United States Patent Application Publication US 2011/0183924 A1 - sequence listing, part 211

SEQ ID NO: 519281 - DNA, 329 bp, Homo sapiens
cttaaatgtattgtggagtgtgatgtgctatgggatgtggacatccctgtaggctcgcagggggattgggggctggcaggacgacggatgctactcagtcctccaggaggatgggcgaacacgatgtgcctcttcttggcccagctggaacagacaccgccttctcagtgatgaagcggtgggcgctcagggggcgccttgtcggtgttgccaggtacatcttgaccacatcatctaagcgggccctttctcaaagtcgtggtaagggcactgaggtgtggctcttttccctgcagtagctgtcgatgaccattcccattagaccagga

SEQ ID NO: 519282 - DNA, 722 bp, Homo sapiens
tggtctaaaaggcaaaaaatcctacaaacagcccaagtcctgagctccccaatgacctggatcctccactgtccccctgaaacccggcggggggagcattggggatgccctacagagcgtgtgggatttgtctaagacacagagtcacaccacgtggatctcggagaagagatacctctatagtgtcgatatcactattctgtacactctcttatgtgtccaccgataaggagaccataccaagggataatatacacgctccggagtaacgcgcgcgagaaatagtatgaaccaaacgagaaggtgccgagctagagtacatgcgaccccaattaggagaagaaaaagtggagaggggaggtccaaaagagtgaactagagtgacacagaacaagcacgagagaggcgagcgatagcggacacaaatctcaaggggcgggatacacctatagaatacaagacaatacctaatacaccctgcagaacgtcgagaaggacaaacacgacaaaaaagagactagacggcgaccttcgacgacgaacgcgcgatacgatgacagccaactgcgcgcaaaatcacacaagagagctcgaggcaggtactaaaacagttagtagatatcatgcgagcaaaaccaccacacacagaaaaacaacacgagttgacgactacaaaaacaaagtggagggaggaagtataacaaggggggagcaaccatgag

SEQ ID NO: 519283 - DNA, 123 bp, Homo sapiens
tgaatgctggcaatgcacgagtcccagcaagactactccaaaggattctggcgggaagtatggtggtgcagaatggatctggatgtgataatgaatgcagtcaacctattgaggattgtcacc

SEQ ID NO: 519284 - DNA, 641 bp, Homo sapiens
  misc_feature (272)..(272): n is a, c, g, or t
agagtaaaaatgtcctgcataacttgttgttccctaagtatggtatactgagtaaagtagggtggagactcgtagtcgtcccccgctggtcttatagtgttgtttacacgaccaactattggtgtgttggtgaaccgcacactctttttctgatatcacgcacacagagcgggatgtaatcctttcagatatgggtcacgtacacacctctcgggtggttaataagggcttgtggttccccttgttgtggtgtaacaacggcgacacgtcgnggggttatatagaaaaggttgtttcgctcatcataagaagaccccctgcggtcacaatgtatcccctcttctggttttgtgctgctttattccatagtaccggtgctctctattaacaagtttttgaggaacatcctgatcaaagggggcatagatgccccacgtgtcctattacccgcgccttctgtactattggatgaacggatgaagagggtatgtttccaaagatttttttcattgaagatctgattttttctcccctttatcctaaatgtgcacacacactttgtgttatttatttccttttcacaggagggcacaaaagagggagacctgatttttaattaatccgggattgaaatttaatta

SEQ ID NO: 519285 - DNA, 1044 bp, Homo sapiens
ggcggtggtgcgctgaggatagccgattcctgcctggattccacagcttcgtgccgtgtactgtcgccccatccctgcgctgccagcctgccaaaacagtgtgcccggttgcaggcgtcatgcagcgggcgcgaccagctctgggccgctggctgactctgatgtttgctgtccgggggccgcgatgggctgggctggtgctgagctcgtggggcgcgttggtgtcccgtggtgctgctgatagcccgtgcggacgtcgcgtgcagtggtccacatgcgcgcctctgacgcgcggcgtggtgcgctgagaattggtacgctgagccggggctgggttgtgtgcctgagtgctgcactggagcgaggtccaccgtggggatctacaccgagccgctgtgggtccggctatggtggcgagcgttgccgaattgagggctcataaccgttggaaggcacttgtttggaaggagtcgcgaggattcatgaggttcaacacgctaattgcaagtaacgctgcctgttgtgcataatcctagctgcacggagacctgacaagactccaagggaaagtgctagttgagtacggaggaagacccgcaagcaggccggcaaagagtggcaaatccccgtcctgttgccagtaccgcaacgggtgtctagattccaagaatccagcccatctagtaacaaagatatcatcattcattaacgtggcaaggttaaagatcacgcaagggatactgacgtttcacaactagttccactatgagagaaataccagagaactttcgcccaggcccagcggggcacagaatattggccctgccctttagaaatgaaaagcctgacatactgaaagtcataagggtagacccagggtgaagctcccgctgggcccacggctctatagaaaacgcggcctccacagacgagaccagacaatccggtagcactctagccataccatataccacagggagaggtcgtacatacaaaccaggttagaagatactccaagcaaaccggcacattcgtgttcacaca

SEQ ID NO: 519286 - DNA, 800 bp, Homo sapiens
  misc_feature (542)..(542): n is a, c, g, or t
ctgtccgctcttcacggatgagctgtgctgttatgtgtctgtgctgcagattggcccatgtggtgcaccgtcgggggggacctgcatttcctgcttggaagacttgggggactgccgagcatatcacacatgtgtttatagtcaccaagtgagactgcagctaacaaacatctcctctcacagcaaaggcccgtgaatgtcatctagatgcctgcgaggtgaaaccaagccagccctgctgttgagaggaggaaaagcggcagatgacagtggagatgtctcctaagtcctgtgccatccacctgccaagggaaaagcacagaggtgctatcttacttttctctctaggcaattcagatccatcattgtatgtgcttgtgtgcgcagtgattaacctcacctgtgtgggcgtgaaagctgattggcatggttttgacttcagcttcttggatggcctaattgttgcactgtgctgtgggaaatgcctctgtatattttcccctctttgaccattcttttttctggaaaaataaacgtgatgnggtcctctatgcttaaaagcccaaacccagaattgccactgaaccttctgggcgcggaggacggcccacctagaggtgatccaacagcgaaccggtggggacgcggggcccgcaaagtggaatggcacctgggaacaggcttgggcccaaggaaaccgtgacccaggtgggggcgagggttccaccgatcaaagacctccgggcggcacggccttcgtacacaaccgcagagctgcggcccacaggccccaagagccg

SEQ ID NO: 519287 - DNA, 273 bp, Homo sapiens
actctgcgacgcccgcgtggtgtaagtataaacttattgaacgtcaatgtaactaacatattcacagcacctttacgtggttgccaagccagaggtgttcaagtctgctgtgtctgactgctacgtcattttcggtgaggtgaagagcgaagacatgagtgcttttgctcaagctcaggctgctcagatgctcaggcccagagcgtctgttagcgatgacgctggaactgcttcttcggctcctagctttaacttgattgaccttacatctag

SEQ ID NO: 519288 - DNA, 128 bp, Homo sapiens
ctatctacagtaaaaaggaaaccacagaatgggagaaaataattgcaaatcatgtatttgataagggattaacacccagaatatatagagaacacctaaaactcaatcgcaaaagaaaaaaaaaacaa

SEQ ID NO: 519289 - DNA, 377 bp, Homo sapiens
  misc_feature (98)..(98): n is a, c, g, or t
  misc_feature (104)..(104): n is a, c, g, or t
gggcccctttacactgacccaggcaatcgcgggtgggccccgaaacccttaagccccttcatttgctctctagactcatcgggctgccccaaggtganttaaanctttgtggtcagtggcccctgggcccaacaaatgtacggaaagggtgagtccctttgggagccccacatgggtccgggtcccctgtttgaaaccctctcccaaaccatgtttaattctgtgggccgggaacaagggtcaggcatgggggtcattgtccccatcatcgaaaagggcaaaatccccccccgggccctaaagggccgaatgggctaaccctggtcccagagcccccttttttttttttttttgaaaaaaaaaagcccgtctttcca

SEQ ID NO: 519290 - DNA, 971 bp, Homo sapiens
tgggcactgggtagaaaacacaagtgaaaaaccctaagatgggccctgccacctgacacagttatacagcaggacctgaaaggatcacactgcttcctaggacaaagctcaaaagtacctctgggacctacaaaaatattcaggtgcccaagaaggtaaaatgtacaagtgtctagcattccagtagagaggcatgaaaagcaggaaaatactttgcaataatacagagaaaaattaatcacaactgaccgtggatctcagagtgctagaaatagtagacaaagagtgttattctcccagtgcaaataaagaaataaagatagcaaaaaaaaaaaaaaaaaaaaaaaaaaaaaaaaaaaaaaaaaaaaaaaaagaaaaaaaaaaaaaaaaaaaaaaaaaaaaaacaaaaagaacaaaaaaataaacacgaaacaaaaacaaaaaaaaaaaaaagaagggggggcgcacacaaaaaaacctacacctggaggagcacacaactaagctaccccgacaccacacttacgattgcgaaccggaggcctaccccacaaagaagggtatacaaaacaacaacgccgacccctcgcggatcataccaaaccagacgtgggaacacaacactacctcgatgcttgcagtctaggatgcagacagccacacacattttgtgggtgcacaaaaaattcaagatccgccaccaccaccgcaagatataggctacagccggcgggattaaaaaccaaccagatgtagtggatgagactaccaaccatcgtatagtcgcggtcagaagaaagagctcgccgacgtgattattaaaaattttaacggcgtcggtcttaaaattctgtcatctagatatagataaccaatcatacataaaagcaacgatgctacacactgctaccacaacattaacgtcgctagctacatgaccgctagacacagtagcgaccacagtagataaa

SEQ ID NO: 519291 - DNA, 275 bp, Homo sapiens
  misc_feature (9)..(9): n is a, c, g, or t
  misc_feature (20)..(20): n is a, c, g, or t
  misc_feature (65)..(65): n is a, c, g, or t
  misc_feature (102)..(102): n is a, c, g, or t
  misc_feature (128)..(128): n is a, c, g, or t
  misc_feature (130)..(130): n is a, c, g, or t
  misc_feature (134)..(134): n is a, c, g, or t
  misc_feature (152)..(152): n is a, c, g, or t
  misc_feature (154)..(154): n is a, c, g, or t
  misc_feature (163)..(163): n is a, c, g, or t
  misc_feature (166)..(166): n is a, c, g, or t
  misc_feature (174)..(174): n is a, c, g, or t
  misc_feature (184)..(184): n is a, c, g, or t
  misc_feature (189)..(190): n is a, c, g, or t
  misc_feature (197)..(197): n is a, c, g, or t
  misc_feature (219)..(219): n is a, c, g, or t
  misc_feature (222)..(222): n is a, c, g, or t
  misc_feature (229)..(229): n is a, c, g, or t
  misc_feature (233)..(233): n is a, c, g, or t
  misc_feature (268)..(268): n is a, c, g, or t
  misc_feature (273)..(273): n is a, c, g, or t
cctcccaanaattttttggnggaaattaaaagaaaaccaaacgaaacctcccctatccaaggggnagaactttatccccatattgattgaatataggattcnagatttaaaatgttgtaggcagttanantttnccccttttttttttttcnantggaaaggnccncaaatgtnctattgacanttttnnctttaanccatttggatttggggtacatnttncgatttntctncgttaatttcccttttaaaaataaaaataattccncaacncc

SEQ ID NO: 519292 - DNA, 145 bp, Homo sapiens
cttttttggcatttatttctctctatatattgtgtttataaattgtataagaaaataaaaaaatagtggccggatgtggtggctcacacctgttaatcccagcactgctggaggccacggagggctgctataagtggcgtgtatt

SEQ ID NO: 519293 - DNA, 1575 bp, Homo sapiens
gggctaaatcatgcttattgccacacaggcatcaacacaggcacagccatttgccaagcagctgacatcaccagggcaaatgctttcattcaacacagcgcacaggcagggcacatgcagcctccaccaagtctcccttctggcacatggccatgcaagtgcacaagcaccaaagctgctggcgcagggccgaggagccatggtgcctgtgccacattcagccagctcattcccaggcaacccataatgatcatcagtgagcagagtacccagcgcatcttacacctcataacaacaggcactaagtggcccccacacggcatcatgcgctctagcgccttacaccaaccacacacttcaggtccaacgtttgcctcctcacacccattatcacatccatgccagcgcttactcgacccaggccccccttactgcccagtggacaccgtggggaattcaatacagggctactttaattaaccccaattcacgtgacgccatgtaatctttgacaaagagagccagagtgtcctctctgagcccgtaacaggatctccttgaactctctccctcttaagacaaccccaatggcctccatgggactgtcgggcatttacccgtgcacagcttggcccaccttgcatatcctccggcacctatgtaacatcctggaaccccaagaccacatttaagaaacaacaattctacaactagttccaaaaagtggcgacacacattctgtggggcccacacttacctggttcacacccgcttacagccacagcctattacgccccgacaccacgaacgatatctctggccttagcctttggcgccctaccttccgctcctcacttaacgcccagttcccaacgaaccgccaacgggcatggttaccccatatgctcacacccacacactggcacgtgacaccaagcacacaccgcaccgcacacttgagaatctccacacttactaaacgcgcacacggccatgcatctaccgcacgcttgggctcctcaaactcagctgtcatcatgtgtgcaccaagttaacgaaacccccggtgtgccccaactcacacactggaaccccaacgactataccataaccatcagacgcaaccccttttgtacacaccttaggcagtacagccaagtagacgatgtccctcttcactacgtgccgcccaccaaccacacggcgttaacattccaagcatcactaacacatatcgtcaccaccacgtctctgcacacctcagcttcatactcaccaccacccacgaccccccaccaccccacctgccgcggctgtcacaccccgacaccagtccgacatgtgctaccacaagcacaccacgaattccatccccgccaccaaccacctacaacacacggcgcaaatcatcacaccacagtctgacacacgctagcatgtgctagacaagacatcccgccagcgacctacgacgccatccgcgactacactgcacaccaccgacgcactccgacaccacgaccacgcagaaccaccagcactgacgccacacgcacacacgcgcgcgcgcacgct

SEQ ID NO: 519294 - DNA, 249 bp, Homo sapiens
aatcgagccggtacccctccactgaagcttaaacccccgagttccatgagggctggaatcaacttcctccaaactcctgttaatgttgataattttacttcctctcatgaatcacaaatttcttaatggcatctacaatggtggatcctttccagaaggttttcaatggactttgcccagactcattggagaaatcactgtctatgtatggcagctatacagctttataaaaacctattttttaaatag

SEQ ID NO: 519295 - DNA, 312 bp, Homo sapiens
ggcacgagatgagaattaccgaaacacctgcctcaaagagattgggagatgacacaaacaaatggaaaaacatccccatgctcctgtgtagaaacagtcaatatcattaaaatgaccatactgcccaaagcagtttacaggttcaatgttattcctatcaaaccaccaatgacattcttcacagaactagataaaactattttaaaattcatacagaaccaaaaaagagcccaaattaccaaggcaatcctaagcaaaaagaacaaagctgaaggcatcacgttaccccacttcaaactatattacagggct

SEQ ID NO: 519296 - DNA, 340 bp, Homo sapiens
atatttagttcatagtgaaatataacacatatgaatcatacatatacaacacacaagaccatgcccggttgggtcacgccttgtaatcccagcactttgggaggcaaaggcgggcagattgcccaatgtcaggagttcgagaccagcctggtcaacatggtgaaccgctgtctctactaaaaatacaaaaattagctgggtgtggtggtgcgcacctgtaatcccagcttctcgggaagctgaggcaggagaatcacttgagcctgggaggcggaggttgcagtaggacaagatcgcgccactgcactccagcttgggtaacagagcgagactctgtctc

SEQ ID NO: 519297 - DNA, 489 bp, Homo sapiens
  misc_feature (94)..(94): n is a, c, g, or t
gctggagtgcagtggtatgatctcagctcactgcaagctccacctccggggttcacgccattctcctgcctcagcctcctgagtagctgggacnacaggcgcccgccaccacacccggctaattttttgtattttttgtagagacggggtttcaccatgttagccaagatggtctcgatctcctgacctcgtgatccacctgcctcggcctcccaaagtgctgggattacgggtgtgagccaccgtgcccagcctttttttttttaatagaaaaaataatccgactcccactacatcaagactaatcttgttttgtgtgtttttcacatgtattatagaatgcttttgcatggactatcctcttgtttttattaaaaacaaatgatttttttaaaagtcactaacaaaaacaattcactaaaaataaatatgtcattgtgctttaaaaaaataacctcttgtagttataaaataaaacgtttgacttct

SEQ ID NO: 519298 - DNA, 339 bp, Homo sapiens
ccggcgctcaacgccgcattgctatcaatcattgcactgcctatatttcccgcctgggccatctacgccaccatccgcggaaagggctgcgcaacgtaccttgactgaatatcacatttctacgactcccaaccttaaagcggacaaggtttgtgcaaggagatcgtatgtcgcaatcattctcgtccgctaacggccgtatcaaccttgagcagcaacgcaagcgcgccaaggagcttttgctgcgcctgaaatgcgccgatgccgctgatacgcccaccttgtccgaggctcaatggctgatcgccaaggaactcgggttccccagctggcccaagc

SEQ ID NO: 519299 - DNA, 157 bp, Homo sapiens
cacatgaagccagtatacggatcgtgggtagctaggctggacttcccgtttaggagaagaaggttttgcggaatctcagactgtggtaaggcagacaaacgaaacgcaatcgacttcgttaatacatggttcgatacgctatcgtaatggatataca

SEQ ID NO: 519300 - DNA, 1231 bp, Homo sapiens
aggctatcttcgtcccgtcatgtacagactagagacgtcagtaacacaataaacgcatatctcagcagggtcctgtgttgtcgtgctcacattgcctctctggagatgatcacgcaggccgctcgcgttcatcaatgtctcgaatccgtctgagcgaacgcgtgataagagagggtgcgcgcgacagtatgcagcagccatagctctgacagtgaagatgaatgctcattattacaatcggattcatgatcatcactacgtgaccattgacgtcgtggagtgatacctaatgaacttgcaagactcacagaaagtgggagcaccttgagtggtgtcatgtcaatgcgcggctgcggcaaacatcggaattgagtacgcattgccgcgaaaaaggcacgacaatattgccagcatggcagtttcattcaggtaacactgggatggctagtcggaatgtcaaagtgaggcccgccatacaagggtcttccgaccaacggtgtagtttcggcggaggcctagtgctatgttctgggcccatatactagaaccacctcgattatctacaatattcgcgaaaccccttgtcttggtgcaccatggattacttagagagaaaaagggcatctcggaagtcatataaccaattcgtctgcgcacgtgcaatgtcgttcatgcaaagaccgccatgtactccattgtggccttttttgggagtggggtcacctccccacgagagtcctagggagaagtacccaagactaaggacagtgggaagaactgaatgtttgcttaaccaacagagactggtgggggtttatttctgaggttaaaacaattaccatattaacatggaaaagttcggaaatataggctattatggaaacagagaaataaaaagagacatattaagaaattattggatgacgagaaactcatcctttgggtgaccacacatacaccggtggccagttcgagtacattggccaattggcaccgggaagtttctgcaatatacacttggaaggacatcctacgtacgtttgagtcggggaaaaaaacgtcgtgcacaacaaagaagtgggcacaacataaaacctctaccatgtattgtggcccctgtttcaccaaacagtagtgtgcgttaacgttcccacaacaagagtaggaataaattagaacaaagacaagcacgcaggaggcagccccacatggcgtagatcagcaacacagt

SEQ ID NO: 519301 - DNA, 111 bp, Homo sapiens
tagaggatcgctcggagtatccaaccgtcactccagctaggagggagcaaaggagagggactctttggcgggcccaatttcaactggtgagacagacgggaagaacagcta

SEQ ID NO: 519302 - DNA, 103 bp, Homo sapiens
aactacaataatacgtcctgctttacttgacgtgcggctgcgactgccagaccaataccacctaaaccaaagaccgcaacactatcaccttcttgtactttag

SEQ ID NO: 519303 - DNA, 792 bp, Homo sapiens
ggcagggcactgcactggccccgtgtgcccaccgcaccctactcttttagagcactgacacgggtcccgggacctcgtgcagtcatggaatggagcgccagctggtgtctgtccctccgcctggggcccagcacagtgcctgggactccagaggtgcctctggctgtgggtccagcgagtagactgagccctgctcccctatattctactacccgcagagaagctgaagaaaaccaagatcatcttagtaggtgggtgggccctggctcacgggaagtggcacccagtgtgagaagatcgtgcacgaagtatgcgctacaccacaacctctccaccgtgggacctccctgcgcgtcccgacgggtcacggctcagggctaccggccaaggggcgccaaacgacaggcctgggcccgcgcaacaactccactagcgaccggcacacggggcgcccagcccacgcggcttaccccaacctcggcccacgaacccacgcctggcacaggcggcacccccttcggcccatcacccagcacgcggcaacatgccccacaacagggccagaagcacgacccccacaaccacgcgacgccagacccagcaaccacactaaccaacgacccaagagcacaccgcagcgggccccgcaacaccccccccatcggaacgagacctgcgaccgatccgacgagccccataacaccgcgcccatgggaccaggcacgaggaaagcgcagcagacttaccgcccccagcggagccgcacaacacaggtgggaaacgacgccacag

SEQ ID NO: 519304 - DNA, 215 bp, Homo sapiens
gtcgacctgtggtttgctggccaagcaggctggctgagtgagagaactccagggtccgtatgagatgctttctcaaaaactgaggagctggggtgacaagatgactcatcagctaaaaaggtatttactgtgcaaacctgacaacctgcaccagaaccactcatctccccatgaccactttgtctgttgagcagtcgacgcggccgggaatttag

SEQ ID NO: 519305 - DNA, 440 bp, Homo sapiens
tgccgtcccgcttctcgcgcctacgagccacgcagtgagtttgaacgatgataccatcctggtatacctctggaactcaggcctggactcgagtgacatgagttacctgcgtgcttacgtatcgaacggctgctgtagaccgacaagcgggtctgaatggctccacgacactcaatgggtccatcacacaattcaccaatctctgtacgaccccaataatgcaagctgcggccccaggatgggtccccgggagacaccagacaggctcagtgcgcagtgatggctaataccctatcagcaagaaggagaagctagtggagtgcccgggtagaaagctgtggtgtcctagaccagctggggtccagcatatgccccttttcaccgtgactccttccattctcctatagtcatcttgaagttttgcccggattttgcattgt

SEQ ID NO: 519306 - DNA, 1516 bp, Homo sapiens
ggagagaactagtctcgaggttttctatttttttttttgaaaaaaacgctgtatttgatttccaatgaacaaaatttacaaaaaggggtgggggtggctcttggaacgtgctctcccagttcccccgcggaacgtgggtgtggggcttcatagggacagccgtgctcgtgacagaaccaggaaccccaggagtgtcgtggcgccccgaacgatagagacttgaccatacgtgtctcactgtgaaccttgtgaagcggtgggggccccagacgagccggtgagagtctccacgcacagaaggtgccggccaccctgtggggaaggccgggagagaggtcaggaaagggcattcgataccgcttatttactctccttccttccacatatcttgcggtggtgtggaaaagaacaagaacatatagagatctctgtggagaaaccatgtgccacgtgtgtggtgccaaaaggggccccctcaaaatatccccacagggggcccacaaacactatagggggacatgtgagaggggcgagcgcgtgtgcgagtgagagcgcgcggatggcgcgagagacgcgcgagagagagggccgacagcgtgtagccccaccacaaagcccgtgtgagcaaaagcagaggagtacaaggggccgacatatccttcccacagaagttacaatcactgcgacaaagagcacactgcgccaagaggagggctggaaacaacacaccgcgccgaaaagttgagcagtggggggtactacagggccggacggacccccgtgacagaggggcacgcacctgagggggcaccgtgcgcagggccacactggggctggacccagggaagatgaccacggagagagaccccacacgaggaacggggacaaacaacgtcggagctccaaagagacgagaacacaagaaagcggacccaaacacagcgagtccaagaaagaacccgacatgcagcgacggagaagtactcaccaggaggaggaaggacaacacgaccacaccaccagacggaggcagcgtatgagagacaggaagcacagggcatcacccaccaagaggaagagaaaaagagagagagtaaccgagcgagaggcagcacgaacaacggacaccacaaacacagacaccaagacagccacaggagagcaccacctcaacccgcccacccgcacagagaagggagagggagaacaacaccccagcagcagggagtagacaccaaccaccaacaaggacaacaagacagagacacatagacacacacacacagaggtgagagaagcagaactaacgtgtaaaagacaagactgacaaacagagaacaaaacaagcagatcagaccgaagcaaacccaacagatacccacacgaccagccagccagaaggggagacaaacaagccacagataagcaccaacagcccggaaccacaacgagcgaagagacgagaagcaacgccaaccgaagcacagcagcgtacaacaagagacacagcacacaa

SEQ ID NO: 519307 - DNA, 417 bp, Homo sapiens
  misc_feature (215)..(215): n is a, c, g, or t
  misc_feature (277)..(277): n is a, c, g, or t
  misc_feature (343)..(343): n is a, c, g, or t
  misc_feature (378)..(378): n is a, c, g, or t
  misc_feature (381)..(381): n is a, c, g, or t
  misc_feature (410)..(410): n is a, c, g, or t
  misc_feature (413)..(413): n is a, c, g, or t
  misc_feature (415)..(415): n is a, c, g, or t
caatcaataagcagggtgtccttattattcttttttaagttctcccaaaatcggagaatccaccttttcccaggtgggaagttggtgatgccggcccttcctactccccaagtcagtgttgctggtctttgccctgctcaggtcctgctggttctgccctccagggtgggcaggggtctgccccctcccaaccgaccttggcccacttccagganttcccaggggattccctgccttgacgctgtgccctcagacaacacccagccgcgcaacacgnacagccctagcatcctacagaaatatggggcaggccaggccactttatggactccaccgtggcccntcagccttgagagtcaaagcagggcccaacacatnctnccagcctccaacctccgtgtacctggacnccntncc

SEQ ID NO: 519308 - DNA, 1758 bp, Homo sapiens
  misc_feature (313)..(313): n is a, c, g, or t
  misc_feature (352)..(352): n is a, c, g, or t
  misc_feature (409)..(409): n is a, c, g, or t
  misc_feature (419)..(420): n is a, c, g, or t
  misc_feature (434)..(434): n is a, c, g, or t
  misc_feature (441)..(441): n is a, c, g, or t
  misc_feature (444)..(444): n is a, c, g, or t
  misc_feature (491)..(491): n is a, c, g, or t
  misc_feature (507)..(507): n is a, c, g, or t
  misc_feature (515)..(515): n is a, c, g, or t
  misc_feature (546)..(546): n is a, c, g, or t
  misc_feature (603)..(603): n is a, c, g, or t
  misc_feature (609)..(609): n is a, c, g, or t
  misc_feature (635)..(635): n is a, c, g, or t
  misc_feature (646)..(646): n is a, c, g, or t
  misc_feature (684)..(684): n is a, c, g, or t
  misc_feature (688)..(689): n is a, c, g, or t
  misc_feature (726)..(726): n is a, c, g, or t
  misc_feature (732)..(732): n is a, c, g, or t
  misc_feature (740)..(740): n is a, c, g, or t
  misc_feature (748)..(748): n is a, c, g, or t
  misc_feature (759)..(759): n is a, c, g, or t
  misc_feature (790)..(790): n is a, c, g, or t
taccaacttaatgtttgcactctgaggtgcaacttaacagggagggcctgagaaaagaatgggagggggctattaattatttttagcaaaatgttgccttgtcttgtgcaaacatgtagaatatgctctttaatttagtaaaatatttttttaaaaggtagagatgcttgttattgtaatcataaacttcctgaaattcttgtaatttttttcccatacttatcagaagtgtgtttacctctcccacattcataccaatatacgtcaggttgcttaaccattgattttttttttttttttaccaagtcttacngggattattttacgtgttccaggtatctcacttggggcngtattaaaaaaacctccatttggaaaatctacgtggtacagaagccatgtctttaangtcttcagannaaaaaagccttacnttaattnaangttggactctgaggtgcaacttaacagggagggcctgagaaaagaangggagggggctattanttattttnagcaaaatgtggccttggtctggtgcaaacntgtagaatatgctcttttaatttagtaaaatatttttttaaaaggtagagatgcttngttatngtaatcataaacttcctgaaattctngtaattttttncccatacttatcagaagtgtgtttaccaacttattttngttnngaaagtgtgattttttttttccttcccaacctctctngcaaanaaagaaangggtttcngctaatgaatngagcagacatctaatattttatatgcctttngagctgtgtaccttaactattgggatacttgcacaattggtttcattatgtaatcgataaaatggtgatgtgtattacctgttagttcaaccatatatttatactgtctggggatgtgtggttactacttctgtggcgagcacaataatttcggtcagtgttcaccagcttgtaaaaacttagtgcgagagctgaaacatctaacataaatacatgacactgcattatatcatcattgagatgggttggcttaaaccttaacttatttggtcgaagacaaacactgaattgcaccttcacttaatgtgtgtcctacatcttttaacaaatcaacatgaaggcttataaactgatgtcagcattcttagctaacctttaagccaaaactggtaaggggtcattccatgaaacactttatactacataggcacttaccattatatacctacacacacaggggtctaagaataagtatgaaaccacaattaactaaatcggcgaccggaagccacaaccataccgcaacacgccacaacagcacaagcattgatgctcggaaacagctcacaccccacacatcacgcgatagagcaaccttgcaagcacaccaaatcacgcctgagaacagcaaaatccacagaccgtaaacacatagcaagcgcactcagcatcctacagcatcgggacaagaaaggaacagaacacgaatccctcaaggagaccaacgaaaaatactagtagaggagacataaaacaaaggctaggtacaagtttagagagacataataatttgagagatgacgtagtataaagtacacccgtggttaagtagagtgtacgctactacagcccagaaatacactaaaccaggcccaacgaactgtcggcataacgctacagtcaacacatacagcggctcaccactgccgacacaatacactacgcacgccagcatattcattcgctgt

SEQ ID NO: 519309 - DNA, 616 bp, Homo sapiens
cacgctacagcggcagctaagtagaactgaaagccccggatgatgacacatcccagcgaagatcctttcttataagcgtgaccaatcgagctgtgcaagtgcttggtaaccatcagaggtgtcaccaccaaacaaccttttgagaacgtctatgatgaacttgcaagctaagattgatgccagagaaggatacagcgtagcagatgcccgggagacgacctgaaaagtgctaaggctgatgccaaggtcatgaaggatgcaaagacgacgaaggtagtagagtcaagagaacgaaaggctgttcagagactggtgtggaacagttgatgaagctggaagttcaatgccacagaccgagaggaacaaataagacagatttgccctgtggaaaccttccaaaactcaagttatctggaccctaggatcacggtggcttggtgcaaggaacgctggggtgtcccaattgagaagatttacaataaaagccagcggggagaagtttgcctgggccattgacagtggctgatgaagactatgagtttaagccagtctcacgaggcagagttctgtgaggaggcacagtgcggttgggaaagattggtaaactgagctcact

SEQ ID NO: 519310 - DNA, 139 bp, Homo sapiens
ggagacagtcctgctagaagaattgacgcctcggccatcgctgacagtgatgatctcgtgccttgtgctcctgctgtagtggcctgcagtagccctgcagtaatagtggcttcatccagccttgtggtcccacctctgt

SEQ ID NO: 519311 - DNA, 124 bp, Homo sapiens
tgtcacaaccctcagaggccagtatttgctgtcccttttttgtgctcatgagtcctcatcattcagctcccacgtataagtgggaacacgtggcattttctgttcctgcattatttttagcaaa

SEQ ID NO: 519312 - DNA, 820 bp, Homo sapiens
tgggaggatcgcttgaggcctgaggtgtgaggctgcagtgaaccatgttcaacaccactgtactctagcttgagcaacagagcaagaccctgtctcaaaagtaaataaataataaagtaaatataaatccatgatgccgttactcaggggtagacagactttctgtaaaaggccagataataaatctgctaggcttgcaaaccatgtagggccttgttgcatacttttgtttttttctccaactcttaaaaaataaaaaactattcttagctcataggccgtataaaagcaggccagatgtgcagtaatttgctgaccccaggatgttacccaatacataagccaacagattgtccttcaaaactgatgagcttctcagtgaagcactgagactatttcagctgccaaagtcccagcccatcgtttcttacgtgtcttgtgtatcgagttcttgtaaagcatttcaccaaggccaggtttttaaatacctataaacctcacacacctgagatgcttagtcttgtggatagaaagagtttcattaatgcaaatcgttattaacttgtaacttcttgtgcataaggctgaatgctttggacatctttcctttgtatggctgagctgccttctgtggctgcttccactttcaatacaattataccttctggcacagagggaggtttccaatgccaagaagccctgggttaggcacctccaattccaaaacgggtttaaattacactatgacacattcccaagtgggactcagcaacgattggttgggcaggggtcaggtgtcggtggcagcccaatggattca

SEQ ID NO: 519313 - DNA, 618 bp, Homo sapiens
ctaccagctggaggcagagctcccagagaaatattcccagaatatctatattcaaaaccggaatatccagactgacaacaacaaaagtattggatgtttgggcagtcgaagcaggaaagtaaaagagcaataccaggacgtgccgatgccggaggaaaagagcaacccaagggcgtggagtggctgtggcattccattgttataaggatgtatctgtccttgatcgccaaaagtgtccgcaactacacacaagaagcatccttaggagctctgcagaacctcacggccggaagtggaccaatgccgacatcagtggctcagacagtggtccagaaggacaagtggcctgcaggaacccgaaagatgctgcatgttggtgacccaagtgtgcacaaagacagccatctcgctgctgaggaatctgtcccggaatctttctctgccagaactgacaattggccacaagaaactctccctggattccggtttcccattcattccctgacagagtcccgagtactgaccttctcattgaaactacagcctctgcctgtcacaccattgcacaacataatccacaacagttaccagaatgcacgcgacttctaaacacggggc

SEQ ID NO: 519314 - DNA, 126 bp, Homo sapiens
gctctaattcgtttgacttgcgggggacgagtatgcaagcacagagcaactgtgagtagccctcagtcccaggacactaggattggcaggacaacgcactgagcagcgctcccagcagggtgtctt

SEQ ID NO: 519315 - DNA, 519 bp, Homo sapiens
gcccctcctcccccccctcgtcgggcgcgcgcccgcgcgcggggggagtctcccccctctctctctccccagcagcacaagaggaggacacagagggaaaggagggccccccgcggccgggttgcgcccccccccctcccttcggggggtgcttgcctccgcccacccccgccccgcgcgataattcttccaccaccctctgtgggagggctttaggggcgcgggagagaggtttatcctctcgcggggtgcccgcggagtgttgagggcgcccgccctctgcccccacctcggtgggaaacccgcgtgttcttctcctttgtatgacccccgccagttattgccccgcgcgccctcgtgtggggcatgctcagctgcaccgctgtgagacgagtcgcgcgcgcgctctgtctctctcgcgagagggccgaggagtcgagtgggcgcctctcctcccctcgggcgggccacgcgcgcccaccgagatttcttgctcgccacacacacaatagatacaca

SEQ ID NO: 519316 - DNA, 686 bp, Homo sapiens
gattctcattcgtagaccactaatataatggaaatctttgagcaggcgattgttgtcctgcagaccaataaccgtgataatacctacaagcgagtgtccagaggatctgagaagcagaattgcagagtcactgaagcgcaacagtcgatagaaaaagctacagctatatccagcttctgcagagaaaatgttagagcatcagttggttgagtatgaaacgcactgggaggctggacgattgagtattgaagcatctcgactcattgctcagaggagtcactgcgagtgtgcttgtagcgtcgtgaaagtagagtactgaacggacgtagtgtaagatcgaagcaagaagacagaggcttgtaactaggtctattgtccaaatgagcttgacttacccatctaggagatagtgcaactacgttaccactgtataaacaatgtaaaccaagttccaggactatgagttcctcggaccagttttaatcgagccagcattcagaccggtaccccacaggagtggaacggcattaactaggacagtgccgcatgatgacgaatggagtttagagagtgccgagcaccgagatagaactgtgtcacttgctaaaggcagataaagagctcaggactggtatagagaaggtcacctctggtagacagaatcaccgacgcgtcgttcatgctct

SEQ ID NO: 519317 - DNA, 498 bp, Homo sapiens
aacgacagtgagatagacttacaaggtagcccaaatacctaaataacagcattacattaggataaaaaagtgcaggaaaacaatgacatcccaaagcaaatctccaagtacgcacaaacggaatgatccagacattaccatagagtcctatataatcacattcagcttataaaaataatgccaagatgcagtgaaaagttaccggatgttccatccactgggtgatgtaggatgggagagtttcttccagtaccggtcatgtgacaattgtggcacttatcctactgactggagtccagtagggcttattccagaaaaaaggtcaaaccaggaaaggtctcacttcctgaagagaatcacacttaggacatggcaagagtctgcattaccttctagatacatgaactttccagagctcaacaagtggtcctcactcttctgcttggcaagtctctctcccagcgtctccaaggcatccagcagggtgtggacagaggc

SEQ ID NO: 519318 - DNA, 137 bp, Homo sapiens
  misc_feature (95)..(95): n is a, c, g, or t
tgtcaatcgcacactagtctcagtgtgacacacggttggtagcttctcggcatcgtcctaaggtcatgactcagaagtggggagatcgcactcgncagctcaccatctccatacgagctcgcatgtacccggcgctg

SEQ ID NO: 519319 - DNA, 178 bp, Homo sapiens
tgggttcgacagtgagggtatactgccttgtggggggcttgtcgatcttgggctgttccttgtccgttcagtgttttcatctgccgcaggcttatgcggcggcgactgttttcatgttacttatactaacattagttcttctatagggtgatagattggtccaattgggtgtgaggag

SEQ ID NO: 519320 - DNA, 411 bp, Homo sapiens
  misc_feature (390)..(390): n is a, c, g, or t
  misc_feature (393)..(393): n is a, c, g, or t
  misc_feature (395)..(395): n is a, c, g, or t
tactagtgatctggacaatcataactttaaaaataacactttctttatccctcttctcagttttttccctattgagaccatatttgacagtccctaaatgcccctaatataaatgacccatatttttttccccacccaaaatgtcctagtcttagttaagaactgctcagagtaaaatccctggggaagcccaggtgaagtaactcacgcctgtaatcccagcactgtgggaggctgagacaggcagatcgcttgaggccaagagctcgagaccagcctggccaacacagcaaaaccctgtctctactaaaaaatacaaggattagccaggtgtggtgcacatgcctgtaatcgcttgaacccgggaggcagaggttgtggtgaaccgangancnccatggcactccagcc

SEQ ID NO: 519321 - DNA, 456 bp, Homo sapiens
  misc_feature (2)..(2): n is a, c, g, or t
  misc_feature (22)..(22): n is a, c, g, or t
  misc_feature (36)..(36): n is a, c, g, or t
  misc_feature (53)..(53): n is a, c, g, or t
  misc_feature (183)..(183): n is a, c, g, or t
  misc_feature (288)..(288): n is a, c, g, or t
  misc_feature (298)..(298): n is a, c, g, or t
  misc_feature (311)..(311): n is a, c, g, or t
  misc_feature (340)..(340): n is a, c, g, or t
  misc_feature (357)..(357): n is a, c, g, or t
  misc_feature (399)..(399): n is a, c, g, or t
  misc_feature (427)..(427): n is a, c, g, or t
  misc_feature (434)..(434): n is a, c, g, or t
  misc_feature (450)..(450): n is a, c, g, or t
gncctgaaaccacagctcccanagggcaagagaacntaaccccttccccgagntgaaatcattcccagaaagaggggcaaaaccccatgaaagctgtgggaactgccctgggccatcggcttcccttgtggtatcctcctcttcatcctcaccaagcgggaagtggacaaggaccgtgtgaancagatgaaggctcggcagaacatgcggttgtccaacacgggcgagtatgagagcccagaggttcagggcttcctcccagagtgccccgtcccctgatgttgggtnctggggtgtnctggggtgcagancctgaggagcgtctgcgaccctcctaggnctattgactgttaagtncctcaggtttggtcccgaattccgattcgtgcctctgaggtnccaccagagggcgcatgaagacccaggnctgttgnccaaaccctaccctgnccccac

SEQ ID NO: 519322 - DNA, 161 bp, Homo sapiens
caacgtacacatcatgagacatagtatgatcttacctgatagttatctcacggtgacgctagtcatctttattatgccttaaaaaatactgtactggctggatattttgtatctgtttctcctcctttacgcccattttcctgctgtcgctaggaaaatgg

SEQ ID NO: 519323 - DNA, 300 bp, Homo sapiens
  misc_feature (44)..(44): n is a, c, g, or t
  misc_feature (51)..(51): n is a, c, g, or t
  misc_feature (136)..(136): n is a, c, g, or t
  misc_feature (141)..(141): n is a, c, g, or t
  misc_feature (231)..(231): n is a, c, g, or t
  misc_feature (274)..(274): n is a, c, g, or t
  misc_feature (292)..(292): n is a, c, g, or t
ccaactgatctgacagctttcccatcagtagaagtgggaacatnccttctnaggtatttactattaactacatgtaggcagtgtatagcttctgatcagcgtagtagacattacaaacactggttgtaatggggtnttctntagactttacttgagaggtgagtataaagcatttgttagtcatcatcatgacgatgctgctcaagtgcagatccagaacagtacagcgtngggttcctagagcatttgggtaaactgttgtgggtttcttctntcttgttgccaaaactgnttttccac

SEQ ID NO: 519324 - DNA, 410 bp, Homo sapiens
gacctcaaggtcaaccagaagagagagagcagagccctctcaggtcttttctgggcatggatatggcactgtgcatggtcccggccttctagattgccaggaataattcagagctttacaagacctgttttggacacctcattccccacttttcttttgaagatttttgattagcccattgtttgttcagtttttcttcactacctcaggcagcagaaatgtcaaacaattgcctttaagtattttcttcagataccctgaggaaaaaggcattttgcaaggggtgaagtctgagtcaggtcaaatgaagacagttctctaggaatggcgttttgtcagaactccagccttattctgccccctccagcagcatccagactcctggtgattgtggctgttggtttcaaggt

SEQ ID NO: 519325 - DNA, 209 bp, Homo sapiens
tgttttcccttttttaattccggccggggatttgtgttttttaaaaagcaaaattttgcttttttttgttgtataattttaaaggatatttttgtgtgcccaattccaagtgccttaaaacattgtttagctttcctaagtatatttaaatgcatttttgtttaaaattgggaaaagttccctcaataaaatctttgggaattccccca

SEQ ID NO: 519326 - DNA, 618 bp, Homo sapiens
ggccgggcgcggtggctcacgcctgtaatcccagctctcagggaggctaagaggcgggaggatagcttgagcccaggagttcgagacctgcctgggcaatatagcgagaccccgcttctccagaaaaaggaaaaaaaaaacaacaaaagacaaaaaaaaaattaggggtaatttcccttcaaagaaattacccaacccccaatttttaaaaaaaaaaaaaaaaaacaaaaacaaaaacactttgtgttgggggcctcgtggccctggaaaagggttttcaaacaagacccattcgtgtgttggagcgcggccgggggcgccccattgataggggtaaagcgatcaaccaccttggtgcgccaaaaagcggtggtgtcccaaaagaggagaagaccctcggggccactgacacacacagtgggtcggggcgatttccccctccccatatataaaaaagaaacgcgccgcggggggacaaccagacagccgcgcttctgggaaacaaacttccccaagatgaggcagttcccgagaggacgaaccgacgggggaatcaataacaccggggggtgtccaaagagacgctccgcgataccaaaatttaccccgggcgggtgt

SEQ ID NO: 519327 - DNA, 622 bp, Homo sapiens
  misc_feature (1)..(1): n is a, c, g, or t
  misc_feature (67)..(67): n is a, c, g, or t
  misc_feature (70)..(70): n is a, c, g, or t
  misc_feature (72)..(72): n is a, c, g, or t
  misc_feature (79)..(79): n is a, c, g, or t
  misc_feature (108)..(109): n is a, c, g, or t
  misc_feature (113)..(113): n is a, c, g, or t
nttttctttttttctagcgaagcgccgcctttgtgtttggtacccgggatatcggccattatgggcnggngngcgttcnttcctttttcgatgcggcttgtgcgggtnnagcncgcccacaaaatgcagattttcgtggagacaacccttaccggggaagaaaccattacccctttggggggttgaacacccttggggatcccaataaaaaaaatgataaggcgcacaaccccccgtttaagggggggggtttttttttttttttaaaaaaaaatttttatttttttgtgaaaaaaacttaaaaaaaaagggcccttttttttgggccccaaacattaaaaagggggggttttctttttttttttgggaaaaaaaacggggggggggggcaaaaaaaaagaagaaattttttccctcccccccccaaaaaaaagacccccccaaaaaaaaaagaggggcccgcccccccccccccacaaaaaatataggggggggggaaaaaaaaaaaaaaaattttttcccccttaagagggcccctcctataaaagaaagtgggggggtgttttttttaaaaactctttctaaaaaaaaaatttttggggggagattgtttttttttttt

SEQ ID NO: 519328 - DNA, 309 bp, Homo sapiens
ggttcatgaggaaaacaaatttttttggaatttggaatggggtaaatgaaattcaaaatgaagtggcatcaagaattcagtgggggccgggcgtagtagctcacgccggtcatcctagcactttggagaggccaaggcgggtggatcacctgaggtcaggagttccagaccagcctggccaacgtggtgaaaccccgtctctcctagaaatacaaaaattagccaggcgtggtgacgtgcgcctgtaatcccagctactcaggtggctgaggcaggagaatcgcttgaacctgggaggcggaggtttca

SEQ ID NO: 519329 - DNA, 1112 bp, Homo sapiens
  misc_feature (234)..(234): n is a, c, g, or t
  misc_feature (537)..(537): n is a, c, g, or t
  misc_feature (542)..(542): n is a, c, g, or t
gccgggtctgagaggagcagtggctgtctcctctctccgtcgctatggcgtagtgctcgacccactgactatcggtgttactccgagagaagggggagtacatctggcaaaaatgtctactttgcctgcatgttattcaaggccatccctattcgagccagatattgtgaaactttgcttcgactacgcaacttgcgcgaagaaaaccaacagacgagcccgtattgctggtcnaggtggacatttagcgaggctccatcgagtactagatgactgatgctcttgggtggttactggtcagacgtctgctgtgtctcgagacttgcccgaagcatggttctgatgggctgcgtgtgtgcacctcatccagctgctggtccatgcgcgtgcttattggagataccactgtgttcgtggtacgcgaccgatattgctttgcgatcgcaaaacacataatactctgggcagcccgtttcggcaattcagataaagcaagtggagatctagcatatggctctacaagataactgattaacnggccnactactggttgcattggcaccttgggcttgcctcttcaagggcgcacttatccgcaagactacgtaggctcagttgtctaacaatggctcactccggttattggacggcaaagttacccttcgaaaactttcgctttttgcgatacgttggcaatgcatacacaggcttcgacagcggtactagagtaaatgatcctagatgcgtacatggctagtcttgtggctcctcttttacaggacaagcgtttagacacggcccttggcacaattgcattaatcacgactataacgggttcttattgacccttccatcgagcccgaatagtgaaggaagtccttaggggccataaaaggggcaccacctcatcgaaggataaaccggttctggcccaggttaattccgcaggctggccaaggggagcccccagttggcatttccatccttatacaattgacgggaatacactcgggtaaattcactccaaaaaggccctttccaggaaaaccattcccccttgggaaaatttacctccctggcttttaacttgttaaaggcaagggctagaaaca

SEQ ID NO: 519330 - DNA, 309 bp, Homo sapiens
atctataggtgtagtttgtgcaagtatctatgcaggcttagatcatggacacttggtcagtggttggtactgtggacgcacctgggaagggggtatcacagttaatttctcaaatggcagaatttctgggttactgccatctgtttcaaagtacagatagagactaaactgtcacagccaatttcaatccatgacagaacataaattcctagtgcttaaaacagaattttctcatatttttgagcaggacttctgtttaaccagtggggtttatggctcattcttaatatgtagaaatagtttatgctg

SEQ ID NO: 519331 - DNA, 1250 bp, Homo sapiens
gatttgtgccctggttcgccgagatgtcgttccctaaagtataagccgtcgagccttgcgcactctgcctgtagaccactcgaagctcagccgaatacgatatatctcgcggataacccaggtgggcgcaagtccgagcggttggaccataagagcccagggtgaaacgatgagtagctgtcttcaggtacaaacgaattcccaagccgaccgaagggactcagtcgaatcagtccatggccgtggcgtgtcgctctggggcctattgcacaggatacaaattaccatgtcgtatccgtcacatttctcagtacccacttccttaaataaactgcactcatgggggatgcatcatggtcgtgagaaattgtgtgggccccatcgattctttacaatgtatatgtagtagtgtactccataaacattaatgcaggaggatacgtgacctaggcaaaaaagcatttagttcccagggcaaggcaaaaatttggaatcctgaacaaattattcaatctgctcagtaattaggggatcgtggggcagaataggcattggaaccttaggttattggttagtatcaccgtggcgcccaagactggtcagaggagtgcgactcgtaaatgtaagaggcgaatgagagaaacagacaaagatggaccaagatcgaaaagaaaagataaaaaatgcacatgtggtgtcgtggggcgacgcaacaggggtagatccacatgggcgagaggaacaatgatatattggaagagactaaataagtagcaaaggaagggtgggccgccaaatagggaccaacacacgtcaaagaggtgcgacacgaagcagtgacaaacactggtcaacgaaaataatcggggggaaagatgacacacaaagaagaaataccagcaggggagaaatcagagcaaacaagtaacaagcaggtgtgagaaaatcagcaacgaaccacaaaaataaaaaagaaaaccagacaaagagaagggaaaacaagacggacgagaaacctatttggaagaagaacaaaaacatcacagagagaagggaagacaaacgggaaagaactaacaaagaaagcggacggaccacgtcacatcagagagggaaggggagacccacaagaggaggagacgccagaacaaacaaagaaaagtaaaagaccagcagaggcgagcggtggtacagacagccgggcgcccagcgagagcgacaggagatgacaagcacaacaccagaaacac

SEQ ID NO: 519332 - DNA, 1364 bp, Homo sapiens
tcgtcgttgggtgcatgagcgtgtctgctgcgtgttgtcattgcgcgcggtgtcgcgctggtgttggtcgtctgtgtagtgctggtgtgctgacggtacgtatgcggacggtgtcgctgcggcgtgacggtgctatgcggacgcggtcggagtcggtgtcggctggaggtgaggctgactcggcctgctgcgctgcttggggtgtggtctggcgggcgtttataatttaaacacccagggagggccttttcgcgttttgttatgaagtggtgtagccgcgccgttcctagaggaatttgctgtcggccccctcggggtgatggtaaagcgcgctgccaacttgtcgccgcacaccggtccgtcgtgtgttttggtggaagaccccctctcccccgcgttatgtgtagggagcgcatctccccgggggggggtcccccgcgagtttgcccacggaccgctttcccggcggaggacttctcttatggggctctttggggggctccgcccggggtgtttcccgctgagttttgatccgactggttttgcacacacacacgggtaacacaccgccttatatgaggcccacctttatgggccctcaaatgtttatagcggtgacacaccgtatttatgggacccacactgtgtttggtgaccacacaagagaggcacacgcgtctcgggtaaacccgcgtttctcgcgaaatttttcccccgcgggagtatatagtcggtgtcgaagactcccacacgccctgttgtccgcggtgtcgcgctgtctgtgtcgccccacaaaacacattctcgtgtgtctctcggctctcacagagacacactgcttggggccacgagaatatgtgtctttggggggaggcctctcacaccaacgtcacaggagagcgcccgttggcaaaagcccgggacacaggcgcggtgcgcacacctcaagagccctaccacagccccctctctgggagagcacaccgccacacctctctctgtgtgtgtgtgagaatgtgaagcgtctttctgtcttccctctcacagccctcgcacaagggtccgcacattttgtccacttcgcagaaaaagagcacacccttctaacttttttttctttgttatattttgagatataaacacactcgaaagcctcggagagctgtttataaatttatacttggggaaaccctccagaacatggtcttatattggtgtcgtggaacctcttacatgctttccaataaccaccgatttagtgaataccaactgttttgtataacattgttttccagattttccatttccgaccaaaccagccctgtaattatagctattagactccaattttttaactatttcca

SEQ ID NO: 519333 - DNA, 889 bp, Homo sapiens
  misc_feature (889)..(889): n is a, c, g, or t
tgatggctagttgtctttttattagctatcacgttcatttaacatgacgaaaatattccagctccaatcgtcacttcactctaaaatcagtgaagtagatcaaccaactagcgtcatgctaatgcattgcttgtcacgctgtatgcctgattttatacacaatgaacttgttcctattagttgcgcacgattcatggacggatgttcttcgacacagaaccgtattgattctgtgtcaatcccatacaagcattgcgcgccaacatattaaaaagagagccccccttacactttggttccggggtaaatgtcatcgccacgctcaagcctttgctggatagcactgtcgagctccttagcctggtttttataacatacaagacattagcgccgtggggtaaagcaacctcagcgcaactgtgtgtgcaaaagttaccttatcattgctacagggcgactttattttacttgtctgttgctgatgttcgcaccgacacactcagtggagtgaagactgtaggatgtgtgtgtgaagaccgcttcagtcctaaatcgctcttcggacgacgcgagaaaagacatgctaacgtgactctccagtcagtccgaacaaacccatgaaacttgggttctttgcaccgctttccaccacaagttctagtactccaactttaaactacagggtgaggagagtccccccgtctcttcttgtagagtacactcatatccttatacttcacatttaagttaggacctctccttcaggatgtcgcccaggtcgtctctgggtttttcttctttattttattgtcaattacatgggataccccggcgcagcaccctgaccaacacctcactccccactctacgcctgaccccggtctcaagn

SEQ ID NO: 519334 - DNA, 740 bp, Homo sapiens
aaccttatagattatgtgtgtccgatgtttcaaagatcacggatctggatttgcataactgggtacaatagaagctggtgatatccaaactggggaccgagtactggaaggcctcctaatgaaatttgtaccgtgaaaggaatcactctgcatgatgaacctgtcgactggccggcgttagtacaatcatgttagtcttacttggttgggatggatatcatcaaaatcaatgttggctgcatatttggtggccccaaagtacccattaaagcttgcactcgttttcagagcccgaatcctcatctttaatattgaaattcctatcactaacaggatttcctgtgctgttacactaccaaactgtcagtgaacccgccgttattaaacgattgattagtgtcttaaacaaaagcacgggtgaagtcacaaagaaaaagcctaagttttgactaaaggccagaaatgcatgtggtagagctacagacacaaagaccaatagcctctttgagctaatataaaagacttcaaaagaagctggggagggtccatgctacgttacgggtggttctacaaatagctgctggtgttgtcactggagataaacagaatgatggggtcagaatttctaccaggtttcttggatacagtggaatagcttaactttgttccaagaatgccgttttacgctcacaggaccacgtgccactgcacaggttctcagcatcagggagaacacttag

SEQ ID NO: 519335 - DNA, 387 bp, Homo sapiens
ccttatatgacctcaaactgaccatactaaacagtgtagaaggtttttttaaggctttaaatgtcagggtttcccatcccctgatgcctgacttgtacagtcagtgtggagtaaacggtttcctccacccagggttgactcagggggatgatttgggtcccattttggttttaaaaccccaaacaagggttttttcagctccaggatttggagcctctatttggttagggttgtaacctttgtgggcctcccgttaccccatttgtccagtgaggtcagcccccatccccctaacagggtggccacagggattattgagggttaagaccttaaaactgggtttagcccccgataaaagctcaaaaaatgttgttcctttccccatca

SEQ ID NO: 519336 - DNA, 1729 bp, Homo sapiens
tgacgatagagagaccgcgcacggcggacgacgctgagggtcagaacaatgatggcagcgagagggaagaagctaggtggagaccgcagtatgtgcgagcgggggcaccctggtggagtgctcgacgtagactggatcgtatgtgcgtcggaagccgcagcaagtccgagcgccgatcggtgagggacgatctcacgagagaaacgtcgaggtgtagataagaagagagactggcaagcgaagctgacacgacggcgagcgtcgtgccgagaggaggcagccgaacgaggaggggagttggcgcacctgaattggtgcatcgatagacgtagaggcggaggagcttaaatcacaatacatagagcgtatgtttctctgtagtgctaccagacgtaaatggtatgagatatgccatcgccatgactctcgatgtcccagagtgaatgagatcctcaatagatctaaaatgttcgatgctatcgctcccatgaatacgtgtgtccgtcgctcgctgagtgatgcccgactattctaacaggcttttgcgtgtactcatgatctgatggtgcgggtttgagcggagaagcacttactgcctgacagaagtttggcgtacatctatatgtgagcactctccattatgcagcgccgttgttagaagcctattggacgaactatatatacggcctgatagcggtgccactaggtcgagacgcctggacgctgatgaggaagaccaacattgggcgcgcccacatagaaccgcgggggagccgtcggttgtggatcgccccgagaggggcgccgcgttaaggagaagggtgccacgtgtaacacgttgacgagggaaacacccccctggagagtgcccaacgggaagacctcggcgatggggggggggcaccacggtctagccgcgacgtagcacaggtgtcctgagacgatgtaggccctgtcgcttctattttcaggggggactcacaagaggcacccacggcgcccacgtggaaagagacacctcggctgagaaggaccacaactcgtaggagcgctagcttaatacaagtcggcgtatcgagagaacacggggagttaacgccatgtttcggcgttcgtgaccccagcctggagaaggggtagactacgcgggcgtccacatatatgagggaaggtacccgcttgtggggcttggtggaagaaggcgtggtccacggagacgtttatatagaggaaacacgcacactgatgggagcgacctgcgcacacgctgtttctcggctatgactctgtcgcagaaattgacatggacacactgcgctgagtgcacggcctcacctcacatatacgacaacaggcgagatgagaccacgagccgcgcacactggcgcgggcctccgtgatttgctcggaccacaggaggatgaggttgcctatggccacacggcgtaactctcacacatgcaccagagactcacccacgaggtcttctccctcttgtccgtgatagccacgaggtcgccacggaacacctgtggagcgtctttgttcacgaaagggatacacggttggggcggcacgccgcccacgtgccctcttctgttcccacgctcacgttttgcccaaagagcacctgaccactgtaattcttgcttctagttgtaaaggtttccctattagtttgcttccgatgattaaatctaagtccatttgtgaaagaaaaaaaagaaaa

SEQ ID NO: 519337 - DNA, 129 bp, Homo sapiens
gcggccgcctactactactactactgctcgaattcaagcttctaacgatgtacggggacatggttgtggttaatctggtttatttttgttccacaagttaaataaatcataaaacttgaaaaaaaaaaa

SEQ ID NO: 519338 - DNA, 129 bp, Homo sapiens
cttgcaaaccacatcgccgtcttgccaaccatccgttgccaaccacatcccgacttgccaaccactcacctcttgccaacaaatcaccgtcttgcaaaccacatcaccgtcttgaccaccacatcaccg

SEQ ID NO: 519339 - DNA, 260 bp, Homo sapiens
  misc_feature (133)..(133): n is a, c, g, or t
  misc_feature (211)..(211): n is a, c, g, or t
tatccctaataggaggtaagcccttaggctacatcatgggggagagaaaatttcccaagaggaaactgaggtgccattatgaaggaggagtggatactagctagctttactctgccctcaaatgtctccctanccaagtatcacatggctgaaattttaccattaggtattcattcctttggttgagatgattcctatttgtgattctctnaaaatatgcaaatcgaactagaagaataaattgttgctatcttaatgtt

SEQ ID NO: 519340 - DNA, 88 bp, Homo sapiens
ccgcctactactactactgctcgaattcaagcttctaacgatgtacggggacatgtaggttgtctaatcatcaaatgcatttaaaccc

SEQ ID NO: 519341 - DNA, 103 bp, Homo sapiens
gcaaacttatgggagacttccagtctgggggtactgggaccccgaatcccagagctggaaacatcttatcactgtcgtagtcctgaatgatctgcacaacgag

SEQ ID NO: 519342 - DNA, 441 bp, Homo sapiens
tttttttagttctttaatgtaataaaaaaaagtatatatgagtcaggggtagggagtgggggtgacaggaaaagagggcaagcaaccaagcctctgtctctcagtttcattaaatgttcagatggagtggcataagccatggtgaattggtaagccttgtagggaggacctgagccgtaggaacatggccaggcactgacagcatcactcgtcggcctgttgaaggagcagaaggtggatttcttggaatgagggacggttcttcgaatctcttctccagcagttgagcatcagcttatacacggattcaggacaaatggctggttgagggaagtaagtctgcctcccttggtctcggaagaactctccagtattctcaataacctgttcatctagcagctggggaaaagggctgttctggacaaaggtgaaagtctccca

SEQ ID NO: 519343 - DNA, 498 bp, Homo sapiens
gggcgtggtggtgcatgcctgtaatcccagccactcgggaggctgaggcaggagaatcgcttgaaactgggaggcggaggttgcagtgagctgagatggcgccactgcaacaagagtgaaactccatctcaaaaaaaaaaaaaaaaaaaaaaaaaaaaattttttggggggttgggcttgaaaaatttttaaaaccaattcctgttgggggcggcgggggcgccccatatgggtgaaagtgtgaacaatggggcacaaagcgtgggtcccccaaaggggaaacaccccggggccaaaggactataggtgggtgggagttctcttcacccaatatttagaaaagacaccgccggggggagacacaccgagggcgttctcttagcaacaaatctcctagaagtgggagtcttcgagaggggcgtcaatctacaggggagtctttcttcacaaggggagagtcccaaaggggagaggcttcagattttaaatttaagcgcg

SEQ ID NO: 519344 - DNA, 807 bp, Homo sapiens
  misc_feature (807)..(807): n is a, c, g, or t
tccggcactaactcaagttctttacttcccagaagtgatggctaaggggagggaggagggtgagaagaggaagactgaaagagccatatagaatgaggaggtgagaagggggggacagtaaaccactgttctatgaagtctcacgaggcaagtgctcaaggtaaaaaaatagtcctggatattcgtccacggctgccggaagcatctcggtttccttatgcttttaagtccttttaaggaatgtctgcgccgtttcccttgtatttaatatttatgtacattccacagattcctatgccctggtctggttggggatgggccccatttttttcatgttccatatttatcatcgcaccttacttgttatcatttccttttatgattttagccctgttcttcgtccttctgcatctttacatttttatacctatttttccttttcctccaatttcatacttttccctcgttacgtctttgctttcgccccctatttcttatacactaatcttatcctgtttctctttcgttctcttttacccccgccttacgatataatgtttgtttttctacacggcggtcgtgccctcgcttgtatgaatgtttgtattaatgttgttaatgatatattttcttatttttctgttttttgtccttctgttgattagttttgcttatgttttcttttttatgattttcttagactatcctgcccggtattatatacatatggctgagggggttttcttctttttatctctctattgcatccgttgctcttaatttactctattttcttatatgcttctn

SEQ ID NO: 519345 - DNA, 163 bp, Homo sapiens
cgcgcggacaggtaatggcgatgcagcaggagaatcgtgccctgcgcggcatcgtgacgcttggcagcccgcattgcggctgccgctggcaccttcggcgctggaacgaacgcccgtcagatgcgttgggccagcccatggctgacgtaacctgtgccgaggt

SEQ ID NO: 519346 - DNA, 146 bp, Homo sapiens
gtaccctcattagctgtgacccgagatattcttgtgacctgcatccaccctcatgatgcgacaatgggcatctggctgccgaacgcgaatacatctgaggcctgaactggctgcctgacgaggccaacaaacccatcatcgatgtg

SEQ ID NO: 519347 - DNA, 827 bp, Homo sapiens
ggcttgaggcagtaccggaggagaaagatggggctaccttactagctgctcggggagccgggcagcaccggctgggggccggaggattcatccagatggaaagccgagaagtttccactggaccactatcatggccgtgcagttggacgggggcgtgtcctgggggcggactcagaacaaaccactggtcctacatcgccaatcgagtgatgacagctgacacctattcaggaccgcatttctgctgtcgctcaggctcagtgctgatacccaggcagtagctgatgctgtcacctaccagctgcggttcccacagcatttgaactgaatgagcctcaatgttccaacacagcagccagcctcttaaaggagatgtgtaccgataccggaagacctgatgggggaatcatcatcgcaggtggaccctcaagaaggagggcaggtgtacctcagtgcctatggggggtatgatgaaaggcagtcctttgccatgtgaggctcggggagctctacatctatgggctatgtgggatgctaccttaacggaagggcatgcccacggaagagtgtctgcaattcatgccaatgctctcgctgtggccatggagcgggatggcccaggcgaggaggagatcggcttggcagccattggagagcagggtaaaccggcaggaattgtggagacagatcccaattcgcgtgcattacaccgctgatctgggatcagttgaaaagaatgccgtcgtgacattaacacgtcccgggacaaacaacaaagcccaacccgtcagcacaacaaactggggcggcccagaaaacaggggcaa

SEQ ID NO: 519348 - DNA, 481 bp, Homo sapiens
tgagtgtgtgtaaaacgtgtagcaaatattagtcaatttaccaactttgtattgttacttgatttctaattttattctccttgtggttggagaacatacttagtatgtcacaatccgtttaaatttattggagacttgtgttactggcttaacatatggtctagccatcgaagaatgttctaaataaaagaatattgtatatgcactcttagaaaaatgtgtattctgttgttaatgggtggaatattctacaaatatctgttatgtctagttggttaatactgttgtttaattttcttgttgctctcctgtctagttgtctattcatcattgaaagtgggtattgaagactccaactattgtttctaaattctctattattttcttcaattctgcccgctgttacttcatatattttgggggctctcctgttagctgtatacctgttcattattgttatgtctggtctatcttttttggc

SEQ ID NO: 519349 - DNA, 204 bp, Homo sapiens
tcacctgaacagttagccactcgggagatactcccaccccggagaggcgactacagattcggatttaaggcccggtcgaccacatcgacgattgaaacaggaaaaatccttgggacatagcagtgagtgggctgaggcatattagagcctgaatgaagatcgcacatgtgggaatatagaacagcagatacgtcagggagatat

SEQ ID NO: 519350 - DNA, 375 bp, Homo sapiens
cttttggggtctttgctcaagatgaagctgaacgtctccttcccagcgagtggctggcagaaactcattgaagagcacgatgaacgcaaacttcgcactttctatgagaagcggatggacacagaagtcgctgctgacgctctgggtgaagaatggtgggcgatgtgatccgaatcagcgatgggtacgactaacaaggtttcctcatgaagcagggtgactgcgacctatgtacgcgaccgcctgctagtgagtaaggcgcattcctgttacagaccaaggagacctgcagaacgaaagagaagatcagttcgtgcttgcattgagctacaaatctgagcgttctcaactcggatattgtaaaaaaggagagaa

SEQ ID NO: 519351 - DNA, 176 bp, Homo sapiens
cttcggtggagcgtcagttgcttttgctccaccggacgtgcctgctcactttcaacaccaggagccatatggtgcatccagtctctcaacagagcttccagtcgtatggtctccatggctgttcttcacggtgtctctaggttctccgtggaagctcccccacttgagaggagcgt

SEQ ID NO: 519352 - DNA, 858 bp, Homo sapiens
ggccgtcgcttgtgctgcatgcatgtgtctagtgattcctgcaaaagtcccagcatatattgcgagtactcaacaccaacatcgatcgcggtcggcggaaaataacctttggcatcactgcccattaagggtgtggggcgaagatatgctcatgtggtgtggaggcacgcagactttgaactcaccaagatggcgggaaaactcactgaggatgatggctaggatactgtagtgatccgagcaactctcatgacaagcaagttcgaacgccacgatagcaaagattcccaagatcctgggttctgtgtacacacgatcgagacaggaattgtgacacacgagatgggagagaagtcacagctcagggtacctaactcgaagtggctcgttggtacggaacctgagtcgtccgtgagagtaactaggactcggaacgttgacatgaccgattcggcccccgttagagggctgccgtcatcttcgtgtggcgcccttcggtggtcctgagggccgcgagccagcatcgcgaaggacccagcgtggctcggcctggtgggcggtaccggtggggtgctggtccggaggaaacgtaaatcaaggtcttgtaaggaccttgcttgtggtcaatctcgaatagatctatagtactacgaagaattcactgactggaaactactggaccctcggaggacaatattctggcggaggcctgggcacccccgcgcttggtaacttgggcattcggaggcggtgtggaattgggagaaaccccctggtagctggcatctgttgggggctatggacccgaggacctgatgcaggggatgacaaagaaaacgaaggcgggactggtgtcac

SEQ ID NO: 519353 - DNA, 266 bp, Homo sapiens
tgcctgcacttctcattttagtatctgtaaccatatcatatgccagtcatgccatatgtttacatattatctatggctgttttttgtgccacacatggtacagctacaaaaattaacagtgtagctggactcagtggctcacacctgtaatcccaacactttggaaggccgaggagggtggatcacttgaatccaggagtttaagaccagtctggccaaccatgcatacatttcacctgtgggcatcctctcagcagtctgcacct

SEQ ID NO: 519354 - DNA, 251 bp, Homo sapiens
  misc_feature (9)..(9): n is a, c, g, or t
  misc_feature (17)..(17): n is a, c, g, or t
  misc_feature (96)..(96): n is a, c, g, or t
  misc_feature (135)..(135): n is a, c, g, or t
  misc_feature (158)..(158): n is a, c, g, or t
  misc_feature (219)..(219): n is a, c, g, or t
aaagctgtncctcaaancatcccagtgaacactggaagaggctttctagaagggaacaaattgtccctctgaggccgccgtgggtgacctgcaganacttcctgcctggaactcatctgtgaactgggacagaancagaggaggctgcctgctgtganacccccttacctcccctagtgccttcttcagaatatctgcactgtcttctgatcctgttantcactgtggttcatcaaataaaactgtttgtg

SEQ ID NO: 519355 - DNA, 868 bp, Homo sapiens
gggagaattcttagatataaattttagtgaaagttctttgggggagaattcttagatataaatttgagtgtttgaagagacagggtcttcctgtgttgcctaggctggtctcaaacttctggcctcaagtgatcctcctgcttctgcctcccagggcgccaggattatagggttgagccactgtgcttggcttagaggtaataaattttaatattctattcagaataagaaaatatagcatataagcatttgtatctttagtaaagttactgccagtttgatttttttttttggcaagttacttagcagaacatgtaattcacagtaacagatgatcctgtgttggtaccatattctttaatattcctgttctcgacaagaatagtagagagaaaactgggtggcctgctcagtgatggctttctcgtagtcttgcgctgaatgttacacggaagattcgacactttactagactacacgcacagtcatcatagtttccaccagtacatttgcacgcacattctagctgtgctagcctaaaaatctgactcatgctgagttccttttaacgcacagtcactttcgagaacttcaaactagaaccagtttgaacctcaagttgaccgtcgtctgaggtcttacacaatctcttcccatttccaacgattctccacagggctgtcggcacaggaccatggacggtaggctattagctgctcacacacccacggccctaaatctccagaaccgactagacacacgcttacaggcccaggcacagccccagtatccaggtgctcaactggggacgtctacttcacagtgcgtcgcttgaaaaccccctcgaactactgtgtacctccatccg

SEQ ID NO: 519356 - DNA, 167 bp, Homo sapiens
agggtgggcaccccggtatagagcatcttggcacagttttacatgtacttataggacaaattcggagctccagggttcaagaagacagctggtcaaattcatctgacacatgtggcataaagcggaaactcatccacttttaacttcttccggcccaggtcaaaaat

SEQ ID NO: 519357 - DNA, 663 bp, Homo sapiens
  misc_feature (59)..(59): n is a, c, g, or t
  misc_feature (159)..(159): n is a, c, g, or t
agcatacacctcatttggcattcatatgactaggttataaaactcattaagcactttcntctctcaggccagaatgtagagcgttcagttcatatacaggtttaacgtgttagccatttaacagtctgattacgcatcatgactgaacttattaattangtgcctactagctgttaggcgccactctagagactgtgcctagggcactcaatagggcacacatgtagagactcatgtatacatgtagcccacattcaatggtcacatggtacactagcatatggtacttatataaatgagcatgtcattccacagcgttagggtatctagattgtacggtcaacagtgacatctcagtaattagggcatgtagctggttatctcacaagcacggaggagccatccatacacagagtgctataagtacacggcagtgtcacagtggggccactaatggatgtaggcattaatgcgttcttgatgtgttgaagattcagaagccgtgtgtagttgcagcatagtggggtagcagatattcagagccagtaggtcttagaaaggcttcagcaagtcagtcataaacaactgggtgtggtggatcacccgtacgatcctagcactttgggaagccaaggtggacgtatagcttaaaactggtagtcc

SEQ ID NO: 519358 - DNA, 100 bp, Homo sapiens
ttgacatgagccattctttctccgccagtatgtgaagggtcatgctgctgatgtgtttgaggcctatactcagcttctaacagaaatggtactgaggctt

SEQ ID NO: 519359 - DNA, 135 bp, Homo sapiens
gtccggcactttcgcgcaagtaccctgaatttcagcccatctgaaagtactccggaggaagcagagttcacaacagcatcataatgcgaggtacagcccttaaccacagcgcctagtgacttgtgggcgctcgtg

SEQ ID NO: 519360 - DNA, 274 bp, Homo sapiens
  misc_feature (253)..(253): n is a, c, g, or t
ttgtaatcccagctacctgggactctgaggtgggaggatcgcttgaacctgggaggcggagattgcggtgagccaggatgaaaccactgcactccagcctgggcgacagagcaagactctgcctcaaaaaagacaactgagaatctggctgggcgcagtggctcatgcctgtaatcccagcaatttcggaggccgagttgggtgcattgttctaggccaggagttcgagactggcctagccaaacgcagtganaacccgtctattaaaaataca

SEQ ID NO: 519361 - DNA, 235 bp, Homo sapiens
tggggcagaacttcagtgaggtccacctgtactacgggacacatccaggctcttctaggacaagtacaatgctagagaagcctaagaatgcgattcacacctttgtgcagtccggatctcacttggctggcaaggtgagaatggcaaatctagtgatggccgagggccctgacacctagtgcagtcgaagctatagagtttatccagtgtaaccctgctcatctactggatagaa

SEQ ID NO: 519362 - DNA, 279 bp, Homo sapiens
ttcattacgccaatatggtggaaggaacagcatatttaagttctttactgttgtaaaactcagatctagagttctgtgggtaagcacctcgaggacagaacatgttggtattggtggagcacctttctattaccacttacaggacagcagattgggaattcatgggctgttggagcaacagaacccctcgttctaccagctgctgtatcaaaggacctggatctagagtcttgatgaacttcccaaatctgattagtcatgattattcgccttaattaa

SEQ ID NO: 519363 - DNA, 970 bp, Homo sapiens
gacaccatgatctctggattgtggatccaaatcctagatggctgaggaggttggatccacaatgcagcagctactgtgcattcaaatcctagatggctgagaagaggcatctcacccttcacatctacaagatctccactgctgggtatgagtaaatgtgtgtgtgagtgcgtgtacacgtacatgtgcacacactgtctacatacaaaccatctagatctatagagatgccaggcttcactttacatgtgattacattctacatgaaaacagttgagggctttcgttatctttcacttgatggagtttcactgtattatgttcatgatgggccccagtgaactccatatcaggtatatacatagaatgtataatatatacaaactgttagacacactacacacacacacacacacacacacacacacacaaagcctagggaaacctgtgatgtgggtaagttcattgtgccatcccatctcctccatctaagtaatttcccggggcaagcattgtttcacacactcccctcagctgcccagccattccctctccagtgtcccataccaccaagccttctttccccatcagtccaaatgtccctgccctatgtcccatctctcagggtcctactctctgataggtgacagttcagtcagtgggtgctaaagagtcgagtgttacccttcccaggtgacatttacattttaataggggctacagataatgccttaatcagaaagagtggctgtagtggtgggaatttcaggcacagaagtgggccagtaagggagattcttttatatcaggagggcattttagagcccccgagtcatacctgtctgtaagcgcagcccttcataagtgcatgagcacaagcaagcacacttacctacattataccctccataattttgagatacctcccttgcattggccctatctttaaaaatgaaaaaaaaaaacccaa

SEQ ID NO: 519364 - DNA, 296 bp, Homo sapiens
cgtttacggagttatgaataaagctgatataaacatctgtgtttcattttgttatgtgtacacatagtttttcaatttccttatgcatagaggccaagggacatgattgctggcattgattgtgtggcaagattatgtctaattttgaaagaacactgccaagctgtctttcaaattgctgtaaaattttacatcccaaccagcaatgactgagggttcctgttgctccccagcgttttgacattaacagtgtcctagattttgaccactctaataggtgtgtagtggtagcaaac

SEQ ID NO: 519365 - DNA, 185 bp, Homo sapiens
tatagaatcgagctcggtccccagttattcgatttcaccgaatctggacaacgccgccgccagcagctgttcaatgaagtggtcggttcgctggccccggccttcagcctgtataccaacgacccgggcaagggcaaccgcatcaccaagctccagcaggattcgctgggcttcgcgcagagcct

SEQ ID NO: 519366 - DNA, 242 bp, Homo sapiens
atagctgactctagaggatacacaactcaggggcgagctgccctccctgtgttcctgcagcctgccatctgagcgatcctgcagcctgccctccgtgcgttcctgcagcctgccctctctgtgttcctgcagcctgccctccgtgcgttcctgcagcctgccctccctgtgttcctgcagcctgccctccgtgcgtttatgcagcctgccctctctgtgttcctgcagcccgcccctgaggt

SEQ ID NO: 519367 - DNA, 848 bp, Homo sapiens
  misc_feature (848)..(848): n is a, c, g, or t
gagtgcgcgcccgggtgctctaccggcgtgtcgctccgccccaggagagccgggctaccatggtggagtaccatcgccatggagaggttggtcaatgctgaggaagcccacaatatttgtcaaagagtgtgtagatggggtgtcaggtggtgaagattataatcagaacaacatcaaccagtggatgtgcatgctgtagtggaacaatccttaaacacctggttaagtttgggaaaagcttataaatatttgtgactgtgcaggtggtgcagaagagcgcatatggttcacagagccagctcctgtgtggggataccacatcggatggaacctggtaccgtgacagatgggagaacggaccatgaatgtatggtcaacgtttggccatgtaatggtcgttaactgagtaaaaatgtgggttaaagcatgaattaagaattgtcaggtatcttgccaaaaagagtaataggtggtcacagtgtgctagatgaaaaggtggaatatggtttaagttattaagaaaattgatattttagcaggattaaagtatggggagataagtcatttctaacagggagcggttcaatacggagaattgttggtcgcacaattaatttggaagtttgggtggcatgagaagcaagttatttaaccacgggttcctaatatttgggcaaggggggggagccctagagtaaaattttcgcgagaagagcgggatatgtacaacggggatgtggagaggagtaattgtgaatccacgtgtaatgagagggatgtccaaagaaaactgttggagaacatagtgagggatcatatatcatgatgctgtagattaatattcgtan

SEQ ID NO: 519368 - DNA, 551 bp, Homo sapiens
  misc_feature (366)..(366): n is a, c, g, or t
aaggcagtgatgtcactgagtgacgactctgctctcaaagaggagggaaaatgtgcttcaccatagggccagtattaaatgatctggggggtgccgagaagatgtagacctaaaatgtcgaagtccatttgagacacagcgaattccagttctcagaaatgtaacctgtggtatcatgggacaggcgtgcgaaacatatgcaggctgatcagcgagacaaatgggaaatcaccaaaaacgtcacatccagcacaaatgattgcgtacatatgtaagtcgtgttcctgtgtcagtatgatgtatgcctttagacaatatagctcagtgtatcctatatcaagctgtcactctaaatttagttaccantaggagcgagagctatgatgcctttacacgaaagaaatatatattagtaaatacagaatgtataatatctcatttttggttatattggaagtgctataccaatcaatttgttcaggttgctggagttacaacaattatgtgtttggacaattttctatgtagtatttgattgctttataggatgt

SEQ ID NO: 519369 - DNA, 187 bp, Homo sapiens
  misc_feature (84)..(84): n is a, c, g, or t
  misc_feature (92)..(92): n is a, c, g, or t
  misc_feature (95)..(95): n is a, c, g, or t
  misc_feature (130)..(130): n is a, c, g, or t
gtttttggcgctcggtccggtcgcgtccgacacccggtgggactcagaaggcagtggagccccggcggcggcggcggcggcgcncgggggcnacncgcgggaacaacgcgagtcggcgcgcgggacgaanaataatcatgggccagactgggaagaaatctgagaagggaccagtttgttggcggaa

SEQ ID NO: 519370 - DNA, 441 bp, Homo sapiens
  misc_feature (3)..(3): n is a, c, g, or t
  misc_feature (14)..(14): n is a, c, g, or t
  misc_feature (40)..(40): n is a, c, g, or t
  misc_feature (74)..(74): n is a, c, g, or t
  misc_feature (230)..(230): n is a, c, g, or t
  misc_feature (364)..(364): n is a, c, g, or t
  misc_feature (374)..(374): n is a, c, g, or t
  misc_feature (394)..(394): n is a, c, g, or t
  misc_feature (412)..(412): n is a, c, g, or t
  misc_feature (420)..(420): n is a, c, g, or t
  misc_feature (435)..(436): n is a, c, g, or t
ctnaactggaaagntccaagcttctggaatttaaagtgantctccctcccttggggaatcaacaggcatgaacnaccaacaccctaagcacatttttgtatttttaagtagacacaggatttcgccatgttggccaggctggggacctcttttatttatttatttggttgttgctgttgttgagacaggatctcactctgtcgcccaggctgaagtgtagtggtacactnacagctcactacagcctcattctcccaggctcaggtgatccttccacctcagcatcctgggtagctgggaccacaggaatgcactgaccacacccggctaatattgtgtagtgagatcggggtctccccatgtntgcccaggcnagtctcgaactcctgggctnaagtaatctgcctacctnagcctccntaagttctggactcnngcatg

SEQ ID NO: 519371 - DNA, 347 bp, Homo sapiens
ggctgattaaggatccgtttactggcattgcacatgtcaggctgtgtcctgacatggttatgtctctctaaaaaatgacctagggctggcgcggtggctcacgactgtaatcccaacactctgggaggcggaggcggcgaatcagctaaggtcaggagttcgagaccggcctggcctacatgatgaaaccctgtctccacaaaaaacacaaaaattacctgggcgtggtggcgtatacctttaattccagctactcgggaggctgaggcgggagaatcgtttgaaccccgggaggcggaggttgcagagagccgacattgctccactgcactccagcctgggcgaac

SEQ ID NO: 519372 - DNA, 148 bp, Homo sapiens
cgtgtagatcatttcccagtgtcacctgctgggccataatcaacaaggtacaagacttaagagagccatgccgggatttcaagtatgcaggcagagagattcaatggtgcgttcttgagtcacgggtgttggttgttaagacactggt

SEQ ID NO: 519373 - DNA, 192 bp, Homo sapiens
tgacggtaccaacatcatatggtagtattgttttcttcctacaaacaaattttaaggtgctcacatactaatcttacctcttttacagataaaactcaggatttaaacttataccattttctccaccaaaaaatgtgaaaggaagaatggcagctacgaagttgcatacacatgagacgccttctttttttt

SEQ ID NO: 519374 - DNA, 341 bp, Homo sapiens
ttcgatatccgcaatagcagcagtgaagagaattagaagtggtaaaattctgaacataggccagatgcagtggctcatgcctgtaatcccagcactttgggaggccaaggcgggtggatcacctgaggttaggagttcaagaccagcctggccaacatggtgaacacctatctctactaaaaatacaaaaatcagctgggtatggtggtacgtgcctgtaatcccagttacttgggaggctgaggcaggagaaccagcttgaacctgggaggtggaagttgcagtgagcccagattgcaccactgcactccagcctgggtaacaaagcaagactctatctc

SEQ ID NO: 519375 - DNA, 1059 bp, Homo sapiens
tctatgagacgagagagagaagcctccgctccttaaggtgaaacttcatgaagttttaaacttcatgcaattggaaattccatataagttttatatctgcaagttacagctggtgtggttggtcttgggaaataaaaatccaggttctctcagaaaaaaaaaaaaacaaaaaaaaaaacaaaaaaaaaaaaaacaccagcagccggcgcctaataatgtgtgggcgggtacaggaacaagaaggaggaaaagaaacggagcaccgcgggagcaagcagcggtgtcctccagacgcccgacaattttgtggtgcaaccaagggtgtgaaactacctcagccgggcaccccacatatagagaggagcagcgtactattactatcgacgacaacacacgacgacggttaacaccacccgaggctaaatataatagaggtcagcggggcgacaaccacaaacacacgaacaacaaacacacaacaaacgcacaacacaacagcacaagtacggaccgaagactagcgagataaaagtcaaccacaaaaataaagagagcaaactacactacacaagcgaacatagcactcaaaacaacaagactacactacaagacggaaacaacaaagaacgacaaacaactaacacgtagagagacgacacagaccaaccacagcaaccacacaccaacacaccaccacgacgacaggcagaagcacacaacgagcgcgaacacaaagaagcgaactacaatgacaatggacaaaaagctgggaggagagacaaaaagagagagaacaaacgaccgcgcgccgcgaaagacagcaagagcgaagagaagacatcgaccgaagaccacacgagaacggacagagacaggagcgaacgctaagatgagaagaaacacagagagacaacgacagagcagtgaatgagaagcgctaagacctgaagcatcaagcgagataaggctagagagagacagggacagggaaagagaggaggcacgagcgcagcaacgaacagagtaagtcagaagcaaacagagggacggagcaaccgg

SEQ ID NO: 519376 - DNA, 292 bp, Homo sapiens
ctgggtagcggagatgctgagtgggctcatgatgaagctgacgaaacagcgagggtcatccatgctggtgtgacagatcacgttgtagatctgagatctggaagtcagacactaaagatagtttccttaagttttctaagtacaagacacacttggacattcctgctagtcatgtatcacagtaagccagagaactgagagaatggtctgtgagagcacacgagcagagcaaagatcagcattgctgagatgcggacattgcttattcggactaagaattcttggatgcttc

SEQ ID NO: 519377 - DNA, 515 bp, Homo sapiens
aaaaacgcaaaggacacccccacccccccccccacccccactttaccgagaacaaaagcaaattttaggactcgccactctctccggtgtcccgcgacacaacaccattccctgccgcactacttctttcccgtccaaagatacaacaacatgccccacatacggggagggcaagaatgacaagcctgcgaccaacatgtctgtctcgcatgtttgcgagtcaccagaacaattgggaaaaaaaaaaaacctatggggagagagaagcaaacagattgcgagactaatttaaagcacaatcacctaccaggaacctcaacatttgaaaaaataacactgcggcatcaacaacagaaagtctgttgcaaagagaagcaataccaaaaacttgcaacaattcatgtatatcacaaattcaacccacgtttaaataaaaatgccaagatttcaaaaacaccaaagaaggatttaatgaaaggttctcatcacccacaaataataaagattttttcccc

SEQ ID NO: 519378 - DNA, 156 bp, Homo sapiens
tttgagctcactatacctcgtataagcatacccgcttcaaaacccacagaagaaacataattcaaaagtgacttgctccgttctgttgatttccagcacagtgttactgtggtcctctttcaggaatcgagaataccttaggttcacagctcccga

SEQ ID NO: 519379 - DNA, 706 bp, Homo sapiens
agccccaagctcctacaaagtggtttctatttttgtctccccgcaaagtttttacttcttgcacagcctctgaggatgtgggccccagcccgaacacatctgtggttttcactagtagagcttttcctagtgtctgcccaggggtgcttccagtggctcttccatttgcccccgagccagctgctgacacggcatgccctgaggtctcgggaccaggttccacgggcggtgcttttggcctgctcccccacggagtggaggctggactggtctcccggccggagtgtgaggctggactggtctccacgcaacggagtggaggctggtctgggctcccgcaacggagtggaggctggtctgggctccccgagtggaggctggtctgggctcccgccggacgtggaggctggtctggggagagagctacacctccccccggccccggtctcccgagaaggagcatcgatagggccccgaggtaaaagccccttagccctctcctgtcctgcacccttatctgggccccttggttcttgggtccctgtctttttcaacaggcagcccccgttggggaattaagttgattctggactggctatgcctaatgatagctgccatctttgaaacccctaaagttcgagttcaaccataaagttggggaggccgtgtccacaccttccttgtagaacggccaaacaaaaaaaaa

SEQ ID NO: 519380 - DNA, 907 bp, Homo sapiens
  misc_feature (347)..(347): n is a, c, g, or t
gcctcggaggctatataaattattcgctacttcctcccggcaagttcttcccggtatgcaccgccgaaaacaaaccttccaccatacaacctttagggtctataactccaagattcccctcttcttaaaaatactctctgctttagatgaccccccccctcgcagagttcaccgtacaccctctcagaattaaactccccttctctaaagactaaaggagtataacctccgcccaaatttcatttggaaataaatcatatttttgaggaaaattggaagttaatttttttcgagaataaagcccttccacatgttttattataagaattaaagccacccttgtttangaaaaatatttaagggtgggtgcccccccgtaagggcccacccgttgttgaataaattatgagtctaatttggaatggttaagaaaaagggttcgcccgccactgaaacggcaatttctctttttaagggccaccttctgacccccgggcctttgggaatgcgccccttatggcgccccctataggttcctgtgttaaagctcccccaaaggtggagatttaaatgggacacccctccctcgatggtgaaaaagtgtgtaatgtgacactaagcaacacacgttttttgtagcacgccgtaccaattatgaagaaatatattttgtgcgaaattgttaaacgacccacctccataaaaaagtgtggattagttatattaaaatgaatgtatgcacccaagttaatggttatgccttattataaaagtcacccttctaattttcttattggcccaaaacgcttttacacctggaaaaattaaaccccataatttgagatttaatttttgtaaaataattttggaaatttttttaaaaaaaggttgtccccttacccaaaaa

SEQ ID NO: 519381 - DNA, 532 bp, Homo sapiens
caacgatggtcctcagcttctcgagtagctgggattacaggtgcacaccaccacacggggctaaattatgtttggtatttttagtagagacagagtttcactatgtgggccagaatggtcttgaacttctgacttcatgatccgcacgcctgggcctcccaaggtgctgggattacaggtgtgagtcaccacgcctggctgatcagtttttcatatgctggtgggcctcatgtatgttttttcagaagtgtctgttcatgtacttggcccattttggaatagagtggttgggttttggctggttaattggtttaagttcattatggattttagatataaggtcttggtcagatgcatagttggcaaatattttctcccattcggtaagtggtctgattattctgtcaatagtttttggttggttggttttggttttactggttggtttttccggtggagaagccctttagtttaattaggtccggcttatcaatttttatttttgtggcaattgtttttggagtcttcttaa

SEQ ID NO: 519382 - DNA, 1543 bp, Homo sapiens
  misc_feature (652)..(652): n is a, c, g, or t
  misc_feature (722)..(722): n is a, c, g, or t
  misc_feature (1113)..(1113): n is a, c, g, or t
ccctcctccgcgttggtgtgccgccccattattgaggacctcccgggggtcgtgtattctacttcctctccggagttctattacctctttggtcccccgcggggcctcggcagtacaccaagtgttgtccgccccgccgggcgaccccacgctgttatgttgcgccctcttatgtccgcctccattttttaggggcgacccacccgttttatggcgacgcgaacggtgtggcggtccccacaacaagacccccggcgcgctgtggttaccccccggcttcctcgcgggaaatttctccctcccccgggggtaatttcctgtccggaaatccctccccatcggcggtttctcactgccctccatcaggcgtgtttctcgatatgggagtgggggggaacacccaccgccccccttcatcttcccccgatggtggtgaccctccctgggtaatgttagcccggccttttctcacagggggacctcccgcggcggtactttatgttggggaaccccccagcccttggggtggaatagggcctccgctcccattccggagatgtttgtgcccgaaccccggagttgtgagctctccaaagggccgcttttagttctcccttggatggacctttggcgcggtccccacacttttctntgcgcccaaacccccccgcgttatggaatttcacatgtccctcttccgcgttattttcgcggaaaagcgnccctctttttcgcgggggccgctctggggagaggccccgccttctctctgggccgcacacaaaatgatagagtgggggccccccctcgagaaggcacctcttttttttcgcgagaaagggcgcgcactttcctccccccggcagacctctcatattgggggccacataaaacgctctttatatggaaaaatttatggaaaaaagtgctcttttgccgctcgggttatagagattcacacaaacgcgcgacaggggggaagtttgaaagagaaaggcggcagagccccacacagagagattttgttgataacttgagctctctagagagcctcgggtttataaattgtgtggagattttgttgtgacacgcttttttcccctctctataaanggagcacacttgtgccaccgaagtttgtgggcctatgagaccctccgggagaactcgtcccgcgagttctctggagagtacactattttcgcggcatctctattctcttgagaagcccgagaatttaacacccaatatgacacccactcttgcgcccactataatctcttctgcccctgtgattatacctggagtggtctcgcctggttggcgccggaatgcctgtctcaagtatccttgtgatattgatttgtctgatagcccataaggtctgccaacccatctgggagcttaggtccgatgcaccagtaccactgccaaggccacgcccactgatccccagagtgtgatggatttcttatttaggaaaattgattttttcccgtttataaggatcttggatgtccaaagaatatttgtttaaccttga

SEQ ID NO: 519383 - DNA, 463 bp, Homo sapiens
  misc_feature (450)..(450): n is a, c, g, or t
aaaattgcaccactgcactacagcctggatgatagagcaagactccaaaaacaaaaacaaaactgtaaactttatttctgaacataagcccatgaagttcaagacacttttgtaaagcgataacaccagccatttgggccatccctaaagaactgagagtcctgggaatttaaccacatcaatgaagtcttttttacattattaactgaagaaaaatgggtgctctatgaagatttttcaagattgggaaacaaaaagaagtcagaaggagacaaatcaggactgtaaggtggatgcctaatgatttccagttgaaactcacagaattgcccttgtttgatgagagacaagagcacgggcattgtgatggagaaggactctgtggtgaagctttcccaggtgttttcctgctaaaacatttgactaagctcgtaccgaaaagctttattnagaaacacttgga

SEQ ID NO: 519384 - DNA, 465 bp, Homo sapiens
  misc_feature (64)..(64): n is a, c, g, or t
ggggctttccatttgaaaaaggaagcgtccacattataaagttggaagaaacgttgaaatcacntgtacacagcttactagcgacgcgcggccctccctcctcccgccccccctccctatgacaccagcccccccccaatctcaaccgccctcttccgcagaccacctcttcccccccccccctacctcctcccccacctccccttatctccccgaccatctcccccccgccgcacccccccctcccctcctttcgcccctccatcttctctcattcccactccctctctccccccccccccctcccaccccccccccccgcccctttcccaccacctcccgcacccccccaccctcctcgcccccatccccacccccccctcccccctctcccccctccgcctaccatcctccccccctcccctaaccacccaccttctctcctctacacctccctcgggcccc

SEQ ID NO: 519385 - DNA, 462 bp, Homo sapiens
  misc_feature (367)..(367): n is a, c, g, or t
aatggagtgaatggaatggaatggaacggaaaggagtggaatggaacggaatggaatggaatggaatgcaatggaatcaacgcgactgcagtgtgaatggaatgtaatggaatgcaatggaatggaatcttccggaatggaatggaatggaatggaatggaatcaaccctgagtgcaatggaatggagtggaatggaatggaacggaatggaacaacccgaatggaatggaatgtaatggagagtaagggagttgaatagaatcattccgaatgtaatggaatggaatggaacggaatggaattgaatggaatggaatggaaagcaatggaatggactcaacccgagtgaaatggaatggagagganaggaatggaatcgaatggaaactacccgaatgcaatggaatgtaatggagtgtaagggaattgaatagaatcataacaccacacaattccgggta

SEQ ID NO: 519386 - DNA, 901 bp, Homo sapiens
agcggggtgagtgcggggaggcggcggcggtcggcccggcccagcccagcccgcagctgcggcggcgctcagagttggttcctgaccgccttctgccgctggcctgggtttgtcaccagtgtcctgtgtggtcttgcacctggctctgtgccagacctcgcccccccgcttctcccgttcatggccctggtgcggggctgcggaggcctggcggggggggccttcccgccttggttgcccaggcaccgtccagggtgacgggtgctgcgggccagcgaggctgacaggggccaaagacgctcggggagccggggccaagcaccaagcggacgccgtaaccacgggtgcactccagggttggggccgcgaagaaaggtacaggaaccgctcaggtggatggaaggaaggacgcagcggggaggtcccagaatgggcagctggaagggaaggttgcagtcccatatatcaggaagccagttgcacatgacaggggagggagcacccctatggggaattagagccattgcaatagacagagagagcgtaccacggagagaggggcgacggaaccgcgccggtggaccaccagtgaggtacggccccaatatagaggaggcccaagggaagaaagacgatcaatggccacaggcacccgggcacagtaagaagaacgggcaatgggagtgatgcataccaagaccagaagaacccaaatatgcgcacgcacgagcggcaaccacgggcaaccaaaatatcagaggcgccgagttacgaaaccgaaaatgggagtcacccattagggaggcacaaacagcagccaacagcggaggaagaggcacgtatgggacaaagcaacgagcccatcacagggcacgcacaaaggcgcatagaacaaccaagt

SEQ ID NO: 519387 - DNA, 1192 bp, Homo sapiens
  misc_feature (823)..(823): n is a, c, g, or t
  misc_feature (862)..(862): n is a, c, g, or t
tggaaagggagtctcgctttgtcgcccaggtgggggtgcaggggcgcaatctcggtttacggcaagctccgcctccggggtttcacgccattctcctggccttcagcctcagtgaagttagctggggaactacgggcgcccgccattacgcccgcgttaactttttggggtattttaagataaaaagtggggtttcaccggtgttatagccaggagtggtctcgaatctccgtgaaccttgggtgaactcgcgccgcgccttcggccttccacaagagtggggcgtgggaaattatacgagcggcgtgaagcctcatcgaggcgccccgcggggcgcgcggtgagagggaaggcaaagccaaggcggcggggccaggcgaagcgcggagaagtgccagaccaaccgagagggcttctccttcctcctatacacccttccttcgcccgtggtgtgggcgcctcaacccttcgcggggtgctcgccacaaaagaacaagagaaatagagggtgaaaaaaagaggggcggcccgcgggagaagccgaagtgtgcgcctgaaggtggcgccgtggagggggcccccgtgaaaacaccccaagaggaacgagaacagagggcaatgtgcgcgacgcgaagtggtggggataatccacgcgaacgaaaaggggtgaccacctcgtgcgcggagggggacaccacaaaataaccccacgagggaggaacaactccgcaggagtggcacaaggggtgtcgccacacttgaacaagtcgtggcgaacacaaacagcgggaagtctctggcgaaagaccacaaatgtgacaanaggtctaaccacacggttgtgagcaaaccacaaccagtngcgggcaggtcgcagagtatgatagcagtggggggggcgcacacacagaggaggcaacaccccaacagaagtcttcgcgagccaacatgaggaggaccaacccccgtatgcaacaagaacagaggggcccgacctgccattaaaaaaacagtggcatcatccaaagtgatgcagcaacagggggaagaaaacccaacattccgcggcggtctacacaccacaacagcgctccagtgtgccaaacccccccccaggagagcaccacaatcacgagcaaaccaaggaggccccaaagaggcccacaacaacacggcggggcacgggggcaca

SEQ ID NO: 519388 - DNA, 447 bp, Homo sapiens
  misc_feature (186)..(186): n is a, c, g, or t
  misc_feature (334)..(334): n is a, c, g, or t
taaaaaaaaaagggatttaaaacggggtccccgtgggattcataattaggcctcccccggaggagggggcccagttttgttatttaagcccaggggcaagttctgtttcattttggcgttcccaaggcccaaaagaaaaaaaaaatcaaaggcctttcatcccccggggggtttcttaaatcccgnaagggcttaggaaacacgttgggcaggtgagcagggcctcctgacccctcctttgtctcttggagaaaggggctggggtcccatggaaacgggtcaatgcggcctgctggtggactccgatgcctgccttttgcgggaaggggggtancccttgaaacacccattggtctgccgtttggagggccctccattcaggatgtccctgatgggctgcacgatgagggtgatggccaccaaattatctgcacctctagggatgat

SEQ ID NO: 519389 - DNA, 111 bp, Homo sapiens
tcgagtcggtaccataagtagcaggtgaaactatccagttactcctctagtcctatcacctcgcttttatgatgtgtaaggtataggatcctgcccgtctaggagcgtaat

SEQ ID NO: 519390 - DNA, 459 bp, Homo sapiens
gacagacgtgtagcaatggagattcgacaatgagcaagaaaaaaatgggacagtggcggtggctcacacctgtaatcccagcactttgggaggccgaggcaggtggatcacctgaggtgaggagttaagagaccagcctgaccaacatggtgaaaccccgtctctactaaaaatacgaaactagccgggcatggtagtgcacacctataatcccagctatctgggaggctgaggcaggagaatcatttgaacccaggaggcagaggttgcagtgagccaagatcgtgcactccagcatgggcgacaacagtgaaactccatctcaaaaaaagaaaaaagaaaaaatggggaccaagtacaacagcctacacctgtaatcccagcactttgggaagctgagggaggaggggctggaagcctaggagaccctcggcaacatggcaacacggtctctcaggt

SEQ ID NO: 519391 - DNA, 1718 bp, Homo sapiens
  misc_feature (176)..(176): n is a, c, g, or t
  misc_feature (373)..(373): n is a, c, g, or t
  misc_feature (1718)..(1718): n is a, c, g, or t
ggcgggaggggaaacttgcgcggacgaaggggaatgcggagccggcgccggctgcgcagaggagccgcgtctcgcactgcacgtgcaacctcgtgcatggcgatgcccgagcgaggctgacctgcgatcactgaccgcgtcgggaatcaactggagaactcggtcgctgacgaggntgacttgggcgcggacgacttgattccttgtgcggacgtctgccaggattgctaagcgcttgttggtggtgccagacctagtgcacaaggcgactaggacgcaatcggacgtgactgtcatagtcacacaccaatacggatgacattcttctcgggggcgtttcacatccaccaaacttccgatgtggctgaatcgncgagactagtacgtaccttctcgcaatgcgtgtgccttgtcctgtacctataggaatcatggagaacttggcaaaaccaagtgtacgtcgttgcatagagcgcaatcctacaaccttacagggggttgacccctccacgaaccgtacgcgacggtaatatttagctagagcggtgctactaacccaacacgagtagtagatagccctttaacgagtgcggtgggccaccttcttaatactagctagatgaaaacgacaaccccaggggcgcacattgtgggtccttctaaatccggagaaatctaatttgcaacggtttcagataacaccacgcacgtttataaggacgttctttagcaaaacctcccaaaaattgccgagactccgaatggttgcgtattcatacaaggaaatggaaccaaatcggtcatggacgtaagtccaaacaattcaccgaccataggtgggaacgccaggttaagagctcggctaaccagaatttatgctttcccaaggcgtggagaacaaattccttggccttggacttttcctaatttcaaggttcagaatccataattcttagcaggagccaaagcgttaattggccagttctccgttgtgacaaggccgagcaaaggtaagaggacggggacctgtcgaggcgccatttttctggtgagttcaccttggggtggaaagccgtattctggtattcgcgagtcggggcttaagttccgctaactttttaagagccgggcgtattaggggggaagagatatacagaaagtgggctgaactattgtccgttatctaacgagactttccaggggagtttgggcaatatcacacattggttatttttgacctttccactaggaaaaggacgggacacaggatataggggccaaattaggaaccacctcgatttatcgtatgtggggaagcctctcgaagatcgaccacagatcgcgatatttacacagggggataataatccacagtgggtgtacccccagcggggcaggttgtgggagaatattacaaggcaattaaggagatatcacttgtcgtgccctatttaagagcgtatagtagatacagggcaggaccagggggtgcagagtatggtgttattaggaacacaagagggattcccgcccgtcgttctcgggagaacacatatgggtgatttataaacgagcgggcaacaggacgaattatttcagtggtatacagagcagaggaatattgagcagatagcaatagtgttgatagagagatacttcaggtgttacaatacgagaggcattagatagtgttatgagagactacataccgaggatan

SEQ ID NO: 519392 - DNA, 378 bp, Homo sapiens
  misc_feature (6)..(6): n is a, c, g, or t
  misc_feature (201)..(201): n is a, c, g, or t
  misc_feature (244)..(248): n is a, c, g, or t
  misc_feature (250)..(250): n is a, c, g, or t
  misc_feature (295)..(295): n is a, c, g, or t
  misc_feature (301)..(301): n is a, c, g, or t
  misc_feature (312)..(312): n is a, c, g, or t
  misc_feature (318)..(318): n is a, c, g, or t
  misc_feature (337)..(337): n is a, c, g, or t
  misc_feature (339)..(339): n is a, c, g, or t
  misc_feature (365)..(365): n is a, c, g, or t
atgtanataagttctgtcattgtagaaagcggtctgacgatttctcaaagaacataaaacggaattaccattcaacccatcagtcctattattgggtatatacacaaagcaatataaatcctttcaccattatttttctattatactttcaggcatttgggtcatacttacaaacacatttattcttcctagataattaanagaaattctactatgagtagttctaatacttatagtttcagannnnncntttatatattgatcaatatataaattacaaattaatgcttctgtnaggcgncaggcacaatncccgcngctttttgtttcttccagntnatctagttgtcttaatgtcacttgcngggtacttctgcc

SEQ ID NO: 519393 - DNA, 370 bp, Homo sapiens
ggattttcaaataggaaaatcaaaaggcccaaagagacagctcactggtgaccatgctttgggattttcatagtttgcgtaattcctatgggctgggccacccaggagcttagagaacacgagattcctcccccagcggggtgtggttttcggaatgtgaccggccagttttcgggcggtgtgcctgtggctacggcctgctatgaggatgcgtggtggtggggccagtgagggcccagttggctagtttgtctgggcccacaccctgcagttgtgtcccagcaggcggggcccagccaggcccagatcttctcgcgtaggactttttaaagtatatatatatatatggatatatatatatatgtgtaaa

SEQ ID NO: 519394 - DNA, 229 bp, Homo sapiens
gggggggggggcccccctttttttttaaaacccccccgaaaggtgggtgtattaagttttttttggggggggtggccccccccttcgggtttttcccttttttcccccccccccccttttttcccccccccgtcgtggttttttccggggggggggggggggcccccttttttggggggggttgggccccccttttgggttttttttaataatggcttcccccctccca

SEQ ID NO: 519395 - DNA, 134 bp, Homo sapiens
  misc_feature (126)..(126): n is a, c, g, or t
taaagaccaatcttgtcaggacgaagcttgtcaggactgtaagccttgtaagataagaatattaacttcagggtgagcgaaaaatcagaatagtgttggtataaatggggtctcctcctccggggngtccaaaa

SEQ ID NO: 519396 - DNA, 402 bp, Homo sapiens
ggttgttgttttccttgtctcgattggactgttgccggacatgctgcccattgatgacttctggtagtcagtggcctggtgcccacccatgaagcttcctgggcggtgactgagggtctggcgcctttctggaccacacgggacgcacccactgcttcagcccaggccttcccttcctctcgagtccgcttagtgtccgcactgtctgcagagtccattgacaactgccgctgcctcctagggtcccaacttgttccactattggcctgccggtccctttcacaactttcttcctacctcttcatacatcaactgaactttcagttttctcagaaatagtccaccttcctttcattggagggcctaacaaacatgcaggagggagtaccaccagtaggcaag

SEQ ID NO: 519397 - DNA, 195 bp, Homo sapiens
ccaaaaagcccccccctaaaaggggggggggggcgggaaaatttaaaaattgggccccccggggcccgggaccctttaaccccccggttttccccccaagggccccccaaaaaaaaattgggggggggggggttcctttttgggggggttttaaatttttttaaattaaaaaaaaaatttttccgggaaccccca

SEQ ID NO: 519398 - DNA, 234 bp, Homo sapiens
cgattgcgttccacgtatattgctggaggcaagtgttgatttctactttgcgatactaccctgtgtatctccgtcattgttcgtccacatattatgtcgtattgcagttattcctgagttagtcagcattcatctactattctcaagcacgttaaaatgagagaaccaatctaattcatctttgaactctagtgcctaggagaatggtagattataaatagatacttggtgaac

SEQ ID NO: 519399 - DNA, 650 bp, Homo sapiens
ggcaaacagccagaacgcctgaacgcaggcacatacttcctattctacatgcctagtaggctcccttcccctactcatcgcactaactgtacactcacaacacgcctgagggctcacgtgaagacatgtctactactcactctcacggcccaagaactatcaaactcgctgtagccaacaacttagatcatgactagcttacacaatagcttttatagtagacagatgacctctttacggactccacttatgactccctaaagcccatgtcgaagccgcccatcgctgggtcaatagtactgtgccgcagtactcttaaaactaggcggctatggtataatagcgcctcacagctcattgctcaagcgccctggacaaaagcacgatagcctaccccttccttgtactatccctatgaggcagtaacttataacaagctccatctgcctacgacaaacagacctaaaatcgctcatgcatactcttcagatcagccacatagccctcgtagtaacagccattctcatccaaagcccctgaagcttcaccggcgcagtcattctcataaatcggccagggcttacatcctcattactatctgctagcaaactcaactacgaacgcactcacagtcgcaatcataattctcc

SEQ ID NO: 519400 - DNA, 574 bp, Homo sapiens
aacatgtcgaggctggatgaatggtgtgatctcggctcactgcagcctcaaactcttgggctcaagtgatactcccgcctcagcctcccaagttcccaggtagctgggaccacaggttgcatgccaccacacccagctaacttttatcttctgtagagatggagtctcaccagttgaccaggcaggtctcaaattcctggactgaaacaatcctcccgcctcggcctcccaaagtgctgggattacaggcatgagccaccgtgtctggcccagggtctcttaagagattgcaatcatttgaaaactttgagttaacttgtacgcagcaatagataacttacacatgtggtcgtagcctcatcactggggttagaggatccacatgagaaagagctcattcacacagctgttggcaaaaggcctcagctcctggcaacatggaagctgcctttccctggaacaagtgatcagagaaagagagagagcacactgatcggcactgtatctatataacctagtcttggaagcgatacatcaacacttctctcatattctatggcgcactgtattagcc

SEQ ID NO: 519401 - DNA, 392 bp, Homo sapiens
  misc_feature (359)..(359): n is a, c, g, or t
  misc_feature (388)..(388): n is a, c, g, or t
ttaaattgtgatgtattcatatatcatgagattgttaaaaaaaaaggattacaggcatgagcaccgcacccagcctctatttcctttttaaaattgaatgcctttaacagcacccaagtcacctcttgaatgttttattgcttagaaatttcatccgccagataccctaaatcatctctctgaagttcaaatttccacaaacctccagggcaggggcaacatgccaccaatctttttgctaaaacaagttataggcaaacaacttcctcctctccatttgagaccacctcagccgggatttcattgtccttatcattatcaggcattttgggtcaaaggccataacaacaagtcttctnacaaagtttggaaactttcccacattttncctt

SEQ ID NO: 519402 - DNA, 1967 bp, Homo sapiens
cttctgtgtgtgcacatgtgtaatacatatctgggatcaaagctatctatataaagtccttgattctgtgtgggttcaaacacatttcaaagcttcaggatcctgaaaggttttgctctacttcctgaagacctgaacaccgctcccataaagccatggcttgccttggatttcagcggcacaaggctcagctgaacctggctaccaggacctggccctgcactctcctgttttttcttctcttcatccctgtcttctgcaaagcaatgcacgtggcccagcctgctgtggtactggccagcagccgaggcatcgccagctttgtgtgtgagtatgcatctccaggcaaagccactgaggtccgggtgacagtgcttcggcaggctgacagccaggtgactgaagtctgtgcggcaacctacatgatggggaatgagttgaccttcctagatgattccatctgcacgggcacctccagtggaaatcaagtgaacctcactatccaaggactgagggccatggacacgggactctacatctgcaaggtggagctcatgtacccaccgccatactacctgggcataggcaacggaacccagatttatgtaattgatccagaaccgtgcccagattctgacttcctcctctggatccttgcagcagttagttcggggttgtttttttatagctttctcctcacagctgtttctttgagcaaaatgctaaagaaaagaagccctcttacaacaggggtctatgtgaaaatgcccccaacagagccagaatgtgaaaagcaatttcagccttattttattcccatcaattgagaaaccattatgaagaagagagtccatatttcaatttccaagagctgaggcaattctaacttttttgctatccagctatttttatttgtttgtgcatttggggggaattcatctctctttaatataaagttggatgcggaacccaaattacgtgtactacaatttaaagcaaaggagtagaaagacagagctgggatgtttctgtcacatcagctccactttcagtgaaagcatcacttgggattaatatggggatgcagcattatgatgtgggtcaaggaattaagttagggaatggcacagcccaaagaaggaaaaggcagggagcgagggagaagactatattgtacacaccttatatttacgtatgagacgtttatagccgaaatgatcttttcaagttaaattttatgccttttatttcttaaacaaatgtatgattacatcaaggcttcaaaaatactcacatggctatgttttagccagtgatgctaaaggttgtattgcatatatacatatatatatatatatatatatatatatatatatatatatatatatattttaatttgatagtattgtgcatagagccacgtatgtttttgtgtatttgttaatggtttgaatataaacactatatggcagtgtctttccaccttgggtcccagggaagttttgtggaggagctcaggacactaatacaccaggtagaacacaaggtcatttgctaactagcttggaaactggatgaggtcatagcagtgcttgattgcgtggaattgtgctgagttggtgttgacatgtgctttggggcttttacaccagttcctttcaatggtttgcaaggaagccacagctggtggtatctgagttgacttgacagaacactgtcttgaagacaatggcttactccaggagacccacaggtatgaccttctaggaagctccagttcgatgggcccaattcttacaaacatgtggttaatgccatggacagaagaaggcagcaggtggcagaatggggtgcatgaaggtttctgaaaattaacactgcttgtgtttttaactcaatattttccatgaaaatgcaacaacatgtataatatttttaattaaataaaaatctgtggtggtcgtttt

SEQ ID NO: 519403 - DNA, 400 bp, Homo sapiens
gatggtcctcagctcactgggctcttgcaagtgagctgagagaacaaagtagaaaccataacctttggccaggcatggtggctcacgcctgtggtcccagcacttttggaagctgaggaccatcgttgcaacgatggtcctcagctcgaggcccccgatggtcctcagctacttttcagaaacccagacccccaccaaatggattcacacagacgtcagataagggggaacaccagggactaaactctgacctccattctctgctctcagtttcttcctgaggggcctggccagaccttaatgttcctttctgcggaccccaagtttttagacaaagctttgcttccttaaccaatcacaaatcagggagtctttgaatccaccataacctgtaagcccg

SEQ ID NO: 519404 - DNA, 1028 bp, Homo sapiens
  misc_feature (1000)..(1000): n is a, c, g, or t
ggccgggtgctgcctgattccggatctcattgccactgcgccgccctggaacgatcgcccgacgtgctagttcccgagttccattattggttccaagtcactagaatatggtaactcatagatacggctcatgctgattttagtacaatcttcgtaagagggaacgaacgatgacctcgccctagaaggtaagagacttacatgctatgtccgagggtacgagtcgctggattcggcattggtcctgtgccaatcgacgtagtccttagatgaacggactatgcgctaggaatgagccgtatgccccatagtgctggatggtcatacgtaaggacctagaattgaaagtggacggagagtgattcgtgagtcatctcaaccatgggcctaaggccgtgttttcccttagaagcacctagaagtactcgtcgtctggcagaacgacgtatacagtggtaaccctgcacaagctcccagaagctcgtgatccatatattcgagtgtactgtggtgcaaacgtcatgcaaaggaacgaaatgcaaaagcgcgctcctctagatgtagcgtaccatggcagctgaaacgttgcatggcattccttctgaactattcgatcacttgcgctaagtcgatatggctagaacagtcaccagtgccccgtagaacctgctaaaaggtctgcggtatatttggatctctccatacaagtcccaaggatgcgaattatttcgtttagaccccttaacgttgtgggtccggtggcaaaagcaataaacgggtgaggtcatcactaccgcgaaacacacaacgcggtggtctcaactacttggaaacgcgccggggattgaccagaattacgtggcggaatttcacagtagcgcccggaatgttcccaggtggaaacccataacagtgggggaggggaacaaccgggtcttagggcggaaggcgtatccatcgcccaacttctaattggccctgggtcaaatgagaaggtagngccggtcccatttgcagggctgaaaaac

SEQ ID NO: 519405 - DNA, 1297 bp, Homo sapiens
tataagggggggcccttttttcacaacggggcccacaacccagtgtctccaggttaaccccgtggggtgcctctccccccctctctcccgcgggaagacaccaaaacctcttcatactctctctcaaagtgtggggggacaaaaagaggggaaggggggggccacaacacccctcttttttcaaaaaaaaaacaaaaataaaaacaaacaaaaaaaaaaaaaaaaaaataaacaaaaacatataaaataaaactatcaaaaatcaatattaacataaaaatacaatcaaataaatactacaataacacagatcaatataatatacactcaaaaatcagccctcccccaaaaaaagaaatagaaataagaatccagtaaggcaactactttatacaatatcagcacactatcaaacaaaacagaaataaatcctagctttctactcatttcctactcatcggtctgtgtggctacacttcttatccttgtcaattagtatataaaagaaacatcttttattaatacacaaacaaataatgaacacatatattaatgctattctattttcgttcatacaacaaaataaataaaattatttaaaaaaccacaaactaataaacaaaataacaactaaataaaaaaataaaccactaacaagaaaataaaaaatataaaatgatagaaacaataggggtcacgagaagtaaaaacctacttctaggatcagatagcgggtatctacgtattagtaaaaaagagagtagcgaacaatgcatctgcaagactaggacagagaaagaagtataatgtgataagtgtgaagagtaaaacgagaaaaaggactggagacggaaacaacaacgtacaaggacagaaagggaagcagaagaggatacagtagcgagcgtgtcatggagagagctaggaaacagaggcagacaagaggagagagaaaaaacaggaaaacaagagaaagtgcgaagaacgccacgaacagacgaccacacgaaggaaccgcaggagcgaagcaaaagcggaagacggagcagagagccaagagaagaggggaaagcgcacggaagcgcacgacctgacaagaaacagcacacaaaacagaaaggcaacatcacgggcgagagaagccagcaacgctcagccagacaagagcgagagcgaagagaagcaagacgagatcgagcaagtacgggacggcaggagaaacgccgaatagaagcagaaaaaagaagatagagcaacaagagcagagagaaaaagaaaagaatgaaacacgaagaga

SEQ ID NO: 519406 - DNA, 463 bp, Homo sapiens
ttccagtggggacggaatgacgccgtcaactggttagaccacgagtagtggttataagcggagtagtaaggctataaagcaagtggctttctaattattctgtaagatatatatgtgtgatgtgctttctgtccgagaattacctcactataaaaaagtataaaaaaaaaaaaaactacttctaaaggtcatatgacttactctggaataaagtatggctatgttggccactgatactttgcagcagaaatggagcaaatcaaggtgataaatgaggctggtaaaatatgaccacacacgatgtgaggctagtaaaacatagcctcacatgatgctacatttggcggctaaaaattccctacattgggggaatcagataaatattcaatttttttgaatttctaggtgggtccattacaagcatgctttctggcaaagaggaattcccagatggaggtatatg

SEQ ID NO: 519407 - DNA, 149 bp, Homo sapiens
atgcgtggccggcacgtgacagctggctgctcgtggtgtacaggtccccgaagtcatcctgtctgggtggcaagtatctggcggtcacgccctgcccgctttggctccaggccacactgagtggctcctgggagaagaagccctgaacc

SEQ ID NO: 519408 - DNA, 121 bp, Homo sapiens
cgtgacctcactcagatggccgacgagatgaggcggaacctggagctgaaagagaagggcagacacgtagagctgggcgccatcgagaacaagctggagagcacaggcaattcacctacga

SEQ ID NO: 519409 - DNA, 1974 bp, Homo sapiens
gggcaccatcgtaccgtatcgtgatacattctgcttaacgaggcatgctgccgaggggccagaagcactacatcatcgaccagtgtgtaccgagccaatggaccaacaccggtgaggactctacgaggacctacgcttgcgagtgagatacctcgtggccaggactgtatgcttatgtagattgacgtgtgaggtattcgcacgacctatgagactcaatgcagagactaaggacgaatgcaagactggagtcaatcagtcgcagacagacgtggactgcgcctctcaagaggctgactcggaccgtagcgcgctactgaggccgctcagcctgcagagagacacctctgaagacagtccgataacgtcggttgactacatccagtctagagtcattggatcactctgctagcgaccaagtcaacaagtagccgaaccaccactcaacgtgacttctcgtaacgtgatttcgacatgcgtattatgtaccacacaaagcgcattgacacgaaggagggagcatatgtcactacagacaactctaccagatagttggttgctcgcaacctgggagcgcctcttcgagaatggcgtacgaccttgggcgacgtccgtcccatgtgccacttgatccgtagatgactcgagcgctgagtaccgcgacagtgagcagtgcaccgtgcaggtatgcctagcgggctagtgagtgcacctagcgcctagaattgggcttgcgaagcataacccgccggcccagcccagccaaatcacatcacgacacgaaacagcagtagtcgcactaacctacaccacaagcaaacaccagcgtacgacactgcaccagccaacaacaaaaccacaaccaccacccgcatcacgcctaacacccacgagcaggctccacacatcccaacacagcaccaacgaccggcggacgcgtcaacaccaaccctatccggacacacaccactccaggcccacagcataaccaccaaccagcacccccacggcaccaagcaacacccgcccaggtaccagctcggagccagcgagaccaacacaccacacgcgtacgacaccagacaggacaaccggacaaacgaacgactacaccatctgacacaccaagccagaacaacacccacaatacacagagaaacaggcgaatcacaacccagagaaactcacacccccgaaccacaaacgcacgagcgacaacgcgacaacacaaccggcaataaacgccaacagacacaccacacacgcgaaccagcagcagcaaaacaccgacagagaccaagcaaaacccacgacagacgaacatgacagaggccgcacacacatgagcgcaacaacaaacacacacccagccgagacatggcgaatagacaaaagacgagcgcaacatccacaacacacacagaggcaccacaccacacacaaaaaaaacgcaggaaaagcacgcaaacatccaacacaagcacggccgcacacaacaaccagaccaacaggacacacaatcacaatctccctcaccacacactgtctaaatcacactcatcacccagacgacaaccccaaacaaaaacaacagtaacacaaacaacatatacaactaaaccaataacacacagactccatacagacagcgactatacaaccactcaacatatcaatcacttacaaagtagctacaacatagtccccctataattcgtacacaaacatcacaaatcaatacatactataacaacaccaaacaaacttcaagcacaccactaacataaccaccacccctctcaaccataccacaactaatacatacaccacataataacacacacacccactaaatcaaccaccataccaacacaccatcaaacacaacaaagcatccaactaacacacacatacaaataagacaacaccactatcccctcaactccatcacctacgtacacacaactcccttac

SEQ ID NO: 519410 - DNA, 153 bp, Homo sapiens
gtccttgtctctgcgctcctccttcctctggggctgggtgtcttctcccatagctatgtcctttgaggcagcttgcgggctacccacatggctttgcctttcttcccatgtcacccttgctcacggtcgccactgctccgtggtccgcagttg

SEQ ID NO: 519411 - DNA, 422 bp, Homo sapiens
  misc_feature (235)..(235): n is a, c, g, or t
cactcgtgagctggcacagaaaaagcagccgcatgccaagcgcagggctgtgtggcttcgtggcagcagaggctgcgtctgcctgcagtgaggaggggctccggctgtgccctcaggagcaaagtgctggtgagcccgtgcggtgctgatggctgcagaaagccaaacagtcacgctgaccggacagttccgccggggcagcctggggacgagatcatgatgacgacagtcccangtgatcctcaacgtcaggtcacaggcacttcatgaattctttcaggctggacttgtgttttcctagtgaaagccgtcttggcgttgttccacatacaagtaattattggacttttcttcaaaacatgtcatgaatatgaggcaggatttgagtattgaggcaaaataaatctatttaaattctcaaa

SEQ ID NO: 519412 - DNA, 254 bp, Homo sapiens
gagagataggggttcaccatgttggtaagctggtcttgaatcctgaccttagatagataccaactgactcggctaccagtgttgggattacaggtgtgagccattgcactccgcgcaatctatttttatgtattgtagagacgggttatcgccatgttacccagactggtcttgaactcctgacctacaagcaatctggtacgtattagcctcccaaagtgctgggattacagctgtgagccattgcactccgg

SEQ ID NO: 519413 - DNA, 353 bp, Homo sapiens
tgaaatcatgtggagctgtgaatgaaatcagccatgaaagagtgtaaactgtccagaagatactgctatgaatgagagtcagccctctgcgccctgggtaaagactgccatctcgagctgagacccagactttgttggggacatctatatgggaacatcatagagatcctgcagaaagaggatgtgaaaccatatcaagttaatggagtcaacccagcctatccagaatcccgctttccaaatatacttaagagtttcacatcctcctcctcttcatcttctgactctgcatcttcctccacagctactaagtgctgtccactaatatgcactggccctgaaccacacttcaa

SEQ ID NO: 519414 - DNA, 230 bp, Homo sapiens
ccaccagggctgcgaactcgtccgaggcgttgatggcctggatgtgttgcagggcgcggacgatgggcttgccgatgctttccaggtattcgtacagcgaattgccgatggcctgcgggtgggggaggacggaggcgggcatggcggtcatttcaatcgccatcaccgtgtcgtcggccttacgcaaacgcttgagcaccggactttgtcgctgggtgacaggcccaggc

SEQ ID NO: 519415 - DNA, 151 bp, Homo sapiens
gttctgaggctttggcagcttcgcgaattccacgtgctacctccatcgtgtgatgagggctagactatcagatacctcttgatagatgcagatataaaggtccattacacccccaggtcagcaattggctattgcaacttctaaaactagg

SEQ ID NO: 519416 - DNA, 411 bp, Homo sapiens
tgtcttctctcactgcaaggtggcggcaggagagggggaggtgctcgttcctgtacgtcatgcagcgccatcctcggcgctgcagtgacacacgctgttgccgtcggcatgactgatcatatgaccctccgtggcaccctgaagggccacaacgtctgggtaacccagatcgctactacccgggaggtccgggacacgatcctctgcgactctagagataagaccatcatcatgtggctgaccagcgatgagacccactatggaattgcacagcgtgctctgcgggggcacttccactttgttagcgatgtgagtatctcctcagatggccagtttgccctctcaagctactgggatggaaccctgcgcctctgggatctcacaacgggcaccaccacgggcgttgcgggc

SEQ ID NO: 519417 - DNA, 302 bp, Homo sapiens
  misc_feature (160)..(160): n is a, c, g, or t
  misc_feature (173)..(173): n is a, c, g, or t
  misc_feature (178)..(178): n is a, c, g, or t
  misc_feature (180)..(180): n is a, c, g, or t
  misc_feature (184)..(184): n is a, c, g, or t
  misc_feature (199)..(199): n is a, c, g, or t
  misc_feature (202)..(202): n is a, c, g, or t
  misc_feature (212)..(212): n is a, c, g, or t
  misc_feature (251)..(251): n is a, c, g, or t
  misc_feature (254)..(254): n is a, c, g, or t
  misc_feature (269)..(269): n is a, c, g, or t
ttccaaagtcaacaaaacagccagggggggggaactgttatgatcacctccacatctcagaccaaagggtttgtcttccccagcatttttttactcctgcccttttttcaaaaggttatgtggggaggtgaagggggtccatgtggaccaggggcccagntccccgggacccnggttncngganaagcccatttggaanaanagtcccttcntccccccaaatattgggcagccctgtccttaccccgggnccncccctcccttccagntatgtgtacaataatgaccaatttgtttggtta

SEQ ID NO: 519418 - DNA, 1021 bp, Homo sapiens
  misc_feature (485)..(485): n is a, c, g, or t
  misc_feature (521)..(521): n is a, c, g, or t
  misc_feature (536)..(536): n is a, c, g, or t
  misc_feature (598)..(598): n is a, c, g, or t
  misc_feature (673)..(673): n is a, c, g, or t
  misc_feature (694)..(694): n is a, c, g, or t
  misc_feature (706)..(706): n is a, c, g, or t
  misc_feature (741)..(741): n is a, c, g, or t
  misc_feature (758)..(758): n is a, c, g, or t
  misc_feature (762)..(762): n is a, c, g, or t
  misc_feature (769)..(770): n is a, c, g, or t
  misc_feature (805)..(806): n is a, c, g, or t
tataatgcctggaacctggttgggcagtaggggagggaggtaaaaggaaaagtgtgagatttctcccttttagtttttatcctattgtggcaaatatgaattctccaaccttatttgaaataaattttccactcttggaaaggtaaatttagccccaagttgttttagtctccaggaggctgccagcccccccttttatttaattttgagttttgggggccagcctaaagggaattcctttttttttttttttaaccccccaggggggtagtggggagtgagactataggccataaagaagtgggactgcttgtggaccaaaataaatgggaaaatcggtggtttgaaaagaagctttggggaagtgatgagtcatttggcaccaggtaataggggaaaatggtgtgacctccagcaaacacatgaatggttatttcctggagccggaagcactgtgggggtcggtggtaattcccaggtgtttnctggtgtccatagtttataccctttctaaacacggnccttttggaaagttnggaatatatccacattctatggaaaccttgaaactaaaaatttagactcttatcgtcatctnaagttcttcaggctactcttaacctcccaaaaagcagtatctaagtcacatacatgatgtctggggcattttctngagccatggagaactctgaanggaagaatcgcngcttttctcaagcaaatcggtttctggatgtcatngggttctccttgcctgntccngatgctnnggaccccttttatggatcagagggctctagaatannggatggtctgggatgatggataaatagggacagggacagttaaatggggagcctttcttacaaccttgatgggatttttccccccaagtttccttctccagtgaaagtggcacactaaggctggtgggattcatgaggtgggcagaccaagtgtgttgtatagaggaagtaaatttaaagcttcccttgagagaataagtgggaatgggaagaat

SEQ ID NO: 519419 - DNA, 93 bp, Homo sapiens
atcattccccgggggggttttttgccgatttttgaatgtggttttaaaaagtgaaaaatgagcctatgcgtttttataaaaaatggggcctga

SEQ ID NO: 519420 - DNA, 405 bp, Homo sapiens
tcactgctagcgacggctggctggactatgccagctccttcgacagactcatccctcttctcccgcgaagactttagtatacgttagtccagtggatttcggaggtcagtgggcatctcgtcccattacagccgcaggtgtcccatattacctccagactgtttgtgagtgagatctcggagagttgtggcagtcttgaaatggaatcgattctccattctgggccatagcttcggtggcttcgtgagcggaatgttttcctgtaccttccccgagatggtggataaacttatcttgctggacacgccgccctttctcctggaatcagatgaaatggagaacttgctgacctacaagcggagagccatagagcacgtgctgcaggtagaggcctcccaggagccc

SEQ ID NO: 519421 - DNA, 215 bp, Homo sapiens
atgatattctgatcaatggactttccagattggcgacactggttatttctacttacagccggggtgagaaaaatgagcaattctgagctggcataactctggtcaataattctaacagtgggccataatcctgtggtttggccaatctacctggaaaaccaactggatgacctccttagttgggaaaagggggggaagggaaaaaaggcctggcc

SEQ ID NO: 519422 - DNA, 244 bp, Homo sapiens
  misc_feature (164)..(164): n is a, c, g, or t
gcagcaacgccccttggtggacaggatggttcggcaaagcagcctgagttatttttgttgacggaatcggtacacgctggctccatatcgtgaaatttttattaatttttttctttttccctgtggtgtcttcgtgttatctttttcctttcttcagactgccncccaaggagatgtctcttcccggtcttcttctgtcaatttagagattccctccccctctctctccagtttctccttccct

SEQ ID NO: 519423 - DNA, 1466 bp, Homo sapiens
tcttgaaaaaaaaaagggccaagaaaaaaggggagaaaccgggccatgagggggccacaaaaatataagagaaaaaaatctccctctatctgcatgtggggccacaccccaaacaagagtggagcggctctcagatgacaatgatgacattttttatttatttttatatatattttattatattgtgtgggcccctggtggagaggagataacacaacggacaaaaagaacacaccccctctctaccaccccaacacacacacagggcggcacccaaaggaggtgcgcgcccaacacacgggaggaacaacaccaagagggaaaggagactatcacacaacaggcgagacaactactgactatgagaggcgaaaggacaacagcgtaactctaggagaaaacaaaaacaaattctcttatttatattaacacaacacaaacaaacaaaaaaacaaaaacaaaaacagaggggagaaagaaacaaagaaaatccaaacacaaaaaagagagaaacacaaacaaaaaacacaacaacacaacaacaaaaatatataaatgataacaaaaagaaagagagcaccacaaactaacaaaagagacaacgaataaatactataaaaaaaaacaaaaaacaaaaagcagcagagacaaatacaacaacaaaaataataaaaaaatgagaaacaacacaaactgacaaacaacagagaaacacttacataagaaaaaagcaagaacaaaaaaaaacaataccgatatgagagataacaaacaaccatattctgcgcaaaacaaccaccaaacacaatcgaaaaacaataaaacaaaaacaaacacagaaaaaacaaaaacaaaactcacaacaaacaaacgaacaaaaaactaactcacagtaagataataaaaaaccaacaaacgacaaatacaaaacgacgacggaaactaaaaaaaaaacaaacagaaccaacaaaggaacgcacaagacaaaaacaaaaacaacaagcaaatacactaacacacacagagcgacgacaaacaaacaacacaaaacaccacacaacacgaacaagacaccaaacagacaaacacaaaaaacaaaagcacaaaacaacacaacaacacgacaaaaaccaagacaaacaaaagaaaacgcagcaaaagaaccagaaaaacaagacacaagaaaaaaacagagagacaagcagaagccagacagcaaagaacacaacaagcccaaacggaagagaaaaaagcgaaacaaagagcagcaaagaaacaaacgaaacaagaaaagaagaaaacagaagatcaacaaacgaaagaagaggcaaacaaaggccgtaaccgacaccaccaacaacaagaagaaaaagaatagcagcaaaaaaggacaaaaaagacccaacaaaacacacacagcacaaagcaaaaaaaacaaagaacaagaagcagagcaagacaatccg

SEQ ID NO: 519424 - DNA, 640 bp, Homo sapiens
  misc_feature (640)..(640): n is a, c, g, or t
ccgcgagatgctacgggacgtcatcatgtgttcacgccttcgacagctgagagacaaaaagaagccgtgctctactactgatcagatatgtaattaaagaaccaattataaagcggaagacgagtctcaaagagttgggtttctgcgtccatgtgaagcatcctcataagataatcgttatgtaccttcaggtgttagagtgtgagcgtaaccaacacctggtccagacctcatgggtagcctctgagggtaagtgactaagacttctcctctgctgtccaagcgctttggtgcagggacagcggcatcttcagccaatccagtgcaggctctccaccgaaggctggctctagactggtggtacgcacatagcatagccatggccgactcctgctgtggttctctgacgattgtgcttcttgttaatcctctgtcgttctttggtaatcgtattgattagagtaggtaactgtcttggcttgaattttgtccctttaaaactgctgtacctgtatgataaagatgcagtacctttctcttaaaaaaaaatgctattggaaagctgtgagaactgaagagaaaatttggctgtgtcagtgtgcggttatgtcatgattactagaagccctgaagttgcctn

SEQ ID NO: 519425 - DNA, 221 bp, Homo sapiens
gcacaccagtatactttcattatgttgtatatatctatattatgtatatatattatattatgtatagattctgtgtgatatattatatattatatacatattatgtatatatatattgatatatatgtgtatatatattatgaatatgtatgtatattatgtatatatgtatatatatttatattcttccatctatattcacttaagtgggtagtcacaga

SEQ ID NO: 519426 - DNA, 169 bp, Homo sapiens
atacgcagggcaactctttttttctttttcttttttctgtctgtgtgtgtgtgtgtgtgtgtgtgtgtgtgtgatcacaaatagattgcgcctgtttcttgtaaggtattatttcgtgggaattatacagggttgtgtggggcttatgcattaacccatatggttctaa

SEQ ID NO: 519427 - DNA, 1420 bp, Homo sapiens
  misc_feature (41)..(41): n is a, c, g, or t
  misc_feature (114)..(114): n is a, c, g, or t
  misc_feature (180)..(180): n is a, c, g, or t
  misc_feature (307)..(307): n is a, c, g, or t
  misc_feature (326)..(326): n is a, c, g, or t
  misc_feature (448)..(448): n is a, c, g, or t
  misc_feature (558)..(558): n is a, c, g, or t
  misc_feature (598)..(598): n is a, c, g, or t
  misc_feature (624)..(624): n is a, c, g, or t
  misc_feature (747)..(747): n is a, c, g, or t
  misc_feature (901)..(901): n is a, c, g, or t
  misc_feature (1012)..(1012): n is a, c, g, or t
  misc_feature (1382)..(1382): n is a, c, g, or t
aggtggcaggtgcagattatataagattaatatatattatnatagtggacggcgacgggttgagcttaagactggccgaacagaactactcctatcaatagtttatcatatctnatttacagcgatgtcatttctcaccgtgtcatctggttgtgattatagcattatcgacaacgtaantcagtgtgtaacacgtattgagtgagctcccagcacatagatattatcttcacagacgacttggtatcagctgtctctggtactatgcatttgtggaacatctagatctatgattgcagcgaaattngtataagaatgtgtctacnactcttcagagagcactgtgatgagtacaccgcgctgacgtggaggacttgcagagctatttgcctagtacgtgatcttatgataatagcagggaccgcaccaatgaagttgtcgggcaagngaactgtcgatcgacattgtgtgtgtgtatcgtgagaagtgagaagtcgttgatgctggtggtcgatttgtgagcactgcgttaatgtagagttcgaaacgtaggatgcnttacaccgcgcaagagaggatgtcgcgtcactgattccanagatatatttatcactcgccgacgtnacataaatagtctctaatgaagcgtcattgcgggacgagatagatctgtacgacgcatgagcccgacattacagctagtccatttcgatcgtatgctcctgcagtgaggagtggtatttctgntatgaatcatgacgtatacatatctcgatatattagcacgatcttgacggcgtatgtataatcgtacgctatagttcacatttgcacggtatgattagacagagaatacctgcggttatctgagattcatatgtgtacgtgtgtcacgcagggncaattcgttgctatttacaataatagcacacgagtcgggcttattggacgaagcacgcaaggacgcagcgcacaggacgtaatatggacgaatagagtcggatgaagtcanttctccgcgcccgcacgcgtatcacgcgccgccgtcgattgcttgattttcgtgctcgcggccatatttcattatcgccgtgttaacaatattatattgctgtatcgcccgccccccgcatcttctcctgctattcgtaccatcacatttatgacactgtctatcggttcatgtctctcgtatcgtttgcgccctgtccctctcacctcgtatcgggctccgccgagtattgatatgaatcttatcgacacgctactagataataggcgcgagatattcagccgcgagatcttgttgtgtgtgagattgaagtgtggtgagtgcgcggctatagagggtggagaggctacgtatgatgattaggcatatntgcgctctgatcatgcgtgagctgatagtgtatatgtt

SEQ ID NO: 519428 - DNA, 394 bp, Homo sapiens
gcgaggtgatgctcgcggtggaaatgaggaatgagcaggcctgggccatctgggtggggagagtgggaaggaagatcagtgaagagatatacaacctgattgaaaagcccagaccccatgtttcttttctgcccttgccataggcaagttcaagaaagagaaccattccgtgaaagagcacttcttctaccagcaggtctagcacagacccgatgtgtatcctgtagcctcaagctgtccagaaagctgccatcagccctccctgatgtggggtgccggctgtccgggctgagccaccaatgcacaagacacaccctggcccaaagtgcatcactaagagcctctcacattcttctgcttcaaacaggccccggggtaccgcctggggcattcg

SEQ ID NO: 519429 - DNA, 437 bp, Homo sapiens
  misc_feature (60)..(60): n is a, c, g, or t
  misc_feature (182)..(182): n is a, c, g, or t
ggccgttccaacaaccacagggtgggaatgtaattttgccaaaatgactgacccggtaantccacccccgggtgtccatggtccatgaaagacaaggagggacctgggagggtgtccacaggttggaggagacctaaggagatatgaggaatgaatgcccatgtgggatccccggattggancccggaacagaaaaataacattgggaagagaattggtgacattcaaatggggtcttgagtttacttgagagtcttgtaccagtgatgattccctggttttgataactgtgcaatgcatggcatgtgggttgttgacattgggggaatctggataaagagtatacaggagtttcctgtatcacttttgtaacttttctgtaagcctaaaattattaatatttcaaaataaaatgtttaaaaggcaaaaaaaaaaaa

SEQ ID NO: 519430 - DNA, 306 bp, Homo sapiens
agagtgacaactctgtgagaggctctactgcactgagatgcactcttccgagtggggcacctaagtccagtgtacaatctggtgtgcagtctatggaacttttacctgcaccttctcctggcagcatggttcaagttgaggtgtctggccagctcattctcaccaacctctccctgacctcctcgggcacctaccgctgtgtggccaccaaccagatgggccgtgcatcctgtgagctgaccctctcggtgaccgaaccctcgcaaggccgagtggccggagctctgattggggtgctcctgggcg

SEQ ID NO: 519431 - DNA, 247 bp, Homo sapiens
gtggcgtgcacttgtaatcctagctactcagaaggctgaatcagaaaattgcttgaacccagaggtggaggttacagtaagccgagattgcaccactgcactccagcctgggtgacagagcgagactctttctcaaaaaataaaaaataaaaaacatattttgaccacacgagacaccattcttcctctatgtctttatgcaagagaaatgatccatatgttcatgtcaggatttatatatgatttt

SEQ ID NO: 519432 - DNA, 163 bp, Homo sapiens
cttattccccccggcttccctggggtaatttgtaccctctttggtcagcttatccacattcctccaaccgcgatgccaaaagattgaagaacgtttctccctacttcccggccctctatctagcccatcttaccacgatttgggcccccggtcccattgggtg

SEQ ID NO: 519433 - DNA, 108 bp, Homo sapiens
tgaacattcgttccagactgtctgtaactttacagatggtgcattggttcagcagacggcttagtctggggctcatctaaactagttccagtgggacacgaatgttca

SEQ ID NO: 519434 - DNA, 126 bp, Homo sapiens
gagtgtcttcaagacttaatgttaagggtacagacaccacgccaccctagtcagtgacatgtactccagcgtttccaggaagacctgggccgaaattgaccacagcgctgcaaaatgaagacctgg

SEQ ID NO: 519435 - DNA, 1695 bp, Homo sapiens
  misc_feature (763)..(763): n is a, c, g, or t
agcgggttttagcagaggcagatagtgaggtgctggcacagatgcccacggcatgccgctggactaagcgctaagctgggcttgaggatgatagcagcacgcagggggtgtctagagccagaccaaagggtgcctggtgctgcctgacctgtggaggcagctgcgtgcttgctgacgtggacagcacacaaggcctcagtcagaccctgacaggcatccgcacctgagggcagcaaggcccatagcacaagccccaatgaggccacagagatgtgacctagagcctgactatctgaaccgcgctgccacagtggcagtgcggagcaacgatagtaaggaacgagagatgacgtgcaggacggactgagggacctggtgacactggcccaacatgatggatgggtggactggataaaaaagacctcctagaaaaagggttatccctatcatacaagtgatattccatattacacagatgatagacctgacccaatcaacactgagcatcagacacaccttattgacagtgaaagagtgcgccattggaaagggagacagagactctacaaaagtgtgcaaccccgacgagacaaggaaaagggcccagataccgtcggacgacgccggacgcagagaaccagaagcgatggatgacatccaaacggacgccaccccaagacgggggagaaaaaccaggcagcagggagaagaaacacaggcagacgagaccgactacaccccatccatacacaacaggcgaaancaaacacgaaaaaagagacgaaggcagacaagatatacttcagacaaacacaggacaatatcccacacacaagcacggtgaagcaccaacacacccttcaacgaacacgttatcgcaaacacttataaaggcaacaaccatatgggatttaccagggaccattatgggacgctacaagcagaccgacactgtgcactattgtaccaccattaggtgacaatttactggaaagtccatacagtacattcaaagcgcgcagcgtgcaagcacgcaaccacagcccgttacccatcgagcggcaagagaacatatagaggggcaaaaactattaccatacacagagaagccaatgcggccaatgcacgtggcgcgcatatcacgaagagataggccacaccagaccgctatagccggcacagcccggagacacgggaagacaacaagacagacccacagacagacagacaacaaacgacaaaagaaaccgactggcaacacgcacagcaccaacaagcagagggacacaggacgcacaggccccaacacaccacggaacttagactccgcacacacaccaatagagaatagaaaaccagacaccacagcaaggacgagaagacacacaacatgcagagacacaacgacggaccataaccgagtacagagccatacccgacacacttcgagaaccccctacacaggagcgtcacggagggacgccacacaatgcccaccctaagagcatccacagcagagaggcacaacaagagcaagagaaagcagacagcaggagaccacagagaagagaacaaaggacagacaccaagagcacacacacagccgacggcgagacagcgacgcacgacaacgcagccataggcgagccactatgaagcagacagacgcgacgccggagagacgccaccaacgcg

SEQ ID NO: 519436 - DNA, 339 bp, Homo sapiens
cgtccgcccacgcgtccgggtggagttatcaagatccacattccactcatgggttttctacaagacttgttctccctttttctttttttaaaaaaaatcctccctgcgtctttgtaaaaaatgcagattaacggagacctcactgtttgaccgatgtaataaaagggagcattgtgtcgctgctacatccccaaaaataagtctactggacttgaatggaaccagaatcaccgggacatttttggtacactactcttgttctttgaatgagtgcttcagaatcagaaatgtaagctgttctgtatcaaaactattcaagcaataaagatatattaaaga

SEQ ID NO: 519437 - DNA, 116 bp, Homo sapiens
  misc_feature (15)..(15): n is a, c, g, or t
tctagaggatcccgngtaggagaaagaaaggtgtgtcccatttgcttttaaaacccagccctgtccaaggggcagctcttccaatgcttccatgtgagtgattacagaccaggaag

SEQ ID NO: 519438 - DNA, 303 bp, Homo sapiens
gagacagcgggagacagacccgaaggcatttcacagatctttgagtctgcccctcccatcacaggccatcacaggcccacaggcctataagggcacagtgatttcaagggaggtacccaatgcacactccacaggcttgctgccctgggccaccttggaactctgctcccaaattctggtgcagtgtttcttggccactctaactggagttcaaatggcctgaggtgttaagtaagccttggcagtgtccatgtggtgctaattctgcaggcttgcagaaagcaagagctgtggaggcttgtc

SEQ ID NO: 519439 - DNA, 682 bp, Homo sapiens
  misc_feature (17)..(17): n is a, c, g, or t
tttcaggattcactctncttctgttagtcaccatcctggtaaatagagggttcgttcccaggaaggcgaataccccatcccggagacatcgcccgagttcgagagctcgacctcctcacctcttctggagctgtacatcatcttcgccctcatggctccccttacacctcccaatattacctcaccctacgcacacgcacccttcgctcacccccctgttaccatcccccctcttcctctttcccaactcccctcttccccccccacctctccccctcccctatctgcccctctccgatcctgctcccttgcttatcccgcccccttcacccctcttcccctatccctgcctcctccccattccacacccctctcgctctatcacccacccctcctctcctcctctcctcccacagctctctcccacgtccctcttctacacttcctcttcccctccacctcctcctccatccactccctctcttccccttctccttcctcctcttctacactctctttcctcctctcctcgcctcccccttcccttctataccccctctcattccttccctcctccccccctgccatccccgactcactcctctctcctccttcccccctccccccctcctctactactctaccacccagcccctttcctctctcttctccctcccccccg

SEQ ID NO: 519440 - DNA, 258 bp, Homo sapiens
  misc_feature (43)..(43): n is a, c, g, or t
  misc_feature (53)..(53): n is a, c, g, or t
  misc_feature (76)..(76): n is a, c, g, or t
  misc_feature (109)..(109): n is a, c, g, or t
  misc_feature (182)..(182): n is a, c, g, or t
  misc_feature (214)..(214): n is a, c, g, or t
caagaggctctcctgctgcctgtacaagcccaggatgtacaantacacgtcangccgtttcaagacccgtgcgganaggaggtgaagaaagcagagcacgtagcaaggnttgctgaagagaaggcgcgggaggcagagagcaaagctcggtacattagaagtacgcctaggtggagacctcncgcgggactccagggtgatgttgcgacaggtncagaacagagccatcactctgcgcagagatgccgatgtcaagaa

SEQ ID NO: 519441 - DNA, 102 bp, Homo sapiens
acgtgatggggggccacaaacgatgtcaactatgctgcacccttgctcccatcactgctaccagcacggtaggatcagcacagaaacgctcacaatgtcacg

SEQ ID NO: 519442 - DNA, 281 bp, Homo sapiens
agacagctcacaggacatgcagtcacagtagcgggagcaatcacaaaactgtaatttacttaccaaatctactatcctcatccgtacgcctcgcctgcctagaacttagacgaaagacaagcaataattatatacaggcattttgcaggtgtctcttatgggttctttctagtttgaaacggatatttgtcgcaaaaaaagagcacaaccgttttaaataaactccccctggaaaaaaacccacaacactggcatctgagtaggaaataaacaatacatat

SEQ ID NO: 519443 - DNA, 352 bp, Homo sapiens
tcgttcttgagtataccccgtgctccaccgcacccttagctggggatcacctcacgaagtgtcatctctctctgatcacgcattccctctcagtcatctcagactgtcatatcgtttgacgctggggccgataggcctgtgaggaaaggtgttctgcctgtcattagctctggcgctcgtcggcacctgctgaaacgcccccacctgacagccccctcctcaaagactgtcttaattactcttggcccgttctagagacttcaggggaaaagctgctttcaaggccacccacatgtctgtgctccccatccagctctatctgccttgtgttcatttagttatttcgtgccgt

SEQ ID NO: 519444 - DNA, 94 bp, Homo sapiens
gcgatcgacgcagagcgacggatggcagtaagtgaaagcaagaaacagcgacgaaacggactcagaggacgggtgagaaagcagcacctcgctc

SEQ ID NO: 519445 - DNA, 253 bp, Homo sapiens
ggggtttttggggggttttcccccccaccccttccacctttttttgggtttttggttttggagggcccccccggccttttttccctggccggtccccgggggccggttcccgcttttctggatgggttttggggcccctcccccccccccccccccccttttcatccggtttgtaccctttggggccctttttggggggcccggccccggccctgggaaggttttttggtcccttaaggccgggggttttcca

SEQ ID NO: 519446 - DNA, 113 bp, Homo sapiens
tcgtaggtggaattccaggacacggaatgtacctacttctccacaccgctgctgcttgggaaaaagggcatcgagaagaactggggcatcggcaaagtctcctcttttgagga

SEQ ID NO: 519447 - DNA, 174 bp, Homo sapiens
gagcaaacgccacagatggtagcacaacccacagcaggagagagttagacaggaatcctactgtaatctattatgtgactatgatgtatagatgaacacctttaatataatgatgacaggatgttcccatatgcatggctgtatcaatttaaacaatctagatacaatgggcat

SEQ ID NO: 519448 - DNA, 153 bp, Homo sapiens
tgcttgcgtatcccacggtctatgacaccgttgttccctagtgaccacatgtggaaacaggctgctgtctgttgatgggtgcatagaccaacaatagtgtccgtacataccatggcagtattactcagtctggaaaaaggaaggacattctga

SEQ ID NO: 519449 - DNA, 217 bp, Homo sapiens
cgtgatggtgggcatgatcgagagaattgcacaaaagagcgataggccgcatcatccccaccatcatagccgaccatcaccctcgcgttaagccgctagcgttctacctacgccgtaatctactccacctcgaatcacactactccccatatctgacaacgtagagatgaaatgacagttgtgaacatacaaaacccgaccccattcctccccacac

SEQ ID NO: 519450 - DNA, 670 bp, Homo sapiens
tgatggagaacacagaggactggcggccgcggccgtggtacaggccagatcgcggttccgttccgcatcctatcccagctcacaggcaccgagttcatgcaagacccggatgaggagcacctgaagaaatcaagccaggtgccacaggacgagaagccccagccccagcctcatctacacgcccagtgagccctgtgcctggccctagcggaccccagcacctaccagcgcgacgccagcgcctgggctgtggagccctgcgtatgcctgagcagcatatgccaccggacaagaacgaggacaagcagatgctgatcccgggcatcaagtagcagacctagacgcattgccacactgcatagctgcaaggagccatgaaagcatcacatttggtgcagggcagcgtgccgtgtcagggggaatgcaccagggtaagggggtgtatgtcatatacagacgggcgaagcgacctcaacctgatgtttttcaacccagatgtcaaccatatggatcaataccgaggggcgctgcattaccaatggatatgtccgcaatgatgaccaacagcaggataacctatcacggtgtcgaaggataatgaagatgaagacccaagtgttggtagaagggtccttaggtaaaagggaataggataaatatgagaacaact

SEQ ID NO: 519451 - DNA, 106 bp, Homo sapiens
tcattgcaggataaactgccactaacaaaaaggaatgatctgatttagaacaaggatattcgttgtggcaaattaacatttgccttcttccttcctttataaattt

SEQ ID NO: 519452 - DNA, 105 bp, Homo sapiens
atcgatcaggactggtgacctgggagatcggctagcgggactggttccagctccttcatgagaactccaaagcagaaatggctcagacagcagtgtagccgggcc

SEQ ID NO: 519453 - DNA, 362 bp, Homo sapiens
  misc_feature (203)..(203): n is a, c, g, or t
aaggatctcactcgtgatcactgccagctccagatgctggatacaggtgtaacactgtgccggcgaagtcagtttaacatttaagttacttcccattggaggtgttgctccctttcaagcacttccaaggaaagcacttgccataaagtctgttaagcagattggcgggttggaatttagtgggggcatcagatgctgctganttgtattctcacattctttctcctgttgtgaggggaagagagtgtggaagaggggtggtggagtgttggcactttgaaccattacagtttcaccctaggcagtaactccctgagctgttttattctccaaagtgggaatatctggttagggatagctgt

SEQ ID NO: 519454 - DNA, 630 bp, Homo sapiens
  misc_feature (3)..(3): n is a, c, g, or t
  misc_feature (10)..(10): n is a, c, g, or t
  misc_feature (14)..(14): n is a, c, g, or t
  misc_feature (16)..(16): n is a, c, g, or t
  misc_feature (18)..(18): n is a, c, g, or t
  misc_feature (22)..(22): n is a, c, g, or t
  misc_feature (28)..(28): n is a, c, g, or t
  misc_feature (30)..(30): n is a, c, g, or t
  misc_feature (63)..(64): n is a, c, g, or t
  misc_feature (69)..(69): n is a, c, g, or t
  misc_feature (72)..(72): n is a, c, g, or t
  misc_feature (77)..(77): n is a, c, g, or t
  misc_feature (120)..(120): n is a, c, g, or t
  misc_feature (125)..(126): n is a, c, g, or t
  misc_feature (134)..(135): n is a, c, g, or t
  misc_feature (140)..(140): n is a, c, g, or t
  misc_feature (148)..(148): n is a, c, g, or t
  misc_feature (155)..(155): n is a, c, g, or t
  misc_feature (172)..(174): n is a, c, g, or t
  misc_feature (181)..(181): n is a, c, g, or t
  misc_feature (188)..(188): n is a, c, g, or t
  misc_feature (193)..(193): n is a, c, g, or t
  misc_feature (195)..(195): n is a, c, g, or t
  misc_feature (197)..(197): n is a, c, g, or t
  misc_feature (210)..(211): n is a, c, g, or t
  misc_feature (223)..(223): n is a, c, g, or t
  misc_feature (226)..(226): n is a, c, g, or t
  misc_feature (232)..(233): n is a, c, g, or t
  misc_feature (236)..(236): n is a, c, g, or t
  misc_feature (238)..(239): n is a, c, g, or t
  misc_feature (241)..(242): n is a, c, g, or t
  misc_feature (244)..(244): n is a, c, g, or t
  misc_feature (247)..(248): n is a, c, g, or t
  misc_feature (260)..(260): n is a, c, g, or t
  misc_feature (267)..(267): n is a, c, g, or t
  misc_feature (273)..(273): n is a, c, g, or t
  misc_feature (285)..(285): n is a, c, g, or t
  misc_feature (297)..(297): n is a, c, g, or t
  misc_feature (318)..(319): n is a, c, g, or t
  misc_feature (337)..(337): n is a, c, g, or t
  misc_feature (352)..(352): n is a, c, g, or t
  misc_feature (370)..(371): n is a, c, g, or t
  misc_feature (374)..(374): n is a, c, g, or t
  misc_feature (395)..(395): n is a, c, g, or t
  misc_feature (402)..(402): n is a, c, g, or t
  misc_feature (415)..(416): n is a, c, g, or t
  misc_feature (431)..(432): n is a, c, g, or t
  misc_feature (437)..(437): n is a, c, g, or t
  misc_feature (440)..(440): n is a, c, g, or t
  misc_feature (442)..(442): n is a, c, g, or t
  misc_feature (447)..(447): n is a, c, g, or t
  misc_feature (462)..(462): n is a, c, g, or t
  misc_feature (465)..(465): n is a, c, g, or t
  misc_feature (472)..(472): n is a, c, g, or t
  misc_feature (475)..(475): n is a, c, g, or t
  misc_feature (483)..(483): n is a, c, g, or t
  misc_feature (491)..(491): n is a, c, g, or t
  misc_feature (495)..(495): n is a, c, g, or t
  misc_feature (510)..(510): n is a, c, g, or t
  misc_feature (513)..(513): n is a, c, g, or t
  misc_feature (516)..(516): n is a, c, g, or t
  misc_feature (528)..(528): n is a, c, g, or t
  misc_feature (537)..(537): n is a, c, g, or t
  misc_feature (554)..(554): n is a, c, g, or t
  misc_feature (615)..(615): n is a, c, g, or t
tgnatggtcnaaanangngggnaatttnanaaaaaaaaaatttggttcaaaaaattccacccnnaattnttnaaaantttccgtaaaaaaaaaaaaaaaaaaaaaaaaaaaaaaaaaaanaaaannaaaaaaannaaacnaaaaaggnccccttnaaaaaaaaaaaaaaaannnaaaaaanaaaaaanttttnananaaaaaaaaaaaanncgactgtaaaanctnaaaaannaanannannanaannaaacaaaaaaanaaaaaanaatttnaaaaaaaccacnctggggaaaaanggagccatttttttcaaaaannggcccaaaacacaaaacngcccaaatgtccaanagccccaggggtttgggnngcncagtattaaggggggagaggngaccganagcctgtttgaannaggcttgtgagcccnncccanctnanaactncaaaaagcttccccnccnaaacatnccnccgtttancaaaaaanaccnctttacgctatttanaantcnccttttggccanattttgaanaacaaaaaacaaaaaantccgcagatttgagtgagattaggaaagaaatgctttcttaagtaacttttttttttttcngtgaagaatgaattc

SEQ ID NO: 519455 - DNA, 236 bp, Homo sapiens
taattctcaggcacacccttagaacaaagctacgccaaaatccgtttcactatcatattcatcggcgtaaatcgaactttctttccacaacactttctcggccatatccggaatggcccgacgttactcggactaccccgagtgcatacaccacatgaagcgtcctatcatgtgtaaggctcattcatttctctaacagcagtaatagttaataattttcatgataagtgtgatag

SEQ ID NO: 519456 - DNA, 578 bp, Homo sapiens
  misc_feature (67)..(67): n is a, c, g, or t
  misc_feature (224)..(224): n is a, c, g, or t
ttccctcccaccgggtccttgggcgggcaaaagtcataagccaaacaggcatgtgccaggaacaggntccatttggggcagtcctgacccctataaaagcgggtattgataaacctcccaacccaacctcattcactaggatgagaggcagtctctcacttaaagattctcacagcctaaagcataaatgtccccccccccattggcttcaaatgctttcttgnaaaagctcttctttccataaataaacttactttaaaaacaaagttgacctgcatctattcgaaacaagaattagcttagatctcaaactcaatccctgcaggctgtcattatccagcgggtcgttgagtaaaggcaccatatttgtggctttggacaaatccaattccctcctttaagggaaagagtttaaatcatccaggccccggcacattaccacaccaatgataaattcggcagctttctggctccgtttaaattaagcccagtcttcaagtacttgttagccacccttaaaaggtccaaagcttaattttttgctccttaaacccaaaaaatcttccagccgggggtca

SEQ ID NO: 519457 - DNA, 126 bp, Homo sapiens
acgcgacgggttgcgacctacgtcctgaccctgagcgctgccgccgggtcgccgagctcgcggtcaaccacgcccggctgcgccacatcccggtgcacgagcgccgcatcgcgatcatgctcagcg

SEQ ID NO: 519458 - DNA, 487 bp, Homo sapiens
  misc_feature (102)..(102): n is a, c, g, or t
tcagagggcgtccatctcagtgcagagtcaggcggctgcttcatcgctaccgcggtgtcacgctgatgcagtggcccctctggctgccctgttcttcttcantgctgttgctgcttggtctcgacagccagtttgtaggtgtggagggcttcatcaccggactcctcgacctcctcccggactcctactacttccgtttccaaagggagatctctgtggtcctctgttgtgccctctgctttgtcatcgatctctccatggtgactgatggcgggatgtacgtcttccagctgtttgactactactcgtgccagcggcacccaccctgctctggcaggccttttgggagtgcgtggtggtggcctgggtgtacggggctgaccgcttcatggacgacattgcctgtatgatcgggtaccgaccttgcccctggatgaaatggtgctggtccttcttcaccccgctggtctgcatgggcatcttcatc

SEQ ID NO: 519459 - DNA, 113 bp, Homo sapiens
gtctgccccccagggaatgccggcactatgttgagaggctgctgttacctgaccatcccgccccaggcaaccccatctattttgaggggctgctgttacctaagcagtcaccc

SEQ ID NO: 519460 - DNA, 141 bp, Homo sapiens
ccttttagtgatgggcgattcaggccatgtcatagggcctttcagaacaaaaggttcttatcccagtcagtgggccaaaacattaccttgggatttcttacccgtgctacagcatcttctagcaaaggcagggtaccgagc

SEQ ID NO: 519461 - DNA, 677 bp, Homo sapiens
tggttaccaggggtgctaccctttatgggagggggtcttaggagaaaaaaaagggtaaaaaagggaaaaagcttgaataaaaagagggccaggaccctaggggtgccagagccatagtcacggggccaaaccgccctataccacccaggccgggacaaagggtatggggctcggggggaggaatcctagggccgggggcctcaagactcaagtcggcggggcctgcaagggggctggggagaggggcaggtgtgtcctggctcataaggggaagaggctgtgaggactgtgtgggagagtgaatggccagtggagaggaggatggggcagttcttgtgccccgtggtgtccctgatgcttgcctcccaaatggcacagtccacatgctccccatggccctcaaagggagaaacgctatagtgtgggattgggcccccggaatatagaagatgaacacctgattgagatgggggtcggagcagggggctgctgagtgtgtccatggcttcacacttccctttctccagcctcctcagttccagaatttggaggaagctgtccccaggaatctgtgggccacagccatcccgaagggtgactcccaggagctccacctgttatcggggcagagaggtgccaagctcaaaatttggatccagacttgattaattctatac

SEQ ID NO: 519462 - DNA, 954 bp, Homo sapiens
  misc_feature (264)..(264): n is a, c, g, or t
  misc_feature (809)..(809): n is a, c, g, or t
aaacgatggcatcgccagcatctgaatgcaagagcctggaaaatcttcaggggctgatgtgagccaatgtgaaccaaggaccgatgttggcagagacaccggagacaagcgacacccaggcagcacgcaggctgaatcgtctggctgtgtctgcattcaactagcgtgatgcataatgttgtagaccaatgatcaccgcatgtgcatagcatgttggagaaagaaggtgcggttatagaaaagcgaattgagacaccatttaanaaggaagggatgcctatggagattctgatgacgcgaaagtgttcagcacttgtagtaatagacattgggttgtcaattttgtgggggacagatgtacacaaagatgaatgggaggtggatactgagtagtcgtcacaattgattgagaatcgtagggggtctcgagtgcaccccatactactaagtattgctaggctaggggtatcccggcgactcacttgatatagaggttggacgaagagggactaaaagaggggagacagcatgcactccacatggacggggactcgttgtatactacggatagaatggggctctaagatttccgtcttcaagggactcaaaacaaaactgcaagggatggaacacgcacttattaccaagcgtagataacgtgacacattgccagtgcatgatccctgggtgtgaggcatttcaaaatggcccaggcacttcgggtgtggtacgcttcatctgatcgagcacctgtcgtgacatgcaccttgtctacacgtcactcactgaccacctcacttggactacanaacagggcggaaatttcgcagtgtccaactaggacgttcacaaagaccattccttgagaaccattggtggtctataggacaacaggcatgcactgacatattaacactcacacattgttagactcaaagaggttccttgggtggc

SEQ ID NO: 519463 - DNA, 330 bp, Homo sapiens
  misc_feature (24)..(24): n is a, c, g, or t
  misc_feature (29)..(29): n is a, c, g, or t
  misc_feature (253)..(253): n is a, c, g, or t
  misc_feature (278)..(278): n is a, c, g, or t
  misc_feature (323)..(323): n is a, c, g, or t
gaattcggcacgagctcgtcgctntgtancaggcagtgatcagtgactgacaggcgctgatcagggaactgtgcacgcaatgatcaggtggctgatcaggaactgaccgcctgaccaggcatgcagtgatcacgtggctggtcgttcactgatcacgtgtttatcatacggtgatcacgtgactgagaggcgctgatctcgtgactttgccgtcagtgatcacgtggctgagcaggcactgatatcgtgactnagcatgcactgatcatgtgccgggngccggggaggcattccactctggacaaaggtcatgaggaagggtngtcggca

SEQ ID NO: 519464 - DNA, 161 bp, Homo sapiens
gcgctctagaggatccgaggtaatggtgatccttgggcatccagccacacctctgcctacaggttcctccaggttgacaggttggtgcctctcctccctgcgccagctgttccagctcctcagcttccaccccacccctcccagattcttacccctagaca

SEQ ID NO: 519465 - DNA, 1327 bp, Homo sapiens
  misc_feature (388)..(388): n is a, c, g, or t
  misc_feature (472)..(472): n is a, c, g, or t
  misc_feature (568)..(568): n is a, c, g, or t
  misc_feature (612)..(612): n is a, c, g, or t
  misc_feature (621)..(621): n is a, c, g, or t
  misc_feature (719)..(719): n is a, c, g, or t
  misc_feature (725)..(725): n is a, c, g, or t
  misc_feature (729)..(729): n is a, c, g, or t
  misc_feature (761)..(762): n is a, c, g, or t
  misc_feature (791)..(791): n is a, c, g, or t
  misc_feature (798)..(798): n is a, c, g, or t
  misc_feature (802)..(802): n is a, c, g, or t
  misc_feature (816)..(816): n is a, c, g, or t
  misc_feature (826)..(826): n is a, c, g, or t
  misc_feature (829)..(829): n is a, c, g, or t
  misc_feature (848)..(848): n is a, c, g, or t
  misc_feature (876)..(876): n is a, c, g, or t
  misc_feature (883)..(883): n is a, c, g, or t
  misc_feature (913)..(913): n is a, c, g, or t
  misc_feature (922)..(922): n is a, c, g, or t
  misc_feature (959)..(959): n is a, c, g, or t
  misc_feature (1038)..(1038): n is a, c, g, or t
  misc_feature (1071)..(1071): n is a, c, g, or t
  misc_feature (1085)..(1085): n is a, c, g, or t
  misc_feature (1115)..(1115): n is a, c, g, or t
  misc_feature (1134)..(1134): n is a, c, g, or t
  misc_feature (1149)..(1149): n is a, c, g, or t
  misc_feature (1151)..(1151): n is a, c, g, or t
  misc_feature (1193)..(1193): n is a, c, g, or t
  misc_feature (1249)..(1249): n is a, c, g, or t
  misc_feature (1272)..(1272): n is a, c, g, or t
  misc_feature (1289)..(1289): n is a, c, g, or t
caacacgtgtccgccggtcgttggacgtataaggtaacatgactaccccaacaacgattccctggtgatagatagtgctgtgaactggcatcttgcacagtcgcaacagttctgtggcaaggacatgcttagtaccatgatttggtaatatgctcgtgacttcgaggcaacactgctgaccatgccatgtgtaactatgcgatatgccaattctcggaatggggcgcagaagtggcacagtggagtagacaatggaccatttagaggtgtgagggtatgactcgtattcacctatccaatcgaactcggttcgggatctcaagttgagcgaccatgtgtggagaccttttgcgccaaagtccacttgtccgcctccacaggagcaaanttgatatcctgtgaagcaccctttgtgaaaccaccccaccatgaattccatatcgcaattgacattcgttctcgagctaagccntagatgcaaacacaataatcgtcttgcttcgatgcgttcacttaatcgcggatctccccattagaggaccacccctggtgtatctcctaagcaaanagagcggagcacatgaagacgagtggccaatccgctcccatatncctagaacntaactgtgtcactccgtgattggtgtccgatccgttatcttgcaaccaaaattctgggccagagatgcgcatagaaatccgagtaattgaaggccgantcccgnatgnatatacgcgacccgcccgataccattgcatgnncaaaaaagctgtgtgtttcgccagtagcntctaatngttngtctaccaggttgntctattcccnacncgcggggtcttatacctgntcgtggtcctattacaccaaccaaaggntctccangtgcagttcggcgttgccggtggacctacntcaagaagntcatctgaaggaggaagtttaccactccctcctagangcggtggacttgccaactagcggaaaacctcggttaccttacactaccgaacagttgtaaggaatctccattcgggcgncggaaaaacgagaaacatgtttacaccaaaaancgagccttccgcgnaatcggtcctacgttccggttgacattatngtaaccacgcgggacagancgtggtcccgccccnanagatgttatgtgtgctccaaaacgcaaagattcggccgaaanggtgtacagtaaggacgctcctttacggaagaagttctcgaaatactcctaccagnagcggaaacctcagagtgagctncaatactctcctcgggnggagatgggggccatcccttcgcttttggacatctcgg

SEQ ID NO: 519466 - DNA, 231 bp, Homo sapiens
tgtggccccctgtccccaagacacttccccttgtttcggtggttgcctttcttgccccttgtcctgaagcccagcgacccaccaccggtttgggcgggtttatttcctttaacgccccagggtcacagaagggcatgggttggccgggtgggcttttggggccctctaaggtgggttttcaccccttagggcgccggcagcttccaaaaaaaatttattttcttcacggga

SEQ ID NO: 519467 - DNA, 114 bp, Homo sapiens
ctcggctctagttatgtctgtagcccaaaaccaaggcccgagaccaggtccaagcaatgaatgccaggtcagaggaggaagccctcatctgtggacctggttcttggtgctaca

SEQ ID NO: 519468 - DNA, 1147 bp, Homo sapiens
ggagccattgtggctccggccggttgcgcggtgccctcgtgaccctcagggtaggcgagggttcgagggcacgagttcgaaggccaacctggtccactgtggggttccacaaacaacacaacgaaacaaactaataacaacaaaaattgttgggggcgcggcacatggagccacttagaaaaaagcggttttaaaacaacaatggtggtggggggccggcgggggggaccccacagacaagtcgtgagagggaccagtgtgtcacaacacaggggtgttccccacaagaggaaaaccctgtgtagcacagacaaacaatgggctggggcatctgtccacacacaactataaaaaaacggccccggggggggccacacccgagacgttttcgggagacaaaaccaccaaaaaggagagagcatacagaggaggaccacaaaccgcggggggtagtcaatcaaacaccaggggggtgcacaccaaggagaggaaggccggaagaacacaaaaatattagacgcccccgcgcagtggtggtatcaatacagagaaacaaacaggaagaacgaacagcacagaagacacgagcaagacaacagaaaagtaagaaaataagaggaaagaagagaagaagggagaggaaagaagagagaggagaagaagaagggagagtaaagatggagtagaaggagaacgaaagaaagaggagagaatgggggagagaggaagaaagaagaaagggagaaagggaatagaaggagaaggatagagggaaagaagaaaaagggaatgggagaatagagaaagaggaagaagaagaaaagggaaacggagaaaaggaggggaaaaggagagaaaaagggagagaagaaagagagaggagaaagggaaaacaaagggagagacagggaagcaagcaggaggcgaggagaggaggaaagggcaagaggagagagaggtagaggaaggaggggaggacggacggaagggagaaggaaggcgagaagaaaggaaggaagcagaggagagaggacggcgaagaggagcgagagagaaggaggagtcgagggaaggaagagaggaggcacgaaagaggagggtagagagagggaggagggggacagcgaggaaggagaagggagaagag

SEQ ID NO: 519469 - DNA, 213 bp, Homo sapiens
gggtaaaggggcctttttaaggacccgggtttcccccccccaaaaaatttggggtttttttttccggggaggggccaatttttttcccccccctttttgggggccgggggggccccttccttttttttgaaagcctttttaaaaaaagggttcccccccatttcccttgggtttttttgcccggggggttaacgggcccttttttccctttta

SEQ ID NO: 519470 - DNA, 184 bp, Homo sapiens
gcacatactacaatgtctgaacctgcggttcctctcgtatgagacaggattaccatggcacaacacatcatcagatagggtaaaactaacctgtatcacagaaggatcataacccagctcacgttccctattagatgggtgaacaaaccaacgcttggtgaattctgctatcacaatgatagga

SEQ ID NO: 519471 - DNA, 339 bp, Homo sapiens
gcagctgctctgtcacctagctcgctgggctaggttccgtatgggtcaacgtaagtcctgcaatgccacctatgtccctttagcttcttgtgcacactggtgggtgcgcgtcccccggtggggcctatgagcctctgggacccggaagacgtctctgttcctgtaggcggcgagcaccggggtgcccctgccttgatccagcccatgactaagggcagagctgacccatgcctgttgggcactcacctcctccaggaacagcctgcgccgcctccagcctctgcacccgcttcctgcatggccttctcatctctcctccaggagaacgtcgtaaaatcg

SEQ ID NO: 519472 - DNA, 380 bp, Homo sapiens
gaactctgcgcgggtactagaacgtctgagcgtgagagttgagaatccctgctgtgtactagaacgtctgagcgtgagagttgagagtccctgctgtgtactagaacgtctgagcgtgagagttgacagtccctgctgtgtactagaacgtctgagcgtgagagttgagagtccctgctgtgtactagaacgtctgagcgtgagagttgagaggtccctgctgtgtactagaacgactgagcgtgagagttgagagtccctgctgtgtactagaacgtctgagcgtgagaattgagagtccctgctgtgtactaaaacgtctgagcgtgagcgatgagagtccctgcagtgtactagaacgactgcgcgagagagttgag

SEQ ID NO: 519473 - DNA, 251 bp, Homo sapiens
gtgtgctctgttgtcaggaagacaggcttgagatgagctggcgctgacatccacaccttatcatagggatggattagggtaagttatgtcatgtactctgagcctcactttcctcatggtaaaatggatataaaatacctgccagtggagggttgttgtaagtagacctggaacatgtaaagcacatagcacttaccatattttcctgtgtctttcacagatttatcatagaatccccgactcagacccat

SEQ ID NO: 519474 - DNA, 166 bp, Homo sapiens
ctctatactctagctgataaaccatccaaaaataattataaattaagcaataacaatttacactaggatcaaaaacaaatactaaacaataaatttaacaaaagaaatacaaaacttatcttatgaaaaaatatgggccaagcagtcgatcgcaaccggtagagga

SEQ ID NO: 519475 - DNA, 382 bp, Homo sapiens
tttagagacagctctgaacacagaatgatttcataatcagggacatttttgagacaggagacttcatggttccaggctttgagtgaggtggagaactcctaaaggacccacccaggagatgacactgcctgaacagataactgcccctgtcgcctcccactccactctacagcgacaccccttccacagcagtcagctgttttccaggtacaagagacacctcaccaccctggccagtttacagaccagctttcgagcccagaaatttccctgtaggaaatttgtaaggaccactggctcatggggaggaaataaatcaataaaaggaaaaaaaaatgaataatactgtttttttaaagagagaatgcaatcatccttttct

SEQ ID NO: 519476 - DNA, 445 bp, Homo sapiens
gaccaaagtcactgggtaatatgaatttttcaagctccattataatcttatgggaccactgttgtatatgtaatctgtcgttgaccaaagttttactgtgtagcacatgacttgcttagaaggaaggatcaactatgtaaataatgaaggaggaggccgggtgcattggctcacgcctgtaatcctagcactttgagaggctgaggcgggcggatcgcttgaggccaggagtttgagaccagctgggccaacatagtgaaaccctgtctctactaaaaatacaaaaaatttagccaggtgtggtggcacatgtctgtaatctcagctactcaggaggctgaggttcacttgaacccaggaggcgggggctgcagtgagctgagattgcaccactgcactccatcctgggtgacagagcgagactgtctcaaaagtcgacgcggcc

SEQ ID NO: 519477 - DNA, 614 bp, Homo sapiens
gtggagctgcggctgcgggaggcactgttccttagctccgccgcggccgtcctccgcggctcgatggactccgcttccttccctcccctcccctgcgctccgtgcctgtggtgtctacggacgctggtggtgagctgtgacgtggaatgtgtgacgaagtgatggacgtacggtgaacactgcgtgtggtgacgggtgcggaagtggtcccgtgtgcagaggtgttgatgtgcgatggggcttgcactctatgtatcctccacagcactgctagcctgcaccgttgcataccatagtgtacgtgagttgcctggctggtgcccaagaaagtgctgctgctcgtgggtgccttgccctgatcttggcccaccactggccagcattattggcaaagtggcatgaacattgccctgggtgtcctagcctggataaacatgtgacggatagcactgggggctgggtatgcggatgatgaatggccaatgtgccggctttgcaccctggcacgattgatccacaacagatggttccgtggtgtccctggttcgtgccctggtctggacccctccgcgaatcttgcggccatgcgcctctccactccccatcatacccac

SEQ ID NO: 519478 - DNA, 186 bp, Homo sapiens
ccaaggagtctgtcagcagagataattttaagagaatcagtttcctgattctcaccttccattctactctctcctaaagttgatctacttgagactccctttagctgttaggtgatagcattgtggttttaatttatgtctctaatgactaatgatgttgagcatctcttcatgtgtgtatagcca

SEQ ID NO: 519479 - DNA, 646 bp, Homo sapiens
  misc_feature (42)..(42): n is a, c, g, or t
  misc_feature (114)..(114): n is a, c, g, or t
  misc_feature (130)..(130): n is a, c, g, or t
  misc_feature (135)..(135): n is a, c, g, or t
  misc_feature (151)..(151): n is a, c, g, or t
  misc_feature (163)..(164): n is a, c, g, or t
  misc_feature (168)..(168): n is a, c, g, or t
  misc_feature (170)..(175): n is a, c, g, or t
  misc_feature (187)..(187): n is a, c, g, or t
  misc_feature (189)..(189): n is a, c, g, or t
  misc_feature (193)..(193): n is a, c, g, or t
  misc_feature (275)..(275): n is a, c, g, or t
  misc_feature (280)..(280): n is a, c, g, or t
  misc_feature (404)..(405): n is a, c, g, or t
  misc_feature (471)..(471): n is a, c, g, or t
  misc_feature (482)..(482): n is a, c, g, or t
aagctagaatttgccccgaaagctgtgctgaacagaaaccgnccagagaagaattaatggaggacacagggccctatggtcctactgtgggtggtgacttgtcctgctaccatnttgacagagcccctgnacccncatctaattggctttnttgcttattctnncccnannnnnnccacacagccananaaanactggctgctccttgatggccaggcagacccaccagcagccgagggggtagtgaagaggaaggccgcatctgttgtgtggtngccanaagcactcaggcatctgagtttactggtgcactgctgggaggagagttatgagatgaacattggctgtcaatctctgtgggcaggcggtttggcctctagtgggaatggctgggatttgggcgnntgcctttaggagggatacctgcatgtctagttccagtctgcactggaaagaattcaaatatgcacntggctcccttnactattttgccctatcctttgtgctcattcttactgaaatctgtcttgtcagctcaggaatgggattcccccaggaaggaaagcacttttcatgttctgggaagcccagactgttcagctttggagcagggacgtacatgtgcctcgtgaatttgcttgtaacc

SEQ ID NO: 519480 - DNA, 1182 bp, Homo sapiens
  misc_feature (2)..(3): n is a, c, g, or t
  misc_feature (15)..(15): n is a, c, g, or t
  misc_feature (17)..(17): n is a, c, g, or t
  misc_feature (245)..(245): n is a, c, g, or t
  misc_feature (349)..(349): n is a, c, g, or t
  misc_feature (482)..(482): n is a, c, g, or t
  misc_feature (592)..(592): n is a, c, g, or t
  misc_feature (627)..(627): n is a, c, g, or t
  misc_feature (633)..(633): n is a, c, g, or t
  misc_feature (657)..(657): n is a, c, g, or t
  misc_feature (719)..(719): n is a, c, g, or t
  misc_feature (754)..(754): n is a, c, g, or t
  misc_feature (758)..(758): n is a, c, g, or t
  misc_feature (775)..(775): n is a, c, g, or t
  misc_feature (815)..(815): n is a, c, g, or t
  misc_feature (864)..(864): n is a, c, g, or t
  misc_feature (911)..(911): n is a, c, g, or t
  misc_feature (920)..(920): n is a, c, g, or t
  misc_feature (924)..(924): n is a, c, g, or t
  misc_feature (929)..(929): n is a, c, g, or t
  misc_feature (1021)..(1021): n is a, c, g, or t
  misc_feature (1060)..(1060): n is a, c, g, or t
  misc_feature (1066)..(1066): n is a, c, g, or t
  misc_feature (1071)..(1071): n is a, c, g, or t
  misc_feature (1094)..(1094): n is a, c, g, or t
  misc_feature (1155)..(1155): n is a, c, g, or t
tnngacggccccgcnangcggcagagatagttgacggtatatctgtgagtgcgtggagatacaaagaggtagatggaattatgatagcaagatgtcaagaaagaatggtagagacggacaagacgcgaaccaccagactggagcgcaggcgacagatggcgtatatgtcatggcggcaaacacgcgacacatacaaccagcacatcacggcaagacacacaactacacacagaacaaaccacatntctccccctcgccccctccacgcgccgccgtctcccgccgcccaccacacaaccacacgcccgccgtccgcgaaccctgaacatgccacccgcagccgaagtcncgacatggaaacagcagtagcagatcacacaatctcctaacaagcaattaaacatccgctattccagtccgaatagtatagcacactaccgccacagcagaggtagaaccatggagctagcagatatgcgagntaagagtgctcaacgccgcataaacgcattataccagagatgtacggtacacacaaccctctacccgacacgcgcacgcacaaggcgcacgcgcgcgctcgccgctgcgngtggcgacttcaagcgtcgcgtagcgcgcaacgtnatgtcnctacgtatgctacgccttcccctncgcgctagcacacgcatctctgtcgcctcacaacgtctacgtgcgctcctacccctccgccntccccacgccaccgcaccaacctcactcgcgcgtntacnctatgtcccatcagaanaccaccatgacagtctatgcgatgtgtgtcacattacgtntcagattgcacttaagaatgatgacacacgacacgaggagcacacgtgnacgagccaggacgcacgatgtaaacagtagaatgcatgacactcgcntcgcacgantctntccanactatatcgacgcgcgtatcagactacacacgctacgtccgacccactgtgatcgcgatttagcgtacagtataattactacagaggcgacntcgaagagactcgcgcgtgtagagcatctagtgtgaatntgtggnattcngtagtacgcgtctactacgagtntagacgtgatacaccagatgttctttgtatatgttccttgtctgctgcactcgttcgacanctctacatccatcgtggcatcgcacgc

SEQ ID NO: 519481 - DNA, 230 bp, Homo sapiens
tacccatgtcgacacgtcaggtactcactgttgtccaccaaagcttgtagtgccgctgttgtaatctatggctcattgcagccttgaacttctgggctcaagtgtatcctcccgacctcaacctccttgagtaggctgggaatacagcgcgtgcacccatcatggcctccattttttatgcagatacgggtcattgctaatattagcccagtactggcctcaacgttatt

SEQ ID NO: 519482 - DNA, 253 bp, Homo sapiens
ggggttttgtccaaaaagtttttttaaggaaaatggaggtgaaaggccttgggaaaagtcctgcccgtaaaaatgggggaaaaggcttttaggtcagggaaaggctttgaaaccatttggattttttccagccccgtttaaaacttttgccaccactggaagctctaaaaacggaaagaagggctttaccggaaaaaactatggaaaagccttccaatgggttttttttcaaaaaaaaacggggccaatatta

SEQ ID NO: 519483 - DNA, 153 bp, Homo sapiens
ggaaaagaaggcagaacggtaatcagcctcggacctcagtgtggctgatggagagaatgtatttggtgtcttgccatatcttatgcatccttacactgacactatttgtaccatgtacactgactctttcttggcaaggcaaaccatcttgcc

SEQ ID NO: 519484 - DNA, 386 bp, Homo sapiens
cacccccaacagccacctcccttcactacccgcagctcccaaccccaaaacctatcctagatccagaacaagatcaaagctgtacagggaggttggacagaaagccgggcgcagtggcttacacctgtaaccccagcactttgggaggctgaggcaggcggatgacgaggtcaggagatcaagaccatcctggctaacacggtgaaaccccgtctctactaaaaatacaaaaaattagccaggcgtggtggtgggcacctgtagtcccagctactggggaggctgaggcaggagaatggcaggaacccgggaggtggagcttgcagtgagaggagatccagccactgcactccagcctgggtgacagtgtgagacttcatctcaaa

SEQ ID NO: 519485 - DNA, 302 bp, Homo sapiens
tcagtgagatcaggcgattggttcatcctgtgtacagacgtgtgaacgcctgtctctactacaaatacaataagaatttgctgggtgtgagtgggacgcgctgtagtcccagctactcaggaggctgaggcaggagagttgcttaaacctgggaggcggagcctgcagtgagccgagatcgcacctctgcactccagcctgggtgacagagcaaggctccatcccaaaaaaacaccaatatatatatatctatgggtcttggagcaagactgccttgttccaaggtctcagtacatcacttc

SEQ ID NO: 519486 - DNA, 163 bp, Homo sapiens
gtgactttaaaaatatcttttcctattcatataccgctcagaaggattgttttacttcgaaatattttgttgtatttcgtacaatagcataacaattaaaatgcatttatgaggccaggcgcagtggttcatgcctttattcccacacttttggagggccagg

SEQ ID NO: 519487 - DNA, 1064 bp, Homo sapiens
  misc_feature (1064)..(1064): n is a, c, g, or t
ttggcttccttcctcgctacttcctaaaaagcaacaaaaaagtcttgtgaatgctgcaagattgttgcatgtgtatactgagataatctgaggcatggagagcagattcagggtgtgtgtgtgtgtgtgtgtgtgtgtgtatgtgcgtgtgcgtgcacatgtgtgcctgcgtgtaggtataggacttaaagttcctttgggcatagggaagtcacgaaggattgcttgacatcaggagactatgggggggattgtaagcagacgtctgggctttaccccacccagagaatagcccccttcgatacacatccagctggattttcaaaagcttcaaagtcttggtctgcgagtcactcttcagtttgggagctgggtctgtggctattgatcagaaggtactttcaaaagagggctttccaggctcagctcccaaacagctgttaggaccccaccccttggccttatattgtacgacgtgactcaccagacgtcggggagagagagcagcaagaccgagccacgtgctcaacatggaggaggttagcaggggcagaggacatagcacaggaagtggtaggggaaggtacacgcaaggtactgctccccaaccgctgccatcggaaagacataacagagaaagtagtaccctaaggaaaggacattaacggccgacgcaatagaccacaccaagcggcaacgcgaacagtgaggcccccgtggtacgacgctggcacctgtccagggaggagaggacagagtgcgcgagaaatcggccacatgactgagccaagcactagacaagctgggagcgacacacacaaggatcggaaagaggacaccggagacgaccaaaaagcacagagagtcaaaggggcgctagaggacacaacgaggtgtgacatgaaaacactcaacacaagtcaagagcaagaccaggcggaactagagaggaagcaaccaggagagcgcagaaaacgacgcaagaaaagagcaaagacaacgacacaaaaagacagcagcaaatggaagaacgagcataagagagtcgctagctacgaaaatgn

SEQ ID NO: 519488 - DNA, 947 bp, Homo sapiens
  misc_feature (947)..(947): n is a, c, g, or t
ggacgggagtggggccgcgcggaggaggcaagatggggcagtgggttcgtcgcggggtagtgtgggcccggggcgggggtccggggcgccggtgccgggttgtgtggggggccgcagtcccgggttagtggaccccttcagggcaggtggctttgtggcacgagttggtgctttccccggagggcgggaaaggttggtggttgcaccagggtgagtattgcttggcgcaaggggtatgcaggtcttggccggtagtctgcaatcggggtggtcgacgtgccagttagcggtgggtgttgccccccacaggtatattcgggtgggtcacacacggggggcctctcttttcttttggaccaacacaagagtattacaggagggggtcaccccgagcgcttattataaggcgtgttgtcgcccttgctgtgccacagtggtatgtgactttggatggcccaaacccgcccactgggtgtgggctttgtaccaacaacgggaagtcattgaacgctaacggaaacccggcgaaggaaacgagtagacgggtcacaacgacgggccccaattggaagagtggcggacacatgtcacatgccggaccaagagcaagatgtgtcaggattatttcccaaaaaatatatataccccaagaaggaaggttgcccaccattgcgaaaaagggggtattcgcccttgaccaaagataaatgtgcgcagaccaacgaatggagggagagaacacagtttccgcatgcacagaggactatcgtgaagcacacagcggggtggactgcagaagtttaaatacacccgatattgtggaggcattggagtgacccattaaaagtttgagttggaatgcccaacacatgcattgcaagagttgcctcggggggttgaacaaaactaacgcggaatatgatgcgtgccgtaaaaggaagtcaaan

SEQ ID NO: 519489 - DNA, 357 bp, Homo sapiens
ttcatacctactcttggtcacaaagaatgtgaatgtgatggtatttatatttagatctccctaagccacgcatggtggttcatgcctgcaatcccagcactttgggaggctgaagttaggaggattgcttgaggtgaagagtttgaccccagcctggggaacaaaggaagacgccatctctacaaaagaaaaatgtaaaaattaggtgggtgtggtggcacctatagcctgtagtcccagctactcaggagactgaggcaggagaatcgcttgagcacaggagtttgagaatacagtgagctacgatcacaccattgcactccagtttgggtgacacagcaagaccctgtctcaaag

SEQ ID NO: 519490 - DNA, 124 bp, Homo sapiens
  misc_feature (60)..(60): n is a, c, g, or t
cttgaatacaccagcggttgtgactgggtgacgttaactactgggtggtacccaaatcgncttccccatgaaagaacagagaatagtttaaattagaatcttagcttgcggcggtgtatgccgg

SEQ ID NO: 519491 - DNA, 883 bp, Homo sapiens
ggccagaggcacaaagaagccagctgcgctgtgcagagtcaatggtgatgtgggcatggggctgccggggcctatgcagggaccagctgaatgtgctgcgcatgggtgtgtgctggtgcacagacaggactgcgtgcatgtgacgcttgaatcgattggctgatgctcctgtgtgcgcccttacgatgcatgctgtgtgatggcagtgtggatggccttgaagtgcttgagaacatgccaccgtgaggcatggatgctaatgggacaactccagccacctgtccaagctggagacagagacgtcgggcatgaaggaggtcctgaagcacctacagggaaaactggagcaggaggcccgagtgctggtgtcctcggggcagacggaggtgctggagcagctgaaggccctacagatggacatcaccagcctgtacaacctcaagttccagccgcccaccctgggcccggagcctgccgcccggacccccgagggcagcccagtacacggctccgggccctccaaggacagctttggggagctgagccgggccaccatccggctgctggaggaactggaccgggaacggtgtatcctgctgaatgagattgagaaggaggagaaggagaagctctggtactactctcagctgcagggcctgtccaagcgcctggacgagctgccgcacgtggagacgttctcgatgctgatgggcctgatccggcagccgcttgagttcgaggccaggacgatccgatcgcctgatggacgagcgcatcgggaacctcggacgacactggtgcgaggggacaagattcgggacctcggactgtgagcagatgtgcaagagctgatggagggcagaaccgaggagaaaggaggcca

SEQ ID NO: 519492 - DNA, 777 bp, Homo sapiens
  misc_feature (7)..(7): n is a, c, g, or t
  misc_feature (115)..(115): n is a, c, g, or t
  misc_feature (117)..(117): n is a, c, g, or t
  misc_feature (214)..(214): n is a, c, g, or t
  misc_feature (221)..(221): n is a, c, g, or t
  misc_feature (227)..(227): n is a, c, g, or t
  misc_feature (243)..(243): n is a, c, g, or t
  misc_feature (245)..(245): n is a, c, g, or t
  misc_feature (262)..(262): n is a, c, g, or t
  misc_feature (335)..(335): n is a, c, g, or t
  misc_feature (346)..(346): n is a, c, g, or t
  misc_feature (361)..(361): n is a, c, g, or t
  misc_feature (380)..(380): n is a, c, g, or t
  misc_feature (393)..(393): n is a, c, g, or t
  misc_feature (396)..(396): n is a, c, g, or t
  misc_feature (399)..(399): n is a, c, g, or t
  misc_feature (462)..(462): n is a, c, g, or t
  misc_feature (467)..(467): n is a, c, g, or t
  misc_feature (488)..(489): n is a, c, g, or t
  misc_feature (493)..(493): n is a, c, g, or t
  misc_feature (513)..(513): n is a, c, g, or t
  misc_feature (521)..(521): n is a, c, g, or t
  misc_feature (578)..(578): n is a, c, g, or t
  misc_feature (587)..(587): n is a, c, g, or t
  misc_feature (589)..(590): n is a, c, g, or t
  misc_feature (593)..(594): n is a, c, g, or t
  misc_feature (600)..(600): n is a, c, g, or t
  misc_feature (611)..(611): n is a, c, g, or t
  misc_feature (619)..(619): n is a, c, g, or t
  misc_feature (622)..(622): n is a, c, g, or t
  misc_feature (625)..(625): n is a, c, g, or t
  misc_feature (629)..(629): n is a, c, g, or t
  misc_feature (664)..(664): n is a, c, g, or t
  misc_feature (678)..(678): n is a, c, g, or t
  misc_feature (717)..(717): n is a, c, g, or t
  misc_feature (752)..(752): n is a, c, g, or t
gcctgtncgccgctatgcctccgcgcgcgccgcctgcgcccgggccccggccgccgccccgggccgccgccgccaccgacaccgccgcgggcgcggggggcgcggggggcgcggngngcgcggggggcgcggggggcgccggcgggcccgggttccggccgctcgcgccgcgtccctggcgctggctgctgctgctggcgctgcctgccgcctnccccgcncccccnccgcgccccgtccccncncccccctgggcggtgcnagtgctgggcggcccggccgaggcggaccgcgtggcggcggcgcacgggtacctcaacttgggccagattggnaacctggaagnttactaccatttttntcacagcaaaacctttaanagatcaaccttgngtngcngaggccctcacaccttcctcagagtgggcccccaggtgaaatggctccagcaaccggaagtgnaacgncgggtgaagagacaggtgcgnngtgncccgcggccctttacttcancggccccntttggtccacatgtggacctgcattgtggcgacaagaaccgtcgctgccggtcgganatgaatgtncnngcnncgtggntagaggggctncccagggncancgntcgnggtggtccccctccttgatgatggcatagagaganatcaccctgacctnggccccaaattattgattcctacgccagctacgacgtgnacggcaatgattatgacccatctccacgatataangccagcaatgaaaataacacggaat

SEQ ID NO: 519493 - DNA, 771 bp, Homo sapiens
aagaaacatatcaaggtgcttttggcacaggtgcccacgaaatacggatgcagtgctgagatagttatatgagacttgtaccatttcaacaaatgtctggaaattgggttccatgattggcaaggctgccacagttgttaagaataatcgcctctatgtttcttcctcgactaaaatccatgatcgtcattgtatatccgagaccattacgttcactataattaggcaaggacaatatgattagcagatgaaataagaatagtattagagagaatgtgatcctattttgaacccctctccaggtatcttcacactcttgtctaactctccaggcctctctcttgaccctgagttagttcagcctgtgtggtggttaactagccgttagaaggtacgagctaagaagagtgtaacagtatcaagccctcccagttgcttaattatatcccactaggtaagtacaaaaatagctctgaatgacgcaaagatgacggattactaatgcatgtgcattgtcaggagccgacagaaagaaccttacctagggttccctctaataatcagtccttaatcctctttctatcttcaagatcccatcatcatgcgtattttcggcactatccagcgtaagcaaagattcctggaggctgtacttgtatcttcagactcacagagtgaattcagctcttctgaatccagacccagccagtctctttcattcagacctgttgctaacaaatctatatatgccacaggatataaggcaaagag

SEQ ID NO: 519494 - DNA, 138 bp, Homo sapiens
cggagacaaaggtgagtgacaacgggagtccacatacaaacatcatttaaaaatagaatgttctccatagcgctcatgagatgtcaaaggatcatcagttaagaccgtagaaatcgtcgacgtggccgcggtcgacgc

SEQ ID NO: 519495 - DNA, 1167 bp, Homo sapiens
acgcgtccggattgaggggtgactgagcgttgcgagccttagctttctcccgaactgccagcgctgaggacacgatgtcgcaggatctcccgactcactgctttgaggccgccacctgcctgtggcgtgctctgctgtgctgtccgcggacaagaacacgagccagcacccgaacgtgacgactttagcgcccatctccaacgtaaccgtcggcgccggtgacgtccctcccgctggtcaccactccggcaccagaaacctgtgaaggtcgaaacagctgcgtgtcctagtgttaatgttcagcgtcggttcaatcatcacctgctttcaggcatcagcaatgtcacacagcatgcagcagctcatcggtcccacatcaactccaaccagcttagtgcattgtccacagtggggcaccacgaccagacttctggttccgattccacggccactccagtgccaacaggcaattctacagctcacacccacagttcagacctcccttctacaagttccaagcacagttacctacatcaggtacaacaacatcacaccactgtgactccaacctcacacgctgtgcgcacagtctaccttctgatgcagccagtttcattggaggcaatcgacctggatcttagggtgtgccaggctggcacacaggcccgctggcatcacagtccggcccaactctacacgaactgacaagagccacgacctccggacacacagaccccagtggcactcccacacggcaccggctgcacccccacgacgtcactcactgcagcacacacaccacctgacagcggcccacaatggatagacggtaatgccgcggaacctaaaacttacctgagatgcaacatcgcaagtacgggagcgacacacggcgagcacacagccacatacccgcggctaccacagcgacgtccgcccccccgcgcgcagccgcgcgggccgcacagcaacccaagcaccaccgcgagcacgcaccactcgccggacccccacccccgcgcgcaccaccgaccgacgacaccacaacgcgaagcagccacagccgccgagcggcaccaccacagcgagagcccgacgccgcacagccaccgcacaccgcgccaccgcagcgcggcagcgccgacacccacccgaccacagcccacc

SEQ ID NO: 519496 - DNA, 260 bp, Homo sapiens
cacggttgtatattacacaggcttaagcataggcagctcccccggtaatgaacacatatacacagtctttctctacaactctggtcacaggctcttttttgaaccattccatgtatatatatgtgggtcacgctgctggacagcaagaaattggcacaacattgtaaatcaactctaataaaaaaaataatcaattccaggagttccctgcgtagcctagccaggacgcgtaacagccacagtttttgggtaccgagact

SEQ ID NO: 519497 - DNA, 294 bp, Homo sapiens
tcgcatatgggacagagcataggcacttagtgccccagcttatgtcgtccacttggctgatctctgtggcactatgagatagtgtgttagtgaccatcccgggaacactcctgttggtcagcacgacaacttggactcagtacactggtacttcctatcttcattggaagaaacaaagagcacctgattagggctacagcatattccactcaaatctgcatttagccagcaatccatatgaaggcacattctgtcctcagtcccagagagttacctacataatgaaccctctta

SEQ ID NO: 519498 - DNA, 313 bp, Homo sapiens
  misc_feature (7)..(7): n is a, c, g, or t
  misc_feature (11)..(11): n is a, c, g, or t
ctctagngagngtatgagaccttgcagtgagtttatcagcatattcaaaatttttttcctggaatttggagggatgggaggagggtgtggggcttacttgttgtagctctttttttttttaacaaccttaaaaaaaaaggcggttgttttaactcaaggttggtctgttttgtggaaaagaaaaaccagaactgttctgacccccctgttttaaaaatccattggaaaacaacgggggtataataaaaagtggttccccccaatgcttggggtagtaattgtggaagaaaaaaatccacctgaggaaaaaagc

SEQ ID NO: 519499 - DNA, 110 bp, Homo sapiens
gaacccggcgtccgtccagagtggaataaaacagttgcatgccaggattacccaccagatggatcataacagaagcgaatgtgctcagggcatatcccgctcacacaaag

SEQ ID NO: 519500 - DNA, 845 bp, Homo sapiens
  misc_feature (617)..(617): n is a, c, g, or t
aatttaatcagtgagcgggacacatgctcttgataacccaaaaaattgaagcatgaaatctgggagtcatacccatcacccaaatgtggcataacaatgttcttcttccccgcaaagcagtgtccttccccaaagaaattctggggatggcattttcttcatccactcctgttgcattatttcctttacctatggtctctgagtctattagcatccttggaggggggaatgtatcttatgtatgtgatatctcccaggctcacgagcatcacgtcaataaaggttgttgaatgaaacaataaatggatgcaagactaaatgaacaagagaaaagccacggggaagatagacaatgtgtatgtcgatcattcaggatcatcttgtcttctgttttttcccctccagcgtttatggaggtatactgtgacaagtaacaaaattatatatattcaaggtgtccaacaagatgtttggatatacatatacatggtgaaatgattaccagaatcaaactaattggcatgtccatgtacctcacataattacctttttgatgtgtgctggagaatacttaagattgtggtttcttagacaaattttaaagtatacaatacatnatgattaactatagtcatcatactttacaagtaagtctcagaacttacttcattctgaggcttgttattctgaacaaaataattttatttaattcccgacccatttagatggtacccattttttttaaggctctgggaaatttttttttatcccggggtaacagggaaaaaaaaaaggggcaatttaggggtcagaaagataacggttaaccgaaggggggaagggga

SEQ ID NO: 519501 - DNA, 1335 bp, Homo sapiens
ggtggaaaggccctgggcagaccctggcagaaggggcacggtggcagtggtgtgagttccccactagcagtggccaggtgatgctatggtgcttgcacctactgctcttcttgcttgctgaccccacatgggtgggcacatgctgccatgggtgctggatgcttggccctgggaacttgttcttggccaatggtgatgggccctgttcttgtgattgccttgtggtgcccccacgctggttgaccatgtggaatggttgtggtgaccctgtgatgtcatggctgtgcttgcccctgaaggacattgccctgtgtgtggtgctttcacacagcatgggggctcctgagccctgatggaacgatggatgtgactgtctcccaaggccatccattttcccatgccacatgatgccagcttgtgagggacagatgtcatgcttgccatgatggtgctgtgcccatggagggcttgacgtgatgtggccttcttcaggaatacagtgtttcctggccagtcagcgatgcagtaacaactgcatgcctgcccatgtggtgaccttcatgacaccaggcttgttgagttaccacaaacactgtgggcttgtgacatggcaggtgggcacatgcatgagcttccagataaggctcttgaagcccccttgctcaggccattgcttgggcaacttgttccaccctggtggatggaaccctgttggggtttgttgccgcattgtccttctgggcgcatggcttcccccccttcaactatggtgcctggtggcttggcacctttggggccgaccctccttggctccttcttctccttggttgagcccacccctggtcctcggtggcttgttggcttgctgcttgttccccttctggtatcttggctcaggcccgggcctgcagggctgaggccctttcttcggttggcccacacttcgggaccagagacaacccagtggtgtgggacgcaaagcgcccgagcgggctcaaagtcccctgaatggtcctggggctatgagccacccgacagcggcaggagctcagaggaggagagcctcctggagagaaacgcggctggccgagccagattgccagagtgcacgcccgagacatttcctccacagaagcttggtgtcgagaggaggcgcatggccccccgagatatatcaaagacagacgagatgagagagtgtcaacctcacagcatgcgtccacaggcgagagcacacaagacaagcaactcatggagcagcaacgtgtcaactcagacaagtcacacagaccccgagaaagaagtacacaccagcatttgtgtcgtcggactcag

SEQ ID NO: 519502 - DNA, 660 bp, Homo sapiens
  misc_feature (186)..(186): n is a, c, g, or t
  misc_feature (205)..(205): n is a, c, g, or t
tatagaaggataatacagagccaagatcaaattaaaagacaataaatggaacagaagggaggcagtgtttagctttgtataaacttttaggtttgctctgtaatctgctaaaccatatacattcttttgtgatatgttattatgtatgtggcacttgaggcactgtatgtaaagtaaggaatgctntactagttctccttgggtntatctttgtttaaactagctttaaagtattaaacaataattgaaatgaaaagcttacctattttaaaaagccaaatttaaataaatatagaactttaaaatggttatcacggtgtttcatgaaagaatttaagtttcaagtaaatttagtgaatggttacttacttttcttattttggaatacatagtaatgtaagtaaatttttaaaaattcttaagggagccacaatggacaagctaaccttaaccggcaaattttaagagaggcataattaaggtcaataaccaatatttttaaagtatatatggctcatgtgacctggaaaaactttatatggaaaatggctgtgcaagttttgagatggtaaattgggtaaaaccgatattatatatatattaggttaggaacatttatatatcacttccaagtgattaaagtccatgcattgtgccttt

SEQ ID NO: 519503 - DNA, 475 bp, Homo sapiens
ccccaaggtttgtacccaaacggagggtgcgcccggccgcggtttcacctgggaggagttcagggtggccggaatttcacaaaaagggggcccggaccatcggcttttttttggatcccagggggcggaacaattccccggggtccctgcaggcccacgtgcagcggctgaaggagtacccctccaaactcctcctcttccccagggagcccccggccccccaggagggggacagttttgctggagaacttaaactggccccccaggtggcgggccggtcatgcccctccgggacgtttttaagaagggggaagctcgggtcctccctgggggagggaagaatttcaaagccttcgcttgtctccgtttggcccgtgccaacccccggctcttcggcattcgggcaaaaagggccaagggagcccccgaaccgggttttgaaaagaaaaaataaagcccccctgggggcttggga

SEQ ID NO: 519504 - DNA, 246 bp, Homo sapiens
tggtaccacctcccttagttgtacccgggaccacctgtgtaagcacattatacttgtaagaaatatgagtctcagccaggcgcagtggctcacacctgtaatcccagaactctggaaggcagaggcaggcagatcacctcgaggtcaggagtccgaaatgagcctggccaacatagtgaaaccccacctctattaaaaatacaaaaattagctgggtgtggtggcaggcacctgtaatctcagcta

SEQ ID NO: 519505 - DNA, 124 bp, Homo sapiens
tgacttacacgaccttacacactgttacgaccctacacacacccactaacacacacccctacgacacgaaacaccctacgggggactcctctacgacgtcgaccctcgcacggcatgcaacgct

SEQ ID NO: 519506 - DNA, 1184 bp, Homo sapiens
gggcatatcctcgttcgcgtggcattcgtgagaagcgcggggcatgagcgaaacaactcatacatgacaggcaagcttgcatccagaagcatatagcaggacaagcctgtaagcgaagtagtaaattcacggcatctggattcctaatccttcaccgaaatggcaggatgtgagtgcctgtataaaatatgctagtgtcgtagccttcagacttctggttgctggctatgtggtatcttgatcctagcattagcaatatgggtacgagttagcaagtgactctcaagcaatgtaggtgctgacagatgtaggctctagctcctacgttgctgtggacatattgatgtgctgtagggtgccatcatcatgattctgggacttcctggcatgctgcggtgctataaccagaaagtcgctgcatgcttctgtcgttgtcataggcttgcttctgatcctgctcctgcaggtggcgacaggtatcctagagagactgtttcaaagatctaagtctgatcgccattgtgcaatgatgatctctattgaaaacgacaaaggcttaggagcgcaacaggggacaagtgaaaagacaattccagggaagccataatcgtgttccacagaagagttaaattgcctgcggataggacacactggaggctgctggactgggcgaaataatttcaccacttattccctgacttatgtgcctggcagatcacgccgcgtaccagtgcaagccataaatgggcaccagtttccaagaacccggattgtttattaacaacctctctgtgcaacactggcacacgcatggaacacatgtatcgggcgcatacgaaaacgcgaagcagccacagacacagatccaaaccggcacaaatcggagaacaagcagaggacaccccagacatgcagcggcaaaactacgcgtacccaaccactcaagaacagggagagagaagaagtgaaacacggagggcacgccagagaggtaagatgcagaaaaagccgcgcccaggagacgcagcggactaccatgagcatccgacgcacagctaagatggactcgtaaacacacgaacagaagacagcaacaccacggagacacacccagcggcaaggcgacggacagcacgaccaagcggaaccgaagacaaacagcaacgaaccaaccgagcaagcag

SEQ ID NO: 519507 - DNA, 122 bp, Homo sapiens
gagagagagaactgaggcagaggtcagtaaacctgccctgggccacagagcagcagatagaagggcctagacctggataccagaagctagggctactacggtccagcatacataccactagg

SEQ ID NO: 519508 - DNA, 163 bp, Homo sapiens
  misc_feature (118)..(118): n is a, c, g, or t
aactattacagtgtatagttaatctctaaatatatgtacacagtcgaatgtacacgctttgaataaattaagtaccaatttgcatattctgggtaaccttaaatgcttatttacacanaattaccatttatttcactaaataatcttgttttttgttccccgt

SEQ ID NO: 519509 - DNA, 419 bp, Homo sapiens
ccttagcgtcactgaggaccaagtgcacactcatgcccaattaagcagactcagagcccttcggggaagctttagcagttattgatctctgcctattttaactcaagttcctcttttcatgttgaggcaaaacctcacagtcttttctgagcttagccacagtttctaaataactcattcctgacacctgagcctgttcagtgccaccagaatacgaggctccccaaaataagaatctggcctgaaattttgccaagtgaagcaccgaaaggctttcattgtttcttagtttagtaactttagctcttttcctggggacttctgttctcttgtcaacaccaaagatctcatctttgttctttgcagaccaacttcatggagttggcccacgtgtcatagcccatgacagccctgtatca

SEQ ID NO: 519510 - DNA, 1105 bp, Homo sapiens
  misc_feature (231)..(231): n is a, c, g, or t
gcagcaaccagccggactctccgtatctgctgcgttcccacggacaagataggtttgcggctgtaccatggcacccccagagtccctcctgctcccgcttctccaggaccccgcagatgcaaaacaggatcgacagtgacccatcagttgagaggactgcaggcgcgtagcagctaaccactgctggagagaccacgagccgtgcacctgggagccgtgcggtatccaccntgtcgttcctggagaaccgttcgtgggtgatcatggatctgcagtcagaatacctggccatgcgttccaggcgtcgactgggagaagtccggtcgcacgctgctccgtagatagcgctccctccgagaagcccaatcacgtgggactacttggactgacttgattactttcaccctgtaccctctccctggtagaacgttttgaggaagagctgctggagactcctagcgtccaggacctacttccaggacgggatgtggtccgagctggagcggtggtgccctggagatcctggagcggcgcctgcgtgtgggcgtgcacgatggtctgggcttcgtgctgaggccgccaggtcgttgtagctggtgcctgaggatgggtgtgcgcttgacgcgctcagcgtaggttcagcaggagagtggtctcctcttccaagaccagatccgggagccaagctctggtcccgagaagccgcctccgcctcccagagatggtcggccacctgcatttgcggtcatcttccagctggagtacgtgttgcagcagtcctgcaggagttggaccggtaatgcagcttcggtcacctactctgtgcaaaactggcatgcatgcacatggtccgtgggctgtttggaaccccttgttgggacgctgattctggaatggttgaacccatgacgactgcagggtgagaattccaggcctaacccatcgcacagacagggctagaaagggaaccctcagcaagatgacatctggaagaggttgagccggggagtcccggaaacacccgcatcacataccacgggtaaaaaagacctggtgatccacataggcctgacaagggcaaaaggaagagagccccaggaacacc

SEQ ID NO: 519511 - DNA, 893 bp, Homo sapiens
gggtgggtcccaacagtggcatggagagagacaagggcagaaagagaagagagaggaagaagaaaagagcgaagcgggccggttcctccgggccacatgaaccgccatggtcgcaggaaggccccctaaccaggggccgtccgcccctccttcgagccgttccgttccgtttccggccttcagggtccgccgtaccaggtgaagcaaagggaaggtggccagcgcaaaccagggggacacaacccggaccgggggttcacgtgccgaagcgccggatgtcctccccccagatgcgctccgaacgcttggggccgcccgttcccgcccggggcccctggagaaccccccgcggcacgccacaggggacaaaagggggtcttccctaaacgcacgcgtctacagcggctacaaacaacgatgcctcgaggcacgccggaggccccacgcgacgtgtcgcctccttccgcgaagccaccccgcgccagagaagttggtgtcgtcggcgcacggcctcgcacccgcgcaatcgagaatcaccggccgcagagtcaaagtctccccgagcagcctagtgcttgtgcgaggcgtttgcactcttcacgacaggaagaagtacttgcggtgagtgcccaccacgcaccccggaaggatagcattgtcgacccccggatacaaggacaatttgagtattacgggcaccggccacaacgttctgccaagaagctgggggttccccagtgtgtcccgcgaaagacgaagagaacattcttcgagcctcgggaggcaagcagtcgagcacttggtgtccgtcgggcggaatggtgaatagtactccccccaatggggtttttaaaattccaaaaaaccaataaaaagggcgccccaacaaaaca

SEQ ID NO: 519512 - DNA, 177 bp, Homo sapiens
  misc_feature (4)..(4): n is a, c, g, or t
  misc_feature (82)..(82): n is a, c, g, or t
  misc_feature (141)..(141): n is a, c, g, or t
cctngcgaccctttagcaataaaacgcattctcactaagctatactaaccccagggttggtcaatttcgtgccagccaccgncgtcacacgatttaaccaaatcaataaaagccggcgtaaagagtgttttagatcacccnctccccgtcgacgcggcccgaattttattgtattat

SEQ ID NO: 519513 - DNA, 624 bp, Homo sapiens
gctttctattattttattttattttttgatatggaggtctcactctgtcgcccatgctggcatgcagtgagccgagagatcgcaccattgcactccagcctgggcaaaaaggagcaaaacttcacctcaaaaaaaaaaaaaaaaaattcaaaatttttccgtggcctttatcaccttccattagcccacaaggagcagtgggtaaggggttgggggagggcacaaagtgtgcaaaattagacttgttgaagagttaatagcttcaactatttaatgtgaatggtatgttgtgatggaagcagatgactaataggggtcatggataatcaagtcattacaaagcagggccctttaaggccagaagctaacaaaaaacctaggtgaccaaaaagaattgagttttccctgaacattttactcgggaaacccatagaatcctttgctgtgctctctgaggctacggctgctagaaagctttagaaaagcttttggccatgggcactgggtgagcttgtaaggggctaatagcttttccatagtcaccgaagattttttttaaaaccttaccagatttttagaatttccttttagaactcgattctggtggtctggagtagctgcgag

SEQ ID NO: 519514 - DNA, 139 bp, Homo sapiens
  misc_feature (109)..(109): n is a, c, g, or t
ctcaccacctcatgcgagatgctctcacactgcagatacaccagtgtctctgtcacaaacgtatatgctggtgtcaggaatggctacctggccaggctgtgtgtggatnggattcatggcagcctctctgctagctttt

SEQ ID NO: 519515 - DNA, 480 bp, Homo sapiens
  misc_feature (14)..(14): n is a, c, g, or t
  misc_feature (24)..(24): n is a, c, g, or t
  misc_feature (65)..(65): n is a, c, g, or t
  misc_feature (74)..(74): n is a, c, g, or t
  misc_feature (163)..(163): n is a, c, g, or t
  misc_feature (166)..(166): n is a, c, g, or t
  misc_feature (173)..(173): n is a, c, g, or t
  misc_feature (176)..(176): n is a, c, g, or t
  misc_feature (178)..(178): n is a, c, g, or t
  misc_feature (259)..(259): n is a, c, g, or t
  misc_feature (412)..(412): n is a, c, g, or t
  misc_feature (428)..(428): n is a, c, g, or t
taagggggaaaaangacttttttnaaggtttttatttttaaaaagtcattcccatttttgggttntgggaaaanacatttttaacatggttataattcacggcccttccagttaatgggcttgcccacagttttactgggaagtagagctgagatttgaagtnggntgggccntananaaacatgtttctttccctttgtgggattgagtagaaggtgcaatatttaggtatgaccacagggtggtgccaaaaatcaanacatagctgcccccacctccattggattgaaaaccaaaccaaaaacctaagcctgtaatttgggaatttggatgaggatatagggagatggctcaggagtctagaagacctggcaagtatggtgtggatggggacagaatttacttcatggtntggtgtaacctgaatntgtagacttgatgcctgttgatataattggtttttaataaatttttgatcct

SEQ ID NO: 519516 - DNA, 128 bp, Homo sapiens
  misc_feature (40)..(40): n is a, c, g, or t
ctgggtggtgttctagaggtcccaactcaggggcgagctngccatacaccacgtggggagtgccagtttctctcccagcacaacacctagacttgcttggaagaaacagagctctacagaaacaaatg

SEQ ID NO: 519517 - DNA, 197 bp, Homo sapiens
gactacaatccaagagactggagagagccatatctgacatgctaacgcaaatttataaacacagagtttggctggacctctccaattattaaatgcaagccaagctctgtggtgatacaatttgactctggctttccgagatggtaccatcaatgtccacgacgtggagacacagtacaatcagtataaaacggaag

SEQ ID NO: 519518 - DNA, 1330 bp, Homo sapiens
taagggagaaggtgctttattcggggatctgcgttaccaggctggctggggtgctggattgggaaggggattccaaggagcaagaccaagaaggtcctagggccagcctatgcctccagggacccggccgtatgatagacgcggatgtgggcggatagacgtcctggatggttctcgaaagtgtgtggtgcccgtgggcccccgagtgtccggcagtgtgtgcatttttctcagtttgtccagtggcattgtccaggatcagtcgcttacggcatgtgtgcgggtggcactagcgagttgcagtctctgcacggtgggttctcaggcttctgtgccagtcgtggcccgagtcactggggtggtccgtgtgggtgcattgcgcaaatgtgtctctttattgtggcgaattactgtcctatgtcccgggtgttcacctcggctatgacgtgttgttcacacacacccgcccgtctatcaccatgtgtggcgcaataatgttgtgacaccccagtccatagatagcgtcgctggggatccccacagacaacaaggatctccctgagtcgcaactagaacactttgtatgtgccccaggacttgatcgtgccccacattatagaaaggagttggggggccatctacacccgcatgtgacacatcgtcagatacattcgccttcggcgagccgctgtagagaaaccccagcgggctagacaattagcggtcgatgctgttgtaataatcccaccaacaccatcacattgataactcattcgacaaaaaggggtaggaaacttcctttagcatgagcggttaacaccatgggtcaattttgcaacaataccctgtgtcctccgttgcacatcctacctgtggtaactgatgacacaacatggccccatatgctgcatcccaaggagttatttacacatagcaacttcatctgaggtggcccttttggtgtggcacccgcgacgtcggtatccaaactattattcctttgtgtaccgacccacccggatgtatcttctccttggaacggccccagacgtctttgtctaaataggagctcatatactctcatcgcaggacaacaattggcagctccgggggcacatcttatggaggcaccctatactgagattacagtttagcatcctcatctctgcaagaggacgcactatacttcacccaaacccgtgtattaccccgcggcgcacaccatcaggattgccatctgaatgtatggcactccacatcgatgataattagcaattagttatacaactttccgcaccccacattagtgggatgatatattatctctacg

SEQ ID NO: 519519 - DNA, 946 bp, Homo sapiens
gagtgcagacgcaagtctttgctgtcttcttctccaaagtcacgagaggatgggagaggagcacccttggtatcctccggagatcaagagcttgagacgtgtccaatcaagtgctacaggtctcgattctgttggccatgtgtcctcgttgcacatgtgaataggcagcaagtctcaggctcactttaacactctgctcgtcccgacattcaagcagatatctccatgcctgcagcttgcccgtgaggtaatcattgggactacgagatgctccatgagcatgcactggctaagttgttagtatctttctatgatagagacagggtttcatccatgtggctcagactggtctcgaagtgctgacctcaggatagattctgcttggagatcaaaaatgctgtatatcagtagtaactgatgggagtcacggcatgggggactggacagtgggagacttagatccctggaggtggtattcgtggaataaacataggtgttaagggtgcatattagaatattctctcacaagaaagggaagaaatcgcatcctgactgtacaatgttgctgagcaatagaaggaattaagaggaggactgcggtgaattcacaaggagtaaagggaagttggtatagtatccttggataggcgaagttgcaagtccaaccgagcacagttaggtagattgcatcaaagatgagtcagccgttctcctgcggaaaaggccgtcaagcccgtgctacaaatcagataaggagatacggtcgtaccataaaaaattggaaaagtaaatcgacctcaaaagacacggtaaggaagtaccgtggggaacaaaacgataaaattataaaaccacacaggggacaaagcaaagaacgtgtcatccacagtgagtaggcgcgaagtaacagaaaataaagagcgcacgtccgtggctatcttgtctg

SEQ ID NO: 519520 - DNA, 143 bp, Homo sapiens
attcatctaaagacacaagcctaacagtagcaggtacactcacatttcagaagctgtgtcttctctgccacacctaaattggcatacattacaaacaggttgcaatactgctgtcaatgacgcccatgctctgaaacttccct

SEQ ID NO: 519521 - DNA, 118 bp, Homo sapiens
ctagctgggctgctctcctgctcaggccttacacagctccctcccttgctggtctctttctgtcttccctgctcttgtatcaaaagtgatcatgggttgctgtgtccgatcattaaca

SEQ ID NO: 519522 - DNA, 213 bp, Homo sapiens
gggcagcgcggtgcgtcacgtgtcgtgcgtgtatttgctgcagtgtgggcatgcacctgctgtggtgaatacacgtcgacctggctccatgtttgcgttctttggtggtgagcgcggtgctcatgtgtccgcggtgcttgtctagggaggcatgcaccgcagtggtgaatacacgtcgagcaggaggcatgcatgcgtgctcggtgtactgta

SEQ ID NO: 519523 - DNA, 753 bp, Homo sapiens
gggaagctgaggcaggaggatcacttgaggccagaagtttgagaccaacctgggcaacacagcaagacctcagtgccacaaaaatgaacacattagttgggcatggtggaatgcacctgtggtcccagttgcttgagcggctgaggtaggagaattggttgggcctgggaggttgagcgctgcagtgagccatgtttgggccactgcactccagcctgagtggcagtgaaaaaaaataaaagaaccatagagttgataaagtcggggttccagtccctcagtaccgtgagcctgtgttaaagggcctcaaggaagatctggaggaaactgatgatgagggaacagtgcagccttgcttacacctagatagcgtccttgtcctccctccctttttccttccttcctttccttcttttctttccttcctttcttttcttcctcccttccttccttttcttcctttcttccttccattcttcctcccttcttctcttccttcctttccttcccgccttccttttcttcctttctttctaccttccttccttttttcttttcttccttcctcccttccttttcttccctccctttctttccttctcactccctccctacctctctacctttccttgttccctcaacatttttccccaagccatttggggaaacaagttggaggcgaggaaatcatctcaagcagagtcgagagagttgcatgcggaaactgctggagatagttaaggggcgggaaat

SEQ ID NO: 519524 - DNA, 954 bp, Homo sapiens
gcagattctcttatgactaaattggtgactaaattggtggtgttgattccgcctggactcctggaattggcttggtggttgtctgccagacaattgtggaacacagctgccatcactgctgtaatcccacctaaggacagttaatccacgaaaatctccgaggaaatatgtcagacttgttctgggctcagacagtaaggtcgagcagctagccacctgactgctgctgcagttcatactgcacctggtagtgagctctcgctgttgcggacttggatatcttctgcacgagaaaacaatgttggggtcgggagtatgtgagacgagtctggctgtacttatgtcatggccattacttgtagtgacacaaatgagtgatccactgcaacttggtagaaggtgtggttcttacaataccactaagcagtggcgcacagtttgctgtcatgctggagaactcatgtacatgccatagtacacacttattttttacctgtcactggtgcctggatcagcacaggtaaaacatagcagatgagcctccggatcgtggtggccttcacaggtacattcctatcaggagagaacgatcgagacctggaactcatagcagaaaccgcgggaatgagtaacactcaaactagcagtactgtccaagactggttacttgatctggtacctgcttcaccgcgaacaggtctggacaggatctgacgatatgatgcacgacgtcaagatatgtacacgcgtttgggtgtgcttccctgctacaatgctctttacaggccgggtttggaaagcacgtagaatgcagcgacgcagcgaagttcttaacatggttctagagaactgattcagttgccggaaatcctctcccgtacaaacgtgttcccgtgctacgaccacgttattatccaggccgttaacgaagactggactcatcggagaaccatc

SEQ ID NO: 519525 - DNA, 569 bp, Homo sapiens
atggaaaagttagtggggtgtgacatagaggagagtagaatgcagacggtaacagcagcgttgaggaagcttatggtgaccgatagcagcgaggatggcctcacagtgggggtgtaagagtcggacaagttgatgaatgtgacccagctagcgtggtcgtctgcgtcttgaacattgagaaggaggaggaggatgacatcgggctgcagatgcatttcacgctgatacagtctatgtgctgtgagatagacatgaacatcgtgcgggtgtcgggcatgcagcgcatggcgcagctcatgggagagacggccgagacacagggcaccactgaggtcggagacgtgcattgtctactggtcacgaaccctcacacggacgcctggaagagtcacggcttggtggaggtggccagatactgcgaagaaagatggggcaacaaccagtgggtcccttacatctctcttcaggaacgctgaggcccttgacagcagcagaatctgttgagttgatgccacaaacaaaaaatacaataaatatttgaaccccctcccccctagcacaaacctcct

SEQ ID NO: 519526 - DNA, 796 bp, Homo sapiens
ggatgtcagattgcatctcagtgttaaatctttactgatagatgtacttaagtaaatcatgacacattctacttgtacctatagaagtgaacttgtgcgacgtacacaatggttgtgctattctggataactggcccctaggcagcatttgtctacgctacactaactggcacaaaattcatggctagctgatgctactaaaataacacatattcctttgcacggtaaacattattccctttgcctgaactgcttatcaagacaggcggggcatacacaccacacggcaacctaacaacattcgcgccaccctgcccacgatcataccttcaacttctctacgctacatctttcccctggctcatcacgcgctctccacatcactcgcactacatataaggacacagacagccactacacatgaaccacatattgctatacgactcggacacggcccactacaactttgccttgccttggaacccgtagctcgtcttctgaaccccttagtcatctatataaaaccacaccattttctttgaacttacgcaggatcaagtatttagtctatggcgaacgtggccctcggcacgccgcaccttcacacgagccagaacccctgcgcccagcttaccactgcccctcctctgacccccttgcgcaccgccttggcacaccaccccttaacccgatccctccgctgactcacacactctttgcccctacgactcatttctagcccaacccaaacgtttaaccttccacaagaataccacaaacacctctatgggcgtag

SEQ ID NO: 519527 - DNA, 478 bp, Homo sapiens
cagcctgaccaacatggtgaaaccccgtctctactaaaaatataaaaaaaatcagctgggcatggtggcacatgcctataatcccagctacttgggaggctgaggcaggagaatcacttgaacccaggaggcagaggttgcagtgagccaagatcgtgccattgcattccaagcctgggcatcaagagcgaaactccatctcaaaaaaaaaaaggtgggggaaaaaaaaaagccaggtgtgttggtgtgtgcctatagtcccaactacttgacttcctaaagtgctgggatcacaggtgtgagctactatacctggcctccttccgttttctatcataccccaaatccaattcatcagcaaatcctgtcgctcgctatcccttcaatatgtatccagggtctgaccatttctctctgtccccatcagcaacactttggaacaaattaccaccgtctcgtgtctgcctaaaaagccgaa

SEQ ID NO: 519528 - DNA, 608 bp, Homo sapiens
tatcgaatgccacactattatatgtatatatatatatatatgtatacacatgtacatgtatatacatacacgtattcatgtatatatatatacatatatatagtgtggttaagcagaaacacacatgaaacatgtttgtggataaatacagttaacaaaaatgtgacaaggggctcactggagcctaccttgtattttccttaagagcagtagctcagtatttactaattcattgtttaaaggggctttacagagcgtaactaccatgcataacaggaatcaattgtacctaccagatttttcttgactaaactgttgaaaaaattttgtctctaacaattgggaaataaattgtacctttttctgtgtgaaatgaaacttgctcataaaacaattcaaaatctagttaatgcttcttgagagagacccctttcttgatcagcaggttctctggtgagcctatatagaatcatagcaagaaagcagccaatgaagacagaactcataggcttgaaacactaattgtaatttcttaacattttcagttaatacttatggtgtgcctcggaattctgggtgcaggctgggcatagtggatcgataaacac

SEQ ID NO: 519529 - DNA, 576 bp, Homo sapiens
gatattaaggaatagccatgaaatcatctggagtcctctgattaggtaaatatcaaggagaaaaaaagaactaggggctgtcttatagcttggataggcagagcagtatgctagaaaacaccagatctgggcctggcgtggtggctcacgcctgtaatcccagcattttgggaggccgaggcaggaggatctcttgaggccagaagttagagaccagcatgtgtaacacagtgagatcccacctctacaaaaaatcaaaaaattagccagtcgtgatggtgtacacctgtgatctcagctacacaggaggccaaggtcgggggatcacttgagcctgggagatcaggtttgcagtgagctatgatcgcaccactgcattccagcctggggagcaagcaagaccctatattaaaaaaaaaaaaaaaggaaagaacgcacaagaggtcagtcctgaggggctcctaggcctagcaaatccggagcctctgtttctccagctaagggaaagatactactctaatgtttaacccctggggtggttagggatcaaacgaatggcagatggcgaggccaggg

SEQ ID NO: 519530 - DNA, 740 bp, Homo sapiens
tgtgcccctccaccccccacctgagttttgccccccccctttggggacacgccacgaacactgcttgtgagaaggaagatggaaggtaatttctgtcggtctttcccctatccccagggatggacaaggacccacttagaaagaagggtctcacgtggctgcctggctcctccgtagacccccgttctgtttcaacctcgtgccccacccgtgcaagtcatcaccaacaaattgctcttaagttaccagagaccacatcccccccgggattagggttcaagtagcagctgctaacccttgcgacccagcccttgtgggactccccacaccagaccaagctcaggatgctggtgatgctaggaagatgtccctcccctcactgccccccaccatttctgccccgtggctctaccagcctcacccctccaacccgtgatttctccatcttgcctccccgtgctgcagcgcccagcggcatccccccagcatccagttggagaaaaggggaccccagccgtagagagcgatattggagtcttttgttcattccaatcttggatttttttttttccctaagagattctctttttagggggaatgggaaacggacacctcataaagggttcacaagatcatccatttttctgactttttaaatcattatcattattatttttaattaaaaaaatgcctgtatgcctttttttggtcggattgtaaataaatatacccttgtccta

SEQ ID NO: 519531 - DNA, 138 bp, Homo sapiens
ttcgtcaaaagcgaggacgtataagaagaaatactgaatgtcctccagtactccttgatggaagtttccatattgtggacagaggagagatgtctaggaagaagtcaactcttagttccacgtttatgtagtgttaat

SEQ ID NO: 519532 - DNA, 705 bp, Homo sapiens
ccacgcgtcggaagagaacaccaacatctccctggttcaggactggacctggagagttagcgtggcgaaaacggtgctaggacagtgatcgggatgactttccgtggatgactttggctctgagaatgagggggagctgcgtgctcggtaaactgaaatcacgcccctgacccagcagcccggaaacgaaggaggagaagggggctcccgatgccgggcccaggacatgagacaagcagaccaggagctggacagccgggggtgggccggactgacgagagacacccggaacgaagagagctctgagcaacgacacttgctgggggacagaaagccaccgagctgcacacaagagcccgggaagaccatgcgcaagtaggcctgacaaggcggaagcccgtgcagagccgggacttatcccatatgcagcagtggaacctcatactgcttgagcaagaagggaggcaggggcttagggagagagggcgatagttaaccgggaccaacagcaggatagaaggagatactgaggcacgcgagacggaggcaactccagaggagaaataaagggtgcacaccagtggacgaaagcgcggagccagactgaggacagccatccttaaccgccgaggcccgtacagcgaaggcgccacagagcacctgagagggtcaacacggaaacaggagacgcaggagccaggaaac

SEQ ID NO: 519533 - DNA, 543 bp, Homo sapiens
tggctcagtgatctcccgctttggctctcagtgctggattacaggttgagcaccgcgccgggctgcattgaacatctcttcatgtgcttatttaccatctgcagagcctcttcagtgaaatactcctcgtgtgttttgtcctcgtcctaatttaattgtttggtttttatactgaattttgagttttcctgtattctagataggagtctcttctcccagcttgtgacctctttatcctctcattggacgcctgcgcccatccagagctttacgttttgatgacgtccgatgtgttgagtttttttctttttcttttatagatcctgtttttggtgtcatggctaagaactcttcaccaagccccaggtcctgaaggatttttttgaaatttgaatagtttttccctcattggtttctccctggctgccttgtttctggtcttcagaagcctggttgagtttcttcgggttcatcctgcatggggctcactcatcttcagtctgtaggtttatcattctgacccaatctgtacctttttcagcc

SEQ ID NO: 519534 - DNA, 824 bp, Homo sapiens
aactcgttcttgaagggcggcggcggcggcggcggtagaggcgggtgcctgggtgggggcctgggagatgtgcttggagagcctgatcagcggggccgggggcgtgcggtggtggtggctggagcgagctggcgggctcgtggtggaggcggcggaggcggtggaacggccatgacgcatcctaggcggagatcattcagcgcccattacaggcgacggcggttgcgcaagtacaacccggagcccccgcccccagcagaatatactccaacattgaggccaacgagagtgaggaggtccggcagttccggagactctttgcccagctggcttggagatgacatggaggtcagcgccaaagaactcatgaccattctcaataaggttgttgacaggaaccctgatctgcacgactgatggctttggcattgacacatgtcgccagcatggtgggccgctgatggatagcgacaccacagggcaagctgggcttatgagggaatttcaacgtactttgtgggaccaaccactcaaaagggtggcagcgaccattataacaaaacagagctttcgaacaactgacccggagtcgaggcacccaatattggcgggtaggtgaactccccaggttgcctattagagggccgcggggtgtttccaccctgaaatagagcccatctctattaacagtgatcatccgaacgctacctccagattgaacaggtgggcaacatgggtttggagcaacttacatcaggtggctatggcgaggctggaaagcatggttccgtggcttcagaattttcttgccacagattgcgctg

SEQ ID NO: 519535 - DNA, 477 bp, Homo sapiens
acttctctgaggacagaagaaggttgagcccctcatccctgattggagctaacgaaggcttactttgtacgtcgagaatagaaacgggaagatggaatgtggagccatgaggaggagctcgataactcgggtgaatagcaccagaaaccagatgccaccccatggtgctgcgcactccagtctgtagaaaggtgctctgaacgaggtcatagactctggccaggactgaggagcctccggttccagctctcgcgctctgcctgggaccctcgtgaaaacttactctagtcaggagcaattcctccaggccatgagagggcgctctgcaccctcaggcctcgatgcgtgctgctctacctctcatcagcccacagtctgacacgatgtcttttcttgtccctggtgagtcccggatgtctgccggtctacacaacagccctgagaacgggctggacaaccctggggggaaccacgctt

SEQ ID NO: 519536 - DNA, 602 bp, Homo sapiens
tttgaactttatttgaaaaaaacagaagataattgtttcaaaaaaacacacaggtggcgggggaggcacagccaggtgtgcggcagcagggggtgggcatccgggctaaggctataactgtggcggaagctctcatcggatttggcagtttctgggcccccaagccgtggggcccgggaacctcgaagaggggtgcaacgtgggaagtgggtgaatcctcgtgtgtggacacagtgcgtgtgggctatagactgtgggggcaaagtggggggggcctctccaaagcgggaactccgaagtgtgttgggtgggccaccccctcctcaggaagggggggggggggagggaacaaacccgaagggggggggcgcgagggaaaaacactggaggtaaaggacgaaggaagggaaacaaaacaaacccagacctgctaggtaggcgcgaaggagacactagcgcgactagagcgggggaagggaggagttccatttcccacccaaaacagacacacgaaacactccaccccgccccgcggggcacggggtacgtggtgtacgaggagcagagggagagacgtaaaccccaaaaaaactcagaagacc

SEQ ID NO: 519537 - DNA, 656 bp, Homo sapiens
  misc_feature (622)..(622): n is a, c, g, or t
ggggggcatggtttttcttactggggacaggctggtgctgtaaaaattcacatacctgccatccatacaggcatatgtcgcttgctctaatgccagttcatagtatccatactaacatccggcttgcgcgcacaaagggatgcagagcgcttgacaggtctgtgttagcatgtttcgcaatgccaggggtgtttgcaaaacccctaatgctttccgtcaagccattgtatgtgagcaatcaccctaggcccaattaatccatcagggtccacctgtgataaagatggccatttgcttacttaaagcccacttaatgactgcttaactaaattcgtctggaaaggtaaaacactttcctaacagcctgaaatttgttagtggttcaaggtcaaaaggcctggtctaggcctattcaagtgattaataaacagtctttaaatggaaatctcttttgaaaagctgatggtgcctttaaaaaaaaattatgttggtgggaaagaataacctttccccctgaataataatcgtatcccaaaaaccgggatatagctaccatggaaagggccattgtttattgaatggaaacttttttttctctttaaatgaaacaaaaatggttttnaaaaataaaaagggccggccggaaaaaaccccgc

SEQ ID NO: 519538 - DNA, 1122 bp, Homo sapiens
agcgggatgacctcaccatggtggtggatgacctccgtctgctgctgttgtgaagccgatgtgatggacatcgaagcgtgaggtttcttgcttccgagggtgctgtcatccactcaaagaggcttgcatgtttgtcaggctgatctccgagaatgctgcggcaagcctgggtccaagctgtgcaatgccagctatcgctctctcgatctacctggagagccctgatcagtgtgctatagcgagaggctggacccggaacagtagtccccgatccagcgaggtcagcatacgatctccgccatcgatgacttcgggagcgtggcgtgaagggtgacgagtgtgctggacgcgtgtgtcagcagtgctggtgcggcctaacagctcacgttgctggccgagctgactgcccagtcctggcacccccgacgtaggggcgcaggcaatcccaaccatgggacagatgcatgcatctgccaattgcacgttgtcatacctgcgcctgtaccatcagagtagactctggggtgatctcaccttggcatccaatgggctgtcgagtcccttgtaccagctgcgactcgttggggagcctgaagctgctaacaaggctggactgtttgtgatagccttgtgcataatcaggtcgctgttgcaaggtcccgttatttccttactggacagggcccacagcatgtttgaagcgggctggcaaggcaagccaggtaaatatgccccgacaaagttcatgcaagacatccgcgagggcatgggaaccaaggcaaggggaccctgggaatccaagggatcgacattattagccgtagggaaaagcacgaaagattttacttgcgtggacggggcgccccattggtctacctcatggccacttgctaagtggcccctcatacgaatggcctgtggaggggtgtcatagaacaatgccctggtggtgaccctctacaggtcttctacccacgtgggactcccaagattgggccgaccggcataaggtcccgggccttgaaatcccggtatctgtccctgattaatgtgacctcttcttgtgtcctctcagttggggcaacccctgtgtatgtagcaaaagattccaccgagatatcg

SEQ ID NO: 519539 - DNA, 439 bp, Homo sapiens
atgaggtgtcacaggcttggcctgtagtcccacctactcggaggctgagcaggaggatctgtggatctcataagttcaaggttgcaataagttacaaacatgccactacactccagcctagtgacagagcaacactgtataaaaaaagaaaaaaaatatctggggagaaaagttcaatgaagttccaaaaagtaaaacttgaatttgccatgtacagagactacattgaattcatgtgaatgaagttatgtgtaggcattctattaggtattataagtaacccagagattatttaaagtgaatatacatatgtacatgcaaatatatatgcaatatataaaaagccaaagccattttatataagggacttaagcatcctaggatttgatatccacaaggtcctagaatgacctctacagaacaaaggatgactgatgac

SEQ ID NO: 519540 - DNA, 102 bp, Homo sapiens
gcacgtgattttaaaacattttctaatttcattcctattatttttgagacagggcctcactctgtcgtctaggccggagtgcagtggtgcgatctcagctca

SEQ ID NO: 519541 - DNA, 138 bp, Homo sapiens
  misc_feature (29)..(29): n is a, c, g, or t
  misc_feature (64)..(64): n is a, c, g, or t
  misc_feature (94)..(94): n is a, c, g, or t
tgtgagaaccccaggtaggtaatttcctntctattgtactcatagtttgtttgaaacctcttgncctctatcccttattgttttatactctgtnaatctgattttacctttaataaacttttctgaagtgaaaaaaaa

SEQ ID NO: 519542 - DNA, 470 bp, Homo sapiens
cgtagaacatcatggatcatgtgtccattctagctcagtagaaatctgtcatacttgccttctggttgtaatccttgactacaaatctcaggttggaatttcagccttagccttcaacaagtactttagctctacatttagcacggcatggggcggagtgctgggcccatgtgaccgggctgtccttcttctgctctttcaattgcttataaattgcctgctccgaattctactgaaaagtccagaatcaggatgctagaaataaaatattttaggcaaccctctgaaaatttatcctattcaaggctgttcccatgtttggcaatttaaaaatctaagttaaaaaaaaaattaagcatccctgttatagggacaagaatgcagaaaaatagcctctgctctaatgaagtaagatatgttcgatgtcatcagcatccactccaataggagtatagattttgcttgccagt

SEQ ID NO: 519543 - DNA, 197 bp, Homo sapiens
taacattgcagagctgtttgcgtgtgtaagactatgcgagccctggagaaggctacatcaaggactgtgtctcccccagcgagtacactgcagcctgttccctggctcctggtccaatacgaagctgccttcaggcaggtccaggcctcagaaatcagctctattgacgaattctgccgcaagttccgcctgccctc

SEQ ID NO: 519544 - DNA, 387 bp, Homo sapiens
  misc_feature (325)..(325): n is a, c, g, or t
acagaatctacccttgacacccaaccttctccagccagcagtgtatctcctgcaagatatccagctacatcttcagtgacccttgtagatgtgagtgccttgaggccaaacaccactcctcaacccagcaattccagtatgactacccgaggcttcaactatccctggacctccagtgggacagataccaaaaaatcagtttcacggatacctagtgaaacatacagttcatccccctcaggtgcaggctcaacacttcatgacaatgtctttaccagcacagccagagcattttcagaagtccccacaactgccaatggatctncggaaacttaattcacgtccatatcactggtattgtggtcaataaggccaaaggtgggattt

SEQ ID NO: 519545 - DNA, 257 bp, Homo sapiens
aacatccatgaaccaccaccatgtatcccaattttcttaagtatgtacttacgaaacagcagtgaggtgtttttgttttttgagatggagttttgctctttttcccaggctggagtgcaatggcacgatctcggctcactgtaacctcctcctcctgagttcaagtgattctcctgaacccaggaggcagacgttgcagtgagccaagattgcaccattgccctccagcatgggcaacagagcaacatccgtctcca

SEQ ID NO: 519546 - DNA, 198 bp, Homo sapiens
tacaatatataagatataatagatctagtaaagtatataagccatcctcttatatattaccattcctcttacatatgtacccatacctcttatattttttaaccattcctcttacattatttacccattcctcttacattatttccccgttcctcttatatattttacccattcctcttatattatttacccattcct

SEQ ID NO: 519547 - DNA, 201 bp, Homo sapiens
gaaatttttcttaaaagagggggaaaggaaggttcccttacccccaggcccccccctagcaatatcaaccattacccttccctctacacttatcattttcccaattttaattttactgactatcctagaaatcgcggtccccttaatccaagcctaggttttcacacttttagtaagcctctcccggcccgccaccccata

SEQ ID NO: 519548 - DNA, 136 bp, Homo sapiens
gtataaagatggtaaagcatgtcgctcattctgattagcggcaattgctgattggtttgcagttatggtttgatgttgtttctgattgccgcgggcctgactctggtcttcggcattatggatatcatgaacctgg

SEQ ID NO: 519549 - DNA, 283 bp, Homo sapiens
ttttccccggggaaaaatttttccccctgggcccttttgggggccccctaaaacccggtgtgtcccaaaaaacgggggggggggggggggggtttcccggggtttttttcccccccgggggggggtttttttaccccccctttttttttaaaaaggggggggtttgggggggggccccccccggttaaaagggggaaattttttttggggggtttttttttttttttttggggggccgggggggggcggggtaatttttttcccccccctttgttttttttta

SEQ ID NO: 519550 - DNA, 252 bp, Homo sapiens
gcacactactaccatgccttgttgtacttatttattcagtatagatagggtcttattatgttgcccaggatggtctctaactcctgggatcaatctccgtaaagtactgtagcgtaggattacaggtgtgaacctctgtgctccagactagagctttgtatattgtgatcattgtgttgtcccagattattaccatcagcgcaactaacgacgtggcagacatcatatacctgggaaaagtatccttctagg

SEQ ID NO: 519551 - DNA, 461 bp, Homo sapiens
cttgtacactcttgttgagcacgtaaaatggtgcagttgctataacaacttccagtggtgccccagtaggttaagactagtaatctcgtaagacgtagtaataccacctctggctatatgctccaaagcctgtaaggtaggatctcaaacagatgtgtgtcattctagcattatacttgtcaatacgataatgtacatagttgtacatagcgccattatgtacaatagccgagagcatcgcaagtgtccactaatgcatgtatggatgaacaacagttataatataggtatatgctttgcatcttgtacaaaggaagcaaactgtgacagatgctacaccatagacgcatctcgagcaccctgtgctcagagcactaagacagtcacaggcagacaaatcagtcatgattcaactgatatgaagtgcttgcgatagtcaatcgaacagctacagatagtag

SEQ ID NO: 519552 - DNA, 203 bp, Homo sapiens
aaaggcacatatatccacacatgcacacacagcacacacacaaacgcacagcacacacaaacgcacagcacacacgcacacacagcacacacacgagcacacagcacacaaacgcacagcacacgcacacacatgcactcacagcacacacactagcacacagcacacacacaaagacacagtacacatggaatgcacacaca

SEQ ID NO: 519553 - DNA, 423 bp, Homo sapiens
  misc_feature (164)..(164): n is a, c, g, or t
  misc_feature (180)..(180): n is a, c, g, or t
gggaagggaagaatttggcacaattgaagaaatgaaaaatgaaattatagaaccttgttgctggagattgcagtgagctgagatcgcaccattgcactccagcctgggtgacaagagcaaaactccatctcaaacaaaacaaaacaaaacaaaaacagaaaagnaaagaaaagaaaaagnaaaggtgagtggatcacttgaggtcaggagttcgagaccagcctggccaacttggcaaaacctcatctgtactaaaaatacaaaaattagccgggcatggtggcatgcgcctgtaatcccagctactctggaggctgagctgggagaatcacttgaacccgggaggcagagattgcagtgagtcgagatcatgctactgcactccagcctgggtgacagagtgagaccctgtctcgaaagtga

SEQ ID NO: 519554 - DNA, 412 bp, Homo sapiens
  misc_feature (228)..(228): n is a, c, g, or t
gcggccgcctactactactaaattggcggccggtcgacaaaatgtatgaattcagcaaccataagtgaaattgtacacataatacttagcatagtacacaatatgtcaagtaatcacaaactaactgccattgcacttccttgttaatctgcatttctcctgagttttgtgatgtcaaatatttcagatttgaaaattacacatatctccctagggcagcggctcatngctgtaatgccagcactttgggaggccgaggcgcggtgcatcaccgtgaggttcggcacgtttgagaccagcctgaccaacatggagaaacaccatctctactaaaaatacaaaaacttaccgggacatggtggcacaccgctgtaatcctagctcctcaggagtctgaggtagcagaattgct

SEQ ID NO: 519555 - DNA, 827 bp, Homo sapiens
cacaccagggggacctgctcaagtccaggaggacctcattcgcagaaaggctccttccccaccagaggacacctgggtaggcgggaaacagtgctttcatgtacccccccagccacacctttggcctatgggaaaagcaaggaactcaacctgggtgtgttccgtctggacccggggaggcccctgaaggccaagagggaaactcgtccccagctgtgtctgtcctaggggagggggacatagcccttacaggagctccccgcccctcttggcactctgacacaccaggacacccatctggggccccctttgccacgaagagctgggcaggcctcagggtgtggggaaggaggacaccacctccagaaaggaagcgtgaacccccgggaacaagcgggtcccttccctcctcagacacaagccaccctcagcttgtggctctttggcccccacgccccaccacaacccaccctgttcactttattcgaccacgagccatgagcacgctgatatttattggacactttgcacccacatgcccagcacttcggcttggagttatccccatttggtttctcaccacgccggtatttattgtctgctcctctgtgccccggtgctgtgctctgggcacggggcacctgcatgggctgcctgccctggtggagcttgtggtctgatgggtgaggctgacccacagcccccccccttgcccacagggcccgggcacagagtacacacaccggggcctcataccaaaagtctaaatatttaaaagttatccatccagctaaccactgttaaataaaatatgttctattctccta

SEQ ID NO: 519556 - DNA, 207 bp, Homo sapiens
  misc_feature (30)..(30): n is a, c, g, or t
  misc_feature (93)..(93): n is a, c, g, or t
  misc_feature (124)..(124): n is a, c, g, or t
  misc_feature (166)..(166): n is a, c, g, or t
  misc_feature (198)..(198): n is a, c, g, or t
catctgtcagaaacaaaatggttgttggtngagcacccaatgctgtctgcaagtctttcggtaactttcactctctactttgtgtccaatctnggtatcaaagtgaccatcaacaagctcaagnatatctccctccgtagaatgcccgaataacagtttctgtgcntccacactccctgaggaatagatgtacacctncattccggc

SEQ ID NO: 519557 - DNA, 443 bp, Homo sapiens
gatggcgcccttgccatttttaattgctctcgtgaattcgcggccgcgactgtcacgatggttcgcccaaccttactaccttcggtcggccctgctctctgctgccttcctactcgcgaggaaactgccgccgctctgccacgatctgcccacccaatgcgacgacggtaacccgtgcgactttgactgtagagacgtggcgaccctgatgcttctcagtgccattgtgacgatgaagaaccgcagatccataactgtggagcaacatataggcaccattttcatgtttagcaaagtgcccaacacaattcttttcttccgcttgcatattcgcatggccctactttacatcacactctgcatagcgcctctgatgacgcccaaaccacccctatatacgctcccctgagtatactcgtacttcacacgatcccattgctggg

SEQ ID NO: 519558 - DNA, 215 bp, Homo sapiens
gtccccctatcgtgacgggggcgtcgtcaggatctgaatgagctgaaagggcctgtggaagagttgaatttcataacctataacatcacatctaatgctttataaagattcaattgtggacttgtacagataggcgttagacggtcagaatcctttgtacatctacgtgactgtcagccggcatacgcacaacctttaatcatagtactttccat

SEQ ID NO: 519559 - DNA, 332 bp, Homo sapiens
tctcttcttctatctgggctttcttttgagctcttctttgttattacgtagcttctttagctctttgtcagacatgttgctgtatcagcattcagttgttcactcttattcttccatctgtgaagggggtttgtccagtgaagcttcgaaatagatctctatagcacattcatgtgcgtgcccttgcaagtaaacctggatgctcgtccgaagtacatcttcgtagatttaataataagtccaccatatgatcattaagggtaatcttccgtccatacagtatgttttgacaagtcaaaacctggtcaacacagagatattccttataaaaa

SEQ ID NO: 519560 - DNA, 586 bp, Homo sapiens
tgcagtggctcatgcctgttatcccagcactttgggaggccgaggcaggtggatcacctgaggtcaggagtttgagaccagcctggccaacatggtgaaaccccgtctctactaaaaacacaaaaattagccgggcatggtggcgcatgtctgtaatcccagctatttgggaggctgaggcaggagaattgcttgaacccaggaggtggaggttgcagtgagccgagatcacgccactgtactccaggctggtgacagcgagagtctgtctcaaaaaaaaaaaaaaaaacaaaaaaacaaaaaaaaaagagacaagcacactaggattagcgaatgctatacgagcgttgtcaaagtaccactaagacatcactctacagtttacaacagtactacaacgcttcccttccttggattcgtggctaagtggtgtgccacacaggttcgcctcaacaatttttttacattgagtcctctcctttttggggatttcatacctgtctatcgcctctttttaaagcctctttgtgtggctattgcgctaacctctttcataatttgtgggtctcacttcttttcgcccccc

SEQ ID NO: 519561 - DNA, 139 bp, Homo sapiens
taaaaggtaggccccagctctatgtcagcaccactctcgtgttctccgaaatcagcgctgtgattgctgcctgccttgttggaccgtccgggacctcccgctccctgtcatttcatcgcgactgtgcggctgtggttgg

SEQ ID NO: 519562 - DNA, 446 bp, Homo sapiens
agaagagtgtgcaggtatcactcgatctctttctgtgtcgctgtgacagatgacatcatacgtggatacagtccctgtgcactcacataatggcctgcagatgggcaatatttctccccttttctcctccactttacagagcaatcagaatgcaaatgaaggagagagctgtcagtaaaagctccaccttcaaactgctcaacttgactccccccgaaagagagaaaggaggaaagaaaacaaatcactagaaaacattgtgatttaagacaaggaggaaagcttccttgtaatatatggaacaatgtcccaacaatgacatgtcacacggagctgggcaccatgactgcaatcacattacagaaaactgaagtgggcatcaagcctagaacatgttggaaataaggtcaatttgctccagccaataaaatcaggcagcattttcg

SEQ ID NO: 519563 - DNA, 158 bp, Homo sapiens
ctgggtttgctattacacctcctatttactctcatacccttctcgttagtccttcatatttctctgcctctattcttctatactgcagatttttctcacctatggtacaaagcaatggcgatgtatcttttcatgtaattggctttgggaattctggt

SEQ ID NO: 519564 - DNA, 811 bp, Homo sapiens
gctgcgctgtggactgaagtgaaccggtatggccagaacggcgacttcatgcgcgctctcaagaccgtcaataagatactcacagatcaacgaagagatgacgtaactgaccatgcattgtacaagtggtatgccttatccagaatggcagagtttcaaggaagctttgaatgtcatcaatactcacacctaaagtgtaagccaataactctctctcctttgcaaaggcatatcgcgagtacaggctgaacagaattgagaatgcctctgaagacaagtagaaacgtgccaatcagcagtacagacaaactgaaggagcttttatggacaagtgttataccgtttggaacgcctatgatcgaagtgcttagcagtgtagtagagatctcgtccgaacctcccaagatgattatgatgaggcgaggaaagacaaaccctttcagcagttgttgcgaggctcaaagccaattcgggaaaaagtcggttccagagaacctgggcctccatagaaggcactacatgagctgtgctacaacactgcatgtgcactgataggccaaggccagctgaaccaggccatgaaaatcctacaacagagctgaacggttggaagtctgttaaccttatctgtaaatataacgtgcatataactttgtagagtatcttctaacattgcagtccgacttctgtgacaattattaccatggacagttattcgatgctacactcaagaatgggaacatggcgcaacgaaacatgcttgcaaccgcatccagaagactagatcatatccctcaaagcccccaaacag

SEQ ID NO: 519565 - DNA, 198 bp, Homo sapiens
cccgtatcctaatacgaactgcacctcatggttctagtcggatttgttaaccactgcgccacgatgggaactccctctctcactgttaaaaatcccctattattaattacaatgatgactgctgatgactaaacaggtgtccggaacaaactaaatgttttactcacatcgtctcatttcattctcacaacgacccca

SEQ ID NO: 519566 - DNA, 982 bp, Homo sapiens
ctaaaaaagcaaccccagcaccccaaggccgctgcgcgatccgactggacagcagagagcgcatgtcgagccagagtacgagcgagcatggcagaagagaccagcaacagcagcagaagtagcagagcggagcacacagagcagaaaactccacccccgccagcctagtccaaactatcctgccatcagtcgactagcaccacacatggcagaccagcagctacggtctcccactctaagcggaacgcagtgagacgagcgaaccacaaaaagagcgacgaaagagcacgatataatcagcgacacggaaggcagccaggcatcaacgacaccggagagcatcacacgcgcgctccgagctcactgcacctcacagagagacagagaccgctctccaaccaagctggcgcgtccgagagagcagcccgagactaacagcaagaagaggagaccacacgcgctcgtgcagcagcattacacacacatagcgagacacagcacgagggtcacgaggagcaaacggacaagacgcactccgcacaagcagggcaaagcgctcagagacagcgcatacgcagcgcagcaagcgtccaaacagaaaagacaaggatacaacaagacggagctacaatataagagctacaaggaattcataaaggaatagcatacgagcaagccagtagcgcgacccagacacgacagacgcgcgcaacagtgtagcaacgcagtacatccgaggcatctacactagcaacaagagcgtaccacgcactatcaggacccgaccagcacgaaactaccacgagctaccccaccacacagagcataaggcagtactacaacgacatcaatagaacccaaccacacacactaaccgtcactcagtacatgcagcactcacacgacatgcatcacacagcagtacgaaccacacacgaaacacataacagagctcaccaacacacacactccaacaacagcg

SEQ ID NO: 519567 - DNA, 151 bp, Homo sapiens
gtcgtcatccgcagcagtctgttacaaagtgccatagcactcgatacagccggtcacgcaggagctggtctcaccattaatttggataggtggatcgttcgtgccaagactctatcattcgttacggataaactggtgtacgcgatgcggg

SEQ ID NO: 519568 - DNA, 192 bp, Homo sapiens
ttaacatacagtattgggtacagtaatgtgctgtgcaggagtctgtaaactaggagcagtggaatgatgtagccgaggcctgtggggggcgctgccatccagttgatgcgcacactccgtcatgctcccacagcagcagagtcaactgaggacctatttctcagaacgttttctctcggcaagcacacgcga

SEQ ID NO: 519569 - DNA, 349 bp, Homo sapiens
  misc_feature (313)..(313): n is a, c, g, or t
ccgatgctttgggtgcatgcatgtgcatcgcacatggataaaaaaaaatcccctatctgcccagtcaaaataaatgtacacctgaaaactcagatgcaacactaacttgcaaagattcccacaacatacaaaagaagtgatgctttcatgtgctggccgtggacaaatgtggaaaaactgaagcgtatacagcgctgtggtcagaacaacctcatgtgcagacaggggtggactgtggcgtgccgggcagcgtgcgctatgcaactcagacctgggactgaacgagacatccgacattaccttacccagacgncctgacgacgtgaaaaccagacgattaaccgaactc

SEQ ID NO: 519570 - DNA, 118 bp, Homo sapiens
atgtgtctgaactgctacaagtgaaggaggaagttccacagtgtctctgtttgcctcctcctccataaacccacggcataaggccccggcataaggtgggcccacggcataacggtgg

SEQ ID NO: 519571 - DNA, 229 bp, Homo sapiens
  misc_feature (4)..(4): n is a, c, g, or t
  misc_feature (228)..(229): n is a, c, g, or t
tttnaactcccttcctgcagtccgctctagaggatccccgagtgggtcagtgtcttcactctattcactgtagaggaccaaaaccaattctccctaaatagaaagtgctatgttataatcaacttgaaacaggtagtttcattttgaagccccgcagggttcaactacttgagggaatagtctggtaataaataaaatactatctcattacaaaacatcctttgcttnn

SEQ ID NO: 519572 - DNA, 317 bp, Homo sapiens
agattctttccatggttcaagtatgcagctgctcacccttgggaaagccacggcgcactggtgcacagagacaagccctctcctcacttggtgatatgaagtgagggagtgaggggtatccctcagcctaggtggctttatttgtctgatccctatcctgcctgcgagcctcactccagtaccctctacaatcccaagaagacttaagaatagcctgggctataggattttcaagaagcaggaactggccagttcctgcttcttgacattgcagaaggactgaacctgcataccatccgcgaccgagtctggcagat

SEQ ID NO: 519573 - DNA, 665 bp, Homo sapiens
gatgtagaaataatggaattcttactccccgattacaccgccccctggatccaggactcacacttctgacccgcgctgtctttttggggtttttttgagattggagtctcgctgtgtcgccccgactggagtcccatggtgggatccggctcacctgcaacctccacctccccggggtcaagccgttctcctgtcgtcagcctcccccgtagctgagattgcacggcacatgcccccaccgccccgctaatattttgtattttccgtagggacggggttacacccactgttggcccggctggtctcgaactcctgacctcaagtgagtccaccccgcctcagtctccccaagtgctgagattacaggcactgagtcactacgcccggcccacagtctgtctgtcttgaagtgtgagcaagcagctgtggtcaattaaacccattagtttaacccctctagaactggggtctgccaaactcccaccctgcagcccaatttggcccacctcctttttaaagtaagggctgtgagagtggtttttactttttttaatgatttaaaaaatccaaattatattctgtgaccatgaccggtgaatttatatgtgaccagtggaaattatatgaaatttaagagtccataaataaaatttgttgggacacca

SEQ ID NO: 519574 - DNA, 465 bp, Homo sapiens
aagaatattgtactccaatttttgtatccacacaagattagaatacaaataacttacccggtccatagtaaaatcagtatgtgaatcatggatttttgtcaaactcatttggttcggggattacaaatttcaaaaccaaagttaacaaagtgagctagaagccaaactaaactagaatctgggtcttttaaactacccagttcaaagctctttagtaaaaggggaaagactaacaccatacgaagagaaaccagagtataagttcagaacacagattcaaaggcacaaatctttcaggaaaacatcagtagaaacaacaagacaccaagacaaaactaagtctgaatcgattaaaacacatgactcatctattcataagctctagacttagaagtcacattaagaaacttcacaatggatctttaaaacacaaaacagactttaaacaatggtaaggaaagctca

SEQ ID NO: 519575 - DNA, 402 bp, Homo sapiens
  misc_feature (400)..(400): n is a, c, g, or t
ctgggactcctccatgctttctgtcactgctcaggccaaggtctatgaacgttgtgagtttgccagaactctgaaaaggaatggaatggctggctactatggagtcagccctggcccgacctgggtgtgtttagctcagcacgagagcaattataacacaccgagcctacaaacctacaacccgtggagaccaaagcacctgactatgggatatttcagatcaatagcccgatactggtgtaatgatggcaaaaccccaagagctgtgaatgcctgtgggatcaattgcagtgctctgctgcaggattgacatcactgcagccatacaatgtgcaaagagggtggtgagagattcccaaggcattcgagcatgggtggcatggcgagcacactgtcaaancg

SEQ ID NO: 519576 - DNA, 1173 bp, Homo sapiens
  misc_feature (673)..(673): n is a, c, g, or t
  misc_feature (706)..(706): n is a, c, g, or t
  misc_feature (898)..(898): n is a, c, g, or t
gccaagatcagctactgatggtcgtcgcagaacgtgaacgcgcgctcggtggctgaggctcctgcggtatactggtcgtggtcgatctatcctgattctccagacctcggtttttacatccccgtcgtccccaaggtttacgcctgaaacagtgttgtgcaaggacgggaaccattgacagcacgatggtgagggactgaggacggtggatgccatcgaggctagaacgcatgtgatggtacactcgcaaagactagtccactgcaagcgcacggctttcacggtgtcgcctgtctcaacggcgtgcagctgggcatcgtgggtgcccaagagcagtccaatgtgacatggcatctagtcaaggtccttcgtgatgaactgcagtatccgagcatgattcgaagaccaggcagctggtgccttattgctctggtgccaaaatgacatgatgcccgcgccatccccattgcttagtctagcactgtgctagaatgagacagcgctctgctgaggtgatgccgcatgcgtcgctgtcactagagcgttacgcgtgacgggccgtgtgggagcctatctgcgggacactcccgagaaagtatcctaggcatactcccttgaaagtcaagtaatatccttgctgaacgctccgcagtcattccgaagagatgagccntagtaccctcgacaaagcgtggggctggtgccngcagggggtggcaagtgaggtgtgctaccagaggaatgggcgtggaaagcccgggtgcgaggaggagaaccatcaccctgctttccttgtgggtacccctggccccagtcagggctattgcagcgagtctgtgcacgtcgccggccgcctggcgaggtaacgtcgctggttggaattcgaggtggcctgcgnccttgctgtgtccgtagcgtagtaccagcgtcctagttacgctcctgggcgtttcaccggcggggaggaggaggaggccgcgctgggcgtcggtccgaggggtctggaatgttggtaggggccgtctttcgcggcagaggtggcgggttgcttcctggggtcaattgggcacaagatgggctggcccatgggtgcgcccctgtggcctaccagagcccttgttggagattgggtggcctttgtcttgttcgcccgcttgtcgtggttcgggacaa

SEQ ID NO: 519577 - DNA, 103 bp, Homo sapiens
gcctgacagcagcatgtgcagcggtggttatggaggtggttcatggtgatcagcagcaactgtgagttgtggttgtggaggtgtgttatggtgatcaggcgat

SEQ ID NO: 519578 - DNA, 364 bp, Homo sapiens
gtgggcccatcccctaaatttcagattaaccccatttaccccaacatgtttatcaaaccttttagagttttatttggaaagaaatcaaatctctgtatccccttgaggagaatttggatttgtttgaaattatctttttacccccaagcccttgtttttttctttttgaaaattttttatgtaaagttcccccaaatattttttttatttacccccaaataatttataatttataggggttggaccctttgcaaaaagtgttttttaaaaaaaccggattttatattttcttgcttaaataaaaaaatcccatttatatgtttatgggggtttaaaataaacccattttttttgtatataaata

SEQ ID NO: 519579 - DNA, 109 bp, Homo sapiens
agctccactctgcccactcccagcacggtctaacatacagccagcagcacatgggcagtgggcagcttgtccttgtggcaacacagccacagcacatcagtatcgggca

SEQ ID NO: 519580 - DNA, 1111 bp, Homo sapiens
  misc_feature (111)..(111): n is a, c, g, or t
  misc_feature (626)..(626): n is a, c, g, or t
caaataaagtataggcgatagaaatcgaaacctggcgcaatagatatagtaccgcgaagggaaagatgaaaaattataaccaagctagtaatatagcagaggactaacccnctatagccgttctggcgagtaatgaagttaactaggaaataacgttggcgaaggaggagccaagagcgtaagacccccggaaaccaggacgagcgtacctagagaacgagctaaagagagcacacccgtctatgtagcagaatagtgggaagatttataggtagaggcgacaaatcctaccgagcctggtgatagctggttgtccaagatagaatcttagttcaactttaaatttgcccacagaaccctctaaatccccttgtaaatttaactgttagtccaaagaggaacagctctttggacactaggaaaaaacctgtagagagagtaaagagttgaagacccatagtaggcctaagagcaggcaccaattaagaaagcgttcaggctcaagagccactagctaaaagagtcccagacatataacttgaactcctcagagccaaattgggaccaatctatcaccctatagaagaactaatgtgagtataagtagcctgaaagattctcctccngataagccggcgtcagatcagaacactggactggcatttacaggccaatattctacatcaagcaaaaagtccttatttaccctcatggtcaacccaaaacagggtggtcataaggcaggtgacaaacggtaaagggatcgggaaactttacgcggctggttcccaaaaccatacgcttataattcaccggttggagggccgccgtgtccccgtgacagggttacggggccgcgggacctaacggggcagggggggcaaaaaaccagttggccctaatatgggaggcacgctttataatggtcccccaggggggtacacagggcgctcaataaccacgagaaaaaacgccccgggaaaagagggaggtaaacaccagatgagagaccagcggggcgtatatttagtgagcggctgaacaacacaggtgcttactaaaacaaccggtgtaataaggtggggcggcgagacaacacaacaacagatgt

SEQ ID NO: 519581 - DNA, 502 bp, Homo sapiens
gagcttaacattcatagatcagatcggatgccatggtgattcaatgccaaatctcaagtggcttcttatttacatccatacaagaaccgggtatgaacgcgattatgtacaaatgctaatttaaacgcatggtaaatccaataagaacactaagatgtaactgatcaagtaactgagtgatgaacaaccacacattccccctctccaaatttgtctcacgttaagataaacccaatgccatcactttggcctcttatagtagtatttggggctggatgtgggggctcatgcctgtaatcccaacagttatgaaggctgaggtggaaggcatagttgagcccaggagttcaaggctgcaatgagctatgatcataccactggactctagccgggacacacagagcaagaccctgtccctttaaaaaacaaacccaaaaaaaagcaaacaactaaattaccataaaagagggtacccgcaaggccagatgcgggggctcatgct

SEQ ID NO: 519582 - DNA, 913 bp, Homo sapiens
tgatgttaaaaatgataatgaaagcaaaattagctgtatctgtaattttctctctagtgccaaatgaatgccttagctactcatagtgcatggtactgtaagtgaagacctgtagctttttttttttctttaaggaaaagcattataatgatgtagcagcatcagatataaaccttaaaaaaaaacgggtttcaattaacatttatatatggataaggcttggtaaacgtgggtacagagaaaggtggcagtgggatcaagtataaacccatttgaccaagccaaaatcagcaccctaggcccttaaattaaaatagagataccccacaaaatgaaatatttggaaggactgggaggggacaagacggggggactatcccccaaggttgcaagatacttttcaacagtgtgctactcataatacttggtcttctggcttacagtcaggaaggtttccgaggtaatctgtcatgtaataagataccctattttcctaacctggatttacacggacgcgttctcaaggtgggctaaaatgagggtcatttattggaggtgagccctattggaacattaccagatttgatcctccgtgggatgaattcagggaaacttctttgtccctgtggtcctttagaactttctaagtggctgaaaagaagaaaaatgccttcttcacgggaggggactcatgctcttcaccagttaagatacagaccctttattttttgaaccatacaagggccggtaatagcagctaacggaaagcttgaaccggtttcacggggcactatatgcttcttttcttaacccacacgtcaaattcgctgtggtggggttaacacttccctgtgcccgacgcatataagcgtttagaggagttgtttccacacgtcttgggcacaaccattgg

SEQ ID NO: 519583 - DNA, 194 bp, Homo sapiens
aattcatgtgatatgcttacgggtaagctcagagaagggtcggatctgagagatggggaggcctgatgtgggagtggggggccttgctccagcccgcgatcccctactgtgacttgcttaggcgtgtcaggctccaggctgcagtgggctggtaccacatttgatggatgaggcctgggtgcctattctgacta

SEQ ID NO: 519584 - DNA, 119 bp, Homo sapiens
ccaggcgtccatgccagataacacagctactcagaaagtttgccacctcatgggaattcatgtgacagatttcaccagatccatcctcactcctcgtatcaaaggttggcgagtcgcca

SEQ ID NO: 519585 - DNA, 582 bp, Homo sapiens
gggggctctctctggggtactgctctgccccttttcttcttctgctgggaggttggggtctctgggagctctgcaggtgcagacacccccacccagaggttgcagctcggatggagaaacaggctgggtcacaaaagccccgggaggcagcccctgctgtctggcgtcttctctggggaaagctttccggagcctgatggaggaagacagaggaaagagacctgtgttccctgatgcaactggccagccgcttcccggggaggaggaggcagaaatacacagtaactgattgttgcctttggtctgtgaactgtactatggaacactggaacttactccttcacctgactgcatgtttgtgccccataaccagcctcactttctgtctgcctctcacccacacaccctgcctagcctctgggaaccaccagccaactctctgcctctgtaagagccactctttcagtgcccacaaatgagtgagaacatggtacatttgtctttctaccccggcttacttcccttaacatgacagccttcaattccatccatgttgttgtaaacgacatgatttcaaaaaaa

SEQ ID NO: 519586 - DNA, 972 bp, Homo sapiens
acattttcaaagccccgtctctactaaaaatacacaaatgagctgggtgtggtggcacatgcctgtagtcccagctactcctgaggtgaggcacgagaatgcttgagcccaggaggcagaggtgcagtgagcggagatcgcaccactactagcttggcaacagagtgagactccgtctcaacaaataaaagaagacctgtctgatagggaaggtctataagtgagagacagatctttaatttttatgtatttatttattggagacggggtctctgtgctgggttggagcagggtgcgatcacacctcactgcagcctcaaactccccaattcaagtgatcctcccacctcagctggtgtgtgccgacacacttggctattatcatcataattatatttatttatgtagaggcgaggtcttgctctgtcgcccaggcgggatctcgaacatcactggactcaagacagtccctagacatcaggcctacccaaagtgaggaattataggcatgagccaccgaacctagaccaaggttacacaacacacaaacacagaacctgtggacaacgaaaacacaacacgggagacaaaacacgagccaatagaaaccacatgtgcacacatcaccccctagctaaggccacactgaggctcaagcaacgaaggacgggcacgagagctccaacgccagcacagccccacaaaaaggggaaaggaaaaccacggagacgaagacaacacgcaaccaacgcatcgggacaactcacacacctgaggaaccacgaaggacaccgtacataaccttgaggcaacaggcagcacaagcggcaacggactagctcacaaaaccagccacgccaacacgatcagcaaggaatcacgacagcacccacaggccaatcgcacgcgcagcacactcaccgcctgctcaagaacaggcacacacacaccaagacaggcaccactcacgcc

SEQ ID NO: 519587 - DNA, 353 bp, Homo sapiens
  misc_feature (20)..(20): n is a, c, g, or t
  misc_feature (185)..(185): n is a, c, g, or t
  misc_feature (227)..(227): n is a, c, g, or t
  misc_feature (260)..(260): n is a, c, g, or t
  misc_feature (343)..(343): n is a, c, g, or t
ccttttgggggaagtttttnaattaagaaaaacacacgcaactcctgggggtggctccacctgtccccaggacagggcctgcaactccaggggctcccaggctggattttccaccagaccagtttggggggcaggagcttgtaagaaatgcagaaccccagggacctgcagcggtttgggcagtncctccaacaaagcggcttaaggggaggaagtccggccctaanctgggagccccgtgctgaggctgattgcacgcnagggctctgggggttgggtggacagggttcctccgagaaaggggctcccagcagcaagaccacactgtgggtttaaagctgcnggggggaagc

SEQ ID NO: 519588 - DNA, 305 bp, Homo sapiens
  misc_feature (38)..(38): n is a, c, g, or t
gacccacctttccctcacttgtccaacaatggaccacnacccaacacctggaacctcagatgacgagtcaccaatacgtccttgctctccaatatgtgaagagggggaaaagcctggaggaggggcaaagatgaaagagaaaaaagcaagacgggagagtcacaatcttctgaggctttgattacatctcactgagcccccctcgttgcatgaaaaggaggggtggagggagcaattacgcattcaccttgtgctcactaaatctacactttataagcaaataaacagagtagaggaagaagtca

SEQ ID NO: 519589 - DNA, 100 bp, Homo sapiens
agcaacgtgttagggtgtgtatgtgtgaggtatgtggagtgtgtgtgtgtgtagagagtgtgtggagggtgtactgtactggggtgtgggacgggtgtat

SEQ ID NO: 519590 - DNA, 409 bp, Homo sapiens
  misc_feature (230)..(230): n is a, c, g, or t
  misc_feature (366)..(366): n is a, c, g, or t
  misc_feature (387)..(387): n is a, c, g, or t
gctgtggcttttaggctggaaatacaggatgaggaagaagcagccctccataagagtgatgagggagttagtgttgtagataaaagggttgaccagccaagatctggagccggaaagcctggctgttggggctgaaatttgcctatgtgcagggtggtagtaaagaaagaagtaaggcaggcaggtgatgtattagactcgccaccctagcgtttgggccttgaacccanggtgcttcgagtactctaggcaagcagtctaccgctgagctccatggctagcccctctgtccctttaaatagatgtgatggctccaggttaggtcaagtcaggtcaccctggagccaaatcttggaactaattacnttctgtccgacgatgcaattntcgctcaacagttaattgcttt

SEQ ID NO: 519591 - DNA, 732 bp, Homo sapiens
aatttaggcatggcggtgcccaggattgctccgtcgatgacgtttcgtgtgtgcggctggtggggtacggtgccgaggctgggggccggtgtcggattgaggccgctatggagccgtagattctggaggcgcgaatcaatagagaccactaacccccgtaacaaggagctcgactgggccagcatcaacggagttctgcgagcagctcaacgaggactttgtagtgggcctccaactcgcacacctcgtgagtgcgtggctccacaagatcgcagtccccacaggagtgggaggcgatccagtgccttgactggtgctggaaacatgcatgaagagctgcggcaagcggttccacggacgaagtgtggcaagttccgatattctcaacgagctcatcaaggtcgtgtctcccaagtatctgggctctcggacatcggagaagtgtgacagaacaagatcttggagctcctctacagctggacagtgggacctgcccgatgaggttgaaaatctgcagaggccgtaccaggatgctaagagaaggcaggggattgtcaaggtccgagcccaagcttccagatgacgactaacctttccccttccgtcctccacggacgaagaatgtgatctttgaagatgagggagaaatccaagatgctggcccggctgctgaaggaggctcccaatgccgaagaacctccgggcagccgaataggctcaatcaaagagatg

SEQ ID NO: 519592 - DNA, 168 bp, Homo sapiens
agcacagtgctcgtgagctaggaggtgaaggcgtcgtgtgagttgaggctgggtgggtctggaaggcggtagattctccctgaagtccagggcttggggagctggcagggagacagtgttgtgcgtggtgagccaggtgctgctgctggacgctgtgtagactgcttc

SEQ ID NO: 519593 - DNA, 378 bp, Homo sapiens
agtttagagaaggcaccaaagccttcactttggtttggcaccagtttctaaccacctgtttcttctaccccacctacctcttattggtaaaacataaatgcacaattatgtttgtagagcctctaccaaggagtctccctccctctttgtctgttgattagccaatctctgactctccattttccaaaagtaagagactccagcacggccttctgtctgccccgcagtaaagtaactcccatataaactgcgtatttgaaagcgagacttcatgacaaccgcccgtcttccatttcacctgcatcttatctccgtgactccaactcgcgggtctgttctgtttttccatgagactcaaaatactggcggttttctcca

SEQ ID NO: 519594 - DNA, 207 bp, Homo sapiens
cacagcccagtcaccgtcgagtcgtgggcccaggttgggggtccagaagctgcagaatccgatgagactgacgtgcaagtaaagtctaagcccggatgaccagccctgctgccgtcactggatgtgcctcccccgccacctgtgtgttcttttgatacattcatcttctgtttttctcaattaaagttcaaagcaaccacctgagga

SEQ ID NO: 519595 - DNA, 209 bp, Homo sapiens
cacgaggtggaagtggaagaactcagacgatgggaggcaacgtatcatgaaatgtccaagcatgttctaagggactgtaagcaatagcagctcgagatgtgtttttaatgcaatagaagccaagctacaagaagctacagcttcacgtatagacaaccttctttgaaatttacagaggaaaagtgtttgacttgcttgacaggaaggca

SEQ ID NO: 519596 - DNA, 213 bp, Homo sapiens
agacgttcccatccaggaagttcccagatgtaccgaaccccgcagccgcgaccaggagccccacgtcgaggtgcgtcgtctcccgcacgaccgtcgcgggaccggacggctccgacagatccaccgccagcgtgcgcgtggcgatgccatgccgcgagccgagctccgccccgagcgcgtcgagcacgtccttgcggcgcgcgacgagcgcga

SEQ ID NO: 519597 - DNA, 432 bp, Homo sapiens
  misc_feature (195)..(195): n is a, c, g, or t
  misc_feature (204)..(205): n is a, c, g, or t
  misc_feature (212)..(212): n is a, c, g, or t
  misc_feature (220)..(221): n is a, c, g, or t
gcacaggattaattttaatctctagccataaaaacataagtaatagtaagctcctaagcttggacaaaggctggattctcttcactataactgagtggtaatttaaagacaacaatttaatgtcactaattttcaaaattaaatagtttaagctcaatttaattttgctagatatttaacaagaagcagttgaangcggggggnnccttttnccccaaannacctcataacctatatgtgtgtatgtctacatctgtgtatatatcataggatttgagaatcttaacacatgtataaataagtatatataaactccaattttaaatcttaaaattgctgaatttaccctcatattctttaaaaaacttaaagcattatgaatgtagagaaattcaccagagctcactgcctatttgatggctgtaacaagtc

SEQ ID NO: 519598 - DNA, 108 bp, Homo sapiens
cagaactatgagttcaccaactatctacattgtatctcaagaactgtaaaagtatctggtacctggaatatgctcaataaatgaatgaataagggttaaaaaccctga

SEQ ID NO: 519599 - DNA, 283 bp, Homo sapiens
cgctcggtaccgaatcacggcaggcacaacagcatcaataaaaaagtccccacaaaaacctcatccaggccgggcgcggtggctcacgcctgtaatcccagcactttgggaggccgaggcgggcggatcatgaggtcaggagattgagaccatcctggctaacacagtgaaaccccgtctctactaaaaaatacaaaaaattagccaggcgtggtggcgggcgcctgtagtcccagctacgtgggaggctgaggcaggagaatcgcttggacccgggaggcga

SEQ ID NO: 519600 - DNA, 275 bp, Homo sapiens
actctagagtatccccacacgaacgccttcggtaccgggcgtgcgggcaacagcttgccgatggcgttgcggcgttcggtcggcggcgatgtgacgttgcgggtggtgccggggctgtattacgaacgcttgagcttggaggccaaaagcagcttttttgccgagccgtggacggtcggctccgaggccgatcgcattggctatcgcttcaagggcggcagcgcgttgagctttcagccgcgggaacagccgtttggcgccggctccgatccttc

SEQ ID NO: 519601 - DNA, 98 bp, Homo sapiens
cttcccagcctttatgcaaaaaaaggggagaatcaaagctttcatttcacaaatgttgcgtggaaaagtatccgtaattaaagtttcgaagtaattta

SEQ ID NO: 519602 - DNA, 1199 bp, Homo sapiens
  misc_feature (216)..(216): n is a, c, g, or t
ggaacaggaagaggacgaaaaaaataaccgtccgcgacgccgagactaaaccggacccgcaatgcacgcatgaatcaggcaaaggtcagtatccagtcatagccaagctaccctgtgcaggcctcctgggacatcgcagtataccctacagagccttggcatcttcctcaggcttccaccctatatccgatgactccactctgtcctagctcagangctctatcgtccgagcttgtgtgctccgcaggggctgcgcacagtcgcccaccattgtctagccgcatttcctggagcctctctgtactcttcccattggcccaggtctgtgggctgtggggcctttaggttccagaattccccatggcttattatccagtcggtcccatcgtatccacctggtctccacatgtgctggtggaaggagggtatgatgcacggtgcggcagatttggagctggggctacctgtgtggccaacatgcctatccgtccaccgtcctgtgatgcccgtccgcaagtgcgtgcgtcagcttgcagtcatgcagggagccaacgtccgtcgtaagtcagcggaaggggaacttcattcatgggtggtccagatggtggctacaccatctggtgaggaacccaaggccaccctttgtgccgggaaatgacatcacataacttcagaacttctcagcaacgtaacgtgcttgagtcaatattcactctgaggtagcagtatagagcacattgtcgtcggagagtggaccttgctggtgcccaaacgtacaagggcacttttcaaatttcaacttaaggacgcctgtacagaggaggcagataacttccttaaagcatttagaaggcacgcgcacggcacccattcctaacaatgcacggtgggctaaacgcgcctcaggaatacctcaaatatacccgcgataaaaacgggaccatcatggtatcaacatactagtagaaacagaaataacatacgtctcgaacgaacattgtcaatcactgtcactctaccgggcaccactcgttggagcaatcccatcaccgatctacattccacgacacaataaaacaaagagccatcaccaatttacacacacaacaaaattcacatacacacactaaatcaagagacacacttcacttcatattgctaatacttcatgctagaacttcttgcatcttcagttcact

SEQ ID NO: 519603 - DNA, 174 bp, Homo sapiens
  misc_feature (142)..(142): n is a, c, g, or t
gagtaagaacacacaaatgtcatcaactgatgaatcaataaacaaatgtggtctatctatacaatgaagtattattcagcaatacaaaagaatgaagtactgatacatcctcaacttggacggccctagtaaaacattcagntgcaagaagccagtcacaagaagagatatcag

SEQ ID NO: 519604 - DNA, 1226 bp, Homo sapiens
ctgtgttttttttgctcgatttgacaggcagtgcagacgcgaggagcggcgttgtgtgacgttaggttgtgtcggctgcttgttggctgccgtggtcgtagtgctgatacggtttgtgtgttcgtttgctgtcctagtgcttattttcgtgctcatcacgtggtttcctggtcgcctcttgtcccttgtgtggcctgcttttggtgtgcagtatgcccccgcttttttttcctgcgacgcagccctttggtgtttaaggttgttgtctgtgtatcacttggccgttattttccggctgtcgccgttttccccctacctgtgcttgttgtgggggctctgtctccgtgttgcgcgacttgttggttctggtgttccgcgcgcttcgggtcgggaccctattggttctagattggccagcttagcgcatttccctggataatgtggactagccagtctttcaggaccttcagatagccttagaaggtttgccactgtctaggtctcgccaccattttggggaccaccctggactggtcacaagccagggttcaccagttatgtgggagtgttaaggttaagcttttgacttgacgcctgcgtgtgcaccagatgaatatccttccgtaccccagtccccagtctgtcctatggggacccaatttggggccggccggctatcccggagcctgggaaagaggccctcgcccaggtgtatggccagggcccagggtggcctggggccaccccagcggatatgtgctttagttatttggtccacccagccgtccatcctgggcttttccttactgtgtcttgttaccaggcctccacccaatcccccagaactctctctccttccttccccctgtccaactttctctgctttctgagaattaagaaacccatattgtgtaaccaccccaccactttaacttccagaaaagcacatagccctattatagtgggtgtgaatccagaccccgatgctgttccagatgacctacttacattttccatgtggataagtattaagaacccataccaccatgccatctataactgctgggccatcccagttgactttttaatgttcagaatgggattcccccaccacttgacaccttccagctatatcgcccgaaagcttaatctatggatatggtattttgtgaatgatctctttcaatctaaaggacaccctttcttttacaatcaataaaaataaa

SEQ ID NO: 519605 - DNA, 347 bp, Homo sapiens
acgagctctgtaccctgtgggtatgcatcaatacaggaagggcccagcgttggggacgagccccaacgttgagaacaagtaagtgaacaattagttgtactgaaccacgtagttacgaaacagctgatcatgaacaacctgtgtgtaatattatttccctaaacacgtagcacccttcagcaggaccctataaaactttcctccagcccttgcctctttgcaggtagccccttctctgctgagctgcccaatgcaacatattttcacaatttctctaataaatctgcccttctttacctacaactatcttggtcaatggctttaccacctgcaaaactgaccctagg

SEQ ID NO: 519606 - DNA, 1438 bp, Homo sapiens
gctgtcttaacgagagccaaacagagcccagtgagactccggtgtgaggaaacctcattgtatctgatacggatagttacttatgctaagaccagtaaatggttgattccagtgaggaagttatggcgaaacgaacgaatcagataaacaagagaaatgtgcgtgttcaagatttgcatgctgtattaggattatcttgtggattgatgttatttctacttttttgattgtttttgccattagagaagttaccaagatttacacgactggtcaatgcacacgtcttgatgaccagaaaagtattgtgtccgcgattcatctaacctcgccttcgacataactgtctctactaggacatgggattcattgtcccgccgttattgttggaggtgaaccactttaaacttgctttgtccctagcacttcctttgtaacacgacatacggaagatcgacacacgatacggaacatggtgcttcttatttgacgcaccctcgacgtttacgcgccacttgttgacatagcctgcaattccttccatttaccccgctattatcttgcggcttttcgacacgcccttgccgtgtcatcacttctttcggtcaaatgctttgtccctattttccgtccgaaagtcttatgattcgggcgctattctggggtatcttccaagttcccaaggcgttaggccttggcgacacgcatctacaactttcgtctggcaaatcttacgtggcactctcacgtttgtgttaacccacgacatgacaccggtttatcctcctatacaaccagctttctttgtaaagctaagtttgacattctctcgtgtgaacacaaagcctttcttttcggcccgttctacttggcggcggcttaatataaggcttcggcgccaacctcccccggtttatgggaccaaccaaaaccccacctcaaaaagttccatttgcggcccgttcgttcggaccactaaagtgcactccattccatttcggccaaactgtgattccacatacgggttttcgccggaggcatatgtaggaggcgaaatacggtttctttacgcggtgctacgaaagattccccttctgtgttatacacacgagcattttattcgccctttttatcaccctttaagtgtgcccgctaatgagatgtcgcccctccgaaagtcatttctacgccgtgaggcagatatcaagcacacgcggattcttcaggacgcatttaaatcatgctgcacacggctgcgttcccttctcgactagcaaaagaggcgcgttagggtttacaccaagttttcccctttgggtccaatagcccatttgctaacactttatcgaggcgccgtttgaacacagagaactctgtagttaatcatgttcctattcgcccaattactaacctcaactctggcttagcggggtccacttca

SEQ ID NO: 519607 - DNA, 411 bp, Homo sapiens
taatgtcagaacataataattctacagagctcaaatcacaagctcgacatattccaaatgttcatcaataacagaatgaatatcagtcccatcaataagggggaaaatcaaagaaaaaaaaacggagagggtggcagatgtcagagctgactgaaggttgacaactattctcctttaaaaagagcaccactgcttcctcaatgtcactgacggatatgaacaggcaagaggaaagtacctgtccttatttgccttatatacagaatagggtaattgaatgccagtgggtctgtttaggaatggctcgctaacacattgaaaaaatgaaagacttcatccttgtcgtagatagccacttcagtgaacatttcagtgccagtgactgggtgatagatttctaccacatctgtc

SEQ ID NO: 519608 - DNA, 383 bp, Homo sapiens
gaacgaggtagggacccagaaaaatataatgaaacctcaaagcccaggtattcggggaccatctaacttagagcaaacagccctccccctcagggatctggtggtccaatgaagtgtgaaaagatgataattactattatcataatcattagaatatgcgggccaggcatggtggctcatgtctataatcctacgcaccgggggaggccgaagcaggaggactcactggagcttaagagttcaagaccggccggggcaacatagggaggacttatctctacaaaaaataacaaaaatcagccaggcgtggggggtgtgtgcccatagtcctagctactggggaggctgaagtcagccagggtggcacaagtgcactccagccg

SEQ ID NO: 519609 - DNA, 188 bp, Homo sapiens
attacacagctccagttacaacagcgccagttacagcagctccagttacaacagctccagttacaatcagctctcgaacggaaagccacatctcgccacgtaggacaggaatcgggcaaattacaatggaagaaaccattgagaagatgcaggaataatgtattcttatatactagctttgttactgg

SEQ ID NO: 519610 - DNA, 156 bp, Homo sapiens
tccccagcattgtgcatgcaaaatgccatggctgcatgttcctgtatctcccaaggcagcactctccatttgctcactttgcagctaagtatgtgctcccttaggttcttgcagtccatgctgctggcctgactactatggagacaaagggaaaca

SEQ ID NO: 519611 - DNA, 691 bp, Homo sapiens
  misc_feature (552)..(552): n is a, c, g, or t
  misc_feature (559)..(559): n is a, c, g, or t
  misc_feature (576)..(577): n is a, c, g, or t
  misc_feature (677)..(677): n is a, c, g, or t
ggttaacacaagctgcctatagacggcaaactaaaagagcaccctgtaacacctgcccactgggacgtcagttgtaaacatgcacccctagacactgccatggcatcgaagccccacagccttgcctgtctgtatgctcccctagagatttgagcagcagggtgctgaagaagcgagcgacaccccatcacatgccctgtgagggggacaagggaaccttttctgtttcactaggatgacgagtgtctcctgaaccaaacaccaataacacaatgaataagactatagttaaacatatctagactctggacccagaaatcaagacaagaaagataattttgtgcatattgtacaacatctctgaggctcagtttcccaaacatggattctacaagtggagtattgagttcaaattccagttcttcttaccaattgtgtgactttgtagattaccttgtgtgtcctcatttataaattcaaggcacaatagcacctatctgacttagtacttgtgtaaagtaaatagtccatgtatggtaaactaatacatangaccccnagtagaaagagtctcannaagtgcgtaagacatgttcactggtttgtggctataatgggtgtaataatttctcatctgcgaagaatcaacaattctacttcccttgactgtgacatgngtgatttatcgccc

SEQ ID NO: 519612 - DNA, 104 bp, Homo sapiens
  misc_feature (41)..(41): n is a, c, g, or t
cgccgcggagggtcaggtcgtttctgcgcgggctcccggcnatgctactgctgctgctcttcctcgggccctggccatggcagagccacggcggcgaagtactc

SEQ ID NO: 519613 - DNA, 184 bp, Homo sapiens
tcgggtgctctagaggatccaattctgcaccacagcctgagggcggagcgggtatggtggctcatacctatatcccagcactttgtttgagaggcagaggcaggcagatcacctgaggtcaggagtttcagaccagcctggccaacaaggtgaaaccctgtctctactaaaaatacaaaaatta

SEQ ID NO: 519614 - DNA, 199 bp, Homo sapiens
tctgccactctaggcctgaggatggggagctttggtgcttcaagtagttcttctgggacttgtccccacagggaatgcaagtgtctgtcatggaaacattacccttccttgttcctgctactgtcacctgggcatttagcgtttgtttggctttcagggcgaagcattacatagttcaaaagtgtactttatctccaga

SEQ ID NO: 519615 - DNA, 195 bp, Homo sapiens
gctgcggtcgactctagacggactcccctctaccctcgcggtgtgccttgttggtacgacgtgggctacgggcactttttaactcttacgacgcgacaagcctataatcacctggcccgctcactacacggggactggccactggctacggtttatagactagttgggttggttgtgtgtaaactgacgtgtggg

SEQ ID NO: 519616 - DNA, 475 bp, Homo sapiens
  misc_feature (475)..(475): n is a, c, g, or t
agaacacaaattactttctcggtcgataaaatcgcctgccaaccctaccactggtaagaccggtccatatgaagcacatttctacactcaactaatgccgtgtataaagccatacccactttctagattgatgaggccatgatcgtgtgaatgcctattatagtccctccaccagattatgtatcatatgaagctgaatgcagggaaaggaaactgatacctgaaataagagcagggacgtggtatagatttgcatgccataataactgacctatgaagccccacctttctcttaagattgaacatgtgtggcctttgcagcccttatatgtacttgtgtcgaagtgccaggattaaaggaaactccgctaccatgcactcctcctactaaaaccactgcagcttggctcccactcattgaaccctactatgcatagcattcttggaagagctgactgacatgagcagccccatn

SEQ ID NO: 519617 - DNA, 290 bp, Homo sapiens
ctgctccgcccctctctgggtccagctgctcttccttacctgcctcgccttttacccttccctgtcgcgtttcctctcctcagagactctgccattgatgaagctgctgtccactcacccctagatttttgctgcatagccaggaagatctgtggcctggaatgttttggggaaaactgaaaggactgtgttatgggagcgggagcataactggcacctggctaaagctaccccttttcattatgcttttcttgctccagcctgagcagagaaacgtggctacaagacag

SEQ ID NO: 519618 - DNA, 375 bp, Homo sapiens
aaacccggggggatccctttctttccccgcatggccatttttgaaaaaaccaggaattttttgggacccattggcccctttgattttgctctaggggcttccccgggcccggggagggaacttcccccaaactttttgttttttttataaggccggggggaaataaaaagggagaagaagattccctcggcccggggtccccagtattgggaagggaccctttttgggaaacctgggaaaaaaaccatcctcttgggagaatttttaaggggggaaggttggccaatttgaaaaaaaaaaaattaccccggggggcggggccctcccttaaaactaattaaagggccctttctaaaaaaaaaattttttaaccca

SEQ ID NO: 519619 - DNA, 277 bp, Homo sapiens
gaaggtcaagtcacgagtccggatgccgtccaaggccaagaagagcgttgctgaatacgtcgcgatccgagcatgcaaggagttcaacctgggcggctgggggcgggacacaggagggacagcgtgcgagcgtggccagggcgtgcttcgacctggcacagaagcgcatcttcgggctcagtggaagaggactggtaccgtcgcttgctcggttctgacctctacctggaccgtattaaccagaagaagatgagtcgcccgctttaggggcgactgg

SEQ ID NO: 519620 - DNA, 792 bp, Homo sapiens
ggttcctgcgacgcccgtgccgcaccggacccagtgctggaggcctggcctggtggcacactgggccactgctggtacctgctggtgctggacaactgggtctgttccaatgtcctgcttgctggctgggctgtgtccctgggcatgtgacccaggtcccgagccggcctgcagttccgcgctggtgtgctgccctgcgttgtctgtggctgtgggcactggtgtgcgcgtctgggccctgcaggtggggaacagctctgggcagcctggagccaactgcgctggatgctgcagctcgcccttcgaccgaatgtgccggtcaactggagcttcaggagtttgctgctggactacagattccaggcacctgggtgtctcctcacaagggctgtgttgatcatcccatagttttgacagaagctgtgtgcaaacccacgtgtattccacggcaaatgattgtctgagcttctttattgaggtgctacgggattcccaaggtttgcctatggaatagcacagctcttcaggcttctagcagaataagccaaaggaactcgatgtgcaagtgagctaatccatttctcatctggataccaggtgtaacgcagtgttttaccccagtcttaagaaggggagattagattgctaaagaaacttgcaatggtgcgatcagagtcttggcaggaatgcacagccagaactggtaacctacagaggtctcctaccaagctgaagtaccctggggcacacatgtgaggcatcaccctacaggcgcagttgaggagaatctga

SEQ ID NO: 519621 - DNA, 443 bp, Homo sapiens
cttcttcctagctccttcaccacagtcgcactggctcctggtactctatttcctatcttcaccacgaacggctgcttgtttcggtatgctccgtttgtcctagcttcatcaaacactggttcctggtatcctgtctgctgctgtcttcctcagattcactgaatccacttctgtgtagcaccttggatcagctgtcaattaatgctagtcctcaggatttaaaaaataatcttaagctcaaagtccaatgcaaaaacattaagttggtaattactcttgatcttgaattacttccgttacgaaagtccttcacatttttcaaactaagctactatatttaaggccttccaaattcttctaagctcttccaaaagccttctgcctgagttagttttagattacaccagtccttttagtagctttttgatgtgcggtaaaagctt

SEQ ID NO: 519622 - DNA, 1651 bp, Homo sapiens
  misc_feature (1244)..(1244): n is a, c, g, or t
ctgatctggtgcttggttcggtgatgtcttgctcgcttcaacgagtgttcctggtcagtcttctctgctgagtggtgatcgcgcgttgtagttgctgttctgcttcagagggggccccttcgtttttgagtgcagtgggggtgtgcccctggtgagcgctctttctttctacttgttctcgggggagttgcccctttgtgagatttgagccggtggccaccctgtttggacgaagggggtttccccacagtgggccccccttgggggtgcacaaggatcggtgtggttgtgccgtcctccccgggggccaccccgccgttgttgttttcgtgggaagccctgctggtcgcttttgacgcaggagttacactttgggggccctcttggaagttctgtgggccaccaggaggaacccctttgcggtttttaagagcgttttccgtaccaccacgctcacataggggtagaagagaagggggtttgtgaccaaatgaggagaccctggttccgtcccgaggcgccccgccttcgtagaaacaaaagaggccttgggggggataaccacagaagaggggggacaatattttggcgtgtaagaaagccccaccaggggggtcttcctctttcttaggggcgccactctctctcacaccaaggggggggtgttttttgtccacgcgagctttaagttgcgaaccttacctggggttgctttttctgacccctctggttaaggccctataatgtgcacagtgccccacatagtgttcgtgtgccccccttgggcacttgttgggggcaacacatggggaaaggaagtggtacttcgtacttagggggttgtgtaataacgccttgggcaacccactcgggccccaccctggagagctttcggggggacaaaaagagggggagatatatatttcaacagctggagagccacactctgtgtttctggcgtctcacagaggcgtctccctcggggtgtttatgcgcgctcactcccccccctcattggagtatttccacgggagatttgggggtgtcacaaaggctcgggcactgagataccccacggggcccctcggcgacagcacacactctcggggagattgggcctctggagagagtcgggaagagagagaatacctcggagactctgtctttcttgtgtcgcctctctctccgctccgcttgcgcacacacactttataactcgggagaactctctatattcctcgctntaaggagttttcttctcgagggctctggtgtgttccctcgtctctgggtgggggaacaagagaggagacaataaggaggagaagggagagggcttctatgagaagaaggcacgcccctcttctttgttcctctctcgggggtataaatgaggcttgagacctatgaggtaaaatgtgagagaagaacccaagaagcctcctggaattttttaatattcccattaaatagttaggaagatataataataataacataataatgataatatttctttaaatattttgagttctttgataatagttgtaaaaaataccatttcccttctggccctgaagcctggagtgagacacctgaagaaaaactgtgtttcatttaaagatgttaattaaatgattgaaaccttgga

SEQ ID NO: 519623 - DNA, 327 bp, Homo sapiens
tctgtggctgcagtccatcgaactccaggtggctatggcggtgccagtggatgtcggcagtggccttaggcctgggtggaggaagcagctactcctatagcagtggtcttggcgtaggaggtggcttcagttccagcagtggcagagccattgggggtggactcagctctgttggaggcggaagttccaccatcaagtacaacaccaactcctcctccagcaggaagagctatagcactaaagtgcgtctgctagctctcggtcccacagtcctcaggcccctctctggctgcagagccctctcctcatgttgcctttcggagaaga

SEQ ID NO: 519624 - DNA, 221 bp, Homo sapiens
aaggcatgcacacatcccaaccacaggaagccaagccagactgacatacatcatatgcgacatatcgatgagccatgtaactaggaggccacagaaacatagaggggctcatccgcatcttctactcgcgatcttaacggtcacagtgtccttgaaagggccatagctgataaacttcgggtcgatgtgcacgtaggcatgcctctaacttcaagctatcg

SEQ ID NO: 519625 - DNA, 394 bp, Homo sapiens
cccccttttgggcccccaaaaaaagggggtaatttgggtggcccgggaaaacccccccggggggccctttaaggttaaaaaaaaggggttaaaagggggaaaggggggtttaggtcccccccccccccgccccccccccccccaaaggggggggcaaaggggggaaggtttaaaagggtgggggggggggaggtttccccccaaattgggggaaaaattttcccgggggggcccccaaaattttaacccaaaaggttctttgggggggggaatttttgggggtttttggttttttttttggggttaattttttaaattttggcttttttgaattttttgcccggccttaaattttttgggtttggttaattaaaaaaattttttaaaattccca

SEQ ID NO: 519626 - DNA, 992 bp, Homo sapiens
  misc_feature (36)..(36): n is a, c, g, or t
  misc_feature (61)..(61): n is a, c, g, or t
  misc_feature (64)..(64): n is a, c, g, or t
  misc_feature (114)..(114): n is a, c, g, or t
  misc_feature (157)..(157): n is a, c, g, or t
  misc_feature (161)..(161): n is a, c, g, or t
  misc_feature (196)..(196): n is a, c, g, or t
  misc_feature (210)..(210): n is a, c, g, or t
  misc_feature (243)..(243): n is a, c, g, or t
  misc_feature (251)..(251): n is a, c, g, or t
  misc_feature (257)..(257): n is a, c, g, or t
  misc_feature (259)..(259): n is a, c, g, or t
  misc_feature (312)..(312): n is a, c, g, or t
  misc_feature (329)..(329): n is a, c, g, or t
  misc_feature (349)..(350): n is a, c, g, or t
  misc_feature (352)..(352): n is a, c, g, or t
  misc_feature (356)..(356): n is a, c, g, or t
  misc_feature (358)..(359): n is a, c, g, or t
  misc_feature (388)..(388): n is a, c, g, or t
acagaacaaggtgttgtgttggagggctccgtcttnagtgactttgtgttcctggaggcgntgnacaaccagggagtcatccgaaagcagtgtgtggaccactacaacgaggtnaagagcgtcaccgtctgcgattacctgccccccccacctggtnattnacatcgatgtgcccgttccagaggtccagaggcgnattcagaagaaagnagatccacatgaaatgaagatcacctctgcctntctacagnacattnanaatgcctataagaaaacctttctccctaagatgagtgaaaaatgtgaggtttnacaatattctgcaaggnaagctcaatattcaaaaaanntngtanannacattgaatacctgaagttcgataaaggnccgttgctcaagcagaacaatcgcactttataccacctgcgattactggttcaggataagtttgaggtgctgaataacacaagcattcctatctttctcccggaagtcaccattggagctcatcagactgaccgtgtcttacatcagttcagagagctgccgggccgcaagtacagccctgggtacaacaccgaggtgggagacaagtggatctggctgaagtgaacgggccgccttctgctccagctgcatcacagtgatggccaagctgcatcagccgcactctcctggacgccatatagctttaagatcgggggagggtaaataatgcaaaaattgcacagtggaagaaggggtctcacaaaaagcaatccatcctgtagtataggtaatggagttgggggaagcagcttccattctggatgtttggaaccctttagctttgttttggaatggcccaccattctcactggaaaacagtggtctgctgtgaaaggccagctctcggcagcccctgtggtttcagcgctgccgctctgtgtcattcaggttgtgcacattgtttttcttctgacttccagaaataaaagtgtttccatgggaa

SEQ ID NO: 519627 - DNA, 389 bp, Homo sapiens
  misc_feature (12)..(12): n is a, c, g, or t
  misc_feature (384)..(384): n is a, c, g, or t
attaaaacagancattttggccttataatgaagtaaacatgaacacaagttttgcctaggtgtaaccctcagttagagatcctgtctgtaggaataagagttaggtacaggctggatgctgtggctcatgcctgtaatcccggtactttgggaggctgaggcaggagaatcgcttgaacccaggagtcggtgactaatgtgggcaacattgttataccctatctctataaaaataattaaaaaattaagcaggcattagggtgcatgcccatagttccagctcctcaggagactgaggctggaggatcccttgagctggggagttccaggctgcagtgagtcatcatcacgccacggcactccagcctgggctacagagtgagnccttg

SEQ ID NO: 519628 - DNA, 815 bp, Homo sapiens
  misc_feature (36)..(36): n is a, c, g, or t
  misc_feature (61)..(61): n is a, c, g, or t
  misc_feature (64)..(64): n is a, c, g, or t
  misc_feature (114)..(114): n is a, c, g, or t
  misc_feature (157)..(157): n is a, c, g, or t
  misc_feature (161)..(161): n is a, c, g, or t
  misc_feature (196)..(196): n is a, c, g, or t
  misc_feature (210)..(210): n is a, c, g, or t
  misc_feature (243)..(243): n is a, c, g, or t
  misc_feature (251)..(251): n is a, c, g, or t
  misc_feature (257)..(257): n is a, c, g, or t
  misc_feature (259)..(259): n is a, c, g, or t
  misc_feature (312)..(312): n is a, c, g, or t
  misc_feature (329)..(329): n is a, c, g, or t
  misc_feature (349)..(350): n is a, c, g, or t
  misc_feature (352)..(352): n is a, c, g, or t
  misc_feature (356)..(356): n is a, c, g, or t
  misc_feature (358)..(359): n is a, c, g, or t
  misc_feature (388)..(388): n is a, c, g, or t
acagaacaaggtgttgtgttggagggctccgtcttnagtgactttgtgttcctggaggcgntgnacaaccagggagtcatccgaaagcagtgtgtggaccactacaacgaggtnaagagcgtcaccgtctgcgattacctgccccccccacctggtnattnacatcgatgtgcccgttccagaggtccagaggcgnattcagaagaaagnagatccacatgaaatgaagatcacctctgcctntctacagnacattnanaatgcctataagaaaacctttctccctaagatgagtgaaaaatgtgaggtttnacaatattctgcaaggnaagctcaatattcaaaaaanntngtanannacattgaatacctgaagttcgataaaggnccgttgctcaagcagaacaatcgcactttataccacctgcgattactggttcaggataagtttgaggtgctgaataacacaagcattcctatctttctcccggaagtcaccattggagctcatcagactgaccgtgtcttacatcagttcagagagctgccgggccgcaagtacagccctgggtacaacaccgaggtgggagacaagtggatctggctgaagtgaacgggccgcctccattctggatgtttggaaccctttagctttgttttggaatggcccaccattctcactggaaaacagtggtctgctgtgaaaggccagctctcggcagcccctgtggtttcagcgctgccgctctgtgtcattcaggttgtgcacattgtttttcttctgacttccagaaataaaagtgtttccatgggaa

SEQ ID NO: 519629 - DNA, 775 bp, Homo sapiens
  misc_feature (16)..(16): n is a, c, g, or t
  misc_feature (62)..(63): n is a, c, g, or t
  misc_feature (67)..(67): n is a, c, g, or t
  misc_feature (107)..(107): n is a, c, g, or t
  misc_feature (119)..(119): n is a, c, g, or t
  misc_feature (134)..(134): n is a, c, g, or t
  misc_feature (140)..(140): n is a, c, g, or t
  misc_feature (172)..(172): n is a, c, g, or t
  misc_feature (181)..(181): n is a, c, g, or t
  misc_feature (193)..(193): n is a, c, g, or t
  misc_feature (201)..(201): n is a, c, g, or t
aaaaaaaatggtgganggttttttaaccaaataatttcttgcccaaaggggaaaagcctccnntttntttcccaaaaaaaaaggttgggttagaaggaaccatgtgnaaataaccctgnaagtttccgtataanaagggncccgttggcctccagagccaggcaccaatccnccacctttnataacccacccngccgcatntacctgtgttccaggaataaagtgttgcagagtgcctgcaattacacaccaagcattcctatctttctcccggaagtcaccattggagctcatcagactgaccgtgtcttacatcagttcagagagctgccgggccgcaagtacagccctgggtacaacaccgaggtgggagacaagtggatctggctgaagtgaacgggccgccttctgctccagctgcatcacagtgatggccaagctgcatcagccgcactctcctggacgccatatagctttaagatcgggggagggtaaataatgcaaaaattgcacagtggaagaaggggtctcacaaaaagcaatccatcctgtagtataggtaatggagttgggggaagcagcttccattctggatgtttggaaccctttagctttgttttggaatggcccaccattctcactggaaaacagtggtctgctgtgaaaggccagctctcggcagcccctgtggtttcagcgctgccgctctgtgtcattcaggttgtgcacattgtttttcttctgacttccagaaataaaagtgtttccatgggaa

SEQ ID NO: 519630 - DNA, 580 bp, Homo sapiens
caacttcgacggacgcattcagtaaacacagtatgtgcaaggacagagaagaactgagtaatacaacaaatacatctgatttagcagacatagagaaatttgaatcaataccttaaaaaatgtttgaagtcatgtatctaccataaaaaaaagcctaaacaaaatttgaaaaacatttttacagtcaatgttctcaaataattatctgcttaaattgggtggaaaaagatgaaaagtaactcccagtaatttgttacattactggatatccccaggatcaaggagggtaacaaaagcaaagccataagcaatctctagaaagcaatggaaggaagataaaagcaaaacttaggagataaaacaggaaatcaataaagagaaaaaatgaattatgagggggggaaaaagaagggtaaacaaatccaaaagctggttttctttttgttttttgagatgtgaatgcgtccgtccgtcgaaggacgcattcatacagggagcttggtgtagtggcaggtgcctatagtcccagctactcaggagactgtggcgggagaatgacttggaccagggagttggaggt

SEQ ID NO: 519631 - DNA, 1624 bp, Homo sapiens
  misc_feature (266)..(266): n is a, c, g, or t
ccccgtcacaagccctggccccagatccctcagagtctacgggttcagagtctaagccccacgtccctactaccgcccaatgcgccgtgcaccccagcgacttcagagcccgttagaacatggccgagtggctgtccagaccccgagtcacgcaagcgggcagccagggagcgagtcgtgaggagacaagtgagcctgtgaggagagcactgtggaggcgccgtaagtggctgacgcgggactgacgtactcgtggtacagttctntccatgacgtcgtgcatgtggccatggacgcattgagggtgactcgcgctcgatcgaaatgatctgcgtcagtgccgtagacgaacggatctgacatcgcaggccgggcgcactcccagtctcagcaatcaacttgatgggagcattgccttgtggacgcaggcttcagcgttccctcagaatgacaagacggaagatgaacgacgaagtgcatgttccgtgggggacaaggctctgccaaagacagccgcggcagggcttgaggaggctcgaggagaacaagacattaggacctcacgcacacggtggcccggaccactcctcaggcagcgggggtggtccaggcatcttgggattgccttgccctatggtccctgggccatcctggtaccaagttggcagtcctgccctcccatggcgtggaacgccgtgggaacagccagtatgggcgccaccgtggccgcctggcgcaagggcgaccggccatgggagccccctgccagggcgcgctggatatggcagagggacacgaccacagaggtagccgggacggacaagtgagtgacgagggttacacgccaagagccaggtggacggaagaatacccgcggggaccaacgggatatcttcgtcgccaacgggaaaccgtggggtggcaaaggaccatccagcagcgatcctatcggggccaataggcctaacacatatagacacgcctatcgtagggagggaaacgcaagttgggcagacaagcggaacgacgacttggcaaggacatgaggcatatccatacattgacaccagagggtggggaaagctcagaggatagcgattgaaaataaccatgataaatggcaaagacacacggaattggtgatggcccggggagccaatcgactaccccgggacgagccaaggtcccaaggacgttaaggagataagaaagacacgaggatgatcggatagagagcacagtcccacgagcaaggaagacacgcagagcgcgacacaaacagtgtgacacacgaacagtgtgtcacaaaatcaaggggacacgtgcgagacacaagagagtacagaacggctgccagcatcgaccagagagttagtggtagacagccactgggcacaggcccacacaggatagcgaccaaggagcaaaaccaccgacacaggcgcaggtaacagagagcgacacacgaagagcaaagaacacaagcgaagatacgacaccaggctaatcgacacacaaggcaaatgagacagagagagtccaagcagaacgaaagtaatagaacagaacgttcagcaaagcgagcgagaaaacaggagaacacaaaagacaagctgagcacccg

SEQ ID NO: 519632 - DNA, 1225 bp, Homo sapiens
  misc_feature (36)..(36): n is a, c, g, or t
  misc_feature (61)..(61): n is a, c, g, or t
  misc_feature (64)..(64): n is a, c, g, or t
  misc_feature (114)..(114): n is a, c, g, or t
  misc_feature (157)..(157): n is a, c, g, or t
  misc_feature (161)..(161): n is a, c, g, or t
  misc_feature (196)..(196): n is a, c, g, or t
  misc_feature (210)..(210): n is a, c, g, or t
  misc_feature (243)..(243): n is a, c, g, or t
  misc_feature (251)..(251): n is a, c, g, or t
  misc_feature (257)..(257): n is a, c, g, or t
  misc_feature (259)..(259): n is a, c, g, or t
  misc_feature (312)..(312): n is a, c, g, or t
  misc_feature (329)..(329): n is a, c, g, or t
  misc_feature (349)..(350): n is a, c, g, or t
  misc_feature (352)..(352): n is a, c, g, or t
  misc_feature (356)..(356): n is a, c, g, or t
  misc_feature (358)..(359): n is a, c, g, or t
  misc_feature (388)..(388): n is a, c, g, or t
acagaacaaggtgttgtgttggagggctccgtcttnagtgactttgtgttcctggaggcgntgnacaaccagggagtcatccgaaagcagtgtgtggaccactacaacgaggtnaagagcgtcaccgtctgcgattacctgccccccccacctggtnattnacatcgatgtgcccgttccagaggtccagaggcgnattcagaagaaagnagatccacatgaaatgaagatcacctctgcctntctacagnacattnanaatgcctataagaaaacctttctccctaagatgagtgaaaaatgtgaggtttnacaatattctgcaaggnaagctcaatattcaaaaaanntngtanannacattgaatacctgaagttcgataaaggnccgttgctcaagcagaacaatcgcactttataccacctgcgattactggttcaggataagtttgaggtgctgaataacacaagcattcctatctttctcccggaagtcaccattggagctcatcagactgaccgtgtcttacatcagttcagagagctgccgggccgcaagtacagccctgggtacaacaccgaggtgggagacaagtggatctggctgaagtgaacgggccgccttctgctccagctgcatcacagtgatggccaagctgcatcagccgcactctcctggacgccatatagctttaagatcgggggagggtaaataatgcaaaaattgcacagtggaagaaggggtctcacaaaaagcaatccatcctgtagtataggtaatggagttgggggaagcagcttccattctggatgtttggaaccctttagctttgttttggaatggcccaccattctcactggaaaacagtggtctgctgtgaaaggccagctctcggcagcccctgtggtttcagcgctgccgctctgtgtcattcaggttgtgcacattgtttttcttctgacttccagaaataaaagtgtttccatgggaaaaaaaaaaaaaaaaaaaagaagacaaaaaaaaaaaaacaaaagaagaaaaacaaaaacaccgggcgcatccaaatgatgtgggggggggcgaaaaaaagggttatacgaaagcgcacacgtggccaacacggtgttcctcccaccccattttgtggcaccaggggggagaatgcgggggcgccccaaagagggagcgcgtataatgtggaaaacccggggtacccgataggat

SEQ ID NO: 519633 - DNA, 113 bp, Homo sapiens
caaagttgcggggactacaggcatgagcctctgtgcctggcctattgcatactttttatggctacatagtattccatggtatatatgtagcacattttctttatccagtccac

SEQ ID NO: 519634 - DNA, 190 bp, Homo sapiens
gtcccccttaaagggtgtgcggtggggggtgtggctcgcttctttggtgtcctgctgctcaaacctctaaagggagtgtgcagtggtgaagccccagtgggcgtgtgttacccggtgctcttttagtttacccatcagctcattgagaactcttgcaactcctgttggagttgcaactccaacagcctct

SEQ ID NO: 519635 - DNA, 2015 bp, Homo sapiens
  misc_feature (36)..(36): n is a, c, g, or t
  misc_feature (61)..(61): n is a, c, g, or t
  misc_feature (64)..(64): n is a, c, g, or t
  misc_feature (114)..(114): n is a, c, g, or t
  misc_feature (157)..(157): n is a, c, g, or t
  misc_feature (161)..(161): n is a, c, g, or t
  misc_feature (196)..(196): n is a, c, g, or t
  misc_feature (210)..(210): n is a, c, g, or t
  misc_feature (243)..(243): n is a, c, g, or t
  misc_feature (251)..(251): n is a, c, g, or t
  misc_feature (257)..(257): n is a, c, g, or t
  misc_feature (259)..(259): n is a, c, g, or t
  misc_feature (312)..(312): n is a, c, g, or t
  misc_feature (329)..(329): n is a, c, g, or t
  misc_feature (349)..(350): n is a, c, g, or t
  misc_feature (352)..(352): n is a, c, g, or t
  misc_feature (356)..(356): n is a, c, g, or t
  misc_feature (358)..(359): n is a, c, g, or t
  misc_feature (388)..(388): n is a, c, g, or t
acagaacaaggtgttgtgttggagggctccgtcttnagtgactttgtgttcctggaggcgntgnacaaccagggagtcatccgaaagcagtgtgtggaccactacaacgaggtnaagagcgtcaccgtctgcgattacctgccccccccacctggtnattnacatcgatgtgcccgttccagaggtccagaggcgnattcagaagaaagnagatccacatgaaatgaagatcacctctgcctntctacagnacattnanaatgcctataagaaaacctttctccctaagatgagtgaaaaatgtgaggtttnacaatattctgcaaggnaagctcaatattcaaaaaanntngtanannacattgaatacctgaagttcgataaaggnccgttgctcaagcagaacaatcgcactttataccacctgcgattactggttcaggataagtttgaggtgctgaataacacaagcattcctatctttctcccggaagtcaccattggagctcatcagactgaccgtgtcttacatcagttcagagagctgccgggccgcaagtacagccctgggtacaacaccgaggtgggagacaagtggatctggctgaagtgaacgggccgccttctgctccagctgcatcacagtgatggccaagctgcatcagccgcactctcctggacgccatatagctttaagatcgggggagggtaaataatgcaaaaattgcacagtggaagaaggggtctcacaaaaagcaatccatcctgtagtataggtaatggagttgggggaagcagcttccattctggatgtttggaaccctttagctttgttttggaatggcccaccattctcactggaaaacagtggtctgctgtgaaaggccagctctcggcagcccctgtggtttcagcgctgccgctctgtgtcattcaggttgtgcacattgtttttcttctgacttccagaaataaaagtgtttccatgggaatttccccatcgtacgtctatgtgcgtgcgggcacgtcgaaactgcacacgtgcacacacgctgctctgggccctgtttggtgtggtgtggtttaattgaggcttacattatgctgaagagtttttctaaaggcctactgtatttattttagtaatgtgctacattagagtagaaaaaataagaacgtgaagaagaaatagcaaaaggagaaaattaccacagatttacagaacaatatgttttaagagagacgttgagaaagattcacgtggccgtcctcagcgtctcaaactcctttgaagggagatttgagcttaggctgttgatgacataagatgcaaaagcaaaataatatactctctttattacccagaaaatcaagttgccagtcaaaactgagaaatgagaaagaaaatcagatttctttattcatctctgttgaagcctagaaaaccaaaacaagctggttgtggttcagcatcatggtttaggaatcaagctgtcagttgtgagtcctactgaactgtgggttttccactgtaaagctccactgtgtccattaggaatcaggctgccagttgtgagtcctactgaactgtgggttttccactgtaaagctccactgtgtccaatatggtagctcctagccacatgtgggtattgaaatttaaatgagctaaaatgtaatagagtttaaaattgggttccttggttgcactggccatagttcaggcactccacagccgcctgtgggcagtagttccagtgctggtgcagaggacgatgctctgctccccgcggaagctctaccaggcctcgctgctgcggagcatgcgaagaagatgcacagtccttccctccttgcgatcagctgcctttttccctctccccttccttccctcattctttcctcctccttccctcccttcctttcttccattccatcatgtcttgttttcctcccattcccttcctccctgcctctttccttccctcattctcttccttccttccgtctgtcct

SEQ ID NO: 519636 - DNA, 118 bp, Homo sapiens
cctgctttatccatggctgatgggtttgtctgcctctctcgtctcgcctaatctcactctcgatggattcacggatggccagcgtgcttgcaagctggccatccgtgaatccatcgag

SEQ ID NO: 519637 - DNA, 284 bp, Homo sapiens
  misc_feature (237)..(237): n is a, c, g, or t
ataacatgacaccaatgcaacacaagcaagagagatcctgccctgaaactcactgttgttttaggctttcggcggaccctgctataaatatacagattttatgcccagtctgtgaccagggccgaacctctttcctgaagggctgggggactccttcgaggaacaagaacagcccggctgtccacaaaggagcccgttttcaggggtgggatcacaggtcaggtgctctctcagcanaacttcaggacccgggcaaaccataacactcatctcactaggaggca

SEQ ID NO: 519638 - DNA, 1109 bp, Homo sapiens
  misc_feature (36)..(36): n is a, c, g, or t
  misc_feature (61)..(61): n is a, c, g, or t
  misc_feature (64)..(64): n is a, c, g, or t
  misc_feature (114)..(114): n is a, c, g, or t
  misc_feature (157)..(157): n is a, c, g, or t
  misc_feature (161)..(161): n is a, c, g, or t
  misc_feature (196)..(196): n is a, c, g, or t
  misc_feature (210)..(210): n is a, c, g, or t
  misc_feature (243)..(243): n is a, c, g, or t
  misc_feature (251)..(251): n is a, c, g, or t
  misc_feature (257)..(257): n is a, c, g, or t
  misc_feature (259)..(259): n is a, c, g, or t
  misc_feature (312)..(312): n is a, c, g, or t
  misc_feature (329)..(329): n is a, c, g, or t
  misc_feature (349)..(350): n is a, c, g, or t
  misc_feature (352)..(352): n is a, c, g, or t
  misc_feature (356)..(356): n is a, c, g, or t
  misc_feature (358)..(359): n is a, c, g, or t
  misc_feature (388)..(388): n is a, c, g, or t
acagaacaaggtgttgtgttggagggctccgtcttnagtgactttgtgttcctggaggcgntgnacaaccagggagtcatccgaaagcagtgtgtggaccactacaacgaggtnaagagcgtcaccgtctgcgattacctgccccccccacctggtnattnacatcgatgtgcccgttccagaggtccagaggcgnattcagaagaaagnagatccacatgaaatgaagatcacctctgcctntctacagnacattnanaatgcctataagaaaacctttctccctaagatgagtgaaaaatgtgaggtttnacaatattctgcaaggnaagctcaatattcaaaaaanntngtanannacattgaatacctgaagttcgataaaggnccgttgctcaagcagaacaatcgcactttataccacctgcgattactggttcaggataagtttgaggtgctgaataacacaagcattcctatctttctcccggaagtcaccattggagctcatcagactgaccgtgtcttacatcagttcagagagctgccgggccgcaagtacagccctgggtacaacaccgaggtgggagacaagtggatctggctgaagtgaacgggccgccttctgctccagctgcatcacagtgatggccaagctgcatcagccgcactctcctggacgccatatagctttaagatcgggggagggtaaataatgcaaaaattgcacagtggaagaaggggtctcacaaaaagcaatccatcctgtagtataggtaatggagttgggggaagcagcttccattctggatgtttggaaccctttagctttgttttggaatggcccaccattctcactggaaaacagtggtctgctgtgaaaggccagctctcggcagcccctgtggtttcagcgctgccgctctgtgtcattcaggttgtgcacattgtttttcttctgacttccagaaataaaagtgtttccatgggaacatccagaatggaagcctgcttcccccaactccattacctatactacaggatggattgctttttgtgagaccccttcttccactgtgcaatttttgcattatttaccctccccggga

SEQ ID NO: 519639 - DNA, 428 bp, Homo sapiens
gtctattccctatatacagcagcgtgtctattccctatatacagcagcgtgtctattccctatatacagcagcgtgtctattccatatatacagcagcatgtctattccctatatacagcagcgtgtctattccctatatacagcagcatgtctattccctatatacagcagcatgtctattccctatatacagcagcatgtctattccctatatacagcagcatgtctattccctatatacagcagcgtgtctattccctatatacagcagcgtgtctattccctatatacagcagcatgtctattccctatatacagcagcgtgtctattccctatatacagcagcatgtctattccctatatacagcagcgtgtctattccctatatacagcagcatgtctattccctatatacagcgtcgacgc

SEQ ID NO: 519640 - DNA, 955 bp, Homo sapiens
  misc_feature (36)..(36): n is a, c, g, or t
  misc_feature (61)..(61): n is a, c, g, or t
  misc_feature (64)..(64): n is a, c, g, or t
  misc_feature (114)..(114): n is a, c, g, or t
  misc_feature (157)..(157): n is a, c, g, or t
  misc_feature (161)..(161): n is a, c, g, or t
  misc_feature (196)..(196): n is a, c, g, or t
  misc_feature (210)..(210): n is a, c, g, or t
  misc_feature (243)..(243): n is a, c, g, or t
  misc_feature (251)..(251): n is a, c, g, or t
  misc_feature (257)..(257): n is a, c, g, or t
  misc_feature (259)..(259): n is a, c, g, or t
  misc_feature (312)..(312): n is a, c, g, or t
  misc_feature (329)..(329): n is a, c, g, or t
  misc_feature (349)..(350): n is a, c, g, or t
  misc_feature (352)..(352): n is a, c, g, or t
  misc_feature (356)..(356): n is a, c, g, or t
  misc_feature (358)..(359): n is a, c, g, or t
  misc_feature (388)..(388): n is a, c, g, or t
acagaacaaggtgttgtgttggagggctccgtcttnagtgactttgtgttcctggaggcgntgnacaaccagggagtcatccgaaagcagtgtgtggaccactacaacgaggtnaagagcgtcaccgtctgcgattacctgccccccccacctggtnattnacatcgatgtgcccgttccagaggtccagaggcgnattcagaagaaagnagatccacatgaaatgaagatcacctctgcctntctacagnacattnanaatgcctataagaaaacctttctccctaagatgagtgaaaaatgtgaggtttnacaatattctgcaaggnaagctcaatattcaaaaaanntngtanannacattgaatacctgaagttcgataaaggnccgttgctcaagcagaacaatcgcactttataccacctgcgattactggttcaggataagtttgaggtgctgaataacacaagcattcctatctttctcccggaagtcaccattggagctcatcagactgaccgtgtcttacatcagttcagagagctgccgggccgcaagtacagccctgggtacaacaccgaggtgggagacaagtggatctggctgaagtgaacgggccgccttctgctccagctgcatcacagtgatggccaagctgcatcagccgcactctcctggacgccatatagctttaagatcgggggagggtaaataatgcaaaaattgcacagtggaagaaggggtctcacaaaaagcaatccatcctgtagtataggtaatggagttgggggaagcagctggaatggcccaccattctcactggaaaacagtggtctgctgtgaaaggccagctctcggcagcccctgtggtttcagcgctgccgctctgtgtcattcaggttgtgcacattgtttttcttctgacttccagaaataaaagtgtttccatgggaa

SEQ ID NO: 519641 - DNA, 137 bp, Homo sapiens
ttgccctcaaaaggacattagtcttaaaatggcacagaagttatgcttggtctctcctctccagcttctcttacctctcctgtatcatctcaaccttggttcagtttgctccagccacagttgcgtttcacttccga

SEQ ID NO: 519642 - DNA, 304 bp, Homo sapiens
  misc_feature (16)..(16): n is a, c, g, or t
  misc_feature (39)..(39): n is a, c, g, or t
  misc_feature (177)..(177): n is a, c, g, or t
ggtcaggccctcatgncccctcccctgcctgtgatggantgttctgagggctttgcatttctggaagcacagggagttccaaatgagagggagcttttgtgcttgagagcctctgggccttggctccagagcacgagcaggccaggacctggagagcccagaccctgtctccagganccaggaggccagatggggccttgcctgaaagactggccccttgatcgctggaggcatgtgggtggcaactagggctgggcaaggaaaaagaaaataaagacaaccatatttagcagtgcaaaaaaaa

SEQ ID NO: 519643 - DNA, 654 bp, Homo sapiens
tcgtactgaattggtggtgtcgctcactggatggaagagatggctgaactgtatcctggatgtacccgctggggcctgccatgctttggaggggcaggaggccccattacctatccctggaggtgcaggaccccaggaggggcagggcatttctttttctttctttttttttttttaagagggagactcactctgtggcccaggctggagtgtagcggcatgatctccgccgcccgaggtcaggtgattctccgtgcctcagcctcccaagtagcggggaatacaggcgtgcgccaccacgcggtgctaatttttatattttttaagtagagacggggtttcaccagtgtgggccaggtgggtctagaaccctgtgacctcaagcaatctgccgtgcctgcggcctcccaaaagtgcggggattacagatgtgagccatgggggcgggccaggttcatttcatagtgatcagtgggtctgatcactcagtgtcttctttttgctactcgttcccatctcgggggacttagcaatacactcagaccccggaatcccctcttaagggttcaccggattcagaaaggctaagctcacaatccaggtaatcaaacatctccacagggagcgggaagatgttgttgacatgggtcccag

SEQ ID NO: 519644 - DNA, 117 bp, Homo sapiens
gtcagagtcgttagccgggggcagagcttccggtaccatccaggtgtccaggaaggtgctggggccgcttgggcaggagctctgtggtccccttcagcttctgcaagcaggcgcggg

SEQ ID NO: 519645 - DNA, 247 bp, Homo sapiens
ggtcgacttaaaaaggtaattaaggttaaagaagttcattaagatatggcctcatcccatctgactggtgtctttatagcaagaagagactaggacacagacacacacagaggagagaccatttgaggacacggggggaagatgaccctctaccagccaaggagagaggcctcagaatgaaaccaacacatctcacaccttgaccttgaacttcttttcacacagttctggaggctgaagttcgtcg

SEQ ID NO: 519646 - DNA, 495 bp, Homo sapiens
catctagttacttgtctctccctttgttcccctatactctctcctctagtactcacagttaaatagactaggtcccttttctagagagcaagatgaacgcgaattggcaggattcttcattttccataaaaatttctaaactcctccctgcacacatacactttctccctgcctcaacagcttgcacacatattcccctcttctcaaacaccaagcctctgggttctgatcctgctccctccttccttcacgatagtggtgctcctgcaatactcttaccaactccagcatcaccaagctctcccttttctaaacatctctctacaataagcactttaacatccttcagaatcttccatttaacaattaaaaacaggccaagcatggtggctcacacctgctgtcccagcacattgggcggccaatgtgggcagatcgcctgagtataggagttcacgaccagccagagctacatggtgtaacccatggctacga

SEQ ID NO: 519647 - DNA, 114 bp, Homo sapiens
agggcactcctgagacttcaacgtgcccgctgtacgtgtgccatccaggccgtgctgtccctctacgcctccgtgcaggaccacctggcatctgtagctggactcctgtgcgac

SEQ ID NO: 519648 - DNA, 185 bp, Homo sapiens
  misc_feature (113)..(113): n is a, c, g, or t
ttgtaggaagtgggctagggctttttagtattagagcgaaagcctgcgaagtacaaggaggcctgctgcgccgcgtgcctgtttccgcagaccccaacgtccccaacgtcgtngtgactggcctgcccctggtgtgcagctcggccccgggccccctggagctggaactgtcgggctagtcgggg

SEQ ID NO: 519649 - DNA, 583 bp, Homo sapiens
actggtgggggccacttgactagtgttccccccagtatggtgtctccgtgcggattacccccgaggctccccaggctgtaggcccccccgccttctgtcctaagataaagctcaatttgtggtaggaattggatttgctgcagggttggcgcaccaatcctcccaagaaggctacccctcgccagatttctagcagtttgtgagaaattgtattaaaaatggcggagaagttcataggtgaagaaatgtcgagattgactgggggatgtagtaaatagatctgcctcgcgggagtatattgtacaagctcgcccctcctctgttctggatagataacaattccatagacacacccacggggggtttgtatctatttgcggattcgattggggaccccccgcgcgggcttgtctatgtttgcgccaccacattgggcgccacataatactggtaaaattattattagtctttgttattttattcccctagtcccttcaacatcccccacggtatcttcacaagacccacagaattttctttctttaataaaattatataaatcttcccatcattgacaagaaat

SEQ ID NO: 519650 - DNA, 111 bp, Homo sapiens
tacttctttttttttaaaataaattttgtatctaacaggaaggcagttcttatgaaatttttgtattttcaaaaattgttttgttcaactaaaattttatgagtaaagtta

SEQ ID NO: 519651 - DNA, 364 bp, Homo sapiens
  misc_feature (81)..(81): n is a, c, g, or t
cgccgccgccgtgggcagtggcaccttggggctgtgcctgtcgctcaaggtcctgggcattggtccgggcgatgaggtgcngaccgccgcatacgcctggcaccagatcgcgcacgccatcaccatcgtcggcgccacgcccatcctggtcgatattgactactggtccggctgcatcgaccccgtgaaggccgccgagaaggccacccctcgtaccaaggccatcctggccagcaacatcaatgggcatccagccgactggaaggccctgcgtgaactggccgaccgctatcagctcaagctgatcgaagacagcacggaagccgtgggctcgcgctatcaaggccggctcacgggcagcttt

SEQ ID NO: 519652 - DNA, 631 bp, Homo sapiens
ccccaaggagagagtgttcagatatggcacatctatataaaacgcagcgatgctggctcattattgttataatgtgacatctcctcaatgtgataactgtattgtggttaagagattgtccttgtgtataggaaatacgctcctttggcatgaataagggggcacaaacgtctgcatctatctaaatatttgtggaaaaaaacaatgagggggtgagagtgggtaagcaagagagagggagaccgggaaaagtgaagtaaagggtatttgcaagtctcgtgtactgttctcgccatcttccctacctttagaattaattccaaagaaaaggttggacacaaggactcttgcctgtacatatgaatcacaggcttcttagtaaaaactctgactcagtaggtcgggtgtgaaccctcagagcctgtatctgaatgagcccttaagtggatctgctgctcgaaagagtgtcagtgtgaaaaagcctgtcttcccagcctgttccacagaatccaacacaggcctcggcaagcctgtggatttcattacaaggacctgtgggacacacacttgatgttggtttcttaaatggggaaaaaaatggtaattgccacagtcacaaaaaacacaagag

SEQ ID NO: 519653 - DNA, 343 bp, Homo sapiens
caggctggccaagatagtggaaccccgtctctaccaaaactacaaaaaatttagctgggcgtggtggcaggtgcctgtaatcctagctacatgggaggctgaagcaggagaatcacttcaacctgggaggtggacgttgcagtgagccgagattgcaccattgtactccagcctgggcgacagagcgagactccgtctcaaaaaaaaaaaagacccgtctctctacaaaaaatgaaaaaactagcagggcataggggtacaacctgtagtctcaactacttgggaggctgaggcaagaggattactggctgcagtgagctgtgatcatgccactgcactcggg

SEQ ID NO: 519654 - DNA, 434 bp, Homo sapiens
cctcccaccctccttccctcctcctcttcccagctcccccgccctttgctgctcgcagcctcgccagtgagaatctactgtaagtgtgaattgcttcgacgaagtcacacacccacggagggaagtaatctggaggctgccttggcatttttagtgatgtgtgggcctcaccacttaaatccagtttattgaatctgaagtgatttgctcctctttctggactacacaataaacaccctccaacgtccccagccatgctcttcccatcatttggctgaaaggggaggaattcaaggccttagagtggggaagctacaatttggaagaatcctggaagcacagattaccctgtgaagcagcatccccatgagggtctctttcttctgtgatataagcaagaaataaatgaattgtgcaaatccaaaaaaaaaaaa

SEQ ID NO: 519655 - DNA, 322 bp, Homo sapiens
  misc_feature (50)..(50): n is a, c, g, or t
gagaacgccgggaagagggcacgttttccccgaattgggtctataaactngttggggcctcccattaccccatttattgaatctgaagtgatttgctcctctttctggactacacaataaacaccctccaacgtccccagccatgctcttcccatcatttggctgaaaggggaggaattcaaggccttagagtggggaagctacaatttggaagaatcctggaagcacagattaccctgtgaagcagcatccccatgagggtctctttcttctgtgatataagcaagaaataaatgaattgtgcaaatccaaaaaaaaaaaa

SEQ ID NO: 519656 - DNA, 310 bp, Homo sapiens
ggatgaagctggtgtccccaggacctcccagggcccacctgcctggacccctgcagcctgtgccctgacgccctggtgccctcgtgcatttgctgggacgtggctgtgcagcggcagagggaagggcacagagaccccgccccgatgattcccaccttacaactgagggctgagctactccccagtcagccaggtcagactggagcccagggaaagcttccggagccccagcaagtcaggttgagagtgtgtttacgctaagaagcaaattgaggaacagtctttataaaagaggggtcctaacccagag

SEQ ID NO: 519657 - DNA, 411 bp, Homo sapiens
cggggggatcactagtactaccactaggagctgcagttctcacgcgagagtggacatctacgtggtgcctagccgtatagctggtgagaccaggaatagtgtatgtataacatgtgaagaaggaccatgtgtgagggtggggagtgaagctcccacatgtggaatggaagcccttggcattggccaagggcagaggtgggagcatgagggctcatttttccatggccctagcccttagctacagggaggcctagagagaggacacttggcaagtctaggatgggaaacaaggttaagcctggctttgctattcagacctgtgcagccctgattttggggactgggcccaaggagccatgagtcttaggcttgacactaggggccttacatggccaggtctcatatgggatt

SEQ ID NO: 519658 - DNA, 146 bp, Homo sapiens
gccttaattttagaaagcagcttactagtttccccttgtggtataaagtattctaaactcttctgactttgaagaacccgtctactgtattattcctaaatactctgtttctactaagggacaattatcttaagcccatggcttta

SEQ ID NO: 519659 - DNA, 520 bp, Homo sapiens
cggccatacatgtgtgatgacagtaaatacagcttggttagtacatataggtggacaggagttacagacaaagacataaatcagtacatggaaggtacagattgtgttcagctgggtgcagtggctcacgcccgtaatcccagcactttgggaggtcgaggtgggcgaatcgcctgaggtcaggagttcgagaccagcctggccaacatggtgaaaccgtgtctccacaaaaaatacaaaaaattagccagggatggtggcaggcacccgcagtcctggagccactcaggaggttgaggcacgagaattgctgcggaggttgcagtgagccgagaccacaccactgcaccccagcctgggtgacagagcacgactctgtctcaaaaaaaaaaaaaaattctacggtattttaataatacatttggtagtcccacttatacccacttgggtccgtgggttgcccattaaatcaaccagtttacagttcccccttgaacaccatgctttaaactgtcctggt

SEQ ID NO: 519660 - DNA, 122 bp, Homo sapiens
ctgtcgatgggcaggaagcaggcgagatcccacacaactttgtaattaagggagtttccggagcttttggtttgagcgcctctcacctccatttaaagcacatctgtgcacctaattaaaac

SEQ ID NO: 519661 - DNA, 96 bp, Homo sapiens
gggggggggggggttttttatgggaaaggggttttgggggggcccccccctcccccccccggcccaaataaagttgggcccccctttcccctttta

SEQ ID NO: 519662 - DNA, 484 bp, Homo sapiens
atgcttgggtttggtaaggatggaggggctcagcgtctgttcccaatcggcccgttcccagtgccactgggtgggcagcaagttcctctgagagtctctccgtatgtgaatggggagattccgaaggcttagatcaggttgcagccagttccccgctcggtactggtgctcaacattcctgatattttggatggcccggagctgcattacgtcctggagatccccttccagaagcccccccgcgggggcggggaggtaaaggcccttacagttgttccccaaggacagcagggcctagcagttttcccctttgagtcaggctaggggcctccccttttcatcctccccccccccccgccaaggttttccccctggcctgggcttgggtgcccatataggaggtttgtatgttcccccacagtgcggaggggtcccccattgcaaaaccctgcccagaacagtaaaaagagcctgcatgccatga

SEQ ID NO: 519663 - DNA, 1801 bp, Homo sapiens
gaattcatgcattagcagagggagcacgtaagttgggactagacaaaggaaacgctacaagagtagcaaacggtaaacaagcgcacactcacggatatacaattgaatatatttaacaaagcccacacaagggctttttattttgatataatagtcgttagcggaattcgattcagcaaagacaagggcgtgtacagcgcacctaataaaaggagaataataatgaaaaacacaacggactggtttataattttaaaagaaacgtcacacactcattcaagtcattcaagactgttcaatactgggaaggacttagcacatcagacaacttgttggcacccaacttcgtatatgctgttcggcttttcgattggtttgcaactcgtgacacttgtaacacacaaaattactttattatcaattgtgacagcaatttcagttacattaggagttgcgacaattatatcaatctcacaaggtaagtcgcttaatggttggcttggcatgttttcagttttcggaattattttcgttgcttatcagctaagaattatttgcagattgctgaacaactagtctatctattcacgctagacttggctgttatcttaaacgttgactggaataagagtatggctaaaaaaattggtgggcttgatttaaaaagctgggtagtaacagtgctttgctgggctggtttatggtcgttatcagctattgtaattggtcgattcacagatgacccacgccctgtcatggacgcacttgtattctcatcagctactgtcggaggcttacttacattcttaaagaaacctgaaagttattacgcttggatagtaacaggtattacatcacttcccctttggtatattacttacaagcaaggggacgcaacttatcgaatgctattgtcttcattagtttacgtcatgaatgacgcaattggtttgactgtttcgccttggttctctaaaaaaggacgtgcaaggttagcagaacaagaagcgcaatacttagtaaataaaaaacaaagtacggagctttaaataagctcttttttttattgcataaaagtttgtatatattcattttcaatggtataattatgcaagcgggtacttgacatgggctttttgcgtttgttagtgcgtgtacaaaaaaatgaattagcgggctgtaatgtgggttatgcgtacatgaaagccgcaaaggagaataacaaaatggctgatgaagtagtaacaccagagattgatgaaaagacggaagttcctgtaacgttcacagaaaaagatttgcaaagcgctaaggatcgtgcatacgataaggcacgtaacgacttgcaagcaacgtttgaagaaaaacttgcacaagcagttaaagacgccaaagcacaagcgcttgaagaatctaaaatgactgccgaacaaaaggcacaaaaggaattagacgacaaaatcaaaacacttgaagcacgtgaggctggaattaagcaacgtgagctaaccgcagatattacaggacaattgtcagcagcggggttgccagttgatttggctaaatcgttagctactcttggtgacgaacgaaggctgaaacgaccggtgcaagtagtagcagtgcaacgaaggccgattcaaccagcgcaaataacagtagtgcagtaaaggctgaaacgaccagtgcaagtagtagcagtgcaacgaaggctgaaacgaccggtgcaagtagtagcagtgcaacgaaggccgattcaaccagtgcaaataacagtagtgcagtaagggctgaaacgacc

SEQ ID NO: 519664 - DNA, 491 bp, Homo sapiens
  misc_feature (12)..(12): n is a, c, g, or t
gggatggctacnatcaccaaatgcactgtctgttttaaagcaagacatgggagggctatcagacatcttagatgtacgtggggaaggcgccccgctacaagaaccagtattatctgagtgggcacctcctcccagcactgggtgtaagtggctccgtgccatggagttgttgggtaataacgccaggactggcttgatgacagtgactcacagtagaaaaatgtccttgcaaaagaccaaagaacccactttaatttgcacagcttagaatgggccactggttgccctgccaagggatccctgtaccagctgattttcatatccacaaacacacacacaaaagcacctatttaaatattgcaaataataccacattgcatttttattatgctttatagtttacaaagcacattacaatgctactttattattcttagtgtgctccaatataatttcacttgccttctcttttctcacctttttctcatctt

SEQ ID NO: 519665 - DNA, 550 bp, Homo sapiens
  misc_feature (29)..(29): n is a, c, g, or t
tcgaatcgacggttctcccttaaattaantgactaaatgtataacattcaatattccatgggctcttctggacaaaggatcggcataaatacaaacaaaactcaggacttcttccctaaacgacgaagatgaaccaggaggcagggacgggacgcttcatattacacttgcttacttacagtcagtgcagaaatattacagaaatacataagaaaaaatcatgtcttggcaacatactgaaattcatacaaactgtatatatgatgtcaagcaaataatgatactgcttattttttagccacaactgccaagcccttcagaggagaaagatgtctgggtcactataagagatgaggacttgggaaacttggtttgcttcaacaagtatatactgggcgcctactatatggaaggcactgtggaatcccaaattataccttttccctcaccattaaaaaaagaaaagcatctgaagaacatgagttgatattctgagaaacaactagaagtacatggcttctttagctactaagaaaccgtcgaattcgag

SEQ ID NO: 519666 - DNA, 689 bp, Homo sapiens
  misc_feature (516)..(516): n is a, c, g, or t
  misc_feature (554)..(554): n is a, c, g, or t
aatagattttatatgataaagggttaagtgaggaaagaaaacaaagatatttgatatatatgcagacacaaacacaaccatattcctaactaagaatgtaatactcataacagctgcagtcctcacttctgttattgctcatgtggtcttagctggtatttataattaccttcttccactacccattccatattaccttttccccagcaagtaccttaactgcttctggttctttacctgatgaggtaaattaaatccccaaatcttcatttctgaagggtctgcgccacgagtagctctgtctaaatcacatggttgtactcttccgttcactttaatcacagggcatggcaatttagtactaagagattccctaatggatattttgtatttcagatatactgttacttacctccattgtgcagtaacaatccaatttgcccttggtattcaggaacaatcacttaatcagtgcagtaactcccttctttgcctgttcatttagaggtgtgaggngcccaaagtggctgagggtctgggagaagtctaatatncagttcaatgtaatcactgtgtttcttagtggaagtattctgcctttggaatgaagacctgtatgccagcagagcattagggtacagggacaggaagcaaacaatcattagcagggcacttgtggtatgggttgc

SEQ ID NO: 519667 - DNA, 162 bp, Homo sapiens
tgtctgatctggtggcttggcaaaagacaatttcaatattttctccctgccgaagtgctttgccatcatttcttccatagccttgacagcaccatctccgctctacaaaagataggaacgctataacttttaactcttcactcgttccgattctctaaactg

SEQ ID NO: 519668 - DNA, 145 bp, Homo sapiens
aactaccttagttcgctgtatacagacattgtcttgctttggttaccttctataagatgaagtagctacaatgttactcactattacttgaatcaagatattctcaatagttgataaattagatccatttcagcgttgaggttat

SEQ ID NO: 519669 - DNA, 1260 bp, Homo sapiens
  misc_feature (695)..(695): n is a, c, g, or t
cccagacctcgggcgcaccccctgtcacgccgccttcatccccggcctgtctcctgagacccccgcgcatcctagtaccctttctcctccaggagacggagtctctctccggacctggccagcagatcccctattcaagatccacccacgcttcgtggataccagatcgcgtcccatctaggttatttccgtgggatactgagacacccccggtccaggcctcccctccagcactgcgcccttctccctgatggagcctcagctttccctcgagtgccctcctaccttttgccgggagagccccctaggcccctgcaggggcaggggcctcctcctaccgacaccaggcccgtgttcgctgctcttctgagcagatgccggtgggtgcgccgctcatcccgccatgacctgctcctccgggcttgcggcatgctgcatgcatgcatgctaccggctgcttgtggctacgtggtgctgagcgcctggtcgctggccggccgcgtggactatccatgctgccaggactattcgacgtggcagctgtgtgaagcggaggcgccatcgaggccattcctgcggacagtatcctgtccgaggctgcgtgctcgcctggcccgccgagccagtggggaggtgccgacctggtgccgttgccggaggtgcgtgctcgtccctggtacagcagcgatccgtgnacgggtgccccggggtagagtgccgacacctggatgccccgagcctgaacgccgaactactacgccataggaggtcaccctgcgtgctgaatgcgtaggaaacccatagcgaaatcttatgagcactgtccactgcatgaagttacgccacaagacctttgtattgttccctcacacgactcggaagaccccgacaaaagggggacactgaaagccggaggtaggacctgcccggggcaacacacgccctctgcggaacgcccaacgtaaacagcgggagccacacacggagagcccggtccaccgaaaatagagcagacactgccggcggagacccctcacgaccgcggctgcgtgaagccccccaaaccaagcaagggggacactcatggaggcaccgcgaaaacaagccgaacgaggacaccagccgaggaacacagaagacgacaaaccaacacaactacgtcaaacgtacgtcacaaaagcaagacaagagcaacacagcagcatgaccaactgacacagcacaacctagctcgaggggacgaacacacagctcatacag

SEQ ID NO: 519670 - DNA, 227 bp, Homo sapiens
gtgaaccctgccggctgagcacacagcacacacacaaacgcacagtacacacacttatacacatgcacacacagcacacaaacgcgcggtacatacacgcacacacatgtacacacagcacacacgcaaacgcacagcacacacaaacgcacagcacacacgcacacacagcacacacacgagcacacagcacacaaacgcacagcacacgcacacacatgcacaca

SEQ ID NO: 519671 - DNA, 135 bp, Homo sapiens
gattgtggggctgcagccgggtacggtcacgcaggatggtgcggaatgatggcctctgggattggctcatagcgctcagacactgcgctggtgagctgtggccagcctgtgggcagcgagggctcgggccagccg

SEQ ID NO: 519672 - DNA, 980 bp, Homo sapiens
  misc_feature (670)..(670): n is a, c, g, or t
  misc_feature (694)..(694): n is a, c, g, or t
acctgcacccaggtgaaataagcagcctgttgctcacacaaaacctgtttggtggtctcttgacagcaacgcgaatgaaatttggtgccatcactcggatcaggggacctcccttgggagatcaatcccctgtcctcctgctctttgctccatgagaaagatccacctacgatctctgctcctcagaccaaccagcccaagggaacatctcaccaattttaaatcggatcttctcagcttagcggctgaagactgatgctgccagatgactttggaagccccctggaccatcacagatgcccagcttggataactcttacagtggaggaagacaggaatatcaggtctctgagcccaagctaagccatcatatcccctgtgacctgcatgtatgcatccagatggcctgaagtaactgaagaatcacaaaagaagtgaaaatggcgcgtgcctgccttaactgatgacattaccttgtgaaattccttctcctggctcatcctggctcaaaagctcccccactgagcaccttgtgacccccactcctgcctaacagagaacaatcccctttgactgtaatttcccactacctacccaaatcctataaaacggcccaccctatctcccattcactgactctttttggactcagccactgcacccaggtganatacacagctgtgctcacacaganaataaaaaaaaaagtccgagaatagcttctccgtgagaaccagaagattcggatccctttcttgtgatggaccccgaactatgggtgtcacgctgcccgtagttggaccggcaaacatgccttgaacactttgaaaacgaaccagggtgggcagtcgccggcacaacaggtcagccctctttaattggccctcagtcgaggacggggtgagggcggcctcgcaaccaaggcgtcggggtacccagttttggcggaggattacggccggggggggacaccaccacgg

SEQ ID NO: 519673 - DNA, 130 bp, Homo sapiens
agatcttgtcactgcagttttgcaatgctcagtgcaaccccacgtggcacacttgcacttgtgtgtcccagtgacagcagcacagcttggacagtgttcttggcaccaacatgcaaagcgtgtgtgtgtg

SEQ ID NO: 519674 - DNA, 1018 bp, Homo sapiens
  misc_feature (679)..(679): n is a, c, g, or t
cgggcttcggcgccctatgaacttcggctggcaacacaggagacacgcgttcacgccacggatttttccccgttgctttcacatcgggccggacaaaaggcccaaagtgggtttcgcacatgttttgcacaccaccttgggcatctggattgcgccggcaatgacagtatttctgggaaatgatgaaaggttgaaagcttgtccccctttcctgggcttttcccgcgctcactggcctttcccacggttccaaacccgctctgttccccgccactgtcccccacacttgcccctcgggagaatgtagacccccatctcccttcaactctccctgccacagaggaatggcaacactcgcacatcgcggcgaatagaagggggatctcgcggggccggcccccccttcgaacacatttgccggccctcatgagtggacttacacacataggcggcaacaccgttctttcaaagagggaccgcggagattctcacaaccccacagctgtagcacgagactctccaataccctgtcacggttcttcttggccctcttggcttgttgcctgtggggcatgacagaatgtggtgacattcacgcgtttcccctgtggaaagtcggcggtgtcctcgacacaggatcacagactgtaggagaaccagtccttcgtgcccgtttctngcctgtcgcctcgcgagaagcattaggaagtcacgccatctgaacaggagcctatcaagagttcacacatgacactcgtcgagggagataatagttagcctttcattccttagctcgccttggggaaacaggcggagaaggggttccgggaggctaatggttgctttgctgaatgtgttactggggtacccatacgagttcccataggggctgctccctccaaaagggaggggacagatggggagcttttcttacctatttcaagggataacgtgcctttgtttttaaatgctttcatgttacttgcaaaaaaaaattactgccccgcaaagcactatt

SEQ ID NO: 519675 - DNA, 175 bp, Homo sapiens
acactgacgggcttacacggctctactcgctgctcagtacacggggggctcactgtccgcgtgctctccgaccacacccaccttcacttttggcacaccacaccgacgccctgcctttctccgccactttcctgccggcacggtccacgactttacgggtgactgactggacttc

SEQ ID NO: 519676 - DNA, 3540 bp, Homo sapiens
gcagtggaacgcgctgggccgcgggcagcgtcgcctcacgcggagcagagctgagctgaagcgggacccggagcccgagcagccgccgccatggcaatcaaatttctggaagtcatcaagcccttctgtgtcatcctgccggaaattcagaagccagagaggaagattcagtttaaggagaaagtgctgtggaccgctatcaccctctttatcttcttagtgtgctgccagattcccctgtttgggatcatgtcttcagattcagctgaccctttctattggatgagagtgattctagcctctaacagaggcacattgatggagttagggatctctcctattgtcacgtctggccttataatgcaactcttggctggcgccaagataattgaagttggtgacaccccaaaagaccgagctctcttcaacggagcccaaaagttatttggcatgatcattactatcggccagtctatcgtgtatgtgatgacctggatgtatggggacccttctgaaatgggtgctggaatttgcctgctaatcaccattcagctctttgttgctggcttaattgtcctacttttggatgaactcctgcaaaaaggatatggccttggctctggtatttctctcttcattgcaactaacatctgtgaaaccatcgtatggaaggcattcagccccactactgtcaacactggccgaggaatggaatttgaaggtgctatcatcgcacttttccatctgctggccacacgcacagacaaggtccgagcccttcgggaggcgttctaccgccagaatcttcccaacctcatgaatctcatcgccaccatctttgtctttgcagtggtcatctatttccagggcttccgagtggacctgccaatcaagtcggcccgctaccgtggccagtacaacagctatcccatcaagctcttctatacgtccaacatccccatcatcctgcagtctgccctggtgtccaacctgtatgtcatctcccagatgctgtctgttcgatttagtggcaactttttagtaaatttactaggacagtgggccgatgtcagtgggggaggacccgcacgttcttacccagttggaggcctttgttactatctttctcctcctgagtccatgggcgccatctttgaggatcccgtccatgcagttgtatacatagtgttcatgctgggctcctgtgcattcttctccaaaacgtggattgaggtctcaggttcctctgccaaagatgttgcaaagcagctgaaggagcagcagatggtgatgagaggccaccgagagacctccatggtccatgaactcaaccggtacatccccacagccgcggcctttggtgggctgtgcatcggggccctctcggtcctggctgacttcctaggcgccattgggtctggaaccgggatcctgctcgcagtcacaatcatctaccagtactttgagatcttcgttaaggagcaaagcgaggttggcagcatgggggccctgctcttctgagcccgtctcccggacaggttgaggaagctgctccagaagcgcctcggaaggggagctctcatcatggcgcgtgctgctgcggcatatggacttttaataatgtttttgaatttcgtattctttcattccactgtgtaaagtgctagacattttccaatttaaaattttgctttttatcctggcactggcaaaaagaactgtgaaagtgaaattttattcagccgactgccagagaagtgggaatggtataggattgtccccaagtgtccatgtaacttttgttttaacctttgcaccttctcagtgctgtatgcggctgcagccgtctcacctgtttccccacaaagggaatttctcactctggttggaagcacaaacactgaaatgtctacgtttcattttggcagtagggtgtgaagctgggagcagatcatgtatttcccggagacgtgggaccttgctggcatgtctccttcacaatcaggcgtgggaatatctggcttaggactgtttctctctaagacaccattgttttcccttattttaaaagtgatttttttaaggacagaacttcttccaaaagagagggatggctttcccagaagacactcctggccatctgtggatttgtctgtgcacctattggctcttctagctgactcttctggttgggcttagagtctgcctgtttctgctagctccgtgtttagtccacttgggtcatcagctctgccaagctgagcctggccaagctaggtggacagacccttgcagtgatgtccgtttgtccagattctgccagtcatcactggacacgtctcctcgcagctgccctagcaaggggagacattgtggtagctatcagacatggacagaaactgacttagtgctcacaagcccctacaccttctgggctgaagatcacccagctgtgttcagaattttcttactgtgcttaggactgcacgcaagtgagcagacaccaccgacttcctttctgcgtcaccagtgtcgtcagcagagagaggacagcacaggctcaaggttggtagtgaagtcaggttcggggtgcatgggctgtggtggtgttgatcagttgctccagtgtttgaaataagaagactcatgtttatgtctggaataagttctgtttgtgctgacaggtggcctaggtcctggagatgagcaccctctctctggcctttagggagtcccctcttaggacaggcactgcccagcagcaagggcagcagagttgggtgctaagatcctgaggagctcgaggtttcgagctggctttagacattggtgggaccaaggatgttttgcaggatgccctgatcctaagaagggggcctgggggtgcgtgcagcctgtcggggagaccccactctgacagtgggcacacggcagcctgcaaagcacagggccaccgccacagcccggcagaggggcacactctggagaccttgctggcagtgctagccaggaaacagagtgaccaagggacaagaagggacttgcctaaagccacccagcaactcagcagcagaaccaagatgggccccaggctcctccatatggcccagggcttaccaccctatcacacgtggccttgtctagacccagtcctgagcaggggagaggctcttgagacctgatgccctcctacccacatggttctcccactgccctgtctgctctgctgctacagaggggcagggcctcccccagcccacgcttaggaatgcttgcctctggcaggcaggcagctgtacccaagctggtgggcagggggctggaaggcaccaggcctcaggaggagccccatagtcccgcctgcagcctgtaaccatcggctgggccctgcaaggcccacactcacgccctgtgggtgatggtcacggtgggtgggtgggggctgaccccagcttccaggggactgtcactgtggacgccaaaatggcataactgagataaggtgaataagtgacaaataaagccagttttttacaaggt

SEQ ID NO: 519677 - DNA, 1321 bp, Homo sapiens
  misc_feature (1264)..(1264): n is a, c, g, or t
agcgggcggccgggctgcagcgcgtgggagcacgaagtgcgtggctgactcggcgagggcggatccctattagtgacccggaggcaggctctggggcccgccgggtccagttcaatctcacctgcgccgcaaagggggccacgtatataccactatgatatagcaaccctaagccggtttgcaaatctgctttgctctccacaggaccttcagcccgtccagctgacctcacgcattcctccccaccgttgtcctatctccccgtttccgctgggcccctgcgccgctgcggcctgctcctctctctccgccatcctcctagcccggataggttcgcccgctcccgtgctcctccagcttccctctcgccgccccgcctcgcggccttccttgctcctctcccctgaccgggccctccgcaaacttgcctagccgcgtgcgagtttgagccgcctttgcggcggccccctaatcagccgcatttcggcctcagcgctgtaactgcggatccgtttggcccgccgctacgtcggtacgcgactccccacgctgctctgatctgattatgccctggacccttggcttgcgcctttcgtcccttgcctctctgttctcgcggcccagccccttcaccgagctcggcccgtgggcgccaaaaatctgacttcccggcccgcgacagctccggtgagacgaacagcgagccgcaccacgctacggccagtctcagagaacgtttcgccgctacagcggcgcctctccaagtatcgacccatgcacatagagaaatcgctcctccccccctgggagcagcatgggccctggcaccgcgctacctaagaccgacgcatcccgccctacggccgtactcatccacaccgccgacgggggcgacagaacacccgactccctattatagagacaatattctcggccagcgccgccatctactccagcaacagatgtcagctccaacatcagcgtgatcgatatcggccaacgcagacaacagtgggctagcgcgattaggtgcaactccttacacgctggtccccccacagcgtcttctagtacgacactatgcgtctccgtaccacagtaagcgcatcccgacaacgtcggagttgctgcaagtcttagctcaagcgtactctttcacaccttcggtcgtagcatcacgcggccgttacctctgcgaacaacgcgtgagtcttataagcccccgattgggagtctacacagtcagcagtcgactatgctgcanctgatccgcacggtgttgtgtgtacctccatactactagctgatctattcgaccgcc

SEQ ID NO: 519678 - DNA, 353 bp, Homo sapiens
tgagatggagtctgactctgtcgcccaggctggagtgcagtgctgcaatctcggctcactgcaacctccgcctcccaggtttaagcaattctctgcctcagcctcccgagaaggtggggttacaggtgtgtgccaccatgcccagctaatttttgtattttcagtagagacggggtttcaccatcttggccaggctggtcttgaactgctgacctcgtgatccacttgcctcggcctcccaaagtgctgggactacaggcgtgagccaccgcgcctggcctaaaaacactcttgtcctaatcagagagtagttagttgtctttgtgggagtagggaattggtggtggaaatgt

SEQ ID NO: 519679 - DNA, 114 bp, Homo sapiens
attcctgagagcaagcagattgtatagtgctaatgcaaatggagcaaagcgttcgctgagccagttgcgtgagctccagatcgcaaaccttccctaccccccgtacgaggccaa

SEQ ID NO: 519680 - DNA, 145 bp, Homo sapiens
ctttttttgggagggggccttccagcatgtggggaaagccttccatcaggggaagatttttaagtgaaaattttttgccatcccctaaatgcctgcacctgcccttcagggaaatgggggtccttaaaggaaacttgccctttta

SEQ ID NO: 519681 - DNA, 269 bp, Homo sapiens
ataggctggcctccaatgccgtgtagtctgtagagaacaccttcactcctactgctctaacccaggtccccacggataccttggcaacggggttgtaccactgtcactgtacagaatcagacacgctctcccttgcgtggcatcagcatgcccaaccatggtatactcatcactagcaggacaacactgacccatctgccctctccctgctggaccatggacaccttaaggccaaacacagctgactccaggtgcacactggctgagaa

SEQ ID NO: 519682 - DNA, 281 bp, Homo sapiens
attttagaggatcccccgcgtgccggatcagtagtgggatcgcgcctggagtgcagtggcgcgatcgtaacactgcaggccggatgcggtggctcacgcctgtaatcccagcactctgggaggccgaggcgggcgaatcatctgaggtcgggagttcccgaccagcctggccaatatggtgaaaccccttttctactaaaaatactaaaaattagatgggcatggtggcaggtgcctgtaatcccagctacttgggagactgaggcgggagaatcgcttga

SEQ ID NO: 519683 - DNA, 1087 bp, Homo sapiens
ccattaataaggatatgagtaagtggaaatagagttgagcaagataatagagtaggctatggaccccgtccagcaactgcagtggtgtggcccaccacctgcgaggaagataggtagtcgttgaccgacgtgtggcatcggcatgatagatcgggctccggcagggtgcggagggtgaaacactcgcgtcgttcagcttgcgcgtcaccgacagaatccatatgcaccagctaccacaacgcgcaagagcaatgacaccaacaacacggcgcagtacagggggcacaacgcgagaagcggccggggaagcgcgcgcacggagcgagaggtgactcacaccgcgcggagcgaggggggaggtgtagagggggagtgaccccacagctgcggagcgcgccgcccgcggcggagagagagaggcatcgcggcgcgcgcccgcgcggagagagagaggggagggggggcaccgcggggcggggaagagagagagacagtagtgtgtggcgcgcccccacgcagagggaccaccaccgcgtgactgcgcgggggtggagagagagagggtagtggggagcgacacgcctgcgccagcgagagagagagaccgaccgcccgcggctgcgagcgagagacaaacgcgcggggtggagggggggcgcggaaggcacgcagcgaggggggccgcgccacacagagagagaacacacatccctcgcggcgcgcgggttgtgggcctccacagagagagagaagaagaagaaagggcgggtgggctgggggccaccccacgcgagaaagagaaagagaccccgagagggagggaggggagaagaaaacacacacacacctccgcgcggaacacccccccacccaagggggagaggcgcccagagaggaccaccccacgcggaggaacccgcgaccccgcccccgcgggcgcgcccggccccgccccccccccccggcccccccccccccgcgcgggggggggcgagagagaggggtggggggggcgggggaggaaaggctgggcgcgccaagagaggggggcagagatgtgtcccccggagggggggggcggggggga

SEQ ID NO: 519684 - DNA, 112 bp, Homo sapiens
  misc_feature (32)..(32): n is a, c, g, or t
  misc_feature (36)..(36): n is a, c, g, or t
  misc_feature (41)..(41): n is a, c, g, or t
  misc_feature (64)..(64): n is a, c, g, or t
agcccgcgagtgttttaatgacgttaaacctngacnctacntaatgtggccgccccaccggcgntttttatgcctggaacgacgagcgcacgagtagtgagcgaggaagcgg

SEQ ID NO: 519685 - DNA, 156 bp, Homo sapiens
tactgccggtgctctactgacttgggtttatcgtcgtgaccgctgtggtctggcacgaaattgaccaaccctggggttcgtatcgcttcagtttaactttcgtttattgctaacagcttaatcactggctgtttccctgtgggcggtcgtggctag

SEQ ID NO: 519686 - DNA, 701 bp, Homo sapiens
  misc_feature (462)..(462): n is a, c, g, or t
  misc_feature (471)..(471): n is a, c, g, or t
  misc_feature (473)..(473): n is a, c, g, or t
  misc_feature (483)..(483): n is a, c, g, or t
  misc_feature (486)..(486): n is a, c, g, or t
  misc_feature (491)..(492): n is a, c, g, or t
  misc_feature (498)..(498): n is a, c, g, or t
  misc_feature (501)..(501): n is a, c, g, or t
ggcacgaggcggaaccgagcccaggagccggggacggtgcgccagtgccccctccgcgagccccaaccagtagacggttccctgtctcccgcgccccaatttcgattttcaaacgcaactcctacaggattctgagaccccgtcccatctcccatatcccatttccagctgcaaattactgcagaatctgaacccaggaaagaaacccatttgccgaccccctcttccctctccagacaggtggagagcgggtgagggtctcgctcggctttccccctgcacctttcccaccctcccgcccgtccctgggggtcctccgtcaccgcggccatggcccagaagccgaaggtggacccccacgtcgggcggctgggatacctgcaggcgctggtcacggaattccaggagacccaaagccaagacgccaaggagcaagtcctcgccaaacctcgccaacttcgncttatgacncncagaaactangantatcnngcggcnagntgcaggtcctgagatatactatcatcgactacgcatgtcggaggagacacgagcacctggtggaaggttagctataggaggccatgatgacaacactgtgaccaagacaggggacaaaaaaggagcaccatactgaaacgaaggaaggatgccacacatcaataatcaaaaagcatatccaagaacccacatgaggagac

SEQ ID NO: 519687 - DNA, 170 bp, Homo sapiens
gaggcgactgtaaggataaagaaaaggaaggggtggtaggcgcagaagcgggggacgaatataggcacaccgcatacatacatagataggcagctagtggcggctagcagcctaccggtgcctatcctacataagacctaccacacaacagactatgtagcaccgaccct

SEQ ID NO: 519688 - DNA, 450 bp, Homo sapiens
  misc_feature (12)..(12): n is a, c, g, or t
  misc_feature (54)..(54): n is a, c, g, or t
  misc_feature (68)..(68): n is a, c, g, or t
  misc_feature (137)..(137): n is a, c, g, or t
  misc_feature (248)..(248): n is a, c, g, or t
  misc_feature (368)..(369): n is a, c, g, or t
  misc_feature (385)..(385): n is a, c, g, or t
  misc_feature (396)..(396): n is a, c, g, or t
  misc_feature (399)..(399): n is a, c, g, or t
  misc_feature (408)..(408): n is a, c, g, or t
  misc_feature (412)..(412): n is a, c, g, or t
aaaaaacttgcnccttgacacttaagacagtttttaaaggttccttcgcgaagncactacgtagacanagagctcgcaagtgaaccccgggcacgcacatcactgtgcgtggtagtatccacggcgaagtaagcatnaaaaagatgcttaagggatcacgatgcagaacagcgctttgaaagcctggttggactcttcttacctctctggcgcaaaccagagctggatagaacagctctatgaagacntcttaaccgatcctgactcggttgacgctaactggcgttcgacgttccagcagttacctggtacgggagtcaaacccggatcaattccactctcaaacgcgtgaatatttccgccgcctnnccaaagacgcttcacngttactcttcnacngatctccgncccntgacaccaactgtgaagcatggttaaacgtccctgtag

SEQ ID NO: 519689 - DNA, 275 bp, Homo sapiens
  misc_feature (7)..(7): n is a, c, g, or t
  misc_feature (107)..(108): n is a, c, g, or t
  misc_feature (114)..(114): n is a, c, g, or t
  misc_feature (125)..(125): n is a, c, g, or t
  misc_feature (129)..(129): n is a, c, g, or t
  misc_feature (136)..(136): n is a, c, g, or t
  misc_feature (150)..(150): n is a, c, g, or t
  misc_feature (164)..(164): n is a, c, g, or t
  misc_feature (199)..(199): n is a, c, g, or t
  misc_feature (203)..(204): n is a, c, g, or t
  misc_feature (219)..(219): n is a, c, g, or t
  misc_feature (241)..(241): n is a, c, g, or t
ggatttnttggtggtagcatccacctccttcccccaacccaacagactagttcaaatttgggtaaataaataaaataaataagattcctcaagctggcctacccttnntagganccgtggtttcntccngccactntggatgcccgatgnccatctggggttanttggggcgtcctctcctctcgggtttttgggagcngctnngggatggcagcatanggggctggatggcgcttggcanatggctgctgcgcgcgcagcattgctgagctgcg

SEQ ID NO: 519690 - DNA, 216 bp, Homo sapiens
ttgccaccagcaatagggcaaaaaaaagcttgagagaaacaaaaacactgagagtgggaaacatatgacttcaaacattcatcaacatcagagaatccatactaagagcatttataataatatatgtgatagagatttcacaggcaagtactaggcatcaaaacttttgatgaaccatacaatgtggcgtgcatgctagctttaccaggcatcaaa

SEQ ID NO: 519691 - DNA, 117 bp, Homo sapiens
ctgggacacagatgtgaagagggtggctgcgagttcttgttgtcctgtgctctgagagtgtgccccgattcatcaagtacacaggctatgggaatgctgtggccttctggctgccag

SEQ ID NO: 519692 - DNA, 202 bp, Homo sapiens
  misc_feature (105)..(105): n is a, c, g, or t
ctctagcaggatccctttaacgacccgacagaccaatgacatttatgtataacatgaagacggactttaagtgccagctggcccgctgccagacagctgctggancggcaggggccggggctcagcaacgctgtgctcctgacgatctacatctcacggcttgggcctggccatcaaccgcgccatcaacatctgcgctagc

SEQ ID NO: 519693 - DNA, 168 bp, Homo sapiens
  misc_feature (44)..(44): n is a, c, g, or t
ctctgaggatccccaggcaaagctctacagaggagccaagcagncatagttgtatatgatatcacaatgaggaggtcctttgcagacgcacaaattggggtaaagcacttcagaggccaggcagtctaaccattgttataagctttatcgggaaaccaggccgaacta

SEQ ID NO: 519694 - DNA, 104 bp, Homo sapiens
ttacacgctatgatactgttcctgtgtgcgataatagcgaggtgcgataatagcgaggtgcgataatagcgaggtgccgataatagcgaggtgccgatgaatag

SEQ ID NO: 519695 - DNA, 729 bp, Homo sapiens
cttctccaccaacggacctctggggacacgagtctgagccgaacaccagagacactcctgccctttgcagaggcagaagccttcctcaagaaagctgtggtgcagtccccgcaggtcacagaagtcctttaagagggtttgccttggatccggtgcacagttgtgagggctcctctgtcatcacctaccaggatgtctggaggagaaaaagacagaacaaagatggaagtggcctggggcccctggggggtggggtcctctcgtgtgtgttataaaatcgtgccatcttatacgtagcttgatcgtctcatgtagggaggagccgagatctgctccactcagtgcatgcgtgtgcatcgcacgcgcaagacatacacttctcaccacaatacacacatatacactcacagcctctctggcctcttcccttggggaggggccacctgtagtatttgcctgattggtggggtacagtggatgtgaatactgtacaatagcttgtgctcagactcctctgcgtggagagggtggggtgcaggaggcagacccatcccccccaaagcaccctggggagatcttcctctctctatttaactgtaactgaggggatacaggtctggggatgggggacacttggccacaggatactggtgcttaggggtaccatgcccctgcatgcctgaatcgtgtactgctcgataatgttccgaatagaatatttgcaaaaaa

SEQ ID NO: 519696 - DNA, 323 bp, Homo sapiens
  misc_feature (176)..(177): n is a, c, g, or t
ccctagctaaagcctcccccaattccccctgccacccccccccccacttggctgccttaggagtcttgtggcattgctgtgaattagctcccttggtgatatgtcctatattggctaaattgaaacctggaattgtggggcaatctattaataactgccttaaagtcagtaacttnncccttagggagggtgggggaaaaggttaaattttgtattcagggggtttttggggaccttttgggttttttaaaaaatgtttttggagggggttatgcccaatccatgttttatttcagggccaataaaatttaggaaggcttcca

SEQ ID NO: 519697 - DNA, 1247 bp, Homo sapiens
ggacgcgtgggtccgcaagggaaagatgaaaaattataaccaagcataatatacgcaaggactaacccctataccttctgcataatgaattaactagcaaactaactcttgcaaggagagccaaagctaagacccccgaaaccagacgagctacctaagaacagctaacacagcagcacacccgtctatgctagcaaaactagctgcggcaagactctatacggtagagcgcgcacaaacctaccgagcctggctgcatagcctgcgcttgtccaagactagaactcttagcttcaactttaacactattgcccacagcaaccctctaaatcccccttgctacaactttacacctgcctctacgctcccaacacgagcgaacacagcctctctctgcgacacctaccgcaacacaacaccctctgtaccacgcacgcacgctacacaaccacattttacacacccacaatacgctacggccctacacaaccccagccaacccacaattacacgcaaaagtcgcttcaacgacttctaacacccacataccttacaaaacaatccccaacaccactactacactgcaacatccttccacacccaacttggaaccacatctctcacccctaatagcaagcaaccttaatgcttcacgctcataacgctaaccatgcacacaaccatccatcctaccgcactacagccactgcgatccagcactttaaccacaccacctcgaacctgcacaacttaaacagccccacatactctaccaatccaaccacaccaagttcattctatttaccccattcaacttgctcacacccccaaccaccagtgcactgcctccattaccgaacaaggcttacaacaccacgtacacaacgcgcaccctcggcgcacacatcttaaaccaccggactgtcataacccacaacaaccttcaccctcctatacactacaccacgatatcaccactccaccgtcctggactccgagtggcacacactggtgtacaataggcgcgctgcagcgcatacccttaaccggcttcaaacgtataaccataaatacctggcttcccctaactaagggacccaggctttaaacaggctccacacacagcgttccacagttcacaaacatacatactcatgagaattgacatgctcgtcaaaaaggcgtaccgtaccatcagacaacataaacactaggcgcatactattaacgcgacgagcagccaaacc

SEQ ID NO: 519698 - DNA, 863 bp, Homo sapiens
  misc_feature (792)..(792): n is a, c, g, or t
cctagcgccgctgggcctgaacggtctctgtcgagcagcggacgccggtctcggttccgcaggatggggtgttgttaaagtggtcaagaataaggcctactttacgagataccaatgtgaaatctagaagacgacgagagggtaaagactagattaattatgctacgggaaacgcattggtggatacgaaggataaatgataaagtagcaagcgaacgagcgcgcaagagtaacaggagtgaatagtgtacgtgtgacgaaatcgatgagatgatccatttgtcaggattggctctatgtcgcgcagtcatgagagaggcggagtatcgagtagatctagcagcagagatatggcgagcagcgaatctgcccaacaatactggtagtggaagggttggcgtcgtgacagaattgatgctgacaggcatgattgtcactcgggcctggctgactgaggctcgcagtgccttcatcgaactaggatttggctactggcacagaggatgctagtgacaggcgcaacgtgggaggctgaagcgtggtagatgagatagcaactgtaggcaaacgcagttgcatggttcgagaccgagggtgccatgtcaggctgcatactgttggactgcgaggcactttgcccaaggagactactcacgtggcagatgagcacgtgtttggggagcctcgtgaaggggagctggggagatggcgaggggctctggtcttagtaccgcgtcaccagataaccgaaagcagagtatcccatgcgtttactggatctctggaacacgnctgaggacactttcacatggcgggtaaagttgacactcggtgaaggctatcattcattggggcccagaatt

SEQ ID NO: 519699 - DNA, 136 bp, Homo sapiens
ctgacaatcactctcggactgcgtctcgctgctgggggcatatgccccagcaccctgtaacacccctgctgttgcctgggcagagaggaaggggagggcacggatgcctgtaattattaacacactgacttccatt

SEQ ID NO: 519700 - DNA, 193 bp, Homo sapiens
ccccccggggggggggttttttagggggggtttccccccggaaatggggggggtaattttaagaaaccttttttccccccctccccccccggttttttggggaatttttaaaaaatttttgcgcccccggggttccccggggttgggggggggggggggatttttttttgttttatttttttttttggtttga

SEQ ID NO: 519701 - DNA, 204 bp, Homo sapiens
gtatgtgtacatgagtacaagtccccatggaggctagaagcattgcatctctctgtatctggagttacaggagcatagaagcaacatgtactcattggccaggacaccaggcatggccagaagccctgcaagagtggctgctgtgagtctctgatcctcagaggaaggcccagctagcaagcaccacctgctcctaacagccat

SEQ ID NO: 519702 - DNA, 407 bp, Homo sapiens
tgtttatcgatgcaccactgcttctgcaggaggctgctgcctggaaacagtgggtggtggtgtgagtggagactccttcaccattggttagtcttcttgatgctgatgtcctgttagtgagttcttatgtgatctggttgtctaacaggatgtcacacctctttcctctctctgtcttgctcctactcctgccatatgaaacatctgattgccgcttggccttctgatatggttaggaggggcctgatcagtgtgggcctgctcagtggacctagtcagttgggacttggtcagtgaggcctatttagtggggggtggtcagcaggtgtctgcttagagagggtctcattagagggatctagtagtgcaggtcttggtgagtgtgttcctagtggcatcgataaaca

SEQ ID NO: 519703 - DNA, 190 bp, Homo sapiens
actcagttccagcccttcatggcagcacgaagttcatcagcatttaaattgcgctgagtttttagcagagcttaaaacaacctcctcaaggtgacctgttaaaggctttcttcagatgtttcatacccaggggctttcctcttttcctgagagatatgctgtctttgtatctgtttgacacaaggtgcac

SEQ ID NO: 519704 - DNA, 83 bp, Homo sapiens
gcacgacccccattccctctctactcttgacagcaggattgaatgttgtgtattgtggtctattttattttcttcattttgtt

SEQ ID NO: 519705 - DNA, 413 bp, Homo sapiens
ctatactgatactacaacgtcatcgactgtgacccaatcatcttcatatacctgtgaactgttcctaccgtgctcgagtggtcaaataccagcgtgacggtccgaattgcatgcaggacaatcaaggtggtgctccaaattactaccccatacagctctggtgctccgtaacagcaggcttctgccctgtatcacagtatccaatattctgtataaatggggagataccagactggcaatgattattacattattcaggtgtgggcattctatgtgaacgtgctgaatgaggcacagaggaaacgtctgtgtgagaacattgccggtacacctgaaggatgcacaaatttgcatccagaagaaagcggtccttaacttcactgacgtgcagccttactacgggagccacatcg

SEQ ID NO: 519706 - DNA, 346 bp, Homo sapiens
tattagtttttaaaaagtcctttagttttacttaattctgtggtcatgatatatgattagggcgtctagatctatatacggcagaacacggaagggaatgatctttactcaagaatttcagaaagtcagcactgaagtcctgacctatccgtagacacattggtccctttccagcatattttaggcatcattctcagcaaagcaggccatttctcccacctgcaaagtaccatcacttctatccacttgccacataattcaacagcaactcacattaagcggttactcagcacagttaatcatagaaaagcattcatttgcttcatcagttcatagaaaatatctg

SEQ ID NO: 519707 - DNA, 412 bp, Homo sapiens
ctacggggctctctgcgtcgccctgcggctgcgtgcttggcctggcgtcgttttcacctgtgcccagctgctcttccgtcctggcctcagtagctccccccgccttggtctcccgcggtgttgggcttacagccctgcgccactgcgccgcgcctgcgcctcagtttctgctccttgcaactgggcgcctgttctgcgagctagcgcaagtcttgttgtcttgtgtcccctgccccacagctgtgcgagatactagctaagatcactgaacggttatcaaactcaatctgatggtgaacgacgatacagagatcaagcccgtccgcatatttaccgtggggacactgaggcccaggaaacttggagcttcttcaagtaatagctcggcctgtactgccccatatggtagccg

SEQ ID NO: 519708 - DNA, 4728 bp, Homo sapiens
gagttgccggcgcttcccggcggtggcggcgtctctggccggccttggtgcggcgagccgagcgaggcagctctgagccgcgcggaaatctggcattttttaaagtttgcgccccacaaagaggaaatattccaaaggtactcaggatgtaaaaggggagatcttcacagatgcctccgtggatggcatggcaatccatccatcaatgagaagaccatgatttcttttaattttctgtgtgtttccacattccccagtgagaattcttccacctttttttgtgccatgggaaaaacctgaagggcaggcagagctgctcccgaacttgtgaccttctctgaggttgcagcggctcttgtagaacatgactctgggacatcacttccttttgttttctttcggagctgaaccaaagaatgtgcaccctctttctctagtgctgtggtgtctgcttatttttgtatttgtgctttccatccatcttctgtgatcacaaggcattcttaaggttttctagcacgacttgcggacatccagactcgtggggggcccacccatggctcggtaagccagcagcccagggcactggcactaccatgaggcactgcattaattgctgcatacagctgttacccgacggcgcacacaagcagcaggtcaactgccaagggggcccccatcacggtcaccaggcgtgccccacgtgcaaaggagaaaacaaaattctgtttcgtgtggacagtaagcagatgaacttgcttgctgttctcgaagtgaggactgaagggaacgaaaactggggtgggtttttgcgcttcaaaaaggggaagcgatgtagcctcgtttttggactgataataatgaccttggtaatggcttcttacatcctttctggggcccaccaagagcttctgatctcatcacctttccattacggaggcttccccagcaaccccagcttgatggacagcgaaaacccaagtgacacaaaggagcatcaccaccaatcctctgtaaataatatttcatacatgaaggactatccaagcattaaattaattatcaacagcatcacaactaggattgagttcacgaccagacagctcccagacttagaagaccttaagaagcaggagttgcatatgttttcagtcatccccaacaaattccttccaaacagtaagagcccctgttggtacgaggagttctcggggcagaacaccaccgacccctacctcaccaactcctacgtgctctactccaagcgcttccgctccaccttcgacgccctgcgcaaggccttctggggccacctggcgcacgcgcacgggaagcacttccgcctgcgctgcctgccgcacttctacatcatagggcagcccaagtgcgggaccacagacctctatgaccgcctgcggctgcaccctgaggtcaagttctccgccatcaaggagccacactggtggacccggaagcgctttggaatcgtccgcctaagagatgggctgcgagaccgctatcccgtggaagattatctggacctctttgacctggccgcacaccagatccatcaaggactgcaggccagctctgcaaaggagcagagcaagatgaatacaatcattatcggggaggccagtgcctccacgatgtgggataataatgcctggacgttcttctacgacaacagcacggatggcgagccaccgtttctgacgcaggacttcatccacgcctttcagccaaatgccagactgattgtcatgctcagggaccctgtggagaggttgtactcagactatctctactttgcaagttcgaataaatccgcggacgacttccatgagaaagtgacagaagcactgcagctgtttgaaaattgcatgcttgattattcactgcgcgcctgcgtctacaacaacaccctcaacaacgccatgcctgtgaggctccaggttgggctctatgctgtgtaccttctggactggctcagcgtttttgacaagcaacagtttctcattcttcgcctggaagatcatgcatccaacgtcaagtacaccatgcacaaggtcttccagtttctgaacctagggcccttaagtgagaagcaggaggctttgatgaccaagagccccgcatccaatgcacggcgtcccgaggaccggaacctggggcccatgtggcccatcacacagaagattctgcgggatttctacaggcccttcaacgctaggctggcgcaggtcctcgcggatgaggcgtttgcgtggaagacgacgtgagagctgaattgttgctgcacgtgctgggcccgccaatgccgtcatcatcaggattttacaaatctctttgcggggaactgtttcactcatggtatggaaaaccccaggactctgccactctaggcacacatgaattataaccattttggaatttccttcgtgatgttcgagagctcagcaatggacccctcacagagctcctctatccgaggccattggagaccccagtttctcaagaattcagctctgctctgagcgtcctggagcttggggatgcagccagctggcctgcactgggtgtggagagaacacctagggaaggcagcctggccctgcccgcctccgccttctggagagcctctgggttctgagtcagcaagccagaggtcatgccacaggcctggctggaacttacacttcacgttccctttttttccccctagagatggggtctcgccgtgttgcacagactgtctgtattcaatggctatcttcacaggtgtgatcataccacattcacttctgaaacactcttgttgcgatcgctaacctcactgggacagagaaccgcagtctttcgagaatggaggctcttcattttttttttctcctttactccaaactcagccctccagtttcttcagatgtaaaccctgttaacgtcactgtttccaaaaggaaaaaaataagtcagtttttggcagcaccttcatctttctgacctcctcctattctgtccttgtggacttatgtttaacatagaaaatgaatgcgtttaaaacaaaaccactttctgcatttaaccagtcctggctctctctctgctgcctcttcatacgttttctcaagaacttcagtttataattggaagagaaatttttgctgttaatgccagaatgagcaacctcaaggaattgaacacttcttggaaaatctaggtaattcaagccctcatcaggtttacaagatcatcagagaaacagaggattttaatttttagttctggccggctacaggctccatttctctgccttcccattggaaatagtttatttccacattctccactgcgtgtggtcaaagttcctcacccagcaagggactatagatactcgtgtcccaattccaaaacacaatgcacaagctgaacttgggctgaacgtggcgtgttgagatttggaatgaggtttctaagagccgtgttcttcatggaattttccaggccacttggcagcttggtttaccgatggatgggctagagatcttgtcgtttcttggaagtcacagggaagattgaagagaacgcttgagcatccttggcaacagcccaggtgggacctggatgaagctttgcactcaagtattgtcaagggaagcttcctgtgaaccaaagttctcaggccaaggtctcgcccaccaaagccagaaagtgcaagcacccgtctacccagctctaacttgtatgtgtgagacagaccaggcttcgggggtaggaggatctgcagttgttcagccgtctttctgctggtgttgtctttctgccatcagagaagggacacacagcccgttcgaaggtgtgcagagggctctgagcgccaggatggccagggctgtttttgctactgaaggagcgtgtgtcctgaactcccacttgcagggacagtccccaccttctctatagccggcactgggagcagccgccagcagggaaatctggcctgagcacaaggatgctttagggagagatcacttcagtgtgtgtgtatatttatttgcagtacagtgcgcgcgtgtgtgtgtgtgtacgcgcacgtgtgggtgagtgcgtcttctgagtgggttctgttcagttgctaatgaggctcctccgctctggacacaacccttttatagattaatttctctgccaattaacttgtcattttcagtacatattttactattccacaccaaccataattacaacaagggatttttcttatgcactcctatgcatgtgaataacatgtggtgtaattctgcttcttacagaagtattactgaaggtattatttccaatattatttggtttattatgcggatcttttttatatatgcagtcccatcccttctgtgccactcaatgccatccagacatggtttttccctccaggggcctttctctccagagggcacttcggctgcctctgcttcctctcattcgaggcccggctcttgctgacagaataggttccgttctgggcggtggttctcgagcctgccattcaaaaccaaagcaaattggagcatttctcacaacatggtattgaagttcctttttgttctcaaaagttgtgaccgtgttaaattgtactcccttagtcctgtaaggtatgttaagtgaatcgcagttacgctgtacttttattaatatttaacataattaaagatggacccataagagtga

SEQ ID NO: 519709 - DNA, 4776 bp, Homo sapiens
gagttgccggcgcttcccggcggtggcggcgtctctggccggccttggtgcggcgagccgagcgaggcagctctgagccgcgcggaaatctggcattttttaaagtttgcgccccacaaagaggaaatattccaaaggtactcaggatgtaaaaggggagatcttcacagatgcctccgtggatggcatggcaatccatccatcaatgagaagaccatgatttcttttaattttctgtgtgtttccacattccccagtgagaattcttccacctttttttgtgccatgggaaaaacctgaagggcaggcagagctgctcccgaacttgtgaccttctctgaggttgcagcggctcttgtagaacatgactctgggacatcacttccttttgttttctttcggagctgaaccaaagaatgtgcaccctctttctctagtgctgtggtgtctgcttatttttgtatttgtgctttccatccatcttctgtgatcacaaggcattcttaaggttttctagcacgacttgcggacatccagactcgtggggggcccacccatggctcggtaagccagcagcccagggcactggcactaccatgaggcactgcattaattgctgcatacagctgttacccgacggcgcacacaagcagcaggtcaactgccaagggggcccccatcacggtcaccaggcgtgccccacgtgcaaaggagaaaacaaaattctgtttcgtgtggacagtaagcagatgaacttgcttgctgttctcgaagtgaggactgaagggaacgaaaactggggtgggtttttgcgcttcaaaaaggggaagcgatgtagcctcgtttttggactgataataatgaccttggtaatggcttcttacatcctttctggggcccaccaagagcttctgatctcatcacctttccattacggaggcttccccagcaaccccagcttgatggacagcgaaaacccaagtgacacaaaggagcatcaccaccaatcctctgtaaataatatttcatacatgaaggactatccaagcattaaattaattatcaacagcatcacaactaggattgagttcacgaccagacagctcccagacttagaagaccttaagaagcaggagttgcatatgttttcagtcatccccaacaaattccttccaaacagtaagagcccctgttggtacgaggagttctcggggcagaacaccaccgacccctacctcaccaactcctacgtgctctactccaagcgcttccgctccaccttcgacgccctgcgcaaggccttctggggccacctggcgcacgcgcacgggaagcacttccgcctgcgctgcctgccgcacttctacatcatagggcagcccaagtgcgggaccacagacctctatgaccgcctgcggctgcaccctgaggtcaagttctccgccatcaaggagccacactggtggacccggaagcgctttggaatcgtccgcctaagagatgggctgcgagaccgctatcccgtggaagattatctggacctctttgacctggccgcacaccagatccatcaaggactgcaggccagctctgcaaaggagcagagcaagatgaatacaatcattatcggggaggccagtgcctccacgatgtgggataataatgcctggacgttcttctacgacaacagcacggatggcgagccaccgtttctgacgcaggacttcatccacgcctttcagccaaatgccagactgattgtcatgctcagggaccctgtggagaggttgtactcagactatctctactttgcaagttcgaataaatccgcggacgacttccatgagaaagtgacagaagcactgcagctgtttgaaaattgcatgcttgattattcactgcgcgcctgcgtctacaacaacaccctcaacaacgccatgcctgtgaggctccaggttgggctctatgctgtgtaccttctggactggctcagcgtttttgacaagcaacagtttctcattcttcgcctggaagatcatgcatccaacgtcaagtacaccatgcacaaggtcttccagtttctgaacctagggcccttaagtgagaagcaggaggctttgatgaccaagagccccgcatccaatgcacggcgtcccgaggaccggaacctggggcccatgtggcccatcacacagaagattctgcgggatttctacaggcccttcaacgctaggctggcgcaggtcctcgcggatgaggcgtttgcgtggaagacgacgtgagagctgaattgttgctgcacgtgctgggcccgccaatgccgtcatcatcaggattttacaaatctctttgcggggaactgtttcactcatggtatggaaaaccccaggactctgccactctaggcacacatgaattataaccattttggaatttccttcgtgatgttcgagagctcagcaatggacccctcacagagctcctctatccgaggccattggagaccccagtttctcaagaattcagctctgctctgagcgtcctggagcttggggatgcagccagctggcctgcactgggtgtggagagaacacctagggaaggcagcctggccctgcccgcctccgccttctggagagcctctgggttctgagtcagcaagccagaggtcatgccacaggcctggctggaacttacacttcacgttccctttttttccccctagagatggggtctcgccgtgttgcacagactgtctgtattcaatggctatcttcacaggtgtgatcataccacattcacttctgaaacactcttgttgcgatcgctaacctcactgggacagagaaccgcagtctttcgagaatggaggctcttcattttttttttctcctttactccaaactcagccctccagtttcttcagatgtaaaccctgttaacgtcactgtttccaaaaggaaaaaaataagtcagtttttggcagcaccttcatctttctgacctcctcctattctgtccttgtggacttatgtttaacatagaaaatgaatgcgtttaaaacaaaaccactttctgcatttaaccagtcctggctctctctctgctgcctcttcatacgttttctcaagaacttcagtttataattggaagagaaatttttgctgttaatgccagaatgagcaacctcaaggaattgaacacttcttggaaaatctaggtaattcaagccctcatcaggtttacaagatcatcagagaaacagaggattttaatttttagttctggccggctacaggctccatttctctgccttcccattggaaatagtttatttccacattctccactgcgtgtggtcaaagttcctcacccagcaagggactatagatactcgtgtcccaattccaaaacacaatgcacaagctgaacttgggctgaacgtggcgtgttgagatttggaatgaggtttctaagagccgtgttcttcatggaattttccaggccacttggcagcttggtttaccgatggatgggctagagatcttgtcgtttcttggaagtcacagggaagattgaagagaacgcttgagcatccttggcaacagcccaggtgggacctggatgaagctttgcactcaagtattgtcaagggaagcttcctgtgaaccaaagttctcaggccaaggtctcgcccaccaaagccagaaagtgcaagcacccgtctacccagctctaacttgtatgtgtgagacagaccaggcttcgggggtaggaggatctgcagttgttcagccgtctttctgctggtgttgtctttctgccatcagagaagggacacacagcccgttcgaaggtgtgcagagggctctgagcgccaggatggccagggctgtttttgctactgaaggagcgtgtgtcctgaactcccacttgcagggacagtccccaccttctctatagccggcactgggagcagccgccagcagggaaatctggcctgagcacaaggatgctttagggagagatcacttcagtgtgtgtgtatatttatttgcagtacagtgcgcgcgtgtgtgtgtgtgtacgcgcacgtgtgggtgagtgcgtcttctgagtgggttctgttcagttgctaatgaggctcctccgctctggacacaacccttttatagattaatttctctgccaattaacttgtcattttcagtacatattttactattccacaccaaccataattacaacaagggatttttcttatgcactcctatgcatgtgaataacatgtggtgtaattctgcttcttacagaagtattactgaaggtattatttccaatattatttggtttattatgcggatcttttttatatatgcagtcccatcccttctgtgccactcaatgccatccagacatggtttttccctccaggggcctttctctccagagggcacttcggctgcctctgcttcctctcattcgaggcccggctcttgctgacagaataggttccgttctgggcggtggttctcgagcctgccattcaaaaccaaagcaaattggagcatttctcacaacatggtattgaagttcctttttgttctcaaaagttgtgaccgtgttaaattgtactcccttagtcctgtaaggtatgttaagtgaatcgcagttacgctgtacttttattaatatttaacataattaaagatggacccataagagtgacgcctgtggagcgcgtgctcttcctctgcagccaagctcttcctggtg

SEQ ID NO: 519710 - DNA, 3294 bp, Homo sapiens
  misc_feature (6)..(6): n is a, c, g, or t
  misc_feature (81)..(81): n is a, c, g, or t
ggtggngtgtggctgtggcagggggggcatccaaccttctctctttggagtcccagatgcccgcaaaggctgacagcttgnctctcccgctgcttaagaggaaggcatcggggccaggtgtggctctggacctagagccactccgtgggagcctgaatcacacccctgctcacttggagtgttttctgtttccaggggaggccagtgcctccacgatgtgggataataatgcctggacgttcttctacgacaacagcacggatggcgagccaccgtttctgacgcaggacttcatccacgcctttcagccaaatgccagactgattgtcatgctcagggaccctgtggagaggttgtactcagactatctctactttgcaagttcgaataaatccgcggacgacttccatgagaaagtgacagaagcactgcagctgtttgaaaattgcatgcttgattattcactgcgcgcctgcgtctacaacaacaccctcaacaacgccatgcctgtgaggctccaggttgggctctatgctgtgtaccttctggactggctcagcgtttttgacaagcaacagtttctcattcttcgcctggaagatcatgcatccaacgtcaagtacaccatgcacaaggtcttccagtttctgaacctagggcccttaagtgagaagcaggaggctttgatgaccaagagccccgcatccaatgcacggcgtcccgaggaccggaacctggggcccatgtggcccatcacacagaagattctgcgggatttctacaggcccttcaacgctaggctggcgcaggtcctcgcggatgaggcgtttgcgtggaagacgacgtgagagctgaattgttgctgcacgtgctgggcccgccaatgccgtcatcatcaggattttacaaatctctttgcggggaactgtttcactcatggtatggaaaaccccaggactctgccactctaggcacacatgaattataaccattttggaatttccttcgtgatgttcgagagctcagcaatggacccctcacagagctcctctatccgaggccattggagaccccagtttctcaagaattcagctctgctctgagcgtcctggagcttggggatgcagccagctggcctgcactgggtgtggagagaacacctagggaaggcagcctggccctgcccgcctccgccttctggagagcctctgggttctgagtcagcaagccagaggtcatgccacaggcctggctggaacttacacttcacgttccctttttttccccctagagatggggtctcgccgtgttgcacagactgtctgtattcaatggctatcttcacaggtgtgatcataccacattcacttctgaaacactcttgttgcgatcgctaacctcactgggacagagaaccgcagtctttcgagaatggaggctcttcattttttttttctcctttactccaaactcagccctccagtttcttcagatgtaaaccctgttaacgtcactgtttccaaaaggaaaaaaataagtcagtttttggcagcaccttcatctttctgacctcctcctattctgtccttgtggacttatgtttaacatagaaaatgaatgcgtttaaaacaaaaccactttctgcatttaaccagtcctggctctctctctgctgcctcttcatacgttttctcaagaacttcagtttataattggaagagaaatttttgctgttaatgccagaatgagcaacctcaaggaattgaacacttcttggaaaatctaggtaattcaagccctcatcaggtttacaagatcatcagagaaacagaggattttaatttttagttctggccggctacaggctccatttctctgccttcccattggaaatagtttatttccacattctccactgcgtgtggtcaaagttcctcacccagcaagggactatagatactcgtgtcccaattccaaaacacaatgcacaagctgaacttgggctgaacgtggcgtgttgagatttggaatgaggtttctaagagccgtgttcttcatggaattttccaggccacttggcagcttggtttaccgatggatgggctagagatcttgtcgtttcttggaagtcacagggaagattgaagagaacgcttgagcatccttggcaacagcccaggtgggacctggatgaagctttgcactcaagtattgtcaagggaagcttcctgtgaaccaaagttctcaggccaaggtctcgcccaccaaagccagaaagtgcaagcacccgtctacccagctctaacttgtatgtgtgagacagaccaggcttcgggggtaggaggatctgcagttgttcagccgtctttctgctggtgttgtctttctgccatcagagaagggacacacagcccgttcgaaggtgtgcagagggctctgagcgccaggatggccagggctgtttttgctactgaaggagcgtgtgtcctgaactcccacttgcagggacagtccccaccttctctatagccggcactgggagcagccgccagcagggaaatctggcctgagcacaaggatgctttagggagagatcacttcagtgtgtgtgtatatttatttgcagtacagtgcgcgcgtgtgtgtgtgtgtacgcgcacgtgtgggtgagtgcgtcttctgagtgggttctgttcagttgctaatgaggctcctccgctctggacacaacccttttatagattaatttctctgccaattaacttgtcattttcagtacatattttactattccacaccaaccataattacaacaagggatttttcttatgcactcctatgcatgtgaataacatgtggtgtaattctgcttcttacagaagtattactgaaggtattatttccaatattatttggtttattatgcggatcttttttatatatgcagtcccatcccttctgtgccactcaatgccatccagacatggtttttccctccaggggcctttctctccagagggcacttcggctgcctctgcttcctctcattcgaggcccggctcttgctgacagaataggttccgttctgggcggtggttctcgagcctgccattcaaaaccaaagcaaattggagcatttctcacaacatggtattgaagttcctttttgttctcaaaagttgtgaccgtgttaaattgtactcccttagtcctgtaaggtatgttaagtgaatcgcagttacgctgtacttttattaatatttaacataattaaagatggacccataagagtga

SEQ ID NO: 519711 - DNA, 717 bp, Homo sapiens
  misc_feature (203)..(203): n is a, c, g, or t
  misc_feature (392)..(392): n is a, c, g, or t
gcggcgttggcggctagtgcagcaatggccaagatcatagctcgtgatcttcgtgggaagaagaaggaggagctgctgaaacagctggacgacctgtaggtggagctgtcccagctgcgcgtcgccaaagtgacaggcggtgcggcctccaagctctctgagatacgagtcgtccggaaatccatagtccgtgttctcacacntattaaccagactcagaaagataacctcacgagatactacacgggcgagatgtacaagcccctggacctgctggctaagaagacacgtgccatgcgccgtctgctctacatgcacgaggagaacctggagaccaagaagcactatcggtaagagaggctgtacccgctagcggagtacacactctaagnctgatgtgcgcacttgtaatatagcacagctggctgtgaagaaacatttctgcataaaagtcatacatatgaagcacgggctgtatcataatctcaaggctgaattttgataaacgaatccagagacctaaagcttttgtggggggcccgactcccagttgcgccaagtgggatttttgtttatattcttgggccgactctttaaaataaagggacggggccacgcctttccctaactctgtgacaatgagctgcccacttgctccagaaggtgttttatttacatactatacgcctttatgttttactagattacacgcttttt

SEQ ID NO: 519712 - DNA, 111 bp, Homo sapiens
tccagagctgcagtttaatgtttaatagccaatactcaatacagagggctagcgggctactaagaccgacgcgaacagcgcgatgcgtagtgacgccgagcgttagacgta

SEQ ID NO: 519713 - DNA, 2777 bp, Homo sapiens
  misc_feature (109)..(110): n is a, c, g, or t
  misc_feature (113)..(113): n is a, c, g, or t
gccaaagaattttaatccctaaatatgttctcttaaaggaaactcctgtctgaatacgaagcatagctgggatttttgcaaagtcccttttacttcctgccatgcctcnngtntacgggactcgtcttcttttattctagggcccttaagtgagaagcaggaggctttgatgaccaagagccccgcatccaatgcacggcgtcccgaggaccggaacctggggcccatgtggcccatcacacagaagattctgcgggatttctacaggcccttcaacgctaggctggcgcaggtcctcgcggatgaggcgtttgcgtggaagacgacgtgagagctgaattgttgctgcacgtgctgggcccgccaatgccgtcatcatcaggattttacaaatctctttgcggggaactgtttcactcatggtatggaaaaccccaggactctgccactctaggcacacatgaattataaccattttggaatttccttcgtgatgttcgagagctcagcaatggacccctcacagagctcctctatccgaggccattggagaccccagtttctcaagaattcagctctgctctgagcgtcctggagcttggggatgcagccagctggcctgcactgggtgtggagagaacacctagggaaggcagcctggccctgcccgcctccgccttctggagagcctctgggttctgagtcagcaagccagaggtcatgccacaggcctggctggaacttacacttcacgttccctttttttccccctagagatggggtctcgccgtgttgcacagactgtctgtattcaatggctatcttcacaggtgtgatcataccacattcacttctgaaacactcttgttgcgatcgctaacctcactgggacagagaaccgcagtctttcgagaatggaggctcttcattttttttttctcctttactccaaactcagccctccagtttcttcagatgtaaaccctgttaacgtcactgtttccaaaaggaaaaaaataagtcagtttttggcagcaccttcatctttctgacctcctcctattctgtccttgtggacttatgtttaacatagaaaatgaatgcgtttaaaacaaaaccactttctgcatttaaccagtcctggctctctctctgctgcctcttcatacgttttctcaagaacttcagtttataattggaagagaaatttttgctgttaatgccagaatgagcaacctcaaggaattgaacacttcttggaaaatctaggtaattcaagccctcatcaggtttacaagatcatcagagaaacagaggattttaatttttagttctggccggctacaggctccatttctctgccttcccattggaaatagtttatttccacattctccactgcgtgtggtcaaagttcctcacccagcaagggactatagatactcgtgtcccaattccaaaacacaatgcacaagctgaacttgggctgaacgtggcgtgttgagatttggaatgaggtttctaagagccgtgttcttcatggaattttccaggccacttggcagcttggtttaccgatggatgggctagagatcttgtcgtttcttggaagtcacagggaagattgaagagaacgcttgagcatccttggcaacagcccaggtgggacctggatgaagctttgcactcaagtattgtcaagggaagcttcctgtgaaccaaagttctcaggccaaggtctcgcccaccaaagccagaaagtgcaagcacccgtctacccagctctaacttgtatgtgtgagacagaccaggcttcgggggtaggaggatctgcagttgttcagccgtctttctgctggtgttgtctttctgccatcagagaagggacacacagcccgttcgaaggtgtgcagagggctctgagcgccaggatggccagggctgtttttgctactgaaggagcgtgtgtcctgaactcccacttgcagggacagtccccaccttctctatagccggcactgggagcagccgccagcagggaaatctggcctgagcacaaggatgctttagggagagatcacttcagtgtgtgtgtatatttatttgcagtacagtgcgcgcgtgtgtgtgtgtgtacgcgcacgtgtgggtgagtgcgtcttctgagtgggttctgttcagttgctaatgaggctcctccgctctggacacaacccttttatagattaatttctctgccaattaacttgtcattttcagtacatattttactattccacaccaaccataattacaacaagggatttttcttatgcactcctatgcatgtgaataacatgtggtgtaattctgcttcttacagaagtattactgaaggtattatttccaatattatttggtttattatgcggatcttttttatatatgcagtcccatcccttctgtgccactcaatgccatccagacatggtttttccctccaggggcctttctctccagagggcacttcggctgcctctgcttcctctcattcgaggcccggctcttgctgacagaataggttccgttctgggcggtggttctcgagcctgccattcaaaaccaaagcaaattggagcatttctcacaacatggtattgaagttcctttttgttctcaaaagttgtgaccgtgttaaattgtactcccttagtcctgtaaggtatgttaagtgaatcgcagttacgctgtacttttattaatatttaacataattaaagatggacccataagagtga

SEQ ID NO: 519714 - DNA, 108 bp, Homo sapiens
tgaagacttaggcctagcaaattgtgttggttatgtgagtgtgttataaatcagagatgtacatgattgccaatctgcattatcttaccagtgtgaccacacgtgtta

SEQ ID NO: 519715 - DNA, 4459 bp, Homo sapiens
  misc_feature (4388)..(4388): n is a, c, g, or t
  misc_feature (4390)..(4390): n is a, c, g, or t
  misc_feature (4433)..(4433): n is a, c, g, or t
  misc_feature (4453)..(4453): n is a, c, g, or t
  misc_feature (4458)..(4459): n is a, c, g, or t
gagttgccggcgcttcccggcggtggcggcgtctctggccggccttggtgcggcgagccgagcgaggcagctctgagccgcgcggaaatctggcattttttaaagtttgcgccccacaaagaggaaatattccaaaggtactcaggatgtaaaaggggagatcttcacagatgcctccgtggatggcatggcaatccatccatcaatgagaagaccatgatttcttttaattttctgtgtgtttccacattccccagtgagaattcttccacctttttttgtgccatgggaaaaacctgaagggcaggcagagctgctcccgaacttgtgaccttctctgaggttgcagcggctcttgtagaacatgactctgggacatcacttccttttgttttctttcggagctgaaccaaagaatgtgcaccctctttctctagtgctgtggtgtctgcttatttttgtatttgtgctttccatccatcttctgtgatcacaaggcattcttaaggttttctagcacgacttgcggacatccagactcgtggggggcccacccatggctcggtaagccagcagcccagggcactggcactaccatgaggcactgcattaattgctgcatacagctgttacccgacggcgcacacaagcagcaggtcaactgccaagggggcccccatcacggtcaccaggcgtgccccacgtgcaaaggagaaaacaaaattctgtttcgtgtggacagtaagcagatgaacttgcttgctgttctcgaagtgaggactgaagggaacgaaaactggggtgggtttttgcgcttcaaaaaggggaagcgatgtagcctcgtttttggactgataataatgaccttggtaatggcttcttacatcctttctggggcccaccaagagcttctgatctcatcacctttccattacggaggcttccccagcaaccccagcttgatggacagcgaaaacccaagtgacacaaaggagcatcaccaccaatcctctgtaaataatatttcatacatgaaggactatccaagcattaaattaattatcaacagcatcacaactaggattgagttcacgaccagacagctcccagacttagaagaccttaagaagcaggagttgcatatgttttcagtcatccccaacaaattccttccaaacagtaagagcccctgttggtacgaggagttctcggggcagaacaccaccgacccctacctcaccaactcctacgtgctctactccaagcgcttccgctccaccttcgacgccctgcgcaaggccttctggggccacctggcgcacgcgcacgggaagcacttccgcctgcgctgcctgccgcacttctacatcatagggcagcccaagtgcgggaccacagacctctatgaccgcctgcggctgcaccctgaggtcaagttctccgccatcaaggagccacactggtggacccggaagcgctttggaatcgtccgcctaagagatgggctgcgagaccgctatcccgtggaagattatctggacctctttgacctggccgcacaccagatccatcaaggactgcaggccagctctgcaaaggagcagagcaagatgaatacaatcattatcggggaggccagtgcctccacgatgtgggataataatgcctggacgttcttctacgacaacagcacggatggcgagccaccgtttctgacgcaggacttcatccacgcctttcagccaaatgccagactgattgtcatgctcagggaccctgtggagaggttgtactcagactatctctactttgcaagttcgaataaatccgcggacgacttccatgagaaagtgacagaagcactgcagctgtttgaaaattgcatgcttgattattcactgcgcgcctgcgtctacaacaacaccctcaacaacgccatgcctgtgaggctccaggttgggctctatgctgtgtaccttctggactggctcagcgtttttgacaagcaacagtttctcattcttcgcctggaagatcatgcatccaacgtcaagtacaccatgcacaaggtcttccagtttctgaacctagggcccttaagtgagaagcaggaggctttgatgaccaagagccccgcatccaatgcacggcgtcccgaggaccggaacctggggcccatgtggcccatcacacagaagattctgcgggatttctacaggcccttcaacgctaggctggcgcaggtcctcgcggatgaggcgtttgcgtggaagacgacgtgagagctgaattgttgctgcacgtgctgggcccgccaatgccgtcatcatcaggattttacaaatctctttgcggggaactgtttcactcatggtatggaaaaccccaggactctgccactctaggcacacatgaattataaccattttggaatttccttcgtgatgttcgagagctcagcaatggacccctcacagagctcctctatccgaggccattggagaccccagtttctcaagaattcagctctgctctgagcgtcctggagcttggggatgcagccagctggcctgcactgggtgtggagagaacacctagggaaggcagcctggccctgcccgcctccgccttctggagagcctctgggttctgagtcagcaagccagaggtcatgccacaggcctggctggaacttacacttcacgttccctttttttccccctagagatggggtctcgccgtgttgcacagactgtctgtattcaatggctatcttcacaggtgtgatcataccacattcacttctgaaacactcttgttgcgatcgctaacctcactgggacagagaaccgcagtctttcgagaatggaggctcttcattttttttttctcctttactccaaactcagccctccagtttcttcagatgtaaaccctgttaacgtcactgtttccaaaaggaaaaaaataagtcagtttttggcagcaccttcatctttctgacctcctcctattctgtccttgtggacttatgtttaacatagaaaatgaatgcgtttaaaacaaaaccactttctgcatttaaccagtcctggctctctctctgctgcctcttcatacgttttctcaagaacttcagtttataattggaagagaaatttttgctgttaatgccagaatgagcaacctcaaggaattgaacacttcttggaaaatctaggtaattcaagccctcatcaggtttacaagatcatcagagaaacagaggattttaatttttagttctggccggctacaggctccatttctctgccttcccattggaaatagtttatttccacattctccactgcgtgtggtcaaagttcctcacccagcaagggactatagatactcgtgtcccaattccaaaacacaatgcacaagctgaacttgggctgaacgtggcgtgttgagatttggaatgaggtttctaagagccgtgttcttcatggaattttccaggccacttggcagcttggtttaccgatggatgggctagagatcttgtcgtttcttggaagtcacagggaagattgaagagaacgcttgagcatccttggcaacagcccaggtgggacctggatgaagctttgcactcaagtattgtcaagggaagcttcctgtgaaccaaagttctcaggccaaggtctcgcccaccaaagccagaaagtgcaagcacccgtctacccagctctaacttgtatgtgtgagacagaccaggcttcgggggtaggaggatctgcagttgttcagccgtctttctgctggtgttgtctttctgccatcagagaagggacacacagcccgttcgaaggtgtgcagagggctctgagcgccaggatggccagggctgtttttgctactgaaggagcgtgtgtcctgaactcccacttgcagggacagtccccaccttctctatagccggcactgggagcagccgccagcagggaaatctggcctgagcacaaggatgctttagggagagatcacttcagtgtgtgtgtatatttatttgcagtacagtgcgcgcgtgtgtgtgtgtgtacgcgcacgtgtgggtgagtgcgtcttctgagtgggttctgttcagttgctaatgaggctcctccgctctggacacaacccttttatagattaatttctctgccaattaacttgtcattttcagtacatattttactattccacaccaaccataattacaacaagggatttttcttatgcactcctatgcatgtgaataacatgtggtgtaattctgcttcttacagaagtattactgaaggtattatttccaatattatttggtttattatgcggatcttttttatatatgcagatccgtntncgcggtaccggctcgaatcgaatcatggcatagtgttcctggngaaatgtatccgtacattcncacann

SEQ ID NO: 519716 - DNA, 1042 bp, Homo sapiens
  misc_feature (43)..(43): n is a, c, g, or t
  misc_feature (65)..(65): n is a, c, g, or t
  misc_feature (79)..(79): n is a, c, g, or t
agctccgctcgatgttggtgaattgtaacggataccatttccncagaaccagtatgccatgattnggattcgagctcgnaccgacggatacggatctgcagttgttcagccgtctttctgctggtgttgtctttctgccatcagagaagggacacacagcccgttcgaaggtgtgcagagggctctgagcgccaggatggccagggctgtttttgctactgaaggagcgtgtgtcctgaactcccacttgcagggacagtccccaccttctctatagccggcactgggagcagccgccagcagggaaatctggcctgagcacaaggatgctttagggagagatcacttcagtgtgtgtgtatatttatttgcagtacagtgcgcgcgtgtgtgtgtgtgtacgcgcacgtgtgggtgagtgcgtcttctgagtgggttctgttcagttgctaatgaggctcctccgctctggacacaacccttttatagattaatttctctgccaattaacttgtcattttcagtacatattttactattccacaccaaccataattacaacaagggatttttcttatgcactcctatgcatgtgaataacatgtggtgtaattctgcttcttacagaagtattactgaaggtattatttccaatattatttggtttattatgcggatcttttttatatatgcagtcccatcccttctgtgccactcaatgccatccagacatggtttttccctccaggggcctttctctccagagggcacttcggctgcctctgcttcctctcattcgaggcccggctcttgctgacagaataggttccgttctgggcggtggttctcgagcctgccattcaaaaccaaagcaaattggagcatttctcacaacatggtattgaagttcctttttgttctcaaaagttgtgaccgtgttaaattgtactcccttagtcctgtaaggtatgttaagtgaatcgcagttacgctgtacttttattaatatttaacataattaaagatggacccataagagtga

SEQ ID NO: 519717 - DNA, 219 bp, Homo sapiens
accgcagtgcagctgcatgccgcaggcgactacttagaggatacctctgacaaacctcatcaatagactggagacgtacagaaatattcaaccatatctacagaatgctcagctagtcatgtcggccggcttctagaaccaaagtgatgtttggatgtggagtgacatattatcttagcggatgacatcatatcgtgaggaaggttgagccttatactg

SEQ ID NO: 519718 - DNA, 362 bp, Homo sapiens
ctgtgcctctgggtactcctcctggtactcctcctctaccttttaagtcaaatcttccagtaagccaaagtctaaggaaagaaacaagtacattgttgcctattgagaaggtaatacaaagccctttcatttcctttacaaactttaagggcctttataatacttcctaaatggctgggctcagtgtgctcacacctgttatcccagtcgctttgggaggctggggcagacagatcacctgaggtcaggagttcaagaccagcctggccagcatggtgaaaccccatctctactaaaatacaaaaactactccggtgtggtggcacaggcctgttttcccagctacttgggaggctgaggca

SEQ ID NO: 519719 - DNA, 2438 bp, Homo sapiens
gagttgccggcgcttcccggcggtggcggcgtctctggccggccttggtgcggcgagccgagcgaggcagctctgagccgcgcggaaatctggcattttttaaagtttgcgccccacaaagaggaaatattccaaaggtactcaggatgtaaaaggggagatcttcacagatgcctccgtggatggcatggcaatccatccatcaatgagaagaccatgatttcttttaattttctgtgtgtttccacattccccagtgagaattcttccacctttttttgtgccatgggaaaaacctgaagggcaggcagagctgctcccgaacttgtgaccttctctgaggttgcagcggctcttgtagaacatgactctgggacatcacttccttttgttttctttcggagctgaaccaaagaatgtgcaccctctttctctagtgctgtggtgtctgcttatttttgtatttgtgctttccatccatcttctgtgatcacaaggcattcttaaggttttctagcacgacttgcggacatccagactcgtggggggcccacccatggctcggtaagccagcagcccagggcactggcactaccatgaggcactgcattaattgctgcatacagctgttacccgacggcgcacacaagcagcaggtcaactgccaagggggcccccatcacggtcaccaggcgtgccccacgtgcaaaggagaaaacaaaattctgtttcgtgtggacagtaagcagatgaacttgcttgctgttctcgaagtgaggactgaagggaacgaaaactggggtgggtttttgcgcttcaaaaaggggaagcgatgtagcctcgtttttggactgataataatgaccttggtaatggcttcttacatcctttctggggcccaccaagagcttctgatctcatcacctttccattacggaggcttccccagcaaccccagcttgatggacagcgaaaacccaagtgacacaaaggagcatcaccaccaatcctctgtaaataatatttcatacatgaaggactatccaagcattaaattaattatcaacagcatcacaactaggattgagttcacgaccagacagctcccagacttagaagaccttaagaagcaggagttgcatatgttttcagtcatccccaacaaattccttccaaacagtaagagcccctgttggtacgaggagttctcggggcagaacaccaccgacccctacctcaccaactcctacgtgctctactccaagcgcttccgctccaccttcgacgccctgcgcaaggccttctggggccacctggcgcacgcgcacgggaagcacttccgcctgcgctgcctgccgcacttctacatcatagggcagcccaagtgcgggaccacagacctctatgaccgcctgcggctgcaccctgaggtcaagttctccgccatcaaggagccacactggtggacccggaagcgctttggaatcgtccgcctaagagatgggctgcgagaccgctatcccgtggaagattatctggacctctttgacctggccgcacaccagatccatcaaggactgcaggccagctctgcaaaggagcagagcaagatgaatacaatcattatcggggaggccagtgcctccacgatgtgggataataatgcctggacgttcttctacgacaacagcacggatggcgagccaccgtttctgacgcaggacttcatccacgcctttcagccaaatgccagactgattgtcatgctcagggaccctgtggagaggttgtactcagactatctctactttgcaagttcgaataaatccgcggacgacttccatgagaaagtgacagaagcactgcagctgtttgaaaattgcatgcttgattattcactgcgcgcctgcgtctacaacaacaccctcaacaacgccatgcctgtgaggctccaggttgggctctatgctgtgtaccttctggactggctcagcgtttttgacaagcaacagtttctcattcttcgcctggaagatcatgcatccaacgtcaagtacaccatgcacaaggtcttccagtttctgaacctaggagtcagagccgtgtggctgagttttggctgctgatcatggatgctgggcccctggggcatgagcgcctgccctcagcctgtggataccagcccccccaggggcctgagagtcactttgtggtacaggccacactgctgaatagggtgatgctggcaagaggcatgtgctggcggagcgagtgctgcccatgtggacggggcaccgagggatggcttgaaaggctgagcaggcttgaacaagccgccctccttcccagaacgcctcctgcagccctgactaatggtcttgcccgggaacttggttaattgagtatttctgaaaatatatctgcctgccactgggaaa

SEQ ID NO: 519720 - DNA, 122 bp, Homo sapiens
tatgagctgttctaatctcagccttgctagcagatgggcttacacctaaaataagaccagcttctcgcctactcattttctgttcaaatcctcctttatagtaggatgaaaagctaggagtt

SEQ ID NO: 519721 - DNA, 2377 bp, Homo sapiens
gagttgccggcgcttcccggcggtggcggcgtctctggccggccttggtgcggcgagccgagcgaggcagctctgagccgcgcggaaatctggcattttttaaagtttgcgccccacaaagaggaaatattccaaaggtactcaggatgtaaaaggggagatcttcacagatgcctccgtggatggcatggcaatccatccatcaatgagaagaccatgatttcttttaattttctgtgtgtttccacattccccagtgagaattcttccacctttttttgtgccatgggaaaaacctgaagggcaggcagagctgctcccgaacttgtgaccttctctgaggttgcagcggctcttgtagaacatgactctgggacatcacttccttttgttttctttcggagctgaaccaaagaatgtgcaccctctttctctagtgctgtggtgtctgcttatttttgtatttgtgctttccatccatcttctgtgatcacaaggcattcttaaggttttctagcacgacttgcggacatccagactcgtggggggcccacccatggctcggtaagccagcagcccagggcactggcactaccatgaggcactgcattaattgctgcatacagctgttacccgacggcgcacacaagcagcaggtcaactgccaagggggcccccatcacggtcaccaggcgtgccccacgtgcaaaggagaaaacaaaattctgtttcgtgtggacagtaagcagatgaacttgcttgctgttctcgaagtgaggactgaagggaacgaaaactggggtgggtttttgcgcttcaaaaaggggaagcgatgtagcctcgtttttggactgataataatgaccttggtaatggcttcttacatcctttctggggcccaccaagagcttctgatctcatcacctttccattacggaggcttccccagcaaccccagcttgatggacagcgaaaacccaagtgacacaaaggagcatcaccaccaatcctctgtaaataatatttcatacatgaaggactatccaagcattaaattaattatcaacagcatcacaactaggattgagttcacgaccagacagctcccagacttagaagaccttaagaagcaggagttgcatatgttttcagtcatccccaacaaattccttccaaacagtaagagcccctgttggtacgaggagttctcggggcagaacaccaccgacccctacctcaccaactcctacgtgctctactccaagcgcttccgctccaccttcgacgccctgcgcaaggccttctggggccacctggcgcacgcgcacgggaagcacttccgcctgcgctgcctgccgcacttctacatcatagggcagcccaagtgcgggaccacagacctctatgaccgcctgcggctgcaccctgaggtcaagttctccgccatcaaggagccacactggtggacccggaagcgctttggaatcgtccgcctaagagatgggctgcgagaccgctatcccgtggaagattatctggacctctttgacctggccgcacaccagatccatcaaggactgcaggccagctctgcaaaggagcagagcaagatgaatacaatcattatcggggaggccagtgcctccacgatgtgggataataatgcctggacgttcttctacgacaacagcacggatggcgagccaccgtttctgacgcaggacttcatccacgcctttcagccaaatgccagactgattgtcatgctcagggaccctgtggagaggttgtactcagactatctctactttgcaagttcgaataaatccgcggacgacttccatgagaaagtgacagaagcactgcagctgtttgaaaattgcatgcttgattattcactgcgcgcctgcgtctacaacaacaccctcaacaacgccatgcctgtgtgtacccccgcccccgtaccccccgagctggcccctggcagaaggagctggtttgttgttattatgcaagcggcattgtgggtttgcgtttcagcataggaacagagagaagcgttttaatgtgcaaatgctgttccccattattcatggatgtaaaagctgaaaactgatgggctcttggtctggctcctgccttcctccctgctggtcacctgccacctccccctcctccctcagcaggaggatgagggtgcctttaggaagattaccatttagcaagacacccggcaattagaatcggcagacacgaggacacccaactctcaaattgtcttaagagcattctcttgagcggtggattgttttgttggtttaaaaaactacccatcaatgattttcaatgcttcgttgacagagtctcaattgaaaaa

SEQ ID NO: 519722 - DNA, 169 bp, Homo sapiens
tggggcgtaggttgggagcgggagtgaacatttcttcaggtgtgactactctggctggagcccagcaggagcttctgaacatgaatgctatggaccatccacgagctgctgcaggatagcaagccggacaaggatatggaggcttcagcagcaggtgaaggctccatat

SEQ ID NO: 519723 - DNA, 409 bp, Homo sapiens
  misc_feature (14)..(14): n is a, c, g, or t
  misc_feature (379)..(379): n is a, c, g, or t
ggttttcttgccanctgggggggcatcaataatcgccccttggagacaaccaaaccatatacttcccattcattttcgtcgtttgataggattattccacggcctttcctaccagttggttcaaccttatgtcgttattccagcttcaattgtgagccttgattgctgcaacactaggaacggcaattcggacatacaacaaaaaaccctttaaaagccccaggcccctgttcttcggatggattttttgagctttgtttcttcatatcgctccctcgttggaaaatcaaaagttaagtttgaaaacaatcttcacaggagcccaagcacaaattttgttattcagctgttctagttaattcatttttgccagttgaanaactattaatcacccaatccaaaaaaaaaa

SEQ ID NO: 519724 - DNA, 220 bp, Homo sapiens
gggggcccggcccccggggggggggttttttttggggttttccccccagggggggggggtcccgggtttttggggtttcgggggaaaagggacgggcccggccgggggcccccctaggtttgggggcccccgggggggttccccccccccccccccgggggggcctttttttcggtgggggttggggggggttccttttttaccccccctgctttgggta

SEQ ID NO: 519725 - DNA, 478 bp, Homo sapiens
  misc_feature (88)..(88): n is a, c, g, or t
ttactggcatttcctgcttcatgggattgactgcagactctcattccctcagtatagtgtatgaatgggaagcacttcatagccaagngtctgtatagtcaatccattgtgcgtgtgccttgcaatgtgaaggcggcgaaaactgtgtccaatgggtaaagtataacgtcagaacaaagactggcagcaaagttagcaataagttctggaaaataagcatccaacatactctgcacagggctagtgctctcagctaggtggctatagtaagctcgtttctctttagaattagtaggacaaacttctggaataacttgagctgatagatgtaatggaagaactccgatgacagcaccgtaagggcaagatcgcacaggaaagaatgcggaagaagtcgtttggctcatgaggcactcccgatgccgtatcactcttcccaattccttctttttaacacactcgccaaaatgcccaggtc

SEQ ID NO: 519726 - DNA, 585 bp, Homo sapiens
  misc_feature (491)..(491): n is a, c, g, or t
  misc_feature (515)..(515): n is a, c, g, or t
  misc_feature (519)..(519): n is a, c, g, or t
tctgttgcccaggctggagtgcagtggtgcgatctcggctcactgcaacctccacctcccaggttctaatgattgtcctgtcgcagcctcctgagtagctggcattacaggtgcccgccaccacgcctggctaatttttgtatttttagtagagacagagtttcaccatgttgatcaggctggtctcaaattcctgacctcacgtgatccgcccacctcggcctcccaaagtgatgggattacaggcgcgagccaccacgcctggacctggtgtgactttttgaaagcatgcccattcatctgctcactcaaatccacccagtacagaggagtgtggtgaggcctctgcactgcagggctcaggagaatcagggccttggaaacgccaactttgcctacaccactagcacccctgtgaagcctagagatgcaagccttgtgtttcaatcttcacccgaaagatctgaagggtgcagtgggcattggtcatnctgggctgtctggcattcatcctnccgnctgggctgagcacagtgatccccttgggaagccttaccctcaacatgcattcttcgtgggaggtgc

SEQ ID NO: 519727 - DNA, 138 bp, Homo sapiens
  misc_feature (104)..(104): n is a, c, g, or t
  misc_feature (131)..(131): n is a, c, g, or t
tgctgatgtagcctgtctgtgtttgtgtgtgtgtgtgcgcgcgcgcgcatgtttgtgccgggagacagcaagctggtagtatgtctttctggctttaaaaatanatggaattaataaaaaccctttgtacnattcaaa

SEQ ID NO: 519728 - DNA, 100 bp, Homo sapiens
gacggagaggatcccgagcgagatacatactaaccagtcatggaaatgcaaatcagaaccacacaaggtatcggcccacacctgtgaggatggctaatat

SEQ ID NO: 519729 - DNA, 312 bp, Homo sapiens
atatgtaatgtgaccgtaaacaaacctcccttttgctgtataaatgaccctgactcagacagtcccttatagtatcgacaaacagattctgacactacccacccagtcgtctctcagacctcataacgttgatgcttcttacatgggtgcccgttaagctgcgggggaccccatacagttgtcaagcaaacatgctggtgctcctatctggccttcgtattagaagtcccctcttctgggaaacatgcctcctttagtgacctgaatggtcaccaattcacctcctgtaggtctttgctttggtgtcacctt

SEQ ID NO: 519730 - DNA, 158 bp, Homo sapiens
gacctgccccatttatagcataatgtcttccaggtttatccatgatgcacaaaggacaggatttccttatttatttatttttttgataggatagtactctgtcacccaggccggagtgcagtggtgcgatcacagcttatggcagcctcatcctcctg

SEQ ID NO: 519731 - DNA, 151 bp, Homo sapiens
gcatgctgctcttcatgtgaatgtgcgtcgcggttctccacagcatcgcatgtcgctgctcttccatgtagatgtgcatcaggttctcctcagcactcgcatgtgcctgcctcttcatgtgaaatggtggcgtcaagggttcctcctcaga

SEQ ID NO: 519732 - DNA, 277 bp, Homo sapiens
tgaggagctataaaggcgagccgggtacattgcaatgttatgctatcaattataagctacctcgggagtcaatggtagccggcccggtctcttgctggaagctcgggtcgtcctcgtcctccagtgattgttttccagataaccagtgcctccctgcttctctctcgtcctgccagagctcttttcctagacatctctctgacacacacgagaaggtgctaggtggagaccgagttaccccaagccaaagccacgtcgacgtgcccccacatcacct

SEQ ID NO: 519733 - DNA, 733 bp, Homo sapiens
  misc_feature (733)..(733): n is a, c, g, or t
gcatctcagtgcagaagagagcgatccgcgatccctcttggacatgtgcatacgtatgccgattcgatcatgattgtggctgccattgcgtgagtgcacttgtgtgcctacaaatgagcgggtacttatcgtggggtctaaccaggtctccatataatagctagaaactggctgcaagagcaatggttgaggcccaaggtgaagatctaggaggcgctccttattgattgtctcacacgcagctcgtccagaatgtgagctccagagcccatctcgtttactatctaggcatacatctatgttaatggatcgcatgtatgcggatctcactgaagatcgagctaccctcctgtgagagtctgacggatactattggccaggagacttctgcccttctggaatgatgacttagttcgcccaaggatcaatggatggtggtaaatcgtgtgactgattgcagccgcatggcaacaggctgccggggcattgtcaagtcgatctggatgggtctcttctgaagaggcttatcatggagcctgaatcgctgccgatgtggtattgccagttgtggtatgaagttggacatagaatcttgaagtcctatctaagtctccatgcgagttgctagggggagattgaacgtagaacgggtgtcgcattatggccatgtgactgttgtgggttgcccaaggcaggggtccagaaagtgaaggcccggggggaggatattggn

SEQ ID NO: 519734 - DNA, 794 bp, Homo sapiens
acccacttggtttgttacgtacgcatatatttgtgtggagtggtttttctttctggtcggctgttttgattataacttctttattacggtgcggccactacgtgcgctcacaccttttttttgtgtggttcccgccattgctttttctgcggtggcctcttccttcattgttttcttctcttccccccctcgggtgatttccttctctttcttttggagtcacgcagacgttgtttttagttccttttcgttgtttttccgtccaccatgtattgtcttgtggcacaccacctgttttgattataagcgatataacaccggcgggtgttcttctcttcttagaaagaggaacgacgctcgggggtccccccctcttcatcatccacactcattctggtggtgttcccttctccttcataattacccactcttctttggttggttttgtcgtcctcattagcacacccgtcgaggtgtttttttttgtccgcgtgtgttcacggcgtgtgtatatgtgtttgagtgcgcgtgttttctgagccaccgtgttgtcctcccgcccctggaggttttttgaatcccttctcttctttttctcgaccgtcatcattgctgggggccatctctttgtgttattataaattttttccccgttcttgtttttttttttggttttttttgttcctgtctctttttttttttttttgttaaaaaaaaaaaagaggggggaggttttttttcctttttttttttttattcccaacaaatgttaaaaaataaccgggtggttttta

SEQ ID NO: 519735 - DNA, 379 bp, Homo sapiens
tgcccctgtttttaaaacaagttgggaaactggatgggctccagggggaagggagaggtttttcaaggggaactgtttttgcatccatggcccggtctcctgtttaaaactgcaggggtgcaggcaaaaccggggagctttgcccagttagggccacccccttacccttactccaaagaaagggcagcaccaggctttttggccaactgcctgtttgcccacgtggccaccctcctgggggggggcagcctcactggttttcctgcactgaaatgcaactttttttgccatcctcctgggggaccgggtggcatccatgtaaagtctcccgccctggaccaccactgttggaccccagaaaatcggcggaaaaattgat

SEQ ID NO: 519736 - DNA, 308 bp, Homo sapiens
ctgaaagtcaggctatggatcgtgggctccttgtaactcacgtaattgtttcacatcaggaaaactctgggctgtgtgcagtgagctcacacctgtgatcctagcactttgggaaaccaaggtgggtggattgcctagctcagtgacaccagcctgggccacatggcaaaaccccgtctgtgccaaaaatgcaaaaaattagctgggtgtggtgttgacgtttgcggtcccagctactctggaggctgaggtgggaggattgcttgagtctgggaggcggaagttgcagtaagccgagatcatgccac

SEQ ID NO: 519737 - DNA, 763 bp, Homo sapiens
gcttgcagcgcttggtgtatgctgattggcgacgcgccggggtgggctgcaggctgggaaatggcatggtttgtatcttgtggctcggtcgaagcgagttagtaccagattacgatatcggtgcgtgtagtgcgggacgtagtatactccgcgggtccacagtagacgcctccaaggggcagcacaagaatctacctagtgggttatcgggtcccaggataatcctcattgacactggcagaaatggcaatttccagaagtacatcatgcctgtgtttaagagcaagtggctcataaacgtcgtagatttaaacaacaagtctaacgtccaggtagaagttgtacgtcgatgtcatcatggggcacccagagatcattctgggaggcactacggagatatgcagtcaataccgtcatctaattaatgagacactacctgattgccaggtacgaaaaatgtgccctacggaaatccatcgggcagtacggacgacgcattatgggcgacacgtggagagcagagcaactggtgttacatctgcaagaggatggcagatgtgacttaagacttgaggggagccactctaagagttctactattaccccttggacacactggatgatcacatggctctaactcttagaacgcacggacgcatgctatctcttctggaagaatgcatccctaggggacgcgaagccccgggtattttgaccaccctctatgattcatctgacccctttcatctcgagtctattggac

SEQ ID NO: 519738 - DNA, 154 bp, Homo sapiens
ggcgaaaaaaaaaaaaaaaagtcagactacatcgaaaataactcaattataccttttatcccattaagtcgagtcgaatctatagtctccgagtcaactagtctccgcgatttgatgggagagcgttcgacacatcccttggcgtggtcgtgtg

SEQ ID NO: 519739 - DNA, 170 bp, Homo sapiens
  misc_feature (160)..(160): n is a, c, g, or t
  misc_feature (166)..(166): n is a, c, g, or t
agacggtgaccactcctggcatatcttctgggcagcgacgcagctttacagtgcactggtggctgctgcatggactaggcagcttctagtatctgctcctcaaagttcaaggactcatctgcctccttgggtttggcccggggcttcagctgctctagcntttttnggct

SEQ ID NO: 519740 - DNA, 257 bp, Homo sapiens
aaacgggacaacttgtccatcgtttcactgtaccagtattcgccgactgataaaggcatgaggatgtggcctgcatgctgcctgatcttgcctagaaccggctgcacctgctgttctcttgtttatgcaaactggctgcacctgctattcctttgcttatgcccctacccctggctatcctaattccctgttctcctgcctcactattactgtattctctacttttaaataaaaataaaacaaaatacaaaccgtta

SEQ ID NO: 519741 - DNA, 440 bp, Homo sapiens
  misc_feature (29)..(29): n is a, c, g, or t
  misc_feature (40)..(40): n is a, c, g, or t
  misc_feature (55)..(55): n is a, c, g, or t
  misc_feature (59)..(59): n is a, c, g, or t
gctgttttcctgcgcaggagccgcaggcngtacagcacantggcgcccagcgganatgnatggtcttgaagccccacttccacaaggactggcagcggcgctcggccacgtggttcaaccagccggcccgtaagatccgcagacgtaaggcccggcaagccaaggcgcgccgcatcgccccgcgcccgctcggttcccatccggcccatcgtgcgctgccccacggttcggtaccacacgaaggtgcgcgccggccgggctctcatccttggaaggaagctcaagggtggccggcattcacaagaagggtggccccggaccatcggcatttctgtggattccgaaggaggcggaacaagtccacggagtccctgcaggccaacgttgcagcggcttgaaggagtaccgctccaaactcatcctcttcccccaggaagccc

SEQ ID NO: 519742 - DNA, 325 bp, Homo sapiens
tagacgtgtagtggatgaacccccccatctcattcatataccaaatctctccctcacgaggcgtaacgcgttctcctcgactctctcaatcttatccagtcatagcaagcagttgagggtggattaaagccgtacccagctacgctaaaatcttagcatactcgtcagtcacccacagttggatgaataatagcaattctaccgtacaagctctaacataacgcattcattaagttttcttatttatattatcctggtctactaccgcattccgtcgactcaacgttatctccggcaccacgaccacgtactactatctcgctcg

SEQ ID NO: 519743 - DNA, 438 bp, Homo sapiens
gatctaagcaactttgaaataggcaggatgccattgtgacagatgggtctccgtgtggccaagatgccaagtattctatgcatcaagtgtctctgctaaaagtttgaatccccgccaggaaaatccaaatggatgtctgtctccaaacccggacataatgtttagggcgtgaccctctcccgaaatccactgccgccgggcgctaacgttccctcgtccgaggtctgggtgtgaaggttgggaactgctagcccagagttcaatcggatgcaacagtcccccagctgtccctgctcctgccctctactgcagacgcaggtccatgacacctcagagccgtgctcctgccaggcctgctttttgtatggaaacccaagaaaaataaatatatgttggttctgaggaaaggaagattgtacgcagatatgtggtttccaa

SEQ ID NO: 519744 - DNA, 894 bp, Homo sapiens
  misc_feature (273)..(273): n is a, c, g, or t
  misc_feature (283)..(283): n is a, c, g, or t
  misc_feature (310)..(310): n is a, c, g, or t
  misc_feature (318)..(318): n is a, c, g, or t
  misc_feature (322)..(322): n is a, c, g, or t
  misc_feature (363)..(363): n is a, c, g, or t
  misc_feature (434)..(434): n is a, c, g, or t
  misc_feature (436)..(437): n is a, c, g, or t
  misc_feature (444)..(444): n is a, c, g, or t
  misc_feature (464)..(465): n is a, c, g, or t
  misc_feature (566)..(566): n is a, c, g, or t
  misc_feature (575)..(576): n is a, c, g, or t
  misc_feature (591)..(591): n is a, c, g, or t
gacagtggttctcaaaatttttttctctcaggacctcttagaaatcatcaaggaccccaaaaagcttttgggtatgtgggttatagctatcaatatttatggtactagaacttaaaagtgagaaaaatttaaaacacgagaatacataggcacacattctattcatcgtgggaaccatggtgtcaatacatatcatgtagcttctgaaaaactccactgtacacttatagaatgaagaaggcaaaaaacttttttttttttttggaaacggantctcgctctntcgcccaggctggagtgcaggggcgcnatctcggntcantgcaagctccgcctctcgggttcacgccattctcctgcctnagcctcccaggtagctcggactacaggcgtcctccaccatgcctgggctaatatttggtatttttaagtanannacggggntttcaccgggttagccaggnntggtctcgatctcctaacctgggtgatccgcccgcctcggcctcccaaagtatggggattacccgggtgagccaccgggcccgggttgcaaataatctttntttttttcnngagacagagtctcgntctgttgcccaggctggagtgcagtgggcacagatctcggctcacgggcacgctccgcctcccggggttcacgccattctcctgcctcagtttcccgagtgggctgggactacgggggcccgccaccacgccccggctaactttcggtggtctttagtaaacgcacggggttccaccgtgtgggccaggagtggtctcgatctcctgacctgtgtgatctggcccgcctcgggctcccaaagtgctgggattacaggcgtgagccaccgcgcccggcggcgaaacacgatttgtcctaccatg

SEQ ID NO: 519745 - DNA, 418 bp, Homo sapiens
tgggtgatagcgaggtcagacacatcaaagtgatgcagcctgggatcatcaggatataaaatctaggaactatgactaaaaatgtgttcctttcttaaaaccaacgtgacactacaaatagcatccttgagaaaccaatatgcatgtttaataatttttgttttcccactgcgtacctatcgattagtctttcctgtatgtagctctgaaggaagcctcacttctttcctggcatagggagttccttaaacaagagtcagggactctggatgcccatttcctcttaacatatctattattctgggatagcaaacagaggaaagatttttaatagaagttgtttactaacttcaggaaattgccccttcaggatttgaacaatctttctaatgttagagaaggcttttcaccctcaaag

SEQ ID NO: 519746 - DNA, 240 bp, Homo sapiens
ggtcgatctctagcacgatcccctgttagacattctagggaggacgggctgaatagttaactgtttaaatgatgtttatcattggtgttgcagctcctgttggatcaccaggatgccattgctccggtagcacaatgtatcccatagtccacgtatacctgttgggatctacctcgggcgaggtgcccgaccatcgagctcccctacatagcgtatgagtgtcataacttttgctctgga

SEQ ID NO: 519747 - DNA, 702 bp, Homo sapiens
aaacgtttcaaatgttgggtataatcccatcgtaacatgtgtccagactgggaatcatagacggtgaaaggtgcaaagcctcaagcgcgatgtctccgccagtgtttacacttagacgaccattacagctcgaccatcaatttaggaagtgaggtgtgtcatcaacaagttatcaagctcgtgcataggtcttgagctataggtaggccaattgtgtatgcgtagaccatgatctatgttgaagggacgaccctgtgatgatatcatcagtgattaccgtcctaggtgcctatttcagacgagttaatgcttgcagatgtctatgccacatatgtcacatggaggacgtccctgctgccacgggcaagggtggcaagaatcgtcgtcaacgtggaaggttaccgcactagttgggcgcgcctctgggtgtcacaatcagcatgtggtttcgtcaacgtggcggtagcgggaaaatgacaattgtgaacatccagcatcttaggtttttgtacactaatggggaagaaggggcatgctgaacgtttgaaggttcatcatggtcatcagtctctttctcaatgaacaaagcctgaatgagtcactgcgtgtaggaccatttattgttatggcacgcgctgcatcggtggaggctgtgcttcttacagccaacagtgagcagtgtgttcatttgtcgataaacag

SEQ ID NO: 519748 - DNA, 408 bp, Homo sapiens
ttggaaggctgaggaaggaggatcgcttgaggccaggagtttgagactagcctaggcaacacagtgaggccttatctcaacaacaaccacaaaatctaaaaattagctgggtgtggtggtgcatgcctgtgatcctggctacttcagaggctgaggtggaaggatcacttgaggccaggagtttgaggctgcagtgagttatgatggcactgctgcactccagcctgcgggacagagtgagaccctgtctgaaagaaagagagaaagaaagaaagaaagagagagaaagaaagaaagaaagaaagggaaagatggaaggaaggaaggaaaaagaaagagaaagagagacagagagaaagaaaaagaaagaaaagtaagaaagaaaaaagaaaaagacccccaagtaag

SEQ ID NO: 519749 - DNA, 103 bp, Homo sapiens
  misc_feature (5)..(5): n is a, c, g, or t
ttgcncttaaagcacgagctatctcactgctccagctctcttaagttggattaccagttattactcagcaaataggtggtggtgtcagcagatgaggtggggg

SEQ ID NO: 519750 - DNA, 530 bp, Homo sapiens
ccaggcatcctttcagacaccattcttggagtctcttccctccatcacgtaaacctcacagccaacagtgaaggcactgaactccttccaggggctgagcaggctgccttgggcatgctcttcttgaccttaaaatccacctgatagatctggtagggaggtagaaattttggtggtaggaaagccagcaattatcaggtcaaagggtttctgataaaaggagttattcagcagaaaggtaatcagattatgggagccttaagtgccagtttgggctaaattctctgagtcactggcagattgtaagtaggggaatgacgtaataaaaccactgcaaagccaggagtttgtgatgggaagataggaaatccctttctttttttcccacatgggaaataaaaatctaaagatgtgtggggaagctccttagagtgccaggactttcagtatcccccaatttatcattaggttctgtccagacctcgttccgcacacagtagcctagggacacctctggaataaggtgtgac

SEQ ID NO: 519751 - DNA, 389 bp, Homo sapiens
ttacaggatccccactcagcaccctcttctacggaggaaggaacgggccagcagacttgcggcactcctgctccccttcccatttctgcacttgggggtctagtgaggcctcctgtgcgatacgatgaattcctcccgtcctgtatcatcagacctcccgcctgtgatgcctcctggatctactcctttcgcctcctcccttccctgagagcagcccctggatcatgctccacctccgctgctgcctcggaccacctgcccactctatctgccatcacgctgtccacgctgagctccctgcgcctgatcatggcttcatcgttgaacctccttagaggaacacatcaggctgtgcgataccacgaattgggattctaggttgccccaga

SEQ ID NO: 519752 - DNA, 530 bp, Homo sapiens
aggacattcaggtgatcgtacacctagaaacgccaggacgatttgccggagccagacacgccggtaaacaccacttagggcgtcccggggaatatccacatcgacattgcgcaaattatgttcacgggcgccacgtaccctgacaaaaccggtttgccgggcggtgagcggtgggatgttgcgctgtgaagtcatgggcaaccttgtcttgcgcttagcaccctgcgcacgcgttgggtcagggcatcgggactgtagggtttgctcagcaggtggatatcggcgctgagcagatgattggaagacagaatgtcgcgggtgtggccagaggtaaacagcaccggcaccggcgggttctgcgcgcgggcccaggtggccaggtcggtgctcttgacccgacccggcatcaccacatcggtgaagatcaggtccggcgacacgccgggcttgaaacacttgcatcgcgcggtcgccatcctcggcggtcagtacggtataacccgactgcttcagcaactcgaacaccgtca

SEQ ID NO: 519753 - DNA, 255 bp, Homo sapiens
caaggtgcacagatcactcatggtaccagatctgagaagctaagaaacctctaatctaaattgctcattaccataacaatttagactttacaccagcattgaataatggctggataactgccgaagtaagcgccgctccatgacgtctgcttcacttatttaaaaattgtgtatcagttataagtactgttcatggtgtgcagatataaggggaatagggccttctgtagaattatacatgtctaggttagtaaa

SEQ ID NO: 519754 - DNA, 505 bp, Homo sapiens
ctgactctagaggaccccgacgtagcccaactggtaccaatgcacatgatcctagcctgtgatccaatcaactggaaagtctctaagacagtttaagcctgtgatgtgtgtgattaaattttttttttttttttttttttggaaagggacttgggctttgtggcccaggttgaagcgcagtgggcaaccctggggataaattttaaaggcatattttccccattccatttacaaagagtagccgtgtggtctcttgtgctctcatgtgcaggcttctgagccccctcatacaattagcaccggtgtgtgaaacccaaggcatcgggtgtgtggagccaaaaagagcccattcgtgggggtgggaaaaaaagaggtcctcattcaatcagttccctacctaagctgggggacctcaatattcctctgtgcgctcttaagacccggggaagacaaatgaaccaccctatgggtgttcgccagaaacgcatctctggactggggggaa

SEQ ID NO: 519755 - DNA, 123 bp, Homo sapiens
aattcaaagcttctaaccgatgtacgcgggacatgtttctttaaaaggcattttgtgtgtttttaaaatcctgtacagcaagaagcaacttctttctgtcaaataaaaatgagaaatgcagga

SEQ ID NO: 519756 - DNA, 139 bp, Homo sapiens
cccgtgccctaggaggccgcagccctgttgccttcgaactccagtggtcagaccttcctcatatctcagcatttctacaggaccgacctatgccagaatgtgatggagtgcagcacatacacttgtcaccgagccacca

SEQ ID NO: 519757 - DNA, 203 bp, Homo sapiens
tcgttagtttgagaccagggtggccaacatggggaaaccctgtctctagtaaaattagtggggcatggtggcgcatgcctgtaatcccagctacttgggaggctgaggctggaggatcgcttgagtccaggagttctgggctgtagtgcgctatgccgatcgggtgtccgcactaagttcggcatcaatatggggacctcccg

SEQ ID NO: 519758 - DNA, 157 bp, Homo sapiens
  misc_feature (52)..(52): n is a, c, g, or t
  misc_feature (74)..(74): n is a, c, g, or t
  misc_feature (78)..(78): n is a, c, g, or t
  misc_feature (137)..(137): n is a, c, g, or t
accaccaaggtcttcttagttggggactactcctcgtcagccgaattctttntcaccgtggccgtgttttcctncctntactccatgggggctctggccacctacatctttctgcagaacaagtaccgcgagaatancaaagggccatgctggactt

SEQ ID NO: 519759 - DNA, 153 bp, Homo sapiens
acctcgcggtgctctggagtgtagtggtgcgatcggtcatgcaagctcgcctctgggttcgcgccattctcctgcctcagcctcctgagtagctggggctacaggcacccggacgtagaggcacccgcgagtagaaggcacccgcgagataga

SEQ ID NO: 519760 - DNA, 238 bp, Homo sapiens
ctagaggatcccatggagagagaggccaagtggagagcagaggccatccaggactccagagagtcaggtcaaccccgaggacccctgggcccggttcgggggtactccgttcggaccccctggtagagtctcgggagttcacacaggggggcaaacaccccctagagctcctctgccggaatcctgccccctaggcctttgaccactgtcagccagctgtgtcccgtgggcctctgct

SEQ ID NO: 519761 - DNA, 185 bp, Homo sapiens
gtggaacaggtaggtgctaaccttgagtccccacagttccacctggtttgggtctttcctctctaaccatgacatccgtgtcaccccgacagtaggctgccaatctagtgttttacacatccttcagacaccagtgagttccatggggttgtacctatcaagtctatgcactgcccatggccttg

SEQ ID NO: 519762 - DNA, 483 bp, Homo sapiens
gattctttctaaggttttcaaggttcacccacactgtaccaagtatcagtcctttatgccttttaatggctgagtgatgttcccttatatgaatatacacattttatttatccattcatcagttgatggatgtttgggttgtttctggttttttttttggctattgtgaacaatgctgctataaatacttgtgtacaccttttgtggatatatattgctaattctcttgggtaaatacctaacagtaaaactgctggtcataaggtaactgtatgtttaaccattttgagaactgccaagatatcttccaaaccagatgcatctttctacaattctaccaacaatatatgaatcttaactattcgactccaaaattcttcacaggaaggctccatgtgtgtcggacttacccttcaagactttcatttcatttaagtatccaacttgttacctgtcaaaaagcctatcatgagacctatgccc

SEQ ID NO: 519763 - DNA, 386 bp, Homo sapiens
  misc_feature (96)..(97): n is a, c, g, or t
ctcacccctctcttctcgtccatatgacacgaactctcctacatttcactacattatactgctcgtcgtcattactcaagccgtcacaaccagccnnttcactgtgcggcggctcacgcctgttatcccagcactttgagagggcgagatgggcggatcacaaggacaggagatggagaccatcctggctaacatggtgaaaccccgtctctactaaaaatacaaaaaaattagctggatgggggggggggcgcctgtaggcccagctattcaggaggctgaggcaggagaatggcgtgaacccgccaggcggagcttgcagtgagccgagattgtgccactgcactccagcctggacgacagagcgagactccgtctcatcaaac

SEQ ID NO: 519764 - DNA, 245 bp, Homo sapiens
  misc_feature (33)..(33): n is a, c, g, or t
  misc_feature (177)..(177): n is a, c, g, or t
  misc_feature (239)..(239): n is a, c, g, or t
  misc_feature (241)..(241): n is a, c, g, or t
  misc_feature (244)..(244): n is a, c, g, or t
ctagagtttcttgtcaactgtgctcgctgcaantccacttagctttggtgctgcctcctcctcatgccctggcaggtctgctcctgctactattccccacagtcaagaactgctttgaggctaggcaccgtgctcatgcctgtaatcccagcactttgggaggctgaggcgggtggntcacctgaggtcgagagtccgagaccagcctggacaacatggtaaaacaccatctctactanantang

SEQ ID NO: 519765 - DNA, 680 bp, Homo sapiens
cgagtgcacggtgggactcacactggagagaaaccctatgaatgtaggaatgtgggaaagccttcagatctacctcacaccttcgagtgcatggtaggactcatactggagagaaaccctatgaatgtaaggaatgtgggaaagccttcagatatgtgaagcaccttcaaatacatgaaaggacagaaaaagacagtaagaatgccctctggagaaagaccttataaatgtagtatatgtgagaaaggcttttatatctggccaagtgatattcaagaagatgacaaaagtcacactggcgagaaaccctatgaatgcaaccaatgtggtaaaggacttacagatgttagcaaatatgcgcattcgatatcatgaaaggactcacaatggagagaaagcactatgagtgtaagaaaagtgggaaagacttacagatactgaatcacacgcttcagaatggcatgaaaggactcacaactggagagaaacgctatgagtgtaagccaatgtgggaaagcgttcagattgtagaataaaaacttgcacaggcatggaaaggaagtgaacagaggaagagaagacgtaatgagatgtagaaaaggtggggaaaggaatatagaataatggataaaaaattagaagtgatgaaagggactcacaatggagagaaaacgtatgaa

SEQ ID NO: 519766 - DNA, 260 bp, Homo sapiens
ggcagcagatgagagtgagagaggcatgaaagtcatttgagagtcgagcccaaaagatgaagaaaaaatggaaattcaagagatccactaaagaggccagcacattcttaagatgccgacccgcaatattaagaaggtgcccgtaagcttgtcatcatttagagcgacctgacgtcagagagcggctgagctcttaaaaggcaaatgttccgagctttaggaggattaaactgttacgacacttgaggtcacttgaggct

SEQ ID NO: 519767 - DNA, 169 bp, Homo sapiens
caggcaaccgcccaatagggcgaactgacccgccagcgctcggccggcgcccgctggctttgatgcaacaccacgccgtccgctggcaaagggcacgtgggtggctttgccagtagctgcgccagtgcgccgcttcggtaaagtccttgatcgggtggctgtagcgcct

SEQ ID NO: 519768 - DNA, 167 bp, Homo sapiens
cggctagagcggctgggcatgatgctgatctttgccgggatccactcgaatactctctttgtttggtcctcagtgcatgttttcagatgatacatatataacgagtatgggaaccaattaactcctgttttcacagaaataataattccgaaagaccgctcttacca

SEQ ID NO: 519769 - DNA, 469 bp, Homo sapiens
tgcaggaatccagcaaaagagagatccaaaaactagaaaccagtcgaagacttgaggggggatcgagacgaggagaaatgtcagctcaagacagacttgcaggcactgagcagcgaaggcgagctgaagaaaacgccctcagcaaaaggcctgtggctctgagataatgcagaagaagcagcatcggagatagaactgaagcaggcatgcagcagcgctctgaggacaatgcccggcacaagcagtccctggaggaggctgccaagaccattcaggacaaaaataaggagatcgagagactcaaagctgagtttcaggaggaggccaagcgccgctgggaatatgaaaaagaactgagtaaggtaagaaacaattatgatgaggagaacaattagcttaaaaaatcaggttgagaccgagatcaacatcaccaagaccaccatccaccagctcaccatgcagaaggaag

SEQ ID NO: 519770 - DNA, 398 bp, Homo sapiens
gacccttattacgaaatgtctccacccagcgagtatgcccgtcaggtccaggctgcagccgatcatccagcgcccgctgcgcgctgagacaggcccaactcaagcccaccagaaagaacgccacgggataggaccgaaaaggcaacagcatcaaggccagcacgagcattgccgacaacccggcgccaggcggcaacaccggtaaccaccgcaacgccagcaaccccagcgccaacgccaacatccctgtcttcatggatcatccttttccagtgatccactcagtcttagccggctgaacgacagcgcctatgatgttttgtcacaaagtctgaattttctgtttatagaatccgggcatacttgcccctcgaattgacctggaccccttatgcccc

SEQ ID NO: 519771 - DNA, 583 bp, Homo sapiens
tggcccggattacgccacgtgggcggcgttgccgttgagcttactctggcggctggccaaacaggatctcgccgcgcagcgactgcttgaggatgggggtggcgcggccaatgggcgttccgggttggacagcgggatgcctggcgtggccgagggggtgccagaggtgctttgggaggcgcttgcagaggcccccaggacggcgctctgggcaaaggtcaacgcaggcacagccagggccagagcggccgtgaccgacctgagacagcggggcatggtgtagatccaggggctgttgatcggagacgcgattctacggcaagggtgtccgccgatgtgggtaatatgcgggctgccgggtgcccgaaggaggtgccctgatccgggagaatcacatgggtttggtcgatttcatcaagaagcagttcatcgacgtcatcgagtggacggagtccaccgatggcgtgctggcctggcgttaccccttcgaggaccgcgaaatccagaacggtgcgaccctggtggtgcgtgaatcgcagatggccctgttcgtcaacgagggcaaggtggacgtggcgtctgt

SEQ ID NO: 519772 - DNA, 266 bp, Homo sapiens
atccaaagaattcggcacgagggaaggagggggaaattaatagttgttgaatgggtatagaattttccaagataaaaaaaaaatctagaaatctgcttcaaagcaccctaaatattcttaactttccaaaacttttttcccacaacttgttacggtggtaaaatttaagggatgttttttttacggaaattctaaaattataaatatatttattaagacggaactctctttcgacacaggtcttggtctctgtgtccccgcgcacg

SEQ ID NO: 519773 - DNA, 959 bp, Homo sapiens
  misc_feature (444)..(444): n is a, c, g, or t
  misc_feature (676)..(676): n is a, c, g, or t
  misc_feature (684)..(684): n is a, c, g, or t
caagatgtaagtcctgtgacatggaatcttctcttcgatcaaagtgccccaaagacagaagcacggaagtatacatcacaagaacatttgagctcactaccctaggtgatacataaacgatatacaagaagttagataaattcatgctgacttgaagcttaaattgtggtcgtggtgaaatgtggtcgacaaatagagatagtagttgtattagatgagagagttaaatgattatgaatttagagagtgtttgggggactcggtgctcgattcctaagaagagtgttaattgtaagtaagtatagtacgcgaacagcatggctttgctctgaacgctgtttccttggaacacaggtgacttgaagaatgtcgaagatgtatcgattaaattctctaagaatgtgtcgtgttcatagatcacagctggttatcgagaatcatacnttaatgtacggtgaagtattttaccactgaaggtaattgaactttcctaaatatgttactctgagtaaggatacacactaagtcgtgcttatcagaggagtaagtgggatctgccttgacctctgatagttagatgctaatctggagttttgaacaataagctacagggaagaaaatcctttggattcgtgcatagagaagatcttgagccgaggtttacttgcgtaccatntcgagtangaggtgcgcccctttggtagaatgtgtatgccatagcatctcagagaaaagtggcctgtcgagacttcttggtgtgaattgatccccagagattttgttggataccgctgcgtccagcacaaggtgtttataacgtgtcagacaaaaggagagaaccttcacactgtctcatgattgtgataatggggaataccattgtgctcatcccctactagggcaaaatcctaattattagcaaagggtttctgaccgtgacttatggttcgcgcttgtaa

SEQ ID NO: 519774 - DNA, 854 bp, Homo sapiens
cggcctttccggcttggcccgattttgtttctgcccacctgggtattaacctgcttcttacttcgaccttgttcgctttggcgaccgacgggcttcttcccccggtgacgcgcagcccccagccgccagacacatgcccccagccaagcaccccaatcaggctacccctggaggggatgcccaccctgtcttccgcctgtgccgccatgatgggcctcctcaccgcgcctggagccgcctgagggcctggacctctagaccctggctggtggaaccacgtaaaaggacccagctctggtagaactgccctggagggagaagctaggactcctctgcccatccccccataccccttggggccagaccgccctgaagaggaggctgaagaccagtggaggccctggagaggacagagaaacactggggcgtgaaaacccgccgttcccttcctgaagcctggggacttttggatgatgatgatggcatgtatggtgagcgagaggccacccgtgtccctagaggcccgggaagtccatttgcagatggcccgcgtgctcccctgtctccccgccttctgataaggaccactgccaggttctgataagaaccccggggaggagaaagccgaggaagagggagttgctgaagaggagggagttaaccagttctcttatccaccatcaccccgggagtgttgtcccccgctggaggaggaggacgatgaagaagctgtaaagaaagaagctcacagaacctctacttctgccttgtctcccggatcccagccccgcccttgggtgtcttgccccggggaggaaagagaatccagccccggagaataaaaaaagaaaaaa

SEQ ID NO: 519775 - DNA, 113 bp, Homo sapiens
  misc_feature (7)..(7): n is a, c, g, or t
  misc_feature (74)..(74): n is a, c, g, or t
  misc_feature (92)..(92): n is a, c, g, or t
gttacgntctccaagactcagcttggtgatctgagcgcatgtccgcgcggtcaagacgcaggtctctttgaggnccatgtaatccttgcgtngtaggcgtactggtggtaccg

SEQ ID NO: 519776 - DNA, 434 bp, Homo sapiens
  misc_feature (14)..(14): n is a, c, g, or t
  misc_feature (59)..(59): n is a, c, g, or t
  misc_feature (77)..(77): n is a, c, g, or t
  misc_feature (127)..(127): n is a, c, g, or t
  misc_feature (164)..(164): n is a, c, g, or t
  misc_feature (191)..(191): n is a, c, g, or t
  misc_feature (223)..(223): n is a, c, g, or t
aattacccccaagntggggaattaacccccaaattgacccatcgaccggattaaattgnaccaaaaccaaatgtggnccttatccccataccagtgggaactggcccataaaaggaataaaatgccnaataccatgcctataacatggatggacccttgaaaancatgatggtaagtgaaagaagcccagntcacaaagggcccacatatatcattcccattncacatcaagtttcccagaacagagaattcctatacagtcagaaagtaaattagtagttgcttggtcgtgggggatgggaagacagggtagtagttaaagggtacaggatttctttttgaggtgatgaacatgttctaaaatttgctgtggagatggttgcataaatctgtaaacatattaaaagtcattaaattgtacacttgaaatggga

SEQ ID NO: 519777 - DNA, 167 bp, Homo sapiens
tctggggcaggcagtgggcgctttggtatggtcatcgacactcgtggagggccggtcacgcagatcacacgtgcaccaaggtctctggttttcctcgtgcagccgaccctgcgagcttcctgcagtgttatgtgtccctgggatacttgcgcttagggcgtggtgat

SEQ ID NO: 519778 - DNA, 202 bp, Homo sapiens
attcatctcgtttagatattgtacgagcacattcacagtcacctcttcagagatcactgtcagctaagtgtgtatctgaccaggacaggtatccccttgtcgactaagacggatcaccagcagaagatgatgaggatacgagttagatgtacagagaagaccttttcttaggtacactacacatttccttttcatcataaat

SEQ ID NO: 519779 - DNA, 758 bp, Homo sapiens
ggagctgtaaaacatcatcaggtgtgctatatgttatatgattacttctgttgactctgtgatatatatgtccagttgtctgtatcttgcgctggttgagccctgaaccaggagctaacagggtcgagcttctggaggttggttggaacagtacggaagtgctcgaaatgacatccagagaaatctaaactgctgtgggttccgaagtgttaacccaaatgacaacctgtctggggtagctgtgttaagaagtgaccagctcgtgctcgccatgtgcgtccaatcataggcagaatatgctggagaggttcggagattagtggtggcattggactgtccttcagtgttgtacagagatcctgggtgtttggttgacctacagatacaggaaccagagagaccccgcggcgaatcctagtgcattcctgttgaggagaaaacaaggaagatttcctttcgtattcatgatcttgtgcactttctgtcatatttctgtgaagctccattgtgccagtttagaggaaggaaacactatgtggagaagtaccttattgatagtggaattcatatatttcactctatgtgactctacatgttcgtggactttcctgttgcttgaaacaaatatttggcaaactttgtgggcctctgaatgcgtcgggggggaccctggatttcacctgtacttcattggtcgggccactgtccacgtgtggcttcttaaggcatttacacctgcagaaaacttgtatggacac

SEQ ID NO: 519780 - DNA, 1022 bp, Homo sapiens
gctagtcaatgtaatgtgacacaaaccttcttgactaggtgtaattctataccatatgtaaccaatgctggcgttgctgtgtcgcgacaagtatgtatggcaaatctctaagtaatgctcagatagaaaaggttatacatgtgatctcaattgatagggaccaggatctgaaatagcggagaagagttcctatagatcgtatggttgcgtgcacgcatatcatgactcgcaaatgtagactctcacaacacctggcctgatattgtctaacttgcctgctacgcatctgtcatggaagagaggtctatgactgtatgcaatatcgtaatcccagatgtgcagtacaatccatgtgtcgtgaagatgttcatgtcggatcacagagaatgaaattaaatgggtacggccattggacatgaatagccacactgctgacatggtcacatgatgtcgtaataggctggtgggaaatatctagctgcaaatgaagcagagagcgaaaagtcggttgcatgccattgtggggatgccacaaaagaggttgctggaccatattcggggattctgtcccacaaaagaacttctaacgagaaggggggaggacttgtctgcatggatctggggctgcagtggataatggacgggatcgcgaaggcctacgaaggatgatgaatgatgcagcggcgaggaagtgaggcatactgacgtttgtgtaggtcaaatgcacagcggaagtcagagttacttatatccccaatgtggctcaccaccataagtgctgatcaactcacggctgaccaaagcgtcaggacgcagacgcaggctgccttttaggacatcaataaggtgcgaattcatcaccccattaattgctcccaaacgcgcggactttcccacttattttagccactctggcgtttgacacggcctacaccagtgggacggcacccgcttccagacacagggatggctctcctcaaaagaaaactgctctgcacaggcactcacactggcgctcaaac

SEQ ID NO: 519781 - DNA, 952 bp, Homo sapiens
  misc_feature (941)..(941): n is a, c, g, or t
  misc_feature (952)..(952): n is a, c, g, or t
taggagccctgtgtgatcgtgcgtcagagtcggggctgagaccagccctggcaggcagttaccaggacggtctccggaggccgggattcgcggagggtccaccagcaggaagaaaccccaggaggaagaaacctcagacagatcgccggggaggcagcgcgggatcccagcctcaggcgtgcgcggacggtgtgcgggtgagtctccccaaaagtggcgcccttgtgatgtcgaggacaggtctccctgtgtgcccgtgggctgctgtctcaccggtggctcgtagtcgcggagaccagaacccggcagcttcaggggctgcctgggggtgggtgttccctgctgtatgtctgtgtccattatgggtgtgtgtgtgtgtgtgtgtgtgtgtgtctgtgtgtctgcgtgtgtgtgcgcgcgcgcgcgcgcgcgtgggtgcgtgtctgtgtgcccactagcgtctcgtctcttaagtctctctctctctctctctctctctctctctctctctctctcgtctctctctctctctctccgttctcgctcttgtgcggcgccgcgctttgtgtctgtgcgcgtgtgtgtgtgcgtggcggcggagagacatatgttcacgtgagcgcgggagggtgtttacgcgcgcgtcggccttatgggggtacacctcccgtgttggtctgctgtgttgtggtgtcgggcgggaggcaacttattacagggcgggcaccgggattaggtagttgaaagcgctgacaaggtggtataaggacgcacccggggggtatgaatcaccacgagaggaaacggttttgaaggtaggacaagcggtcacaaaagaaggtcggggttatgcaccgaggggccgacaagatgtagctggcgtcgcatgaaacagcgggaaagagggggggcctcagaccacattggccggggggattccngggatgcagan

SEQ ID NO: 519782 - DNA, 1519 bp, Homo sapiens
gattccggcggggtctatctctatgcgttgttcatcaagtcgtctgggcacgcgtacacgacgagtactgcgcgccgccaattcgtctctgctcaatgcgtctgtagcaacaggccccttcacgaatgttactgtactaacgagtcgtcaaacgccatccagtgcgaaccaatgtctttcgtgccatactcctgtgttttggcgaccctgtgcagcaacgcgttatccgattggatctagctttccgttctttggctcgaaaccgagaactactagtagactcaccagaatcactgtcagtaacaattgttcacacccagcacagtagctagggtgcagtgcggccaatcacggcttagagatctgatttgtggttagcacttggcacgggctcgcctattaccaatacactcttcatctgcgtagccttctattgtcgacctgcgcaatggattgtgggctctgggaacgtcgctcagaccatgtatctgtgccaaagcaactttgtgcccgatggagcatatgccggctgatgcgcctactgagcgatcgtcgctgaatgagtgcgaaaccatgcaaggctgtgcgctggtacgacgcatactctttcccaaggaactgtactgagaattcccagacatgggaggatgaaaggtgaggggtatacagcaggcgcagaccgctctgagagaggacttgctccggtggtacctgttgagaacaacaagcttgtaaatccatccgtctgttatttggcaatcttccagttgcccctagcgtgctttctcgaccctgttatgaggagccccccgcagtctttcgttgtagaacctctctcttggggaagacattctctttgtgtccataagaattcgacttgaacaccgttggaatagcttatcattccaaagaatatgagtggcgttttgaagccaacacgtggaggctagagtccgtcccactacaggagtgcgttgccgattggagattcccggcattgcgacatggggcagcgtgagggacagcaccgcttatgttgataccttatccgaaaagaacgggcattcaacaattccaatcaccaacgacaagcaagaaggatatagaaaaaacggcacgtaatcctggtatgaccttgacgtgggagctataccgttcgctcatgggggcaccccccttctcgagataccggctacacaatacacgagggcctttgaataggtccttctaacggttcctctttcaccagttccatagggcccattggttaagaagccaccgcccttcttgcaatatgaaagctttagaatagcgtaagagcaataagcgcgtatggcgagcccacacattttgggtcaaatttgtataacacggcttttattaggaataggctaacacacaatatgtagactttcaaaaccacaaaattcaagcaaagggaccatcaaattagaacagagcgttgcgagagagagaccacagagcggttttagacggaataatcgtggacgaccatttg

SEQ ID NO: 519783 - DNA, 1286 bp, Homo sapiens
gtccctctcagccctcctaatgacctccggcgctaggccatgtgatttcacttccacgtccaataacgcgtcctcagtactaggcgctactaacgcaacacactagagccatataccaatgagtggcgcgaatgtaacgacgagaaagcacataccaaggtccagcacacaccacctgttccaaaaaggccattcgatacgggataagtcctatttattgaccgtcagaagttttggtatcttcggcaggatttttctgagaccttttaccacgtccagacctagccgcctaacccgccgaattaggaggaacactggaaccacgcaacaggcatcaacccgctaaatcccctagaagtcccactcctaaacacatccgtattactcgcatcacggagtcatcaatcagctgacgctcaccatagtctacatagaaaacaaccgaaacgaagataattcaagcactggttattaccaagttcactgggtctctatctttaccctcctacaagcctcagagtacttcgagtctcccttcaccatgttccgacgggcatctaacgggtcaacatccacgtagccacaggcataccacggacctccacgtcatactatggctcaaagtgtcctcactatctgcttcatccgccaactaatatacacgtttacatccaaacatcactttgggcttccaaggccagccgcctgaatactgggcactaagcgcacacatgtgcgtcggacaactcctcgccatgatcatcactctatcgactcgaggggctaccagcacacacgaccacaaaacacacagaagcacaaacccaacagcaccaccaccacacacccacgacgcgaccacaagagacacaacaagacaacaaggaagcaaagaacagcaaacagcccgccgcatgccacaacagagaccaacacagagcagacacataaacacaacaacgcaggcacaagcatacagaccacagacgaggcggaggaaacacgaacaccgaccggagcactcgagagcacacacaaaaactcagcgagagcagaaatgagcacaccgcacaccagcagaagacgcacgcggagaacaccacacacagacgcggacagatcagaccacccagccaacgcgcgagcagcgaagagcatggcacagaataccagccgagaaagaagaaacaagaacgagagcgaagacagcgaagccaacgaagaccgaaatcgagacgagaccacagcaaggaagcgcacagagcaagacaagaacagcacgccaa

SEQ ID NO: 519784 - DNA, 917 bp, Homo sapiens
cggaacagcttccgcgttcctactgtgtgccccctacttttagaaccccggtccgtaaacacgcccgatgtaactttaggtaagcggcacgtgtttggaccgcgggccgacttgtttgcccacgtggacgaacgaaaggtgccgccttctgtgaaacaccgggtccaaattctgggaaacgcggcacccacaccggtccgccgcgagcaaatgtgcggcccccccctttcttctgggggccccgcgctcatcctttattgcgcgcgtgtacggtgttattctcgtagtgcccgcgattccactctgcgcccagggggccacgatattactgttggcctgaacagtgaggtccaacaaaaccgggggatcagtctccctcctgcagccccatgggggtcctcgccaaacagtgtcgcagattttggtggtacgaccacccctgctagaaccttttctggtaagattagggggagcccgcctgtctttgccaccaccggccagattacaatgacagtggtgcgcttgcagtgttgcgcacctggtctcgcccaaccaggaggttctgtctccctccgcacaagcctcgcgcggtttggattttcctgccccacttcgcacctgattactacccccataaaatttgtaggattttaagaaccccactgtagaatttaaactcctcttccaagtcttttcttcacaaagttagtgttctcccagaaatcttttccaatgaactaacaactcctttgtttctctcctcttcgccaaatcttctttgccccccggcgctgaatgctgtcgcggatatgctaaccattctttacatctctgatcccattatacacgcgtccgctaaccccatcgttttcattcgcccaggcgtcaaaaaaatcaccaatttttttaacaaaaca

SEQ ID NO: 519785 - DNA, 567 bp, Homo sapiens
  misc_feature (7)..(7): n is a, c, g, or t
  misc_feature (9)..(9): n is a, c, g, or t
  misc_feature (11)..(11): n is a, c, g, or t
  misc_feature (422)..(422): n is a, c, g, or t
ccaattngncntattccagacatctgccctatacaactcctttcccctggcaaccacctccctagggaacagttagacacagcctacttgacttgcctcactgacccccacaccccatgtggactgcacagatgtgcaccagtgaccacttctcagtcacagcacaactccatggaattcgtgtctgcttgctctgaactcaccagttagaactcccccagggaaacctgcttagataatgctctggaccccaataaaggctttgacccacaggtttttctcccttccttgctctctgcccactgagtgagcacatatgtccctgaaggttcctctgttctgctggtcctgcaaaacgtgctgccctcctttctctgggatctgtaagtaataaactgcttctggtatttcatgtgttttgnggagttgcctcctctgtgtctctcctgaccaacacacgtgaacctaacttctttccaaatcatggttctcctatagaatggctatcttggcaggagtaaactggacacagtccagataaaagccacaagggcatctgatagtata

SEQ ID NO: 519786 - DNA, 757 bp, Homo sapiens
ggccgcggcggagcacccagcccggcggagaaggagctcgcccggcgctggggactgggacctggagccccttcccctaccgcacgtacgccccgcccgcgcagcccgccgccgccggcctgggcagttcatccggatggttcctgtcctcccgcggtccgagggcgctggaaacccagcggcggctgaagcggagaggagccccgccgcgtctccgccgcacggtccaggtctggggtctgctgctggagccgcgcggggagaggccgtctctgcgacggccggcccctgtcccgacctgtccgggtccgcggcagcccggccacagccatgggctctggcccgctctcgctgcccctggcgctgtctgccgcgggctgctgctgctcgctgctgtctctgctgacagtggccagtggcctcagaggcttgagcaccgtctattttgagcggctgttttgaagattacaatgagatcatccggctgtagccaacgtgtctgaccagtcatcatccatttctgaggttgtccatgtctcagctggtgaaggtggatgaagtaaaacagatcatggagaccaactgtgggtcaagcaatctggaatgactacaagctgaagtggacccctctgaatatggtgcggagagttcatggtgtcacatgcacagaagatttggaagcagacatgtgttgtataaaatgttgttggaattcaggtggacgaaagacaagataatcaatacatgggaattttta

SEQ ID NO: 519787 - DNA, 149 bp, Homo sapiens
cccatggcgcttgtaggtcacgggtcttcacgaagatctagcataccacctctcagacgcaggaccaaggtgcaggggtcgactcccttctggatgttgtagtcagaaagagtacgggccatcttccagctggcttgcctgcaaaagga

SEQ ID NO: 519788 - DNA, 245 bp, Homo sapiens
cttgcggtctcataacggatatgtaaatctgtcgaaatgcaccatgaagctttgagtgaatgctcttcctgtgggacaattgtagggctatcaatgtcacagaatgtgtctgtcaagggatgttctgtcgtggcaagtttgcatggtgacagcaaaaaatgacccaccatatggaagcagctggctatcacatgcatcaggtgaattatccttgaaccatccatggccaaatacagcgccggata

SEQ ID NO: 519789 - DNA, 174 bp, Homo sapiens
ggtggtgatgaggaagtttaggtagatggactagaggataattactatgattagcatttagagaaattaaaaactgccatttattccacagccaagggacataatgaaaccaaggaatatgaccgccttgctatagcctttgtcttgagaagattcatttcttcattcctcatt

SEQ ID NO: 519790 - DNA, 378 bp, Homo sapiens
  misc_feature (82)..(82): n is a, c, g, or t
  misc_feature (101)..(101): n is a, c, g, or t
tgctgaggtgcctagagttcccattagttatttgcatgttgtcactgcatatgtatgaaaatagaaaaaaaaacatgctttngtaaaaacccctaagattngtatatgttcatttttagggcttctgaaaggggagagaaattcatattgggaaaccagtgttggtgttctgaaatctgcttgtaaaactctcatctcattttacattgatattaaaacattttaacagtgttggctagctgattacttgattaattatactcccatggccccataggaagctgttgtgggcctctgttcaaaagcacagaaaagagcagaaggaaatgtcttagaaagaatcaaagctgatgaaatcagcaaagattgggggaaagg

SEQ ID NO: 519791 - DNA, 298 bp, Homo sapiens
acgagacagatgtaggaagcggcgcaagtcaacacggagaagcgggaggtgcaggcggacaggacgcagaggctgctgtagcttgcgtccccttggagctgggcgacaagactgttttattgcaggtgcgttctcttgagagcgtggtgggggccatctttcctcttcccaacctttagcttagccagcattgttctgaaccaaattgaaagtcttaaggggcatagaggggaaagaaaaaaaaagagaaccagcacatttacaaagcgaacatacccacattcattcctaggacggg

SEQ ID NO: 519792 - DNA, 825 bp, Homo sapiens
gcctcccaaggtgctgggattacaggtgtgagccaccacccctggccagaaaaaaaagcttttaaataaagtaattgtcagcttgggcaacgtggcaagaccctgtctctacaaaaaaaaaatttaagttagccgggcatggtggcactgacctataatcctagctactctggaggctgaggcgagagtatcacttgagcccaggagctcaaggctgatcatgccaccatactccagcctggatgatagagtagaccctactttttttttttttcttttaaaaaagggtgacccatccaggggcaatgaacaagaactggcgtccgtattcccaattgcataatcccttatccctgacaggatatgtaacggcagacatttatacggcacaggatcttgggtcgaccgcactgtgggacctcatagcgacgttgtccgacttatgggcccacaaatcctgtgttgcctcccagtccaactcgaactcttctcaacgcgtggttgggttcaaacgcttccttttttcacgcctctgtcgcccctctcggggacattctcggacgcgctccatgcgctaactactctccctcggtctctggcgacaccttcgtactcttcacccccccggggagaacctcctcccgctttccaacgtggctttcatcacgcggggcggtaataaagcggctcctgaagcgccatccccccgttgctgtggcccccaggctcccggcgcgctcccccaacatcgcaccccctgtgcgcctccctcctgtcgcccccccgagcggtctggccggtcgggctctcaccggcgcccccttc

SEQ ID NO: 519793 - DNA, 164 bp, Homo sapiens
cctagcgcggtacccctcatcgtgcgcgccttcgaacgcgccattccatctgcctcagatcgttacgaaagttcttacatgacctcaactgctactgccgctgtcaagttcagaccggaccgtcggttctgggttgtctacttctgtctcatgatggtgatgtt

SEQ ID NO: 519794 - DNA, 106 bp, Homo sapiens
agaggattcgctctacctcgccagtgggaggagaaggagtcctcatgtcaagttccaggaggcaggaaactggtggagagactcggcctggagaagctcgatctga

SEQ ID NO: 519795 - DNA, 348 bp, Homo sapiens
  misc_feature (8)..(8): n is a, c, g, or t
  misc_feature (74)..(74): n is a, c, g, or t
  misc_feature (90)..(90): n is a, c, g, or t
  misc_feature (94)..(94): n is a, c, g, or t
  misc_feature (96)..(96): n is a, c, g, or t
  misc_feature (100)..(101): n is a, c, g, or t
  misc_feature (105)..(105): n is a, c, g, or t
  misc_feature (108)..(108): n is a, c, g, or t
  misc_feature (112)..(112): n is a, c, g, or t
  misc_feature (127)..(127): n is a, c, g, or t
  misc_feature (131)..(131): n is a, c, g, or t
  misc_feature (135)..(135): n is a, c, g, or t
  misc_feature (142)..(142): n is a, c, g, or t
  misc_feature (158)..(158): n is a, c, g, or t
  misc_feature (166)..(166): n is a, c, g, or t
  misc_feature (198)..(198): n is a, c, g, or t
  misc_feature (200)..(200): n is a, c, g, or t
  misc_feature (202)..(202): n is a, c, g, or t
  misc_feature (221)..(221): n is a, c, g, or t
  misc_feature (228)..(230): n is a, c, g, or t
  misc_feature (238)..(238): n is a, c, g, or t
  misc_feature (247)..(247): n is a, c, g, or t
  misc_feature (261)..(261): n is a, c, g, or t
  misc_feature (263)..(263): n is a, c, g, or t
  misc_feature (267)..(267): n is a, c, g, or t
  misc_feature (272)..(272): n is a, c, g, or t
  misc_feature (280)..(280): n is a, c, g, or t
  misc_feature (299)..(299): n is a, c, g, or t
  misc_feature (302)..(302): n is a, c, g, or t
  misc_feature (339)..(339): n is a, c, g, or t
gggggganagatcacacacacatacacacacacacacacgcacacacacgcacacatgttgcagctcatgtcantttatgtacaaaatanggtntngagnnaggngcngggntgggggggggttgtnagtngggngcactantgtcacagtgtcaganaacttganatgctcactcacactcagcctgggcccatgtnancnccttccccacccaggggtngggggtnnnggtgggtngtgggggtntggggtgtgagggngntggnataanggggtgangagagtagtcccttctctnggngggggcccctttccaagtttactcaggccaagggtgntgggacaca

SEQ ID NO: 519796 - DNA, 1207 bp, Homo sapiens
  misc_feature (8)..(8): n is a, c, g, or t
  misc_feature (80)..(80): n is a, c, g, or t
  misc_feature (118)..(118): n is a, c, g, or t
  misc_feature (122)..(122): n is a, c, g, or t
  misc_feature (130)..(130): n is a, c, g, or t
  misc_feature (133)..(134): n is a, c, g, or t
  misc_feature (153)..(153): n is a, c, g, or t
  misc_feature (166)..(166): n is a, c, g, or t
  misc_feature (168)..(168): n is a, c, g, or t
  misc_feature (227)..(227): n is a, c, g, or t
  misc_feature (293)..(293): n is a, c, g, or t
  misc_feature (296)..(296): n is a, c, g, or t
  misc_feature (298)..(298): n is a, c, g, or t
  misc_feature (383)..(384): n is a, c, g, or t
  misc_feature (404)..(404): n is a, c, g, or t
  misc_feature (410)..(411): n is a, c, g, or t
  misc_feature (415)..(415): n is a, c, g, or t
  misc_feature (418)..(418): n is a, c, g, or t
  misc_feature (421)..(421): n is a, c, g, or t
  misc_feature (429)..(429): n is a, c, g, or t
  misc_feature (478)..(478): n is a, c, g, or t
  misc_feature (514)..(514): n is a, c, g, or t
  misc_feature (520)..(521): n is a, c, g, or t
  misc_feature (530)..(530): n is a, c, g, or t
  misc_feature (534)..(534): n is a, c, g, or t
  misc_feature (538)..(538): n is a, c, g, or t
  misc_feature (542)..(542): n is a, c, g, or t
  misc_feature (547)..(547): n is a, c, g, or t
  misc_feature (587)..(587): n is a, c, g, or t
  misc_feature (602)..(602): n is a, c, g, or t
  misc_feature (604)..(604): n is a, c, g, or t
  misc_feature (627)..(627): n is a, c, g, or t
  misc_feature (644)..(644): n is a, c, g, or t
  misc_feature (662)..(662): n is a, c, g, or t
ggggtgtngcgcatgcctgtaatcctgtctactcaggaggctgaggcaggagaattgcctgaacccgggaggcagaggtngcagtgagctgagatcgtgccattgcactccagcctgngcancaagagcnaanntcagtctcaaaaaacaaancaaaaaacctgtngntatagtacgaaagaaacgtcttgcagttttctgttgcagagaattaattagaaccaacntgttggattatacacattcacctttcagaatccttttcttctctgtggaaacccacactctcagcngtntntgggaacacagtagattcttaaggaatgcttgttgaatgttgcagtctgcatcttcttgaagtaacagacctgctggtacgctcnntaaaagtaaaatgtgtctanagaccnnttgnaanccnagatgtangagattaatgcaccaaagcactctcctaattacttaaaatgaattattncaaagaatctttaattgaattttctgtgaagtctgnaatttnnaaattatgncccnttgntcanaccancccctgaaaagaacaattaaggcaattaagatagcattanagtttcaatgaagtngncattttctgtgtattaagattanatgttagctgctgaagnttgtggaggtcggacatnaagcttccaacatcagtaatgcaaaattgtcttgaacctgcgataaaattttgttggacttttttttcattgcagtgaaaagggccatgtagcatgcctcaaagccaggttactcagcctagtccttgtttaagcagttttgatattcattcaagttcaattttctcactgattttatgattaatttcttggaaaatttgaaagttttcaagaagtaaaaaattaatatcttgttatcccagtatatagagattaacttcagttcaatgtttggtgcattttcttctagtctttttttcaatgtataaatattaaagttatttcatagttgagatcatactgcatatatgattactgtatcttgcttttttcattttaacgtcgtgagcaattttcccatgacattacaaactgtctttgaaaaatggaaaacatttggggctgtcagcataactgaaaatgttttcttggtgtgacacatgtatctttgtaattggtttgatttagtgtgctttatttcaataaaaattcagtattataattta

SEQ ID NO: 519797 - DNA, 626 bp, Homo sapiens
  misc_feature (238)..(238): n is a, c, g, or t
  misc_feature (282)..(282): n is a, c, g, or t
  misc_feature (307)..(307): n is a, c, g, or t
  misc_feature (420)..(420): n is a, c, g, or t
  misc_feature (428)..(428): n is a, c, g, or t
  misc_feature (448)..(448): n is a, c, g, or t
  misc_feature (450)..(450): n is a, c, g, or t
ctgagcgtcggctcgtcgagccccggcggtgaagcgggcggtggtggagtgatgcggagcctcctgcgtggtgctgtggctggcgacgcgcggaagctgcgcgtctagtttcacatcggagagacggaaagacgtgctttatgaggagatcccgagaacgagaccattggtcattagcctgtttcccaagagcgtgtatagcaggagataccagcgcacccggggcttgccatgtttntggaggtgaaggacccagaggacaaggtcatcctggcccggcantatggctccgagggcaggttcactntcacttcccatacccctggtgagcaccagatctgtcttcactccaattccacccaagttctccctctttgctgtaggcatgctgagagttcacctggacatccaggtaggtgnacatgccnatgactatgcagaaatgctncnaaagacaagttgagtgagttgcaagctacagaagtgcgacagctggtggcaacaagtggcgcagatccaagaaagagcagaactcacccagcggtggcgaaggagcgcttccggagaccagtgagagccccaaccagcgggtgctgtggtgggtcccattctggcaagaccctcat

SEQ ID NO: 519798 - DNA, 293 bp, Homo sapiens
aagcgactctatctcctgcgttcaagcaattcccctggctcacctcctgtagtagctgggagatacaggcatgcaccaccatgcccagctaatattatgtattttacgtagagacgaggtttcaccatgttggccaggctagtctcaaactcctgacctcaagtgatctacccgactcagactcccaaaatgctgggattacaggcatgagccaccatgcttggctatagaaataattttataacagctttattgagatataattcacatatcatacaaatatgcaattcaat

SEQ ID NO: 519799 - DNA, 2063 bp, Homo sapiens
  misc_feature (8)..(8): n is a, c, g, or t
  misc_feature (80)..(80): n is a, c, g, or t
  misc_feature (118)..(118): n is a, c, g, or t
  misc_feature (122)..(122): n is a, c, g, or t
  misc_feature (130)..(130): n is a, c, g, or t
  misc_feature (133)..(134): n is a, c, g, or t
  misc_feature (153)..(153): n is a, c, g, or t
  misc_feature (166)..(166): n is a, c, g, or t
  misc_feature (168)..(168): n is a, c, g, or t
  misc_feature (227)..(227): n is a, c, g, or t
  misc_feature (293)..(293): n is a, c, g, or t
  misc_feature (296)..(296): n is a, c, g, or t
  misc_feature (298)..(298): n is a, c, g, or t
  misc_feature (383)..(384): n is a, c, g, or t
  misc_feature (404)..(404): n is a, c, g, or t
  misc_feature (410)..(411): n is a, c, g, or t
  misc_feature (415)..(415): n is a, c, g, or t
  misc_feature (418)..(418): n is a, c, g, or t
  misc_feature (421)..(421): n is a, c, g, or t
  misc_feature (429)..(429): n is a, c, g, or t
  misc_feature (478)..(478): n is a, c, g, or t
  misc_feature (514)..(514): n is a, c, g, or t
  misc_feature (520)..(521): n is a, c, g, or t
  misc_feature (530)..(530): n is a, c, g, or t
  misc_feature (534)..(534): n is a, c, g, or t
  misc_feature (538)..(538): n is a, c, g, or t
  misc_feature (542)..(542): n is a, c, g, or t
  misc_feature (547)..(547): n is a, c, g, or t
  misc_feature (587)..(587): n is a, c, g, or t
  misc_feature (602)..(602): n is a, c, g, or t
  misc_feature (604)..(604): n is a, c, g, or t
  misc_feature (627)..(627): n is a, c, g, or t
  misc_feature (644)..(644): n is a, c, g, or t
  misc_feature (662)..(662): n is a, c, g, or t
  misc_feature (2063)..(2063): n is a, c, g, or t
ggggtgtngcgcatgcctgtaatcctgtctactcaggaggctgaggcaggagaattgcctgaacccgggaggcagaggtngcagtgagctgagatcgtgccattgcactccagcctgngcancaagagcnaanntcagtctcaaaaaacaaancaaaaaacctgtngntatagtacgaaagaaacgtcttgcagttttctgttgcagagaattaattagaaccaacntgttggattatacacattcacctttcagaatccttttcttctctgtggaaacccacactctcagcngtntntgggaacacagtagattcttaaggaatgcttgttgaatgttgcagtctgcatcttcttgaagtaacagacctgctggtacgctcnntaaaagtaaaatgtgtctanagaccnnttgnaanccnagatgtangagattaatgcaccaaagcactctcctaattacttaaaatgaattattncaaagaatctttaattgaattttctgtgaagtctgnaatttnnaaattatgncccnttgntcanaccancccctgaaaagaacaattaaggcaattaagatagcattanagtttcaatgaagtngncattttctgtgtattaagattanatgttagctgctgaagnttgtggaggtcggacatnaagcttccaacatcagtaatgcaaaattgtcttgaacctgcgataaaattttgttggacttttttttcattgcagtgaaaagggccatgtagcatgcctcaaagccaggttactcagcctagtccttgtttaagcagttttgatattcattcaagttcaattttctcactgattttatgattaatttcttggaaaatttgaaagttttcaagaagtaaaaaattaatatcttgttatcccagtatatagagattaacttcagttcaatgtttggtgcattttcttctagtctttttttcaatgtataaatattaaagttatttcatagttgagatcatactgcatatatgattactgtatcttgcttttttcattttaacgtcgtgagcaattttcccatgacattacaaactgtctttgaaaaatggaaaacatttggggctgtcagcataactgaaaatgttttcttggtgtgacacatgtatctttgtaattggtttgatttagtgtgctttatttcaataaaaattcagtattataatttacagattggggtggggagtggtatctacttcaaattactgaaatcttcctagtagaattcctttttaaatgtttgaactcccctggtacatcttaaacacgacattgacactgcaagtgcttggatgtcctggcacctcagaacacaactttgtgcaaaaggagtgctgtgcatctgaatagtgcaattcatttccaatgcaagaatgccagtttcttagggcccccggtcaggatattacccacttggtttaagttgtgatttcaaatcccattttctatgggagatacactggtggaacaaatctgcagagggccctgcacctgcgctggtggatcaacggtgtcttctcacctccaggctagctgccttgccttccctcgtggggcttaagtggctgggaagcagatagacagtgtagatgaagtcctgggccactggctgctggactgaggcagtgagatgactgggctggcatttgttctttctctgcctgtgtgtgacctctaactatgtgcctggaaactgaattacatgtaattaatgctgcaaacaggattttcttattgcctaagcatgaacttggtatgaaaataatagttaataatttactatgtaacttggattcttataacctggactgtaagttgttttagctccagtggggagtttcctttttcaaagtatgatgaaaccatcctcatcttttctacccctgggactaatcatttaacacatggttccagacactttaaaactggtgagttatcttgtggttaagcaatttaaagacttctctgtctaatcatgctacttgtcctggttttgtcattgatactctcatagcccttttgaan

SEQ ID NO: 519800 - DNA, 560 bp, Homo sapiens
  misc_feature (238)..(238): n is a, c, g, or t
  misc_feature (282)..(282): n is a, c, g, or t
  misc_feature (307)..(307): n is a, c, g, or t
  misc_feature (354)..(354): n is a, c, g, or t
  misc_feature (362)..(362): n is a, c, g, or t
  misc_feature (382)..(382): n is a, c, g, or t
  misc_feature (384)..(384): n is a, c, g, or t
ctgagcgtcggctcgtcgagccccggcggtgaagcgggcggtggtggagtgatgcggagcctcctgcgtggtgctgtggctggcgacgcgcggaagctgcgcgtctagtttcacatcggagagacggaaagacgtgctttatgaggagatcccgagaacgagaccattggtcattagcctgtttcccaagagcgtgtatagcaggagataccagcgcacccggggcttgccatgtttntggaggtgaaggacccagaggacaaggtcatcctggcccggcantatggctccgagggcaggttcactntcacttcccatacccctgagagttcacctggacatccaggtaggtgnacatgccnatgactatgcagaaatgctncnaaagacaagttgagtgagttgcaagctacagaagtgcgacagctggtggcaacaagtggcgcagatccaagaaagagcagaactcacccagcggtggcgaaggagcgcttccggagaccagtgagagccccaaccagcgggtgctgtggtgggtcccattctggcaagaccctcat

SEQ ID NO: 519801 - DNA, 759 bp, Homo sapiens
ggatgctctcagctatcgtggcacggtctaggttatctctgtagcatagtcactgcggatttcactctacccggaaagtgtgcctgattgtgtggatcatctcagcctcaggaagcttccttcaaaatgtctcactgtcgcaagacacatcctgtgctaacgctcaagtttgcgtaggcgtgatcgagctctcagacactcccgaaggtgtcgaatagtgtgggtcttgctcgaagatgctctagtacatacactttgaattgctcgatacgtggagttcatttgaagcattgaatccaggcaatcataacccaaaggtgtggatgaggtcagcagttgtcgaacatatcgacgcaagcgcaggaaatgcatagagacaggatattgcctttcggctaccaagagaaggaccataataggcaacttgcatcagcagctgatgtcagatcttatctgggcacctggagacggtgattgggtggcctattgatagacacctggtcagtatcgacgcttcgtgagctaaaaagcttccatgaaggggctgggacccgacgatgactctctcattgagatcatctgctccagaaacaagcaggagctgcgcggaagcttaaccgagtctccaaggaaaatgtcaacgacttgatctggagcaaggacattatttcggacagcctctggtgacttccgcagctgatggtttgcccctggcacaaggtagcaagagcagaagaatggtctcgtccttgattatga

SEQ ID NO: 519802 - DNA, 346 bp, Homo sapiens
  misc_feature (49)..(49): n is a, c, g, or t
cttacaggactcctcccctctggcctcgggcttctactctctttttcgnaggagctatgggtgcctagctccttcccctgcctgctcctggaacaaggaagatagcgtactttcttttttgcttgttgttttctggagacacattctccctctgtcgcccaggcagaaatgcagtggcagcgatcctctcaccccggcctcctgaatagttgggacctcaggtgcacaccattacacccaggtaacgtccttttcttttgtagagactgtgttgtccaggctggtctcaaatgcctggcctcaagcaattctccgtctcagcctcccaaaaccctgggattacagg

SEQ ID NO: 519803 - DNA, 1148 bp, Homo sapiens
  misc_feature (8)..(8): n is a, c, g, or t
  misc_feature (80)..(80): n is a, c, g, or t
  misc_feature (118)..(118): n is a, c, g, or t
  misc_feature (122)..(122): n is a, c, g, or t
  misc_feature (130)..(130): n is a, c, g, or t
  misc_feature (133)..(134): n is a, c, g, or t
  misc_feature (153)..(153): n is a, c, g, or t
  misc_feature (166)..(166): n is a, c, g, or t
  misc_feature (168)..(168): n is a, c, g, or t
  misc_feature (227)..(227): n is a, c, g, or t
  misc_feature (293)..(293): n is a, c, g, or t
  misc_feature (296)..(296): n is a, c, g, or t
  misc_feature (298)..(298): n is a, c, g, or t
  misc_feature (383)..(384): n is a, c, g, or t
  misc_feature (404)..(404): n is a, c, g, or t
  misc_feature (410)..(411): n is a, c, g, or t
  misc_feature (415)..(415): n is a, c, g, or t
  misc_feature (418)..(418): n is a, c, g, or t
  misc_feature (421)..(421): n is a, c, g, or t
  misc_feature (429)..(429): n is a, c, g, or t
  misc_feature (478)..(478): n is a, c, g, or t
  misc_feature (514)..(514): n is a, c, g, or t
  misc_feature (520)..(521): n is a, c, g, or t
  misc_feature (530)..(530): n is a, c, g, or t
  misc_feature (534)..(534): n is a, c, g, or t
  misc_feature (538)..(538): n is a, c, g, or t
  misc_feature (542)..(542): n is a, c, g, or t
  misc_feature (547)..(547): n is a, c, g, or t
  misc_feature (587)..(587): n is a, c, g, or t
  misc_feature (602)..(602): n is a, c, g, or t
  misc_feature (604)..(604): n is a, c, g, or t
  misc_feature (627)..(627): n is a, c, g, or t
  misc_feature (644)..(644): n is a, c, g, or t
  misc_feature (662)..(662): n is a, c, g, or t
ggggtgtngcgcatgcctgtaatcctgtctactcaggaggctgaggcaggagaattgcctgaacccgggaggcagaggtngcagtgagctgagatcgtgccattgcactccagcctgngcancaagagcnaanntcagtctcaaaaaacaaancaaaaaacctgtngntatagtacgaaagaaacgtcttgcagttttctgttgcagagaattaattagaaccaacntgttggattatacacattcacctttcagaatccttttcttctctgtggaaacccacactctcagcngtntntgggaacacagtagattcttaaggaatgcttgttgaatgttgcagtctgcatcttcttgaagtaacagacctgctggtacgctcnntaaaagtaaaatgtgtctanagaccnnttgnaanccnagatgtangagattaatgcaccaaagcactctcctaattacttaaaatgaattattncaaagaatctttaattgaattttctgtgaagtctgnaatttnnaaattatgncccnttgntcanaccancccctgaaaagaacaattaaggcaattaagatagcattanagtttcaatgaagtngncattttctgtgtattaagattanatgttagctgctgaagnttgtggaggtcggacatnaagcttccaacatcagtaatgcaaaattgtcttgaacctgcgataaaattttgttggacttttttttcattgcagtgaaaagggccatgtagcatgcctcaaagccaggttactcagcctagtccttgtttaagcagttttgatattcattcaagttcaattttctcactgattttatgattaatttcttggaaaatttgaaagttttcaagaagtaaaaaattaatatcttgttatcccagtatatagagattaacttcagttcaatgtttggtgcattttcttctagtctttttttcaatgtataaatattaaagttatttcatagttgagatcatactgcatatatgattactgtatcttgcttttttcattttaacgtcgtgagcaattttcccatgacattacaaactgtctttgaaaaatggaaaacattttcagttatgctgacagccccaaatgttttccgtcgacgcggccgcgaat

SEQ ID NO: 519804 - DNA, 341 bp, Homo sapiens
gatccctaggagtaagtccaatcaagtagttaacaaccatgtcactgaagagtcaagctgcctgggttcaaatcccagcttctgtcacttaacgatggcatgacctgaggcaagttctttaatttagctatgcctcagtttcctcacctataactgatggataggattcatgttctgagccaggggacccattaaggggacccataggactcatgttctgagccaggatatttttgagagtgaatggggctggttttaagaattagatcaggacaacaggcatcctgtgggactgtctcaggcaaacctaaaaagatggttatcctcataattacggtacc

SEQ ID NO: 519805 - DNA, 1192 bp, Homo sapiens
  misc_feature (8)..(8): n is a, c, g, or t
  misc_feature (80)..(80): n is a, c, g, or t
  misc_feature (118)..(118): n is a, c, g, or t
  misc_feature (122)..(122): n is a, c, g, or t
  misc_feature (130)..(130): n is a, c, g, or t
  misc_feature (133)..(134): n is a, c, g, or t
  misc_feature (153)..(153): n is a, c, g, or t
  misc_feature (166)..(166): n is a, c, g, or t
  misc_feature (168)..(168): n is a, c, g, or t
  misc_feature (227)..(227): n is a, c, g, or t
  misc_feature (293)..(293): n is a, c, g, or t
  misc_feature (296)..(296): n is a, c, g, or t
  misc_feature (298)..(298): n is a, c, g, or t
  misc_feature (383)..(384): n is a, c, g, or t
  misc_feature (404)..(404): n is a, c, g, or t
  misc_feature (410)..(411): n is a, c, g, or t
  misc_feature (415)..(415): n is a, c, g, or t
  misc_feature (418)..(418): n is a, c, g, or t
  misc_feature (421)..(421): n is a, c, g, or t
  misc_feature (429)..(429): n is a, c, g, or t
  misc_feature (478)..(478): n is a, c, g, or t
  misc_feature (514)..(514): n is a, c, g, or t
  misc_feature (520)..(521): n is a, c, g, or t
  misc_feature (530)..(530): n is a, c, g, or t
  misc_feature (534)..(534): n is a, c, g, or t
  misc_feature (538)..(538): n is a, c, g, or t
  misc_feature (542)..(542): n is a, c, g, or t
  misc_feature (547)..(547): n is a, c, g, or t
  misc_feature (587)..(587): n is a, c, g, or t
  misc_feature (602)..(602): n is a, c, g, or t
  misc_feature (604)..(604): n is a, c, g, or t
  misc_feature (627)..(627): n is a, c, g, or t
  misc_feature (644)..(644): n is a, c, g, or t
  misc_feature (662)..(662): n is a, c, g, or t
ggggtgtngcgcatgcctgtaatcctgtctactcaggaggctgaggcaggagaattgcctgaacccgggaggcagaggtngcagtgagctgagatcgtgccattgcactccagcctgngcancaagagcnaanntcagtctcaaaaaacaaancaaaaaacctgtngntatagtacgaaagaaacgtcttgcagttttctgttgcagagaattaattagaaccaacntgttggattatacacattcacctttcagaatccttttcttctctgtggaaacccacactctcagcngtntntgggaacacagtagattcttaaggaatgcttgttgaatgttgcagtctgcatcttcttgaagtaacagacctgctggtacgctcnntaaaagtaaaatgtgtctanagaccnnttgnaanccnagatgtangagattaatgcaccaaagcactctcctaattacttaaaatgaattattncaaagaatctttaattgaattttctgtgaagtctgnaatttnnaaattatgncccnttgntcanaccancccctgaaaagaacaattaaggcaattaagatagcattanagtttcaatgaagtngncattttctgtgtattaagattanatgttagctgctgaagnttgtggaggtcggacatnaagcttccaacatcagtaatgcaaaattgtcttgaacctgcgataaaattttgttggacttttttttcattgcagtgaaaagggccatgtagcatgcctcaaagccaggttactcagcctagtccttgtttaagcagttttgatattcattcaagttcaattttctcactgattttatgattaatttcttggaaaatttgaaagttttcaagaagtaaaaaattaatatcttgttatcccagtatatagagattaacttcagttcaatgtttggtgcattttcttctagtctttttttcaatgatccatccgctatcaagtcctctcccaatatgattactgtatcttgcttttttcattttaacgtcgtgagcaattttcccatgacattacaaactgtctttgaaaaatggaaaacatttggggctgtcagcataactgaaaatgttttcttggtgtgacacatgtatctttgtaattggtttgatttagtgtgctttatttcaataaaaattcagtattataattta

SEQ ID NO: 519806 - DNA, 457 bp, Homo sapiens
caggatgacgagatggtatggagagggagagagagatccagtcatcaaccagccatcagatatgtgagtgaagtcatcttagaacattcagccccagtcacattggcagatgactgtaaccatataaaggaccacagaaaagaccagcagaacaaccacctagctgattctagccgaaattgctaaatccacagaattgtgtagctaataaaatggttattattttaaggctactaagttttggggatgaattacatagcaataacatgactgaaagggcagggtttgtactgctatattcccagggcctagagggcatgaccatggcaggttttcagttatagactgttgtggattactgtcattgtggtgtcactcctctctttgctttatagactacctgacttcccagtcctcttgggtctcaccaaagttctaagcttgacttccacacatt

SEQ ID NO: 519807 - DNA, 942 bp, Homo sapiens
gtcagaaatgaagacatgagatgaagcaaggagcaaccaccagcttcctcccgcctgaagcttctcaactcaagccagacaggccagcaattccagagtccgagaagaggccttgatgtagagaaataccgtgggacgggggtgctttgagcaccggagaggaataggaggggccggctctcctctagcctccctgctgagagaggatgaagatcgacgttggatgataccgcgttggtgagcgtatagactaccttataacttgcggaaccatccaacattcaaaggctggcccagaggaatcggcgagtagtggcgtaatccggctcaacacattgacgggacttcgcataacctggtggtgccaggagcgcacggtgaccagcatagtggggtgctcacgtaaggtggtccgttgtaatgtcttcgaatgaatgaaaggatcaattgagggacatatctgccgttgtaaatgcacactatctcgattctacagtacgtcgctgatcaccctccatctgtggtgccgtgagtcggacttgggtcccctggaggtcctgtcgagtcaaccccagacttagggcgcataggaggccttttgctaccatatgggcctatggggcaggcaacatggcgaaaggtaaggtaccatcctaagtagcccggtgtgtgataatactaacgatgagaatcaaaggttgtggcgaggtagcaacagggctgttgaggtggggcctggcttttgctgaggattttatgatactgttgggagaatgaacagttgggtaaaggtgttctttgataatcgatagtaactggtaaaagcatgggaagtggggacagtaggcattgtcccggaagttcctggaaaggggaaagaccgttgtggaaggagtccaaggaccctacttattccgtcatgatacagggtggaaggaaagt

SEQ ID NO: 519808 - DNA, 144 bp, Homo sapiens
tcattagcggagcatcataagcggttcagtaagcggagcatcagtaaccggagcatcagtaagcggagcggtcacgcctgctgggggtatgttgtgttggaagaagaggaggcgaggaggtggcatagatctgcccgcttactg

SEQ ID NO: 519809 - DNA, 769 bp, Homo sapiens
  misc_feature (46)..(46): n is a, c, g, or t
  misc_feature (122)..(122): n is a, c, g, or t
  misc_feature (125)..(125): n is a, c, g, or t
  misc_feature (133)..(133): n is a, c, g, or t
  misc_feature (167)..(167): n is a, c, g, or t
  misc_feature (176)..(176): n is a, c, g, or t
  misc_feature (180)..(180): n is a, c, g, or t
  misc_feature (185)..(185): n is a, c, g, or t
  misc_feature (202)..(202): n is a, c, g, or t
  misc_feature (226)..(226): n is a, c, g, or t
  misc_feature (237)..(237): n is a, c, g, or t
  misc_feature (250)..(250): n is a, c, g, or t
  misc_feature (258)..(258): n is a, c, g, or t
  misc_feature (281)..(281): n is a, c, g, or t
  misc_feature (302)..(302): n is a, c, g, or t
  misc_feature (343)..(343): n is a, c, g, or t
  misc_feature (348)..(348): n is a, c, g, or t
  misc_feature (371)..(371): n is a, c, g, or t
  misc_feature (374)..(374): n is a, c, g, or t
  misc_feature (390)..(390): n is a, c, g, or t
  misc_feature (414)..(414): n is a, c, g, or t
  misc_feature (420)..(420): n is a, c, g, or t
  misc_feature (424)..(424): n is a, c, g, or t
agcggaattcgggctggagccggagctccggcggcgcgggtggcgngcacgtccctccagacagtaccacaggcacctggagtaccggacatcggtcgcatgtggcccccgagtgtccgtcnagnagcctagngggagcctgccctcccgcgcctcgtcggggcccnggccaggcnaccnttggnccgccggcgcacggacngcgggcatcgagctactagaatcnagcggctgctnggacctcggcacngttgacanagatttctctggggtaccgcggnaggattactttgaatttcggntggtcgcctgtggtctggcatatttagaacttaagtctatnatttngggcaccatgactttgaggcttntanaagactggtgcagggngatggacatgaaccctcggaaagngctatngatngccggcatctcccagagctgcagtgtggcagaaatcgaggaggctctgcaggctgggttaagctacccttgggggagtacagactgcttggaaggatgtccaggagggatgagaacaggaaagtagccttagtagggcttactgcgggagactagtcacgcccttggtccctaaaggagataccgggaaaagcgggtatctggagagtgatctttaagccccctggagccagaataatacatgcgcccaagccgcattcaactgaatcacaaacacgggacgacggcatgccgctgcgtgacttgaacagagccctctgcgccatgaaaatgcgtcttaagacca

SEQ ID NO: 519810 - DNA, 441 bp, Homo sapiens
  misc_feature (5)..(5): n is a, c, g, or t
  misc_feature (19)..(19): n is a, c, g, or t
tgaanacatttacattgcnacttgtctggccacgggtatgtttaattactgctttctcctgaactggaagatcactgatggtagggtttggtcttctttatgtttgtatacttaacacttaccctagaagtgcttgccacattaaggatgctctgggcccaggtacagtggctcattcctgcaatcccagcactttggcaggccgaggtgggaggatcactggagcccaggagtttgagaccaacctggccaacatggtgagaactcatctctacaaaaaaataaacaaaattagctgggtatggttgcgtgcgcctgtagtcctagctatttgggaggctgaggtgggaggattgcttgaggcaatcctggacaggaggtccaggcagcagtgagccaagactgcgccactgcactccaacctgagtgacacagtaagac

SEQ ID NO: 519811 - DNA, 605 bp, Homo sapiens
  misc_feature (17)..(17): n is a, c, g, or t
agtagtatagcctcatnatgggcgacccttgggagctttaacggcggggcgcgactgttctctatcattgatcgcatcgcgttgatctcaacgttctctctcgctgacagcagactgtctgcgggctctacccaggctcctcactgtcctctcattgtggggtgttagacctttccctggcatgccagcaggtctctgtagtcctggtgtgtctatgaacccgatggtgggatggtcgggctgcccgaaaggctgtgctctcccctgctctcccgggtgatcgcatccgaggacatctgggcccccgccccaccggggcctgggaggccctgggcagcggcttcaacccgcagggggatggacaaaaccctcctctccctcattctctactgtcacagtggctccggaagcctggttggcattgacaacaaaatcgagcaagccatggacttggtgaagtcccacctcatgtgtgcggtccgggaggaggtggaggtgctgaaggagcagatctgggaattgggggagcggaacgctggctggagaggagaatgggctgtgcgcgcctggcagccggagcagtggtcactgcctcctcggggtcc

SEQ ID NO: 519812 - DNA, 680 bp, Homo sapiens
gaataactcaataagagtttatgagcaggcttcttctcctcttaattgatataccataaaggtcagatcattgggtagcagcttcttcttgaaataaagacctgattatacaggcaataaaaatataagaacctaaaatacaataggattaaaaaaaacaaattcacgaaaacatagagatactgggtgtcctcagcttaaaagaaccatgaacgaagggctacacgggcagattgctctactcgtgggcagagtagataaggaggacacctcccacgccgtgagagggtgaagaaacatacggcgactctggctgcgtctatagacaacccggagcggcgacaccaccaacatgtaccgggaataccgggaacaagaccaccgtaggcgcggtgaccccagtgctaccgaaaccatggcgtgcaccaggaaacgagcccgagcacgcaatccatacagatcatgaagggtggaaggagatcgcaggccaggcaagtgacgcaggcgagaagaacatgtcaggtccacgactaccaagatcaagataaccgtatgcacccaggggatgcttggaaaacgacagaaaagacaagcttcaccaccaagaaggcccaaactttctactaagtgccaggacctcgtaccgggtgtgcccaaataaactcaggaacagccccggt

SEQ ID NO: 519813 - DNA, 320 bp, Homo sapiens
aaccaaaggaagcacaacatactcaacaacttccaccatccctactactagcttcaaactcttccacactgcatctctacagacacaataatttaccttagcggacttgcaaaaaagcagaggggtggggcgacggagccactcttcagcacaaaaggggcgccgctccttccacgcattaatattccatattcccgggatgatgtccactttcacagtttgactgtattataacagatttgatgtgagagaagacaaatggcctcacaaaggaaagacgacaaatcatcacactgcttttagcagggtttctctttatt

SEQ ID NO: 519814 - DNA, 173 bp, Homo sapiens
ctggctggcagcgcggaggccgcacgatgcctggagttactgtaaaaggacgtgaacccagcaggagttcgtcagagctcttgggcagccttcctcaaaaagtcccggggaagcttgaaaggtccccgaatggggtggataccgtcaaagctggccaagcaacaaaagagctt

SEQ ID NO: 519815 - DNA, 95 bp, Homo sapiens
agaacgccatggaggaccagagcccacggccgggacacccgcgatggctctatctctgacaagaggatgacgagggctcctcctcccacaactta

SEQ ID NO: 519816 - DNA, 304 bp, Homo sapiens
gtgcagaatttagtaatttatttttttgaaaacatctcacactattgcccaggctgaaatgactcaacatatttatttctttcttcagcaagaattgatcacatgtgcattataccaggatactgagctctacgttgggatataatggtgatcaaggagattatagattctggcagggaaaactgacatcaaacacggcgacccgacatagtgagaccctgtctctactagaagaactttaaaaatcaactaggtgtgggccgggcacgatggctaacgcctgtaatcccagcactttgagatg

SEQ ID NO: 519817 - DNA, 1505 bp, Homo sapiens
ctgataggtcgtcttctgctgggtgccgagttccatctgggttcaggattaatacttgctcttcattaaatctgccgagaacgtcctgggtgtccaagattcgcattgataaccgagcagagtgctggatctacatgtagaatgtaatggctgatggattccataattgcacgcatgaggtagaagagtgtggtagaaatgggtggtaggtgggttatgaatgtgcgacgtactagtagagcgaaagcgcgagagtaaggtattattcacaattacatagagaagttttagagaggagggagaaatccagtgtatatatgaataggcttacttagaatttattaagttaatgttcgagtttccacagtccttccatgcgtggcgagatgggtgaagggtgttcaaagcaagttaatttaaatttccttcccaccattttcaaaagttctttcaccctgccaaaagcattcctaacgtcctagcgcatgtgcagatcatgatacacgcaacgtacttagtagaaggctaggaaaatccatgtcccttattacattactcttactcttctccgtctgacgttcgagttgtcacaatgttctccccgcatgaaatccagtagtaacagggggccagtcgaacgggtgaggtttctgcgcatgagagagggtgacacagagtgagaaatctagtcctttggggatcgccgtaataggacacggtctctagcagagattgatcatgggcttggaagtcgcccgcggagctggtttttcaatataaattctcaccgaaaaaacatcagtaaatgtaaagcaatccctcccattggaagcaattcataggaaggataatggtggggggtaattaaccttatgtggctaaaaatttctaatgcatgaatatgggggagctacgaaaatacctcccctagaaagtgcattgtagagagggcacaacgcctattttctttacacaggtcaatgtgtgttttggctggaacccaatttgtcagactccctactttcggcttatttagggcgttgttgtgacattatttcctccacccggcgtttcaatcataccaaccggtgtaggaggtaaaagtgggttagttcgtaacattgccccgtgaacgaggtctttgaaatgaaggctccaggccgtaaataacttagcgggttgccatgtgaaaggctttttgccttagggacattaattttgagttgtgagtgtcacttttgcaacaactaacgggaattgggacgcatgttctggattagcttcgataaggggaagaccgcattacggaaaaggtcacaaaccgtgggcggcaaatgtttggtagtaatgacaaaggagtatcaatactgataggagaacattgcgtggggaaattaaataacaaagcggagaggaagacaaagtggatttcaaccacataagaaagaacaatccagcgtagggaggtggggagggaccaatgggggagaaattgtagggaacac

SEQ ID NO: 519818 - DNA, 217 bp, Homo sapiens
  misc_feature (96)..(96): n is a, c, g, or t
  misc_feature (156)..(156): n is a, c, g, or t
  misc_feature (160)..(160): n is a, c, g, or t
  misc_feature (165)..(165): n is a, c, g, or t
  misc_feature (168)..(168): n is a, c, g, or t
  misc_feature (184)..(185): n is a, c, g, or t
  misc_feature (187)..(187): n is a, c, g, or t
agcgctgagcatactgtgggactcgtggctctcttgctggaggctataacttctcctctggtctcagttcggtattgccagcgctgcatacgtgtnatctctgatgctgggaagtcctccccttggtctaagatcttccccatgatcttcaggtantgcncggcncancttcgtctgagtctcnntnacacttggaggttatcgtgcccagtgcatc

SEQ ID NO: 519819 - DNA, 438 bp, Homo sapiens
  misc_feature (322)..(322): n is a, c, g, or t
  misc_feature (342)..(342): n is a, c, g, or t
  misc_feature (407)..(407): n is a, c, g, or t
tttttttggactgcatcaggtgctgtttattgaagctgtgaagtgagggtccatcactcagtttcctgttggtgacaaggactgatgtgcctctccagtgagactcgtcagtggtggcgacttacacaaagtttgtctctttggtgctaggtactcctagcctgaacctcggtgcaggtgccaccaaactctgtcctgagtgccgccacaccccttccctccagacacaccaccttggagtttgtgtcttctactctaccaacacaaaaaagacaaaatggtcatccatcacaccctattatctaagcttcaaactacattnctggcctctgttttctcatnctctaatcaggaaggcaagaagttgtcctggttcctataaatggctaaaggtgttctaaggttgnatgggctttgggaatttgggaatcaaaaatg

SEQ ID NO: 519820 - DNA, 418 bp, Homo sapiens
cacaggagaacacccagcagcaatctcttatgtggtccacccatgtgtgtactgtgtgataagactcctggctgcttctctggtctcatctatctgctctctcttctatactatctttgttcactgagctacagtctcagtgatgttcctttttatttaataaaagatagcctattaaaacttacacaagcaaaaccgagctaaaggtgcagaagtaacctgtataccccttgtcttgacacatatgcagcaacccccataatcagcatcccacatcagagtcgcatatatgtaacagttgatgagcctacattgaaacatcattatcacccgaagtccataggtaccattaggattcactcatattccccacttgttctgagaggagaaaaaacgaaggagactgactcttggtgtc

SEQ ID NO: 519821 - DNA, 106 bp, Homo sapiens
ctcttagaggatccctcgctatcatctggcacccgtattgaattcaatgtatattactaatctatgcatgacctctagagcttaatggtgccgattaatatgcgag

SEQ ID NO: 519822 - DNA, 442 bp, Homo sapiens
  misc_feature (442)..(442): n is a, c, g, or t
gaccctgaaaggcactgtatagccattcgtagcgagtgttcccgtcattaagttgatatcagaaaccgggttagcttgcaccaacttgtatcgtagaacatgactcagttactacacagtcgaagtttccatttctgtagagcaccgcgtactagtactacgaaaccgaccctgagtccaatgcggccctgttggataggggcattaattcagtacctgaatatggggccatgagtgacttcaaagattgaccggaccaatgctcgcccgagttcaagactgctgaaacgtaactggttaactagtagtgcaattactaggaactggaaacacagcctgccacccagtgaagtgtccagaccattgtcttccaaccccagctggcctttagaacacccactggctagtcctagagctcctgtccttaccaactctttgttan

SEQ ID NO: 519823 - DNA, 715 bp, Homo sapiens
  misc_feature (65)..(65): n is a, c, g, or t
  misc_feature (77)..(77): n is a, c, g, or t
  misc_feature (84)..(85): n is a, c, g, or t
  misc_feature (88)..(88): n is a, c, g, or t
  misc_feature (92)..(92): n is a, c, g, or t
  misc_feature (101)..(101): n is a, c, g, or t
aaggcatttaaaaggcgccagaaaattagaaaagggataccaaacttttgatataaagaaggtgntgaagaccgccntcatccnnganggcntagcatatnaaatttgcaaagctgccaaagcctcagacaagtgccaagcccatctttgtgtgctgtgtgtgcttgcatccaactgtgatgagcctatgtatgtcaagttggtggaggccctttgtgctgaacaccaaatcaacctaattaaggttgatgaccagaaactaggggaatcggtaggcctctgtaaaactgacagagaggggaaaccgtgtaaagtggttggttgaagttgtatagtagttacgaactatggcaaggagtctcaggccaaggatatcattgaagagtacttcaaatgcaagaaatgaacaagtaaatctttggcacacacacacacacacacacacacacacaaaagaaagaaaaaataacctcaaaaataaccaatctattgctgcctcaattcacagtcccctccctgctgccctcagacattctcctcaggctccacactgcagcccaggaaagaagcccttcaccaaacgaggccaaatatttctttgtgggcagtgttccttctgacatcactgaggaggaaatgaggaaactgtgagaaatatgggaaggcaatttcacagaaagagagtttaaataaattaacaaaaaggaaaaaaaaa

SEQ ID NO: 519824 - DNA, 767 bp, Homo sapiens
  misc_feature (117)..(117): n is a, c, g, or t
  misc_feature (129)..(129): n is a, c, g, or t
  misc_feature (136)..(137): n is a, c, g, or t
  misc_feature (140)..(140): n is a, c, g, or t
  misc_feature (144)..(144): n is a, c, g, or t
  misc_feature (153)..(153): n is a, c, g, or t
gaggcgaagtctcgggtgcattcaagatacggcttcactcgtaacccactgccatggccgaggaaggcagtgctgctgaaggtgtaatggacattaatactgttttacaggaggtgntgaagaccgccntcatccnnganggcntagcatatnaaatttgcaaagctgccaaagcctcagacaagtgccaagcccatctttgtgtgctgtgtgtgcttgcatccaactgtgatgagcctatgtatgtcaagttggtggaggccctttgtgctgaacaccaaatcaacctaattaaggttgatgaccagaaactaggggaatcggtaggcctctgtaaaactgacagagaggggaaaccgtgtaaagtggttggttgaagttgtatagtagttacgaactatggcaaggagtctcaggccaaggatatcattgaagagtacttcaaatgcaagaaatgaacaagtaaatctttggcacacacacacacacacacacacacacacaaaagaaagaaaaaataacctcaaaaataaccaatctattgctgcctcaattcacagtcccctccctgctgccctcagacattctcctcaggctccacactgcagcccaggaaagaagcccttcaccaaacgaggccaaatatttctttgtgggcagtgttccttctgacatcactgaggaggaaatgaggaaactgtgagaaatatgggaaggcaatttcacagaaagagagtttaaataaattaacaaaaaggaaaaaaaaa

SEQ ID NO: 519825 - DNA, 670 bp, Homo sapiens
agtggttactgaccccaggactgaccaccaggctctcacggaccgcatctgatgttaacctacctaccattgcgctgtgtagcagagatttcgcctctgcgctatgtgtgacattgttcatcccatgcaacatcaagggagctcactcagtgggtttaactgtgggggatgctggctcggaaagttctgcgcatgcgtgggaccattttcccgtgaacatcccattgggggcggtcatgcctgaattcgtgttgaacttcgtatcacgatgatccttggaagagtagttgaggagagacgacgagcaggctgccttgtatgaagtacggcatgagacccagggaggatattttcaggtgtgaatgtggactgctcccgcatcctgatttcactgttactcagcctgatgttgcagagctggtctgatggtgtacaggtgtgccctctgtgcctatgcagacgaatgctcctactgaagtactggagccgtctcaagatctgctcacggtagagcagttggtcatgcacgcgtcccacttgtgtcaggccattgtacatgggtagggagcaagcatgtgactggtcttacagctgttcttgtatgaggctcattaagcaggtagtgcaacaactggtcgagtgagattaattctaccatgcagtgttctaa

SEQ ID NO: 519826 - DNA, 134 bp, Homo sapiens
atgtcgggatcgctgagaatgtcctcctcagcctgaagacacctgatagttttcccccagccatctccaaacacgtgaagcccatgtggagaagatgcgctttatgtcaaggaaacgtgacaattacaatgaca

SEQ ID NO: 519827 - DNA, 190 bp, Homo sapiens
acaggagtagctggaaaatgcctgtagtacatagatactcgagaggctaaagcaggatgcttccttgagcccaggaggtcgaggcttgcggtgagctatgattacaccgctgtactctaacctggatgacagagggggaccctgtctctcagaaacaaaaacaaacacccatccatcccccatggacatc

SEQ ID NO: 519828 - DNA, 250 bp, Homo sapiens
tgagctaatagaaaggctaggacaaacctataatagtttatgctgtacagcataaactattacagcataaactattacagcataaactattacagcataaactattacagcataaactattacagcataaactattatagcataaactattacagcataaactattacagcataaactattacagcataaactattacagcataaactattacagcataaactattacagcataaactattacagcataa

SEQ ID NO: 519829 - DNA, 431 bp, Homo sapiens
ggtcgaccagtaatggcatttctgggttgaatggtctttctgttgttaggtctttgaggaattgccacactgcttttcacaatggttggactgatttacactcgtaccaacagtgtgtatgtgttgctttttctctgccacttcgccagtgcctattattttttgactttttgataatagccattctgagtgatgtgagatggtatctctacttgcattttttttttgtctctttgttttttgtttagatggactctcgctctgtcatccagactggagtgcagtagcgcaatcttggctcactgcaacctccatctcccgggctcaagtgatctgcctgcctctgcctcccaaagtgctgggattacaggtgtgagccactgtgcccggcccctctacctgcgtttttaataaaggattatacatgagtc

SEQ ID NO: 519830 - DNA, 174 bp, Homo sapiens
tgagtttcatgcaggtacgctcacccaccccgggacacatccagagaaatacctgtacgtagaatatggtggtgcccttgcttgtcacggtctggaaacaactcgaagggactgtgctggtgtagacggagacagaaactgttgaggagttcccattgtggcgcagtggttagc

SEQ ID NO: 519831 - DNA, 1245 bp, Homo sapiens
ttggtgtcctcccctgagtgtgtggtgtcgctctatgagatgtgtctctttgttgtcgttggcccacgttgtggtcacgacgccgaaggggtgttcctctaggggcctcccttggtgcacaggggcgtttttttgtctcgggactcctgcttgaggcccgagttcctccgcgtcccccttttgttggaacgccctctttgaattttggcgctgtgtacagcgcttgttgaaggccacctggggtgcttttctggaggcttccacgcgggtccccccccgtaaatgtgaattgtgttgaggttctcccgaaggatgcgcactgtttaagagtgatataaaattaggggttatcccacatgtcccgagtctgattggttaccctcgcgtggtgacctcaccctagccaccccaggttatttatatgccccttaaacttgggagggaaaacccttgggagaccccgtccataggtgaaaatgctgtaaagggtatgtaaatttgctaaacttggtgaagggaaccgacttgggttaggcgccgcccccccttttttggggtctctgttaaaaattacctcggggggccactaggttaaaagtgtgttagaaaaccctcccagtgagttggctatttatttgaaaatggtttgcccgcgtgaagaatgttggttatattttttatgtttatatttgaaaaatgttgtgaactcggagaaaggggggtaagggcggaaagcacacaataatttgagaaatttgtggaaaaccccctcgaacccctctttggtgataagaaattgtgagaattgttcacctcttaaatgtttttctcttataaggaatatataagagaggtttattataattgagaggtaagttataaattgggacccactaaccccctctggtggaactcggaggcacggtaaattattatgcctcgccacgcgaaacaaattatttctataagagaatgttttatagaaaatataagagtcctcgagaagttggtttaaattgcacatcccacttttctcgtaatttatatgtgagaatttataaactcgccacgtgaagttttgaatgaggttaatcttgtttaaaataagtgaaatgagtctgtagacctgtgatctccccccaacttaaaagtcaccacgtgaccttggagattgtgttcctttatggttgtagatgttggttaaccccttatatgccagaaaattaaggaattaccccgtgccca

SEQ ID NO: 519832 - DNA, 356 bp, Homo sapiens
caaaaaattttagaaatatctttttttaaagcccctgtaagataatttgaagctcttttagtgaaggattgttttaaataagagctctcagttcaagccaactactgttaggggctttaattgggacccccaattcagcatataaaggtcctaatcctgcccttaatccctttggaatattggttttataaatcatcaatcaacagtgttcccctatgaaagcatattcggtttttttcttttcaggtattccttcacggggggggcttaaggtctttccttcctcttctgccatttctctttccatgaattataattgccttttgaattcagaaattaaaacccctccggcccca

SEQ ID NO: 519833 - DNA, 962 bp, Homo sapiens
  misc_feature (342)..(342): n is a, c, g, or t
gaaaaagagagattcgaatcccgactgatcgttcagggatactcttgtccatgggcttaatgagggctggtgatgacctgtgaatctgaagccaaatatctggactctacaggctcaaggagatagattatcgtcgctgtgcagacatcacttctgcggatagtcctgggggctggcagtatgctggccgccgtggaggaacggcgcttagttgatgggtgacatagaccaagatgaccaagtcgacctgtgtgttttgcaatgcaagagtgacgatcatgaaaccattcccgtaacgtatgctcaggtctgtcgtatagagactcatctaggagatgtaanttacttgggatgagcggcgtcttggggagtgagagtactaagctttctcctccttctcttatatcgccttttcgcgatgatcatgagcgagacgagcgtgggcgatgctgatcaggggagtgtctgctgggcatatgggtgcctggccggcagtcatcctcatccagttctcttgcagccgagtaggttgtagtcgagaagaaggcatgggggactcaattgctgtccagcttctattaaaagcatggatggcagagtaaagatgtcaagtatgtatactgggtactttgatgagaaagccgattgagatgtgaggtggttggactcttttccagtcaacagacagaggtggggttgccactgcaaaaactccactgacgcagggcttaaggagcttcccgaatctcggagccagagccctgggccccgaggactgcgaagagctcagggcgaaatcagaagccgaacagggggcgctcttgcaccagaaggaagaagcgcccaaacaggaggtctctggagtatgacaggtgcacacgagaattgtgagcgcaaaaaactcccgggtcacaagagaaaaagaagacaccaacaacgtagtgacgccgcattcttcgtcc

SEQ ID NO: 519834 - DNA, 235 bp, Homo sapiens
agccaggctttcctgccttgtcaacaaagggggccagtccagttgacccccaagtttccttccagctttacattttttttggaacggggtctttttaaaaagcccaggtcgattttgaactcctggcttcaagtgatcctcaccccttagcctcctgagaagctgggattttctactttttaaaattgaattcccacccatattacaaagaaccaaaaaaacccttgtgcctgca

SEQ ID NO: 519835 - DNA, 119 bp, Homo sapiens
gaggattacaataaatggaggtcattgatctttcatcaaaaatcgcctagcttatgcttaggcttatggattcccggagtatcgatgaaaataatttgcgcatcatccgtcgtatagac

SEQ ID NO: 519836 - DNA, 617 bp, Homo sapiens
gtgtttacgccattgcagtccagcctgggcgacagagtgaaaccctgtctcaaaaaaaaagtaacatttctatatgatttatgggatcgacatgtccataatgttaatgaagcgcatagcagtcactagtaaattagcgagttatacattgtcttctatagcatcagaaattgtatatcatggccaggtgcacaaagtctcactcctgaaatccaagcactttgggaggctgaggtgggcggattgcttgaggtcgggagttcaagaacagcctggccaacatgatgaaaccccaggtctctactaaaaatatcattaacaattggtctagcgcatggtggctgcatgcctgtaattccacgcctactcgagagaggctgcaggcattgaggattgcttgaacccggtatggctgatgtgttgcagggagccaagattgtgccacgtgcactccgagctcgaggcgacgaacagagctcaggactgtctgaggaagaacttgtgtatcaggctgggcactagtggctcatacccgtaatcccagtcactttggggggcccaggctggtatcacttgagcccaggagttggagatcagcctgggcaacaaattgagac

SEQ ID NO: 519837 - DNA, 679 bp, Homo sapiens
gcgctctccagcccgcttggaacgctccccgcagcagcgtgcacccattggaatggccaacaggggacctgcatatggccatgagtcgcgggactgtgcagcagaagattgagaaaaatatgatgcagatctggaggcagatcctgatccagtggatcaccacccagtgccagaaaggatgtgggccggccccagactggacgcgagaacattccgaagaactggctcaatggatggcacggtgctatgtgagacttcattaatagcaactgattacacccttgaggggcaggccccaagtaaagaagatccaggcgctccatcatgagcctcacaagtcagatgtgatgcagatcctctcagatgcctgcaagcagctgagcgcatatgtgcattaacaccactggacatcttccaaagctgtggacctctggaaaggacagcaagcatggcctgtgctgaaagcggagcgctggatagaatctgcgtctgggcggggcagtagccacgagatcgatgggctcttgctatggggactcgccagcgtggctgccgtagagaccccaaggagagtcctcgggacttctcggataaccagatgcagaggtggaagaacgtgatcgggtgacagatgggcacaccggccgggttcacgctggactgactgctcaggatgcag

SEQ ID NO: 519838 - DNA, 114 bp, Homo sapiens
tcccaggtaactaactacctgactcctacccctcacaatcatggcaagccacgccacttatccagtgaaccactatcacgaaaaaaacttactacctgggttaggtctacctgg

SEQ ID NO: 519839 - DNA, 117 bp, Homo sapiens
ctctagaggatcttcatatgctttgggacggcgtggagtgttgtataatagctcaacaaaggctgatgtggtagtaggaggtgcaggcatagtgtcctattgagcttggccagctct

SEQ ID NO: 519840 - DNA, 331 bp, Homo sapiens
gaggcgcagtgtaatcccagctatcaggaggctgaggtgggaggatcactgagccctggagatcaacatctgtggtggatggaacattctataggtatcggttggtctagatgatttatactgttgctcaagtcttgtgtatccttactggttttctgacaaacggtcctattccttattgaaattggtgcgtcgcggtctccaactattatagtcgaactgtgtgactgggcacgcactgagttccatgtgaagtcctctagtcacagtgctctcggaactcctagtgcacagacactgcatagcgtggttgccattgggcccgcggaga

SEQ ID NO: 519841 - DNA, 929 bp, Homo sapiens
taattaaccactcattcatcgacctccccaccccatccaacatctccgcatgatgaaacttcggctcactccttggcgcctgcctgatcctccaaatcaccacaggactattcctagccatgcactactcaccagacgcctcaaccgccttttcatcaatcgcccacatcactcgagacgtaaattatggctgaatcatccgctaccttcacgccaatggcgcctcaatattctttatctgcctcttcctacacatcgggcgaggcctatattacggatcatttctctactcagaaacctgaaacatcggcattatcctcctgcttgcaactatagcaacagccttcactaggctatgtcctcccatgaggccaaatatcattctgaggggcacagtaaattacaaacttactaattcggcaattccaatatacattggggacggaccatagctctccaagtgaatctcgttgagggagggcatactcagatagagagtcccacctctcacaacgattctattactctttcacttcatctgcccttcattattgcagccctaggcaaactcacctcctatgccttgcacgaaagggatcaaacaacccctaggaatcacctcccattccgataaaaatcaccttccacccttactacacaaatcaaagacgccctcggttacttctcttccttctctccttatgacataaacactattctcacagaactcgtaggaccagaaattataccctaggccaaccttaaaacctccccaataagccgagatattctatgctaaaaattcgacgcccttaaaataggggcctgcctataaatacacctactagaaatcctctcttccaagaagtaatttccaaacactatgccaggacccttactggggacacctccgaaccgtatattgcatc

SEQ ID NO: 519842 - DNA, 825 bp, Homo sapiens
gtcagaaagggaagaagggctttgtatcccccatccgaaggctggtgtaccccaaggccgggcgccgggcagactgtaggagcagtgtagagacgcggtccccgtgacactcgagtgcccctttatccccccgaatacctcatcgatccccagatactgctgtgtgattacctgggagaaagagggtcaagttcctggagccaccttatcctggtgatgagcttcgctcacgtgaagcccatccatggtcgggacgagctccatgcagctggcatagacaccggcaggcagcctgacaggagcatgagcgcgtgaagaaccacggcgggcgcaggagcagcatcctgagcacttgtcatgccacgaaagccgtgctgcatccaccttgggcagcgacagaccaaagaacgcatacaaatgactgacggatatccgcatactgacaccgagaatcaggccgggacggccaatccgcgtaacccttggaaagcgcacagaacggcgactgcgacacggtggcataaggtgccgtcacaggcacccggatcactggagctgtgagaaccccaggtggcccggcaccgcgacgatgagcaatgacgcaaaacacccagagcccgtggacaacctacgggaactagtcagaaaatccgacaggagacactcgacacaaggaccaagaaggagacgaacaccccagagacgacacgacgcgacaacgacgctgatacgacaaaccactccgcgacaagcacagagacagacaccaactaaacaaacaacgatgcagaagacacatggagaaacaaggacacgagaaaagag

SEQ ID NO: 519843 - DNA, 500 bp, Homo sapiens
ggaagatggcgacttctggcgcggcctcggcggagcttggtgatcggctggtgcatattcggcctcttactactggctatttgggcattctgctggatatatgtccgtaaataccaaagtcggcgggaaagtgaagtgtgtctccaccataacagcaattttttctctagcaatgtgcacttatcacatcagcacttctaccagtggatatatttgggtttcttacatgaaaactcaaaagtggtacatttaaggactgggctaatgctaagtgtcagcagacagattgaggacactggtattatagcggttactatagtgccttgtgtcccatgtgacagtgttcccaaataacaaaaattctacagagtgggaaacagtgaagtccctattggaacgaactgggaagtagtcatgggttaagctgcttggtcatttcctatcagttctctgcccttgatgggcatgtgggcagctataactttacaaagcctatggca

SEQ ID NO: 519844 - DNA, 851 bp, Homo sapiens
tcctctctcgtgctcctcgcggctcgctggctggccgacggttcctggtgacacctgcttgcttgtgccctgtcctggcggctcagtgcttctctgctgcgctcccggttctgctggacgggaagaatgggctggtgcctgtccctgtccctgtccccatctggaaccccaatgtctgctgcctgctgaccctgtctgcagtggctgatgattgatgctgctgtgactgcagctgtgcctgtgtggtgctgcccgctgcccctggctcgtgcttgccatgtgatgaagtggtcctgaactgtgctactggtgcttccacctgcactgtgggagaatgggcaagtttggggccaggtacatcctgtgctggtgtgagccctgtgctcgcctgtgccgagaatgtgcggtggcttgcttggctgtgggtgaccttggcttggtggatgtggtagaactggcgaaaacgtggagaatggatgacccaccagcaggtggtgatgcctgcatcctgcgcctgcactcaactgccgtgcgccttgcttggttggtcgacccctgagacggacagagcaagctgcatgaaagctcggctgtccaggtccgatgagtgagctgcttgcggcgcccagtgaaggctgccggggcaggccgagcctgccggccgcctgccggatgtgcatgggtggctgggcaacggaaaaatgagcctcgctgaggccgacaagagccaccggagcagcgcgagcttcggcttggctctgtaccatgaagaaggcccagtgggtatggttcagctgcacaggacagtcaagccagccgtcaccggcagtgacaaaaccggtgagataggc

SEQ ID NO: 519845 - DNA, 297 bp, Homo sapiens
acatgtcaagagaatcatcagtagtcagaatatttatcagaagtatgtcacttagtgtataagatagcaaaggtgagtctagtggtatgtagtttgtatactgtgacaacaaacatgtcaccccttttcactctgatttcaactcgatgtagttaatgccacattgcgtaacaagaaagctcttggagaaaagaagttgtatgagtttcatctctgcatccctgaaagtatctaatacatttagataacccttactaagcattgttattgaaacctaagaattccattgaaatattc

SEQ ID NO: 519846 - DNA, 1048 bp, Homo sapiens
agcaacaaggatgaagggaacctgagccaggcccgagacatcgcggcaccagcaagacaactggcaccagtaggacacgaacccgaaggccgttaagagtaggtacacacgagaaagtcaacccagaggcacaggagacccgcagaggatcaatgggggcttcagggaaccacagcagagccaggtacaatatcagcagggtggagaccacagctagagggcgacgaatccctgagcacggaggtccaaagccagctcaatcaacgtcctacggaaagggacttacaggttcgcgaagggcccccctgcatggtatggaacagccacacgtaaggctggtgaagagacaagtccgctggattgtgttcagtatcgatatgcttccttttccgtcaccctgaacattgtccagggtattgaaagtgccgagatcctgcatggctcgatgccgctaccggctgagggggatgcactttgagcatgactgtgtccctgcgcaaggcggtctgcccaaggaagcctgcatggagatctcatcgaccagggtgccagccccctgcccagcgatgtgccagctgtgcgacccagcccagcctgccagctggttctgcaccagatactgaagggtggcctcggggacatactgcctcaatgtgtctcgtggctgataccaacagcctggtcagtggtccagcaccacagcgttatcatgcctggatcaagaagcaggccttgggcaggttcccgctgatctgctggggcatcttcgctgccctgttgatgagctgtggtccttgcatctcgtgatatataggcgcaagactttatgaagcaagactatctctcgtacactccagttgcacacatagcagcagtcacctggctgcagatctaccaccgcatcctttatgctcttgtccaattggctgagaatagccccatctctcagtgggcagcaggtctgagtactctaatactatgctgcgattttcaacgagctgacagacacacctaacttctcgcgtttaccacgccacgttatctatcc

SEQ ID NO: 519847 - DNA, 1091 bp, Homo sapiens
aaggcgtggcacacccctggtggcctgctcctgcagaatgtgtgaatccgcctttttccgcggttgagctggatgttcgacctgttgtgccggctcgggacaaggggggggagtgtttgggtcgttttggtgctcccggacgaacccgtggggtgtccagagcccggtgtttgcccgtgagtcttgtgtgagcgcatcatctgtggtaaacgaggggggatttatgtgcccttcgggaccctgtgaggatggcgtaactggcacgaagttttggttagagcatggggtttagaccattaggaatctgggcacccttggaaaagaccgggatagcagcaatggttcagggcacacagagagattaccttgaactctgagcactggtgagcccgatgggacagagccatatttctcttctttccaaagccaatgggagaaatatcgcctgaagttctgtttttctcagcaagggacatccctgagaaaagagaaatgcgtcccctcgggggtaaggcctttataaatggccgccttcgcgggggcaaacccgttcttttaatggtcgaaaggctgtaagggaatgaaaatatagcctccacgttctcccccgttagcggcttcccacggctttatttaggaaagagggagaatttcccgccttaataaaattttggtgtcataaccacgtgttgttctcgcttcttccaaacactcgttctccctcgataaaagaagtgttatcacatgagcacaacacagtggcccgaaaacttcacttagcgatgtttaaatttgccccggtgcctcgtgggtgcctcgtggattcttgcttctgcctcccactttggcctctgtggaatattcctaatagccttgtggaagcaacgtgaatctctgtgaactcacacccctattcatacacctccctccctttttgaaaatcacctaataaaaaacttgctggttttgcggcttgtggggcactcactggagaacctcgctgacacagattgatatctgtggagccacagctcccacttttcaatttccatggcccattaaataaagcctgcactgcttgatgctcacca

SEQ ID NO: 519848 - DNA, 181 bp, Homo sapiens
  misc_feature (107)..(107): n is a, c, g, or t
  misc_feature (134)..(134): n is a, c, g, or t
  misc_feature (149)..(149): n is a, c, g, or t
  misc_feature (160)..(160): n is a, c, g, or t
tgaagagaaatttgccgggtaccctggtgtcccagcccctcagaaggccatcgtcgccccctgaatacacaatttctggatgccagtaattgaaagcagcaatccangcctcgaattgatgtgcctgccatganggcactttttggaanctgggccttgntcttaattcaacagcttttct

SEQ ID NO: 519849 - DNA, 375 bp, Homo sapiens
  misc_feature (9)..(9): n is a, c, g, or t
  misc_feature (57)..(57): n is a, c, g, or t
  misc_feature (66)..(66): n is a, c, g, or t
  misc_feature (104)..(104): n is a, c, g, or t
taccagatnaggttatggagaaacctatttgaagatagtccttgcctgttcatcatnccctaaatnccccatgaagggccagctttgccttttttagtaaaaanaaaaaaaaagaaaaaaaagtgaataaggctgggcacggtaggaggcccaaggtgggaggatcacttgaggtcaggagtttgagaccagccctggggaaagtggcaaaatcccgtccctacaaaaaatacaaaaattggccaggcacggtagctcccaggggtgggatcatagtagctaacacctgtaatcccagcactttgggaggccaaggcaggtggattacctgaggtcgggagttcgagaccagactgaccaacatggagaaaccct

SEQ ID NO: 519850 - DNA, 1013 bp, Homo sapiens
agcggctggttgctgcactgggctgactgcggccgctgacgcagcgtttccccccatccctgtttgcctgtgtgtcgtgtggatctgttcctagtataggcaacataagtgagatacgtgtgcttcccaccgtccccttcagtttcagagccaagaatgggtctagaatctggcatctttagctcatttcctttgataaattgtactatgcagagactgctcaggaaccgttcagatacgcagtagtaggactgcagatgtctaggtctgcggccacatcttggggacacactggactgttcccagtgtgcagggtacagcacgttcatgtgggagtgctaggggttaggcttctgagcttgaacgcgtgcgtgtgaacagagtgaaaaagtccttcagtaacccaagtcccagtctgtcctatggggagcacgtttgggggcggtcggcagcaggagcgatgggaaagaggccctcgccagtgtgatggcagtgtccaggttggcctgggtgcacccagacggattgtgcttagtatttggtctccatccgtcatcctgcgcttaacctaactgtggtctagttacaatgcctcagcgaagtcccacagagattctctctcctatccattccatgctgtcagcttctctgcttctgagataaggagcccttgggtgtaccagcaatgacttaagtttcaggcaatgaccatgcattatggtggtgttaatcgatacccagaagcttttcagatgagcctaacttacactctttcagtgtgtgcgttaagataccggaaccaaaagcacgctggcattttttaaacttgcttgggcagaatcccagctggacttttctacactgtacggaactggaacttccgatcacagttagcgcaattccggctatatgagccgaaaggtgagtctcaggagaattggaaaatgggaatgacctttaaataaaagaaaaccttcgttagtaacaacaaaaaatctcccacgggggaaccg

SEQ ID NO: 519851 - DNA, 188 bp, Homo sapiens
tcgcctccttatggcacgctggcttcatcccgcatatctgacgtgctgaacgtcctgtcggtggggccgcgcagcattgccttcaggagcaagtagcgatgggaatgtcttgatatcctgcaacacccggatttgctcgagtgcctcggccttcgtcgtcggaaccctcatggcgtaaaaagcaccga

SEQ ID NO: 519852 - DNA, 733 bp, Homo sapiens
  misc_feature (19)..(19): n is a, c, g, or t
  misc_feature (73)..(73): n is a, c, g, or t
  misc_feature (81)..(81): n is a, c, g, or t
  misc_feature (88)..(88): n is a, c, g, or t
  misc_feature (90)..(90): n is a, c, g, or t
  misc_feature (94)..(94): n is a, c, g, or t
  misc_feature (97)..(97): n is a, c, g, or t
  misc_feature (103)..(103): n is a, c, g, or t
  misc_feature (108)..(108): n is a, c, g, or t
  misc_feature (234)..(234): n is a, c, g, or t
  misc_feature (237)..(237): n is a, c, g, or t
  misc_feature (245)..(245): n is a, c, g, or t
  misc_feature (250)..(250): n is a, c, g, or t
  misc_feature (345)..(345): n is a, c, g, or t
  misc_feature (375)..(375): n is a, c, g, or t
  misc_feature (379)..(379): n is a, c, g, or t
  misc_feature (381)..(381): n is a, c, g, or t
  misc_feature (417)..(417): n is a, c, g, or t
  misc_feature (421)..(421): n is a, c, g, or t
  misc_feature (437)..(437): n is a, c, g, or t
  misc_feature (441)..(441): n is a, c, g, or t
  misc_feature (508)..(508): n is a, c, g, or t
  misc_feature (510)..(510): n is a, c, g, or t
  misc_feature (512)..(512): n is a, c, g, or t
  misc_feature (520)..(520): n is a, c, g, or t
  misc_feature (522)..(522): n is a, c, g, or t
  misc_feature (569)..(569): n is a, c, g, or t
  misc_feature (593)..(593): n is a, c, g, or t
  misc_feature (600)..(600): n is a, c, g, or t
  misc_feature (604)..(604): n is a, c, g, or t
  misc_feature (618)..(618): n is a, c, g, or t
  misc_feature (653)..(653): n is a, c, g, or t
  misc_feature (686)..(686): n is a, c, g, or t
tacatttttgagtagaggnttaaaggagtgacgaccctttctaaagtggggtctcccatcccggatccctaanactgtaanatctgcnanatanatnaaaaanaaaanaaaacaaaagcaaacatgaaacttatgacctgacttcactccacccttcatgcctgcattatgacagaaacacgtcccactgctcctacttatgtatgtacatccagagctccaaacctaagctgnggncccctccncccanccctacccacatccaccctacttcccaaaaacctgtagaagcccccacttagaaaaaaaggcagaaatacacatacacagaaacacatatctatntgcagctcctccatgtgaagcccctgaaanatananaccctggaactttcctctccttatgcacagatgggnaggntgccttcccctgtttntggngtcccccaatagccagaatcccttccgactggtcccttgccctgaatatttgggaacccccccccanananacccctgnanacacatgcacacacatgcacacacatgcacacacacacatacctgcngcccattctcttcccttgggaganaaaaggntgtnttgacccaaattcnggttccaccccagcttaggggcagtggcctaaggngctatttgggcaaggtccagtggaaatcctganggggctgtctcgtggggtgagggtagatagggagctccttagcctga

SEQ ID NO: 519853 - DNA, 585 bp, Homo sapiens
actcttttagcagttaaagagaatgaaatctgaaattcagtagataaaacaggtaatagattttgatgacagtttgcagcccttcgttcattcataaagtattactgtaatttggtgattaggagcctttatggatatacccgactgctgaaaaacattcatcttttatacagtaacaaacagaggtatgattgagcatagagtttaggcaagagaactgactactatggtctcttaatcacattgattctatttcgtggatacttccaaggaggaagggaatctggaaaacatgtttgtggataggtaatctttgttttcctcatttgaaagcaaatttaaatgcctttactttttccttaggtttttttttatgatttctacttaagtgttcttgacattttactgcacccttttaaataaccaacttagtaatttttactattagtaataagggtttttttctgagtggtgggattatgggtgattgtaatcttccttgggctttttggtattttcaaaattgtctgtgatgtacatttaatacttagaaatgcaataaaattcaaataaagtaaaaaaaaa

SEQ ID NO: 519854 - DNA, 137 bp, Homo sapiens
gagcgcaagtacgagctacaaacccacaaagcacctccaaggccacctccatagccactccaaggcactccatagcactccaaagcactacagccctccaccaaaaccacagctcacgccgcctccatagccccagc

SEQ ID NO: 519855 - DNA, 399 bp, Homo sapiens
gaccggcctcctgttcttcttgcttccttcagctcgtttctggcacaactggcagtgtgaagcattgcaaagaatgaccgggttaaggagacctgtcctgttccagaccgaggccttctggctgggtgcagtggctcaaacctgtaatcccagcaccttgggaggctgaggcaggtggatcacctgaggtcagaagttcaagatcagcctggccaacatggtgaaaccccatctctactaaaaataccaaaagtggccgggcatggtggcatgtgcctgtaatccctgctactcaggaggcgtggcaggagaattgcttgaatccaggaggtgaatgttgcagtgagctgagatcacgccaggaactccagcctgggtgacagagcgagactctgtctc

SEQ ID NO: 519856 - DNA, 434 bp, Homo sapiens
gccgacacacacacctgcagcagcagcggatgggaggatgggggtcaggagctcctggctgggctctgacccgggctgtccttcaaacgctgggtgtgatcccttccccaccaccactgcccagcctcagtctcccagtttgtataaaggggctggatgtatggagtctgaatgatccagctcgacagtctgattctgggcttccagacacgcagtcaccattcacacctacagttcacacacagagacacctactcactcacactcagatttaccttcacacacgctcaccattcacagccacagttcacacccacagacacctactcacacatatttaccctcacacatgctcaccattcacacccacacttcacactcacactgatacctactcagtcatgctcacacacactcacaccatttacacttac

SEQ ID NO: 519857 - DNA, 655 bp, Homo sapiens
  misc_feature (135)..(135): n is a, c, g, or t
  misc_feature (230)..(230): n is a, c, g, or t
  misc_feature (336)..(336): n is a, c, g, or t
  misc_feature (344)..(344): n is a, c, g, or t
  misc_feature (353)..(353): n is a, c, g, or t
  misc_feature (368)..(368): n is a, c, g, or t
  misc_feature (389)..(389): n is a, c, g, or t
  misc_feature (414)..(414): n is a, c, g, or t
  misc_feature (417)..(417): n is a, c, g, or t
  misc_feature (465)..(465): n is a, c, g, or t
  misc_feature (475)..(475): n is a, c, g, or t
  misc_feature (521)..(521): n is a, c, g, or t
  misc_feature (599)..(599): n is a, c, g, or t
gagccgtgagttcggtatgcaagagcggaagaaacgcggctggtaccccggaagcagtcgctgcaacttccgggaggtgcttgtgtgcctggtgcgggagctacggggcccaggattgtgttaaagtagtgcttntaccaacatgtcccgtggttccagcgccggtttggaccgccacattaccattttttcacccgagggtcggctctaccacagtagaaatatgcttntaaggctattaaccaggggtggccttacaatcaagtagctgtcagagggaaagactgtgccagtaattgtgtcaccaccagaagaaaagtaccctgaacaaaattnatgggatnccagcacangtgactcactttatncaagataacttgaaaacatgngttgtgtgatgaccggaatgacagntgnacagcagatcccaggtacagagggcacgctatgaggcagctaacgtgngaaatacaangtatggctatgagattcctgtggacatgcttgtgtaaaagaatggncgatatttctcaggtctacacacagaatgctgaaatgaggcctctgtggttgttgtatgattaattgtatagatgaangagcaaggccctcaggtatataaggtgtgatcctgcagggttaacttacttgttgg

SEQ ID NO: 519858 - DNA, 285 bp, Homo sapiens
  misc_feature (15)..(15): n is a, c, g, or t
  misc_feature (42)..(42): n is a, c, g, or t
  misc_feature (64)..(64): n is a, c, g, or t
  misc_feature (69)..(69): n is a, c, g, or t
  misc_feature (79)..(79): n is a, c, g, or t
  misc_feature (81)..(81): n is a, c, g, or t
  misc_feature (88)..(88): n is a, c, g, or t
  misc_feature (92)..(92): n is a, c, g, or t
  misc_feature (107)..(107): n is a, c, g, or t
  misc_feature (122)..(122): n is a, c, g, or t
  misc_feature (124)..(124): n is a, c, g, or t
  misc_feature (128)..(128): n is a, c, g, or t
  misc_feature (142)..(142): n is a, c, g, or t
  misc_feature (152)..(152): n is a, c, g, or t
  misc_feature (164)..(164): n is a, c, g, or t
  misc_feature (180)..(180): n is a, c, g, or t
  misc_feature (185)..(185): n is a, c, g, or t
  misc_feature (187)..(187): n is a, c, g, or t
  misc_feature (191)..(191): n is a, c, g, or t
  misc_feature (198)..(198): n is a, c, g, or t
  misc_feature (215)..(215): n is a, c, g, or t
  misc_feature (217)..(217): n is a, c, g, or t
  misc_feature (220)..(220): n is a, c, g, or t
  misc_feature (231)..(231): n is a, c, g, or t
  misc_feature (237)..(237): n is a, c, g, or t
  misc_feature (239)..(239): n is a, c, g, or t
  misc_feature (247)..(247): n is a, c, g, or t
  misc_feature (249)..(249): n is a, c, g, or t
  misc_feature (269)..(269): n is a, c, g, or t
  misc_feature (279)..(279): n is a, c, g, or t
aagaatgttaatgtnaatcatgtcagtggactagcacatggnagtcgcttggaacccactcacnccaanccagtgaccntntgtgggntggnggctcttctcccccnccaacggaacccctntntgcnccaaccttccccanagctccggancgccctctcctnacttccaggttttggngcaanancttncaggaancccgcacccagcttccntntgnccttcagttcnctttgncncccttggngnaagctgtttttctttaactnaaaataaccnaaatgc

SEQ ID NO: 519859 - DNA, 255 bp, Homo sapiens
agaggatcccctccggcaccacggaggataggatagaaatactagctgaaatcgtgaacaagttcataggtgtcagactagaacattccacagttaatatacgaagattactgccagagttactatcagagctatacgaaaatcctgcacattatcctggagactaggaaatgtcgaactctcattttgaataacccaggacatcacccctgatactgagctgctagatactgggggcttgttacatagccccct

SEQ ID NO: 519860 - DNA, 696 bp, Homo sapiens
tcttctgccttgagatgctgttaatctgtaaccctagccccaaccctgtgctcgcagaaacatgtgctgtgttgactcaaggtttaatgggtttagggctgtgcaggacgtgctgtgttaaaatgtgtttgcaggcagtgtgcttggtgaaagccatcgccattctccagtcttgagtacccagggacacgatgcactgcggaaggccgcagggacctctgcccaagaaagcctgggtgttgtccaaggtttcccccgactgagacagcctgagatatggcctcgtgacaagggaaaaacctgaccatcctccagcccaacacccgtaaagggtctgtgctgaggaggattagtgaaagaggaaggcctctttgcagttgagataggaggaaagcatctacctcctgctcctccctgggaatggaatgtctcggggtaaaacccgattgtgcattctatttactgagatacgagaaaactgccttatggctggaggtgagacatgctggcggcaataccggtcttttactgcctgagaatgttgggtaaagtctgacataaatctgggctacgtccacattccagctccatacctttcccttaacctatttattacccagagacctttggttacatgttttcctggtgacccttttcccaccatttccctatagtccttgcaaattccccttactt

SEQ ID NO: 519861 - DNA, 695 bp, Homo sapiens
agcggggcgtcgcatcgtggcgagcaggaggcaggagcgggacgcgcaggggagccgggaccctcccgcgcacacgcacatgcacacgctgcgcgctctcacgcgcatacacacgccctccctgccgcgctcgccgccgcggccaccatcgcggagccgagccctgcggagcgggaaccgaggccggagcggggaccggaggcagccgagccgggggatgccggcccggagcggagccgcgcgcggacggcgcgcccgggacgcctccggcacccacaggccctgaggctccagtgcccacaggcagagagggcgactgagtccagcccaggctgagccctgcccagctgtactccgcagacacccacgcaacccgaggtgtcccaccgaggaggccctgatcttgagcccggagccctgagccctgagacgatgcttgaggatcttatgaccatgacctggctaccttgagtctgtggggctacacagccttcagcctgcatctccagggctctgactctatccagctcctggaccagctcccaagtctactcctgaccccagcctgggccaaggggacttctcaagctttgggacccagcaaggacacagcagcagtcaggtgcatgcttgggaccgcgacaggacaggctgccgcaccccaggcccccagaggccaagtctgtttgcctcca

SEQ ID NO: 519862 - DNA, 778 bp, Homo sapiens
tcctcgtgcggaagttgggcaacctgttgctagtctgtcgttggtgacagcgaggcttcccggctcggtgtggtagcagccccggcgtgccccgcgggctgaagaggcggcgggtatgcggcccgtggacgcggacgaggcgcgggagccccggaggagccgggcagcccgtgagccccggccccggccggccggaaacctggcctccctgtgagcgtgagcgcgcccgggcgcactggcgggcccgaggaagctgctggagatccagagcctgctcgacgccatcaagagtgaggtggaggcagaggagcggggcgcccgggccccaagcaccccgcccgcgtgcggaggctgaggagcggtgtggctcggtgtgcgccgaagcagagaggaaggctgcggaggcggcgcggatgggcaggcgggatcgttggaagctgcaccagcggatcgccggcttgcgagttgttggtgaggccggggaggccggcgggtctggagcggagcgcgggcgggagtgtcccgccgtgaaggcgctgggtaggcaggaatggggagcgcagaagccgtgccacgctcctcccgcggagttggttcattcttttttcataggtggccaacttgacgaattgtgttcacctgataaggagtcgtggctgcttggacaggctcaaaccaagaagagctttcgtttgtctccctgtttttctgctgcgttttctccatttagccactcgatttcagtaccatcctggcggatgacttcagctttaagatc

SEQ ID NO: 519863 - DNA, 256 bp, Homo sapiens
cctggcgatgatacaatacgattacatatcttcgatgacaaatgccactgaaacactccacgctacctggtcaaaagcaggcgttaagttcaactgatgtgtgaagacagagtgtcagtgaagatcctgagtggtgtgggcaacaactgtgctcctccatcccatgtgcagcacccgaccatgcatctaccaacatgctggcacatgcctggacgattgttcttgcacttgtccactatacctgcaaatgtgcagg

SEQ ID NO: 519864 - DNA, 188 bp, Homo sapiens
atgtatgctgataactactattaatgcctgtgtatacacggtgctactgtattcccaccgttcccaggtgtacaaggcagagggccgggacagctattcctactacagtcatagttcaccccactaagaaaattcagacaaggtagagccgagagacaacgtacgagccgagagacccggtagagccg

SEQ ID NO: 519865 - DNA, 542 bp, Homo sapiens
cacggggtagaacgtccacccggtgtcaacgcccccagccagaatcgacgtgagtgtgatgaccgccccggtcgtgaagacataccagctcaacaggttcaatttggggaaggcgagatctttcgccccgatcatcagcggtaggacgaagttcccgagcacggtcgggatgaccgggatcaggaagaaccacaccatcacgatcccgtgcgcggtgaacagcttgttgtataactcggccgtgaccagtgccccgcggggcgtaatcaggttcagccgaacgaccgtcgccgccgccccgccgacgaagaaaaagagcgtgaccgtaaccatatacaggatcgcgatccgcttatggtcggttgtgaacagccacgaccgccagccgtgcgggtcggtcaggtagttcgggacggcatcgtccatcggtggagcggccgacgggacggattcgagggcggtactcatttctttggaccctctcccttcggcaactccgtcggtgccccgaccggcgggggggcggcgttgttcgggaccgg

SEQ ID NO: 519866 - DNA, 114 bp, Homo sapiens
gcatatacctaaaaacgatattgctagctgtatagtaattctatgtttttacttttgcaataatgttgaggacgcagtatccttttctcattattcactatctttctctggcat

SEQ ID NO: 519867 - DNA, 378 bp, Homo sapiens
gagagctcaacagtggtttggctttgggaagtgtggagtgaggtcgaggaaggcaggagagtgagagtgaccctgccattgcagaggagccagtcccagctgctctgtcatcacactgggcaagtctcagccttgggacagactctagtgtggggagcacaccactgttggtctttgatactgactctgtccactgcactgtgcttaggaccctagaatgtcccacccgccatgtcctccctgggcttggaggggccacgatatggctgccaccaactcagcttctcctgctatggctaaaagagtccttcaggtgtgggaagagactcttctccacatcactgtgctcttgtgagcaaccttgatggcccagcccct

SEQ ID NO: 519868 - DNA, 325 bp, Homo sapiens
tttcacagggtgaatggtagtaaagatcagtctgaagcaacatttaacaaaagttgctttctagtggctagatttcttgtactataaaacagaggcatttaggtgaggtctactgaatggaaacagccaaggatgaagatggaaagcgctggttattgcacttaatatatcagtcttcctctctttcaataagccagcacctactgagcatctaccatgtgcccagccatgggaatacgatgatgaacaacattagtcctcaccttcacagaacttccactctatgattttaccttccaaaattttgggtcacactccaaggatt

SEQ ID NO: 519869 - DNA, 642 bp, Homo sapiens
tgtgccaccacacccagctaattttttaatgtttgcagagatggggtctccctatgttgcccaggctgctcttgaattcctatgctcaagtgatccccccgctttggcctcccgaagtgctgctgggatcacaggtgtgagccactgcgcctggtcttttttttttttctgagatggagttttgctcttattgcccaggctggcagtacagtagtgcgatgcttggctcacggcaacctccacctcccgagttcaagtgattctcctgcctcagcctcccaagtagctgggattacaggcgcgcaccactacgaccggctatttttggtacactgggtttcacctgtgggtcaggctggtctcgaactcctgatgtcaggtgatccgcctgcctcggcttcccaaagtgtggggattacaggcatgagccactgtgcccaaccagtctttcttttttttttggagacgggagttttggctctggccacccaggctggagtgcaggggctctatcggcagctcactgcagcctccacctcccgggttcaagcgattctcccgcctcagcctcctgagtagctgggactacgggtgtgcgccaccatgatgggctaatttggttggcattttaagtagagatgg

SEQ ID NO: 519870 - DNA, 123 bp, Homo sapiens
tttctaatattctttttgattatttctaatttattaatttaaattgtcatttttctataatgtctagtatattctgtttctttcatttaaatatttatttttgatttttgaaaatgaaaaaaa

SEQ ID NO: 519871 - DNA, 641 bp, Homo sapiens
  misc_feature (528)..(529): n is a, c, g, or t
  misc_feature (551)..(551): n is a, c, g, or t
agcgggagactgaatgaaagatgagcttctgcctttatatccttctctcctgctacccaactcattgtggtgaacgaacaagacatagacgcgggtggcagactgcactatatgcttaggactgagaatgcaactgtcagaagcacagcatgtgaccttgttagagatgcttgctcgggactgcgataaagtgaacgaggcgaaactgagaaaaaaactaggatgacatccgcttccactaggacaacagtgcaagtgtcatgttctctagtgcttctgagtaccgagcaaggacttggtcccagcccccagctccagggatggatcttgcattgtttaagcccagtcccagtgacttctaacccaatggacctaagaccctgcccttggacgattggggaaacacggtgttggaaccggcttctatcttctggcaacagacatggacttactttactcgtgacgccatactttcccccgcaaaacttgcaccatcgcggacaaaaccctgggctttccctgcaacanncaactggacaaacagccctgcnactttacgaacacctgttctcccttctggcccctcccactcgacgaaccgctggcacactctgtacattgcttaaggcccccctctactg

SEQ ID NO: 519872 - DNA, 638 bp, Homo sapiens
gatcgattagcagaagaaaggcatactcgatgggcaagaacggagaaaggcagcgtacagaagaacgcaggataagcatactatacgagaacaaagaagaggacggagccagcagaagggcagaagaacaaatgctacaaagagcggcgagagacgacgacgagcgcgtccgaagcgacgccaaaacgcgcggacatgagctacgagagtagtgcagggagccgggtgacacgacagcttagaactgaaacgtggacaagggacacaacaaccgcccagcaggggacgtctgggaaccttgaatcgacacgaggaagcggccccgtagacgacgggaaaggatgaagcaaaagacctttgagcgaactaggttttccggcatgcccccccaggcaaacaagtgacccctcgttcgccctacggaggggacgggcctacgtcacgcatctatgcacgtacaagcgccagaacccatgcggaacgcacaattgccgggaatgctcctggaatgcgcccaacgccatgtttaccttggacatggcgtgagccatgcacaaccggcatggaggcccgccccgggccccgcagaagcctaaggccaaacaccaccgggacaacagccctgcgggcacacgaaa

SEQ ID NO: 519873 - DNA, 931 bp, Homo sapiens
gacccacgcgtcgcatgcctgtagttccagctacttgggaggctgaggtgggaggattgcttgagcctgggaagtagaggctgcagtgaactataactgtgctagtggccgggcgcagtggctcacgcctataatcccagcactttgggaggccaaagcaggtggatcacttgaggtcaggagttcgagaccagcctggccaacatggtgaaactctgtgtctactaaaaatacaaaaaattagctgggtgtggtggcgctcgcctgtagtcccagctacttgggaggctgaggcaggaggaatcacttgaacccagaaggcagaggtagcagtgagccaagatggtgccactgcactccagcctgggcgacagagggtgactcctcacacaaaaagaaaaataggctaaaatatgattgtaccactggcactccagccctggcgtgacagagtgagaccctgtctctaacaccacctcacctccacgaacaaccacggccacaaccaagaatgtccgcatgtccagccgttaccttccaagggagtggctttggctacacagaagaacccgctggcatactcgtaaaacaagaaggttccccaaaggatgggaacaggaagcaggccccttacatccaggcagggagaccatccggcgacggggcctgaagggactagcacaggccacaaacccttcctggaccaatcagggcccctgggcaagcaaataacagacattcgcagaaggggaagcgacttctcccaagtggcatctggagggcaagtaactgagcctggtcccccacgaaagaggcattgggccgggaacatccaaggaagaactcacggcccaggcgttgtggcactggtgcgacggacacgaccaagcagacccagatagaaggcacatcggaatcaagctcccccagg

SEQ ID NO: 519874 - DNA, 288 bp, Homo sapiens
aagcagttgtgtgtgtgtgtgtgtgttgtgcgcccgcaatttcgattctttattctgcagtgtgtatacacattgcgtgtgtataagtggaattccactgaattgttctgcaccctttatctgtgtgaactgattacctgtaaaatgatgcttcatatcttattactgatcccttcatcaccactggttatgctcgactatttcattgcttagaatattacaccttcactttatacagcttccagtttattcatagtcttgtgctattttaaacttctcatatctagg

SEQ ID NO: 519875 - DNA, 682 bp, Homo sapiens
  misc_feature (190)..(190): n is a, c, g, or t
  misc_feature (283)..(283): n is a, c, g, or t
  misc_feature (380)..(380): n is a, c, g, or t
  misc_feature (449)..(450): n is a, c, g, or t
  misc_feature (464)..(464): n is a, c, g, or t
  misc_feature (545)..(545): n is a, c, g, or t
  misc_feature (573)..(573): n is a, c, g, or t
  misc_feature (624)..(624): n is a, c, g, or t
  misc_feature (626)..(627): n is a, c, g, or t
  misc_feature (639)..(639): n is a, c, g, or t
  misc_feature (642)..(642): n is a, c, g, or t
ggagttccaaagggtgggatggggaggagggggtggtcagagagaaccaccaaatctgacttttacatttggtctcagaatttaggttcctgccctgttggttttttttttttttttttaaacagttttcaaaagttcttaaaggcaaaagtgaatttctgtggattttactggtcccagcttttaggtnctttaaaacactaacaggactacatagaggctttttcagcattacgggtgtcgtctccgtgccagatgtggcaagatcaccattagcaaagtngaaattacttttgaaagccattagacttacagggtgatgcaagcatctaagagagaggttaatcacactatagaggcataaggtggtatcaggtttncatttttctaatggtttaaacgggtgttttataccaggtgttggcaagtaatgggggtgtagcttgagnntggttaaaggtggnttgggggagggacttcgtggtaagggtttggctgtaaaaaatgtttccaactccgctgaaatgtggctgaaaagcatggtngctgggtaccagttcaacaatccggggntgctcattctggcctactttactctcccattgaagcaggttagcgttgaangnnggtatggaaaangcntgatgcctgttcaatcctttgggtccattcctatcccctc

SEQ ID NO: 519876 - DNA, 115 bp, Homo sapiens
agaagttacaagtagcaccattaacctctccttacatcacatattgaagttagacttacatagcagtttgagtcctgaacatttactgagtgcaattgaaacttctaaaactagg

SEQ ID NO: 519877 - DNA, 123 bp, Homo sapiens
tgcctttccatatagcctggagggttccttaatggcaggaaactgtccaccctagtagtctcaagggctattcctgcatggggattcttgccaaataccagccaacatgactggacaatggca

SEQ ID NO: 519878 - DNA, 814 bp, Homo sapiens
  misc_feature (293)..(293): n is a, c, g, or t
gaatgaacgagtggatacgtgtactcaggatgacctgcttgggctagattgtctgtgattgagggtttgcctgcgagtgcctcattatcactgtgatacaaaagtttcagccgagtctggtatactatgtggatgtcactgataagtatcgcatcagagtctgttaggcaactgcccaataagtcgatgtctccaattgagaagctacaatatcattgtacacctatagagcaacattacatttggctctcgaatattcttacatcttgtaaagtttatgctaaagctcaaanaagagagttccaggcagcaaccatgatagagagcgtaggagctcagccgttaggtgtacttgtgattgatccttacttccctatgttgtcatagttgcttctaaactcagctgcactatggctgtcaacatttctgatacttattgggatatgtgccatccagtcatttagtactttgaatggaacatgagatttataacacaggtaatagctgaaggtaccagtatggtggtgagactcacacttagtgatccagctaaggtaactgatgttataatggaacagagaagaggccaactagatagctaagttcttctgaacctatgtgtatatgtaagtacaaatcatgcgtccttatggggttaaacttaatctgaaatttacattatttcatagtaaaaggaaaccaattgttgcagatttcttttccttgtgaggaaatacatggcctttgatgcctctggcgtctactgcatttcccagtctgtctgctcgagaagccagaatgtgttgttaacatt

SEQ ID NO: 519879 - DNA, 804 bp, Homo sapiens
  misc_feature (265)..(265): n is a, c, g, or t
cggaggcagagaccgaggctgcaccggcagtaggctgcggggcggacgcgcgggccggcgcagccatggtgaagattagcttccagcccgccgtggctggcatcaagggcgacaaggctgacaagggcgtcggcgtcggcccctgcgccggcctctggtcaccgagatcctgcttgacgcctggcgtagggaggagcagcccccacgaacgatcgatccagagagggggacgctcagtgggcggcgctgtgctacctgtcgatgnggcatggtctgtgctgctaatgggacctacgatgttcggcctcgtgatctacactctacagatagcttgctttcttgacacaggctgggcccgagataaacttcttccggctgtggtgtgctgtatgaggactccctgtcgctcccaggatccggactcagatggcagctggaagcaggatgtgaaaatctacctcgacgagaagtactgagcgcagtcaacgtgcctgtgcccctagtttggctggcgggtgaccgctgcagacatcatccatagacttccagcggggtctgactgcgtaccatgagtagtctccctggagcaagtgctagtgtcagtcgaactcaacaccagccattgtgctgccccctcgcaagcttctgggagctcctcatgaacgtgaacgagggggacctacctgccgcagagcgtacatcatccaggaggagatggtggtcacggagcatgtcagtgacaaggaggccctggggtccttcatctagcatctgtgcaacgggaaagacacctaccggctccgg

SEQ ID NO: 519880 - DNA, 229 bp, Homo sapiens
ccactacgaatatagatcgaagaatatcaactatatatacatatatacataaaatacataaatattcataaatatattacacctaatatataaatctatatatacataaatatgtatataaatatatcaaatatgtacacgaaatctatacataaatataaatatgtatacataaatataaatatatatacacacataaatgaaaggtattaccctgggtagtcacaga

SEQ ID NO: 519881 - DNA, 137 bp, Homo sapiens
accgatgttgtctttggttatactacagcgatggctattgaggcgtatcctgcggcatgggggtccgggttgaggtcttggtgagtgttttagtggggttcgcgatggcggccggattggtgctgccggtgaactct

SEQ ID NO: 519882 - DNA, 316 bp, Homo sapiens
tgacttcttagttatgttatttctctttatatatcattcacctcccttggtttagcctgtattcataggtattgtactcctcttgtgcctattgtgaataggattgcattcttgatttggctgtcagcttgacattgttggtgtatagaaatgcttctgatttttgtaccccgaagctttactgatgttgtttaacagttctaaaagcttttgggcagactatggagtattctaggtttaaactcatatcatctgtgaagagagatagtttacttcctctcttcctatatggatgccttttatttccttgcctgat

SEQ ID NO: 519883 - DNA, 249 bp, Homo sapiens
ggtcttgatctcttgaccttgtgatccgcccacctcagctttcccagaagtggctggggatttacagggcattgagccacttgccgcccaggcccataaatggaggatttttgccggttccagcatttcttatccttacttattacgagcacaattttggggagaaggaggagttacagatttttttttcgtgagaggtctctgagcacatgatagtggagctctcttagagacatacagtgactctac

SEQ ID NO: 519884 - DNA, 261 bp, Homo sapiens
agcaggtcaggtccagaagacgagacttacacacgtacggcaatgattttatataatggtgctaagatagggccgggcgcagtggctcacgcctgtcatcccaacacttggggaggccaaggcaggtggatcacgaggtcaggagtccgagaccagcctggccaacatggtgaacaccctctctttactaataatacaaaaattcagccaggtgtggtggtgtgtgcctgtagtcccagctacttgcggaatgtatcgtta

SEQ ID NO: 519885 - DNA, 246 bp, Homo sapiens
  misc_feature (3)..(3): n is a, c, g, or t
ggngataccgcccatgaggcactaagctctaacagctgcagactgcaacagaacacattcagggatgtaatgatgcccaagcagtatctctcttctgtgcagatctaaaactcccaaggcacgtgtgttagagatattgacctgaggggcacggcctctcttccggacttgtagttctccctgaagcttctcaatcaatgggacctcaaaggtgaatgtgtacccagttcctgaccgtgcctctgc

SEQ ID NO: 519886 - DNA, 711 bp, Homo sapiens
tggggccaggcgcgttttctcacgcctgtaatggcaccacgttatgggaagctcaagggcagggtgttatctacgttcgagggtcagggagttccgagagcagtcatggctaacatgcgataaccctgtctctactaagaatacaaaaattagctgggcgaggtagggcacgcctgtaattccaggtacttgctaaactgaggtgtaagaactgcttggacccagaaggcgtaggatggagtgaactgcgattaccggactggactagagcgttctagacagacagagaatgtggcttaggcgccggttattatacactgcgattggtagagacctcatctttgggagtttgtccaacggttttcttgcttcgagctcacgaatcctgcggggttaccgctgggtggcttgctcaggtcgagttcgtgattgtaggactgcagtccgttggccgtcgcaggccaaccccgtcagccgagaaatgcggggtgattctccaggatactatgctgaacagtcaatccccttgcgcgcccagcttccgtccacggtagctttcgcacggcctcgggcatctgcatacatctctcgatctcctctgggctggacgtggccaccttcttgatccgtccaacgcttgcaccatctgcttacaactctgctttgccgtgctctaaccgcttctacgcgcgtcgcaccttctctcgcttc

SEQ ID NO: 519887 - DNA, 290 bp, Homo sapiens
attggatacgcggatagggcgtgctatagagtgtaaatacggtggcctatttcaaagattgttaggggaattaattctaggacgatgggatgaaactgtggttttgctccacagatttcagagcattgacgtagtataccccggacgtgtagcggtgaaagtggtttggcttagacgtccgggaattgcatctgtttgcaagcctaatgtggggacagctcatgagtgtcagacgtctttgtgatgtaattattatacgaatggggccctcatccgtgttattcaaatgg

SEQ ID NO: 519888 - DNA, 267 bp, Homo sapiens
cgacaccctcggtcggagagctcaccactaccatctacacctcactaccctcatctatacctcaccagctacacctcaaccacacacctccatctagacctcaccagctccatctagacattaccacctccatctaaacctcaccgagcaacatctaaacctcatcaacctcaactatacctcaccagccacacctgaaccacacagctccatctaaacctcaataactccatttagacctcaacaaatccatctagacctcacctc

SEQ ID NO: 519889 - DNA, 813 bp, Homo sapiens
caacagagcagttatggccaggcgtctcgaggggcgtggtggtcacacatgacaatcaccagagcatactaccggagacacatggccgaaaacaggatgtgtataggagtacaggaaaccagtcggaatgtctaatccagtttaaagatcaactcgacaacatgatgcgtctccccaccatactatgtgagcctggttttatcactatagatgtgggagatgtgtgtgcacatttgcgttcatgagcctgttttgcctccaagatgtctattggactctgttactctttacaagtcttatctacacattggcgtttagtattgcagaaaaacttaagagtttccctgttgctttgtgtaccaggtggtctagaggagataacttaaacattttagaactattaacaggtaaagtactgaaatgggtacaacttaatggaaagacaagaatgttgtcttcgtaactctgacattataccttgtttgtacccgccagcgggaacttcattgcaggccgtgtgtcaccctgaccacgtctatctctgggggtcgcacgttgcgggcagagcgcaaaggcatacaccagaaaaacgctgtccgtgtggtatggtctctttccaacttcatgtaccagcgtaaacgattcaacagtggaacacacgtttcagacttgggctaccatttgtaatcttttttggagattaagtgtctaaacttaacttacatggttttaccaggacgtaaacgtaccataaatggcttttttccagcttatcatttgggcttctgttaagtggagtattcacttgtggcc

SEQ ID NO: 519890 - DNA, 194 bp, Homo sapiens
ggggggttttgttttcccgggggtttggtttttgggttttttttttttccccccccccttttccccctttttttggggggaatggggggaagggggacccgggggggggggggggggttttgtttttttttttagccccttccccgggggggggatttttttttaaaatggggcctgaaaaaaggggtttttga

SEQ ID NO: 519891 - DNA, 141 bp, Homo sapiens
acagtctgctaaagtggatccgtgggcttggtggatagccacacgaaagaacgaaattgcagttgtgtgagggtagattatctcccggtcgattgatgcctatgtgtgatagtttgttacgccactgaatgcttatgccca

SEQ ID NO: 519892 - DNA, 107 bp, Homo sapiens
aaccgaaacttctccttcactgactttatgcatcctgaagagttagaatttatgaaggaaattgtggttttggaaaccctggaggacatcgacaagaacggggagcc

SEQ ID NO: 519893 - DNA, 501 bp, Homo sapiens
gccgttctgctcctgcgctgtatctgctgcttccctcctgctgtgaagcctcgtgctgcctttgctggctgtgctgcactgcgaccgtgtccgtgtggagctgtcgtggggctcacgtgacttcccttcctacaggcgtccgagctgggcacagctgaacgagaacgtcctcaagcctgcgcaggagaaggtaacgggcagctccgggtggttgtgcctggagcccttcactccaggtgacgtgcgtgtgtcaggggtgtatagggggatagtttgtccagcagctgagactcagtgaggccaagcctcagaacccacctctccagcacaggcgtcctcctcgggcctgggctcctcttggatcccccagctggtccttcccctggctagggctcccttgcagtgcccgcagaccaagaaccccagccacactccgatactctgcatacccactaaggtggcccaaacccaaccccagccacctcgatctgcctaatccca

SEQ ID NO: 519894 - DNA, 921 bp, Homo sapiens
  misc_feature (503)..(503): n is a, c, g, or t
  misc_feature (628)..(628): n is a, c, g, or t
cgggtgtcgaatgtttatatctctcctgctgggagagggttgttgtctccccccgacacactgttgttctgcggggtgtgtgaaacacaagagggccacccaacagtgtgggggtttgtgtgtgccgcacgacacagaacactcctgttggggggcgcaccaatttgtgtgatatgaaaagacctgtgttgccgcggagagagacgctgtggttagaaaagagaggaaaaagaagacatagagagaggcgccgctctcgacacgatctcgggtgagggggcgggcccccacacacacacaggaggctctctgcccgcacagagaggggctctctcacagagagggcgcccccccctacataaggagagtgagggcttgtgaaaagtccctctttatttctctctgcacagagaagtgaacacactgagatggtgtggagatatgcccgcacagagagagagatctatgaaagagttctataccggggcaccacatggggtctnccacacaagagggggcgccccccacagagaatctgtagtctcgacataatacttggcacacaccacgggtgttgtgatagcgcaccacaaagggggaggcagaattctacaaaaatgtgttgggnagaacacccgagaggccgagggaggattttaggccaccaataacacttgaaccttaaggcacgccacggaagttccgccgttccactttagggcacacttgccgcgagctttgtccagaggcctctttatgggctcaagaattccccagaagggagattcaaggaggccctatataacccctaaaacaaggggccccctataattcttttccccttttttaatctctttgtctccaaaaggtttacccaattttggggggcctccaatggggccaataaagggggccccagga

SEQ ID NO: 519895 - DNA, 163 bp, Homo sapiens
  misc_feature (70)..(70): n is a, c, g, or t
atgactttttttccaagtcatatctgcctgcaaaacacattgttaacaaagcacatcctgcacggccctnaatgcattcatctttgattcaatacagcacatgtttctgtgagcacggattggggcaaagttacggtaatagcatctctcactgtggggaagg

SEQ ID NO: 519896 - DNA, 796 bp, Homo sapiens
gcagagacccagcttgccgagcggccgccgctgccgctgtcgccgccgccgccgccaccgcgccatggttcctggcctgctggccaccctcctgcctgtccatgtggccccgtcctgtctctgtgcccctgtgtgacccctgtggtcccctgccatgcccctgtgcccctggaccctgtgcaccagtgtctggagaaaatgcgttggagtgcatagttggcctgacgttgacgacgccaacggacccttgacacggagaacggacacggacgaacgggtggacggacgtagacggcaagagccgggacaaggacggcgagacagacgcaggacaggtgggtgcgacgagcagggacgcgacagacagcgtgcggctagacgggaggggcaaacgacaggacaacggcaagaccttggccagcacgcgacatgcgcaagacacgagaacgagcacaagacatagacagcgcgatgcacaggacaacgaaccggagtgcacgagcacagcgacagaacgcgaagacggagcgcactgacaatgaagcagagagctctccgcacggccgtgcgcagacagacacggcaatgcccgggacagaagcgacagacgcaatggaccgcaacgaaggactccaccagcaacaagggacccaccaacagaggacgacgaaagaacaaacagagggacgaaaaatacgagccaaggccctgaaagacggcgaagaggaccagaaacacagaagccacacgcgagtgggaaggaggaccagaggacgcgcacgacgtgggagaacga

SEQ ID NO: 519897 - DNA, 477 bp, Homo sapiens
gcggaaagtggtagtggtgcgtgtcctgcaggctggaagtcggatcggctacattcgtatctgtcggaatgcaagggtccggagtgaccgacgagatgcaccgttacgagtgtgatgccagggttaaggagggagtagaagtgacggagcatcggttcttcatccgcgccagcatcaggcactctgatctgatcacaaaggaagcctccttcgaatacctgcagaacgagggtgagcggctgctcctggaggccatggactagctgaaggtggcgtacaataacaccagcgtgcgcaccgactgcaaccacatcttcctcaacttcgtgcccactgtcatcatggaccccttcaagatcgaggagtccgtgagctacatggttatgcgctaaaggaagacggatgtggaaaactccgtgtgctacaggctgaggtcaagatcaaaatccggcagaacacaacggcagtgccgttccc

SEQ ID NO: 519898 - DNA, 351 bp, Homo sapiens
caataaataaaatggactctgatgaaacggcataacagccggcaggacacctggggccagctgggttttactctagaagttgcactgatcgtcccaccccacatgtcattccaccccacgttcttccttcaccaacatgcagtttctttccttccttgccagccaaatagatagacagatggaaaaggcaggcgcggccttcgttgtcagtatttctttgatgtgaaaggggcagcacagtcatttaaacttgatccaacctcttggcttcttacaaagttaaacagctcaaagaagtaaaataagaaggcaatgctggtggaatgtacagtgcatatgggctgcacccgg

SEQ ID NO: 519899 - DNA, 1267 bp, Homo sapiens
  misc_feature (256)..(256): n is a, c, g, or t
ggacaagacaagctatccagcagaatgtttcagagaaagttacagtggagcgtgggcgtttacgcagactcctaatgtgagtctggaacctaaacctgacagtgtctcatgaagtcttctggtcaatgtactgacggcatagggatttccacaagagagaagcttggcaggcaaaagattcccatcagtgatacgctatagtgctgtgcagatctcgacgggagctgcgggcaacacggattaacacgacgatccntactagagtcacacaaatgtgcttcctagtaatcagtcaaaatgccgagagatgatgcaaaccagcagatgctaagacataagccagttggcatgcacatgtgaaaactaaatacaacgagtccatggaagacatgcataggttcgagatcccaggtcttacttcatgctgacgttactactggaatttaatacctaggggtggatcaagctcgccttcgatggcagacggtgacaagcgctgacttaatgggctaattcgatgctggaagtattcaatcaatcctaagtccaagagaatgttccaccagtggtgaccagggcagctattgaaattatagaaggtaacagaaacatgaatattacccccttagaccctggagaataatctacgttaaccccaagatggaacaatccaaaaaaaatcctgggatatcgccttgtattgatagtaaattagtgtggacaggggtgggagtacgaaaggaaattgcaggcgcaataggaaaggccggtggggcgaaaaacgatctaaattcgggtaatccaatttagtgtggcaaggttcaaaggtaagtggtgttgcacctaatggtgggaaggggccatgcggtaaataataatgagaggcggtatatactttccctggtataagttatccaaagcgtgtggggaaagtttaagcaactaatggggagaatacgtaaaaaatctggcgggtcgcgctagagcccaaggcccaacggatcaccaccatccgcagaaaagacgcgaaaccacgggagccagaaaaacagcggagaaaaacaagagaaaagagaagggacacaaaccggcggccacaacaaacacagctagcaaagggctcaaaagtacaaaagcgaaccgggccacaagaggatgacaaccatggtggtgcgcattacacaaagacgaacagggacaacgtctgtgaagcgagcgacagacacaacacaacgacgcaaaacaagaccacaaggagaagctcaga

SEQ ID NO: 519900 - DNA, 136 bp, Homo sapiens
agcggacctctgttggtactcctccctcggcttccaaaatgttgggattacaggcgggagcaccatgccgtgctgtaaccctaattattagataatttgctgtggaatggattctaatattcaataatagaagttg

SEQ ID NO: 519901 - DNA, 406 bp, Homo sapiens
ggcgagctatgatgactggcggaggaaggtcctctatctgccgagaccttctttcagctacgccaagtagcatcgtgcaagtggatggtaagatagggctgttccgaggtactgagtcacccgtgctgatgtccaatgcctcgtctctactgtgactcgaggaactatgaagaaggtttccctccagatcagatagagcaggtttccaagcaaggatgatatgaagacttccctgaaagaaagtagtgaagttgaccgtcctacgagatgatgatgcagtgtgtgtcccgcatgtgggcccaacccctgtcatgtcatctcaatgcgctgcatggtccagttagtgggacgggaggccaagtacagtggtgtgctgagctccattgggaagattttcaaagaggaa

SEQ ID NO: 519902 - DNA, 1121 bp, Homo sapiens
gccttgtccttgtgaaacagcctcggtggggaattcagttcgtactctcctctcctctcttcttgttcgaacgatggtgcgggactgaaatgcagtacgagtggtgtccaggctagttcactaggatacacagtgcgtggggtgctccgagcacctccgagaagagagtgcttggcttcttcacatcttctgctcgactgaatctcgactatacagtttgcatctggagagaagagctagaaagataacatatcgcttgtgacggtgacaccccggttctggctgttgcgtcccatagtccacagtgtcggcacatagatggtaattgtgaggaattcttgtagtgtttgtgcctcttaatacgattcttggacaagaggaatcagattctcttgaaggaggcatggatgcaagtggcttgagtgaacaatgcgcatagaagactacaggcattgtcctcttgcaagccgtggatcacacaaattgatgaaaacagaatagaagctttctcgatgtcatctttgaagtaatcgtctccttgtgttgaccctggtattctaggaattgtccagtttacactagaatcgtgtctgttccagatgaagcgttatgtagaacagggcagtttaattagacagagtttaggttataagactttacgatggttgccaacagagtagttggtgaacattttggaagaagttgaggttgagaacgtaaactttatgggtaagcttagctttgagttattccacatcataacttgcatttggtgtggggccttcgtgattaaccaagatttgagggtgtcactaagttctttggcttacaatcaagtcatttgcatcgtgttcgtaattcacaagtatgttgtgatttgagaattgggttaaaatggctgtggtactggctgtcaactcgaaagtaagggggttatgcagtatttggaaattgggtggcatagttgttgcactactgactgcttgggtctaacaaaggcagaggtttgaattttgggggcctgtgaaaaacatgtcagatttaatgtaaggtctataaaagattgagcgagggaaaaacaacaattttggggggcgatggtcttgtgaaagttgtgaaaa

SEQ ID NO: 519903 - DNA, 259 bp, Homo sapiens
aaaaaaagggggccgaaaaggtttcccacatgaaaagggggaaaagaggccaaaccaaaaaaaggaagtaagtccctcaaaaaggaacccaagggttaaaatttaaagatcccgggcgaaaagtggggggaaattggaagggaaaaaaaatttaaacaagaaaaaaagaaagccaagatttcgccccaagtttaaaaaagaacacacaaaaagaaaaaatgggaaccccccaaggaaccggccggaaaaaccgggggga

SEQ ID NO: 519904 - DNA, 987 bp, Homo sapiens
atatgccactaaaggatgatacggagtgtgaagattctgaattatagacacagtagattatccagaagttttctttctctgctctctcgtgactagtagattcaagcaataacaagatagatcgctccattcatggtagtagctgcgaagagcgctagatgatggatgtacattgttcttatgtctactatctttttgtggcgctagactactgttctagtcgtgtgtggcgacgaggtgtcttacagtatctcttgctgtaacactatcttggttctcattaatgtctgcatctcactggtaacaacgatgcacttgctatctcctgataatcatcttacccgtcttctaagcttgggaaaagttgaacgtaatattctctctttgattatttcacacacattctgtttttgccgtattggtctcggagccaaatcatcacattattaactggttggcgctggacatgtatacgtggcagtacggggttccgcagttgttgggccttcgttcatattaagatagtgtgtaacaagagtaaataggctatatcattagtgtttttgtgtctattaaaagtctttagagtggatgagttattcagtctcaatacatatcagcttatacaggtgtagtgggacttggtagcagtatcctcagtgtactccgtccatttttttgctgtaatgacatgtccttcaattagtgttctctttgtgtgggactttttcaactctgttggatggttgcttttacaaacttcctttatttctaagggttccacagattctgtttctttgtttataatagcccggactacgagtgcaatgcataagtctttgcttcgaggatgtcttaaccaaagtttccttacgcaaaaaactgcttggggcccatcggggcatgggggggggtttaataggcctggtattcccaaagacttgggggaggccggggggggggcagatcaccagggcgcggggctgc

SEQ ID NO: 519905 - DNA, 172 bp, Homo sapiens
gagacagggtttccctgcattgcattgcccaggctcatctcaaactcctgggctcaagtgatccttgatccgcctcggcctcccaaagtgctgagattataggcatgagccaccacacccagcctacaaactctatttcttgaattttaagccacccttctgtcgtcttctc

SEQ ID NO: 519906 - DNA, 861 bp, Homo sapiens
agatcgagcaaccctctaaaagcagtttagagtggtaaaaaaaaaaaaaaaacacaccaaacgctcgcagccacaaaagggatgaaatttcttcgggaaatcctccgggttctcccggttactggatccgtctggctccctaagagtccttcgtggaagctttttattcctaagaggagaaaatcagtcaccgggcgaaatcggtggctggattacaggagctggggcatgggaattggggagactggactggctatgaatttggctaaacttaaaagcaagctgggttctctggggatataaataagcatgggactgggaggaaacagctggccaatatggcaaggggactggggtgccaggttcataccttggtgggtagactggggcaacgcgagaagatatttacagctctgccaaagaaggtggagggccgaactgggagatgtagtatttagtaaataatggtgggtgtagtctatacatcagatttgtttggtacacaaagatctcagatgtgaacaagactttgaagttaatgtacttgcccatttgtggactacaagggtttcttcctgcatgagaggaataacctggcatattggaatggggttcggcgtgactttcggccttttagggttatgtcacgcagttgtgggggggtttcataaacttgcagatgactggggctaaaatagggcgtcaacactgggtgcccattcgacggtctcaaatcagacgttggcctcggccggagggccgggggcggttcagggacagttccttctataacaggaggctcggtgggaaaaacagttgtgtaaggacccctcatagcgaccggattaaggacgacaataa

SEQ ID NO: 519907 - DNA, 427 bp, Homo sapiens
  misc_feature (240)..(240): n is a, c, g, or t
actcagttataccatggttggtcaggctggtccagacctcctgactctcacacaccgccagactcggtcacccagagcgcggagatagcaggcgatgaaccaccgtgcccagcactgtatataaactagctttaacttaaatatgggcctcctacctgctggaagtcacaggcgtggcttactcaggataagtcccagcacaacaatcgggacgtgtcggactgcccatcgtaaaacaancaaggggcttccaagagctgagagtcgctgattgtggcagatctgagtctgcagtgaagccttctgtcaggcagaccagcctgaggcctgagaagggagagcagagccaggtcacagcctggtcagggccattaactcatgtcagagaagtggaaggtggggcctgagcccaatcagggagcggtgg

SEQ ID NO: 519908 - DNA, 217 bp, Homo sapiens
aacatgtctgtagtgatctagcggatccctgattgcatttcgaccatggaagggcagtatgtattttcttactaaacctgttgcagaccaatactcttgtcaaatacaatttcacaaatcattgactagaaaaagacataaaatataagccagacttttatgacagcccaaaaattactgtatcaaattgctataaaaatgtctaaatgcaatcggg

SEQ ID NO: 519909 - DNA, 157 bp, Homo sapiens
tcctggcggcctccatctacacaataagcaacactcgcaaacatctcccaggtgcagcaagcagccagcacattgcaagctaggcaattcagcaggcagcaggcccgtggaagcagctcaatggcactcaccctccaaccagcacatggggcacagg

SEQ ID NO: 519910 - DNA, 825 bp, Homo sapiens
aggtcaggtctcggccgagtgtgcagagtatacgttgctgtgtcggagacactagtccccgacaccgagacagccagccctctcccctgcctcgcggcgggagagcgtgtcggcctggcctggcctggctgtgggcttctgctgcaacactccgctcgcctcccctttccccgcgcatgccgtcctgcccctgccagtggccccggccctggatcttccctggagcccgcgagcctccgtctgtccgtcggtgttcggcccgctagcctgcctgtggctttaaacaatgcccccatgttcacggcgcgcatttcatcgtttcgctatggtttttggacgatatgtccaaatgcgagatgggaaaacaggtgggcagaaaagtgtgtacgccgattggagatgggccgaaggatagcctggtattgaccggcctgccctgagccccccctgccgggggccccctttgtaagcggccgcattgatgtcccgtggggtgctcccccgggtctctgtcgtgccctcgggatatccgcggctttcccggaacatctttggggccaaccggttatccgtgcccgcctgcgcccacggaaaagtgtgttacacccccccgccgaggaaattattggtaatagtttggccactgatgcacggtattagaaaatcggcccttttccacaccctacacccaaaaagcgcctaaccagccgggtcgcacgtgagctgcagaaccacgcgtggaccactttttcccccgtgaaaccccgaacttttgggaaacgccacaacaaggcaaaaagcccagctgccggggagcgctatccc

SEQ ID NO: 519911 - DNA, 116 bp, Homo sapiens
gttgcgcggcgacctagaggaccccttctttacatttgtaggacttctctctatgataaatgctttgtgttgggttttatgtgaaagcatttatcatagagagtctccgtcgaact

SEQ ID NO: 519912 - DNA, 897 bp, Homo sapiens
gaagctaagagaagggcggaacatcattgggctgcagatgggcaccaacaagtttgccagccagcagggatgaaggcctatggcacccggcgccacctctacgaccccaagctggcacagaccagcctctcgaccaggcgaccatcagcctgcagatgggcaccaacaaaggagccagccaggctgcatgactggcgccaggaccaagcggcagatcttcgagccggggctgggcatggagcactgcgaaacgctcaatgtcaggcctgcagatgggcaagcaacaagggcgcctcgcagcggggcatgacgggtgtatgggctgccacgcagggtctacgaccccaagtactgtctgactcccgagtaccagagctgtgtgaagcctgccaaaaaccacagggcacaaaaatactacaattcggcctaggggccacaagggcctttcctgttttcccccccagggaagggtgtggtgtcttggttgacccaagcaaggccagcagacccgtctcctggattggattcttccagcccttgtagaattcaactctacagggttaaggagtgggagagagcagatggcggggggcccatgtgggggaagggacctccgtcgtagtgtacagggtccacatagagcggtggtccaacagggccaatggaggagtggaaacgtatcaggtgtccccaatcctcaaagtggtaccccagaaaaaagtcccggagaaagccagaggacagttggtggccaccatcggtgggaagcatgttgcataccgggaagcgtgtggcgcgaacttgtggtagaggggggagagggaattttatcgggacgaagggagctaaaaaaaaaaagtgcgggcagaaaagaggagaaatacgaagcaaccggag

SEQ ID NO: 519913 - DNA, 1026 bp, Homo sapiens
gctgacaaaggagcggaggagcagtcgcagctgctttccgaggaagccggtgttgccgagatggccaaacatgcttatggagtattcttcaacatgacatctacagcaacaagtccacacacatcagcatttgcagcactgtcaacaaacagaaactgcagcaagggggcattcagtgccaatgcatcaacacaaaaagacaaccagagttagtggcacaggaaatcttcctgtactcgtgtaccccacggagctcatcgttttatgcagaatgatcagtcaaacacataagccacgtgtagacaactgtacaactccctatgcagacttagcctataaagcttcaaagctttccgtgatacatacgtcccaaactacagctatggtcgctccggcttgactgcatgcatggtgccaggtacaacagcctcagacgttgtagctggcatactcgtcgattccggcacatacgacgactgttccgcatcctgatacacctactgcgtgtaatagaccacacacttccgatctaccaaagttatccgacgcaacagccacaaggaagggacttaggagacagcaacacggagggctcggtcggatacactctaacgtccccaatcaaggcaaaacagaaaccacccaccacgcgcccaccgcaggcaccacccacagcattacccaggacacaatccaacatgagaacagcccaatcaccaagagaccaggcacggacacaacacccagcgactacacccacgcaagcgccaatacccacacgacaacccgttacaaccacagcgccctcaccaaaatcaaaccatcaccaggcacaggacaccaccactgggcccacgcaccaactccatgccaactgagcagccccgacccaccacaacccaccaacacgccacagcccccccctcacaaaccatggccacacacacaccacatggccaccgaacaccccacaccacaacccccgcaaccggctaccacacaacaacaccagcagcacacgaagcc

SEQ ID NO: 519914 - DNA, 119 bp, Homo sapiens
cttcttattgatgggggtggtctaggaccagtagataaaaaatccttaaatgttcaagtctctcatataaaatggcatattatttgcacataacccatatgtatcactcatataccacc

SEQ ID NO: 519915 - DNA, 112 bp, Homo sapiens
agtgctgacctctagcaggttcacccctcttcagctagtgtaccagcactaatctctgagtaagctgaacgtatgagactggacacccatgtgagtatgtgttatcaatgta

SEQ ID NO: 519916 - DNA, 103 bp, Homo sapiens
ccggtaatgatatatgaggatccagttttctcgacatcttttccagcattcgttatcgtcagtattttttgtgttttagccattctgacacttgcatccagag

SEQ ID NO: 519917 - DNA, 258 bp, Homo sapiens
  misc_feature (42)..(42): n is a, c, g, or t
  misc_feature (44)..(44): n is a, c, g, or t
  misc_feature (46)..(46): n is a, c, g, or t
  misc_feature (57)..(57): n is a, c, g, or t
  misc_feature (78)..(79): n is a, c, g, or t
  misc_feature (84)..(84): n is a, c, g, or t
  misc_feature (109)..(109): n is a, c, g, or t
  misc_feature (174)..(175): n is a, c, g, or t
cgcatggatctcctcattagtgattctgagtacaagcatgancngntgtgacatgtngacttagcatggtgcttccanngtagntgtggtggtcactcagagccttgcngacagcagccagcaccttctcggtcacatactggcagcgctccaagtcatggtccccatcatggnnggatctcacggctccacgactgggcacgactgccattcctgctggcagactagtgccgattgggccaagcgggcggagatcct

SEQ ID NO: 519918 - DNA, 408 bp, Homo sapiens
  misc_feature (19)..(20): n is a, c, g, or t
  misc_feature (49)..(50): n is a, c, g, or t
tagaatttgttgttgattnngattttgtattgaagttaattgttttttnnggtattaatgtgttagggttgagtgttttgggatttttttagaggttggtaagaattagttgttttgttttgtgggtttgttagggttggaaagtttaagttgtaggatttagtttttttttttagttgatgtttttggttagaatattgtgggttgttatttgttttgagttggaagtggtttgtatttatgtttgtaaatgtatttatttttaatttatgtaaggttttttttgtatgtaatttttgattttttgaagagatgataataaattttggttttttattgttatgtgagaatattaggttttagtaatatgttattgtgtaaggaaaaataaaagtgttgttgtaatta

SEQ ID NO: 519919 - DNA, 267 bp, Homo sapiens
tgacacccattcgagattgtcctggatcaacattcgaggtcgtaaacccttatggtggatatggactctagaaataggatggcgcggttatccctagggtaactggttccgtgggtcaagtaatgggatcaatggagtatagtagttcgcttggacgggtgaagtcttagcatgtacggctcggaggtggggctcggctcggaggtcgccccaaccgaaatttttaatggcagggttgggtagttaaggaccggggggttggtaggg

SEQ ID NO: 519920 - DNA, 247 bp, Homo sapiens
tatatgtcgtgttgtagataccgtgttgtatatgccgtgctgtagatgccgttttgtacacgccgtgttgtacatgctgtgttgtaaacgacgtgttgtagatgccgtgttgtacatgcattgttgtacacgacgtgttgtagatgctgttgtacacgacgtgtcgtagatgccgtgttgtatatgccgtgttgtagatgccgtgttggtcgacgcggccgcgaatttagtagtagtaggcggccgc

SEQ ID NO: 519921 - DNA, 408 bp, Homo sapiens
  misc_feature (38)..(38): n is a, c, g, or t
  misc_feature (56)..(56): n is a, c, g, or t
  misc_feature (103)..(103): n is a, c, g, or t
  misc_feature (138)..(138): n is a, c, g, or t
  misc_feature (152)..(152): n is a, c, g, or t
  misc_feature (177)..(177): n is a, c, g, or t
cgcccggtgctgcctctctgatcagctctggaagaaanatggttatcatcttggcncctggaagaatgccgaccaagctgtggcttgtgttttatttgtggantgcaattgaaattttcaggtactctttctactgcngacgtgcattgacnggattggaaggtgctcactggcttngttacactctgtggatcccttatatccactgggatgtttggtggaagctgtctcagtgattcagtccattccaatattcaatgagaccggacgattcagtttcacattgccatatccagtgaaaatcaaagttagattttccttttttcttcagatttatcttataatgatatttttaggtttatacataaattttcgtcacctttataaacagcgcagacggcgctatgg

SEQ ID NO: 519922 - DNA, 285 bp, Homo sapiens
  misc_feature (41)..(41): n is a, c, g, or t
  misc_feature (50)..(50): n is a, c, g, or t
  misc_feature (259)..(259): n is a, c, g, or t
attcggcacaggggtggacgctgggacgctttgtagctccnccccgcttnccgacccccgccgccgtcgccgccatgacggggctagcactgctctactccggggtcttcgtggccttctgggctgcgcgctggccgtgggagtctgctacaccatttttgatttgggcttccgctttgatgtggcatggttcctgacggagacttcgcccttcatgtggtccaacctgggcattggcctagctatctccctgtctgtngttggggcagcctggggcatctatat

SEQ ID NO: 519923 - DNA, 467 bp, Homo sapiens
tggccccatccaggcaagaacaagagaaagctgcctcagccaatgcggtgctcacacctgtaatccagcactttgggaggccgaggcaggtggattgcttgagcccagaagttcaagaccagcctgggcaacatagccagaccctgtctttacaaaaaatttttttaaaaattagggcagaggccaagcacagtgactcatgcctgtaatcccagcactttgggggaccgagatggcagatcacctaaggtcaggagttcaagaccaggctggccaacgtggtgaactccccgtctctactaaaaatacaaaaattagccaagtgtgttggtgcatgcctctagtcccagctactcaggaggctaaggtaggagaatcacttgaacctgagaggtggaggttgcagtgagccgagatcatgccactgcactccagcctcagtgacagagactctgtctcaaaaaaaa

SEQ ID NO: 519924 - DNA, 138 bp, Homo sapiens
  misc_feature (111)..(111): n is a, c, g, or t
  misc_feature (130)..(130): n is a, c, g, or t
ccacactctatttcttcatggtatacaaagtataccagtaacaattaaatgatattgtaattcatgaagtataagcgagcacttccctcatattatgtaggagaattcctngatgcataatatagcactngcaataag

SEQ ID NO: 519925 - DNA, 693 bp, Homo sapiens
aggagaggaggcatgaatcatgccctaatgtgcactatatatgaactactttggtcagaaggcagcgacgggtaaggatggcttcctctcacagcgcttcttaggctatccatttaccaaggaattctaatctctttctctcacttcaccaggaaaggagggagtttaagatatagaactgggcatgctagcctcgtttttaccttttgcggatttgccataactgcagagaaccgatgttgtggactcttgccagttacattgtgaaccttgcagtgaaagttctttgcctgtgcacagggagatctgtgcttgtgcagaactgcccatgccttagaaagcaggtctgtctaattctaagttcaatatctggtggctatgggtggcataaacttagagtacatcctctaacctagcctttatcagcagttcacttaaaatattgaatctacatctgtctgagtctaaaggggtcagaggtcaggagaggaaagggacactattcatgactcccttaaactttaacaaagactagtgcagaatatatgtcgaagtcagcatgagatctattaaaaaccacatgtgggaattttatgccaaattgtacaggtttttataaatcttggaaaattctatagaaaatcgagtagtgaacattacaaggccccaggtacaccattggtcacgaaattt

SEQ ID NO: 519926 - DNA, 736 bp, Homo sapiens
cccacgcgtccggagggaatgtatatgtcttggtagaccaggaggccttgccagcaatttaagcaacagatgtgaatacttcacaaagctgtaaagaccattgtcttaaatactacaacaacttaacacccttttgtgaagatcacagcatttatctaagaaactgtgaggctttctggtttacatatatcttacaggtgtttttttgtattttttttttttttttagttggaaagtgtgtaagcttggatttaaaccaagtttacttcagtagtgttaatgatgtagtaaaaatatttatggaagagggtgaattcgagtatttaagggttataccgtggccatttttttccttaaagcatattcttgggcatctaacgtgccaggtgccatgggtcaaaacttattttttaaatcgctggtacatttcttattaaactaaggtggcttaattttaagagtattagtgtgtggccatcatataggtgtttaaaaagtgtttaatgggccaatgggatgggtaactattatttatttttaaagtgaaagtggtaacagaatggcgttcggattcacacaaattggtgtatcaaacggtgttccttatcctcttttctgatgtagcataaaattgtgtcccggttggagttataactggccagtagatgaccagtcacaagtgaaccacttctcagtggccaatcttggctcatattaaaaaccatttacaaatacc

SEQ ID NO: 519927 - DNA, 212 bp, Homo sapiens
  misc_feature (146)..(146): n is a, c, g, or t
ttcgacggtgtctggaatgggacaggtagggggctcataagcactgttggataaaggcataataatgagactgaagtctacccatatgtgcttctttttctctatagagctaggctggactcaatccatacatgagatttttttanaacataatgaatcttgatgtgatcagccacacagtaaacattgcagttaaattttcttatttgaga

SEQ ID NO: 519928 - DNA, 242 bp, Homo sapiens
tgttatatctgcatacaatgcatacagtggactgggtcctgaaagtgtccttcagctgggactgacagttaatcatgtcaggagcaaatcatccctcagcacaaggtcccaaagcaggcctggggcccatatggcccactccctgatcacctcgcctaggggccatggaacaccaagctggagatgaaacacaaaacatccacttcttaccacccgtatgctccccatccacagatcttctt

SEQ ID NO: 519929 - DNA, 93 bp, Homo sapiens
acatacgcatttattgctctatctatgtgtttgtgtcatatatttatttgtttgctctttctgctgacactaatacgttgtgatgtagagatt

SEQ ID NO: 519930 - DNA, 745 bp, Homo sapiens
  misc_feature (255)..(255): n is a, c, g, or t
aggaaccaggcgcgtggaacactgaggctcgagggtggagcgcaggattgtgggacgcgccaaggctgctgtctttcccagcagcagcggaagatgtcggacagcgaggacagcaacttttccgaggaggaggacagcgagcgcagcagtgacggcgaggaggccgaggtagacgaagagcggcggagtgcagcgggcagtgagaaagaagaagagcctgaggacgaagaggaggaggaagaggaggaggaatangatgaggaagaggaggaagaagatgatgaccgaccccccaagaaaccccgccatggaggcttcattctggacgaggctgatgttgacgatgagtatgaggacgaggaccagtgggaggatggagcagaggacattctagagaaagaagagatttgaggcctccaatatctctatagttgtcctgctagtgatgatcatccgttgtcgtgtcgctcgctgccttgacaactatccgcgtcgtgggaagcggaccagcgaagaaagaaggaactgtgcgagttttacatgaagaaatacgccaagtcatctgtgggagagacggtgtatggaggatctgatgagctctcagacgacatcacccagcagcagatgctcccaggagtcaaggatcccatctgtggactgtcactgtacgatgggggaggaacgggccacgccattccttgatgcgcaagttcttgcctcccgtcacagaacgcccctggatcag

SEQ ID NO: 519931 - DNA, 285 bp, Homo sapiens
  misc_feature (13)..(13): n is a, c, g, or t
  misc_feature (129)..(129): n is a, c, g, or t
gaatgatggccgnatgtggtggctaacacctgtaatcccagcactttgggaggctcaggtgggagaattgcttgaggccaggagtttgagaccagctggggcagcatcatgagagcctgtctctacagnaaaaattttgaaagattggctgagtgtggtcacacatgcctgtggtcccaactgtttgggaggctgaggagagagaatcgcttgagtccgggagtttgaggctgcagtgagctataatcttgtactgtactctattctgggtgagatcctgtcttt

SEQ ID NO: 519932 - DNA, 1091 bp, Homo sapiens
  misc_feature (239)..(239): n is a, c, g, or t
  misc_feature (532)..(532): n is a, c, g, or t
  misc_feature (536)..(536): n is a, c, g, or t
  misc_feature (551)..(551): n is a, c, g, or t
  misc_feature (616)..(617): n is a, c, g, or t
  misc_feature (644)..(644): n is a, c, g, or t
  misc_feature (655)..(655): n is a, c, g, or t
gccgccgtgaatataaaaaccaccaacaattggaaaacctttcggaagtaccgcgttccattccgttcgtacccgcgaattcgtccattatggccgtcgcattttgtgaagagacgaagactgagcggttgtggccgcgttgccgacctccagcagcagtcggcttctctacgcagaacccgggagtaggagactcagaatcgaatctcttctccctccccttcttgtgagattttttngatcttcagctacattttcggctttgtgagaaaccttaccatcaaacacgatggccagcaacgttaccaacaagacagatcctcgctccatgaactcccgtgtattcattgggaatctcaacactcttgtggtcaagaaatctgatgtggaggcaatcttttttcgaagtatggcaaaattggtgggctgctctgttcataagggctttgccttcgttcagtatgttaatgagagaaatgcccgggctgctgtagcaggagaggatggcagaatgattgctggccaggttttnagantattaacctggctgncagagccaacaagtgaaccgaggaacaacgcaggtgtgaaacgatctgcagcggagatgtacggnncctctttgacttggactatgactttcnacgggactatnatgataggatgtacaggttaacccagcacgtgtacctcctcctcctcctattgctcgggctgtagttgccctccaaacgtcaggcgtgtatcaggaaacacttccacgaagggccaaagtggtttcaatatctaaagagtggacaggggcgatcttccaacgcctggacaggttgccacgagaatgacccgttcagggcaatttacgaacgagggggccagataaaacgcacaggggatcctctccggaaaagacctggaaacatctggaggccgcgcgaccagcgaagatgacgaagggagcgcccaaagggccacaacaccggagaacagggacaccggcaagcacgcaggcggcgacacccgcgcgacggcccccgccacaaaaagggagcgcacaggcggacaaacggggcacggcccgagggcacagtaaa

SEQ ID NO: 519933 - DNA, 117 bp, Homo sapiens
agtcaacatccggggtcagtccactctggggccagtccaacatccgggggtggtcttcaaatacaggaaaaaggctaaatatatttttctttaaaaatatttttaaaccataaaaat

SEQ ID NO: 519934 - DNA, 273 bp, Homo sapiens
  misc_feature (215)..(215): n is a, c, g, or t
  misc_feature (249)..(249): n is a, c, g, or t
  misc_feature (266)..(266): n is a, c, g, or t
tagtccagtaatacttattaaaattagttgttagaggctgggcatggtggttcaagcctgtaatctcagcactgtgggaggccaaggcggacagatcactcaaagtcagaagttcgagaccagcttggccaacatggcaaaaccctgtctctactaaaaatacaaaaattagttggggtgtgggtgggcacatgcctgttaatcccagccacttngggagggtgaagggcacaagatttggtttgaacngggggaagcagaggttncagttag

SEQ ID NO: 519935 - DNA, 202 bp, Homo sapiens
gagtacccatgattctttgcagtttaatttgctttgatgttggacagttcttaaaccaagggctgtggtctccctatttttttttgagacggagtctcactctgttgccaggctggtgtgcagtcacacgatcacagatcactgcaacctctgcctcccgggttcaaccgattctcctgcctcagcctcccaagtagctggg

SEQ ID NO: 519936 - DNA, 465 bp, Homo sapiens
aagcagtggtatcaacgcagagtgcccattacggccggggtgacgggggagggggaaaaaaaaaaaaaaaaaaaaaaaaaaatttgtgggccgccggcgcccgagaagaaggttttcaaagccccattcgcggtggggcgccggcggcgccccaggtaggtaacggtgagccgctgggcgccaaacggcgggtggtaccataaggagaagatcaccgggggcacatggcgcctaagcgtcgttgggagttttcttcaccaaataaaaaaaacaaccgcgccgcggcgggacaacacagggtcgggtgtctttggacacaaatttctcaaagagagggcgacgtccaggagcggcacactagcggggggcttcatataccacgacggcgggtgcgtcccaaaaggaggagcgcccagagaatatttaaaatatttaacccgccccgcgcccgcggtggaaaaacac

SEQ ID NO: 519937 - DNA, 611 bp, Homo sapiens
ttcgtgtaaaaagcgcttttgtcccccggttgtttgttatcagcatgttttgttggcgcccgttgtttgcaccccggtagtcgtggtagggctcgtttgttcccgcgggggtgcgttgttgacacatcacgggtggggtggtggttatctacaatagcggggagagttttctctggcttgggcgctggggcgacaggggggctctttccccaccccgtgttttgttgagggtgttgtcccgtgagccgagaactgcgctaaacggcaggggtgttcgctgtgtggtactcttgcccacccgaggtccccccttttttttgtttcccacacacttacggggggtgtcgcccaacccaaaccgccctacatagtcccccgcagagtattcacaaaggaatatcaacctctaaagccccgtgccccacaagcgatatccccctgaaacgacattggcgccacgtaataaacccacacttctacctctttgtccactccctataacactccatcccccctggatgttttatgaagttttatatttcgcccacgggctactttttttaaaaaccccggcccccgcaaaccaaaaaaatttacagcccaacaagaca

SEQ ID NO: 519938 - DNA, 262 bp, Homo sapiens
caacactccacaagccgggttttagcccacaattaccagatcaaaaccaacgcgggcaggccctctccggccccactcgaagtgcggcaacaggaaacgcttggggactctagataacctcggcccgaacccacgccccccggcgcggagacaacccattcgaacggccgccctatcaacttgcgagtggaggcgccggccctaccaagatgaccacgcgagacggggaaccacagctcgattccggacagctagcctgaca

SEQ ID NO: 519939 - DNA, 544 bp, Homo sapiens
  misc_feature (461)..(461): n is a, c, g, or t
atgaggctatgtagaacaatgactgactatataattcgggcagcgtcatccttcttcagtgtccaagcaccacgtatctatttgatagaaaatactcaaatataattaatgtaccagttcactttatttatttctattttatttgagataagagtttcactcttgtagcccagtgaggctggagtgcaatggcatgatctcggctcaccacaacttccacctcccgggttcaagcgattctcctgcctcagtctcccctgtagctgggattacaggcatgcgccaccatgcccagttaattctgtagagacagagttctccagcagagacagggtttctccatgtaagtcaggctggtctcgaatcccagcctcaggtgatccagccagcttggcctcccaaaatgctgggattacaagcatgagccatcgggcccggccaagaatttttatacatacatnatccagcaggtatcagccttatttcctgtcctaacacaagaaagagcacttgacagacaggtgcagcgtaaaaagggtaccga

SEQ ID NO: 519940 - DNA, 590 bp, Homo sapiens
gctcgactcggcaccggtgtgcatcatggtccgggccctgtgccgcctcccgcggagcggcgtctggctgctcctggcccatcagctcttacatgaccacgtgtcctgcacaggaggctaagctagcggtgccctcctccgggagctctggctcacccagttccaggtagacatggaggccgtctggggagacgctgtggtgtgactggggacagagaccatcaggagctacagggcacgctggcctgactgcacctggtcgacatggcgtgagaagctgggctggtctctggtcccaatgcaggagagtggacaggttcttcctgtgcagtgcactggcctgctacttacacgagagctgcgcccatgctcaggcagggccgtgacggagacccagccctggatagatagtacctactacgcccttcatcgtgtggtaccccatcacaggtgagcctggtggtgacggcactgtgtgagtctaggcagagcaagcgcactgagggcattgtgtaggcggggccaggctgccgcgggtgcacccaggctgcagggtgaggcaggaggcctgggtaggggcagttctggag

SEQ ID NO: 519941 - DNA, 1527 bp, Homo sapiens
  misc_feature (923)..(923): n is a, c, g, or t
  misc_feature (969)..(969): n is a, c, g, or t
  misc_feature (983)..(983): n is a, c, g, or t
acgggctatagtgctctgtatgactgtaggattattgtagagtaccggcttggcacgacgaagctgtttatgtggctagttctggtcgctggaaatagtaagtgcctggcgcagcagacagaggtggtgctgaactgctgagtagaagctggtggagcacaaccctttttgacccagaaacaaccacccagttctgtggtttttcctcccgggggaaattaatttcaaaacgtggggagtgttcctaccctggggagaggcctttatcccctcttgccatgagatgatgttttgaccccaccggtggggggaaaagctgtagaagcccgcctggaagtcctgtttttaggaagggctacatactgggcgcacacattcgctttgtcgacagggggaaaatgaccctgtttatagcccccaccaatacccgtattggaatgtgaaagaaccgcctttaaataagtgtattaccacgaccgtcctaatcccccacttaaccttgtttttaaagagaaattcttttttaccggggtgacaaatccactctcagcatgaccccctccccccttggggaataaatcccgcagattttaaatttctgtctctcaaaaccccttcggtcctccaccaaaaaccagattggtgatatttaggagcgtcccattgtgtgggaccggtgaaaaggtgcccatgcccagagataggccaaagtgtgttgtgaaaatgttgttgcgatgcgcttgttaaagaaagtgtagagcttggtgggatatttcgttggtgagaacttttgggagggacatttgcttcccgccgagcgccccccaattctcagaatggcccctggatgaacaccacgcctattagcgctctccggtataagagttggtgtgtcttctcttatgccccatctcttagaatgnggttttttatataaactaccacgccctaaaacacacatctctttantatggtctctatangaatataaaaggagaacctattatgttggccccaacaataattttgtgtgccccctctctggagccttttatagttaaggcgctttgtggtataaaatgttgaggagaaacacctttttgtgtatagagaaattatatctcgatatatatagatgagaattttgttgataatgcgcttttccttgaaatgagtggtgtgatataggtggagatatggccccatacaccacagagtgttacaccacgcgttatagtgtaatattttacacataacatcttaagagagatataaaccataataccagtggtgttcttaagtttagtggataaataggagtacctgttgaaggtgtaaccataaatagtggtttaataatattgtttggaataataaatttatagtgattttccaaatagtggctggatttattttgaccatctaataatctgaatagtttttgtgatccagttagtttgtgtttcatagacttccattcataaactttaaaaaacttttaataaaatattttccttcccttttcca

SEQ ID NO: 519942 - DNA, 501 bp, Homo sapiens
  misc_feature (46)..(46): n is a, c, g, or t
  misc_feature (68)..(68): n is a, c, g, or t
  misc_feature (121)..(122): n is a, c, g, or t
  misc_feature (132)..(132): n is a, c, g, or t
  misc_feature (138)..(138): n is a, c, g, or t
  misc_feature (145)..(145): n is a, c, g, or t
  misc_feature (147)..(147): n is a, c, g, or t
  misc_feature (155)..(155): n is a, c, g, or t
  misc_feature (167)..(167): n is a, c, g, or t
  misc_feature (173)..(173): n is a, c, g, or t
  misc_feature (262)..(262): n is a, c, g, or t
  misc_feature (328)..(328): n is a, c, g, or t
  misc_feature (387)..(387): n is a, c, g, or t
  misc_feature (409)..(409): n is a, c, g, or t
ggggcttacgctccttttattttctgtttaggacaggacggggganagactgggacataagcgctgtnatacattagcggttttggggggcatcaattttgcgaggggggggctgggggcnnaaggtgtttncgggtncggggcngnggtggtgngctgtctgtagncgctcncagggctttgcggtggtactcagcagaagccactttgtaatcactggcagtaaagagagatgcagaattctttgccagatattttaggnaatcatgcaaatagcccaacaataatgcaaggcttttctcatcaaggggcgtataggccaacattnctccaattcttacaaataatctcagtaggtgtggtgctccataaacctgggacattggngcatcagggtgagcccagaggntttcagcatactggggcctctcaaatttgtagagcagctgagtgccccacatcacattgaaatattcttttattcctgccacaacttcattt

SEQ ID NO: 519943 - DNA, 983 bp, Homo sapiens
aacaagtcctttgccgagcacgcttccccagcgatctatcctgctatctgatgttgctctgatacggactcaccggagcttcttcatccagtccccgtgaaccgaacctaccgatagcgctcctctcgtccgtacttaccttcatttccaatcgctcacttctagacatagtaactaccggatcctccactatagtctcacaagcagaccagaagcaagtacatatttcggccgcacgtaaggccattcatttttacttgactcttaggagcggatcctcccttcagttctagtcctcgcaagtcagcgtagcgacacaacggagttacagcatagccccgtttatacacatcgatctggaacaagttgcgatcctgtactattcttcacgatatcaactcctaatcctattacctaattatctccgctattttgagtagactatagtactacacatattgggccttaactttcttcaccaatctcaatgaaggagagggatcatgctgagaaagctgcatgaagcatgcttgaatatcaaacagaaggttggccggagatccttccgttcacgatatcaagaaaaccagactgtgatgactggcagagcgggcctgagtgcaatggcagtgtgcagttacattcggaaaaaaatgtgcctccagtcactactggaactgcacaaactgtccactgagcgaaatgagccccattggtgtgacttcattgagacacattacctgcatgagcaggtgaaagcccaagggaattggggtgaccaacgtgaccaaatttgcgcaaagatggggagcgcccgaatcttggctttggcggacttatctcttttgacaggcaccccctgggacgacagtgctactgacaggctaaggctcgggctaatttcccatagcgtggggtgacttccctggtccaatgccgtgctgcatgttgggtttcctttacctttctattagtggtcccga

SEQ ID NO: 519944 - DNA, 126 bp, Homo sapiens
caagcaccagcctgaactagttttatcctttgaagcagcccttaccatctcacgcgcccttctcttcctcagcagtcccgggcctagacagagggcgtgagatggtaagggctggcttcaaaggat

SEQ ID NO: 519945 - DNA, 517 bp, Homo sapiens
ggcctaaacttagtagttaaaattcaattcatgccttcgaacccaatgttatccatagattccaggcattgtataaaagacacattgtgtaactccctgttatgtttcactctgaccaccagtgcatgaaaccccggtcacgtatcccgtagattgttcaatcaatcaggaccctttcatatgaaatctttagtgttgtgagcccttaaaaggaacagaaattgtgcactcgaggagctcagattttaaggcagtagctcgccgatgctcccagatgaataaagcccttccttttacaactcggtgtctgggaggttttgtctccggctcatcctgctacactatctctacaaaaaaaatttaaattcgcctggcatggtggtgtgcacctctagtcccaggtacttgagagggtcagaggatcgcttgagcccaagggtttgagtctgcagtgacctatgattgtgccgctgcaattcagcttgagcaacacagtgagaccctgtcttcaagaata

SEQ ID NO: 519946 - DNA, 423 bp, Homo sapiens
gcgcgggacgacctgtggcgcactgaacattgcctccaaatgccccaagtgctgacaatgaccgtgtacttcgcctgagaagtgtgagctccctgtgggaagtgactgtgcacaagttctgcctcaatgtgcgagcgctgcagcaatgactgctgactgccctggtggtccactgcctgagcatgactggtgaatgcctgttctgccacaagccagtgctacggccacccatgtatcggacccaaatggtgagctcctggctgccctctgggccttgccctgtggaccttgctgggagcgggctgtgggcgcttgtgcgctagtgggatggggctgtggggcgtacccttgtgcccggccaggttgtgattcccactgcaccaggaaggtccccttagccagccctttggaacaaggccttat

SEQ ID NO: 519947 - DNA, 318 bp, Homo sapiens
aatttctaaaaaaacttttttttggccgggtttccccctttttggggaaaggtttaggggtggccaggtcccaatggtttttttccccggaggccctccaaattaggatttttggaggaaaccggaaaaaaacttttttttcccttcccagtctttctccgggaaaattctatggctttgttcccttaaccctggtttgaaaccaccgtttttgggaaaggtggaaaattttgtggaatgggggattttttttaaagggaacccctttcatggggtttttcttgcccctttggaaaaaaaccctgttttttttttgga

SEQ ID NO: 519948 - DNA, 677 bp, Homo sapiens
cgggagtgcgggcggggagcgctggcgcgagctcgctgcctacgagctgagacgatgctgctgtccctggtgctccacacgtactccatgcgctacctgttgccctgcgttgtgctcctgggctcggagcccagctacgtgttggcctggggggtcttgcggtttggtctccggcttcctgtccgcccgtttctaccgtgcgctcgtacgatcgtgtcatgtacttgcgtctaccagagcatggtgctcttcttcttctataattctccgtgttccagtgtgagccgtctccgcagctcgcctggtctctggtgttccattctgagctcccgggggcgcggacgcttctccgtgtcgcccgcagctggcgagggtcacccggccggcctcggcggatccagctcggatgaagctcgtgccgcttccccgacgttcctctccgcatgcttcctgccgttctgccgagatcgctctctaggaagctgtggctgcgtcgtcctgaggctacgagtgggacccgccgcccctttccccggccctcgcctgggtctgatgctgcttagcaaagtgggtgcagatgcacgttttaaataatagggcacgcgtttagcaagtttctggcctttggtccaaagaggtggtcatgttggaacagatcggagacgtctacactccga

SEQ ID NO: 519949 - DNA, 327 bp, Homo sapiens
tcaggctcggtacccgactgcatcgtgcgcatgtacaaggaaggaggagctgacttcgctcaatggcgattgtgtgccgtgaagattgaggaacgacaacccctcagccctcgccatcatggaaaatgccaaatgttctggcccgtcatgccagtatctgaccatcctacgaatggcattgtgcccactcgtggaggcctgatatcctccctgatggggaccatgacttgaagcgctgccagttatgtgaccgagatcgtgctggttgctgtctaccagcgttctgagtgaccgccatcactctacctggacggctcgccttcctga

SEQ ID NO: 519950 - DNA, 410 bp, Homo sapiens
aaataacgggagcccctctgtaccaggctgcccaagatagtgctgcccgtattcccggtggtcgtagcctcggcgctgcccgcccacatagccttggccccggcttcggttctgccggttacgctcgttacggtcgtttcggcgatttgtccgcattctcggaggggggcagaagcgttccttgcctcctccttgtacttcgtgacaatgggctgagcttcctccttctcgagctccccatatgtcacctcatccatatagtcgcatttctcaggcaaagagaagttggctttcatctccagcatcatagattcaggcacatcatctccctctacttccttcctcatctccagcctcttcttccactcttcctcattagggacaaccaccaccagtacaacctgccggtg

SEQ ID NO: 519951 - DNA, 172 bp, Homo sapiens
tgtacctgggccggcatccccgcacgacgaggtctctaggtttcatttagacctggaacccagtgggtaaggctgtctgtttctgggtgtcagagacccagtattaggaagtgctttgtcatcactcaccaaagccatattcttcccacggctgcccgtcttgcgggggctg

SEQ ID NO: 519952 - DNA, 201 bp, Homo sapiens
ttctagaggatccctggcaggtgtactccgtgtagcttgagcatttggtgtggtggtttttgtggtggttttctgagaaagttggtgagacttctgtagttggaacatttactggtggtaggtttctgaactgcttggtgggacctttggaagttagagattttcctctgcattcaggtggtgagtacaacctgccggtgg

SEQ ID NO: 519953 - DNA, 385 bp, Homo sapiens
  misc_feature (114)..(114): n is a, c, g, or t
  misc_feature (312)..(312): n is a, c, g, or t
  misc_feature (318)..(318): n is a, c, g, or t
ataaaagaaccagcccaggtgggtggctggtagcacctgttccgaaagattctggacatgctaaactttctaggcgttgatttataaaataggcatcatccaccgggtgtggtngctcatggctgtcatcccagcactttgggaggccgaggcgggtggatcacttgaggtcgggagttcgagaccagcctggccaacatggtgaaaccccatctctactaaaaatagaaaaattagccgggcgtggttgcgggtgctgtaattccagctactcgggaggctgaggcaggagaatcacttgaacctggggangcggangttgcagtgagccaagatcacaccatcacactgcagcctggggagacagagcgagattcattttcaa

SEQ ID NO: 519954 - DNA, 264 bp, Homo sapiens
tagggataagcaatcttagagcgacagctataatcactgcgcccgctcataaggggatggacatggctaggtttatagatatgttgggtggtatggtgtaaataagtgaggcagagagtccgaggatggttagttagtggcactaaacactgattacgagatacttcttaaccacaacggcacaactaacaaccctatatccccaatactcagttattatctgaaaccactcagcctactcgtacacacctttactcgtacaca

SEQ ID NO: 519955 - DNA, 425 bp, Homo sapiens
  misc_feature (152)..(152): n is a, c, g, or t
  misc_feature (209)..(209): n is a, c, g, or t
  misc_feature (228)..(228): n is a, c, g, or t
  misc_feature (248)..(248): n is a, c, g, or t
  misc_feature (344)..(344): n is a, c, g, or t
ccagtgagcctcccgcctccctctcccaaagcgctgggcctacaggcaggagcactccgcccagccaagacttcaccgttgactgctttggaggcccaaacccatgcaagcgtccgttccaaagttcagtgtccacccttaaatgaacaatncagcaggtaaaattacccccgaaaaaaatcccttggaccacccataaatgacagtgnctttttcaatatggactcntcatagccagttttcctttngaagttggaactgatcacccttttgtcatctgtaccagatcagtagttggcttgtgttacattttgtgtgtgtgtgtgcgtgttttaaaccagtgncatataaattgtatgttcaaatgtaagtaactttaaagttggacttatctcttcacagttaatcaagcctcacgtaatttc

SEQ ID NO: 519956 - DNA, 572 bp, Homo sapiens
  misc_feature (22)..(22): n is a, c, g, or t
  misc_feature (353)..(353): n is a, c, g, or t
gcccttgcccacaatagtccanaatggtagaatattaagcccctcaaatcagcatggcctgctaaagcaggtttaaggtctttgagttagaaaattacaaggtcccacaagtggtattatgcttgctggagatttgtgaaatggtggaaaagaaacattcccacccaaggtgtgagaactgccttatggatgcgctggtggggcctctctgttaactacaacccaaagtgtagttcccaaaattccttaaaaaaaaaaagacccctgaattgggtccaatggtggaaatggaggggggattggagggggcctttttttacccccaaacaaagggttttcccttttttattaantggggcaggaaggcccaagcagggtttctcccccaaaaatttcaaaaaggccgttggggaaaaataaaaaaaaaggggggttgaaaaccccttaaccccccggttctgggtttcggttgccaaaaaaaaaaagggtttttgccggccttggcccccccccccaaaaatttttttttttttttttaaaaaaaaaccttttggcctttccttttctgggga

SEQ ID NO: 519957 - DNA, 589 bp, Homo sapiens
  misc_feature (204)..(204): n is a, c, g, or t
ccggctctgaacttagggtcgtgggctcatttagagcttatgtaagcaaattgaatttcctattacaaacacactccataacttaagacagcaagtgcaatttttataatgagcagttttcaggcatatgtcgttaaactacaaggctcacttcaggtcatcagcaacctaggaagagcatcttataagtaaagactgtagttngccaagttcagacctaacaccttgctcccaacagtctctctgtttataatcttttactggaattataaatattctctgttccagtggttcttagagtggatgcaccaagctcagggtgtttgcagagatatccctcggtgagtgggaaggaaatgtgaggatttccactttgtatctcatgaatagtaaatagtaatagttcaagtccagattaatgcttcctccctcatgcaagatgtaagatgtgatggggctccccagtagggataggagtgcctcacttgtttttactcatttttattttcagcagcctaagttcttggctctgaacttaggcctggctctgaacttaggcctggctctgctgcataggctgctcccaaac

SEQ ID NO: 519958 - DNA, 218 bp, Homo sapiens
catagtgacatcccgtccccaccaaaaatacacaaatgagccaggcgcgatgcctgtaatcccagctactcgggaggctgaggcaggagaattgattgaaccaggcaggcggcattagcagtgagctgatagcaacactgccctccagtctgggcaacagagcgagagtctgtctcaaaaataaataacttttctccaaaagtatatgggaggatgag

SEQ ID NO: 519959 - DNA, 388 bp, Homo sapiens
cggcacgaggatcggtttgccgggcaccccgcgtgaaaatgttctgcggctcgccgtgctggtgaaacaatcgggattggatggcgttgtttgttcatctcttgaagtggccgatctgcgccaaaaccagggtgcggatttttgtctggtgacaccgggcattcgtccgcaaggggcgttgtgcgacgatcaaaagcgcatcatgacgccttatgatgccatccgtgctggatcggattatctcgtgataggacggcccattaccgcatcagaagaccccaagggtgttttgcttgcaatagaagcggaaatcgaagctgcgcttgctgtttgacctcatgtaaagtcatgctacgctgccctcggtcaaagaaagcgatggcggccg

SEQ ID NO: 519960 - DNA, 179 bp, Homo sapiens
catagtcagaaaaaacgaaagtatataaagaatgaagtggaagagtggtgtgtctccgagccagcccagcatggacgggattttagactgccatcgcgaatgagtggctgcatcggtttgcttggagtgagtgtctacctggacctggagcaacatctgaatgaattgatgctggacga

SEQ ID NO: 519961 - DNA, 657 bp, Homo sapiens
cagccgcatagatattaccggacaagaatgattaacatcttgggtggttttacagaggaaggcgcaatatttcatcacactggtcagattggtgtgcactttcaaacttataaactgttggccaggtgcggtggctcatgcctgtaatcccagcactttgggaggccgaggcaggcggatcacgaggtcaagagctcgagactatcctagccaacatggtgaaaccccatctctactaaaaatacaaaaattagctgggtgtggtggcacacgcctgtagtcccagctgctcgggagggctgaggcaggaaaatcccttgaaccagtgaggcagaggttgcagtgagccgggatcttgccattgccctccagcctgcgcaacacgagcgagactccgtctcaaaaaaagaaatgagaccaaggtaaggacttggaatagttgaggtgtctcacatgctatagagcccagagttcctgctttactttttttaaaggaatggaattgttgctcctgtggctgtttctgggattttattagatgatatctgtaacgttcatattacttagtacttggaaacatagtaagtactcaataatgattagagcggagaccctgatcatcttcggaaatatctatgctgctggggtaccgagctc

SEQ ID NO: 519962 - DNA, 234 bp, Homo sapiens
ttgtctgggtttgtgttgaagaaacctctgacaacccaactttacaaagacacaatgccattaaaagacatgaagcatgatctagttgaaagtgaatgactacaagctcattcttgagatatttcaaaggcattgagggtcatcatttttaccaaccctgtggaactgcaaattctggagtccatgccaccattgtcttttctggggaatacaacaacctcatgagaattttta

SEQ ID NO: 519963 - DNA, 489 bp, Homo sapiens
cacactgcaatagcgataatgtactaccgacagtcttagagagcagttcttagaggtctgctggtgcttctcttgacaaagcacacttttttttggtttcccccgagaaggagcttgctctgtgcccagagtcggagtgcaagggcatgatctcggctcattgcaacctctgcctcctgggtccaagcaatcctcctgcctcagcctcccaagtagctgggattacaggtacccaccaccacgcccagttaattttaggtattataagtagagacagggttccctacacgtgggccgacagttaggcttagaactcctagcctcaagtgagccacccgcctttgcctcccaaagtcctggaataacaggcgtgagctaccgtgcccagctgttattaccatttaaaaaacgttaagagaaagacgattatgcaccagaacctgtatgtagcctgcaaagctaaaaagtgttactctcgggcttggacgt

SEQ ID NO: 519964 - DNA, 330 bp, Homo sapiens
ttggcgcaagtcggtctgtatactcactgtgcttatgttgatctcatccatctggcctcccaaagtgccgggattactggtgtgagccaacatacctggcccgtcttgggtttttatggagccttcattacatggcaggactgacaaccatgtagaaatgtgattgggcaaaaagaacacgggtctaaacccagcaagacctgcccgttcagacttttcctagcctctctgtgcagcatttcttcctttagggggctggggcaggacctgctctgaaatgaaggtcttttgacccacaatcggattagagtcccgccttgggcaggagaa

SEQ ID NO: 519965 - DNA, 1033 bp, Homo sapiens
ttaaagtgagtgtcctataaatgtcatatatatggtgaaggatactcagtgtggtggaatagctcaggaagcaaaggtacatcagaatgtggtcttgggctaggtgtactgtagtctacctttgattttggcatgaaaaagccaccacgtgaggaatggacactaagccagcattacagtacgacagtgtggcaagcatggagtgtctcgtctgtgcgtcctacaatgctgaacagctagccaaaggacctgaagcatgagtggaaagatcgttgcttcatgaaaagagttcatagatcacagcttaagcatgtgtggcctgtgctgtgactaggatggtatatacgtgtgtcatttctcttcgactgggagcaagactagcccgacgatgagctcaccaactaggtactccgaagagatctagagtcagagtgtgaacgctgttgcagatgctcacaagatgagcgaatcgacaacagcccatgtctcctatgcagttacgcacgatcgtggtctggtgcaacagcagtagatagaatggcaaactcatagcggcaggtgggctataacagagaggacatgtcttccgaaccgagtcgaaatgctgtaatccaacatacacgctcatctggtccttgacttgtttccaatgagaacaccaggaagccgacttcaacacctgggtggtagtcatgaggcaacggcaatgtgcgcaagggggctcaacagtgcacccaaagacaccgtaatgggcgcaaacggttcagtgttcacacattccttacgcgggaatcccgtgccccaactaggaaacagcgagatcaaacgcatagtgctaccacagtcacacaacgcagtatagcatgtttagagctaagggcaaaagcagcaaacagctgatctacggctgaaaagaggaagcggtacgaaaaagcacgaaacaagcaccgtctacataagagtgccagtagcagccatcaccacttactcgtctgccgtcctttcgttcacgccataactgcgtatgtgtgga

SEQ ID NO: 519966 - DNA, 271 bp, Homo sapiens
ctggcgagcttcattttctctgaatgattgtgtgttctgcctttggatacatgggtaagaagtcaggcctcagctgcctgagggttgcggtttgcggagcgcatgcctgcccatcccctgcctggttgcagggaagcttctctaacgtgcagctggtccagttcttttgtgccatctttctccagcgtttcaggatagccctcattcttttgtgttgctccagctcaatgactaaagggaattgaagaagttgcccagctctccaaggggg

SEQ ID NO: 519967 - DNA, 240 bp, Homo sapiens
cgggacctgcccccagccccccagcctggtttttccccttaagctttggggccctggatggggtaacattcccttttgtttgtccctgggctggccatgaagtgaggagatgggtttttaaaaagaattccctatttttttggccaaaaatcccggttatatattaatgtgaaataaaccctggttgccccccgatttgtttgctgaaaatgtgaaatagtaaaaatgaaataactggga

SEQ ID NO: 519968 - DNA, 1591 bp, Homo sapiens
  misc_feature (24)..(24): n is a, c, g, or t
  misc_feature (62)..(62): n is a, c, g, or t
  misc_feature (276)..(276): n is a, c, g, or t
  misc_feature (805)..(805): n is a, c, g, or t
  misc_feature (966)..(966): n is a, c, g, or t
  misc_feature (1066)..(1066): n is a, c, g, or t
  misc_feature (1083)..(1083): n is a, c, g, or t
  misc_feature (1090)..(1090): n is a, c, g, or t
  misc_feature (1130)..(1130): n is a, c, g, or t
  misc_feature (1143)..(1143): n is a, c, g, or t
  misc_feature (1175)..(1175): n is a, c, g, or t
atgaccccaatacgcaaaactaancccctaataaaattaattaaccatctcattcatcgganctccccaccccatccaacatctccgcatgatgaaacttcggctcactccttggcgcctgcctgatcctccaaatcaccacaggactattcctagccatgcactactcaccagacgcctcaaccgccttttcatcaatcgcccacatcactcgagacgtaaattatggctgaatcatccgctaccttcacgccaatggcgcctcaaatattcttntatctgcctcttcctacacatcgggcgaggcctatattacggatcatttctctactcagaaacctgaaacatcggcattatcctcctgcttgcaactatagcaacagccttcataggctatgtcctcccgtgaggccaaatatcattctgaggggccacagtaattacaaacttactatccgccatcccatacattgggacagacctagttcaatgaatctgaggaggctactcagtagacagtcccaccctcacacgattctttacctttcacttcatcttgcccttcattattgcagccctagcagcactccacctcctattcttgcacgaaacgggatcaaacaaccccctaggaatcacctcccattccgataaaatcaccttccacccttactacacaatcaaagacgccctcggcttacttctcttccttctctccttaatgacattaacactattctcaccagacctcctaggcgacccagacaattataccctagccaaccccttaaacacccctccccanatcaagcccgaatgatatttcctattcgcctacacaattctccgatccgtccctaacagactaggaggcgtccttgccctattactatccatcctcatcctagcaataatccccatctccatatatccaaacacacaaagcataatatttcgcccactaangccatcactttattgactcctagccgcagactcctcattctaacctgaatcgcgaggacaaccagtaagctacccttttaccatcattgacaagagcatncgactatactcacaacnatctaantctaataccactatctcctaattgaaaccaaatactcaantggcctaaaaaanaaaaaaaaaaaaaaaaaaactgtggcccgttngcccaatggacttgaatttggcaagcttagcatggcgccgattggagctcatttggccaattgccctatgggggcggattacattaatgggccgcggttaaaacgggtgcttgaaaacctgtggtaaccaattaaacgcttgggaaaaacctttttgcattggggaaaacgcagagccccccggggctttccaaattggccctcaggggaaggaaattggcgctatattggaaaagcggataaatttaaaaccttttttcacaagggcaaggggaactttttaagaaaactttttggggggccctggacccccccaaatttttgggggcgacaaaacgcccccattcccccctccctattcggcggccacccccctaggaagcgccctcatgggcgtggcaccccccctttggccg

SEQ ID NO: 519969 - DNA, 111 bp, Homo sapiens
tacctgggaccccgctgtacagttgctgccagcagcctgctggtagttccatgctccatagcgtatattaaatgcctggatacctgcaactggtactggctggtgtgggat

SEQ ID NO: 519970 - DNA, 1578 bp, Homo sapiens
  misc_feature (263)..(263): n is a, c, g, or t
  misc_feature (792)..(792): n is a, c, g, or t
  misc_feature (953)..(953): n is a, c, g, or t
  misc_feature (1053)..(1053): n is a, c, g, or t
  misc_feature (1070)..(1070): n is a, c, g, or t
  misc_feature (1077)..(1077): n is a, c, g, or t
  misc_feature (1117)..(1117): n is a, c, g, or t
  misc_feature (1130)..(1130): n is a, c, g, or t
  misc_feature (1162)..(1162): n is a, c, g, or t
actagttctagaatctgcagagcaggtcagctccattttgtattcttcggggagtctccatctcaacatctccgcatgatgaaacttcggctcactccttggcgcctgcctgatcctccaaatcaccacaggactattcctagccatgcactactcaccagacgcctcaaccgccttttcatcaatcgcccacatcactcgagacgtaaattatggctgaatcatccgctaccttcacgccaatggcgcctcaaatattcttntatctgcctcttcctacacatcgggcgaggcctatattacggatcatttctctactcagaaacctgaaacatcggcattatcctcctgcttgcaactatagcaacagccttcataggctatgtcctcccgtgaggccaaatatcattctgaggggccacagtaattacaaacttactatccgccatcccatacattgggacagacctagttcaatgaatctgaggaggctactcagtagacagtcccaccctcacacgattctttacctttcacttcatcttgcccttcattattgcagccctagcagcactccacctcctattcttgcacgaaacgggatcaaacaaccccctaggaatcacctcccattccgataaaatcaccttccacccttactacacaatcaaagacgccctcggcttacttctcttccttctctccttaatgacattaacactattctcaccagacctcctaggcgacccagacaattataccctagccaaccccttaaacacccctccccanatcaagcccgaatgatatttcctattcgcctacacaattctccgatccgtccctaacagactaggaggcgtccttgccctattactatccatcctcatcctagcaataatccccatctccatatatccaaacacacaaagcataatatttcgcccactaangccatcactttattgactcctagccgcagactcctcattctaacctgaatcgcgaggacaaccagtaagctacccttttaccatcattgacaagagcatncgactatactcacaacnatctaantctaataccactatctcctaattgaaaccaaatactcaantggcctaaaaaanaaaaaaaaaaaaaaaaaaactgtggcccgttngcccaatggacttgaatttggcaagcttagcatggcgccgattggagctcatttggccaattgccctatgggggcggattacattaatgggccgcggttaaaacgggtgcttgaaaacctgtggtaaccaattaaacgcttgggaaaaacctttttgcattggggaaaacgcagagccccccggggctttccaaattggccctcaggggaaggaaattggcgctatattggaaaagcggataaatttaaaaccttttttcacaagggcaaggggaactttttaagaaaactttttggggggccctggacccccccaaatttttgggggcgacaaaacgcccccattcccccctccctattcggcggccacccccctaggaagcgccctcatgggcgtggcaccccccctttggccg

SEQ ID NO: 519971 - DNA, 533 bp, Homo sapiens
gccgggcgcggtgctcacgccgtgtaatcccagtctcagggaggcaaagaggcgggaggatagctggagctccaggagtcgagacctgcctggcaatatagcgagaccccgggttcctccaggaacaaacggacaaaacatacaaacccaaagtgcacgaacacacaccacacacacacacaaaaacaaaactgttggtgggggccgcgctgccgcctgaggaagaaaagtttttaacaaacccactgttgtgtggggcggcggcgccacccccgaagtgatgtatagaggcgaacacggtggtccaatcagctgttgtgcccagaagacaaactccgtggtcacagcgagacaagactggcgtggattttcaccacaccacaaaagaaacaacccgcgcgcggcgacacacggagcgtggttgttgggaacacacctccaaagtgggcaatacgagagacccacagacgtggctcacacaacacagggcgcccccaccggacgtcgaaaaaaaattacccccgcggggtgcg

SEQ ID NO: 519972 - DNA, 151 bp, Homo sapiens
cccgacggagagacacgggtcttcgagcaggagttacgagcggcgacagcgtggggggagaacaagaaagctcagctggtggtgagtgcacacgacgtggatcgcatcgagacgggtagtctatcgtggccgggcctgtgtcgtaaaatgg

SEQ ID NO: 519973 - DNA, 206 bp, Homo sapiens
  misc_feature (76)..(76): n is a, c, g, or t
aaaaaaagggaattggagccttcccccgcccaaaaagtttttttttgacccccgggggggaatttttgggttttantggccccaaggggaataggcctttttccttttttttggggggccccttggtttgtttaaacccgtttcccaacccgggttaactggggggtataacccttttgggcccctaagggttccccccaccttta

SEQ ID NO: 519974 - DNA, 1064 bp, Homo sapiens
  misc_feature (278)..(278): n is a, c, g, or t
  misc_feature (439)..(439): n is a, c, g, or t
  misc_feature (539)..(539): n is a, c, g, or t
  misc_feature (556)..(556): n is a, c, g, or t
  misc_feature (563)..(563): n is a, c, g, or t
  misc_feature (603)..(603): n is a, c, g, or t
  misc_feature (616)..(616): n is a, c, g, or t
  misc_feature (648)..(648): n is a, c, g, or t
ggtgtagggcagtgctgctgtcttctgctggtctgactccttgagtatccccagtctcactccacctcctattcttgcacgaaacgggatcaaacaaccccctaggaatcacctcccattccgataaaatcaccttccacccttactacacaatcaaagacgccctcggcttacttctcttccttctctccttaatgacattaacactattctcaccagacctcctaggcgacccagacaattataccctagccaaccccttaaacacccctccccanatcaagcccgaatgatatttcctattcgcctacacaattctccgatccgtccctaacagactaggaggcgtccttgccctattactatccatcctcatcctagcaataatccccatctccatatatccaaacacacaaagcataatatttcgcccactaangccatcactttattgactcctagccgcagactcctcattctaacctgaatcgcgaggacaaccagtaagctacccttttaccatcattgacaagagcatncgactatactcacaacnatctaantctaataccactatctcctaattgaaaccaaatactcaantggcctaaaaaanaaaaaaaaaaaaaaaaaaactgtggcccgttngcccaatggacttgaatttggcaagcttagcatggcgccgattggagctcatttggccaattgccctatgggggcggattacattaatgggccgcggttaaaacgggtgcttgaaaacctgtggtaaccaattaaacgcttgggaaaaacctttttgcattggggaaaacgcagagccccccggggctttccaaattggccctcaggggaaggaaattggcgctatattggaaaagcggataaatttaaaaccttttttcacaagggcaaggggaactttttaagaaaactttttggggggccctggacccccccaaatttttgggggcgacaaaacgcccccattcccccctccctattcggcggccacccccctaggaagcgccctcatgggcgtggcaccccccctttggccg

SEQ ID NO: 519975 - DNA, 1591 bp, Homo sapiens
  misc_feature (276)..(276): n is a, c, g, or t
  misc_feature (805)..(805): n is a, c, g, or t
  misc_feature (966)..(966): n is a, c, g, or t
  misc_feature (1066)..(1066): n is a, c, g, or t
  misc_feature (1083)..(1083): n is a, c, g, or t
  misc_feature (1090)..(1090): n is a, c, g, or t
  misc_feature (1130)..(1130): n is a, c, g, or t
  misc_feature (1143)..(1143): n is a, c, g, or t
  misc_feature (1175)..(1175): n is a, c, g, or t
gggatcggcatacgcgggatgaccatacgcaaataccctataaattagttaacactcatccatcgactcccaccatcaacatctccgcatgatgaaacttcggctcactccttggcgcctgcctgatcctccaaatcaccacaggactattcctagccatgcactactcaccagacgcctcaaccgccttttcatcaatcgcccacatcactcgagacgtaaattatggctgaatcatccgctaccttcacgccaatggcgcctcaaatattcttntatctgcctcttcctacacatcgggcgaggcctatattacggatcatttctctactcagaaacctgaaacatcggcattatcctcctgcttgcaactatagcaacagccttcataggctatgtcctcccgtgaggccaaatatcattctgaggggccacagtaattacaaacttactatccgccatcccatacattgggacagacctagttcaatgaatctgaggaggctactcagtagacagtcccaccctcacacgattctttacctttcacttcatcttgcccttcattattgcagccctagcagcactccacctcctattcttgcacgaaacgggatcaaacaaccccctaggaatcacctcccattccgataaaatcaccttccacccttactacacaatcaaagacgccctcggcttacttctcttccttctctccttaatgacattaacactattctcaccagacctcctaggcgacccagacaattataccctagccaaccccttaaacacccctccccanatcaagcccgaatgatatttcctattcgcctacacaattctccgatccgtccctaacagactaggaggcgtccttgccctattactatccatcctcatcctagcaataatccccatctccatatatccaaacacacaaagcataatatttcgcccactaangccatcactttattgactcctagccgcagactcctcattctaacctgaatcgcgaggacaaccagtaagctacccttttaccatcattgacaagagcatncgactatactcacaacnatctaantctaataccactatctcctaattgaaaccaaatactcaantggcctaaaaaanaaaaaaaaaaaaaaaaaaactgtggcccgttngcccaatggacttgaatttggcaagcttagcatggcgccgattggagctcatttggccaattgccctatgggggcggattacattaatgggccgcggttaaaacgggtgcttgaaaacctgtggtaaccaattaaacgcttgggaaaaacctttttgcattggggaaaacgcagagccccccggggctttccaaattggccctcaggggaaggaaattggcgctatattggaaaagcggataaatttaaaaccttttttcacaagggcaaggggaactttttaagaaaactttttggggggccctggacccccccaaatttttgggggcgacaaaacgcccccattcccccctccctattcggcggccacccccctaggaagcgccctcatgggcgtggcaccccccctttggccg

SEQ ID NO: 519976 - DNA, 106 bp, Homo sapiens
  misc_feature (60)..(60): n is a, c, g, or t
taggggagatgaggtcttgctatgttgcccaggctggtctcaaactcctgaggacctgcngtcctggtgttttagcctcccaagatgctgggattgttgttgtgag

SEQ ID NO: 519977 - DNA, 378 bp, Homo sapiens
  misc_feature (2)..(2): n is a, c, g, or t
gnttcgactgatatacaaaacatgtctgcaaacgtgcctgatactagccaagttttgttgattcccacaataaaaatgtactggcattctatttgtattgcagcttgaaaattcaaatggaaatagcctgatgtatgtataccagaagaaaactttaaatacaatttaaaattaaaaataaattttgttttgttaattcacattaataaaacaattatcttaaaattggcatgatttcctgtttgatcttccagtttcatgttttagactcagcaaactctatcttctatagagttgattacttataatttcatagagccaagattcttgagaacacatcactgaaaatgaaatttgaattgtacgttttttggtcga

SEQ ID NO: 519978 - DNA, 1072 bp, Homo sapiens
agcggttcgagtggtactttcctgcttggcaaatgagggtactgacgttctgatccttgtgttacaaaccagaactggggtctgctcacctgacgctagtaacagtcacaacagtctacgattgcatgcgttgtttgctagcgaagatgactaggatgggcatattatttgctagggtgccaagcacaggacagctgggaagctcactactttaagatcctctagcctctcttagacggttacactcaatggcgtttcttagcatggaaagtgacgctaaatctctcagaacaattctagtaagttacatggccaagacttacaacattcatgcaccactggacggttatatcacgtggtgctttggctgtaatacaatgactagaagtaccctttggcatagtagacgtgggcttgtcaccagagctcatcaagcataggcattcccagaagacattgcgtccttgcattatggcaacgtctcggctctccacgcgaaaagcaagtgcgctctacgtacattgagacaaactatgcgtggtcttgcatgcaaaacaaaacgggaaactcgttgtaaacaggtcattggcgatctttaccgcgggaaccttgaaacatgtgtcccgcacaaggggagcgccactttaagtgaacagcgacacatcttctaggaaatgcaggagatgcaagcttgggcaaggaacaacgaatgatttccacgacgcgcattccaagggtcttacgggcccccttttattcattgacggcgctccttggagataccgccacgccttgcacctgagcgattctcttgccaacctattgtgtgggagacgcgcccaagaattgtctcgtcgaagaaccaaccggaatccttcccaaggtggtggttattgcattcctcttcagcaaagatcgtccacaattgcctattcacaaatttatactttaacatttcggcgcaacaacccggtagccgattactttggatcaaataaccctgaaatcctttcctttaaggggacctgcgttaggctcctttacacaagccccatctcatctaacacctttc

SEQ ID NO: 519979 - DNA, 171 bp, Homo sapiens
cacgaggggacatcgggcccgggaagctgtaccaacaaagcaaggggcccggtgccccccagtatccagcgggaactcatggtgagcaggtgggggtgccacagagactgcctgggggttctggacatgggggagggaactctgggctactctattgggggcacctacctg

SEQ ID NO: 519980 - DNA, 763 bp, Homo sapiens
  misc_feature (10)..(10): n is a, c, g, or t
  misc_feature (251)..(251): n is a, c, g, or t
  misc_feature (310)..(310): n is a, c, g, or t
ttcttgggtntctgttttaacacccatgtttggagggcagaagcacaatcatggttcacagcagcctcgacctcctgggctcaagtgatcctcccacctcagcctcttaagtaggcgggactacagacatgggccagcgcaccaagccaactttttacatgttttgaagagattggttcttactatgcttgcccaagctaagtttgaactcgtgggttgaagtggatcttcctgcctcgcgctcccccagngatcaccttgggggtgccagtaactgtccctacccaacatacgacaaggagtagcggtnaagtgagatggtggtaggtccagccgagtgccctggcaggtcgcatcctgttttattgcgccttcccctcccggttcttccccctcttcgtcgccttcctcctgctatcctttcttctttccctgccattagtttttccttctcccagctctgccccctcccggttctttttcctgcgcttgtctcataccatcccccccctgagacgtaaccttctttcggctaggttcggtcccggcctcgcctcctctcttttcattgcctatctctcaccatctcgccacactcccgctttcgatatgctatgctcggcgcagtacttgtgtctttattcctccctccttcctcccccgtagtcaggccgttcccctctgtactatcgagtaatggtttattgtaattacgcgttgtctcgaacccgggccgcggttccttttttgtttgttccactct

SEQ ID NO: 519981 - DNA, 1013 bp, Homo sapiens
  misc_feature (138)..(138): n is a, c, g, or t
  misc_feature (209)..(209): n is a, c, g, or t
  misc_feature (221)..(221): n is a, c, g, or t
  misc_feature (230)..(232): n is a, c, g, or t
  misc_feature (234)..(234): n is a, c, g, or t
gggctgatgggagcaggcatcgcccaagtctccgtggctaaggggctaaagactatacttaacagatgccaccctcactgcgctcagaccgaggacagcaacaagtgttcaaaggattgaatgacaaagtgaagaagnaagctctaacatcatttgaaagggattccatcttcagcaacttgactgggcagcttgattaccaaggtttngaaaaggccganatggtgatnnnanctgtgtctgaggaccttcagtcttacagcacagagtgctaaagcgcaagtcacaagcggaagattccagcatcactgatatcttgtgcacaataacacatctgactctcccaaatcagtgcaaactcgcctgcctgtcagccacacagcacctgagaacggtgatctggcatgcaactactatctactcccgtggacaagatgcagctcgctggcagattatcaacgaacgagaaaacttaccaaaggacaccacgtgacttcagcctgtagcagtaggtctcaagcaggggaaggtcatcattgatggttacgcgatggacctggcctctctatactaccaggtgtcttgcgacccatgatgtctgaagtcctcccgaatactcccaggaaggcagttgaaccgaagacgctggaataaccttgaaccacaacagacttaggacctctaccctgcataggtgcccgccacaaatagagtcgaactacacattagagagatggactgtcgacgaacacactgtcgcagagacacatcactccaaaacactctgatagaactccatatcagtagaaacttcacaaaatgcactgctacacacatcaaaacccaccagtccactcacactagcacctaaaaattcgccatccagcatactaatttattcatcaatcattactaaccacttaccatccctcccacagtaataattaacaacaacatctaatctacacacattctcactctctctacgacaaatcaaaaccatagatccatat

SEQ ID NO: 519982 - DNA, 732 bp, Homo sapiens
agctacttgggaggctgaggaaggagaattgcttgaacctgggtgacagagcaagactccgtctcagaaaaaaaaaaaaaaaagaagagttagagtaacccaagcggacaagcctgctcttgcccacttgccatgtgatgccctctgccacgtgaggatgcagcaagaaggcctccacccttccctgcagggcttggaaagacccatgaggacacaagggagaataaaaggaagcagccctgattgccatggctgggtcagggtcaggaggctaggactgctttatgtccctgctataatggacttatgggttttttaagattttttaaaatagattaactatagctcctagagctgactctactgataactttaccctggactccctccctgattttgaccttagtttgtgtggcgggcggggggatgagaggctgcggtccaaatggaatgcagtttgcctgtcctctatcagcatcaatgcatcacctttcccccgatttttacctcatgatatatttatgcatttaacgcatgtttattgagtgactgcaagcagcaaaatgcacgtaaaaagcaattttttttcttttttctttgtcctttcaactcctctctctggatttgccttgtccctgcacttgagatgaaagctaaccaataccacggattttctagccactctgagccattaaataaagaggctctttaaaacaaacaaacaaaaaaaaa

SEQ ID NO: 519983 - DNA, 121 bp, Homo sapiens
tctaagggatcccagactgtcgacaggttggtagatgcctgatagtaactattatgagtcctatctatgacttgaatatggcagaaggctacgtattatttatgatagtcaatttctgtgt

SEQ ID NO: 519984 - DNA, 1365 bp, Homo sapiens
ctatgcctaaagaaactgaagccagactgaagttttgcaccctaaaaaaggaacagcatggtttgagttacttgagcaaatgttggtggtccacgttaagacatatttttaaaacttcccaaaagctgtcgattcattaacacattgtagtcattttcaccatttccatctttggggggcaaatcccaagctcatggtgtacggctattgcaagtccagaacagtccatcactctggtgcttgttcaccatagcacagtcttcaacatggatcaccatcatacggtcacacatatttcccaatacactcaccagccgtttcaaacacaaaggcatggcttccacacatcagccacaggtcgaggccgagcaaacagggcgtcacactcgtcatctatggcacaaggttcaactacaatatgaaaccaccaacttccgtccgtgcccatttggccacatgccccagcgggggcaatcggcatcacagccaaacttggtcccacagccacctaggcacgaatctccccctcaaaaggcgcttctggcggcttccaccttcatggcgtcacaacacaaattccaaaaaccaattgtccacccaccccatcacacttttagttgtgggcccacgtcacaacaacacaggccccgttcttccacatcgtgtttacacattcactatcgcaaatttaaggaacacttccgtagatattggccattgggcccacattctaccacggcccctacacgtggcatgccccccgtcacgcacaacacagctgggcttccaacgtagcggggccgcacacccctcaccaacagacacagacgcaccacgtgccgccacaccacagcgaacagcaccaacgacccacacacagaacccacacccacacaccctacacagccagcacaacacaccacactactcaaacgagcaagcagaggaacaccgagtgcctagatcacagcaccgccggcaccacttcaggaagacagaccacaacaccaacaaaaacgcaccagttgtgagtctgaatcaaaccaccgcactaaacagcaagctccaaccaagcaagagcgcgggcaccacacaacacaaaaacagactggagtcgaggccaccactctacgccaccacaccgcggactcgcgatccgcacacagacacaaagcaaccactcacatgagacgacgcagacctagagcacacaccaccgaaccgccaaagacgaataacccaacgacggacgctacatcggaggcccaacacaacgacagactacgtaccccacaagtacgacaccaccatcagcagtaccgcaccaacaacacacacaagcaagatacactatagtcagaacaa

SEQ ID NO: 519985 - DNA, 443 bp, Homo sapiens
  misc_feature (138)..(138): n is a, c, g, or t
  misc_feature (209)..(209): n is a, c, g, or t
  misc_feature (221)..(221): n is a, c, g, or t
  misc_feature (230)..(232): n is a, c, g, or t
  misc_feature (234)..(234): n is a, c, g, or t
gggctgatgggagcaggcatcgcccaagtctccgtggctaaggggctaaagactatacttaacagatgccaccctcactgcgctcagaccgaggacagcaacaagtgttcaaaggattgaatgacaaagtgaagaagnaagctctaacatcatttgaaagggattccatcttcagcaacttgactgggcagcttgattaccaaggtttngaaaaggccganatggtgatnnnanctgtgtctgaggaccatactttcaggcacagtgtggatggatgcccatagcaggcgagtgatgttgcagatcgctgatcctttgccaagtaacacatcggctccccaatcacgggcactcgcctgctcgtctagcgatagacctgagtagagctgatttgcatgctagatacttttctcccgtggacaagatacgcaggcagagagctt

SEQ ID NO: 519986 - DNA, 187 bp, Homo sapiens
ggaccccgagacatcctgcctgctccccatatcctgcttctggctgcgcaggatggcgctggccctgcggatggctgccatgcgcaaggtcggggcggtacttgtctatgcggactcatgtgtctagatagctgctgagcgtggcgcgagcaatcttgttagatggtggtccgcacataaggaggtg

SEQ ID NO: 519987 - DNA, 924 bp, Homo sapiens
  misc_feature (632)..(632): n is a, c, g, or t
gatgatttatcggtctaataacgacaatgcgtagtgtccgagtgtttttccggtcaagcagggtagtgaacacgcgaagaattacatgcatgcaggctttattttaaatgccgatacacattactctgttcaagctgcgttgagactgttataacctgggcttgctactatgaccttcgtaagaaactggctccacgaagaagtaatcaacacctgacaactctttgatgattcacatcaggttggaacctactgtaccactaatctgcatcaaggtggtctctttctgctctactagtgcagtgtttacgtcagttcttagttggcaataggttttccagttcgtagttctataagtcgtgtcttcatgctgaagaatctggtccaaagcatgtagtcattagtccaagcacttaaaaagtggcgctctagccacgtattgaagttctgtgtctacacttgtggtggcctacgaatgcggtgatcaagaagcgctccagtctttttaacagatgggcataggaagaccggcaaaacattttcctatacaggtgcaattagattttcaagatgtactttgctgcctgtggttccttaacacaatcttttgtactttacacgtgtacgggtgncacttgagcagatactgtgagggtcattcgtgtatggtgctagtttcaagtaagtgctaggtttaggcccttgctacacttttgccacataactttttacaacagtacttcttttattgcacagttcacgagaatctcagtatatactgtctatgttgtgcgtgtccttaaacttccaagtcttacttagtctcttggagattgttgaacgcagcttgtctaggaacggggattgggactagaattcttaaaatttcatttgggacccctggggaatgatagttggggaaga

SEQ ID NO: 519988 - DNA, 119 bp, Homo sapiens
ttacagaccacctttcacaaaacgaaatgctatgactgtactcttgatatctcgaactcgtcaaaaatatatcctcagtacaccagttgccaaagctcttgctgtctctaagagaaaga

SEQ ID NO: 519989 - DNA, 145 bp, Homo sapiens
cacagaaacacacaaaacacaaacaaacaaaccaccaaaacaaacaacaacaaacacagccaaaaaaacaacacaaaccacgccacacacacaaaacaaaaacaagatagaatagaactactattagggcgctaggggttttttc

SEQ ID NO: 519990 - DNA, 1576 bp, Homo sapiens
  misc_feature (1576)..(1576): n is a, c, g, or t
ttgtcgcgacggagccgggcctcttcgaccgtcttgagacggggctggcgagaagggcccctcacggagattgccaatgggcgtctaaccgcggcagccaggccccgtcatctacgatgagaccgcacggaaccacggcatggacgcatagactgacaggacggcacgaacacgcatgacgacgaccgaagaagggcactaccgaccaggaggacatgacacagaaaacacgagacaccatccgcacgtacacaacgagcaagcaggcaagggactcctacgagcacatggacgctcacgatgctacacaccctacatgacgcaccgagaggaaagcccacactccacaccgcacgcaaacaccatgcagacaagacactcatacacgcaccccaagggacagcacatcgcgaacgccagcaagcacatgcgcacgcacggcccaccaccgaccagcaggcagacgcagctgacacccagaaacgcgagagcataggacaacagaccatggaatacgagccagatgagcaatagatccgacacacggcgaaacacccaaagaataagaccaacaacagaaccacgccacacgcaagccgaagccacacgaacaccacccacagcaacacaaaccaaccatgaacaaacaagaacatacacctacaaaggtccatcaacaccggcacaaaggcggactaaaaaacaccaccacagacgcgacactggcctccaccccccgaacgacgaccacaagagagacaccacacagcccccacactgccaacacaagccaaccacaccaacacacgcggagccccacacacgcgatgcacgcgacggaccgcagggtcgctggtgaacccccaactaccgagacaccacacaaccatacaaagaacacccacagacacgtaccgaccacgcacacacggcagttgcgaacgagaccacgaaagaggacacgcggccgcagtgcccgcacacaagccccgcacgaccagcccccctgacacgcaacacaaaccagaagacaccaactgccacacccccgacagacaccacgaccgccaccccccccccacggcacagctagcgcgcccacgaccacccaagcgcccacaccgaaccacaccaccaccgcaccccaccccccgccacaactccgaccccagcaccaagagcacggacacacggcgcgcaagacaccataccacgcccaccgacgacacaaaccgaagaacaacaccccgaacacaacccacaacaaacacgcccgcactccccaccgcgcccaccccccccacacaccgcccagacgaaaggagcacacgacccaacacacgacgacgacacaaccacaaccgaagaccaagccaacgagccaccgccagccacgaccaaacccaacgcgaactagaaggggcgcaacaccacccagacgacaaaaacgaagccacacataagcagcacagcgcaagccgcaaccatacctacaaccacataaccacatagcaacaccccaacgccaaacacaaggacggaccgaaccagactatcacagacaaacagaaaatcn

SEQ ID NO: 519991 - DNA, 555 bp, Homo sapiens
tttgaggagctattttcttttaaaaatttaaacttttgtttttgtcctttttttttgagacaagttctcactctgttgcccaggctggagtgtagtggcacgatatctgctcaagggttcaaccaattctcctgcttcagcctcccgagtagctgggattacgggcgtgtgccatcacgcctggctaacttttttgtatttttagcagagatgggttttcaccatgttggccaggctggtctcgaactcctggcctcaagtgatccgcccatctcggcctttcaaagtgctgggattacaggcatgagccaccgcccccggccaataagctttttttcttaaaaagtactcagaagacttttctatccattcattctgttaacgcgcgtcagtgtgaagagaccaccaaacaggctttgggtgagcaataaagcttttaatcacgtgggtgtaggccgacttagttcgaaaaaggagtcagcaaagggagataggggtgaggcagtctttataggattcgggtaggtagtggaaacttacagttacagggggttt

SEQ ID NO: 519992 - DNA, 365 bp, Homo sapiens
cagttgcatgtgctccgtggtgttgagaagtatcgtattatctcctaaacagagtgaagacccgtatcaaagggcggctgatggtttaaaggaagtatgtacatggagtctaatcgagacatgcatgagttacatctcgttatgagccttagtagtgtgggataaccattctcaagcacagctggacgtgcacagcttgtcaagtatgctttctcaggcacgggtaggtaaagagtctggagaaatgggttctctccatgcccaatgacaaagcaagacggtcctaggtttgaggttaagagcaggtcccattgccgggcggtatccgcagctcacagctgagtttagcagtggaatcgagtgga

SEQ ID NO: 519993 - DNA, 230 bp, Homo sapiens
gacattgatggctgctgactgcttagggtggtggttgctgaaggttgggtgacagtggtaatttcagtgattttggtttggttttgtttctttaagagacagggtctcattctgtcactcagggtggagtgcagtggtacgatcatagttcactgcagccttgacttcccgggctcaagcaatccttctgcctcagtctttccagtagctaggaatatcaagaatcggca

SEQ ID NO: 519994 - DNA, 383 bp, Homo sapiens
  misc_feature (221)..(221): n is a, c, g, or t
  misc_feature (321)..(321): n is a, c, g, or t
  misc_feature (332)..(332): n is a, c, g, or t
ggtgtctcgctctgttgcccaggctggagtgcagtggtgccttggctcactgcaacctctgcctcccgggttcatgtgattctcctgcctcagcctcctgagtagctggtattatgggtgcgcaccaccacacctagctaatttttgtatttttagtagatacagggtttcaccgtgttagtcaggatggtcttgaactcctgaccttatgatccacccgnctcggcctcccaaaatgctgggattacaggtgtgagccactgcacctagcctatttatttatttttaattagagatgggatttcgccatattgcccaggntggtctccaantcctgggcacaagcgatctacctgttttcaggcttcccaaaagtgctagga

SEQ ID NO: 519995 - DNA, 725 bp, Homo sapiens
  misc_feature (266)..(266): n is a, c, g, or t
  misc_feature (524)..(524): n is a, c, g, or t
tttttttttctgaaacatattctcaccctgttcgcctaggaaactttattactttcccagtttatcggtgaggaaactgaggctttgaaaggccaactgagcctgtagggtggaggggcattatgacactgtgcccctgtgacatgtgtaggggtgtggaggctgtgccctctctcaccacctgtgtgtgtgtgacgcttgacgccacagccctcgtgtgcatctctaagagcgcgtgttcctttctcccaccacctctctctgtnggagaaatgtgtgagattgtgcggaataccacaacctctcacttaagggatgtgttgtggccagggatgtgtctcatcgaccccacatgtgcccacagtgtgatctcttctcacctatatgtgtgcgtccgaggccgtggagtgggtgtgggcataccgtgcttctccacttctcttctcctccgtggctatatttttacttatctctctctccaccgaggccaccctcttctgtgtctctctctcttataccatatnattttaagtctcacacgccgtgtgctctatatatgtgtggctctatatgtgtgtgcctgtgtaactctcccacatctctccccccaacatatgaaatctcttataaccccagaactctcatctcgcgtgtgcgcccgcgcctcaaatatatagaataggggtgccctcaggataaaatataggcgtgagggggggtattaa

SEQ ID NO: 519996 - DNA, 176 bp, Homo sapiens
gtatacctgacatagctctaggtcacagaccccacagtaggagggacgcataacattcattcatagttacgcctgtttaattctcaacttaccctttagttcggtcctgcaaaactaaaccactgagaaaaaaaatatcaggctgggcgcggtggctcatgcctgcaatcccagca

SEQ ID NO: 519997 - DNA, 590 bp, Homo sapiens
  misc_feature (9)..(9): n is a, c, g, or t
tcgtgccgntattttgaaaatgttctgtttgcaatcagatgcaagaacccaaagttagaaatcaggtttaaattgtgcattttttaaacagcattatctacaaattggaagaacacgaggaatttttcccagcatttcaggcatttactaatgatctacttgaaatcttagaatggctctttgcttttagaagaggagatgaagcttggtatgaaaataagggaatgagtcaatgaaaacttgataagaagaataagtgaaagaagtatctaattagaatatatagcctactgaacataaaggaagttttgtgaccagtcttatgtgcagtggggaagcaagggagacaatgagtgagcttgctttaggcttgtcctcatgtttaaaaagatcacagcaagtgaaaatgtaatttgaaagttaaacttgagatgaggtatgaaactgtataagtgtgttgtctgatatcctgaagagcctggtttcatagaataatatgattcttgctttgggattgctattaacttaagcagtgatgttctcatcattcataaatatttggcacattaataaacatattttaataggga

SEQ ID NO: 519998 - DNA, 626 bp, Homo sapiens
  misc_feature (9)..(9): n is a, c, g, or t
  misc_feature (285)..(285): n is a, c, g, or t
  misc_feature (325)..(325): n is a, c, g, or t
  misc_feature (328)..(328): n is a, c, g, or t
tcgtgccgntattttgaaaatgttctgtttgcaatcagatgcaagaacccaaagttagaaatcaggtttaaattgtgcattttttaaacagcattatctacaaattggaagaacacgaggaatttttcccagcatttcaggcatttactaatgatctacttgaaatcttaggtaagatctctggtggtgatggtgaaattttgagtcttaaaatgtcagtgcatttaagaaaagggtgttccttggtcactggattagtatttttacctagtggttggaaaccantaacagttctggaaacacattccttacaagcagttagagnttntttggattagtccatagaacagaaacacagacccttaacagcaataggaactacctttgttggaggaccttttcatgagagatggcatcattctgtccatgcctagtttaaccctggctctgtcattgctaatgagaaatattcttaggatttatgatcttaaaaggccctcctccctcctttttttttcttaagatacccactttattcaaaaatttttaaatattccaaatatatttcccctttgttttttgagggaacataaagtcttaaattctgggggaaaggaaaaaagaaa

SEQ ID NO: 519999 - DNA, 705 bp, Homo sapiens
ggacgcgctgggccatactgcgcccatagcggccgcgagtggcgctgcttggcctggcttggctctccagagggctgtgctcccacccggtctgcgcagtgccgtgacgcggccgtcttcgttgtggcttctgcttagcaccctggtgcacaggctcctgtcgatggtcatcctaggtgacctgtgtccaatcgccctaccacagtggtgatccttcttccagccgtgtgaccctgcccttgtaccttacctagaatgacctcgaagctccgcgacgtaaccacatctgtcatcatggaagtacaagtctttctgccgggaccgcatcgcctgatgccattctccccggccagcgtctacaaccagcttcaatgcccagcttggcagcctgggaacccaggctacaaccccatacgttgagtgccaggacatgcgtgctgcacctgtcagggtcgtgtggcaccaagcagggcaacgctgtgaccctgggagattactaccaggccggaggattaccatcaccggaaatgcttgacctgacctttgaccagacggcgtggggggacaagtggtgtgtattactgctccgtggtctcagcccaggacctccaggggaaacaatgaggcctacgcagagctcatcgtccttgtgtattgccgtcggcaaaagcagccaactcaggtgtacccagacatttatgaccg

SEQ ID NO: 520000 - DNA, 1048 bp, Homo sapiens
  misc_feature (568)..(568): n is a, c, g, or t
tgcccctcatttacataaatataatactagctgtaaactgtctcatcttctaggataggacatatgtatggatcggctcactacgctcatatgcctccctatcatatgcctagaaggaatgacatactgatctgcatgtctattatagctacatctcataaccctcaagacccattccctcttagccgaatattgtgcctattgccatactagtcgttggcggtctgcggaaggcatcgggctgggcctaagcgcctactaagatctacaatctccagagcagcagtagtggcctagacgtacgtatcgataatcgtacatctacttgccaacttgctagaagactaattgcgttcaccgaaacaaagttgatatgtactactcaactgagtattagactatcgcccacagagaagagcacaattagaatttctgaaactcgaaaaaacaaagtccaacgcacaggagggccctcaagtagagttagtcaatcagtgccacttcataacataatatgtgtatgtacaacccaaggaatgcattcgagagtatatccgtaattttaggncatgtgtccaccccggaaggcttttatgaccctcccgagaaaccccgcgtaagacaaggcgccgcccgatccttaaaggtacgtaaagactaaccgtggacgtccataaaccccatcaaacgacatcgatgggcaaaggccagacggccacgttttagtccaagatggagacccacataatcgacggaaagaagaaaactcataccgtcgtctaataacttaattcctccacataagaaaatcctccagttaaatcacgttaacaattgcaacaggccaaccagggaaagctaagtgcagtcatcgtctaataattcgttacttcacggaagagccagccatatattaccccaaacttggggaatactcaattcagccccggatggaggcaaaccagacacagaaagcgcctgaaacgccagggcaacaaacatcactaatgacaaaacacataagaaggggccagtctgcacctaagtc

SEQ ID NO: 520001 - DNA, 100 bp, Homo sapiens
acacttaagtacgacaagcatactaactggctacatatactaactaaagtaaattagacatgtcaagttaataccactacccaaaataccagagatccaa

SEQ ID NO: 520002 - DNA, 114 bp, Homo sapiens
gactctcaggatctctttatccccaacacgtaaccttcctgatcatgcatatttattttgagaattgaatgttttttggccaggtgcagtggctcacgccctgtaatcccagca

SEQ ID NO: 520003 - DNA, 366 bp, Homo sapiens
  misc_feature (70)..(70): n is a, c, g, or t
  misc_feature (79)..(79): n is a, c, g, or t
  misc_feature (275)..(275): n is a, c, g, or t
  misc_feature (352)..(352): n is a, c, g, or t
tgtcacccaggctgaagtggagtggtgccaccatggctcactgcagcctcaacccccaggctcagatgancctccctanactgccttctgttttctgagtaggtggctgggactacgggcatgcaccaccatgacggggtaatttttttttttttttaattttcaataccagcctggccaatatggtaaaaccccatctctactaaaactacaaaaattagccaggcatggtggcgcacgcctgtagtcccagctactcgggaggctgaggcagnagaatcacttgaacccgggaggtggaggttacagtgagccaagatcgcgccactacactccagcctgggtgacagantgagactctgtctc

SEQ ID NO: 520004 - DNA, 287 bp, Homo sapiens
agattattggggctgttcatattatgattcagaatcattttctattgtggtattataggttggttaaaatgatggcccttttgatgggttttgttgtgttttgtgaacaagtcgttactgtgtccattattggaatggaaatatccccactggatcatgaggggggatttttattttatgggtcccccaggattaccttttgacctggaatcaattaagaaaattttttgaaatttaatggatagggcctttatttatactccattaatttttttccaaaaaaaaaa

SEQ ID NO: 520005 - DNA, 186 bp, Homo sapiens
gttgggtttttgagttttaccccccactagttcccactgaattttgtaacttcctgggttggcatcctctgttccaattcggcccttgctttgtgtcatttcagtcatttgacttaaaaagtgcccttcaaaaggaccctgttcactgcggcacttttcaatgaattaaaatttatttttgtttta

SEQ ID NO: 520006 - DNA, 118 bp, Homo sapiens
  misc_feature (13)..(13): n is a, c, g, or t
ggtagatagtgtnggatacaaggtcctactaagatgacaaaagaagagttaaatgccctcaagtcgagaagcgatcccaggaagcattggaagcggagtgaggaagggaaaggaagaa

SEQ ID NO: 520007 - DNA, 462 bp, Homo sapiens
  misc_feature (17)..(17): n is a, c, g, or t
  misc_feature (240)..(240): n is a, c, g, or t
  misc_feature (406)..(406): n is a, c, g, or t
cccactcggtttttccnacgggaacaatgtgggcagggcgtgagcggctcgtgcacgcggaccgggcgttacctcctgccgatctcctctgccgcaggaactggatgttgttgcgctgtcggccagctcggggtactgctccaccgagagtacgtagtacccgtcgtagccctgcaccttgccggcgctcagcactgccgcttctcgccctccgtccagaggcgcgcgccctcctcgccngttcggcaacgctgctgctcgcgcgcccaggcccggagcgagcgctgtcgcgcctgctccaggatgcgcgccttctcctcgtccagggtcatgccgtagcgcacgtgcacgccagcgcgccgaactgcatctccacgtccgcgaacctgcgcgtcctgccgttcancaccgtggtggactgcgacaccgtcacgttgatgccgttctccagcgttgcggcgc

SEQ ID NO: 520008 - DNA, 1103 bp, Homo sapiens
gggaacgccttctgggagatgaggacacctaaggctgggtagacgtttttaccagctgaaggacattgagggtacatcctaagtttctatcatcaaggtagttctgttaggctatttcatatattcatgcccaaattagtggtttgagagccgtgcacttacctgaggatggcgaccattcaaatgtctaccatatgtcaaggaacggtaacacaagtgacgtgacgacacggaacgactgtgagcggacgtacactatacgactgaagactgctcctctctaggggggcaagggctcctctgttgcaagcctagcatttctgggcaagaatgcatgccctgtagtgatcaggttgtccagttttgtacggaggagccagaacttctgatttctagggtaaatatctactgatttttacatgctgatcccttattcatctttttcacagtaatccagatcccaaatatgggctccgttgatgagctgtctcttaacttcccattggtcttttcaggccagtgcttaatgggatccttcactacagcactcaggctcccattgctccaagacagccactccactgaggctctctctaggaattgacgtggttcatttacttgagtcatcgaagacggcttactctgactaccacaaaggaatttggcgcgacagtacacacaagaattagagccaagagactatgagcggcctacatcctccttaacactgactgcatactgctactatttcaacttgactcgcgcctaattaccatccacatcttcggaccatacccgactcacacgtctgcactccacacgaaatcaaacctcaataccttcctctccccccccaccacttcttcacatacatcaaaacacataaatcgtcgtaacagtccagtcaccggtacaaataagctccccgctccaaattacaagactcttacccacaagcaaaagataaacaacaatctacaacaatcactacaacgtctcaattctatacacacttcttttcatcaatcttcaaaatagtaataaactctagtaaaatctcagaaacacactaatcacccagtaaacgtacctcaaattcatcc

SEQ ID NO: 520009 - DNA, 175 bp, Homo sapiens
ccgctgatggcctcaggtggaaacaggctgcggtgggtggggatgagggactcacacagcattcctggaccggtagctcagaaattggacccatcgagtcctgacttctggatcgcggggctggggcaggttggtcctgtcgcttgtcttttacctacttggtctctcggatgtt

SEQ ID NO: 520010 - DNA, 493 bp, Homo sapiens
  misc_feature (112)..(112): n is a, c, g, or t
  misc_feature (126)..(126): n is a, c, g, or t
  misc_feature (128)..(128): n is a, c, g, or t
  misc_feature (133)..(133): n is a, c, g, or t
  misc_feature (140)..(140): n is a, c, g, or t
  misc_feature (290)..(290): n is a, c, g, or t
  misc_feature (328)..(328): n is a, c, g, or t
  misc_feature (348)..(348): n is a, c, g, or t
  misc_feature (357)..(357): n is a, c, g, or t
  misc_feature (359)..(359): n is a, c, g, or t
  misc_feature (364)..(364): n is a, c, g, or t
  misc_feature (385)..(385): n is a, c, g, or t
  misc_feature (391)..(391): n is a, c, g, or t
  misc_feature (415)..(415): n is a, c, g, or t
  misc_feature (440)..(440): n is a, c, g, or t
  misc_feature (449)..(449): n is a, c, g, or t
  misc_feature (460)..(460): n is a, c, g, or t
  misc_feature (472)..(472): n is a, c, g, or t
  misc_feature (475)..(475): n is a, c, g, or t
aggaggcctgtgatccagctccctgcctagcatccatgacctgttggatgttacctccaatcagtttcctgtcctacctcctctttggcttgacctatatgcctttaggggngcctttcttctttntnggggngcccttntctaaccccttgggaagcctgatcccggtgtgtggcccagcttgttcaggccctgggatgctgcatctccaggcaactatgcactttcccggggagagaaccagtatgagaagtgggggcagggcacacattcatctttgtaggaaggtntggcctggggtcgggtgaaggagggcccaggtcagttntggggtcccagtgacctgcnttgccattntnctggngccgctgctgctccctgtttntggagntggatgttccccagctggcagttnagctgcctgagccaatgtgtctgtntttggtaantgagtgaaccntaataaaggggnacntttggcaaaaaaaaaaaa

SEQ ID NO: 520011 - DNA, 515 bp, Homo sapiens
  misc_feature (293)..(293): n is a, c, g, or t
  misc_feature (296)..(296): n is a, c, g, or t
  misc_feature (317)..(317): n is a, c, g, or t
  misc_feature (322)..(322): n is a, c, g, or t
  misc_feature (348)..(348): n is a, c, g, or t
  misc_feature (363)..(363): n is a, c, g, or t
ttattcgtgttgcactacacgtcaatgtctttcaaaacagtacttgaaagatactgactaggtcaggcgtggtggcgcacgcctataatcccagcactttgggaggcagagacggacgtatcgcttgagctcaggagttccagaccagcctgggcgacatactgagactctgtcttgtataattaaattaaaatttaaaaaaagaagagataaagacccgtgtttaaaatttttaaaaaaggggggaaagtgtaatgcaaaatgtggactatgccagctatgattgggaaaantantttttcatacagcattatctntaganttgtattagcagcatactggtcatangcgttttgctttccncaaatatgatgtggtaagctactttaaagtgtggtggggctttcttccgcatggctccttgaggggttgagtcccaatttatccaattaatttgggtttagttttgatatggataagggagaccagcttcattcatggtgcaacacgaataa

SEQ ID NO: 520012 - DNA, 255 bp, Homo sapiens
tatgtgctgaggtactctcgaggattcagtgctactccacaaaagaaagcggatagtggattccgaggcaggtgcagaaatgaggagcgcggagtgaccggtcagtggggagggggattctttcttggagtgaacgggaacgttctgaaatgaggtcgtgatgactcaacaccatgggcctgtacacttgaaaagggtgaaattggatgatatgagaacttcatctcaataaagcttgtttgtggaggtagcact

SEQ ID NO: 520013 - DNA, 278 bp, Homo sapiens
tcggccctggtgagtcaggtctgggggaaacgacgatgatgttggtcaaagggtaaaaacttgcagttataaaatgagtaagttggctggatgtggtggctcacgcctgtaatcccagcactttggggggatgaggcgggtggatcacgaggtcaggagttcaagaccagcctggccaatatggtgaaaccccgtctctactaaaaatacaaaaagtagccaggtatggtggtgggcacctgtaatcccagctacatgggagacctgagcaagccagg

SEQ ID NO: 520014 - DNA, 310 bp, Homo sapiens
agcaactcaattccaatctgtacaacctaaatagtagttacagtcctctattgtacaacatagttacactacatacacaaatatacaatacagccaaacaaccttccatggtaagatagcgggaggtacccagctaactatcaccatttagtcactactcatagtaaagtagtcataccatagttagagaagaaagaggcacagtactaatcgtactatatgaattttcggtgacagttgtcaaatttgtacagtgaaatctgtaccccctcattttagtctttttaccctcctttcaagttcctcctgg

SEQ ID NO: 520015 - DNA, 150 bp, Homo sapiens
aagtcgagaagccagctgcctgtgaggtgtgtagcttgcacatccagccaagatgccacgtcttgctcacggaaccatcacatactcataacctagaagttttaccatgtaaaatataccatcacgctcatctgtgagttacttgctatt

SEQ ID NO: 520016 - DNA, 297 bp, Homo sapiens
gaggatccccgctctgcgtgagtaagacagacagttgcggtgggtgtcatcaaagcagtggacaagaaggccgctggagctggcaagagtcaccaatgtctgcccagtcaagctcagagaggctaaattgaatattatccctaaatacctgccaccccacatcttaatcgagtggtggaagaacgtgtctcagcaacgtgtttgtttcaagtgggccatttaacgtttagatagtaacaagactggttaatagataacaatgcatcgaaaaaacctatcagaaggaaagcgagaatg

SEQ ID NO: 520017 - DNA, 210 bp, Homo sapiens
ggattctatgtttaccatgtgaccttctgcagcactaaagatatttggaatatcaatcatgatgaggcaatttctgtataaaacgagccttgaaatggaacattgttgttgagatcaaatctccctcactcctcatcaaaaaatggtccacgttgcaataaaatgattgtgagcataattacataaataaacaaaataataacatacagg

SEQ ID NO: 520018 - DNA, 83 bp, Homo sapiens
  misc_feature (5)..(5): n is a, c, g, or t
  misc_feature (35)..(35): n is a, c, g, or t
agagncaacaaaggtctactgatgtgagaacattnggccccagcaacacgtcattgtgtaaggaaaaataaaagtgctgccgt

SEQ ID NO: 520019 - DNA, 912 bp, Homo sapiens
tggcactgggcgttggagctgagcctgatcgcgagcagcaggcgtcagtcacttccaggtcgtgggggcactcaggtccagcagaccacctgacctcatgcccctatggacagcgacctctcatgaggatgaggacctgcagctggccatggcactacagccatgtcagagctggaggcagctgggaagaaacgccgcgagatgtgttcttgcgctggatgccgtggttccagaatcgctgcaacagaatccaaagcagagacacgacgccatatacacacacacatgacgctgagagagggggacaccatccaatattcataccacaccatcacaccgagtgacatgcagtgtcgaacgaccggaggacctgggagtggcggggctgagaaggcccagagagtgagacaggtagagccaagaaagactacaaagcacatgtaggcacaacacctacataccactatgaggaaagataaaggagaggactaggcatacactagagagagaacctaacaaaaaaacacacaacgagctagacgcagtagtgaccacagggacatccaaattaaaccgttggaaattacgaaaatacagcccggacactcaggacagcgcggaacgcagacgaggaaggaacaatgaggatgacacgagacacgccatgagagaccacaaacaaataggagaaacaacacacaatggacaagcacacgaacgccaccaaggggccaccggcgcgatagggagccagcacacacgaccagcggaaagcagaaaaatgagcacgagacaacacccaagagaacggcacgcaaacataggacaagaagaccctcaaccaacaggaatacaggcgaccactagacacaagcgggccagtcaagacacgcaaataaacaaccagcacga

SEQ ID NO: 520020 - DNA, 1015 bp, Homo sapiens
ggagaggctctctacctggtgagggtttgctggggaacgatggatgtatccctgcgcctggccactggttgcatgtgcctgctggactgtgcttggagctggctgggccttacatgcagctcggagttgctggagtggccaggagccgtgacggggtgctgctttgacctgcgagatggtggctgctgccgcctgtgggaagcctgtgtcctggtgcccatgtcctggtgggtagagaggaagtggagcacatgatccagaagaaccaatgtctcttcagcaacaaccagtgtaaaggttttgcttgctgccttgcttatctctctgagtcccagaacgctggcacattaaccagagcaaaaaacattgcccaacacacagctgacagagataccctagcaatccaatggaatggagaccattacacagggggaaaccgaagaagctagactcagatcagctggaaagggctacccctgcaagacattgtaccgatacgttgctgaactccatagaacagtaccaatgctcatgtcagcggcttcaaaacacaacgaacccagtcaccaagcaacaagtggcatcatcccttgtggccagattccaactgcaaagggcaacccattcagaaagactcaagcacttggaagactagagtgtgattctggccaggatcccatatttgggccagacatgagccagcttaccgtgactgctcagcccttgggtccctcttggtcgttgtctcaccaggaaagtacacggtgcctgaggcaggattgggccacagacagcctctcaattagggtcccggggcttaaatttcacctccgttggtggctccccctttctggcaacgggaggtccttggacggtcaatgaccagcggcacgcgcagggcgtatcggcaagcacctcgggcggacatggaggggatcgacagaatagcgaccggatgccatactcccagacaccacaaaccgtctcttgacgcgttacagctgtcacggccact

SEQ ID NO: 520021 - DNA, 954 bp, Homo sapiens
tcgtgaaaactacccctaaaagccaaaatgggaaaggaaaagacacataacaacataagacgacaaaaacacaaaaaacaaacaaaaccaccacaacaaaccaacaaaacaacaaaaacaaaaacaacaacaaaaaaaccaaaaaaaaaaaacaaaaaacacaacaaaaaaaaaacaccaacaaaaaaccaaaacaagaataaaactagaaagcaaagcgagaagcagaaataaacaccagagtgataaactaccaatgtggaaatttgtgatggaccaggcaaggtacaaaataaacaaacataaaaaaagccccatagacacaagaagacaaaagacaaaaacatagactaacagtggacatacacagaacaaacgagagctaaaccaaaaaaagaaagcaagcgatttatataggaaaagaatgtagtcgaagtaaacgaccaatgaagaggacagacccgagaagcataacccattacaagctaaacacacagaggtagtgaaacaagtaataaagtacgggagagaagcgagaagaaggagatccagcgtagagccacccaacagccgaaagagagaaagcgggaaagaagagagggaaggtcatgcgacgatacgatttaagaagagagagaggctacgaggcccgagacaaggagcagaaagaccagaacaaaagaaaaaaccacaacaaaaaccccaaaacaacaaaccaatacaccaaaaaaaaaaacccctaaaaaaaacaaccaaaaaccccgcaaaaaaacaaacaaaccacgcgccaaaccaaacaaaccgaagccaggcggccggaactacaccttgtggggttgtgcttgtcttgttggcggtgggtgggttcttccgttggggtgcttgtgtctgcgggggggagagcgggtgcgccgtggaggagcgggcgggcgggcgggcaagacgggacgggtg

SEQ ID NO: 520022 - DNA, 195 bp, Homo sapiens
aatgggagcaagcatgtgtattatgtgcgagtactatactggaatctatacacatgagaatcattcattcattgtgcctccttcaaagaaccctcaaaatcctactgaactgtattacactgttaaagattatgtgcaccatcccacgtatatttgtggcattttatgactacccagcataggccccggtaggca

SEQ ID NO: 520023 - DNA, 145 bp, Homo sapiens
aactgaacggaggaggaatgtcctataagataccatatgacagacaggaacccacttagagtggcacacaaatcttgacttccagctggaacagtacatctatcacaggccacgtgatggcatctatatcataaatcacaagagg

SEQ ID NO: 520024 - DNA, 985 bp, Homo sapiens
tccattggcatttaactttatatttattttggcttaaaaaatgcatatccggtccacgcaaaaggtgcaaaggacaaaaaccaggggttaaccttgggctgattgaaaaatctcaagccagggagtgacatttcatagttctcagtgaacaaccataaaactaggagaaaattagaaaagtcacagcgtggttaccacagagcacgcccaatttcacagcgtgtcctcctctatgaggaccttgggctaggggtgaagagaaagcctgtgtgaaacacgaggggccctcttaggtggactggcgcttacagtgtggcagaatcttcttcttttctacccaatcttcttataattttctcttcgagatctcagggctaccgtcgctctccacaaagagcctccaactcaagagaggcggtgtttcaacaaagaagaggtccccagaattctagtcgccaatatatacccccagaaatttccctctattctcctctttgtggggatacaaatattcaccgcccatatattatataccagccttaaaaagtttcccctcatatagcgaggggggcggcggtctttcgcccgtggaccaagggggcaaagaggggcaccgcgcggatggaacaccctatacaaacggcgcccaatatgtgtgacaacataagacactcccataagggggggcgggggcaccaaaagacagccggagcgccaccgcctcctatacccccgtggacagcccaaaacaacacacgggggcacccccgccggcatctcgggaaccaaacggggtgatacgatacaaaaccaccgagagggggacaacgccggtggcagccacacaagacacagaacacacaagcgggggggcggcggcgccccccaacagaatagtcccccgccgagaggggcgcccaaaagactgatcagcgcggatgacccgggactcttatcctggggcacaaacgcggggcgcccccct

SEQ ID NO: 520025 - DNA, 821 bp, Homo sapiens
tgcaataatcacgagacctgccaggagactcttgtagataccttgacctagaagaagtacggaactttctcaatgccttgttacactgtgtcccagccttggtcagggatacaatgcaccttaatatgggagcccagtgcaagagggatactcatgcggcctcactcaggttgtaccaaataaaattgtcatcacttgctatttgcttgcacttaggaatcctcttctgtttcctaaacccgtagagagtttctggaacgccatgaacccgtgagctgtgaattccactttcgtcattgcaggtagatggaggaatgacctacgacaaagttcttatgcagctacaagcagatattcatcatattccagtaataaaaccctctatgccgtgaaacaactgcaactaggagctggccatggcagcaggggtctgacagaagggagtaagcgtttggagccttggaaccacaggctttgtcagttctcaggatggaacgatttgaaccacagatccaggccacagaaagtgaaattcgttatgccacatggaagaaagccgtaatgaactctatgggttgggttaccagtcagtctcggctgaaggcggtgatccttctatcttctctagtctgcctttgggatgttttatagtgagtagcagtggtaatgcctaacttggagcaagatatatctcgggtgtgccataataataagcgagctatggagatcccacagaagtatacattgttacataacctgaaagcatatagcagttctgcctcttaatatagattacagtattataggactctgcttttgtt

SEQ ID NO: 520026 - DNA, 945 bp, Homo sapiens
  misc_feature (1)..(1): n is a, c, g, or t
  misc_feature (68)..(68): n is a, c, g, or t
  misc_feature (91)..(91): n is a, c, g, or t
  misc_feature (95)..(95): n is a, c, g, or t
  misc_feature (99)..(99): n is a, c, g, or t
  misc_feature (103)..(103): n is a, c, g, or t
  misc_feature (107)..(107): n is a, c, g, or t
  misc_feature (109)..(109): n is a, c, g, or t
  misc_feature (123)..(123): n is a, c, g, or t
  misc_feature (125)..(125): n is a, c, g, or t
  misc_feature (241)..(241): n is a, c, g, or t
  misc_feature (248)..(249): n is a, c, g, or t
  misc_feature (256)..(256): n is a, c, g, or t
  misc_feature (274)..(274): n is a, c, g, or t
  misc_feature (308)..(308): n is a, c, g, or t
  misc_feature (312)..(312): n is a, c, g, or t
  misc_feature (335)..(335): n is a, c, g, or t
  misc_feature (340)..(340): n is a, c, g, or t
  misc_feature (346)..(346): n is a, c, g, or t
  misc_feature (349)..(349): n is a, c, g, or t
  misc_feature (365)..(365): n is a, c, g, or t
  misc_feature (368)..(369): n is a, c, g, or t
  misc_feature (393)..(393): n is a, c, g, or t
  misc_feature (402)..(402): n is a, c, g, or t
  misc_feature (419)..(419): n is a, c, g, or t
  misc_feature (425)..(425): n is a, c, g, or t
  misc_feature (446)..(446): n is a, c, g, or t
  misc_feature (448)..(450): n is a, c, g, or t
  misc_feature (465)..(465): n is a, c, g, or t
  misc_feature (484)..(484): n is a, c, g, or t
  misc_feature (488)..(488): n is a, c, g, or t
  misc_feature (493)..(494): n is a, c, g, or t
  misc_feature (745)..(745): n is a, c, g, or t
  misc_feature (804)..(804): n is a, c, g, or t
  misc_feature (869)..(869): n is a, c, g, or t
  misc_feature (889)..(889): n is a, c, g, or t
ncagaatcaaattgccctaagtcacgaacatggcagcaaccgcaactccttcgcacttgtgcatgctntcgtgcgctcgcagacgcacacncacncacncatnttcncnctctctcttatgcncncatccatccacatcccaacaattgcaggtgctaagtttggacataacccacgggactcttccctgacttctgtcaggtcctggaaagaagaagtaataaatgaaaagcagctgggnctgctcnntgcatcnctcctcttccaacaatgncgcggagaaggcaagacatacactcggggcagcnagcntcctcggcaccaaaatgaacagncaacnacaagntcnaggcagtgtttccagntcnnctcacgcgttctcaacaccacttnccaacaccncaaaacagtagcaagcnggaaancaaaacacaacaacaaaaacncnnncgtctcgccccccangactccagaaaaaaagggnaggnggagnncttacaacttgatccctattattctaacaaattgcagcatgaccataagcaaaaccagctcggtcaaactgacagcatcagattgtgaccttatctgaacagtgtagttcacttttattttggctctgaagagaggaagaaaaactttttagaggaacttaatggtaacataaaccaaatctccactatattagtatttgagacaagattacatctatgcattcacacagcttgtctgtagatctgagagntccaagggagtggcccagcccccattactctgactttagccttctgaaaagaacaagtnaaacctgaaatatgaaaaataatacctgaatcaaaatggtgttttctatacaatcggactagggnagaatcctgctcaatcctcnactcctatttgacacaaagttaaaaaatttttaactaaattaaatgtgatgttttg

SEQ ID NO: 520027 - DNA, 1174 bp, Homo sapiens
ttcttgtcttctttttcgttttgtctgtcacgctgctcctttctgtccttctttctctgttttgttttcttgtgcgtgtccttgtcttcttctctcttttttcttcctgttggccccctctttttttcggtctcctggttgcgcgtcttgttttcttcccttcttcgtttttttcttctgttgtcgcctggtccgcttctgtgcttttttcgctgtcggtttcctcttgtttacgttcttcttgttctccccctctgtggttcctttttgccctggtgtcccttctgctggcggtgtcggccgttcttttcgtctcgctctttcgttgctcttggcttgtgcgtcttttttcctcttttctggtttatcggtttgttgtttcagtttagcccttttttcgcctttttttttctctgccttggttgtactactgtgctctgtctatgtgtctattgttcctgtttctttatcttctgtttgtgccctttctgtctgttgcttatgcttttttccccttgtattcctcttttggcgtttcttatgctggttctttatcccttgcttttttgtggtttctttattgggtgtccaagatagtctgttttatgtaagtggatgttttctatccttgtttgcctctgtttctctttgttaatttggtctactctacactatcttttatcttattgtatcttatctcatgttttcttttacttacatatattatgctacataattatcgcagcctatatatttgctagttagtgtagtcaatagtatagtatagtatggctgaatatttacataagtatatatttctatatatcttagatatttctctctaagcatgtgtaatataggatagaaggatatgttcttgccctagtaatcttaggtaatcaccactgttcggttatatatcactgcctcctgaatcgttgaggagtcttttaaattagtatttttgttttgttgtctcccaagttaatattatattgagatatcagagagtcaggcaaaataggtaaaacttttatctctagggtatataaacatttagaaaaatgtattcagtgtatctaatactgaaatgcggtaccaaatttaatgttaaaatatatatctatagacattgacatggaaaagagatttaatgttttgaataaattaactc

SEQ ID NO: 520028 - DNA, 117 bp, Homo sapiens
atatgctgctgctgttatctgactctagagtgatccccctagttttgtaatgtcatagcagattacatgagaaatgaaagatagctctgtgtttcatgttctccctgtgtgtgtacc

SEQ ID NO: 520029 - DNA, 425 bp, Homo sapiens
  misc_feature (9)..(10): n is a, c, g, or t
  misc_feature (22)..(22): n is a, c, g, or t
  misc_feature (35)..(35): n is a, c, g, or t
  misc_feature (97)..(97): n is a, c, g, or t
  misc_feature (111)..(111): n is a, c, g, or t
  misc_feature (129)..(129): n is a, c, g, or t
ccttgggcnnccccgggttgcnggcaagaacttcnagaacggaaagaaccaccagaaggggctttctggaaagtcccttccgccacggaccccattntgcaactgagaccncttccaaaggttcccccncaccaacttggccttgaccccattccaagtatcctggcatggttggaccccgaagatgatcggcccatcaaagaacagccacgcaaaacggagaacgtcagccgcacccgaagccctggccgcccaactcaccgctgcgccccaagcatcagtgtgctgcaaaaccaaggggcttgctggtggggaccgtgccagccgaccactcagtgcccggagtgagcccagtgagaagggaggccgggcacccctgtccagaaagtcctcaacccccaagactgccactcgaggcccgtcgg

SEQ ID NO: 520030 - DNA, 576 bp, Homo sapiens
  misc_feature (394)..(394): n is a, c, g, or t
cctcctccccccccccacagggttgggtgttggtggggggggaggaggcccccccaccccccctttttttgtggggggccaaaaaaccaaggggtgtggcccccccccctcccccccccggagggcaaagggggttcccctctccacaccgggggtgagggggccttgaggaggggggcgcaaaggttttttccatttcttccccccggggggaacccgggtgttttttttaagggggggggcccccctctttttccccccggggggggtttttttaaaaaacaccccaggggaaggggggcccccccggggtttttccccccccccccccttttttttatttttccccccccccccggtggggggggggccccttttccccccccctttcccnttgggggggttttttgggtccttagaaaatggaccccttttccccccccaccccttggggggggggggggttccccccccccccctttttggggggggaaaccttttaactgttgggtttttttcccctaaggtttcttttcccgggggggttttggcccccaaaattttttttttttttta

SEQ ID NO: 520031 - DNA, 172 bp, Homo sapiens
cggcccggtagatcatcctacactgacagtgtaggaatgaatctactggcatactttatatcttctggactgctcttttcacctaatggatgttcacccttcttttcctattataatccagcagcatatatctgaatgaattataataggaaaagaagggtgaacatccatt

SEQ ID NO: 520032 - DNA, 723 bp, Homo sapiens
ctgcctcagcctgggtctggtgacagagtgtgactgtgctaaaaaaaaaaaaaaaaaaaaaagaagaagaagaaaatagtgtcgtttaatttccatgtgtgtttaaaaagtatttctaaaattaagaggcctgagttaaggctgctaagtggtgggacctcagaacccatagtttgcgtgtttctggatatgttctctcatagataaaattgagaggcttggagtaaatgggcctgagcccataggggttttgcccaggttgtaacatctttattatagtatttgccaggactctttagaaatcatggagggtgcaggacgagagaccttttgcagttgagaatttacagggaaaattccttttcctctttttctacactttttctccattaggcattcttgtgttgggtgccctagaatttaaattggggggcacattggacgggttgggtcctccgtgcctccttttagttaggattgacagaggttgctttctttcgaaagttctggtggtgtcaaacaggttttatttctcagccactagccctcttgtgaatttgccagctcaccgtgttcttgtcccgtggtaggtaggggcagtctggatttccaagggccaactccaggagggaggcaacgcatggctgtctcccagggtaccttcctgcctcagtttgccccagaaattttccttgccccattggctttccttttatgcgccta

SEQ ID NO: 520033 - DNA, 292 bp, Homo sapiens
ttaacaagcctgcccaggtttgtggtaccactttgatgtggaactaatggtgacatcctgctttcacaatgttctgatctggtcaggcgctgtggtcgagcactcatggggaggtgctcatccgaaacacacgggacagctcctgccactgcaagatcactttctgcaaggccaagtactgcagttccaatgtccacgaggtgcagggcgctgtgctcagtcggagtggccgtgtcctccaccgactctttgggaagtggcacgaggggctgtaccggggacccacgccagg

SEQ ID NO: 520034 - DNA, 214 bp, Homo sapiens
tccagttacaaataagatttctaggtccataaaaaggagtctcaccgttttctttcttatcatgtttttcttctttgactctcctatgcttgccgtgttcaggagagaaaaagactgaaaacaaatgaggtcaattaaggaatcttctaagtataagaaaatattaatgatggttcattctgggtggtaggtatgggtaggtatgatgaggacg

SEQ ID NO: 520035 - DNA, 188 bp, Homo sapiens
gcgcttacaaaatatcaagtaaaatgcccggttaaaccttgatatatcaagcccaatcgctaaaaatgccggtctcatcgcgtttgtaatgtaaacgtttacatgttttccgtgtgactttccagtaaacgttaagcatctgggtgacgtgcacgacatttaccacaggttcaccacaaaaagcaccg

SEQ ID NO: 520036 - DNA, 483 bp, Homo sapiens
tagtcataccattcagtatgtttgctttttaaaataagtaaccacaattaagttgttgtagcccttgcacttcaagagatctagtctttactttcagttgtctgttaggtccattctgtttactagacggatgtacttaaaactatgagagcctgtatgtattctcagcactatttagtggtgtctgtcatctggaatggattagttcctaattgtataatgggtcagtccgcgatagctttaggggataaaggatttgccttgtatagagcagttcataaagttgtgagctgtgcaatccataggctgtaagctcttcagggagcaagaggtgcgctttctgtagtgtcaaggatcttttttacaggtggttggcagcactatgtttcctgtggaggttacagcacctttggtttaaagtggttttcaaatcttttcaaatggtcccgttaaaataaaacccattaaagtgaagcaaaagtg

SEQ ID NO: 520037 - DNA, 105 bp, Homo sapiens
cccgccagtagagatgatgaatatcaacagcatcctgcaaaataactgtagtagcctccagtttttaacttcttgtctcaactcatcctcagtctgctatgttgg

SEQ ID NO: 520038 - DNA, 894 bp, Homo sapiens
tgtctagaggatcccgcgtggttctgcagaagacctggaggcacgaactggaggtgggctgagcggggacatgctcactatcaacgggaagggatcatctccaataaagacatcctagccaccaacggggtgatccactagattgatgagctactcatcccagactcagccaagacactatttagaatgggcgtgcagagatctgatgtgtccacagccattgagccttttcagacaagccggcctcggcaatcatctctctggaagtgagcggttgacccgtccatggctcgccctgaaattctgtattgccaaagatggaaccccatccgaattgatgccgccatactaaggaatttgcttcagtgaacgcacagtaattaaatgaccagcatggcctctagagtatctgtaccatggatcagacctctgggaaacgtctgggctggcgaaaaggaaacgtgagagtttttgtctagatcagtaatagcctttgcattgagaacagctgcatcgcaggtccacgacaagagggggaggtacgggaccctgttgcacggatggaccgggtgctgacccccccaatggggactgtcatggatgtcctgaagggagacaatcgctttagcatgctggtagctgccatccagtctgcaggactgacggagaccctcaacgggaaggagtctacacagtcttcgctcccacaaatgaagccttccgagccctgcaccaagagaacggagcagactcttgggagatgccaaggaacttggccaacatcctgaaatacacattggtgatgaaatcctggttagcggaggcatcggcgcccctggtgcggtaaagtctctcccaggtgacaagtggaagtcagttgaaaaaacatgtggg

SEQ ID NO: 520039 - DNA, 106 bp, Homo sapiens
cccggctacagctcctgagtagctgggactacaggtgtgtgcaccgatcagctaattgtttattagtatttattagtagagaccggttttcaccatgttggccatg

SEQ ID NO: 520040 - DNA, 485 bp, Homo sapiens
cgcgttacagagtagaatgggaccactaagtaggttctcatcctaagcttgcaggcacaaagtgctagccgggtgttggagaagtagttatggtatactgatgtagataaggtaatacaggatctagtgggagatggcattggactggagaagggacatatgtgacccacaataattctggagatgacactcctgagtcatttacttctctgcccatgggaggtgagaggtcagctgacatccttcccattccaggtggatcaccaggcccaaaatcaaagaagtagctaccaaactccaagaggcagaagtccctgtcccagcacagaagatcatcctggggcaaagagagcccatgggatagtggaggggatactagtaagatgagccccagagacagaggatggaggtgaagtgaaggaagcacagagacaccaatgctgggcccagctggacacagtgagctgcagggacctcgtctcctc

SEQ ID NO: 520041 - DNA, 115 bp, Homo sapiens
ctctaggccttactttgtagaccttcatcaggatttgctgaacatgcggtatataggctgagcaagaggtggtgatgttgatcgcggttatcgattacagaacaggctcctctag

SEQ ID NO: 520042 - DNA, 102 bp, Homo sapiens
atcccaccgctactccacaaacagtgtatatccgcgtaatgtggtgtgttttgtgtgtgtgctagtatgtatagtgtcaggcgtgatgtgctgtgtgtggtg

SEQ ID NO: 520043 - DNA, 1254 bp, Homo sapiens
  misc_feature (235)..(235): n is a, c, g, or t
cccacgcgttccgaccacgcgtacgcctcatagtaccgagttctagtcgcaagtggcgttcctaaatgcttaccgagacgaatagaatgctaggctatatacagactacgcgagaaggctgccaagcgtgttgataggcccctacgggactacgtacgaaccctttcgcctggagcgccataaaactgtcgttcaccggatagtagcccactagaacccgccactagtctagcantcacccgtctacatgcaccgctcccgacacattagtctcgtcaacagtcgacgtcttgctaggtaatgaagcaccgctccgtgacctataagcacaaagccctctgtgctacaaactggctaaacataggcgcttctcttaatctaattaactatacacaaacatctaagcccagaggtggccgggtaggaactagcgacttaccctgctggaaatcccgcgggtcgtaagctccaagcgaagagtccgaagggtcaacgagcaaacatggacttcggaaggcccacggaggaaagaccagaagataccgccaagaatgaaggcccacagtcattcgaacaaggtccaacttggttacgtcccattgcattggcgtaactgtgactacgaatgcatgatgaacttaacattgacacgttcgagccatccacatgtcaaataacgcgtgctaggggacacttcgtgttcagtgcaatccaaaacaggtcacttgataacaatcccctcatgcagactttaactagcgcagaggggcccactggcaagtgagaagggcgcctagagcatgccacctacaaggtaccgagaggaaagagactactggacacaaacgcaacagaacctgcaggaaaagaaccccaaaacccaggggggtcggccacaactcttccgggaccttagcaggaccggaaaaagcagagtgcacgtaaccaaggaattaaaagacctacatggcccgtgcgttcgggaagaacagtccggcccatatgggacagatccggccaaggggtaaacccaacgaaagcggaacgacaaaaaggtaagggcccaaggaaggcaagacacgacaacggaaaagaaggcaataggaaaggcaaaacaaggagatagaacagcgaacgatgcgaagaaaacggaagcaccaacatggaaaggaaaccacgaacatcgggggaccgagcaagacagtggccgaactggaacagagcatcacacacagaaattaaataatggaagaa

SEQ ID NO: 520044 - DNA, 1245 bp, Homo sapiens
ccaaggccttatcctttggggtcaccagctccttgggtgcagagtgttagtagagggtggagagggacctttatctcccaaagggcgaaaaaaaggccaggtcaaaaatgaaggattctcagcccggataagtaggcaatacttctaaggattctcagcccggataagtaggcaatacttctaagggtgctccaggaggtgaggaagggcacgcttaaaatacgtgttttggacctccggagcaggatttccaatggagagggaagagaaactcgttcttgaatgggaagagagtggggaggtgcagagtaagaaagtgggaacgcgtcagtcccttccttgcaggagaggtggcggcaggagggggctcccagcagctacaaatcccaacactgcttggccgcagagaaaatgccctggccaggaagccggcttgggggtgttgtgattgatcaccgtactccggcctccgtcctgaaccgtgacgggggcccgaggccgaggaagatcggagcccggatagaagggttcggcctgagagaaggcagtcccgggcctgaataacccccggcccgctgtcttgggccttggggaacaccggggtcggccccgggatcaaacggcagggacccagggccacacgagaaaaggagcgtccacaggccgggaagtatgaagggcacccgggacacgggcacacactcttcgggcaaatctacacgcgccaagagcccaaattcaaaggccggaagatccgggccccaggttcacggagtatcagcccccaggagggacatgggtcccccgcaaaaaagggctgcgacgcgatgagcagaaatgacatgggcgaacgacaacacatgacgacaaaaagacagaccacgcccctataaaaaagatatcccccgtgaaggggggacccaagagcgatcaagaccgggcgactccacccggcgcgttgtcttcgtggggcccaacaagggggtggacccaccaaaaaggtggacggtccgcgatattttcacagaccgctcagacgccgggtgaccgcctggtcgggatcaacaaaacagtggcgtcacaagtgttgctaacgaccgcggtgaacagcggtgggagcaaccagttggtggtcaaggagcacgacaccactatctacagcgtacgacggcggcaccaccaaatagtgggcacagaacaccaccacccactcagcaacacataatacaccgtctctgcggacca

SEQ ID NO: 520045 - DNA, 235 bp, Homo sapiens
ccccctgaggcgcgtcaggtcctcagagtataagtccctcgccacaggcctaggatacccacgttgatgtgcactctcctctggtagaccgacctgcctccatggtggttagcctgtgtgacactcatgtgaccaaacgtcgtactgccacttctgcagcccgatgactccacgcagaacgcgcctaatggctcccgagtctcgaattctcctaatcttgtcttcgcgtctttcc

SEQ ID NO: 520046 - DNA, 968 bp, Homo sapiens
  misc_feature (10)..(11): n is a, c, g, or t
  misc_feature (14)..(15): n is a, c, g, or t
  misc_feature (18)..(19): n is a, c, g, or t
  misc_feature (21)..(21): n is a, c, g, or t
  misc_feature (23)..(24): n is a, c, g, or t
  misc_feature (28)..(28): n is a, c, g, or t
  misc_feature (47)..(47): n is a, c, g, or t
  misc_feature (693)..(693): n is a, c, g, or t
  misc_feature (700)..(700): n is a, c, g, or t
  misc_feature (968)..(968): n is a, c, g, or t
gtacaggccnnagnntcnnananngcgngattacaggcttcagccancacacccagcctcattcatacatttcttatgttgttgtttgagacagggtctttctctgtcacccaggatggagtgcagtgttgtgatcatgcctcagtgcagcgatcatggctcagtgcagcctcaaactcttgggctcaagcagtgctccaacctcagcctcctgagtagctaggactataggcacacagcaccatgccccggctatttttttattttgtagagatggggtctcactatgttgcccaggctagtcttgaactcctggcctcaagcaatcctcccacctcggcctcccaaagtgctgggattaaaggcgtgagccaccgtacctggcccttggtggaatctttagggttttctattcatacatataaaatcatatcattggcaaacagagataattttacttcctcctttccaatttggatgccttagatttcttttccttgcctaactgctctgtctagaactcccagcactatgctgaatagagtggcaagagcaggcatttgccttgttcctaaccttagagaaaaatccttcagccttttaccattgaggatgatgtttgctgttagtttttcataaatgatctatatcaggctgaataaatttctatttctagttaaaaaaaaaacacancaacganccacagcagaaaaagctacagcatacaacccagcactcaacaccctcactacatacatacggcccgcagccagatcgcatacaccacgacaaagaacagcagcaggggccaaaaaaaagacacgggacccaacatccaccagtcttagagagaccacctagttcaatatagcacgggccgtcaccgccgaggagaactcgcgatggagacctgttgggtcggaacccactagcggcaaaagtatttcgcctggagtctagaccacgan

SEQ ID NO: 520047 - DNA, 638 bp, Homo sapiens
cgtagaatgccagcaacatgggagtacaggtcataagccgagagctgaggattcaggcgaataccacggcgtatatcacttggtcagcgctcctaaagcaaacgccaccatgtgaagtgaaagccgctcctgacatcacgggccataaacggggtgagaacaagaatgaagggcaggatgccactatgtatggcaagtcagtgggctacccccacccagacgggatatggcgcaagaaggagaacgggatgcccagggacatggtcaatacctcgggccgcttcttcatcatcaccaaggaaaattacacggagtggaacatggtgaacctgcagatcacggaagaccctggcgagtatgaatgtaagtgccaccaacgccatgggctccgcctctgtggtcactgtcctcagggggcggagccaccgggccccactcgggcctttcttgggaattctggcggaaattatcatccttgtggtgatcatggtggtgtatgagaagaggaagaggccagatgaggttcctgacgatgatgaaccagttggaccaatgaaaacaagttctacaacaatcaccaaagataaaacttgcgcagagaacacaattaagtacggttacatatcttaggttctgaa

SEQ ID NO: 520048 - DNA, 922 bp, Homo sapiens
  misc_feature (647)..(647): n is a, c, g, or t
  misc_feature (654)..(654): n is a, c, g, or t
  misc_feature (922)..(922): n is a, c, g, or t
ccacagagctcctgccaggagttcactcattcgtgcatttcttcctttttttttctttttgagatggagtctcgctctgtcgcccaggctggagtgcagtgcagcgatcatggctcagtgcagcctcaaactcttgggctcaagcagtgctccaacctcagcctcctgagtagctaggactataggcacacagcaccatgccccggctatttttttattttgtagagatggggtctcactatgttgcccaggctagtcttgaactcctggcctcaagcaatcctcccacctcggcctcccaaagtgctgggattaaaggcgtgagccaccgtacctggcccttggtggaatctttagggttttctattcatacatataaaatcatatcattggcaaacagagataattttacttcctcctttccaatttggatgccttagatttcttttccttgcctaactgctctgtctagaactcccagcactatgctgaatagagtggcaagagcaggcatttgccttgttcctaaccttagagaaaaatccttcagccttttaccattgaggatgatgtttgctgttagtttttcataaatgatctatatcaggctgaataaatttctatttctagttaaaaaaaaaacacancaacganccacagcagaaaaagctacagcatacaacccagcactcaacaccctcactacatacatacggcccgcagccagatcgcatacaccacgacaaagaacagcagcaggggccaaaaaaaagacacgggacccaacatccaccagtcttagagagaccacctagttcaatatagcacgggccgtcaccgccgaggagaactcgcgatggagacctgttgggtcggaacccactagcggcaaaagtatttcgcctggagtctagaccacgan

SEQ ID NO: 520049 - DNA, 575 bp, Homo sapiens
gcatgagagtgacaacatgtttaacacttcctaatgaaagtaaaatttttctgggcctggtagctcatgcctgtaatcccaacactttgagaggccgaggtggattacttgaggccaggaggttaagaccagcatgggcaacatagctagacctcatctctacaaaaaaattaaaaaataaaaaatgagcccagtgtggtggcatgtgcctttggtcccagttacctgggaggctgaggtgggaggatcgcttgagcccaaggattcgaggctgcagtgagctgtagccactgcactgcagcctgggcaacagaacaaaatgctgtctcacaaaaaaaacaagggctttatttcccccaattggcctcggtgctcctaaataagacttatgggtgggtggataggagggaaccttcacagtttggcgaagattatacccatggttttgtcggtgggtcagacctgtctggagatcttctgcagtcgcatttttttttgttcggaacggggtttccgccctttgtggccccgggtggattgccggggtggctctggggtcctgggcacttgggtcc

SEQ ID NO: 520050 - DNA, 400 bp, Homo sapiens
gcacgcgagaggacctgtgagtgaaactgaggagagagggatattctaatatatcttatatatgggttaatcatcaaggaatctcttctctgattaaaatacacacatcttaagaataagggttcagagcatattcctcgtgtatcaacacagaagaaaaccaaacacgatgtctggactcttttaaatggaagcaaagatgacttcctcatatatgatagatgtggccgccttggatatcatcttgggttgcgctttttccttcctaactttcccatatgtagaagaagccattaagaatgcgttacatgtggagaatgtggaaactggtctctcacgactcttgatgaagacttttgtgcgtgtatctttggctactgtggattggacattagccctt

SEQ ID NO: 520051 - DNA, 138 bp, Homo sapiens
cggcacccctcttctcccgctctccccctccatcgctccacactagataaagttttgcatggtatctctcctatacgatgatctgacatccaccgtacatgtccttttaggtcatcctttttttttctaagtttttaa

SEQ ID NO: 520052 - DNA, 996 bp, Homo sapiens
  misc_feature (677)..(677): n is a, c, g, or t
  misc_feature (996)..(996): n is a, c, g, or t
tgggttttttttttgggggttttggacagtttatttggaaggtcattttaaaaacaaagttaaagacaatctgagaaaaaaatggcgacagaatacagctcagttaaataggtagtggtttatgggtgattaaatcaagaagtaagggaaagtatgttatcttctgcaattccagaaataggttctgtggtccggaaggttcttatagcatccaaaaagagggaatgatcagtggcaattaaagctgcctcttaatcagtgtaaatctacagtagcaactaaatttttcggttcttcccattaagtcagtttcgatcttcaaacgtgggcctgggttttttaaaagataagatgctagaaattcaaggggattggggggtctttccttggcaagcacagcaagtcccgtgtaataagataggcacaacggtctgatccaggtaggcacgagtgggcaaagacgggagatctaccttcggcttggatgacttttctggcattaatcttctcattttctactattctctcaaggtttgtctggtgagaccgtactcagagtgaggattttctgcgaacctgggttgtccctccagcatctggtctggtccatgggggaccctgcaagtcacagtcccgggatacagtcggggccaagcggtacgtgcttaagagcctgnacggcctggtggccggctcccttcggcaggaagcgtgctgaagaagacctatgcgaggatggcagcgaaggggccaggaggcccggaggatgagtcaggaaaacccggccacgggtgtagcacgcttaagggctgccaaggtgcccgcgaagaaccagggcaagaaacctgcagaaggaagcggccaaaaaagagggagacagaaggcacagtcacaggacaaccaaaaacgcacttatgacaccaccaacgaagagcaaaagcgagacaggccaccaaaaacaaagcaccaataaaccgaggcgctcatcgcgagcgn

SEQ ID NO: 520053 - DNA, 618 bp, Homo sapiens
ctgaataaagaaatagttggatctccttcactaagttccaggatgtctgtccacattcggccaatgacttcactgtatagtctgaagggctctgcacaggattcaatttcgtctgttcaggaaaacatccaaaatcgtcagctgctgggtacttgtaaacgacatcaatccgttgggtgtatgggtcgtatcaaactcagaaaggtctagtgttttgtgacagcagagttcctacttttctccttggcatcattaaactctctgccacgtaatgcaggtgctggacatccgtgacagtgtaattctgaacggctgtcttctacagctccaggtggataagctatgtcttctctgataatcagagctgtagcacaccaaagcatgacaggagcccagctccatatgccttaacagagtctcagtgtctgcagagagctcactccacagtgaatcagtacattgtgtcgagcttatcactgcattcatcaggtgaatccacaaaggcaagtgccatgtcctggcagaactgggcacagctgagatctgaatgcaagggcacatgaccccacagctcatggcagctgtcagttcaggggtatgcgtgggcttgtatccagg

SEQ ID NO: 520054 - DNA, 641 bp, Homo sapiens
  misc_feature (277)..(277): n is a, c, g, or t
  misc_feature (431)..(431): n is a, c, g, or t
  misc_feature (443)..(443): n is a, c, g, or t
  misc_feature (447)..(447): n is a, c, g, or t
  misc_feature (450)..(450): n is a, c, g, or t
gggaccccaaggcccagccgcgcagaccctcaaaggttaagcccacaaaagcctattgaaacccacggccccccccggcaagaccctcaggggcgagccaaccaaaagcccatggagaccccagggccccgcccggcaggacctgaaggggacgaaccaaccgagagcccattggagaccccaggcccaggccggcaggacttcaaggggataagccagccaaggcgggggaggcagcaaagttgcaggacgcagaggtggagtcttctgccaagtntgggaacccttaaggaaaggagtgcccgtcggggttttggtcctcctgtccctgctgcaggggctggggcctccggagctgctgcgggctcccctcagggtttggtttgtgacccgtgacccatgacccacagtggtggcctcctgtggggccnctatagcagccnccanaanccgcgaggccctcagggaagcccaaggcctgcaaaagcctcctggcctgggtgtgttttccccacccagctttcccctgggcccctgtttttgtaaattgacccttttggagtggggggcggcgggcagggctgctttttttagtttgatgccaagcaaggccttttttgaataaattcatttgactttga

SEQ ID NO: 520055 - DNA, 351 bp, Homo sapiens
agagaatctgggcgtaaaaatgagaatacaggaaatggctcttgtatatttttttgctgctgtttacagcttgttaatgctctactgtctttgattcaagagagatttgttcacgtgcccagactcgtatctgtgtcaccttggaagtttttaacaactcaggtgagttttagctttattggggagggggtgatctaaaacactctttacgccggctactattgacttgggttaatcgtgtgaccgcggtggatggcacgaaattgaccaaccctggggttagtatagcttagttaaactttcgtttatcgctaaaggttaatcactgctgtttccccttaagcggatcag

SEQ ID NO: 520056 - DNA, 1871 bp, Homo sapiens
  misc_feature (355)..(355): n is a, c, g, or t
  misc_feature (734)..(734): n is a, c, g, or t
  misc_feature (1541)..(1541): n is a, c, g, or t
cctttgctgcctcatgccgtgatgatgatgttggttacaccacccatcttttgtcgctggtaatataaaggaggggctgcgtccttgtcgactagctggcgtgctgggctgttttagtgcgtcccgcgcgggtgcgtcatcccctcgtttaggggtgtctttctgctctacctctggtgacactctcctgtgttgctgcgccccccctttggggttttgcgacgcccacatggtgtgtgcctctgttttaccccccccgcgtgttcgcttgtttgtggacgctcgtgctacgtcccgtccccacgggtgtttcgctctctccctgtgttgtaacggtgcgataagaagaggtgcnccccctatgggggagcgggcggaccactctatatatgtgggtggggagtttgccccccccgcccgtgttgagcagtttggagcccccctccttcgggcgcacacaagacacaacccgcttattttggggagatatgtatgtgcttctcatttttcgtggggggcgtaaaaaagtttctggggccgtctgctgttgtatcctccggttgtgcccgcctttcttgtgcggtgtctccttatgcctccccgcaaataaggcgggtttctgttttatgacccgtccgcccccgctttcttggggaaatgttggtcgctacccatatgctctcgggacgatccctttatgatgttattgggacggtttatggtcacccgcggcnccccctcggtatatatggggagttttgaagttgcgccgctattctgtttgggttgcccccccgcgccctgttggcggtgtttcttgccaaccctctgtggcgctctcgtataggagcagcggtggtagaacacccaccgcctggtggaacactgctgttgtgtttacctctccctcggggcgccccctccttacaaggccctcttggtttttctggcgatgttaaaaaagtgtcctctcgcccctcttggtgttccacagcagaagtagtgatagacatctgtccccacgtcatgatgttgatatgtggcctccgacatagaggtgtcttataggctcgtcttcattgtgggcccctcgttaacgccccacctaatcaacacagggggacgccactcgggtgtcgccccacacagaggagacattaaatagcgggcgtctctcttctcttgttttatggcgccgcacgcgccactcattgtggttttccccccgtcgtgtcgtatacccccgcctgtgtacgacgtctgtgcttgtgggtgtctcctcgagcatctttttatggcgaccacttctctcgggcgctcgcggcccacatcgttggcgcttttgtctgcgatctggccctcgcgtcgccttcgccacgtgtttggcccgcactcgggagatttcatgcgcacacgtgcgcacatcacgcatttttggtgagagagatatctcacacacgggcgagagctcacagctttctctttggccttcacagagacacccttcccttcgctcgtgctgttgtacacattcggtgttntctcgaatataatgggttctatactcgctgtcctctttcttctcccaaaggggtatgaccacggcccacagctgatcggctggcttgtcttatggaaggccacatcacgtgtcctttcctccatggaagacaagggttctgaacaatggaacagtcacagtggctatgaaagcgggctggttctcgctcgggcccgggcttaacacatcccctgagattcttcagacttcccgttccctgagtctgcaccaacccctggtcatgtatgggtgcgaatttgtccactgggaccccagaaaccaccaccttgtaaacaaaaataaaaataaa

SEQ ID NO: 520057 - DNA, 179 bp, Homo sapiens
acagccgtgtgctgacctttaagggacaggaccaccaaccaatacatgcagatttagtgtgtgtggacagaaggtacttttgacattcagtttagctatactagaaacagaatgaataaatgaactttatttcttttttctattttttttgcaaagaggtaacgtaaaacgattcaatt

SEQ ID NO: 520058 - DNA, 849 bp, Homo sapiens
gagtaggctatgttcagtgattacgcctataactaaggtctatacccttaatacctaagaacgagcgtccatacaatctcattatcgaatatcgatacttcatacgtgcagtaaactcttaatcttggcttcctcacaactattttcctcggttttcattcaggacatgccccagacgatttacatcgggattatcccgtatgccatacgacccacgagtgaaataaatcctcagtcaatgcagttagagtcctcgatctcgatcttcttcatcacacaagtcacgtcaatcaatctcacatcacactttccccatgacatctatgcacgaaagtacatttcggctgtaggaaggcgcaaaagatccctcatatcaggttagcacaagtacaaccctcccattaggaccatggaagctggatctcatgatggcatgcgcagctccaaccggaactcacgagcatgcgtaagtaatcccgatatcactataattattctagcaccaattaaaataggaataggaaatcgagacgacccgaaaggctggcttgcaaagtccgaacacactcagtggtcgtcacaattcgacgtatttgccaagaaacacaccaatatcgtaataaataatttacaatacacaatggatgtgtggtgggcaacttccgaatgatgcgtagaaacacctattatttaaggcttaatgaaatgatgagggagtgcagagtgtccccggaacgtgttaaagaagccaaaaagtgtgacgttttaagcgcggttaccaacagagaggaggggttgattacttaacgagtacaagggctcgtagaaaatcttggctggaagacaaaa

SEQ ID NO: 520059 - DNA, 91 bp, Homo sapiens
catggatttgctggtgcagtacaactaggctctaataggggacatgctagcagcaaatagcagaaattcataagacattttctagaaaaaa

SEQ ID NO: 520060 - DNA, 410 bp, Homo sapiens
  misc_feature (272)..(272): n is a, c, g, or t
tggatgatcgacatattgaaaaaaatagaagagggagtccatcgtggcgcagtggttacaaatccgactaagaaccatgaggtagcgggttcgatccctggccttgctcagtggagttgaagatccgagcattaccgctgagctagtggtgtaggtatgcagaacgtggcttgggatcccactattgctagtggctctaggcgtaggctgggtggctacacctcttgatttgacccctaagcctcggaatctccatatgccacaggatcggnccaagaaatggcaaaaagccaaaaaaaagaaaaaatttagaagaggatttaccaatcatcaatatttttgcccctattttagggagcccccagattcctacaacaattttgaccaaggcttaaaaggaaaaatggcgg

SEQ ID NO: 520061 - DNA, 307 bp, Homo sapiens
  misc_feature (242)..(242): n is a, c, g, or t
  misc_feature (267)..(267): n is a, c, g, or t
  misc_feature (271)..(271): n is a, c, g, or t
tgacttgttccaaaagagtcagacttgagatcttggagtcattggagactgatcatagggatcacgggaggcagatggggaaacacggctaaatgtgtctgaaagaccaggtcagggggcctaggtgtcttgggaacatgtatcaggtggccttaccaacgggccaggtaaagctggtcctcggttttttgcgtcgttcgaggaaaggatcctgatttcgatgaggactggtcttttgattnggacctagtaaaaaccctctgaaanagtnttcaggtgttcgtggtcggtgagactctgagacctt

SEQ ID NO: 520062 - DNA, 435 bp, Homo sapiens
  misc_feature (358)..(358): n is a, c, g, or t
tgctatctagcgcttctgacagttgacagtccgtcactgatggtgttgtcatccccctcagtaactggtggggcccttgtcaatgcttgtgaactctggctcatctgttacattcataacagtactcactgacctgcaacatgtggaacacacaggcactgcggtcgatcatttgcacttgttatctcactcccaacacagccttccacggaacactggtaagtacccctctttacatgaaattggaaacagggtgtgacttttcaacaacgctctttcgcttgtgaagtgcctggtgccgagtctcacaccatagctgttcttgagtgcaaagccatgggctgtcctgtgatgccanctaaagacagtgctgctcagcaattaggcacacggtcacacttggcaaaaagcaggttccccccgatacagtgacca

SEQ ID NO: 520063 - DNA, 934 bp, Homo sapiens
tgtcacctagtatgatggtctggtgatacttacgcaacacatttgtgctctttcgtaactgactctcgtctttggacttacaagtgacaggcacaacgggtggtgtactgaagagaacgttgagagaacgctacatgagactgctctcaccttgtctagtcgagaagatgacatgtattgtcgagtaaccgaattgaaggggtctatcctacaatagaacgtgcaaattgcctgcaacgtcagctcattaaacagctgatgaaaaaggaattcactctagagttttcacgtgacagcaaagtcaatgtcggtttactgtacaccaaataaaccaagcaggacatcaatgagcaagatgtatgtgaagggtgcttccatgaatggtgtcattgacaggtgcacccacattcgagttggcagtactaaggttcctatgacctctggagtcaaacagaagatcatgtctgtcattcgagagtggggtagtggcagcgacacactgcgatgcctggccctggccactcatgacaatccactgagaagagaacgaaatgcaccttgaggactctgcccaactattattcgactctgagaccaatctgaccttcgttggctgcgtgagcattgctggatcctcgaggactcgagggtggctcctccgtgacgctgtgccggcacgcaggcactccgggcatcctgactccttgggaaacacacagggcacgcttgtgacaatctcttagccgaaatcgacaatcatcgcagccacgcaatgacgtacatttcacgttaggaaggctcaccaaaggaccgagacacttgtcttcacctcataccccttcgtcccatataaaagcgtgtctgaaagacccactgtaagcacacactagaaccctcgcaaagataaaccacaacaacatacaaacattcagaa

SEQ ID NO: 520064 - DNA, 386 bp, Homo sapiens
attcgcggccgcgtcgaccaactcctcaaaaagaaaaccagcctgagggctgggtgcggtggctcacgcctgtaatcccagcactttggaaggccgaggcaggtggatcacttgaggtcagtagttgggagacgagcctggccaacatggtgaaaccccatttctgctgaaaatgcaaaaattagccaggcatggtggcacatgcccgtaatcccagctacttgggaggttgaggcaggagaattgcttgaatctgggaggcggagattgcagtgagctgagaccatgccatcacactccagcctgggtggcagagcgagactgtctcaagaaaaagagagagagagagagagagagagactgtctcaagaaaaagagagagagag

SEQ ID NO: 520065 - DNA, 594 bp, Homo sapiens
gtggagaggagggccatgccggagacacggtacccacccagacagagtagatgccatatgccaggacgcccagcactcccaggatcagcaccagcagcagggcccagccaccaggcgcagaagcaagataaacagtaggctcaagcacagagccacccccagtgcaacaagaatccaataccaggactgggcaaaatcttcaaagatcttaacactgatgtctcgggcattgaggctgtcaataagaccgctgatcccctgctgtatggtggtgtcattggtgatccctgtggagcgccggtggagtaatgttggtccatggacagccgcgtcccagagctggagcagcgtgggaggaggacactggggcagagtacctgtatgcaggcttgtgatcaccgtcatattccagggtacccctggcagacaaaagttccgtgtgtattgtaatagaagacttccccaacagtcttgtgagaactcgtatcttcccacagtccatgggtcctccgggcaggaggacacacacacctggtgtgtggggcactgtaggccgttctcagcaaatgagatgatgtagctggaccggatgca

SEQ ID NO: 520066 - DNA, 409 bp, Homo sapiens
  misc_feature (320)..(320): n is a, c, g, or t
  misc_feature (344)..(344): n is a, c, g, or t
  misc_feature (377)..(377): n is a, c, g, or t
  misc_feature (388)..(388): n is a, c, g, or t
gagacagagtcttactctgtcacccaggctagagtgtgacgttgagatcttggctcactgcaacctctgcctcccgggctcaagcaattctcccgcctcagcctcccaagtagctgggactacaggtgtgctaccatgcccagctaatttttgtagttttagcagagacaggatttcattattttggccaggctggtctcaaactcctgacctcagacgacctgcccgcttcagcctcccaagtgctgggattacaggcataagccaccatgcccagggccagaatttgcccatttttaatgcatgtttctccacctttncataggaaaaagccatattatccnactaaggttatttatggaaggaccacaggtttntaggcccatgnacaagtttttttattcctttt

SEQ ID NO: 520067 - DNA, 141 bp, Homo sapiens
ctaggagggtccttggcctattactatccatcctcatccatagacaataatacccatccacgatatatacaaaaacaaagcataatatttcggccactaagccacatcactttataagactcctaagcagaataatctcaa

SEQ ID NO: 520068 - DNA, 189 bp, Homo sapiens
  misc_feature (5)..(5): n is a, c, g, or t
ggttnactctagacggatcccctgctcgctgactttttgttgtttatgcggggcaacgccatctcgggcggccgattaattaggggaactagtcagttgccaaagcctccgattataatgggtattactatgaagaagattattacaaatgcatgggctgtgacgaataacgttgtagatttggtcgtt

SEQ ID NO: 520069 - DNA, 121 bp, Homo sapiens
agacagcacagacagattaacctattaggttatatcgcgagtctagagagggaagcgccgcggacctgtatttactagacctgccctcacgcctgggttcgtaggcgcctaagttaaccca

SEQ ID NO: 520070 - DNA, 271 bp, Homo sapiens
  misc_feature (35)..(35): n is a, c, g, or t
  misc_feature (48)..(48): n is a, c, g, or t
  misc_feature (94)..(94): n is a, c, g, or t
  misc_feature (178)..(178): n is a, c, g, or t
agaagcctctgaccccagcacactactcattgtanatctctgctatgngccctaagggctaggctcaatgccctagctcaatgggaagtaaagnggatgattcttgcctttcagtcttgttgaaaagtcataattcggccgggcgcagtggctcatgcctgtaatcccagcactctgngaggctgaggcaggtggatcacgaagtcaggagatcgggtccatcctgggtaacacagtgaaacacccgtctctactaaaactacaaaaaatt

SEQ ID NO: 520071 - DNA, 244 bp, Homo sapiens
ctaagtgaacgtgaggatggaggtgtgaagggcggacagagaagccttgtccctcccgtagtcccctctaaatgctaccacctgcgtgtctggcggtagtgatgagggagacccccggtccatacagctggtccaggaagggcaggcagggcgtgtgtgagccggagcagctgtgtgcgtgcagcctactcagagctctggagccacagaagtgtcatggtaggggtgccactaacaatctccc

SEQ ID NO: 520072 - DNA, 103 bp, Homo sapiens
gagctgagcaacgtactggccgccatgaggaaagctggtggcaagaaagcctgagcccctccaaagccctcaccctgaaataaagaacagaagcgcattccga

SEQ ID NO: 520073 - DNA, 134 bp, Homo sapiens
agtctttgaaaactgctttaatggacaacataagtagaagtagcaggttattattaatcttcatgatttaagattttattcactaccaggcatattctttttcttttctttctttatttattttatggaacggg

SEQ ID NO: 520074 - DNA, 765 bp, Homo sapiens
  misc_feature (639)..(639): n is a, c, g, or t
  misc_feature (715)..(715): n is a, c, g, or t
ttttcttaacagctgatgttttaggctctgagggagaaaaatggattcttttgatttctcgcacttctgtatgttctgtaattgcaactctcacatttgcatcttccatgcttccatcgctctttcttttccgagcaactgaagctgttgtcgaagagggtgttacctcgtttttataactcttagatttacttaatattggatctataattggaagataagaatgaaaatcttctttttccttttgattatttattactttttcatgttcacccactgcactgttgagacatctttttgcttttggtttattaatctcagtttggttttctctggtacaggtggccttccttttagtaacagtggcagaaagtattggacgtctcttaggttgtttattgtggctatgactagaaatatcctgaactgcagaaaatttaggattattttgttttataaaactgtagtaatttgacttcatttctactagttcttcaaaatctcccaaagctatttttgaacccttaatgtcagggttcaaaaatagctttgggagattttgaaccctgacattcaggaatacgtggcgaaacttcactttttctccaatcttcaggagactgtgggacttgagaattntcatttgataatggtactttacatgtttgctgagatgtacacatatatgccatgttatcttttaaaaaatgattangggataaaataggaataactgactcttgatctagaaccggattagtccat

SEQ ID NO: 520075 - DNA, 848 bp, Homo sapiens
ggccccccctggagttttcgttgtcgcgcgaggccgaatgtgttgtccgctctgccaaggccccccgccctgttgatgtggttgttccgtgcgcggaacaccttattgggggtctcccccagcggtggtggaagcgacaacacctggtggggcacacgaccaaggggggttgcggtaacacaacgtcgtcgcgagaaatataatttattgtatccaaaggcccccccctgtgtcgcgacacaacatccctgtggagcaacccatcctagaggaaagggggacagtttttcgttgcgcctcaacacattgcagtgtgcgggaccaacctcgttgcgggggttatacccctctttttcttataagaagtggcccattactctttttttccagggaacacgttcacgcgcgcaaatgttcgtgtgttgttaaacaagtgtgcgcgaggtcagtccaaattctatgcgcgtcgtgtgacaaattcatgggctcgctcctcacccacacatagtgcgtgtgcctgttgagaaagtgtcgcgcacacgcgatgtcgacatacgcgcgcggtggcattataccccacggtacactctctgactcaccccacgtagtttttctagttcatccagtgggtgtcttctacaccagagacacaaattctttcttttgtaatgtatttgcgatgcttgctaacactagtgctagatcgccccattcaatatctccgctttgtcggcgacccgatttcccgcacgacaccgccctacccaagcttgctacaatatttctgcttcttccccaccaactacagaatgcaaccacatttacccccacaatatacaaacacaact

SEQ ID NO: 520076 - DNA, 167 bp, Homo sapiens
acccccgcgtctccccccctccccccgcgctcgtcccgcgcgcccacacctcctcccgatgcctgtcggcgatactggtccctcctcgtcgtctctgtgtttcgtgcccgccccagccaatgatattgagtcttccccccccaatacaacaacaccagacatatacc

SEQ ID NO: 520077 - DNA, 137 bp, Homo sapiens
ggctttgtggccccccgttctcaagttggcagtgcacgcatttttttcagcatctgtccttttcggtgcaggtttccagtcatcatcttgtgtcctcacccacaggcagtgtccacgtcacgcacatgcgtttgcgg

SEQ ID NO: 520078 - DNA, 273 bp, Homo sapiens
aggctgtatctcctcattacttctctatacctacattcctagcttcttccacacgtctgtgaggacagatcttatctaaaacagcacatctcgaggccaggcatggtggctcatgcctgtggtcccaccacttatgggaggacaaggtgggcggatcacctgaggtcaggagtttgagaccagcctgacaaacatggtgaaaccctgatctctactacaaatacaaaaaaaaacaacaaaaacacaaaaaaaatgggccagcgcatgagctga

SEQ ID NO: 520079 - DNA, 503 bp, Homo sapiens
tgaggtagtatttggtaatctggtatagagatctttcacctctcgggttagctgtattccggtatataattcttttggtggctatggtgaatgggatggtgttctggatggggctctgggcttgatggtggtgggtatataggaatgttagttattttggcgcatggatttggtgtctggggactgggctgaagtggtttatcagcttaaggagattggggctgagactatggggttttctagatacagcgtcatgtctgcacacaggcataggtcgacttcctctcttcatattcgaatgccttttatttcttgcctgatggctctggccaggacttaagtactatgtggaataggagtgatgagatagggcatccttgcctggttccggttttcaagaagagtgcttctagcttttgcccattcagtatgatgtaggctgtgggtttgttatagcttatccctttattatatacgtgtatctgtataagtgatgggaaata

SEQ ID NO: 520080 - DNA, 292 bp, Homo sapiens
acatatgcaaggaatttattacttttatttattggagatggggtgtcactctgtctcccaggccagagagcagtgccatgatctcagcccactgcaacctctacctactaggcgcgagcaatcctcttacctcagcgtctcaaatagctgggacctcaagcgtgagccaccatacctggttaattttggtatttttcagtagagacaggtttttgccatgtccgcccaggctgttcttgaactcttgagctaaagtgagccacctacgttggtctctgaaagtgctgagatt

SEQ ID NO: 520081 - DNA, 896 bp, Homo sapiens
gtggcagcggatgcacggacatgagcggatggcctggagacatcaccttttcagtaattggtcaggtatgtggattatctcgtgaaagaacatgggagttgaagaacatgtatttgtgaatggcactagatcaggagaaaggccatgtccctgagcgtctcagagcgtcttcccaggttgcacagggatgtgggtgacatagagggaaggacacatgctggcgtcatggtgataattcagggtaggatgacactgtaactatgaatggagtctcaggaactggtgcaccatgcagcataaataggagctgatggcattcgatgtctattgcatccgcgcttcctcaagccattggaccaaagataatcctgattaatccctcctaaacggaatgtgtgctgctgccgacccatgcacctgccatttaattactatcaccattcctgcttgacaggggtaacgattcgtgctgaggagttgtaggatgggatctcttggataagatccccaccttcaagggctcgacattcagtgatacacgatctcttagacttcgggcaatgtgttgatcagaatcgcccagcaacagcttgcttccctttcggggtgatgagcacccgctcgaagtgctctggtgatgcggaagcaactggagcagatgggcatcgtacgtataataactgggaaaaacagacataaccacatgctgggaggtttgaccacaaggacttctctttaccagactataagtctgtatccgaagattatcacgtgtggacaacataggcacggcaggcacacaacacaccacagacacggttctggatccaagggcaccccgcaaagtcaaccccagggtacaaaagctgacacaaactgagcacccagacaagcaa

SEQ ID NO: 520082 - DNA, 483 bp, Homo sapiens
tacaggcgagtcgggttccgagaccaagtacgaggcgctgcaggtcacagcaggcagacatggggacgagcatggcaaaccaagcaggagattgctgagatcaacctgcatgatcctaaaggctgagatctgagatcgaacacgtcaagaagcagtgtgccaacctacaggctgccatggctgatgctgagcagcgtggggagatggccctcaaggatgctaatgaacaagctggaagtggctggaggatgccctgcagatagggcaagcaggacctggcctggctggtgaaggagtaccagtgagctgatgaactgtcaagctgggcctggatgtggatgatcgccacctacctgtaagctgctgtatggtgaggagtgcaggctgaatggcagagggcagttgacaaggtcaagatctctgtagtgcagtccagcgtctcgagtggctatggtgggtgcagcggagtcgggagtggcttag

SEQ ID NO: 520083 - DNA, 2408 bp, Homo sapiens
  misc_feature (30)..(30): n is a, c, g, or t
  misc_feature (102)..(102): n is a, c, g, or t
  misc_feature (155)..(155): n is a, c, g, or t
  misc_feature (1184)..(1185): n is a, c, g, or t
  misc_feature (1238)..(1238): n is a, c, g, or t
ccgcttttgttgtcagggacccagcgaggngcgccgctcgccggccgccgccaccctctctcgctgcagcctgctgtgcgctgcacggcctggggcccgggngccccgcccgctctgcccatgagggggccccgcgaccaccgctgcttccagcncggggcggcgcggcgctgaggcggcggcggcggcgctgccccctctgcgggaagcgggcggccccggccgcctccgcgagggcaccatggaggtgaatgcaggaggtgtgattgcctatatcagttcttccagctcagcctcaagccctgcctcttgtcacagtgagggttctgagaatagtttccagtcctcctcctcttctgttccatcttctccaaatagctctaattctgataccaatggtaatcccaagaatggtgatctcgccaatattgaaggcatcttgaagaatgatcgaatagattgttctatgaaaacaagcaaatcgagtgcacctgggatgacaaaaagtcatagtggtgtgacaaaatttagtggcatggttctactgtgtaaagtctgtggggatgtggcgtcaggattccactatggagttcatgcttgcgaaggctgtaagggtttctttcggagaagtattcaacaaaacatccagtacaagaagtgcctgaagaatgaaaactgttctataatgagaatgaataggaacagatgtcagcaatgtcgcttcaaaaagtgtctgtctgttggaatgtcaagagatgctgttcggtttggtcgtattcctaagcgtgaaaaacagaggatgctaattgaaatgcaaagtgcaatgaagaccatgatgaacagccagttcagtggtcacttgcaaaatgacacattagtagaacatcatgaacagacagcttgccagcccaggaacagctgcgacccaagccccaactggagcaagaaacatcaaaagctcttctcctccatcttctgattttgcaaaggaagaagtgattggcatggtgaccagagctcacaaggatacctttatgtataatcaagagcagcaagaaaactcagctgagagcatgcagccccagagaggagaacggattcccaagaacatggagcaatataatttaaatcatgatcatgcggcaatgggcttagcagccattttccctgtagtgagagccagnngcatctcaatggacagtcaaagggaggaatataatgcattacccaaatggtcntgccattgtattgcacaatggacattgtactgaaccttctccaatgcttatactcaacgcagctcatgctgcatacagcttcccgatcagcacggcactttccctccagtaactgcagacacccacaatagctccacctgtgccaaccacctgcgcaggcacagcaatgccatctggctctcgtccaactgcagctaagtctccactactgtggatcctcataacatccaggcacatgcaacatctgggccagcaactcctcgcatgcacgccttccctccaagccagcggacacgaacctggtcgcgacactccggcacaccccgctactccctgggctctcaccaccactctcatccttccagccactgaaccccagggatcaacccccgcacaccgggcctcgcgcacctcccacgcagcgccccaacccgcgccacccagcgaaccggcactccactcgaaccccgactcgcccagcgacaacgataccaagacacgcctcccaaacagctggcaacaggaacacacaaccgctcggcccgacatcacaccgcacgtccacaccggacgcaaccacagcggagaacccacgccaccaaaaccaccaaccgccacgcaaccccaagcgcagaaagcgcaaacaccaccccacccaccccaagagacaccaagcaacaagcagcccgcaaccccgaccagcccccccacggcactccgccgaacgaggctggcaccaacacacgccacccaacgcgccaacaccacgcacgcgagcacgctccaccccacacacacggccaccacaccacgacaaccccgccccgagcgggccccaacaccacgcccacgccacccacccggcgccacacgcgactccaccaccagcaccccacggcaacaggacacagcaccagcaacggccgaccaacagcacccgccgcgcacacagccccgcacgtccacgacaacccgaagcaccgcacacacaacacgcacagacaacacatccgagcacacgccacagcagccaacacagacccaccgacacagagtacctcaacaccgacacgcacaccccacaccaccaccacccgtcagcacccccgccgccgacccgccagcccagcgcccgcgacacgcccgccccgccacccaaccacccccccg

SEQ ID NO: 520084 - DNA, 104 bp, Homo sapiens
cagtggagctgccctcgcagggagctgcccctcgccatctaacagaagtatttaaacagaaactatatgctcagcctaccagaaataaggtagaaggttccagt

SEQ ID NO: 520085 - DNA, 831 bp, Homo sapiens
ctgttgtgatctatgtcctgggatacaagctgtgttgccagtagacctgtcaagcgtgaatcagcatgatccgtactattaccatcgtcgtgctgaatgtcgaagctcacgtgagctagcagcgcttaattggcagtccacgcgtcatcatctctcataggacgagcatgcccgctgaagagaagggcggattgcccattgggcataaacgtgaggcgcagtctaatccgagaagtagatctactatcctgcacgaaatgtaggcctctagtcagtcctcctactcatcgatctacgctcaccattcagcggtcccttataccatcatacgtctcgtagcctaccccttcatcgtacatccatcatcagagtcacacgtactcgcccagtaatctaacagacgtacaaaagaataacattcgatcagggttgtggaagcaataaccatcgacatgcaccaccgagtgtccctctgcctgagcgagcctcacatcgtcctgcgtgtcacctaccgtgcgttatcctctccgtaaccccttagtctggtccccgccctacttcaacatagcgctagaggttaagactcccatatgagttgccccattgcgccgaagatacacttagcacgcccacacagccgacccacaaaccagcactaaaagagccccccaagccaacaccgcaacgcccaggcccgttgtcaccgcaccgccgcagtccaccctggccaaccacgacaccacgctcacacagcacgacgcgacaaacaccccgacgccgaccccacccgtgcaccaccccaccaccatcacccatcacctccggccaccg

SEQ ID NO: 520086 - DNA, 112 bp, Homo sapiens
tcgaggattctagaggctgaatggctcgagatgtatccctgcctgtggagcttacccccagagggccgccagtgcagtcggtggtactgcagatggaggagtcgggagcaca

SEQ ID NO: 520087 - DNA, 868 bp, Homo sapiens
  misc_feature (30)..(30): n is a, c, g, or t
  misc_feature (102)..(102): n is a, c, g, or t
  misc_feature (155)..(155): n is a, c, g, or t
ccgcttttgttgtcagggacccagcgaggngcgccgctcgccggccgccgccaccctctctcgctgcagcctgctgtgcgctgcacggcctggggcccgggngccccgcccgctctgcccatgagggggccccgcgaccaccgctgcttccagcncggggcggcgcggcgctgaggcggcggcggcggcgctgccccctctgcgggaagcgggcggccccggccgcctccgcgagggcaccatggaggtgaatgcaggaggtgtgattgcctatatcagttcttccagctcagcctcaagccctgcctcttgtcacagtgagggttctgagaatagtttccagtcctcctcctcttctgttccatcttctccaaatagctctaattctgataccaatggtaatcccaagaatggtgatctcgccaatattgaaggcatcttgaagaatgatcgaatagattgttctatgaaaacaagcaaatcgagtgcacctgggatgacaaaaagtcatagtggtgtgacacgtaagtgactttggttttctaaagattgctgccattaattgcaaatggggcttattttatcagcttttcatttagggggccattatgtttctgggtacagttttcactccttgctgggtaatcatacatcagtagttagggaagaaatcagtgatgatgatagaagttataacctaggggctgtcattaattcttgcctcagagcaagacatgtgattatgtactctgcctgaccctggtccctctagggtaccctcttttactacatttcacagttacttttcttctgaactactagaactaagtctagtaactagaacagagtacttgctcactgtggggga

SEQ ID NO: 520088 - DNA, 588 bp, Homo sapiens
ccttttttgggccccatggggggggggggcccccaaccccaccaaaatttccttttttttccttccccccccccccgggggtgtaggcccccgggtggtggggggctcggggtggccccctacccccagccctttgtcctgggtgggccccccacccccagaccccttgggggaggggtggggcctaaatttttttcccgggtcctcccggggatttttgttagggggaaccccccccgttccccccttagccaccccctttttttggggtttcccccaaattaaacccggttggggccgccccgggccgggttttttttcccgggccccccttttttttaaagggggggggacccccccctttgtggggggccccgggccccccgtttttcaggatttttttttttggggccccccaacctggggggattttccccccccggaaatttggggttttttttcccccccggccaagggggccctttttttttcccccgggggttgggggggtccccctgggggggccctggggggccccccccccccccccccccttttgaaaaaaaaaacccctttttttttggggga

SEQ ID NO: 520089 - DNA, 192 bp, Homo sapiens
  misc_feature (16)..(16): n is a, c, g, or t
  misc_feature (77)..(77): n is a, c, g, or t
ggcccatttaaaaagntgagggtagtttccagaaaaccttttttcctacccctgccgttggcaggccccaatttccncaccccagccccttccatggtattgtagcaggggaattcccctcccccctccttgtgccttttttgtaaataggcttttcccggcgaccaataaacagctcccagtttgtatgca

SEQ ID NO: 520090 - DNA, 181 bp, Homo sapiens
ccataacactcatggatctgaatcagatggatactcacatgggagtcaagaaggtggagcaaacacgaagtctcgtggtcctataatggacaccccataattccatgaatggcatgatcatcattggcatcccttcttgtgcctatgggggtaccgacgctcgagatttcgtaagtcgtgg

SEQ ID NO: 520091 - DNA, 880 bp, Homo sapiens
atcacaaggtcaggaaatcgagaccatcctggctaacacagtgaaaccctgtctctactaaaaagatacaaaaaatgagctgggcctggtggcgggcgcctgtagtcccagctactcgggaggctgaggcaggagaatggcgtgaacccaggaggcggagcttgcaagggagccgagatcacgccactgcactccagcctgggtgacagagtgagactctgtctcaaaaaaaaaaaaaaaaaaagaagggaaaacacaggcttctctataaagtcgggtggagatctcattccattccatttggatacttatttaaaaacattactttggagccaaacctttattgtagagggccattagattctcagaagaacaaaaagctcattattttcccgtctgcaaaattactccagtagggaagattattgactcaaaaaagaaatttttatagaaggacatgcctgggtatagcattggttttcaaaaagggctttctagaacagtggcctttaaattggagacaatggagtatgcattagaaattaatgaagccagaagtggggggaacttgtgatccaggcaactccagttcttggaggctgcctatcacaatgaaataacttggtgtccctttcaccagagaagctaaaatgtgtcccttaagatagcattatttgtgtccccttactaaagtgcacaactcctgggtttgttaaccaagagcagagtgtgggcacggtctcatcacgtgtcgccctataatgtatttaattggccttaattgaaaaaaagacgctgggcacaatgggagacccgttcttagaaaatagaaatcgcagcggtgtatgccctggtggccccgactgaaggggggggaaag

SEQ ID NO: 520092 - DNA, 237 bp, Homo sapiens
cgacaccgttgcccggactgtccacggggtgccttgggtacccctctgggacctccgaccgtgacaacgggggctcttcctcgttttcttgctcatcagcccattcatgcattcattcaatgcatgcagtcattgcatatggtcagtcattgtgttcatgcgttccatctgctccggcagcagctcatcattgttgcacagcaggcatcagctcattcagcacaggcattcatggca

SEQ ID NO: 520093 - DNA, 341 bp, Homo sapiens
atgaaattgcaggaaggcgctcatcacagagataccagcttgctgagaacagaggcagagatgagggaatgcatctacaagctaggggaccccataagatagctgacaacccaccagaagctgggagagaggcatggatcagactctctcactgctctctcagggaaccaaccctgccgacaccttgaccttggacttctggcctccagaactgggagacaataactttctgttgttgaagccgcccagtctgtgggactttgttatgccggcccgagcaccagcaatgtgtggctcgcagtattggatgtagctccaggggatgctcgagagtcgagcct

SEQ ID NO: 520094 - DNA, 334 bp, Homo sapiens
cgagcacaggctgaaccaacatggtgaaaccgtgtctctaataaaaatacacaaaacaattcagccgggcatggtgacaccatgccttgtaatccgcagctcactcatggcaggctgcaggcacagcacaatccacttgaaccgcagtgagaaggaggtttgcagtgatgcctgagaccgcaccatttgcacttcagcctgggcaacaagacccaaactccgtctcaaaacaaaacaaatttggggcagccatctccttccacaccccatggggagaggactagggcttggtcagtctgctgctttcactgtaaaacaccagcgtggtgcaggc

SEQ ID NO: 520095 - DNA, 143 bp, Homo sapiens
tacagcttgttagcgcgtgctgtccggacagcacgcgctacaccaatcgtgcaggaagaatggacataagacagggacgtgacagtcattaataccaaaatctcttacctccaattctccacatcattcaagcggttgagccc

SEQ ID NO: 520096 - DNA, 422 bp, Homo sapiens
gtgcatgacacaaaccagggccggttgcctgtcatctcctggtctaagtgagcaactcatgtccgctctggtgtatgattgagccccagatccacgcgtaggtatgccagaaggtgttgagccctctaactgggttcgttttctgatctccatctgggagctatctggtggtgatcttctctggtggtcctgactgcgatcctggctgttacactgctggactgtgttacaatagtggtccccgagactctcttgtggccgctcaatcgtgccttatcttgcactctcttacctacagctgtacagtacctgtctgtttcctgtcctccttcctgttacatctgtccatgtctggagctcggctggccgttccctccagccccttgctggttatcttactctgagtctgaaggcagtctgga

SEQ ID NO: 520097 - DNA, 260 bp, Homo sapiens
  misc_feature (41)..(43): n is a, c, g, or t
  misc_feature (71)..(71): n is a, c, g, or t
  misc_feature (76)..(76): n is a, c, g, or t
  misc_feature (78)..(78): n is a, c, g, or t
  misc_feature (84)..(84): n is a, c, g, or t
  misc_feature (120)..(121): n is a, c, g, or t
  misc_feature (150)..(150): n is a, c, g, or t
  misc_feature (153)..(153): n is a, c, g, or t
  misc_feature (205)..(205): n is a, c, g, or t
  misc_feature (246)..(247): n is a, c, g, or t
caaaatctaaaacaaaatctgaactctcaaaagtctatttnnntaactgaaaatgtaaatttataaatatnttccngngttggnatgttgtagttacctactgagtaggcggcgattttnntatgctatgaacatgcagttcattatttngtngttctattttactttgtacttgtgtttgcttaaacaaagtgaactgtttggnttataacacattgcatgcgctttattgcccatgggatatgnngtgtatatcctcc

SEQ ID NO: 520098 - DNA, 306 bp, Homo sapiens
ccgttactatgaggggagaggagaaccctgaagtgggacctcccagtcacgtctcatgggcacagatcccaacagatctgatcaccagtctgatcagatcaaagcagagatgggtgcacatggaggtggacagtgtcagcccatgagcacccgtgcctccagtgctgcatggaatactgagccatgtgtcttcactcttgctctgtgcctcagattttacgaattgtaaaactagggcactacactagaagtactgggtacatttatgtgtgtgatgtaagacagggaccagcacagaggcccctt

SEQ ID NO: 520099 - DNA, 877 bp, Homo sapiens
gtggctgagctgctgtctcaggcctacagactgccatggagcagattcgagctggcaaactctgcctttcatctactgtgaagcaggtggtacgcagactaaatgagctgtacaaggccagcgtggtatcctgccagggcctcagcttgcgacttcagcgcttctttctggacaaacaacggctgctggacgggatccatggtgtcactgcagagcggctcatcctcagccatgctgtgcaaatggtacaatcagctgcccttgatgagatgttccagcaccgagagggctgtgtaccgagatatcacaaagccctgctattgctggaggggttgcagcacactctcacggaccaggcagacattgagaacattgccaaatgcaagctgtgcattgagaggagactctcggccctgctgagtggtgtctatgcctgactacctgctgccaacctgcagggtagggtctgagacctggcagactgtcctcaacactgatcagatccgatggtgctgagactgctgccagccaactccagcagggatgctccacagtggacctgtgcagactggtgcaatcttgcttcctagactgccagtctctgctggcaggtaagacatcagagtgccagggggtccctttggcccactgggaacagggagtttcttgaacattattcttccctaggcttgggttccccttggcaagcagggtatgggggcccgagaaagtgggaaccctggcaaccttggaaagaaggccaaagggaagcgctgtggtctccggcaaggggccctgagagaaccgttggtgaatcccaaagccaaaaggaaagtgtttctccacaagttacttggccccttggtgtcccgaaacc

SEQ ID NO: 520100 - DNA, 388 bp, Homo sapiens
ggacgatctctgaggatccccttcgttttactttgtcttcattaatgcctgttgcttgtgctgccttggagtcttgtgcttgatgctgtgaagcacctcactcattcccatagcacgctgtatgcctaggctcacgacaagctcaagtagcaagaagaactgaggagtggtggaacaggctcgaacactggccgaggaggagctctctgcctgccagaagagtctcgtcctgctcccacagtttggacggaccaagctgatttatctgtcacactcaggctcatgggcaggtaccagaagggtaattaaggtgctgtgtgaagtgcactgctgggagcccttagaacacagatacaagagaagtccggaagtctttgctggtggcaaa

SEQ ID NO: 520101 - DNA, 135 bp, Homo sapiens
accctatctcccaccatcgagcattgcttgaatctataatcaagatgagaatattaacaatagatcattagacatctctgtaaactgtacaaaaaagtcagcctaccgtacagaatatacacaaagtatgtacag

SEQ ID NO: 520102 - DNA, 233 bp, Homo sapiens
ggacgcgtgggcagcgcagcccggagtcgcccaggcctgaactcctacacaggtccccggccccacgcaccgggacccgcgaggacaccggaggccaaccaccgagggtggggagcggagcgcgcagtgtcagctctgactaagcgccaccgcagctaggaccatagatccaggacggaaaaagaaagctggataaagacatagagattaagacccatcacaagaaaatacaa

SEQ ID NO: 520103 - DNA, 119 bp, Homo sapiens
ctagaggatccctgtgctcatgtgatcctcagcctcagcctccaagtagctgggattacaggtgaatgccaccaacccaatgactttttatattattacgtagagatagggtttcacca

SEQ ID NO: 520104 - DNA, 171 bp, Homo sapiens
catgatacaatcgagctctgtacctgatcattcgtgtccgcatcggtgtatcgaatacgtcggggcgttccggataggccgagaaagctgttgcgtgaagaaagttagatgtacgccgatcaatattattagtgaacatgggttccggcgcttagtttggtctacgggagt

SEQ ID NO: 520105 - DNA, 261 bp, Homo sapiens
actgggtgcaccatgcttcctttggaagcttaaggtgaaagctattgggagctcgctactccgctggctttgaggaatcatccgtgcacggcaagtggtccttcaacacagggctggttcagattgaatagctggtaagtcaggtctctctttcagtggtgtactcagggttccgtcagtagcagccattcatgtagcctccagtgtattgaatcagtgcccaataggtggtcagtgtagagcacaattctgatctctgcg

SEQ ID NO: 520106 - DNA, 873 bp, Homo sapiens
  misc_feature (6)..(6): n is a, c, g, or t
  misc_feature (75)..(75): n is a, c, g, or t
  misc_feature (85)..(85): n is a, c, g, or t
  misc_feature (103)..(103): n is a, c, g, or t
  misc_feature (118)..(118): n is a, c, g, or t
  misc_feature (122)..(122): n is a, c, g, or t
  misc_feature (131)..(131): n is a, c, g, or t
  misc_feature (221)..(221): n is a, c, g, or t
  misc_feature (232)..(232): n is a, c, g, or t
  misc_feature (242)..(242): n is a, c, g, or t
  misc_feature (245)..(245): n is a, c, g, or t
  misc_feature (248)..(248): n is a, c, g, or t
  misc_feature (356)..(357): n is a, c, g, or t
  misc_feature (363)..(363): n is a, c, g, or t
  misc_feature (425)..(425): n is a, c, g, or t
  misc_feature (460)..(460): n is a, c, g, or t
  misc_feature (602)..(602): n is a, c, g, or t
  misc_feature (714)..(714): n is a, c, g, or t
  misc_feature (724)..(724): n is a, c, g, or t
  misc_feature (742)..(743): n is a, c, g, or t
  misc_feature (754)..(754): n is a, c, g, or t
  misc_feature (760)..(760): n is a, c, g, or t
  misc_feature (786)..(786): n is a, c, g, or t
  misc_feature (791)..(791): n is a, c, g, or t
  misc_feature (807)..(807): n is a, c, g, or t
  misc_feature (860)..(860): n is a, c, g, or t
caaagngatcatcattgaggcttctgttaaaagttcttccaaagtagcccagttttaagattaaagcaatattgnactttaagangagctagacgggggggcnggcggcggcaaagangggngggggtgcnccatctgtgcttttcttagactaaaagcgatactgcagaaaactctattttaaaaatcgaacactgcagggtacagtaacataggaaagnacctgcctatnttagaatccnagngancatttcattgtaagaaactagcccattatttaagtgtccacagtatttttcatttcagtggtccaagatgcgaaggtttccagacacaatcttgttctcgaatactgnnccaggngggatatcaattctgtcaccatgatttgcaatgatgataaccgtcccctggaatgaaacagnttttccaaatgtcacatcgcctgaaactgtgaggngatccaattcaagcatatctggtatactttcaaatcttctgagataatcttgaaccttcggaaaagaactgcctaatttaaccaagggcactggaggaaattcccgcttttcactcattgtcagagatcctgcattaagacnatagaggggtggcatcaccagcaagagatctgatgtggttttgacaggcagaaaacggctccgggcacattaatacgctagagaattctcaaaacttttgatggcagccccntactgcagtntctaattgaatgacattnnggcctccatcngggggntttgcattcacaatgatttccatgtnaatgncattttgctcctgcantcttttaactgctgctagagaaatccataggttgtttgtattaaatattttgnactttgatacaga

SEQ ID NO: 520107 - DNA, 664 bp, Homo sapiens
cttggggtgggaaggggacgggaatggggtcagtgggcttgagtgtgcctagtatgcatggcagctccctctccctgcctcctccccagtgtgtgttcagtgctgcagtggtgtgccatgcatggcccttcagtggccccttatcttgtgccttgtgaacgtatgtgtgtacattgagccatgcaaggcccaatgaatggacagaggaatatgatgccccacaacagagagctgattgtccaggtaatgagaatgcccccgtcccatgcacctgacagccactggcgctctgagccccctgtcgcagcgtcggggcgcgtccatgcatggcccatccaggggagtggtcagacacatgcttggcttgtggatgccttgctggcaccactgcggccgtggacccatcccagaagtgggaccctcagtatggcgggattctgtgctccaggacgcctggggagtctcatgcccaggacaatggcgaggccccccttgtagtactacagactttagctacaaaggtggcccacctgggcccaaaggcgaggctaggattccctgtgcctccaattcccctctttgaaaggctcttgcacagttgttgcctgcaaggatgtgctaccttggagccttgggtggccaggcatctagagtgccaaagggg

SEQ ID NO: 520108 - DNA, 186 bp, Homo sapiens
acgactaccagcagcactctcgcccagcctcggcctaaaagggaaatcttaattaatcaggtagggttcacacgatatttcttttttaaacacaaccccaccctcctagagaagcacaagggtcacgagtctggtccacacaacttcagcttggcatcacgagtctggtatcccaagacactcagg

SEQ ID NO: 520109 - DNA, 228 bp, Homo sapiens
tggtgtctctgcaggatccccttcaatgctacccgcctttgaaaatacttagagtgtcaaacgcatggcccgatccgcctggcattccgctagtctagtcaatagtgtgaatatgaccgcggttctattttgttggttttcggaactcaggccttcattaatagggacggccgggggcattcgtcttgcgccgctagaggtgaaattcttggaccggcgcaagacgga

SEQ ID NO: 520110 - DNA, 231 bp, Homo sapiens
ctactctattgttaaccacttataagggtctgttaggaatagtatgtgggcagagaaaaagtacaaattttacctgctttacaattcttccagagctactctagaagccacatgactaagtagaaaaaaatctttcagtgcacaataaaaacctcagctttaagtcaattttcccatcttaaaagtacttaccatgggccggacatggtggctcacacctgtaatcccagc

SEQ ID NO: 520111 - DNA, 435 bp, Homo sapiens
  misc_feature (45)..(45): n is a, c, g, or t
  misc_feature (78)..(78): n is a, c, g, or t
ctgggtcaagggaaggaagtcttttaaacaagaccgaagtttctntctcccacaagggagtcacatctttgtattttnatatttgccagataacatccatagactcactctttcccgtaatccacagttccatggagtactataatagctgccataaaagtaagtgtgcatcccctgcttgctccaccggttccctggtaacaacttgctggggctttgcaacatggcctactaaccaacaatcactagggctaatcatgcttaccaaaataccttcagaaccagattgtaaaactaacatttgcaatcctgtgaatcttaccaccttggagccaaattggctcgtatggactacaggtttaaaagcaccactgagggtacaagccagcagccaagaaatagactcaagagtctatgtctatattatatacataa

SEQ ID NO: 520112 - DNA, 941 bp, Homo sapiens
tccacccgggggcccggggggccccctccggggccccttcctgggaaattttctttttttcccccccctttttttttattttttagggggcgccgctgttgttccctactcctaaaaacgaacaggtcggcccaaaaaaataatatttctttctcgtggcgtgagtgtgaaaatattatcatttaatttccgcccagagtgttgatagaaagagttgtgtggcgtgcccaccccccaaccaccagcttgttgttgtgactacgcgttgctacactcaaacatgacgtggtgtgataattttttggagctcacacagtgtgtagtagtgggccttatattgttgggcggcccccaaaatattattattaacccgctcgtgctctgtgtgaaaacaaaaaaactgtgttcaacatagaaggtgtgctgctgtccacatattttcaacaagaacaccaaaccaaacatggtggtgctgttggagatcttttctcgtggagaacccccctctcctgttcttataacccagcggcgcggcgcgatcgccgcaacttacctcaccacttatttttgtgggcccacttgttggggccgccctctttgaacacgatcattcctctcattgcaggggtcgtctcacaaccagatcttcttgtagacttcttcaccaagcggccgtcttttctattcttcccaccctattatatgggtggcgcccaccccctttgttttttttcaaccgctctcctcttcctaatacaaacgcgcggcgtttacagagtaccatcatcgtacctctcgtggttctcctatatgcgtccccctacgagttgtggccccgcgatattacctcctgcacccccgatggcagggcgaccgttctacgccgcccttaattgcggtgtttgttatcccgccttttttgtttctgccccagcatcggg

SEQ ID NO: 520113 - DNA, 173 bp, Homo sapiens
ctctagacggactccccctcgctgggggcgacactgagcaggtgcaaagttatctgaacggagggacaggctgggcaggtataagcaaggcttcaggcctcattctccaagcccacttccagccccaggcaagagaagcccgtcgctgggggcgcaactgctggaggggcaca

SEQ ID NO: 520114 - DNA, 272 bp, Homo sapiens
acccctgcatcccggggagcgggagtttccctgtaggagtttatcatccaatttgaggagggcagcagggggcactatttcctcagggtgaggtctttagttaggcctcccagcccaagctaagccatcatatcccctgtgacctgcacgtatacatccagatagcctgaagcaactgtaaaaatatccttaactgatgacattccaatattgtgatttgtttctgccctaccctgactgatcaatgtgctttgtaatctccccggatacag

SEQ ID NO: 520115 - DNA, 272 bp, Homo sapiens
atcgagtcggtacacatgatgctcaccgctcagcctaggtgacagagtgagactcacaaaaaaaaaaaaaaaaagggctttgggtgttttttaaattcccaaaaggttaaccagaaagatcgctaccaaatacttgtttataattaaggggatccggggttaaaggacccaatattctacttagacggaaaaggactatcaaggtccggggtccagaattcactggcatttcctctctttaagcaacagtaaaaatgtggtattttccaaaa

SEQ ID NO: 520116 - DNA, 259 bp, Homo sapiens
  misc_feature (7)..(7): n is a, c, g, or t
  misc_feature (17)..(17): n is a, c, g, or t
  misc_feature (82)..(82): n is a, c, g, or t
  misc_feature (108)..(108): n is a, c, g, or t
  misc_feature (201)..(201): n is a, c, g, or t
  misc_feature (203)..(203): n is a, c, g, or t
  misc_feature (217)..(217): n is a, c, g, or t
  misc_feature (228)..(228): n is a, c, g, or t
ctcaccntcccacccangattgtgaggcctccccagccatgtggagctatgagtacattaaacttctttcccttataaattncccagtctcatgtatgtctttattanaagtgtgaaaacagactaatacactggtaaagcactatttgggctgtgtctgtgaggatatttccagaggagattagtgtgtgagtctgagtntnctgggtggggaatntctgctcttgntgtttcaagtgtttttgaagattataccagt

SEQ ID NO: 520117 - DNA, 521 bp, Homo sapiens
  misc_feature (39)..(39): n is a, c, g, or t
  misc_feature (67)..(67): n is a, c, g, or t
  misc_feature (125)..(126): n is a, c, g, or t
ttgtttgaaaaaaaaaaaaaaacccccttcccctctttnaccccccccccccccaaaaaatttttanttttaataaaaaagggggggggggggccttcttccccttgtgggaagggggggaaaannttttttttttttttttttcaaaaaaatttttataaacctctttttttttttggggcggccccacaccttttcttataaaaaaaaaaattttttttttcccccccccccccccccccaaaaaaaaaaaatttcttttccggggaaaatttccccacaaaaaaaaaaaaattttttttttcccccccccccccgaaaaaaaaaaaacccccccccttttttttggaaaaaaaaaaaaggttttttaaacaaaaaaaaaaaagtttgtgggggccccccccccaaaacccccgtaagagaaaaaaaaacgcccaaggatttttccccccaaaaaaccccccccccccctttttgggggccccccccttttttttttttttcccccacccctaagggga

SEQ ID NO: 520118 - DNA, 400 bp, Homo sapiens
  misc_feature (63)..(63): n is a, c, g, or t
  misc_feature (154)..(154): n is a, c, g, or t
  misc_feature (288)..(288): n is a, c, g, or t
  misc_feature (324)..(324): n is a, c, g, or t
  misc_feature (329)..(329): n is a, c, g, or t
cagaagcaggagcaaaatatggcctttcttctaagagatataatgttcactaatgtggttatnttatattaagcctacaacatttttcagtttgcaaatagaactaatactggtgaaaatttacctaaaaccttggttatcaaatacatctccngtacattccgttcttttttttttgagacagtctcgctctgtcgcccaggctggagtgcagtggcgcaatctcggctcactgcaacctccacctcccgggttcacgccattctcctgcctcagcctcccgagtanctgggattacgggcgcccgccaccacgcccggctanttttntgtattatgtagtaagagacagcggtttcaccgtgctctagtcactggatggtctcgatctccatgatctt

SEQ ID NO: 520119 - DNA, 278 bp, Homo sapiens
  misc_feature (1)..(1): n is a, c, g, or t
nttccggacgcatctgcggtttatttttagcaccaactttaaggatttttattatgacaatagaggggaatgagcatttggcaagggggacgaaaaatccccccaaatatgcgagtgtgttaacataatgattgcagtttatttttcactcaggggaaatccaagatgggggtgcctgatctgcctgtgactctcctccaacccagactcctttcaaactggggctggggggggttcaatatggagcttccaaaatcaccctgctgccctgcatcaag

SEQ ID NO: 520120 - DNA, 159 bp, Homo sapiens
agaagctgggtgatgttctggtggacgtggaagatactggaacgacaccagcatttaggcaaaagccagtcgtattttgcatccgaagggaggaaaatagggttctcatctcccgggatttggttgagctggatggcaatggggacaatcttgttggcc

SEQ ID NO: 520121 - DNA, 287 bp, Homo sapiens
  misc_feature (47)..(47): n is a, c, g, or t
  misc_feature (186)..(186): n is a, c, g, or t
aaagtcaaactatctctctttgtggatgataggattctataccttgnaaaccctaaaaactccaccgaaaggctcctggaactaatacatgacttcagcaaagtttcaggctacaaaatcaatgtacaaaaatcaattacataatttctacacaccaacaatattcaagctgagagccaaatcagnacacaatcccatttataatagccacaccaaaaacaaaacaccaacataaaaaatcctaggagtacgtataaccaagaagatgaaagatctctacaaggaga

SEQ ID NO: 520122 - DNA, 163 bp, Homo sapiens
gcaccactgcactcaagcctgtgcgacagagtgagactctgtctcataacagacagacaaaactatatgacactgtattggtgatttatgatatgcatttggcagaagtatacagtatctctttgcttgaatctataaaaccatggaccttagttaataatag

SEQ ID NO: 520123 - DNA, 558 bp, Homo sapiens
  misc_feature (366)..(366): n is a, c, g, or t
  misc_feature (475)..(475): n is a, c, g, or t
caccgcgctcgcttccgcgctgtcaggctagcgccgccgtccccagccgtcaccatgatcatctaccgggacctcatcagccatgacgagctgttctccgacatctacaagatccgggagatcgcggacgggctgtgctggaggtggagggcaagatggtcagtagaacagagggtgccatcgatgactcgctcatcggtggaaatgcttccgctgaaggtccggaaggcgaaggtaccgaaagcacagtagtcaccggtgttgacattgtcatgaaccatcacttacaagaaaccagcttcacaaaagaggctttacaaaaagtacatcaaagacttacatgaaatcacttcaaaggcaaacttngaagagcagaaaccagaaagagttaaagccttttatgactggagctgcagagcagatttaagcacatccttgctaattttcaataactaccagtttttttatttggtgnaaaacatggatccagatgggtatggtttgctctccttggactaccggttgaagatggtgtgactcccattccatgattttctt

SEQ ID NO: 520124 - DNA, 159 bp, Homo sapiens
gttatgtcaaaacaaatgataagccatacacaagcactatagtgacgaactctgatctcttatagctaggagtgcgttaatcatttgtattgccacacatgtagagctcctcggattccggcctcactcatttacaccgcaatcggccatcttcgagga

SEQ ID NO: 520125 - DNA, 491 bp, Homo sapiens
aaacgaaatccctgatttacctgaaaataattcagaagggtgattattaagctaatcaaggaggcaccagagaagggtgaagtccaacttttaaaaaattcaaaaaatgatacaagaaatgaggagagaaatcttcagtgaagagattgcatacattttttgttgttgttgtttttgagacggagtttcgctcttgtcacccaggctggagtgcaatggagtgatcttggctcactgcaacctccgcctcccaggttcaagccattctcctgcctcagcctcctgagtagctggggctacaggcacccaccactacgcccagctaagttttgtattttcagtagagacggggtttcaccatgttggccaggctgatcgcgaactcctgacctcaagggatctgcccaccttggcctcccaaagtgctgggattacaggcatgagccaccgcatctggctatgatagtactttttgataatgagctttaaaa

SEQ ID NO: 520126 - DNA, 1885 bp, Homo sapiens
ggactcatggctgctcgcagagctctgccacttcgtattcaatgtgtggaaactcgcttccagacggacgcgataacgtatcgcggacgtcctggtggcatgagcggttcttgctggcgatgatggaatttggcaacgaaggcgtgcaaagcatgccctgtcacatgcggtcatgatcaccgttgtctacgttacgagatctgcctctgtaggctctagactcacgaccccgtggataacaagcaagaacgagctctcgtccaacagcccttcatgaatagggcacaatcggcacgtcaacagacgagatggtgcggatattcgtggccgtgaggcgcatggatctattggaggctcagcgaaacccgtgcatcgttcaacagatatcacacgggccggtccgcgaagcacttgacacacgacgtatgcgccacactgcaccctccacacatgagggacactttcaacagacgtaccgccattccatcagctcgcacggagcatagctacgagccgacactgcacagaggaacgcctgggcatgtctcggggcccaagcttggcaacgtggatacatggattcggacacgagcaacgaggactggttatatccactcgggaaacatagccccggcaagggtactcccgcaggcgagcaaaggcaggtatattacttagcagcgattttacactaatttgactatagagcgaggcacacattaccggacgcgagtgataccgttgggcgccatcacaaggaagtcccagcaggatatttacgcacttgggatcacctagcacagacacaacacgggattcagaaggcattaccggataactgcgacttgaaggacttcatgctcccagctgggaacatttcccttatgacccgaagctgacacggttcacccgttcgtggatatcactcttaaaccctgtcgggcggcatggtctacacaagtgtccagtaagagctagtggatgttgagaaaacattcgcaagagcacagagtgcagagcaattcggaacaaacacacagcacgggaatgtcgaatcgacggaataaagcaaggtcctatagcaatgcgcgtcacacatatcatgtggagcgttggacagaagactatactaactgggaccgtttggacaggttagtacgtccaccccccacgagcgtggtgttctaacatcgatcgcgttgtggtggacaagacgccagttaacctacgggcgcgcgtcctagctatatcagataaccgagcaacgatagtgacagtacgggcttgtgagcacaacgcgcgcagtgattgctccaagtcgcgcacaaagaggccgcagtacaatgatggtgagcgagcagccacaggggtggtaaggacacagtaagcaaagcgaataaggaggccaccacccacccgaaagggaagcacaagtacaagacacaagcccagagcgaatactcgtactgaaggaatatacccaactgttatgagacatgggcaaataagaaccgtgcgcgcagcgacagatcgccgcacagaacaccggagactacatcaggcaacatagcaccacacccatggggagaaagacggaccactagtgggaaacagcaccactcaccaaaggccgaaacgaacacgctccacacaacacagactgtcaagcaagcgggactagagacacagaaggaacacgtcagcggcgaccacagaacacagctcattacgtagcgtcaaccacggcacacgaggcagcgcacagtcagagcacaacgtacgcgagcgaacaaggcgagccacagtgcgtcgacaaatcaaacacgcaagtcataacagcaccaggaacacgaacccatacagaagcaatgggacaacgaacaag

SEQ ID NO: 520127 - DNA, 827 bp, Homo sapiens
aaatcgacgctgctgcgtggcttcagcaaaatgtttgaactgtacccggagcagcgtgcggaaggtgaaagtctgcttgatggcgacaacatcctgaccaactctcaggatatcgcactgctgcgtgcgaaagtgggcatggtgttccagaaaccgacgccgtttccgatgtccatgtggggacaacatcgcttttggcgttcgtctgtttgagaagctctcccgtgccgacatggacgagcgcgtgcagtgggcattgaccaaagccgcattgtggaacgaaaccaaagataaattgcaccagagcggttactctctctctggtggtcagcaacagcgtctgtgtattgcgcgtggtatcgccattcgcccggaagtgctgctgctcgacgaaccgtgttcggcgctcgaccctatctctaccgggcgtattgaagagctgatcaccgaactgaagcaggattacaccgtgggtgatcggcacccacaacatgcagcaggctgcgcgttgttccaccacaccggggttatgtacctgggcgaattgattgagttcagcaacacggacgatctgttcaccaagccagcgaaaaaccaacagaagactacatcaccgggtcgtaacggtgattcaggatggcgtttggacatgctaatcttataaacatatttcggccagtcaccgcgaactggaagtttccgacccagtgaggccctgggcggatgggggacatcactttttgatcatcaccgattctaaccagacaggtctgggaatccgcttcaggcaacaacgtaattgatgaggtggacgtgatctcgtgcga

SEQ ID NO: 520128 - DNA, 844 bp, Homo sapiens
gtgtgtgtgtgtgtgtgtgtgtccgtgtccctgagttaagaatggtttttaggcttgtataggattaaaaaaaaaaaaaaacccacagaaaattgtgggcgcccagataaaataccgcctttcacaaaattgtttggctgcccccggaactggtcactctcgggttacaagagttgggtttctttgaaacagtctgggctctgtcacccaggctgggagtgcagtgggcatgatctcgggtcactgcagcctccacctcccgggttcaagcgattctgcctcagcctcctgagtagctggggattacgggtgtgcccaccacagacagctattttacagggtgtacaccaccacagccccaggaattcgcttgaacccgggaggtgtgggcgttgcggtgagccgagatcatggcagctggtactcccagtcggggtgacacactgtctgaacaaataacagtttagttctaggtacaacttagtggtctacccaaccaggaagctgtgaaattagaagtaatttaaaagcatacttacccctctatataactcaaagtaggggcaagataaacacttgtcagtcacaacgatgttctcattatttcagatagggagccctgccacaataaaatcatttgtgaaagcggtagggggtgtatacatctgcacaaaatccctgacttgtttcacatttagtggactcgaccccttggtgtaagccttgggtgggcaagaaggttcctagagagcagaatttgaactcccatgggcatcccaggtggcgcggcagaaaggcggaaagcccatcttttgacgaaaccccgggcaacaccgggcgacac

SEQ ID NO: 520129 - DNA, 207 bp, Homo sapiens
aagtcgggctgaccaggtgaggccgcaggtctaagaccaaggaagcacgcaagcgcgtgaaagcgctccaggcaagaaggaggagatcatcaagactttatccaaggaggaagagaccaagaaataaaacctcccacttggtcggtacatacgggcctcggtgattacttagatcatgccgttaaaataaaacaagccttatcggcg

SEQ ID NO: 520130 - DNA, 159 bp, Homo sapiens
aaaaattttgtgttattaacaaaaattcatatttgggggggcttaacggtatttcaaaaggtcatcaaattgtgagactgcttcccttaaacatttttgtgctattgttttaaaaaaataattaaaaaacagttggggttaataaaaatgtccatgtga

SEQ ID NO: 520131 - DNA, 773 bp, Homo sapiens
  misc_feature (85)..(85): n is a, c, g, or t
  misc_feature (92)..(92): n is a, c, g, or t
  misc_feature (101)..(101): n is a, c, g, or t
  misc_feature (103)..(103): n is a, c, g, or t
  misc_feature (106)..(106): n is a, c, g, or t
  misc_feature (118)..(118): n is a, c, g, or t
  misc_feature (121)..(121): n is a, c, g, or t
agcttctcctccaggtctgacaagaaagggccaaagaccattgcagagatgaggaagcaggacctggctaaagacacggacccancaaagtnaagctcctngnctngatgagggcaangancgggacatcccggccctgctgtccaccttgcacacagtgctgtgggacggggagagcccgctggaacgcccgtgggcatggccgacctggtggctccggagcaagtgaagaagcactatcgccgcgcggtgctggccgtgcaccccgaccaaggctgcggggcagccgtacgagcagcacgccaagatgatcttcatggagctgaatgacgcctggtcggagtttgagaaccagggctcccggcccctcttctgaggccgcagtggtggtggctgcgcacacagctccacaggttgggagccgtcgtgggacctgggtccccaccgtgaggaccccgtgggcgacagcaggtgtggccagggtggggctccgagccccgggtcaccgcccgcccagcgttccaggcacatgaagagaaagcattccaaagcctctgattgttgtttcctttttctcctcccgaaggaacagctgattcatgctcctcccgcaattgtcacgtctgtgatttatttggtgtttcgggcgtggcctctggagccccggcacgtggtgggccacgctgctggcgctcatgggccctggtgtttgcaccgcactttgtaatcagtcccgtggttgtctgtacagaattaaactattttccgatgaa

SEQ ID NO: 520132 - DNA, 300 bp, Homo sapiens
ggaagggtggaggtgagggtggacccatctggctgtgctgcacagtgtcctcccccgaaccatcgaccgcctaggtcttttctctggccgtttccaggcaccttcaccgtcccctttccttcgacaggggacgtagccttttcttgctctggaagcccagggaggtttaacagttaaaaaaggaaaggactaacgtgctccggaaaggtggaggtttctcttttaagtccttggtctaaaaagcgctgtcccttttttctctcccccttttttttttctaaataaaatttgcccacttta

SEQ ID NO: 520133 - DNA, 803 bp, Homo sapiens
  misc_feature (85)..(85): n is a, c, g, or t
  misc_feature (92)..(92): n is a, c, g, or t
  misc_feature (101)..(101): n is a, c, g, or t
  misc_feature (103)..(103): n is a, c, g, or t
  misc_feature (106)..(106): n is a, c, g, or t
  misc_feature (118)..(118): n is a, c, g, or t
  misc_feature (121)..(121): n is a, c, g, or t
agcttctcctccaggtctgacaagaaagggccaaagaccattgcagagatgaggaagcaggacctggctaaagacacggacccancaaagtnaagctcctngnctngatgagggcaangancgggacatcccggccctgctgtccaccttgcacacagtgctgtgggacggggagagcccgctggaacgcccgtgggcatggccgacctggtggctccggagcaagtgaagaagcactatcgccgcgcggtgctggccgtgcaccccgaccaaggctgcggggcagccgtacgagcagcacgccaagatgatcttcatggagctgaatgacgcctggtcggagtttgagaaccagggctcccggcccctcttctgaggccgcagtggtggtggctgcgcacacagctccacaggttgggagccgtcgtgggacctgggtccccaccgtgaggaccccgtgggcgacagcaggtgtggccagggtggggctccgagccccgggtcaccgcccgcccagcgttccaggcacatgaagagaaagcattccaaagcctctgattgttgtttcctttttctcctcccgaaggaacagctgattcatgctcctcccgcaattgtcacgtctgtgatttatttggtgtttcgggcgtggcctctggagccccggcacgtggtgggccacgctgctggcgctcatgggccctggtgtttgcaccgcactttgtaatcagtcccgtggttgtctgtacagaattaaactattttccgatgaaaaaaaaaaaaaaaattggcgcgcagcttat

SEQ ID NO: 520134 - DNA, 271 bp, Homo sapiens
  misc_feature (49)..(50): n is a, c, g, or t
  misc_feature (52)..(52): n is a, c, g, or t
cgcggccgcgcgacaggctgcgagaagacgacagagggcagaagagaanncnccaaagcctctgagttgcctctcctcccgaaggaacagctgattcatgctcctcccgcaattgtcacgtctgtgatttatttggtgtttcgggcgtggcctctggagccccggcacgtggtgggccacgctgctggcgctcatgggccctggtgtttgcaccgcactttgtaatcagtcccgtggttgtctgtacagaattaaactattttccgatgaa

SEQ ID NO: 520135 - DNA, 1365 bp, Homo sapiens
ggtgaagaaaatatgttagaaaggaccccataaaaagaaaatgaaaggactttgcattccgtggctcaaaggttgcagtgctcaacaatcatgtggtaaatttcccagtcacaacaggcagttcagcaacatgtcagggtcacaaatgcaattcaaaacttctttttcaaacaaacatccattcgttgaccgttcatttaacagcagtcaagccggtctccctagggccatgcgaacagtcaaagcaggcaacactcacaacaacccagcacacagtcacacataggaccactggcatcattagccagcttgcccattgtggggccattatgatccagcacttccaagggaaaccttaagaagggttccccacacggttttatatcacaccacaaaggccttgcggcaatccacacttctaactggccaacacgcaacccaagcggcgccacattataagagaggccacattatggtacacaacacgacaagagagagcaattagcgcaagcaaaatttttggcaacacagaccaccttttacgccgttttattgcagtaaaagttttaagagaagcacgggagcccaagattgggttagcaactagtgtttctgtcgggaacacaatgagggcgtattagttaacgccacctagttaccggggatatacagaagcagtgattgtttgatacaacgcacgggggggtgctatcacggaacaccattgttcatcggtagcaacacacacagaacctgcgacgaatgctcaggttaccgctgaaaagcatacagaaaaggagccaaacaataaaaaggaggtgtgaccaacaagcggcacaccctgtgggctgggcccccaaacaatatggtggagttcaaacacaacgaagaggcttaacgaagtcatggaagcagcactacccggaattagactaggtaagagagaaccgacgatacctacacgaacaacggcggtccccaaacaacaaacgacgggggtagcactcaacactggcacaagtagacttaccgccaaagttatactagcacccagtattccaccgagatgccagtcgagggagaaaaagggacggaggcacacaacacaaccatttgatagaatgagggggcaaccccaagatgttatgagtttgacagagaaaaagtcaagcaggatctagtcagtgttcgatacaaaaggggcgtggagaggaacacacacaaccacgttataatcatcgtacgtggggcaagttatattgatcacccgtcatgtattaggtatgcatacgtctgccaacaccgaacatagatactagtgagggcggcagacgaacaaatcgtatgtaatcactcagacaagca

SEQ ID NO: 520136 - DNA, 443 bp, Homo sapiens
gactctaatccattctcatatggaccattctagcctcctcaccttgcttacctgtaaattcccactccaactgtaagaaacctggctcccactatccatcattgatttatttatttgttctattccagtatgcttgtgcagtcatgtgctgcattttggtcaatgatagaccacatatgcaacagtggtcctgtaagtttacagtggggctgaaaaattcctactgcctactgatgttgtagctattatcatgtagcttgatgcattactcgtgtttgtgatgatactggtgtaaacaaacctactgctctgccagttgtataatattatagcacatacaaatacacacagtacatacttgaaaggtgactatgttactagtttgtgtatttattatactgtactttttatcactgtatgacagcatactccttctacttatt

SEQ ID NO: 520137 - DNA, 744 bp, Homo sapiens
  misc_feature (85)..(85): n is a, c, g, or t
  misc_feature (92)..(92): n is a, c, g, or t
  misc_feature (101)..(101): n is a, c, g, or t
  misc_feature (103)..(103): n is a, c, g, or t
  misc_feature (106)..(106): n is a, c, g, or t
  misc_feature (118)..(118): n is a, c, g, or t
  misc_feature (121)..(121): n is a, c, g, or t
agcttctcctccaggtctgacaagaaagggccaaagaccattgcagagatgaggaagcaggacctggctaaagacacggacccancaaagtnaagctcctngnctngatgagggcaangancgggacatcccggccctgctgtccaccttgcacacagtgctgtgggacggggagagcccgctggaacgcccgtgggcatggccgacctggtggctccggagcaagtgaagaagcactatcgccgcgcggtgctggccgtgcaccccgaccaaggctgcggggcagccgtacgagcagcacgccaagatgatcttcatggagctgaatgacgcctggtcggagtttgagaaccagggctcccggcccctcttctgaggccgcagtggtggtggctgcgcacacagctccacaggttgggagccgtcgtgggacctgggtccccaccgtgaggaccccgtgggcgacagcaggtgtggccagggtggggctccgagccccgggtcaccgcccgcccagcgttccaggcacatgaagagaaagcattccaaagcctctgattgttgtttccttttctcctcccgcaattgtcacgtctgtgatttatttggtgtttcgggcgtggcctctggagccccggcacgtggtgggccacgctgctggcgctcatgggccctggtgtttgcaccgcactttgtaatcagtcccgtggttgtctgtacagaattaaactattttccgatgaa

SEQ ID NO: 520138 - DNA, 462 bp, Homo sapiens
  misc_feature (85)..(85): n is a, c, g, or t
  misc_feature (92)..(92): n is a, c, g, or t
  misc_feature (101)..(101): n is a, c, g, or t
  misc_feature (103)..(103): n is a, c, g, or t
  misc_feature (106)..(106): n is a, c, g, or t
  misc_feature (118)..(118): n is a, c, g, or t
  misc_feature (121)..(121): n is a, c, g, or t
agcttctcctccaggtctgacaagaaagggccaaagaccattgcagagatgaggaagcaggacctggctaaagacacggacccancaaagtnaagctcctngnctngatgagggcaangancgggacatcccggccctgctgtccaccttgcacacagtgctgtgggacggggagagcccgctggaacgcccgtgggcatggccgacctggtggctccggagcaagtgaagaagcactatcgccgcgcggtgctggccgtgcaccccgaccaaggctgcggggcagccgtacgagcagcacgccaagatgatcttcatggagctgaatgacgcctggtcggagtttgagaaccagggctcccggcccctcttctgatggcgctcatgggccctggtgtttgcaccgcactttgtaatcagtcccgtggttgtctgtacagaattaaactattttccgatgaa

SEQ ID NO: 520139 - DNA, 402 bp, Homo sapiens
tggttagggttgtgggaggttgtgagggttgtgtaggaggtgtagaaaggatagggtatttagagatgcggttaatttatttcttgtttagtattggggtaagtttttgaggtgataaatgatatgtgtttagctgaaggatgttataggtttattcttttattaaggagtattaggttaaggagaatgattttgataggctggtgctatagtatgtttctagtgcttgaggttggcccagagttgttaggaccatgaagtcaggacagaggtcaggagccagccttgcagccctccccacccggcatccacctgcatcccctttgggggcaggagcccacccccagcacccccatctgttaataaatatctcaactccagggtgttccacctgaaaaaaaa

SEQ ID NO: 520140 - DNA, 311 bp, Homo sapiens
ctcggacctgttcgagctgggcgagctttgggctcctcttacgtgggctgtggcttttcggtgtgacacactttccattgtgttacgacacggactgacgatcttcacagccggggcttcttttcgggaaaggctgcagaggccgcctgctcacaggattacctcttctgatccttgggttcctgatccacagtttcctgacggcaggctaggacttctgtctggcgattgcctcggcacgtgccacgttgtctgtctccgcctggatccccgaacgccccatgactcctctgggacttcgggaaccctcc

SEQ ID NO: 520141 - DNA, 1611 bp, Homo sapiens
  misc_feature (1031)..(1031): n is a, c, g, or t
  misc_feature (1089)..(1089): n is a, c, g, or t
tctggtgtgctggctctgtgttcgagaccgacacaggtgtgttgcttgttgccacacgctgtgtctatgtgttgttcgtggcttgtgtgtctccgatgacgaagagttggggggagtccttctgtcgggtggcccctccatatatgttggtaggtgccgcctcgtcgtggggggtgttctctttctccgtgtcagtggcaatgttgggctcggtcgtgttggtaagcacgtttgcttcttgtctcgttggtcccgctggtgtggggggggttctcctatagttatgtcgccccctctgttggttgggtgtagccttgtgggccgaccgcatcagtaggtgatgtcatcttattttgcagtgcaacatggtggtgtttacacatcaatccctcttcaagtgaatagtgtgtttaatactcgatccactgttctgtctaataatagatggtttgatcccacccacgaatggtcttcaatttgttgcccaccatctccaccatatttatctgttatttcttgtgtgaaaaccccaacgccttatgaggctccctccgttgttttgtataatatagtgacataaaattgttgtcgtgggccctcccccccacctgtgttatgcctttggaggatggtgtcgccaacagaaagtgtgttttggaggggagggtcaacacctgtgttccacgtctgtgtggtcttggtcgcaccacacgagaaacattgtgtctgttcttttggtccacaacgttagtcactgtgtttgttatgacgggttattacataatatattatgatgtggtattagagtgtcgctatcgatgtgttggtgttctgttggtggtgtacaacacatgccccggtatgatggtgtgtggtgcggcttccacgagtgtaccacagcgagaaacgtggtgataccgtggccgtttatagttctctgtgtgtgtacactcttgtgtgtgaaacaaaatgttctgtaggatagaagatgtgtataaatggccccctgcgtgttcacacataggtggaanaatattgtgtcccgtagaggttgtggtgtccacagttggttgaagatgtatatagggngggcaccacacaactgtgtgttctcacagcggccactgctcgtattgctcacagaggatttatcgtatttgtgctttctgtgtctccgtgcgtgccccacggcccacacacatgtgtggtatgatgtatcgttgcgggcctcacacgcccacgtgtctcgtgtcgtatatatacgtatgaggtggccacgcccaacgcggtgtatatggagacactatataaaagaaatgtgttctgtgtggcgtcacataatggttgaaattgtggcacgcgttgtacagaatggtaactgccaccgcgggtgattctatgggccacggctggtgttgtccacggtccacatgtggttttcgcggtcccccgtatgacacgcgcctttggctatacccccgctgaggctaaccttgaaactgtcaaggggcatctgcctataacccagaatcttttgtccagaacacccttaacccccaccgacaccaattttgaatagctcatgccccggctcttaggaattttgtctgg

SEQ ID NO: 520142 - DNA, 271 bp, Homo sapiens
  misc_feature (128)..(128): n is a, c, g, or t
  misc_feature (242)..(242): n is a, c, g, or t
agtcgtcaagcctgtaatcccaacactttgggagaccgaggtgggggtatcgattgagcctcggaggtcgagatcagcctgggaaacacagggaggcccccatcgctacaaaatattttaaaaattanccaggtgtggtggcttgtgcttgttgtcccggctacttgggaggctgaagtgggagggtggcttgagtccaggagttcactgcactgagctgtgatcacaccactgcactccancctggacgacagagtgagacgtccatctc

SEQ ID NO: 520143 - DNA, 365 bp, Homo sapiens
  misc_feature (8)..(8): n is a, c, g, or t
  misc_feature (276)..(276): n is a, c, g, or t
  misc_feature (292)..(292): n is a, c, g, or t
  misc_feature (303)..(303): n is a, c, g, or t
  misc_feature (319)..(319): n is a, c, g, or t
  misc_feature (340)..(340): n is a, c, g, or t
  misc_feature (353)..(353): n is a, c, g, or t
tcggcgtnggtcttggcttactgcaacctctgcctcccagattcaagtgattctctcacctcagcctcccaagtagctggcactacaggcgcattccaccacacccagctaatttttgtatttttagtagagaaggggtttcactatgttggccaggctggtctcgaactcctgacctcgtgatctccccaccttggcctccctaagtgttgggattacaggcgtgacatttggcacccggcaagccacttgccttttttcacttgccaagaggcngattgacacaaaaggnagacgaaaggnaaaccctgatgagggnagatggccctgttggagtctntttgttcttagtngaatgcataggt

SEQ ID NO: 520144 - DNA, 1543 bp, Homo sapiens
gccgggctctgtcgtggagaacggctccgtggatgtgcaaggccggcttcgtgggcgacgatgcgcgccgggccgtacttgccgcctccatcgtgtggggcgccccaagtgcgcccaggggcgtgatgcgtgaggccatgggtccacgaatgtgcattcgtatgcttggtgggaggaggcccaagcagcaggagaggcatccatcacccgtgaacgtagcccatcggcgcaagggcatcggtcgacgcactcatggggacgacgatgcgagaagacactcgctgggacgaccagcggccggtacgtacaatagagctagcagtggtggactcccgaggaagcaaggcccgtgactgctggacccgaggaccaccccatggaagcccgcagagggccaaacactgccgacgaaatgcgcttgaccgcatcgaatcactgggtacgtgacgacaccctgtcgacactatcgcgccctaggtacactgggtccctggttgacttactctgatgcgcgatgttgcgtaatacaccttggatatcaggcacatacatggcgcgggaaactccactttggccagtccggtgaagtatcgagagcgtcaccgggcgttagaaccgagcgaggagtaccaaccacgcaaaagacattttggatggcccaccagtcgttaacgggaagtcggtgaggtaaattcggaccccatccgcaccagagcaattgctccaaatcccattgtcgggatccattgggagcccgtgtggcgcatgggcgccgtgtggtgacacgtgggctatggaccctaagggtatcacttggaccacgatatccggtcgacagctgagaaacgggcggagcaaacacaaggcgttccaacacgaggcacaacggagtacccagaacgcgtggggcacaaattgggatgccgagtggacacaccattcacaggaagacgacacacccatgtggacagaaacagacacagcccccacgggcacagtagcgcatagcccaaaggaggacatgagcacaggagagaggggccaaacccacgaaggtccaacccccttggcgacgaaagaagaacaacagaacactgacccatataccagggaacaaggggacacagaccacccaacttgtagcaacaggcagcacgtgaaccccgaacacaccagaagcaagcaacaaagcaagcacatacccctccaggggccacagtgaagccagtagggaacacgcacaaaagcaaccctgccacaccacgcagtgacaagggaccacaggacacatcggagaaggacacggagccaagacagaggacagaggcgaggccacacgagtcacggacatgacggaggaacacagaagacacggagaggccgcagagaagacaacgacagaacgcacacgagacaagaaggaacgaagcaaccaggcgagcaccagacgaggacaaccagcagaggaggcacagacacgaggaacaaacaaaccaaagcaaagagaaagaggagaaacaagacaaagcaaagaacacacaca

SEQ ID NO: 520145 - DNA, 330 bp, Homo sapiens
  misc_feature (2)..(2): n is a, c, g, or t
  misc_feature (86)..(86): n is a, c, g, or t
  misc_feature (112)..(112): n is a, c, g, or t
  misc_feature (116)..(116): n is a, c, g, or t
  misc_feature (141)..(141): n is a, c, g, or t
  misc_feature (145)..(145): n is a, c, g, or t
  misc_feature (261)..(261): n is a, c, g, or t
  misc_feature (329)..(329): n is a, c, g, or t
tnaagtaaagaaaaccacatgcaagggaaaccaaatgaaaaggagaagatgatctcaggacagaaattggaaatagaacgactggnaaagaaaaacaaaactttagaatatnaganagagattttagagaaaacaaccacnatcnatgaggaagataaacgcaattggcaacaggaacttgaaactcagaaccagaaacatcagcgacagttttcggacaaacgcagattagaagccagggtgcaaggcaaggggacaganacgacaaagaagtgggagacagaagtgagcgtagagtggcagccaaacagcggggggggcggaataanc

SEQ ID NO: 520146 - DNA, 823 bp, Homo sapiens
cggcgccctttttttttttgttgtttttccaatgaactctgaactttttattgggcctcctgctccccaaagggtaccctgtttctgctggctttaagtgccttcaaaactttgtgggtgtcatgtggctctcaaacaccacttttgccatccactatatccgggcggggtgggtggctctttgtggagtggtttgcattggagtttgcgtgctgttccaaggcattcaccaagatttaaagttccttcgccatctttccagaaggccggccggatagggttggcaactcttcaggcctcacagtgttgacctttgatgtgtttcagacaggggccttcaatacctccgtgggcctgtggacgcgtgttcccttctgtgcccgggtctctgttgcccgagctctcgtgcacctcaaggtgtgcagcgaggaatcccggtttgaagcgtgcttcccatcgtgttaggggcagtaggcgggcactccaccttccctcaagggctggttcctccaaggcgttggccttcaaaatttctcatgggagtccagggtcgatctccaaggactggactgtagcgtctcagctctgtgaaccgtcgtctcagcagctccaacctcagagactgggtggtgcaccactgtgggtgccccctcaatctgctggaacccggatccgtgtttaagtctcctatcgggaccttcccgaaggccagttgccaattagggggccgagttttttcccaatatctgggagggccacaaataggggagagaatccaccggggtacaacacggcacactggccgtagacaaaaaacacagag

SEQ ID NO: 520147 - DNA, 685 bp, Homo sapiens
ggaggatctgggcccccctggaatgttccagatgtgaagccattctcacagacaccgttcaccttgttcactgactcccccatctactgacctcccagggtacgagccggccaagaccgtaacaccctggcataaatcactaccgacactacggaccccgaggaccagcataggcagcaacgaacagcaagcgcgtacggcgcacaccgcaagacgtacgcacgagacagggactacccgctcagatgcgagcacgcccgatcatccacgcacaaccactagacgcgaacacacaagcgccggagccgccgcccctgcggcagagacacccacgaccaacaaggcacggccaacgccggacggggacaataaccgcgcccacgagcccacggccaagcacaccgcctgcgaacccgcaccaccgggaggcccacactcctgacgcggaagcagactgggtagaccgaacagagaaacgacaggaaggagaggaggacgacccaccaacacagccgcaactgacgggtgccccagcccgagccgacgaacaacagcgcccaccacgagacgccacccaccgaaccccacacgaccacccacagcgtcactcaacgaccgcccgagaccggacggcacaaccccacgaccgaggacgaaaccaacaccggtgcgacgaccgcgacga

SEQ ID NO: 520148 - DNA, 171 bp, Homo sapiens
tagaggatccctttaatgtggcatgatgcaaagaactgaggagtgtgagaagggttgctgggagagatacggggaggagcctccgggggataaagggaatcgtataaagtcgatgtagggccggtgagggagaggttttggctcaggttatcaatgaccaacaatttattg

SEQ ID NO: 520149 - DNA, 262 bp, Homo sapiens
gtataatatgctgtctcacttcattcaaatctatattcaatgtcattttatcagaggaggccttccctgaccgtcctccacaataatgctacccccaatccattctctacctcccttactgatttatctagcttatcatccctgacacattgaatatttgctttctgtctgcctctccccacgtgtagagtctgagactttacagtccactggtacatacaagttactcaataaaattattaaatcagactcaatctttcca

SEQ ID NO: 520150 - DNA, 399 bp, Homo sapiens
ggcacgaggctggttcctgagctctaggctgctaagctgagccacacacccctccgtttgcaccagttgcatgcaagttgcatcgaccctccaacaaccatatcggaagcgcagtacatggcttctaacccgcgaacacagccatggcagcaagggtctggcaatgggatgccgccctggggacatacgaaccgcctccttccaccattgtgcactatgggaggccgctgctgcgtggagcacttaaagtccagcctccaggaccggatgcccctcctgtctcccgctcccatcgtgcccttaaatgccagatctggtggagggaagagagaagaggtaggaagaaaggtgatgaaaactcctggtcattccttgaataaacttgattttatttaatag

SEQ ID NO: 520151 - DNA, 176 bp, Homo sapiens
cggagcgatgatgtcctttctcgggagacaagtcgggaaagtctggctgtacttcttcagccccgcgcgcctcctggactcaggttccccgtctctgagctcgggtagatgtttcagagtcacattgccgcccggttctgctcacgcagaggtctcaacttgctacctgcgtccct

SEQ ID NO: 520152 - DNA, 287 bp, Homo sapiens
actcgcaacccaaggagcaaagactagaaaacctcccccgcatctataatcacccttccccccaccccctctagagagaccattcccaacgcggcgggtcacccatctcatccacctcgggagaataaaaaaaacccccccccccccacaaaaaactaaaccccccccccccgccaaaagaacaaaacaccccccgcccggggaaaaaaaatgcccccccgcccgccgtaaacaaaaaccaccccgacacatcgtgaaaaaaaaagccccaacccaagctagtcata

SEQ ID NO: 520153 - DNA, 557 bp, Homo sapiens
gatctagagcatccctttcttgccctcccatctactggctatagtcaatcgaataacctttctctgatctccaagtaccggtgactcagggtgggctctcagtctccacattgaggatacgagcctgaatgaggattctataacaatctcagaagaaagcattggggaacgtcttcatgacactggattaggcaatgcttgcctggatataacaccaagaggatgggacacaaaagaaaaagatttagataaagctagacttcaagaatgataaagtgtcgtgcatcaaaggaacagatcaggagtggaaaaggtaacccacagaagggtagaaaatatttgcaaatcattgacaggttgtgcatatgaaatccaataatctgaaatcggaaatgctccaaactccaaaactttgggagcactggcatgatgctcaaagaaaatgcttatagaagcataccgaatctcaagttcgtggatatagaatgcttaactggggctggacacggtggctcacacctgtaatcccagcagtctggggggccgaggtggaggat

SEQ ID NO: 520154 - DNA, 141 bp, Homo sapiens
atctgaggactgagatgtgccacaaagagaagggcatatggagccatgttgctccatgtacaacagcagcagacttactgccatttatttctagtagtgctcggcaccctgaatggcacaaaggatgagtcagcgaattga

SEQ ID NO: 520155 - DNA, 215 bp, Homo sapiens
  misc_feature (108)..(108): n is a, c, g, or t
ccccttaaaagggacccccccttttttttcacccccggggttccaaaagggggggtttttttttttaaacccaagggggggcagggccctttttcccccggaaaattnttttttttttttttttttaaacccgttttggaaaagggggccccccccccccccctttttgtttccggggccctttttttttttaaaaaaaagggggggggggggga

SEQ ID NO: 520156 - DNA, 143 bp, Homo sapiens
gcaagctcgctcccaggtgcagagagcggggaacaatcactttgggctaggcaacctagcagaagtgaacagataggattacatgaggtgaaaaagcttatgtacagcaaaggaaacaatcaagaaagtgatggttccccgcg

SEQ ID NO: 520157 - DNA, 535 bp, Homo sapiens
ctgcagtttccggcacgagttctgttgttccgccttcagagatgcactaagccggtaagatctgctcggccttcgcatcttgagtctgcagtaatctgtattttccccactgcactctttaaaccccgtcggacagagcgagatcttgtccaaaaaatcaatggacggatgcatggaacgagttcgtcatggcaagaaaaatacaagaatgttggttttagggccatgctacattttaaatgtgtctcgaacttcccagtagaagggtttaatagtcaatgaaatatctggctctggaacttggtcgttgatgtagttaaaatgtcctatcattttagcttgcgtattactgttatctgtccagcacgaatggattctgtttggctttcggcatatgtcacgagctatccacatcagttgttgttacaaaggcgtagtcaataaggtggtcctgtatgttgccgtaggccttcgtagcaaattccctgggtagggcagaaaaggccatataaaattctcggggaccgcaatttgt

SEQ ID NO: 520158 - DNA, 378 bp, Homo sapiens
ttctgtctagaggaatagagtggaacgtaaagtcgagaaatgcaagtattcacagtagaaagatgttggtcatcgggtggtcaatgtgtgattgagggcataggctgaattccttcttcactggctggcagtaatgggctttatgtccaaaagtacccaagttctggtcgttctgacaggctcatcttctcgtgattcatcattgaaagaggtagaactgatcagcatttgcacattgtctctcgccgcagccatttctctatagcataatctcttcggccgttatctcttgtaatgaattttggaagagcacatctagtagccctgtcctcagcgcatgtaagggctgttctgcaactaccaacattctgtgttctg

SEQ ID NO: 520159 - DNA, 1498 bp, Homo sapiens
  misc_feature (176)..(176): n is a, c, g, or t
  misc_feature (381)..(381): n is a, c, g, or t
  misc_feature (624)..(624): n is a, c, g, or t
  misc_feature (715)..(715): n is a, c, g, or t
tccatggggatgatgttttaaatggtggagggcaaaatcagcccacaatacaaatactctaaaatatcacccccattttccccaccgggcccccggggaagggggagaacgctgggggtgttccttttgcgcctgcagggttgtggggagagggacgcaagaggaggcgccaaaanaggggaagaagggaacacaagatgcgccaacaaatgcgcctgggctgagagagttctcctgtgtcgtgtttgccccctgtgccctgtgttccctgtggaagctgtgccctgtgtggccctcctgtgtgtgccctctctttcaccgggtgtgccaccgcctgtgtgtgtgtggcgccccaagcccccacaactctgtgttctgtgngctctgtgcgcccctgtgagagagaggctctcgcgcgcccaccacgagtgttgtgcactctcaagtatctctctctattctcttctctctcacagagccgccctttctcgagagtgctgtgagagtcgcctctctgtgtgtcccccctctctatgtgtgggaatctctgtgtcgtccactgtggcacggacgtgtggctactccctctgtgagagatattgtggacactctcctctctatatnacactgtgagacacatctctctctgtgtctcacacttttctctcccgctgtgtgggcccgaaggggcccaccccagaggacaccgggaaanaacagccgagtatgcagagcggcgggggggcaccccgaggttctatgacgggggagggggcccagtgctcgtgagagcccgttgctctgtgaagagaatatgtgtgccctcgtggtgtggcacacatagtgtggttagagggccccccgggggccgcgcaaaatatttttgggggtcgtgtccaaagcctctgtggcgttgtgtcacacacaattctcagcgcgctcagcaggggggtaaatacacattttcttttcacaaaaacgcctgggtatttgtcccaaaaagggcgcgacaagaacaacgtcaatagcgcgatattggagaaataaatcccccttgggggaaaatttggcaccagaaatattttctcccacaaaatggtcccccaaggctttgtgggcccgaaacgttgttgttttcttgggcccgtgccaaaggggaccctgttttttctccacgaagggaggactatccctgcgtggggggggcaacacagcccccctcaagttcttctgttggggggtggtgcccctcctccacaaagaggagacactcttgtggggcccccacgtgtgggtctcacctccacatctcacacctttgtgtggggtggccccccctatttttcccccccgagaagaacactctctctctgtgctaatatataagaaaaaatcctctcgcgcccccacagtggaatgtgttaccccgcggttgtgttgcatcctttgtttggaggagaggggcggaggaggccctactatcaccccataggggaga

SEQ ID NO: 520160 - DNA, 453 bp, Homo sapiens
  misc_feature (29)..(29): n is a, c, g, or t
  misc_feature (32)..(32): n is a, c, g, or t
  misc_feature (42)..(42): n is a, c, g, or t
ttagacagggtctcactctgttgcctggnctngaggacagtngcatgattccagctcaccgcaacctctgcctccaaggctcaggtgatcctcccacctcagcctcctgagtagcagggactacaggtgcacaccaccacacctggctaatttttgtatcttttgtagagacaggttttcgccatgttacccaggctagtcttgaactcccatgctcaagtgatccactcaccttggcctctgaaagtgctaggattacaggcatgggccaccacaccaggcctatgctaaaacttcttcagtttcaccactggtggtgaacttaaaacatgggaaaaaccagggaaaaacccaggtcaaattttcttactctgttctctttagcaccacagacatccacagtcaccacgggcaaatgggaagtttaaaaaggaagagtgcttggcccggggt

SEQ ID NO: 520161 - DNA, 338 bp, Homo sapiens
  misc_feature (333)..(333): n is a, c, g, or t
  misc_feature (335)..(335): n is a, c, g, or t
  misc_feature (338)..(338): n is a, c, g, or t
gagaagagtccgggaaaacaattgtattccccagcctgtgtcccctgggcacaagcaaatccccaaattccccctcctgaaccctcccaaatttgtcctaagaacttcgaaaactttaacaaacaggctgatatccttcataatattcccagcctagacccaagcaggaagaacattgatttcattgaaataattgataataatgaagataatgtttttatgatttttatttgaaaatttgctgattctttaaatggtttgttttctacattgatggaatttttctcttttaatctatctacagcttatagcagttcaataaactatacttcntntgn

SEQ ID NO: 520162 - DNA, 419 bp, Homo sapiens
  misc_feature (8)..(8): n is a, c, g, or t
  misc_feature (23)..(23): n is a, c, g, or t
  misc_feature (28)..(29): n is a, c, g, or t
  misc_feature (34)..(35): n is a, c, g, or t
  misc_feature (59)..(59): n is a, c, g, or t
  misc_feature (74)..(74): n is a, c, g, or t
  misc_feature (83)..(83): n is a, c, g, or t
  misc_feature (87)..(87): n is a, c, g, or t
  misc_feature (92)..(93): n is a, c, g, or t
  misc_feature (95)..(95): n is a, c, g, or t
  misc_feature (108)..(108): n is a, c, g, or t
  misc_feature (128)..(128): n is a, c, g, or t
  misc_feature (139)..(139): n is a, c, g, or t
  misc_feature (191)..(191): n is a, c, g, or t
  misc_feature (193)..(193): n is a, c, g, or t
  misc_feature (265)..(265): n is a, c, g, or t
agctaacnaagcacaacacagcnaagcnngacannaagaaaggacaaggagcctttcanttttccagcctgcantggcagtgntttncgtgnncnttcctttcagatngagaaggggacaaaaagacnttcctttcatngtccagaagaatgtatgtaactaaagctttgtcctctgtgaagaattataananggaggggggaaaggattcgcctctcctacagaaattctgaattcatttaagtctaagcatttgatttatgtnatttatacagttgggatctaattaggaaatgtgttttgtagttctggataaactatttcatccgctgtttcctcccaaaacacacacacagagcaaactccctttcataaaagccctcatatccactggcagtcccgttcgcatcatggtctca

SEQ ID NO: 520163 - DNA, 341 bp, Homo sapiens
  misc_feature (13)..(13): n is a, c, g, or t
  misc_feature (58)..(58): n is a, c, g, or t
  misc_feature (122)..(122): n is a, c, g, or t
ggaatggattcanatgcaatgtaatgtaatggaatcgtaaataatgggatggactcgnattgtaatggattgtattggaatggactagaatggaaatggactcggaatggaatggaacaaanatggaatggataggattggaatgtactcgaatgtaaatgactagaagggaatagacttgaatggaattgactcgaatggaatacaatcggatggaatggaatgcaatggaaaggaatggagtggaatggaatggactgtaatcgaatggactcgaaaggaagggactcgaatggaatggaatcaaattgaatggaatcaaaaggaatggacgtcgacgc

SEQ ID NO: 520164 - DNA, 708 bp, Homo sapiens
  misc_feature (6)..(6): n is a, c, g, or t
  misc_feature (539)..(539): n is a, c, g, or t
ccagcntcagcttcgtccagcaaccccagctccagtcatgatgacgacagcagcaaggactctggcttcaccattgtgagtcccctggacatctgaccacagtgcccagtcctgccccacagggatctagccacccttcagtggccccaaggccagactgaggctcatccagtggagaaccttcttaaaccactgcttccttcccggcatgcattttgcattggtccagccctttgaaaccccttagagagaagcatatatggccacaaagcacagaggcttaggtttgccacatgcagacagggctttctgggcccttacctaatccccacccgactcttgctctgagttagagctgagttacgtacccagtatcacactcacagttagaaaagaccgaatcacaatttagaatcacttttcctctgtccccttctccccagctaagaatggtgtggcacctccgatcagttaatacttagaaggagccagaaataagtgtattttcggtatcttctatcccctcaaaggcatcagancatgggaaagattggtttaataccaaagaaaggcttctctctggtggagaatcgtgtctcgagcgctacttgtattcctggcattggggaagcgcagtatcgcaggaggctaaatgtcaaatagaactgacaccagaactaggtggattccaggagaataagggataaa

SEQ ID NO: 520165 - DNA, 336 bp, Homo sapiens
  misc_feature (78)..(78): n is a, c, g, or t
  misc_feature (81)..(81): n is a, c, g, or t
  misc_feature (290)..(290): n is a, c, g, or t
  misc_feature (336)..(336): n is a, c, g, or t
gagatactgtgaatgcttgtacagatcagctgctgagactcagacatacgagatgagagacaagtcagctctccattncgncaggaatgtgggaactgctacgggctcatatgaaggcagagctcccacattctctatgtaattggctgactgcatcagtggctctgggagagctcaatagctcagcgactgaggggctggggcgtttgtcattgacagtgccacctggtcatcgggctatgcccaggtggcctgctaccatgctgtggtggaggctttggaacagatanctccataaagatggcatcatcacagaaggttctaggcagccggtgn

SEQ ID NO: 520166 - DNA, 267 bp, Homo sapiens
  misc_feature (223)..(223): n is a, c, g, or t
  misc_feature (234)..(234): n is a, c, g, or t
cagtatcagggggggagccggatggagtttgctatgtgtgagcgggaggcagattttgggacggggctgttgtgggttatgccagcttggagcaggctgggggggggggaattgcatggtgggctccggccacccagactcccccacccccactcccttttccactgctctgacctcgggcactgttgaaatatagtttttattgcatttctgccgttttacnaaaatatgacnaaataaattaaaaccaataaataatcgcctgtt

SEQ ID NO: 520167 - DNA, 142 bp, Homo sapiens
ccaaatacgatgacatcaaggagtcgatccgtcagcgtgacttgaatacaccaccgccgacgacccgaaagcctgatgaggagaagtccagaatcaggaacaacggcgacactcgactaaccattttaaaccaattggaacc

SEQ ID NO: 520168 - DNA, 1271 bp, Homo sapiens
cctgtcaggtcccagaagtccaggccgacgggcgcctctgcagctgagatgattgaaacaaaatcttccaaaccggtgcctaagcctcgggtcggcgtgaggaaatccgcactaggaaccacctgatatggaccaagatgcccaatcccatgccagtagtctcctgggttgtggaccccaaaccagactctaagacggagcctcagcaccaagtatagagaccactatactatctaaaacaacccactaccctgtactccactagtctacactagagcctttgccatccgatactttctgctagtcctacaactactactccttaccagctgctgcatgccaaggccccacctagcactgggacctgctacctactatgggcgggcggcagcgtatgacgctgtacacttgcagctctacgcacctaccaccaccgaacactagtgaattctaccccccttgggcctgaggacacgcttgacgggggatgacgttgccctattgacaggtgggcactcacgacgggcctcacgggctcctgttgccacccatggaaacgcctcacaacggagcagagcacatgctgagacccacgacaggtaccaacggccaagcatcctccaagcagagcaatcccaaactacgacacctgcctagttacccccagaggctagcggcatggagacgtcaagcatgtaggcctatcacatcccatcctagactcaggcatcagctaccatagaatccacacagcactagtgaaacaccgactaggccacaagcacactacaatcgtagacattagcaactatacaacattattcgcaggaatccacccacactccacgctaggagaaccaaccacatatgctcacgaaatatccccaacgactcctctagccatcaactagtgaacgcgactagataatgtacccactagcccacaaagtgactcaatcccaaaaatatactccgaaacaatatattctgtgctaccataccatattcaacaagaccactagcaccctatcgttatagtcaaccctctgtacctcaccagacacaacaattcacatcatcacctatatgtaaccaagattccacacacgccaactacaacaagcgtaccaaaacataatctactccacacacacaagacgccactaacacagtaacctccactccaaactgctagagtagtcatcactccacaacaaattctacacgagatacacagcaaatacatactaaacaaacagactaacaacgcg

SEQ ID NO: 520169 - DNA, 416 bp, Homo sapiens
gctctagagatccaccgaagcacactgcacactactttcatcttacaaaactgaagctctatacccatgaaacaacgactccctactccttccttcttccagtccctggcaaccaccatttactttctgcttctgtgagtgtgactactcctgtagtgaaatcagaaaataatttgtcttgtgactggcttatttcactaagcgtagtctcctcaaggtttatccacgttgtagcatgtccttcctttttaaagctgaataatcgtccattgtacgcatataccacattatgtttatccatttgtctgtggaaggacacttgggttgctttcaccttttgactattgtgaataatgctaccatagacatggtgtacaaatatctctttgaaaccctgtttcaattattttagacat

SEQ ID NO: 520170 - DNA, 1202 bp, Homo sapiens
  misc_feature (215)..(215): n is a, c, g, or t
  misc_feature (218)..(218): n is a, c, g, or t
aggtggagcaccagctacgcgtggcgcagcgcagcgtccctagcaccgagcctcccgcagccggccgagatgctgcgaacagagatgtgccggccccatgtgtcgccctgccgtggacatggtttgccggcgggctgtccccggctcctgcttgcttgctgctgcatgctcgccttgtgtgcgctggtgctgccttgcccggagtttgctccaantanttaccttcaagggatttacaggccttgaaacaaacaagcttacaggtttggtgggacattggggggcattccaagacggccaccttggggacgggagcgccttttgcatttagtggattatggggaattgctccccaaagagccttcaggggaaacaagaatttgcaaaaaaaggaattacatttaacttaagagggggggtttcttattttcatttattcgaagaccacagaagtttgggcaatgtcaacagtggtcgggtggtcggatcaggttggtggcattcccggtttggcattggcaaggctttcggtttttccccctttccaagcccattgggccaattttgaacggaagggaacacggacaactttggacaggcacaggcaattttccaaggaacggtgtgggactgcaatggaatattttcccacaagagttcccactctttggcacgacgggttccacaacacgtttccgggacgggcgaattaattattagaatataattttcccagtgggcgcacaccgtgtgtcacacgttgggcacacacgacaacaggggggtcccatggcccagaggggcgcttctccaagttttttacaaacacagttggggtggatttgtgccccgatggccttttaaaaattttattttaccaccagacgcaatgggaagggcaaaagattgggcattaaagttgggcgcgaacaatttaccccaaacatacagcgttggtttataaccgttggtgaaacccaaattatattcatgaggcttatattatccccattttcccgttgtgcgaaacacaaaatacacacttcccctattgtggactataaacacaagttgtggtttaacccttcccgtgtggcattctcggcaacacgcataattatctcccccccttagtgattgtgtctttttcgggttctcacacacactcatggggtctctcccacttccacacaggtcattaa

SEQ ID NO: 520171 - DNA, 601 bp, Homo sapiens
acataaacaaatttaaagatgcaatattaaatataactgtataaagttcactgcaacacatcttggactactgtgataatttaaagatgcagtgttaaattgtaactgtataaagttcactgtagccgggcgtggtggctcatgcttgtagtcccggcactttggggggccaaggcaggtggatcacctgaggtcaggagttccagaccagcctggccaatttggtgaaacctgctctctactaaaaatacaaaaaaattggctgggcatgttggcaggcacctgtaatcccagctactcggaaggctgaggcaggagaattgcttgaacctgggaggcagaggttgcagtgagctgaggttgcgccattgcactccagcctgggcaacaagaacaaaactccatctcaaaaacaaaaaaaaaaaaaaataaaaataaaaaaaaaaaaaaacacataattaaatataaataaagcatgcgccgcatttcgagctaatttggccaattcgccctatagggagcggttaacaattaatggccggggttttaaacgtcgggactgggccctggcgttacccaactttcgctttggctccccctt

SEQ ID NO: 520172 - DNA, 326 bp, Homo sapiens
  misc_feature (40)..(40): n is a, c, g, or t
  misc_feature (284)..(284): n is a, c, g, or t
ctgaatgtgtgtttcgagctagaaaatcccgggagtggcnaatcggagattcgtttcttatctataatagacatctgaagccctggcccatcccatgaaacccaggctgtagagaggattgaggccttaagttttgggttaaatgacagttgcccaggtgtcgctcattagggaaaggggttaagtgaaaatgctgtataaactgcatgatgtttgcaggcagttgtggttttcctgcccagcctgccaccaccgggccatgcggatatgttgtccagcccaanaccacaggaccatttctgtatgtaagacaattctatccagac

SEQ ID NO: 520173 - DNA, 280 bp, Homo sapiens
attcgcgggcgcgtcgactggttgtcaagggttggatatgggggtaggttgagcttgcttaaaacatgaaaggtcgtccttgtttctaacttaagtttaatgagggcatctttgattcttcactctcgttaatgacatgttcaactttttaaacggattcttccaaaaggacaattttatgaatctttaaaacctgaatgaaaagagtgttagctcataagtattggctttgctgctggttgtccccatttctgccttccctactccaggcaaaattatt

SEQ ID NO: 520174 - DNA, 131 bp, Homo sapiens
tattttaatgtcatttggcattgtggcagtaaatgcagttctttaaggatacacatcttcagatttaaaagaacaggctaggaaaccatttctctcttttttattatttatttatatatatttattttatt

SEQ ID NO: 520175 - DNA, 444 bp, Homo sapiens
  misc_feature (125)..(126): n is a, c, g, or t
  misc_feature (128)..(128): n is a, c, g, or t
  misc_feature (232)..(232): n is a, c, g, or t
  misc_feature (278)..(278): n is a, c, g, or t
  misc_feature (281)..(281): n is a, c, g, or t
  misc_feature (348)..(348): n is a, c, g, or t
  misc_feature (396)..(396): n is a, c, g, or t
  misc_feature (426)..(426): n is a, c, g, or t
gttatcaagactggctacttttccaaaactcatactcatctaactgtatcccccttattaggaaatcctttcaggctctagtacaagacctaccctacataaaggacccaagatattgtccaggnngnagatttcttcaagagatcagctttagctccaaattcacaactcccaatgaaccaatctcttagagtgcaaattacagccttgcactcttatcttatcttgcctncttatcttaatctgcctttagataactcaaaggaactgcatcaggntgncaatttattccttgtatttaattgtttaaatatacaattttttactcattattaaccttagtgtaanttgggtaagaggccaatggtccaaggaatggactctaaagggactatnttcctttttcatttagcatgggccatattnattttttaggttacaaaa

SEQ ID NO: 520176 - DNA, 317 bp, Homo sapiens
atattaggcgctaaggtccggctagtgtgtcggctactaaaaggatgtcactcgtttcagtacgccaatgttcgttatgatccttgatccggcacgcttctcagggcgtgatacaagggctcggcagatgtggatccgctgaggcatctttttaccacggtagaggccgcccgctgacacggtttatgcaggcgctgcggacttttagacgaacggttaaaaataatacggaccgtcataagttagaaaatttactctgctttcgaccgatgcattttattgacaccttacaaaaacgtcactacctagcgcctata

SEQ ID NO: 520177 - DNA, 369 bp, Homo sapiens
aggctgtggataattgaaatttacgattaacaattttgtcagaagaatgccttttagtccccggggtcctttattgtgtatgctaataggacaatttaggataaagacagggagtgggttataaagagaaaagcttcattatgtaagttaaggagtaatacaacgcattcactaatgagaagttttaacatattttacttatctacatttgaacagacaatacattcatatagttcaaaactcaggctgggtgcattggctcacgcctgtgatcgcagcagtttgggaggccaaggcaggtggatcacctggggtcaggggtttgagaccagcctggtcaacatgatggaaccccatctctacttaaga

SEQ ID NO: 520178 - DNA, 232 bp, Homo sapiens
ccgggtttttttggggggccaataaacctaagtttgcctttttttgggccgtggcctgccgtttccgttggggtctccctagaaattcttttttgcctgggggcctggggaggttttttgtccccccggggggcccgtaaatgtttttatttttaaaattaaagctgccaaaggaataaaatgggttttataaaaatttggcccctaataaaatcattttttttttcttgga

SEQ ID NO: 520179 - DNA, 742 bp, Homo sapiens
  misc_feature (408)..(408): n is a, c, g, or t
ggtcgccgctgcgaaggtagccgcgcgcgcatgtctgcgtcactctgcaattggatggtcgtgcgagaactgctaccagtttcctgatcaatcaggaataatgcactaccttacagcgactgcagcccaaagtaacttgaaggtcgccgcacagttcccttccgctacaatcgcgacttgagttcagcgcgcaacaggaactgtgcgcgccgtggacgccggtcagccgacgagcgagagcgtgtcgtggttggtcattacatcgtgagatccggccagacggaagcctgactacctcctatgtgcggaccaccatcacagcaagaatgcgtcgctgccacgctcacgcagtcatcagacacagtgatccgcaaggaacaagtaccgccccgtagcctgcgcaatggngagcgcatccgcaggggcagacgtccatcctgcgcagccgagaagcctgtgtactggtgaagaggaagcggagccgacccaggcaaagagctcctgaagccccgctgcctgccccatggaggcatatataagctccaggctggactttttcttcagcccataattttctacctaaacacttatggcacgtacgggtccggcttcatcttgtccgggttcgggcgcactggatcccgtaccgcgtaggagcgggccatgtgaccgctggggggttactcggcgccccacctccttcgttcccagtgtggttgatctgttcctggtccccccatag

SEQ ID NO: 520180 - DNA, 100 bp, Homo sapiens
aaagtactgagattacagccacaaggccactgtgcctggctgcaatttatttcttaaataaaataaacctagttgtagtaatatgcattgttccctaatt

SEQ ID NO: 520181 - DNA, 2247 bp, Homo sapiens
  misc_feature (2026)..(2026): n is a, c, g, or t
ccgacagggggagtggtgagtgttgagtagaactaacttggtgttgtgatgtgtgtgggtgtggtgggttgtgtgggggatggatatgtaattgtgtatggttgttgagttggagtgtgttgttgttattattcggtttgtttctgtgttgtttatgagttggtttgttgtgtgtgtggggtgggtggagtgtgagtgtatgtattggtgggggatggtggtggttgtttgtatcttggtgtgatattatatattgtgtgtgtttgtgtggtggagggatggcaagaagtgattgtagttgggtgggtatgtgatatttagtaggttagttgtgtagtagggttggttggagatagtaggtgtttgtggggtggtggtgtggtggtggtgttatgtttgcgtgtgttgtgtgtggattctcatgttatgggtgtgggttgagtggtatttaggttgtgttaggggtgtgggttgtggtgttggttgtttgtatgtggttgtgagtggtgtgtgtgtggtggtgttttagtattgaggattagttgtgtttgttttgtttgggtgtggtggttttattcaaagtatgttgggtggtgggttatcactcagttggtttgtttgttgtagtgtgtggggtggaaaatgttggtttgtggtggtattgtatgtatatctgtatctagtgttgtgtatgtttgtgtgtgtggttggtgtgaagatatgtgtatgtgtatgtagtgagatggttggtgggaggttggtggtgtgtggggtgtggtagttgatcgagggtggggaggtgagggtagagggtgcggttgtggtgcatgtgtatgttgtgtggtggtggtggttggtcgggtgtgaggatttaatggggtgtgtgtgtttggtcgacgttttgagggttggattgttggttgtgtggtttttgagttgatgtagtggggggtgttggtggtgtgttgtgttgggttggagatgtgagtgtgggtggatggagtgggcggtctatcgtggagtggtgtacgctgtctgtcgttgttgtgttgttgtttttgtctccgtcgtgcgcggttggtggttgcagtgtggtggtcttgatctgttcgtgttggtggtgttgtgtgatgggtctggtggttggaggtagttgttgttgtgctgtcgagtagcgacggggtgtgggaggagcaccgccgacagcgtcagggtatgtggatgtgtggtgtcgttgttgttgtgtgtctctcgtccgtcggtgtcgttggtcgtgggtggggtgtgtgtactgattgcttcctgctcctctctctttggtcttgttctgttgtttttgttgtgttggtgttggtgtgggtgatgtctgctactgctgcgctgggtggtggagtggagatgaagaagtgcagcagcagcgctgctgttggtgtgtagccactcacttcgttggctgttgtggtcttgttgacggagggggttgttgtgttgtggcgtgctctcgacaccaccctactcatctacacacaccacgcgacacactctgtgttgtgtgttctactgctgcgcggtggtgggggtgatatacacgacaagagatgagcggagggggggtgtggacgcgctgcgctcgtcgtctgcagtgctgtggtgtgtggggatgttgagaggtgtgttgatgagtgatgtgctggggggtgcgcgctgcgtgcgtgggatttcgctcggtgtttgtagttagggtggggtggtgtgttgatgtaagtgtagtgctgtgtggtgtttcgctcacacgcgcgcgaagtgagaagtagtaggtgtgtaactctgtcttatataatgagtgtgtgtgtgacgacacaacacacaccgcggttgggtggtgtttgctgcagcacggtgggtcaccactgcgcgcacactcacgcgcgagtggttcgcgttcgttagttctcttgtgtgtgacacactgcttgtgtgtgagtgtgtgttgtgtgtgtgcggtatgtatgtggttagtaggacncgtccgagcgccccgtgcgtgtgtgtgtgatggatatatatatatatatgatgtatagacaacacacacatatatatttaaaatttaatgttatgactattaagtttataataagcaaaaggatgtatagatacgttcgaaggctagtgtagtggttcatggggactaggtagtatgatgttgtgtactgttgtccttgttttgttggtttggtggtgttt

SEQ ID NO: 520182 - DNA, 525 bp, Homo sapiens
  misc_feature (347)..(347): n is a, c, g, or t
gatgtcagtccctttcacaatctttttttaagctggaagaagctaaacatgctttgtgccattgaagaatatagcttttctcaagcaacattggaccaggttttggtagaactcactaaagaacaacgaggaggaccgatacatagtggtggacctttaaacagcacacttgggtgggaacgaacacaagaagatagagtagtatttggacattggtatggtccggtctgcttactgggacttctttcctttttccacttaattttaacttgtggtttaacaacagtttctttatcgggacatggtaactgggagaaccaagaacgcaccttgaaatttttcctaangctccttaacttggaaactgctgtggttgctgtgttatggcttttctttaacactaaaacgtatgtatcattcaagtgaagctgcatgtttgtatcgacagtatattgaactatatagttcgtatgtcatctttttcaccattcagcaacacagtgcttctgaatttgtgatttaccg

SEQ ID NO: 520183 - DNA, 90 bp, Homo sapiens
gcggccgcctactactactactgctcgaattcaagcttctaacgatgtacggggacatgtgaaaaaaaaaaaacatgaaagttgtactgc

SEQ ID NO: 520184 - DNA, 1039 bp, Homo sapiens
  misc_feature (28)..(28): n is a, c, g, or t
  misc_feature (94)..(95): n is a, c, g, or t
  misc_feature (140)..(140): n is a, c, g, or t
  misc_feature (160)..(160): n is a, c, g, or t
  misc_feature (169)..(169): n is a, c, g, or t
  misc_feature (190)..(190): n is a, c, g, or t
  misc_feature (199)..(199): n is a, c, g, or t
  misc_feature (203)..(203): n is a, c, g, or t
  misc_feature (206)..(206): n is a, c, g, or t
  misc_feature (214)..(214): n is a, c, g, or t
  misc_feature (219)..(219): n is a, c, g, or t
  misc_feature (229)..(231): n is a, c, g, or t
  misc_feature (233)..(234): n is a, c, g, or t
  misc_feature (236)..(236): n is a, c, g, or t
  misc_feature (242)..(242): n is a, c, g, or t
  misc_feature (246)..(246): n is a, c, g, or t
  misc_feature (258)..(258): n is a, c, g, or t
  misc_feature (265)..(265): n is a, c, g, or t
  misc_feature (273)..(274): n is a, c, g, or t
  misc_feature (299)..(299): n is a, c, g, or t
  misc_feature (303)..(305): n is a, c, g, or t
  misc_feature (307)..(307): n is a, c, g, or t
  misc_feature (323)..(323): n is a, c, g, or t
  misc_feature (394)..(394): n is a, c, g, or t
  misc_feature (396)..(397): n is a, c, g, or t
  misc_feature (406)..(407): n is a, c, g, or t
  misc_feature (422)..(422): n is a, c, g, or t
  misc_feature (474)..(474): n is a, c, g, or t
  misc_feature (560)..(560): n is a, c, g, or t
  misc_feature (567)..(567): n is a, c, g, or t
  misc_feature (574)..(574): n is a, c, g, or t
  misc_feature (626)..(626): n is a, c, g, or t
  misc_feature (633)..(633): n is a, c, g, or t
  misc_feature (663)..(663): n is a, c, g, or t
  misc_feature (692)..(692): n is a, c, g, or t
  misc_feature (715)..(715): n is a, c, g, or t
  misc_feature (722)..(722): n is a, c, g, or t
  misc_feature (760)..(760): n is a, c, g, or t
  misc_feature (770)..(770): n is a, c, g, or t
  misc_feature (783)..(783): n is a, c, g, or t
  misc_feature (854)..(854): n is a, c, g, or t
  misc_feature (862)..(862): n is a, c, g, or t
  misc_feature (876)..(876): n is a, c, g, or t
  misc_feature (886)..(886): n is a, c, g, or t
  misc_feature (902)..(902): n is a, c, g, or t
  misc_feature (950)..(950): n is a, c, g, or t
  misc_feature (952)..(952): n is a, c, g, or t
  misc_feature (972)..(972): n is a, c, g, or t
  misc_feature (1034)..(1034): n is a, c, g, or t
actgatcacacacagacaaaaggacagnccctgccctcgaggagctcacagtctagtaaggaagacatatgggagaacgattccccaaagatgnngggagtaggggaggcagtgattagagtggggagacattgtcccanccaccccacgctccaaagtncaggctggntaggagaaagtgagtaggaanagtagatanaatntanataaaatnaaaantctaaatttnnntnntntaattntgtnctaaatatctanaatagangaaaatcnnagagacaaggatgataaggatatangagnnntnctcaaaaagctagaanacccctggcagaatatatacaacggtattttatttcccaaagccgcaaacaagcgcagagaagcggggganannggggaatgnnggaaaaacaggggcngggccagcccagttcagtggtgggaacaggaattgatgagaagaggggtacnagggccagagaagtaggtgagagggaaatttccaggtggagaagctcacagtaggtacaccagcagccacggccaacagaagggcngccaatncagctgngggagccacacagcctttattatggggctgctggggccccccttttgcaggntactgcnctgaattgctgcggtcctggtggccagcgncgcctgcagtcaacctgggctcctcatcncgggaggcctcgtgttctactcnctgtctnggagtctgactggttggcgctggcatgggtttggtggnggatgtgggnctcactggggccnaggtagaagtggtgacagatgtggttgaggccacagtcgtgggctctggagggggcagccggacaaggggngggattcnaggggagaagtagntcttgttgcngaggtcagagttacancgggacccctggcaacaggagccactgagcgtgaaccctgggcctgtnantccataccgagtgcagaatncatcctggacacagccccggacaggcaaggacacagtcacattagctggcgtcaaggtgacntgccc

SEQ ID NO: 520185 - DNA, 124 bp, Homo sapiens
gcctgccttaaacatgctcagaacacttacattagcctacagtgggcaaaactatccaacacaaaatctatattgtaataaagttataaagaattttgaataaaaattcaatatttgaagtaca

SEQ ID NO: 520186 - DNA, 310 bp, Homo sapiens
  misc_feature (24)..(24): n is a, c, g, or t
aatgaggtcctgccaccgcactcnccgccctttttctttttttcccccactttagccagggagggtttttggccctttatttttggggtttttttaaatccccaaggggtattggcaccctttccggttttttctctggtttggttttgccgagggttttttatccaatcccctttttttcccttccggtatttgttgccccggccggttctgctggattttggcctttttttttccggtcctttaaaactgcccaacccctttgtttcttggtcccaactttctttaaattaatttacatgttttttta

SEQ ID NO: 520187 - DNA, 82 bp, Homo sapiens
  misc_feature (37)..(38): n is a, c, g, or t
atgtaatatttaactgatagctgcatgaaagtgaganncgtgttactttggcttttctgtctctgttgacacggttgcacat

SEQ ID NO: 520188 - DNA, 231 bp, Homo sapiens
gctcgacaactgactacactctaatcattcttaggtcatttatgccagaggttgcaaaatttttttgtgaaaaatcatcagaccttggtgctgaccttgagcagtaggatataaataactcccacatgcttaacgttccagtgatggaacactaggcataaatgatttaagtatagccagttattcaggatatagatactaaaaaaaaaacatgtaaatgtgtcgtcgacg

SEQ ID NO: 520189 - DNA, 284 bp, Homo sapiens
tgtcttaagaggggatgggcattgatagcgaagaccccgtagaaagagcatgaaaatgttatgtcacttgataaaaacttatggcaatttactgttatgaagtgtctgttgaagttgaaacaagttctaggtaagccctttgttaagcaaccagaaaatagacagggagaaagcagttagactggaatgctgattagagtcattaattagtaccatgaaagtcccgcagagttaccttccattggaaacctagatgactgcagaattaaaggctttggtggggg

SEQ ID NO: 520190 - DNA, 266 bp, Homo sapiens
agaaagctcgaaagaggagtggtcatccatgttgaaaactgaacgtgtgatgtttgataatgggcttcatttacggtgtgtagtgagcacggttagactcactgttaaagaagctggatgcacttctctaaaaggctgcactttccgtgaacacttttacgtggtacaaatccacatgacccactattctacccctgaggggacgtatggttacagaggtttggtaggcacttaggggagaacgtatactataacacagatttctt

SEQ ID NO: 520191 - DNA, 231 bp, Homo sapiens
tacaccggatacaattctagtcttcaaacacaagatgaagaactcgtgtggacagaggtatctcagccctggatggtgaatatcagtcagcctcagaggttgacttctacattgataaggacatagatccacatcgcggacaccaaggtcgccaggcgttatggggattacttcagtccgtcagatccacaaatttgaggagcttactcgaacccggaagaagaaaatgat

SEQ ID NO: 520192 - DNA, 531 bp, Homo sapiens
  misc_feature (57)..(57): n is a, c, g, or t
  misc_feature (64)..(64): n is a, c, g, or t
  misc_feature (77)..(77): n is a, c, g, or t
  misc_feature (91)..(92): n is a, c, g, or t
  misc_feature (107)..(107): n is a, c, g, or t
  misc_feature (181)..(181): n is a, c, g, or t
  misc_feature (225)..(225): n is a, c, g, or t
  misc_feature (239)..(239): n is a, c, g, or t
  misc_feature (428)..(428): n is a, c, g, or t
  misc_feature (455)..(455): n is a, c, g, or t
agcgggcggagcctctcgggggtcacccggccgccgggccagcgggacgcacggggnccgccangggaggacaacanagcctcaggccctnngtccctgcgccccgncccggcctcccccgcgggggctgcgcagcccaactcggccatcctggcctgaaggggccgcccccgggcctcgncgggaaaaggcctgagcctcccggggccttctcggggccttctncgggactttccccncaggcgggtcctggacctttcttcgggccttctctgggcctcctcggggcttccttgaccctccccaggccttccccgaggcctccaggcccttccctgggcctctccaggctgagctctccgcgacatggccagtgggcctctgggacccggggccgggccaaccggctccacctccattcccaacgnctgctcacatcaagccaggagcaccgnccggttgagaatcctggaaactctctgcgcttagaaaagaaatctttagcaagacattcagtttgccaaaagagac

SEQ ID NO: 520193 - DNA, 816 bp, Homo sapiens
agggcatacgagatgggaagtatagagggaactattcacccgtggggacaaatggattagagtggtataggactgaagggacggaatgtaaaagtgtaccaatactccgaaaaagcgcgagtgaaagagcccagtcacccgttatagagaagtagggaacgcacctgcggccataagaaaataagaccacattccgcaggattggttttgtaagatcccgatatgtgagagggagggttcaatatggagccgggagtccgaactagtattaaagtggtaagcgtagaggaagaggccgggacgaggtaacagcaaagtgaccgaatggcaatggggatgcaaaacaagtcggccccagcaggtggaagggattcaagtggcaagggccttattacaatgggataagctcaagcccatgcaattgaaagtaagacctatactataaggtgaaccaacctagccacggtttaaaggctaaggtgaaattgagatagaaataaatgccagtttatcatgagcgctgcgagtcctgagctacaggcaccaagttgtgctgtgaagggtcatagggagacatctgcatgctcttccgtcatggacacggacacgtgtagtgatttgggtcactgcgtttatatgtaaggcatgattgtcggagagggtccaagtaaggttctgggatgtatctatgtttcaagcgtgaagcccggtggtgttaggggttggcaaaaggtctgtaatgtaagggctatctccattagtggtttcatgcagggagtcatgagcctctgggatgcataaggtaaaaacatttaa

SEQ ID NO: 520194 - DNA, 1235 bp, Homo sapiens
  misc_feature (45)..(45): n is a, c, g, or t
tatatgaattgcgttattcaaacaggatgatttgtaatgaagtcnaaacatagtaatatatagaagtgagacatttgagagggtggctcgcctgattattgtgttccatcatagtgacacttaaacattatactctcttggtagataagattccgagcaggtcgatatcattcttggacacttcctaatcaagatttgtgctaggatttgcggcataattcgtcgtgacctcgattacatgttacctgctacgtgaatgttccacaactatagttgtctaagcgaagattctataagagcagacctgtaggttttcaaatgatttccactgttctgatttgagcgcgatttttgttaggtaaagagccaacagcaatctaatttcgtccttaacttaggtagaaacaatgcattatcattatttgctgacagatcacttgatcctactagatacttctatctcctttttaggatgtctcgcatggaatttgactttcacatcgcaacaaggatggtcgtatagtggaccttatcagaatctgttcacttttcgatacttgtattacacaaaaagtagaataattgctcaaccttcaattatatacactttttaaaagaccgcaagatctttttgaaatccgaaaacccttagtaggtaaatgcttactttaattatggtgtgacgtatagccccaatatgaagggaatggaagaggggctttggtagacaatgttaagtcattgggaaaactaaggcaaattttgaattttttcaattggtgccattccattactgtgtgctgtgttttaggattaattgccgtagggatactttgggctttaattttcactttttttaagtagttggaatatattcccatttggacacaaattataagttacatcaaaataatacttgtaaattacaagaaggcaacgtttggatttacaaaaatttgttaagttttgaactttgagtattaatttgctggggcaggaaattgcaagtttaaggaagagggtaccttttagccagcacttaggaaaggtcccgctttttcacaattctggacttctcctggtattggggcttgttactttgggcttaacctttggattgtgaaggaaccaagcggggacctaacgagaaggggctaaaaacgaactgccttcccaagtagaatggacaaaccagtaaggaagcacccaccctctggttgtgggggtcacaataa

SEQ ID NO: 520195 - DNA, 714 bp, Homo sapiens
cccggggacactggggctcctgaccatatctgaagcaagatgacagcacgaacatgatgctgcgagctgaggaccgtgcatacatgcttgtgccatggacaactgctgtgaaagacaaccatcctgaagaagttcaactggtggagtgacatctgacaccatctccccaacgctgtggacttcaacatcaagaccctggagcaccgaggattcaagctgaacatctgtggatgtgggtggacagaagtccactggtggatcctactggcggaactactttgagagcacctgatggcctcatctggtgtcagtggacaatgcagcagacctgcacagctgcatgcagtgacttgacaccgtggatgctccaagagcctgctggtggcggagctgcctgtgcctggagcaaaccctcctacaatactttgcatactaagcaggcacctgcctgtgagccactgtcctcatatacgcctatcccgacgaggcccatggatgccaggcactcccatcctgcaaccacaaccaccatgggcttgcaatccaacgggcactggcagctggaccggtcaaccgtcgggaagaaagacattgactgcactgatgaactcgacctagtgctccttgtgatgaacataataccaagtaccgcaatttacaccacgcatgaactgacaccaacttccacgattggcccacccacctagccagtcc

SEQ ID NO: 520196 - DNA, 394 bp, Homo sapiens
  misc_feature (97)..(98): n is a, c, g, or t
  misc_feature (135)..(136): n is a, c, g, or t
  misc_feature (353)..(353): n is a, c, g, or t
cccttgctgaaaagtgtaacctgtcagggggctgtgagcctcacatcatgtaagttagccgttattgatgtgcttttcctttattcatttagagatnntttcactctatcgcccacgctggagtacagtggtgcnntcagagctcactgtagccttgaactcctgggctcaggccatccttttcacctcagcttcccaagtagcagggactacaggcatgtaccaccatgtccagctagtttttaaaatttttctgtagaaatgggatcttgctatgttatccaggctggtctcaaactcttggggctcaagtgattctcctggcctcagcgtcccaaagtgctgggcatcancaggttatggagccaagtaccatttacccaagtggacaact

SEQ ID NO: 520197 - DNA, 459 bp, Homo sapiens
  misc_feature (23)..(23): n is a, c, g, or t
  misc_feature (29)..(29): n is a, c, g, or t
  misc_feature (58)..(58): n is a, c, g, or t
  misc_feature (74)..(74): n is a, c, g, or t
  misc_feature (84)..(84): n is a, c, g, or t
  misc_feature (87)..(87): n is a, c, g, or t
  misc_feature (121)..(121): n is a, c, g, or t
  misc_feature (184)..(184): n is a, c, g, or t
  misc_feature (311)..(311): n is a, c, g, or t
tttaaccattccggtgaaccaanaaattnttggggcacggccaaaggcctttgtgccnagaaaattgttggccngttgttttantangggggagaccaagagtttctttttgtggaggagnaaatgatggtgttgggcggtcttccgcatacacttggttcaggggttgggagatgaagaagantccggaggagcccagccccaaagacagcgagaagagcgccatgggggtgtgagcaccacaggcaccttggatggcccggccccggggcccgtacacaggcggggccagcacagtagtgaaggcggtntcctggaccccagaagcgtgctgtggtgtggactgggtgctacttatagacccaatcagaatacggtggttgagaaggaaccagtgtttacaagtaatatcagaaagttgaaggaaccagtgtttacaagtaataccagaaagttgcc

SEQ ID NO: 520198 - DNA, 227 bp, Homo sapiens
accaaaacccagggaagccccttaacttctaatttacagggcgtttactttaaaaaaggggggcccattaagggtcaacgtcaggggatctggaacaaaatttacttttaccattagcaacctggaacctgattaattcccaacttatttttgcccacaggatcatatttatttcacttttggccccgggaccaccttggaaatgaaaccaactgggggtggaccat

SEQ ID NO: 520199 - DNA, 694 bp, Homo sapiens
ggtgaaatgagcgcaggataaaggaggagacaaggttacagggtgggtggcctgatcacacaggggctagaaagctcttttaaagattatggttgtgaaagagagagcccatggagggtttggacaaaggggtgataggatctgatttatcagtcatctgggttgagaagactgtgcaagaagactagtgagaccgctgcagtgacccaggcgagaggtgatggagctcagaccaggctgtagccatggaggtggtgaggaggaggtggactgtgcgtgtagtctccaggaggagccagctggatttccagatggatgggatgcagggagtgagaacaagagagaagggagggccactgagcttcagcatggagaaggatagtttcatcagctgagactagaaagactatgggtaggccaagcacggtggctcatgcctgtaattccagcactttgggaggctgaggcaggtggatcacctgaggtcaggagttcgagaccagcctgccaacatggtgaaaccctgtctctactaaaaatacaaaaattagccgggtgtggtggcgaacacctgtaatcccagctactcggaaggctgagacaaaagaattgcttgaacctgggaggtggaagttgcagtgagccaagattgtgccactgcactccagctgggcaataaggcagactccgtctc

SEQ ID NO: 520200 - DNA, 157 bp, Homo sapiens
tcaccgtggcgaatggaggcctgggcccggcttctgtttaatccccgaatcatcgcgtgcaacagagcgcgcgcgcggacaatctcattcccagtgctcgctgtgcgcagcagctggagcagatcctgcagggacatcccgagatttccgggtctag

SEQ ID NO: 520201 - DNA, 367 bp, Homo sapiens
gtcgactacattgttatgtcatttcgggaagttccagcatctgtgtaatcttaaccgctgtagcatgcaacttggtttaaggaaaatttctttgagccttattcttgggtgctaattattgaagtacaattaggaaggggagcaaatagggagaagaaatttgtgtttactgagttcctgcaatatgctaagaatgtactggtaatgaaaaaaattggccaggcgtggtgactcatgcctgtaatcccagcactttgggaggacgagagaggtagattgcctcagctcaggagtttgagaccagcctgggcaacgtgagaaacccatctctactaaaaatagaaaaattggctgggcgtggtggtgc

SEQ ID NO: 520202 - DNA, 488 bp, Homo sapiens
tgcaatggcccactcagcgagacactaggcgaggccgacagtgaggggaggttcgacagcgtcatcgtgtgaggctaagtacaagctcatccagaaccggggacaccacagcatcattctcctcttcatctatctcatcacccatggcatcatcaatggtatcattcatcatctcctccttcatatccatgatctctgcctgcagcacaaactccatcatgatcttcaggatctggggcacacgttcagctgtccgttcatgttgcccatggccttggtgacatcgcttcatggcttgttggccatcgagtggttggacttgatgtgtctggatcttgaggagacataggcctgaatgttggcccgcatcaatacaaagttgcgcacagtagcgccgggtgcgcagccaagtctttagccatgatgcgaagggcatccatgtggccttgcttggtgatctgccttgatgtctggaacgatggtcttca

SEQ ID NO: 520203 - DNA, 256 bp, Homo sapiens
tcgagctcggtcccattggtcgagagaaattaggcctacccgtcgcagtatgatcattcttttcccctcttttgatccccacctccaatgtttcatatgcatctgacgaatcagccactcagatcatgtgtctatactctaagactatcctcgaagtaaatgataaccatacacaacactaaaggacgaacctgatctcttatactagtatccttaatcatttttattgccacaactaatttctctcggaccaatg

SEQ ID NO: 520204 - DNA, 921 bp, Homo sapiens
  misc_feature (1)..(1): n is a, c, g, or t
ncgacttcctggtgtgcagctaagggtcaaccctctggtagggatcacttctgggacacaggtgaccagatggtggtgactagattctctaagtgggaatcgtagagttccccagcccttgctttcctgagccagttgcgtgctcctacatggagtacaacggagggcatcctgtcatcctggtctcttccgattgcagctgtatcatccagtaagtggcagctgacgctgtctacaatgtcacgcaatgacagcgctgcatgggtctctactagttacatcgtggcattggaagctgggcccccataggacattccgtggtaaactgcgtggttccaggaattactcccagaccatgtacttgcaagcaaagtgtcttcatgggtaatcgagtctcctcctggaacgcaacttcaacggaacatcatcacgctcgctagtaggattgcgggagtcagaggatctgtgcaggaactcgtgtccttcctgttgcatctccagagtgccagcgtacgtcaacggggagaacattgcggatggcaggctactccagcatcggctctcgagatggagtgcaggtcggcatgcgatagctgtggtcaccaggcccaggagacctgagggggtgtctaggtgatcatttggatctggaggcagagtctgccattctgccagactagcaatttgggggcttactcatgctaggcttgaggaagaagcacgcgccttcggcattctccttaggacattatcgtgcttgtatgatttgtgctgatcacaattaacatagtggggttcattgttgtgggtcatattggagcatgaaggattttatggagctggtgctttggaggaatcattaagggaaatggagtagaagctcaggcctttgaagttacccgctgggtcctctctcgtaga

SEQ ID NO: 520205 - DNA, 982 bp, Homo sapiens
  misc_feature (13)..(13): n is a, c, g, or t
  misc_feature (96)..(96): n is a, c, g, or t
  misc_feature (138)..(138): n is a, c, g, or t
  misc_feature (489)..(489): n is a, c, g, or t
tttgatgatgttngtgtaaaaaaaatgatgtatgaataaagaaagaaataaaaaagagaaaaaaaaaaagggggtaatagaaaatttaaaaaaaanaaaatttttaaaaaaaaaaaaaagaagaaagtgttaaaaaanaagaaaaaaagagggatatgctgtagagtgttttattgcctagttgacaaagctgcttttgaatgctggtggttctattcctttgacactacgcacttttataatacatgttaatgctatatgacaaaatgctctgattcctagtgccaaaggttcaattcagtgtatataactgaacacactcatccatttgtgcttttgtttttttttatggtgcttaaagtaaagagcccatcctttgcaagtcatccatgttgttacttaggcattttatcttggctcaaattgttgaagaatggtggcttgtttcatggtttttgtatttgtgtctaatgcacgttttaacatganagacgcaatgcattgtgtagctagttttctggaaaagtcaatcttttaggaattgtttttcagatcttcaataaattttttctttaaatttcaaaaaaaaaaaatagatcaggtatacaaaaagataaattcaagagagctataaaatacctgaagaaaaggtttagaaagatgaagtaaaaaaagctgcatgttagttcttgaagggtaaaacagaggtggggagaggagcaagtctagcctatgtggacctgggttcttctggtaattggaacactttaatgcatccaatgcttaatagggatttataattgaaaagagggggtcagagagggagttttagaaggttgtgtggtgaagatctttaattgatggatggtgaaaagacctcatggggggtggaaattgggaatcagcatgataaagatgaggaggcatctgcataggagggtggggtacccattttttgggggagaagggggaagtgaaaaag

SEQ ID NO: 520206 - DNA, 490 bp, Homo sapiens
  misc_feature (398)..(398): n is a, c, g, or t
cccacgcgtccgaaaacactctacagcatatccctctgttgtccatcattgaaaacactgggatatgctgtagagtgttttattgcctagttgacaaagctgcttttgaatgctggtggttctattcctttgacactacgcacttttataatacatgttaatgctatatgacaaaatgctctgattcctagtgccaaaggttcaattcagtgtatataactgaacacactcatccatttgtgcttttgtttttttttatggtgcttaaagtaaagagcccatcctttgcaagtcatccatgttgttacttaggcattttatcttggctcaaattgttgaagaatggtggcttgtttcatggtttttgtatttgtgtctaatgcacgttttaacatganagacgcaatgcattgtgtagctagttttctggaaaagtcaatcttttaggaattgtttttcagatcttcaataaattttttctttaaatttc

SEQ ID NO: 520207 - DNA, 136 bp, Homo sapiens
gaggatctccaacggaacttatggaaaactatattggatggctcagaaaaatgtagaccctggaaagaaaatacagcagataatgagaaagaatgtattatgggtggggaaaagaaaccaacagatgaagagaagg

SEQ ID NO: 520208 - DNA, 926 bp, Homo sapiens
  misc_feature (4)..(4): n is a, c, g, or t
  misc_feature (29)..(29): n is a, c, g, or t
  misc_feature (38)..(38): n is a, c, g, or t
  misc_feature (42)..(42): n is a, c, g, or t
  misc_feature (46)..(46): n is a, c, g, or t
  misc_feature (49)..(49): n is a, c, g, or t
  misc_feature (62)..(63): n is a, c, g, or t
  misc_feature (66)..(66): n is a, c, g, or t
  misc_feature (76)..(76): n is a, c, g, or t
  misc_feature (433)..(433): n is a, c, g, or t
aaanaaaagggggaaatagcccccccccnccccccccncccngccnttncccatgtcaaaanngcngccagtgttntcaatgatggacaacagagggatatgctgtagagtgttttattgcctagttgacaaagctgcttttgaatgctggtggttctattcctttgacactacgcacttttataatacatgttaatgctatatgacaaaatgctctgattcctagtgccaaaggttcaattcagtgtatataactgaacacactcatccatttgtgcttttgtttttttttatggtgcttaaagtaaagagcccatcctttgcaagtcatccatgttgttacttaggcattttatcttggctcaaattgttgaagaatggtggcttgtttcatggtttttgtatttgtgtctaatgcacgttttaacatganagacgcaatgcattgtgtagctagttttctggaaaagtcaatcttttaggaattgtttttcagatcttcaataaattttttctttaaatttcaaaaaaaaaaaatagatcaggtatacaaaaagataaattcaagagagctataaaatacctgaagaaaaggtttagaaagatgaagtaaaaaaagctgcatgttagttcttgaagggtaaaacagaggtggggagaggagcaagtctagcctatgtggacctgggttcttctggtaattggaacactttaatgcatccaatgcttaatagggatttataattgaaaagagggggtcagagagggagttttagaaggttgtgtggtgaagatctttaattgatggatggtgaaaagacctcatggggggtggaaattgggaatcagcatgataaagatgaggaggcatctgcataggagggtggggtacccattttttgggggagaagggggaagtgaaaaag

SEQ ID NO: 520209 - DNA, 525 bp, Homo sapiens
  misc_feature (4)..(4): n is a, c, g, or t
  misc_feature (29)..(29): n is a, c, g, or t
  misc_feature (38)..(38): n is a, c, g, or t
  misc_feature (42)..(42): n is a, c, g, or t
  misc_feature (46)..(46): n is a, c, g, or t
  misc_feature (49)..(49): n is a, c, g, or t
  misc_feature (62)..(63): n is a, c, g, or t
  misc_feature (66)..(66): n is a, c, g, or t
  misc_feature (76)..(76): n is a, c, g, or t
  misc_feature (433)..(433): n is a, c, g, or t
aaanaaaagggggaaatagcccccccccnccccccccncccngccnttncccatgtcaaaanngcngccagtgttntcaatgatggacaacagagggatatgctgtagagtgttttattgcctagttgacaaagctgcttttgaatgctggtggttctattcctttgacactacgcacttttataatacatgttaatgctatatgacaaaatgctctgattcctagtgccaaaggttcaattcagtgtatataactgaacacactcatccatttgtgcttttgtttttttttatggtgcttaaagtaaagagcccatcctttgcaagtcatccatgttgttacttaggcattttatcttggctcaaattgttgaagaatggtggcttgtttcatggtttttgtatttgtgtctaatgcacgttttaacatganagacgcaatgcattgtgtagctagttttctggaaaagtcaatcttttaggaattgtttttcagatcttcaataaattttttctttaaatttc

SEQ ID NO: 520210 - DNA, 345 bp, Homo sapiens
ttatagctaagatctaaatactgtatttaagtgcataggaaaagctcgcagggcagattctacacgtattattataggtccaaagagagctgctctaggttagattatgccccaatctgtgcaggaatttacagcaatgttattgtgccacaagtttaaacatgaaagattctgaagatgctgagagctaatgatctcttccacagttttaaggttatggtccctctcaggtctagactcatgcgaatccattcaagctgagaaatggaatagagggatagcgttccatggtcacgagctgatacagtactaacgctaattcagatatgaccatactatttcaag

SEQ ID NO: 520211 - DNA, 293 bp, Homo sapiens
gacgtcagatcagtgaactatgaactacagtatttgcttaagcctatggagtgatttattttcaaaaaaggtcgaactgcatatgcttttcttccagcacaaacaacagcaaaaactttggtaataactaacttaccttggcatgtatgaagaacggagtcatttatttccctaacttactcctctttcaagtaacagggggcagatcataaaaggaattctttatggtatctacacactccacattctttactggtgtcctactacggtatctgggctcccggcggtctcag

SEQ ID NO: 520212 - DNA, 214 bp, Homo sapiens
ttttaatggcagactgctggagcctaggagtttcactctagcgtgggcaaaatagtatgatcctatctctcaaaaaatacaaaaaaattcaccaggcatggtggcacacacctgtggtcccagctaatctggaggctgaggcaggaggatcccttgagcccaggaggtagaggctgcagtgagccatgttctgccactgccattaaaggagctg

SEQ ID NO: 520213 - DNA, 402 bp, Homo sapiens
tgcccaatagaacatcacaaggtttacttgtgaaaagtgagtatatttgctgcagtagaactaattcttacaaaagtttgtgactttccttaaaatacatccatccaacaacctgctcagcaccaggcatcgaaaggacacagcagtgaatggtccttggcctcacaatatgtgtcagggatcgcaaggtgtcaaggaatttggagaaaaataaatacacaatagaagtaacaggaatcctataacatgaagacttattttagaggcatgcatacacaaagacagacaagactagagaaaaggcatcaattagttccagctcaggaattgaaaagggggcagaaaaggaaagacttcacagaaaagacgatagaagctgtttgtaggagagatcaggactca

SEQ ID NO: 520214 - DNA, 1191 bp, Homo sapiens
cggacgcgtgggcggacgcgttggtggagacagcccccaagccgggcaaggatgtccctgcccaatgaacagacaaagcttcagcacccaagcagcaaagcaaacctgctggctgatagctggcgcaggaagatgacctgtatcctgcaccacatgccggtagcctactcgcaggggcactcctacgataactaatgcaacgacatcggcgagctaccggtcctacagcagtagccagaacaaactgctatacatactatacaagaacgtactcgcgactctactaaagcaacgcgctcgagtgtcaccgtaagcaaaccccgtagacatggcagaacccggagtcccagcgcggcttgtcggggcccaagcatccattcccaggcccccgaccccgatccctgtggccagtggtccagaagtactagtcgcattgacaaatcccgacagctaccacattctacagccaacactcgaagccgacttgcggtggctgaagctgaggacccacgaaacaacgctcatcacagcctgctcgtgcatgacctgctgcacagcttgaacaacctggacacccctggcaaccgaccgagagaaagccgcaacacacaaacccaagatacagcccaggcctgaccataggatgaaccgccagcgtacacaccttgcccatgagacaacaccaaagacaacgctcagccgtcggcaattcgtgcggggccagactctgggaaccccctaccagaccttaccacctacagatcatccgaagacctgggaacaccaaacaccccatgggcaattatgcgaatctggcacgcacacaacaagtatcaacgctaggcactagacccattgaaatatcagcgcatacagcccacatatacacacgcgtacccacacgtttgtcagaaggaaacgtccacaccggtcccgacattgcggaacggccgcgcagacgccacccgctgaccaacatcccgggcgcatacctcgatcccccatctgtccatccgccaacggctcacctatgtaactttgcacgtggcattagcgcgcccgcggaacacactcgaccgttggacatgcacaccaatccaaaatcgaacaaaacaatcaatcgtgtctcatatgaaaacgccatcccaacaatgaagaactacagaggacgagctactatagtaaaccaga

SEQ ID NO: 520215 - DNA, 352 bp, Homo sapiens
  misc_feature (223)..(223): n is a, c, g, or t
  misc_feature (324)..(324): n is a, c, g, or t
aatcgtttatatacatgaaaaaacccctggaaataatagcgctgatttcaagcattgcgaagcgcaatcattggttaaattattgtttttaaataaaatttaaaaataagaacaggtttggttgatgttgatggatggggcctgatgcgatgcctcaggctgaaagcgatccattgccacgggattcctccccataccgaccaatgcagtgttgctctgggangtcgtgatacgagggctgatggagcatcatcaacctgtctcaacagaatcgataatgcgcattgcagttcagtactgcgccgtgaaacctgtttctgcccnggggaaattgttgaaaccttggttttcc

SEQ ID NO: 520216 - DNA, 447 bp, Homo sapiens
  misc_feature (7)..(7): n is a, c, g, or t
  misc_feature (167)..(167): n is a, c, g, or t
  misc_feature (169)..(169): n is a, c, g, or t
ttaaaanaattgaaaaacagccagaacaacccaaaaacctaaataagaatccagacatccataagaatagaggttaaaagtccagggaaacttggttttgatgccctacttttgtaatttaagataatgtaatactatttaagttttgaaggtggctgggtgccagntntcacgcctgtaatcccagtactttgggaggccgagacaggtggatcacttgaggtcgggacttggagaccggcctggcccagggtggtgaagccctgtgtctgctgaagatgcaaaaatccgcccaggcgtggtggcacacgcctgtaattccggctgctcggaaggctgaggcacgagaattgctttagtccgggaggcggacgctgcagtgacccgagatggcaccactgcactctagcctggttgatggaattagattttgcctcaaaaaaaaaa

SEQ ID NO: 520217 - DNA, 141 bp, Homo sapiens
gggagatatagcccataacgggcaccaggaagtccacaccatatgcagtattggggctgtaggtctccgagcccttccactcctctctggatatatctctggacctcacctgcttgcagagttcctcctcaacctcgatct

SEQ ID NO: 520218 - DNA, 1033 bp, Homo sapiens
tcatctgattccgagctgaagacctcgtggtcctcttaaggagggagagtgcatttttagagcttttagccaaaatgtgaaaagctgatgcttggcgcctggctttggctgaacttgggctctggttctcacttactacaataactcaggtaatcgtcttaaacctgtacaaggcatggatccatttcaacaaaaacaggtaaatttaacaagtgcagaactctggctcacttggccaaaagcaacgattcagtgaaacaactttacgggttccaactatatttctgggaaaaatacgatataaagttatcagcttatggggcccttattataacccagtggttatcccatttcccattctcctatgtgttccccggcattccctataactgggataccatttctaaaccccctgtgggccaaaatccaatttcctatgtaggcaacagaccccacacgaaggcgacacacgaaacccgcaaaccaagactacttcagacaaaacaggaccaatttaagacaattttaaccacttaacttgtggcattacccacaggttgtttccaacccgttcgttaacagacactggacgcaaattttcgggaaagggcaaaacgtagtggccgacaaccgattttaacacttaactttcccaacagacaacagtgggttccactcctgggaactttatccccttattgggctaccagccactttgtctcgttcaaaacaaccttctacgtgggtacaaattccaagggaactgtgaacacttttttcaactggcttaagctgagatactgatccactccaggcggcggactgacacgccgcgtcgaccacctaccttgagggcgagttacatctctttttttgtaaaacacattgtggcaacaagggaaatactattccaggaggttatcgtaccctttcgtgtgcaccaagaatttcccacctgtgtaatgatccattcttacatacacagggggagagtttcacacgccggatgatgtcctcaaacaggattttcccg

SEQ ID NO: 520219 - DNA, 242 bp, Homo sapiens
caaatctggtatggcccatttgggtggggaaaattaaaaattttgctggctaggcagtagctttttccatttttcccccccataccccccccttcaggaaaacaaaaaaaacccctatttttatcttgtttttgtaggtttgtttcctctgggactattttttcctgttgtactattgggtgagggtggtgggaattatgcatctttaataaagttttttaggtgagaccaaaaaaaaaaaa

SEQ ID NO: 520220 - DNA, 175 bp, Homo sapiens
cttgcttcttaagcgctcctttcacacacgcgcgcgctcgctgggccgtccccttctcttccgcccttcttcttcttctggttcttgctaacggtgccgtcggggaggattgatgtcccttcagcatcatgcagccgcccggcgaggggaggtgtaaagtgtacacaagagactg

SEQ ID NO: 520221 - DNA, 525 bp, Homo sapiens
  misc_feature (102)..(102): n is a, c, g, or t
  misc_feature (250)..(250): n is a, c, g, or t
ctacggggatgattttacgaactgaaactctctctttctgattggattagtgggagaaaaccagacaaattctgacgtagcactgtacgtgtacgcaacaanatgtcatggcgccctattggattgtgtcctgaggtggtatcagtgaacggggtggtaactttgtttccaggattgttccagccccaacaaaggagcctttaacctgtgggttgaaacaggacactcgcgcgaccaatgaacccaatcnttagctttattgcagaatgtccaaggcggtttaccacgctaacactggggtttttcccccaggccaatttcccttcccaatttaacaattcctttaaatttccccctgtgggggggagggaggggcaacacacactcttctctcccccaaaaaggtgggcctcttttttggggggcaccctctcttttttcacctccttctctccctcaaaaagaggggaggagagggaggaaaatttttgttgggggccaaaaaaacaaatatgtgcttttaac

SEQ ID NO: 520222 - DNA, 398 bp, Homo sapiens
  misc_feature (71)..(71): n is a, c, g, or t
  misc_feature (187)..(187): n is a, c, g, or t
  misc_feature (215)..(215): n is a, c, g, or t
  misc_feature (234)..(234): n is a, c, g, or t
  misc_feature (250)..(250): n is a, c, g, or t
  misc_feature (258)..(258): n is a, c, g, or t
  misc_feature (374)..(374): n is a, c, g, or t
  misc_feature (388)..(388): n is a, c, g, or t
gggacctggggctggttgtcctggtggatgcacgcaggagtccagctgccctgccgctcccaggccctctnaggattgcaggtacggcaaggttgcatatcccttgggtgtgcagagcatcgtagggcccgtgtgttgctggggcttgccacatcgtgggtcttgagtagccagtccacaagcttantgtgaagattcagatggggccctgtcanagccaccttcttcttgggncttccatgagtcactnttgctctntgggcaggcacagacacttgggaaagggggcttggccatccttgggactttgggaactttatcttaaggtacttgaaaccttaaatgtgcaggcaggcccggtggtggcacctgtncaagaagggaagtnccctccttgc

SEQ ID NO: 520223 - DNA, 488 bp, Homo sapiens
tgtttccacacacacacacacacacacccagtcactgcaaagaacatttgcccaaaggagaagtcagacaaacattctccaaaaataattaagaggtaatatcaaaagtacaacagttaaagaagggagtactaatttcctcctgtttcatataaaagtaaagtaatacagtctgatattgatggaatcaaagctagagaacacattgcttatgttatacgaggaacctacagcagaacaaaaaataatacaacaacaaaaacagagaggaagagaaggaaattatgtgggagattatataaataagccaaattccttaccatggaaaaatgatatacagtcaacaatttcagttatttaaatttatggggggtaactagcaagaaaacaaaaaagagaaagatgaaatgtggtcttctctgatgagggggactataggaaggagaagaacagcgagaggctaccacatttttttcaactgtgcatgg

SEQ ID NO: 520224 - DNA, 632 bp, Homo sapiens
tgtggtagctcatgcctgtaatcccaacatttgggaggctgaggcaggcagatcacttgaggtcaggagttcgagaccagcctggccaacatgacaaaaccccatctctactaaaaatacaaaaattagctgggtgtagtggcgggcgcctgtagtcccagctactcgggaggctgaggcaggagaatagcttggacccgggaggtggaggttgcagggaggtggaggttgcagggaggtggaggttgcagtgagctgagatcacgccactgtgctacagcctgggcgacacagtgagactccgtctcaaaaaaagaaaaaaaaaaaaattttcttttggtttgggccacccctgttgttccatatccgtaaataaacttggctacttggcttccaaatttccggtgaagaacacgccaagattacgggcagtagactattgtgaacctgcggttatacattcgcaaagggctgtcggctggtggtactctggtaaccaattccaacgcaatggccacgtgacacattgacgttcgtagtccctctatctagaaatcctctcccaaatagtggcatatctttccctctgctccattaaagtctgtgctgaaatgtatctactcagagaagat

SEQ ID NO: 520225 - DNA, 757 bp, Homo sapiens
  misc_feature (64)..(64): n is a, c, g, or t
gccgtctgagagcgaccgccgcgttgtgtgtttgcactcgagccccgctttttggcccccctancattgctggtcgggtcctctttctcttgttgccccccaataggccgccgcgtggaatgcctccctcgttttctgtgtgtcgccccccaactctgcgtgctcgtcgctgcaacacctctctggtgcaagtggcgccccctctatggacattgcgtggtacctcccctggggggggggtgcgcctctcctgccgggcggctctcgcgcttgcctagatgtgtggtctcgtcagatgaagtgcgtctcgccactcgattggttcgttcgcgctctcctccgcctctccactcatgcatggcttcgctatgtttatgggtgggccgcacttgttgtaataggcaatgtgcgctcctattatcgggtgtacgaaccatgtgtaggatacatatacagaaatgtggccgcctaatatagttagtgagaggtcgatcactctactctcggtcagcgtccgtgtttgtttgaagcccgctcccccgcgttgaacctacatgcattgcttgcctctctggccgtggcgggcatatgcctcctctctgtcccctctcgcctttcaggggagtctactcctctgtgagcggactcatggtgtagctcctctctcacgagagaagtgacatgtggtccacgctctgtgtgacacacaataagggtggaaactctctctccctctgtcccatcaataaacagaaaa

SEQ ID NO: 520226 - DNA, 391 bp, Homo sapiens
tgtgtttatacgtgttgtgtgtatgtgatgtttcactaccaaaatatgtaaaagggctctaattaattggcttaaagaaaaaaggaagtgcttaaatcaaatgtgttatcacaaaaatagaaactttaattcaaatgccttgtagttcacatgactttattaatctttagtaaattaagacaatttaaaaattattggtaaaataaaaaaagtcttcagaatttaatttagacattttgtctgagtctattgattagatactatctctaccagatgttttaaggcataaaacttgcttctatgatttgttttgatacctaacttgtctataaaacttatgtctttaggatttatttatttatttaaattttttgggaggatgggagtcttg

SEQ ID NO: 520227 - DNA, 121 bp, Homo sapiens
tgagctacgagtgcgacacgtggtggaacaagtggagcagatccagaaagagcagaactaccagcggtggcgagaggagcgcttccggcagaccagtgagagcaacaaccaaccggttctg

SEQ ID NO: 520228 - DNA, 653 bp, Homo sapiens
acccgtcaacaaaccgcggagcggagggcgctccatttgtcctgaatctctaaattacgaccattgtggagatcacgactcctctgcctgggtttaggccaggacccaaccaatcccttggagcttgcacagaccataccagatgtttttggatcctaatagatcctgctcgtaaagggaggcggctctctatgattcgcagccacatcaaaggccgttaacccattgtgtgtcctagccctctgccatagtctgcgatgggagccacattaccagcataccatcccaaacttgagcatagtggagtggactgaatgccttagatattgggccgagcgcctccaaagtcgatcctgtgcatcgtaggcagttatgccttaagattgctctcactgaattctctgaggcggcacacagacacagtgcccattcatgtaatgtacctatctctgattgaagagtactatcagggctacttatccaggacagatgaaagagagtgcttcaagcgaccagcttgtccttataagagactgggagaggtgtttctgcaatgcctcttggggggcactggtacccttgaggatattgatagcagatgctcaaggctgctcatgctgggctgggcgtgaacactgaaccctgttagactg

SEQ ID NO: 520229 - DNA, 462 bp, Homo sapiens
  misc_feature (29)..(29): n is a, c, g, or t
agggcgattagacatgacagcttgcgaantaaatcaggctggtacgtcgatcggatgtcgaccgctcgaggctcggcctcgccctgcaggtgccggcaggcgccatcgcgcccgaggtggagaggggacctctgcggctgacgtggagttgcagatagtagatgacgtcgtagtggctgcattggcctgtgagcatgattcactgccgttcctcacgatgctatgacgtcacaagggaagtgaagtcgctctgcggcagattgtagatgacaggagatgctcttcgagacatgagatgactcggtttcgacgatactgcatgctccgggagctgtcgttgcaggatctccaacaacctgggaggaccgaggcgtgtgacaggtacgcgcgtcttggagcaattctagtgttgactagtgtagtccagagttttgaccgtcgtcgtacagttgtccgactgac

SEQ ID NO: 520230 - DNA, 302 bp, Homo sapiens
ccccggggaaaatccccccccccccccccccggggggggggtttcccccccagggggggggggcccaaaaaggggcccccccccccccagggttgtggggtggggccccgttcccccttaaaaaatttttggcccccccgggggggggggggcccccccccgggggggccccttttgggggcgggggggggggccccctggggggggggggccccccccccccttttttttttttttggggcttttttttttggtttttttttttttaaaaaaaggtttttttttttttttccccgccccca

SEQ ID NO: 520231 - DNA, 131 bp, Homo sapiens
ccacgagtctatgactccggaacgtggctgggtactgggctgaggagatccccaggcgatttcgaacctccgcctcaaatccagtgccaccagagtaaccaccctactgccccgatcccagccctgaccct

SEQ ID NO: 520232 - DNA, 214 bp, Homo sapiens
aggggtgggtgtggcgtgtacactagatttgacatagggtggggacgctgtacagggggatggggttggtgggctggcatctccttcttgcttgaatgtccatggcctccctggtaggcttgacctgtgcttgagtcaaatgatagcgcttatatggtcgtacaaccggatggccaccctcgggcccaggtacaggcggtcagtcagtccaccc

SEQ ID NO: 520233 - DNA, 741 bp, Homo sapiens
tggcaccacgctcacgccccgcagcacgacgtacctgagcaccgacgcaatgccccatccgtcgtgcacggtccatccaaaccacacaggaccccggacattcccgttctcctggcgcagcacaccaggcctgggtacgcgggccctcaaggttgataggaggtgccggctctttcctcgcactgccgcaggagcgtccacgccgcgcacagagtgaacgaggggcacccatggcccgtgagcacgtctagacacaagctaccaaggttccagtggcttattcgggcgcgcgcctatcggccacgatacacgtccctttggctatgagcaggctttctgcgaggccccctacccgcgaccaaccccgggggagccgaagctaggggatccaggggaggcttacgagagctgcgcgatggcataccgtggcccacacgcgaccacgcagggcagcagacgaggtccgatgcctagggaggcgagcggcggcgcgctcgcgacgtggtggggtcaggtggacgctgccctccggggctggtcgcgcatccctcagtccctcggccacccgggggtcgctccctcgtgcccaccgcacctgccgagcctctttggacccagatcagttcatgcatgttggtacttcgtcacctgcggcggggccctttgagtgtcttagtctgtattggggtggaaaaatcaccgggaatccccatacagcttcgggaaaaagttccactttaa

SEQ ID NO: 520234 - DNA, 163 bp, Homo sapiens
gtcttgtaaacaggcctcaccactcacctagggtgtcttgaaaggaggatagagccacttacagttttatttgcttcagtgtttaatgtagatattatgtgtcctgctgtttctgtgggttgtatgtctgggatgcatgagatttggcccttttttgaaagca

SEQ ID NO: 520235 - DNA, 680 bp, Homo sapiens
  misc_feature (608)..(608): n is a, c, g, or t
gccagagtgaagatccccacctgacccatcccctctccagctcccctctccatggagagccatttccattgcttaataaaattctccaccttcaccatccttcaagtgtccgggtgacctcattcttcttggatgctggacaagagcttgggacccaccgagtgtgggtacctaaaagaggctgtcacattggccctggcagagggcagccaccctaggcaacaaggcaagggacccactgagctgataacacactactgtccatagacggcggagctaagagagcactgtaacatgccctctggagcttcgggggttgcaggcacctcaatctgggcactgctgcagggcctgcacggagcttgctcctgccagctcccaaagcagctggccagatgccacactcactcacgtgctccctcccacaaggggttgagcacggcgggccaagtaaacacagcatccctgtcgcaagtccaacgaaggggtcaggaaaaatcccgcacccccatgatggtgagatcctgggcccttgttcttctctgtcctctcagtaagactccgaagcgctcttctagggacagactataagggctggatcagaaacngaaacacggagctgtgattcaccccatccctgcccacagagaggcactgctgagatctcttggctgtcgcta

SEQ ID NO: 520236 - DNA, 212 bp, Homo sapiens
accacaattactcgaacccgtaaatactgctacctgctgtaggcaacccgtgagcagcgtcaggcatcgccacttccagccgcgcaagaccgcaacaccggcgagttggtcgacgacacccagtggcaccgggtgacgtttatatgaccgcctggccgagatcgccggcgagtacctgaagaaaggccgacccgtgtatgtcgaggccaatg

SEQ ID NO: 520237 - DNA, 333 bp, Homo sapiens
  misc_feature (124)..(124): n is a, c, g, or t
  misc_feature (171)..(171): n is a, c, g, or t
tacaagttgctttggtcctattgtttcctcacagcaatagaaaacaaactaagtcaagagggggtgatagtgtatagtgttctagtccttggagcagatcagaatgtcatgtgccaccacgccntggcgggaagtttttgaacttgggtcctcatacatgcacagtaagtnctctaaccccattgggccatctccccagccatctacttccttttaataaggaatcccataagtcataaggtctattgcaagtaggacattgaaaatagacagacccccgtagagacgaaggaaaggtcatcttgcagagggccaccaggaactagggattac

SEQ ID NO: 520238 - DNA, 293 bp, Homo sapiens
  misc_feature (39)..(39): n is a, c, g, or t
  misc_feature (63)..(63): n is a, c, g, or t
  misc_feature (73)..(73): n is a, c, g, or t
  misc_feature (78)..(78): n is a, c, g, or t
  misc_feature (82)..(82): n is a, c, g, or t
  misc_feature (87)..(87): n is a, c, g, or t
  misc_feature (96)..(96): n is a, c, g, or t
  misc_feature (105)..(107): n is a, c, g, or t
  misc_feature (119)..(119): n is a, c, g, or t
  misc_feature (126)..(126): n is a, c, g, or t
  misc_feature (130)..(130): n is a, c, g, or t
  misc_feature (140)..(141): n is a, c, g, or t
  misc_feature (152)..(152): n is a, c, g, or t
  misc_feature (160)..(160): n is a, c, g, or t
  misc_feature (165)..(165): n is a, c, g, or t
  misc_feature (174)..(174): n is a, c, g, or t
  misc_feature (178)..(178): n is a, c, g, or t
  misc_feature (186)..(186): n is a, c, g, or t
  misc_feature (221)..(221): n is a, c, g, or t
  misc_feature (230)..(230): n is a, c, g, or t
  misc_feature (267)..(267): n is a, c, g, or t
  misc_feature (269)..(269): n is a, c, g, or t
  misc_feature (275)..(275): n is a, c, g, or t
  misc_feature (277)..(277): n is a, c, g, or t
  misc_feature (281)..(281): n is a, c, g, or t
  misc_feature (285)..(286): n is a, c, g, or t
aaaaaaaaaaaaaaaaaaaaaaaaagaagaaaaaaaaanaaaccaaaggtgaaaatgtttaanaagtgaaagnaattnaganatctnatctaagtnattattttnnncagactaagcantaactanacanaaaaaaaagnnaaaaaaaaaancagaacanaatanaaaaaagcnatgnggtttatnaaattagatctgctaatattgaatacagtagattnggggattgnagttctcatataagtatcttattgggataacattttnanagtttnantgantttnnaaataag

SEQ ID NO: 520239 - DNA, 246 bp, Homo sapiens
  misc_feature (179)..(179): n is a, c, g, or t
atctgcctgcatctagtcaaagcaacaatatgtatccattacttcggagggagtgagttcttgtgctgctgaggcaaacgagattgaactgtcacagggatggcaggaggggtggagtgtaggaggaggatcagcccccagtagtgagaaattaaaaactccttttgagtattttggcncctccactaagcagtacaattaaaccttcaaaccgtgaccaaggacactaccgtgagacccgtccag

SEQ ID NO: 520240 - DNA, 199 bp, Homo sapiens
ggaagtatatccagaacagaatgaacaacgaacaggctgtatgcaacaatatttagtccctttacacatatatgtacgactttcattaatgctaaaaaatagtagtggttattaacatgtctgaaaaaatcagtatgtataattaagattgttaatctctgagtataacacatattgttcatctcagagttgtttggtt

SEQ ID NO: 520241 - DNA, 485 bp, Homo sapiens
  misc_feature (70)..(70): n is a, c, g, or t
caaactacagaagaaacaggataaactaggcccctgcttgcgtagtcaatgccggcttcttgtcccctcnccgccaccccgccgcttaatggccctcacccgatccaaagaagtttagtctgagatgaaagtttactagcctgcagaatagcttgctttgtctgttcttatcagccttcccagctacttaggtcataaatcaaattcttaaagagcccccgagctgactaggattgcaatgcattgtgggctgcaacaaaatgtagcaagacaaccctaaaaaaaacacctacagcctctgcataacaatcaataggtgacatctgggaagactgtgaccccctagtactcagcctatgaggaactgggggagggacctgcacactaggggataaattgcttgttgtgactgtgctgggtgtgcctgcctactagacacccgaccttgcaaggccatcattaaaagtctcactttcgcaatacaa

SEQ ID NO: 520242 - DNA, 160 bp, Homo sapiens
gcgtctgtaatctacacctacagctcacgtgcacactgtcgaatccttaacccatgcagcaatggtcagggatactatgcccgcataacctcatggttcctagttgaattcgttaaccactgcaccatgaggaggacttcagtacccctgttgcgtatgc

SEQ ID NO: 520243 - DNA, 459 bp, Homo sapiens
gaaaagaaggaacaatggtacgtgccaaaaagggccgcgcgcacgtgcagtcctattcgctgcactaagctgtgcccgatgcgtgcccaaggacaaggccagttaagaaagttcgtcattcgaaacatagtggaggccgcagtcagtcaggggacatttctgaagcgagcgtcgttcgatgcctatgatgcttcccgaagctgtatgtgaagctacagttactgtgtgagttgtgcaatttcacgagctaaagtagtctaggaatcgatctcgtgaagcccagcaaggaccggaacgacccccaccccgagtttatgacactgcgggtgtctgccccgacgtgctcccaccaaagcccatgtcacaggcagctgaggtgcttcaaagcactgaagaagaggctattctctggagacacaaagtcacaatggaaattgtacttaagaaaaaaacaaataa

SEQ ID NO: 520244 - DNA, 243 bp, Homo sapiens
  misc_feature (5)..(5): n is a, c, g, or t
  misc_feature (7)..(7): n is a, c, g, or t
  misc_feature (10)..(10): n is a, c, g, or t
  misc_feature (27)..(27): n is a, c, g, or t
  misc_feature (29)..(29): n is a, c, g, or t
  misc_feature (67)..(67): n is a, c, g, or t
  misc_feature (104)..(104): n is a, c, g, or t
  misc_feature (114)..(114): n is a, c, g, or t
  misc_feature (121)..(121): n is a, c, g, or t
  misc_feature (126)..(126): n is a, c, g, or t
  misc_feature (208)..(208): n is a, c, g, or t
  misc_feature (224)..(224): n is a, c, g, or t
  misc_feature (234)..(234): n is a, c, g, or t
gccancnccnagtgacgccaaagcccntngttgactctaacagccccgtgggcgcgcgggaggccgngcgctctagggtctacctatcagcgcaatcgtttagngctttttcantggggcngggcnggaagcaggcgggaccaggcagccagttctcaaaggctgcggggccgactagaggccacagcccctcacccctagacgtcgncaaccagaactgacgngcgacctccngggcgctga

SEQ ID NO: 520245 - DNA, 105 bp, Homo sapiens
cagaatggcagggtgttattatcccacattactgtttacggtgtgaaaaaaagaggcacaggtaggttaagcaatcttggctatgtgtcacacagtagagtaatt

SEQ ID NO: 520246 - DNA, 167 bp, Homo sapiens
gttcatagcaaatcatagtgctctgcgatgttcacgactaacaaggatgcagagtgttgtgtgacgaggagcaagtgaggagttaggagatgaagtcagatgttggtgatgtgatcggggaagtgagaacatcagcagacagtgctattgaaacttctaaaactagg

SEQ ID NO: 520247 - DNA, 211 bp, Homo sapiens
gctcgataccccgtgaagcacaccctcggtggggcttgtgtgatcttcgctgataggcgggcgctttgcgcttttcttaactatctcccatcatctctatcaataggactaagctcagctttttttcgtgacggtcgcgattgcttgcaacttttcgagattgtttgcataatggcgtgtcagttcaggctcggtcagggtgtgcttcaca

SEQ ID NO: 520248 - DNA, 110 bp, Homo sapiens
tgtactcgggaggctatactttctgcttcctccatcagcagcatgcaaactcctgatgctgaaatttagtaggatcccggctgctcacagggaggggtgggtggagagcg

SEQ ID NO: 520249 - DNA, 286 bp, Homo sapiens
cttcgtgaacagcgttccgaacatgtacatccaggatcaggggcccggcggctcaaccgaaatctacattcgcggcctcgtggcgcaaggcggcgccgggttcccggtagccacctacttcggcgaagctgtgaccagcgtgctgaccaaccacggcggcatgacgaacctccagttggtggacatcgatcgcgtcgaggtgatacgcggcccacggggaaccctgttcggcgccaactcattagccggtgtgttgcgcgtagtgcccaacgctcccaacctgaac

SEQ ID NO: 520250 - DNA, 261 bp, Homo sapiens
gcagtacatgtgggccatatggggccctgtgtagcaatcacatgtgtgttcttaaacattcagttcttgggcttcaccccagtgtgccacaaagttcagcatgttcaagcagtgttgtcagtcaccaggtcacatgtttgaggtgtttcctcagacagcatgaatcttggccacttagccatcagtatttcaatcatttcatccagtcatttcagtagttgccctcaaaaactttcctaataagcctagtggttaagcacg

SEQ ID NO: 520251 - DNA, 633 bp, Homo sapiens
gggcacatctccgaaaggacaagcccacctatagcaagcttcatttaggagtatagtagtgtgtgggcacaaagggcatcttggttgactacagctatgtgttgctcccgccgcacctataccagcagcattgtcctggacgccggtcctcgaagggcaaataacccatcgccacattcttcttcagagaggggaagggacacccacatagtcacagtaccattctgggtcccctccatgtccagaatggctctgtgtgcccgcatgggggccccctcacacataaaccccacacgcttccggtgcaccgtgcctttaaggtgggaaacaatgccctgggctccaggaaagtcaataacagctggggggcgtttccccagtgtccatctgaggctgccctccacaggtgtagtgtgttcatcaatgtcattcccatacagacagaggcctgcctctcagaatagctgttgccaggtgaactgcccccgctaccggcaccgagttctccacaccatcctctcgtgtgtagccacagcgggtcacgcgacagccagacacgccaaacacctccatcacagcactggtcataaagcgcagtttcctcaggtcatctgccacgccggcctgtagtac

SEQ ID NO: 520252 - DNA, 653 bp, Homo sapiens
ctagtgtgaccctcggctgctgcaggtatctgcagcgactgcagccatgtgtgtggtgcccacctggtccggcgctacctggtgctgatgcctcgtgtggagccctgaccccctgcagatgccaaccttcccgccagactactggtgcttcccctgaactgcaaggatgctgctgagattggttggacacacatgcagtgagatgatggactgctgcgagctgagtgctccagcgtgctgggactacattgacgcccaccatctcatcctgtggtgctcaatggtgcaaggcgtgacatgcttccaccaagccttcctggcctgcaaggcagtgatgctggcacggagcttgggactacttgcctgagcacctggggactattgttgattgctgcattgaagggagattttgagacgtggagcggatgtgcttgatccagctgggaaggagagcggagggcatgacacgagagtgctgtgacaaggaggtatgtggccgaaattggagccagggaacaccagtagtgagcaaatttgagaacgcccagaagagttgagacacattgataggtggggttgaaaagacgtagagaaccataagtgggagcatagaaagagataagaaagacagtatcaagtggacaggtaataag

SEQ ID NO: 520253 - DNA, 1350 bp, Homo sapiens
  misc_feature (493)..(493): n is a, c, g, or t
attaatcccctggcccaagcaacgtcatctactctaccatctttgcaggcacaccgtcatcacacgggcctaagcatcgcacttggatttttctgtatcctcgaggtagggcctagagatactagaaccagtgactacgcttttagtctccaaaggttctagagcctataaaaaagtataacccgcgtcgatgaccaccacgataggcatgccgagtcgaaggtgtactttccgtacaccggcatatgcgaaatcgcactctcaatcaatccgttcataagtagcatatccttcgttcaaacgagatggacgtcgtccggcgacagatgaaacacgagtagaccaaatacataacgcaaattcccaaatacgtcgatcgaggttaaatgaatcgaatatagtgggcatataagcacatttaagaaacatatggaaattaggccgcacacatattctactttcgtaaggtgtcccgagggtaggtatatacacncgatagggaaaccgccgtctctgaacaatgtcacggaggtcttgcatatcgtgtcatccacaattggaacatatgaaagctaggcccctctcagtccgtcaaaatgtcttattagtaaccgaaataaatcttcttccacctcaagacttagggaaccgataaaagggccgttttcgtcgcagttctgacgtacgtgctttcaacacatctgtgtcattcgacatgtccaaataaaggccatgcggccacagtatttggacagagttgtgacatttaaggaagtgcagagaacgcccaggagataacggaccagaacacaagtcctttaggacattaaacttcgcctccataatttatatccccaagccaataagtggaacttgacacagttacacacttagggccaggatatactaaaccgggataacaaaagcccccttaatgagcaatttaaagccccgaatttccctctacaggttgtgttaaacgcttagcatggacattaacttgtattacctctaagtaagttaatcttaaccctgaggatattatgacccttaaacgttaaagattcaacaaacgttattaaagaagcctttccgcgaagggaagtccaacagggaaggaccgatatagattaaacacttagatgcctatcgtgaaaagccctgtagaaaacgcagaaggggctatataacagtgtggaaactttataaaacaaccaccgtgatgaaagagtgtcgtcatggtgcccaagacccagtactcgatgtgatgacacattcaaaggaaaagaggcgtgtgacgccaccccggacgtataaagaccgaggggagttgattttgtggacacccaa

SEQ ID NO: 520254 - DNA, 1222 bp, Homo sapiens
  misc_feature (22)..(22): n is a, c, g, or t
  misc_feature (62)..(62): n is a, c, g, or t
  misc_feature (85)..(85): n is a, c, g, or t
  misc_feature (90)..(90): n is a, c, g, or t
  misc_feature (111)..(111): n is a, c, g, or t
  misc_feature (191)..(191): n is a, c, g, or t
  misc_feature (196)..(196): n is a, c, g, or t
  misc_feature (198)..(198): n is a, c, g, or t
  misc_feature (201)..(201): n is a, c, g, or t
  misc_feature (250)..(250): n is a, c, g, or t
  misc_feature (325)..(325): n is a, c, g, or t
  misc_feature (432)..(432): n is a, c, g, or t
  misc_feature (595)..(595): n is a, c, g, or t
  misc_feature (609)..(609): n is a, c, g, or t
  misc_feature (612)..(612): n is a, c, g, or t
  misc_feature (614)..(614): n is a, c, g, or t
  misc_feature (616)..(616): n is a, c, g, or t
  misc_feature (620)..(620): n is a, c, g, or t
  misc_feature (622)..(622): n is a, c, g, or t
  misc_feature (633)..(634): n is a, c, g, or t
  misc_feature (636)..(636): n is a, c, g, or t
  misc_feature (639)..(642): n is a, c, g, or t
  misc_feature (742)..(742): n is a, c, g, or t
  misc_feature (811)..(811): n is a, c, g, or t
  misc_feature (920)..(920): n is a, c, g, or t
  misc_feature (928)..(928): n is a, c, g, or t
  misc_feature (940)..(940): n is a, c, g, or t
  misc_feature (944)..(944): n is a, c, g, or t
  misc_feature (947)..(947): n is a, c, g, or t
  misc_feature (954)..(954): n is a, c, g, or t
  misc_feature (963)..(963): n is a, c, g, or t
  misc_feature (968)..(968): n is a, c, g, or t
  misc_feature (972)..(972): n is a, c, g, or t
  misc_feature (975)..(975): n is a, c, g, or t
  misc_feature (978)..(978): n is a, c, g, or t
  misc_feature (985)..(985): n is a, c, g, or t
  misc_feature (987)..(987): n is a, c, g, or t
  misc_feature (989)..(989): n is a, c, g, or t
  misc_feature (992)..(992): n is a, c, g, or t
  misc_feature (996)..(996): n is a, c, g, or t
  misc_feature (1000)..(1000): n is a, c, g, or t
  misc_feature (1003)..(1003): n is a, c, g, or t
  misc_feature (1006)..(1006): n is a, c, g, or t
  misc_feature (1020)..(1020): n is a, c, g, or t
tccatccgattcaggccatcgntggagtgaagaagcagtccccaaggagatatctactccgntggggtggagcggctcccgatcntcccnggggcgccgaggcggccgggngcgcggcggtggtcgagaccagaacggcctttccaagggcggcggcggcggttacaacagctacggtggttacggcggcncggancngcngctacaatgctacggaggcggcggcggcggttcgtctacggtgggagcnactacggtaacggcttcggcggcttcggcagctacagccagcatcagtcctcctatgggcccatgaagagcggcngcggcggcggcggtggaggcagtagctggggcggtcgcagtaatagtggaccttacagaggcggctatggcggtgggggtggctatggaggcagctccttctaaaanaaaatttaaaatgcctgggagtggctataggggtagctctttccaacagcccaagtggggtcaactcctaagccccaccccctcacacacaccgccttccctgttttgcccttgggggagccacttctaaggctgcttacccttgggggtgttcctctatttncctgccacctctcntcncncncccncngaagatgcacnngnccnnnnatacacatttttgtgtaacagtcattgatggactctatttttttattattacttggaccttggtcgtttttatactagcaaaatgtcttgttttaatttntattttttggggggagggagggagtgaacttgctgattctgtagcaaaacctgggtgggggttggggtngggggtagtttactttgttgtaaggacttgataacctggctacagcgttttctatgaaatctacttggatcccatgcctgaaatttggaagcatatgtacaaaaatcanttttacgntttatttttaanaaantantgtgttngaccgacangtctnacanttnttntcttggntncnttncggnccgnttnttnagggatatttgttnaggacttacgtgtaaatcctttattcttgatgttgtacttatagaaacttaagagctcctgaggttttttacctctctactgttgtcccgatagaagcttgttgtattatattcctaacaggcatcacttttgatgtcgttaatgatgctttttctaaccttaatcctatgtgctttcatttttagtcttaagcctatcgct

SEQ ID NO: 520255 - DNA, 446 bp, Homo sapiens
  misc_feature (11)..(11): n is a, c, g, or t
  misc_feature (55)..(55): n is a, c, g, or t
  misc_feature (62)..(62): n is a, c, g, or t
  misc_feature (438)..(438): n is a, c, g, or t
cccttttttgnaatggaaagttatatgagtttccctcaaaaagttgaaaacacgnaaccccnaagtccttccatactcccagattccagtgttcctttccccatcatgcctgccctgacacttagaaaaacaaaacctaaagaatttttaaaatctggcctggacgtggtggttccatgccttgtaatccccagcactttgggaggcccagagcagatggattgcttgagcctcaggagtttgagacccagccctgggcaacatggcaaaatcccttcactacaaaaagtgcaaaaattggccaggcatggtagtgcacgcctgtagtctcagctactcaggaggctgaaggcaggaggatcacctgagcccagggaggttgaggctgcagtgagccctgatgggccactgcactccagcctgagtgacagagtgaantctgtctc

SEQ ID NO: 520256 - DNA, 1040 bp, Homo sapiens
ggcgggctcggacccacgcggcgccgggggccagactgggctgcagcgctcacacccccggcggacggacacgatgccctttgacttcaggaggttggacatcgtacaggaaggtgcccaaggtacctatacgcagccaagcgtacagccggggccatttatctccatctgtctgctgcctcttcatcgctcttcctcttcctctcggagctcaccggagtttataacgaccagaagttgtgaacgagctcctatgtcgattgaccccagatcaaggaccagcggtggcaagatcgacgtcagatctgaacatctgtttacccaatctgcactgcgagtgggttgggcttgacattcaggatgacgcatgggcaggcacctgaagctgggccgaccatcgacaactccgatgaagattccccgtgaccaatggggcaggctgccgcttcgaggggcagcatcgagcatcaccaaggtccccggtaacgttcccacgtgtccacaccacagtgccaccagcccagccacagaacccagacatgacgcatgttccaatccacaagctctgcctttggggaacaggcgtacaggtccagaacatccacgggagctttccaatgctgctcgggggacgccagtacagactcagcctccaagcccctgtgcttccaggactaccttctgaagattgtgccaacgggtttcatgacggaccacgagtgggcaacgcagcggtactccgtaacaaggtacaccggtggccaccacgggacatacgtcgcctacagccacacgggcgcggctcatccctgcaaactgggtcgggtaacgacctcagccccatcacggagcacgaacaccagcagcagaagcgcactgccgccttacacgcatctcctccaccggaatgggggcactattgtggggacccttccccgcgccggcgacctggacctccggcattttcacgcctgacgcctgcacacgaccaggtgtgcgaagtatgtggccacccaccttggccgcggacccggccttac

SEQ ID NO: 520257 - DNA, 1112 bp, Homo sapiens
tgagacaaggtctcgctctgtcacccaggctggagtgcaggggtgtgaccacagcttactgcagccttgaactcccgggctcaagcaatcctacccacctcagcctcctgagtaggtgggactacgggcacgcaccaacatgcctggctgtgttttatttaaatttattcttgaagagatggggtctcattatgttgcccaggactggatctggtactcctgggctctagatgatcctccgtgtctaagcctactggatgtgctgggattgcgggcatgaaccactgaacccagaccaaaggtgatataacatgaatatcaggccggagtgcaggaggatacaagccgtgaaatcccaccacataagggagagccggggaagggcaggatcacggggatcggcgagcgcatgagaccagccctggccaggcatggtgaaacaccagaatactaccagaaaataccaggatgggccacggcagaggaggagacacacatgctggcccggcaacaacgggagcgctgacagacgaagaagcacatagcaacgaacaccacggcgccgcccacacgcgcaccgcagacaaggacggcagacgcacacacaacgccaccgcaacgcacgggcatgccaccgaaagagcaccactcccaccagcaacaccaacaagaagcacccaaaagcaaaagaaagacagcagaagagggagccaaatgaggacagaagccgacgacagacagaacagcgcggagagggagcacgaaccaaggacaccacgagagagacgcagagaacgagacaaagcccgcaccggaggaccacacaaaagagacgtgagcacggaagagagacgagcagagcgagagaggaacacacgggacagcaggagcacgaggggcgagagacgcacggcggagaagacagagaagagaggagacacaggggagcgacagccacgggcggagcgggagggcacacagagcacggcgggagaggagaggcagtgcggaacgagtacagagaaagagagaagaaggcggaaggaaggacagacgacaggatggagagacacgagaagcggagggggagtcgcgcgtagcacggcaggaga

SEQ ID NO: 520258 - DNA, 1275 bp, Homo sapiens
ttatctttctgcttcagtgattttactgtaacattttcaaatattgtgttctttactgtaccatttaagtatagttgatatatgtgaggcaacaacatacatggtttcagcatggtaggtagacgggaaaataggagctatagaatagtcccacgttggactagcagcactggggccaaagaccgcctatgactccacctcagggtcgttaacgtggctactagttacacatcagggaatcctcaagaatcatgacgtggcactctagcctccatccattacttgcgcgtggcaggggcaactggtggggcttgcttcgtcacgtagatcccttactgcgataacggaccaatatttggtaatagtcgtttacttggacggtgtattggtgaatttccctgtaagatggcttcgggtgatattgcacaggaacaacgaaaagacctcgtgctccctaggagaagctaggacctaagtgatgaatcatagatctcactctttcataattggacgagcacaaagttcttagactttttcgtttgtcgcccctagccttattcgtgcaaactaagacacccaaataatttgcgcgcatcgccataggattttccttgtcattaggttggccttgaaagggggcccattgtgtgagacggcacaacatttaactgtggcaacaaaggcgctttgtcttgcccccttccaaacttgtcagggctaaattccgtggtaccttgggtggggaccccccaagtggacgaagccccccaagaacaaaaattcacaaacgtttcatttaacagcttaccacttggttttttaccttttaaaaacactagcggagtaacttaaagaaccccttcccctttgaagaagcagaacttctcacacgacgttgtcttctacaagacacacatcccaagacgagactaactttgtgagaggcgcaaaaacaacttcccttcttggttgcaacacgcgcgggggccaagggcttcccctttcccaagacggcattattgggaataaatttttaggccttgttatgggccatgggtatgactttgttttctcggcggaaccaaacggaaaaaacgcgtggcggaaccctgaaaccaccccttggtggaacggggagtaaccaactcaaggggggccattccccctatgggattggatattgcgggggattcttttttctcactatccaccattggtctcctttgggaccccccgggggacacaagaaattttcctttttcccctttcctttaa

SEQ ID NO: 520259 - DNA, 206 bp, Homo sapiens
  misc_feature (75)..(75): n is a, c, g, or t
  misc_feature (112)..(112): n is a, c, g, or t
  misc_feature (177)..(177): n is a, c, g, or t
agggggcgcccagaaggacactttcctcctttggtgttgtccccacgtcttccagcagcgctcaggcactgagtnctcaggtgtgacctcttcagacacgctggagacttanagattggcaagtctcagtagggcctgccaacctgagcggagtaagcatgaagcaggctgggctgntttcagcccctaccagcttttcctcatgc

SEQ ID NO: 520260 - DNA, 302 bp, Homo sapiens
ctattaaaaatgtattttccaaaagcaaggtaaatgctgacccaaaaagccgaaagccaaaagaccctgcggaacgggctggatggggctaaaacctgacacagccaggcggggcaaacctcggggggctcggattctatgggagaatagatagagcttcatcggtggccttgcatattccaccgggctgtgttcaagcaggctgcactggatgctcttgtgcaagaggcgctcactcatcacccgcagggagacacacctgcagtggaacaacttggccttacgccacaacaacctgtcag

SEQ ID NO: 520261 - DNA, 324 bp, Homo sapiens
  misc_feature (168)..(168): n is a, c, g, or t
  misc_feature (292)..(292): n is a, c, g, or t
  misc_feature (301)..(301): n is a, c, g, or t
ctttacaacgcctgggaagctttgttgtttgcaataaattttaatacttgtctgtttcggtctgcactgcctttatgagctgtaacactcacggggtaggtttgcagcttcactcctgaagccagtaagacaacgaacccactgggagaaacaaacaactccagacgngccgacttaagagctataatactcgctgtgacggtctgcagcttcactcctgagccagcgagaccacgaacccaccagaaggaagaaactccgaacacatctgaacatcagaagggacagactncggacacgncgcctttaagaactgtaacactt

SEQ ID NO: 520262 - DNA, 166 bp, Homo sapiens
gacatccacgatgcagcgtctattacaggttcgttttgttcatcgattaaagtcctacgtgatctgagttcatgaccggatggaatccaggtcggtttctatctacttcaacattcctccctgttacgtaaggacaatgagaaataagtcctacgatctctgattg

SEQ ID NO: 520263 - DNA, 514 bp, Homo sapiens
  misc_feature (21)..(21): n is a, c, g, or t
  misc_feature (121)..(121): n is a, c, g, or t
  misc_feature (409)..(409): n is a, c, g, or t
  misc_feature (488)..(488): n is a, c, g, or t
  misc_feature (499)..(499): n is a, c, g, or t
ttttccttcttacagtgtctnggcttctaaatcgtctttaattttaccacctttctaaaatatatttatttgttctttaacttacaagcttatttattcatcaagttttcattgagggttnacacttgtgccaagttctgtgttagcctccaggtgtagaaagataaagctttgaaggagctaatggaatccgtgttttgggagtcctcagggcaaccccagcgtttggagattacctggaaggactcacgggacttggcatcaggttgttcttcctcgtgtgcaggacgcactgcagccgtagtgaaggatgcacagtccgactggcagatcggaagggagaagatgtaggcggaacatggaggaaccccatatgccagccgtctgtatgctctgtccctcccacganggtcacacagagcacacgctgtcctcagcaataaaaacgcagcaagctctgtgcgacatttccattcaggctcatcggngactccggttntcagggtttttactt

SEQ ID NO: 520264 - DNA, 200 bp, Homo sapiens
tacacgatccacacaacatctgtaaaacgcatacctatttctccacatcactctccagcatctgtagttacctgactttttaatgattgccattctaactggtgtgagatggtatctcattgtggttttgatttgcatttctctaatgaccagtgatgatgagcttatatttcatatgttcgtgggcacacataatggag

SEQ ID NO: 520265 - DNA, 133 bp, Homo sapiens
aaggcggatattggactgaatgcgtcaggttagagccatttgttgactggagttggcagggctgcttggtcgtctgttgttcttggtctcgtctggaacctgccttcacattctctctgggtttggcccttat

SEQ ID NO: 520266 - DNA, 217 bp, Homo sapiens
ttttaactttagattgctccttcactgagacccacggatgatacatttcaagagtatgtaagcaattacaactctatatcaaatcttagttccaaaatccaattgtactggaaatacacttcagtttacctaaataaagtggcactgcaaagggcaaagaagggttttctatagggatggctacaatagagagttacatctgctggtgtctactgca

SEQ ID NO: 520267 - DNA, 460 bp, Homo sapiens
  misc_feature (71)..(72): n is a, c, g, or t
ggaggacagctggacgtctgcagagttggccttggacacgtgcttgctcacatggctggggctggtttaanngggtaatgaggcattgattacacgaaaaaagatgaaatggcctttgctcattcgttattttaatctcctagctgtggaggcagaaaattgttcataggaatggtttcgaggagatgtattaggagcgacatcagggtgatgtgctctcatttggccagatagaggagtgccggatcctccggggacctgatgggctgagtcgaggtaagtgtctgtctggaaagctctccctcagtgctaattggagctctgtgtacagtcgagcaaatgtaggcaccgacacgcagaggtcacctgtattcatccatgtataagtatcacctgactttcaccatagctgaatcatcacctttatttctccagttcagaggccttgggcacatatagc

SEQ ID NO: 520268 - DNA, 453 bp, Homo sapiens
gctcgacgtccaggccgagccgaaaagcgtgtgtagcgatgcaatggtggggcgcccgaaaaaaccagctgctgcgaagaaaaccacgcgcaaatcctcaactgccctgcccgatcagctcaccccacaattggcgacgctggtggaccgtgcaccggacggcgactgggtgtacgagatcaaattcgacggctaccgcatcctcacgcgtattcgtgacggcgaggtacggctattcactcgcaatggtcatgactggactgatcggctaccgcgccaggtcaaggccctggaggcgcttaagctcaaggacagctggctcgacggcgaggtggtcagcctgaacgcggatgggttaccggacttccaggcattgcaaaatgcctttgatatcggtcgcagcctggacattgtctattacctgtttgatgcgccgtttctggaaggtcgtga

SEQ ID NO: 520269 - DNA, 148 bp, Homo sapiens
  misc_feature (148)..(148): n is a, c, g, or t
ggctgggcgcggagtgtgcgtggcctgagccgtgcagggtgatgcttcagggttcttccgaggacctggacccgggctgccgctcgaaggcacggccctcccattcggcactggtttgtttgggggtcatcatggaaggcgcttcggn

SEQ ID NO: 520270 - DNA, 114 bp, Homo sapiens
cttgggcaaccacagtgtgcatgtgcaatgcacaagcagcaacagtttcccaaggcagggggggcagcaaacagcgtggccactcgcactcatggcacatccaagttccatggc

SEQ ID NO: 520271 - DNA, 97 bp, Homo sapiens
ggatttgctggtgcagtacaactaggcttaatagggacatgttggcttttctcttgacgtgggagaaattgaaaagaaggggaaggggaagaaaaaa

SEQ ID NO: 520272 - DNA, 135 bp, Homo sapiens
tagggaggctgaggctggcttggaggttgcagtgagccaaggtcacgccacttcactccagcctgggcaacaagagtgaaactccgtctaaaacaaacaaaaaaaaaagacgttcatttccttatattcttttac

SEQ ID NO: 520273 - DNA, 390 bp, Homo sapiens
  misc_feature (1)..(1): n is a, c, g, or t
nggctattgtgggaaggcataacccacagatagatcaacctttgtatcctggcccttctccactctccaccatgcaggacatacatcttctcaagcagtcaacgtcgaacgcttgagaaatagtcataattacccacatatagtaattaatagatgcgaattaattgatccttgatgtgatgttcttttgcatatttccttcattctaaagttgttccctggccgggagcgttggctttcgcctgtaatcccaacactttgggaggccaggacagatcacttgaggtcaggagttcgagaccagcccagccaacatggcgaaaccatgtctctactaaaaatacaaaaattatggtgacgcctgcctgtagtcccagctactcgggaggc

SEQ ID NO: 520274 - DNA, 170 bp, Homo sapiens
acctttactacaacaagtacatcaatgtgaggaaggggaacatcttggggatcaccatggtgctggcatgctacatgctcttaagctactccttttcctacatgcatcttaagcactagcggctccgctaattcccctgaagaggacacactctggacccctccacccca

SEQ ID NO: 520275 - DNA, 139 bp, Homo sapiens
ggggcccctaaagggttcccccctttttcccccccccgggggggggggggggttttttttgtccccccctttttttggggggggttttttgtttcccccccccccgggcccccccctggttttaaggggggttttttta

SEQ ID NO: 520276 - DNA, 326 bp, Homo sapiens
aacacgataaaccatggccaattcagtttccctttggggccaattacttgaagtatccccagaaaatgtaaactgctcgccttattccccccaactttttgttcatgtggcagggagcaggaccccactatggaatagatttttaaaactgaacttgaagctaacgttaaaatagtggttaacaaagctaaaaaataaggctaaccctcgaaaagaacatgggccccgggttaactagctttgctctttaaatgcaagtggctgaggcccataggggcctagtaaatgttaactgtttttggaaaaaataaaaacctcagtaccca

SEQ ID NO: 520277 - DNA, 2858 bp, Homo sapiens
agcggagaatagtcagagcaaaaccacgcctgtgtcttcctcctgcctcagggacgaacaccttccttccaggtccgtggcaaatatctccaaaagccctgccgcctgccaacaccccttcaagttcccagttccacggaggcggaagcaaagcccccggaaaggccggtttgtccgccctgtgttgtttaaaggggatagacgaccttggagcgccccgccccctcccgccaaggaaggaccccattggctctccccggaggcttcactctcattggtcagcgagtgaatgccgacctgcagactggggcctaagtttcttttagtttccggtgtctctgcaatggcggctctagactccctgtcgctcttcactagcctcggcctgagcgagcagaaggcccgcgagacgctcaagaactcggctctgagcgcgcagctgcgcgaggccgctactcaggctcagcagaccctgggttccaccattgacaaagctaccgggatcctgttatatggcttggcctcccgactcagggatacccggcgtctctccttccttgtaagctacatagccagtaagaagatccacactgagccccagctaagcgctgcccttgagtatgtgcggagtcaccccttggaccccatcgacactgtggacttcgagcgggaatgtggcgtgggtgtcattgtgaccccagagcagattgaggaggctgtggaggctgctattaacaggcaccggccccagctcctggtggaacgttaccatttcaacatggggctgctgatgggagaggctcgggctgtgctgaagtgggcagatggcaaaatgatcaagaatgaagtggacatgcaggtcctccaccttctgggccccaagttggaggctgatctggagaagaagttcaaggtggcaaaagctcggctagaagaaacagaccggaggacggcaaaggatgtggtggagaatggcgagactgctgaccagaccctgtctctgatggagcagctccggggggaggcccttaagttccacaagcctggtgagaactacaagaccccaggctatgtggtcactcccacacaccatgaatctactaaagcagcacctggagattactggtgggcaggtacgtacccggttcccgccagaacccaatggaatcctgcatattggacatgccaaagccatcaatttcaactttggctatgccaaggccaacaatggcatctgttttctgcgttttgatgacaccaaccctgagaaggaggaagcaaagttcttcacggccatctgtgacatggtagcctggctaggctacacaccttacaaagtcacatatgcgtctgactattttgaccagctatatgcgtgggctgtggagctcatccgcaggggtctggcttatgtgtgccaccagcgaggagaggagctcaaaggccataatactctgccttcaccctggagagaccgtcccatggaggagtcactgctgctctttgaggcaatgcgcaagggcaagttttcagagggcgaggccacactacggatgaagctggtgatggaggatggcaagatggaccctgtagcctatcgagtcaagtatacaccacaccaccgcacaggggacaaatggtgcatctatcccacctacgactacacacactgcctctgtgactccatcgagcacatcactcactcactctgcaccaaggaattccaggcccgacgctcttcctacttctggctttgcaatgcactggacgtctattgccctgtgcagtgggagtatggccgcctcaacctgcactatgctgttgtctctaagaggaagatcctccagcttgtagcaactggtgctgtgcgggactgggatgacccacggctctttacactcacggccctgcgacggcggggcttcccacctgaggccatcaacaacttctgtgcccgggtgggagtgactgtggcacaaaccacaatggagccacatcttctagaagcctgtgtgcgtgatgtgctgaatgacacagccccacgagccatggctgtgctggagtcactacgggtcatcatcaccaactttcctgctgccaagtccttggacatccaggtgcccaacttcccagctgatgagaccaaaggcttccatcaggttccctttgcacccattgtcttcattgagaggactgacttcaaggaggagccagagccaggatttaagcgcctggcttggggccagcctgtgggcctgaggcatacaggctacgtcattgagctgcagcatgttgtcaagggccccagtggttgtgtagagagtctggaggtgacctgcagacgggcagatgctggagagaagccaaaggcctttattcactgggtgtcacagcctttgatgtgtgaggttcgcctctatgagcgactgtgagtgaacagagctggggtgggggcaggtacaagatgcacattgcctgctatggctgcccagctgggggtatgaccttcactttggctgcagattccagcacaagaaccctgaagatcctactgaggtgcctggtggatttttaagtgacctgaacctggcatcactacacgtggtggatgcagcattagtggactgctctgtggccctggcaaaacccttcgacaagttccagtttgagcgtcttggatatttctccgtggatccagacagccatcagggaaagcttgtctttaaccgaactgtcacactgaaggaagacccaggaaaggtgtgagctggaagcactgaacctacctcatcctcctggagggtgtggctaccctcgccaccccaaattccatgtcaataaagaacagctaaattctc

SEQ ID NO: 520278 - DNA, 945 bp, Homo sapiens
ggcatcttggcctggaggacacgcctgggtgcagcgtgtctgtgctcagtgagggccggtgaaagaaagtgcgtttccttgtttgcatttaattcagtttagtgttaatgggtgtgaacaaagctctggtgctagagggaaagttaggaataggcctcccagaggatactccagacagttgacaagacatctgcagcgccctgtcgagtgtcaaggaatttataacctgtggagactcctgaaaatcagtctaatgtcttggggtgcagctgtgcgcatgaggtgctgtgcagatgttgtatggccttgggtcacagactccctactggggctgcagtctattagaccctggggtactgtggataccacgtcgtaggtgaccacatctggacttacagtgcatcacactccaggaccccctgaaccatcacttgccacgatactccgggtcattggactgagactatgaactcttgcaatccatggtgacaggaggtgggcaagtgacatacatacaaggtcgagagcggtaaattcctaacaggagaacataaaggtttcacttctaaaagatccatccaaatatgcgagaaagaagggtacatataaattccaatgtgttacaaaacacaatgttgcctaccgtgtaaaatgagaatccagagtcaattggtgacgtgcagattccgaaggtaagtatttacaacaatcgcagaatttgcacattcctggaacaatgattaaacaagtagattagattgaattaattcctggtagaagtgactttaactgtctggtcccgcgaatgtaccgaagttgtatatacgacaaggcctcgaaactggtgaaacgagctgggaaagtggacataaaaaccattcaatattatatgtacataaaattacatcaataaacaactaggaacccgagaccagggaagcccta

SEQ ID NO: 520279 - DNA, 3390 bp, Homo sapiens
agcggagaatagtcagagcaaaaccacgcctgtgtcttcctcctgcctcagggacgaacaccttccttccaggtccgtggcaaatatctccaaaagccctgccgcctgccaacaccccttcaagttcccagttccacggaggcggaagcaaagcccccggaaaggccggtttgtccgccctgtgttgtttaaaggggatagacgaccttggagcgccccgccccctcccgccaaggaaggaccccattggctctccccggaggcttcactctcattggtcagcgagtgaatgccgacctgcagactggggcctaagtttcttttagtttccggtgtctctgcaatggcggctctagactccctgtcgctcttcactagcctcggcctgagcgagcagaaggcccgcgagacgctcaagaactcggctctgagcgcgcagctgcgcgaggccgctactcaggctcagcagaccctgggttccaccattgacaaagctaccgggatcctgttatatggcttggcctcccgactcagggatacccggcgtctctccttccttgtaagctacatagccagtaagaagatccacactgagccccagctaagcgctgcccttgagtatgtgcggagtcaccccttggaccccatcgacactgtggacttcgagcgggaatgtggcgtgggtgtcattgtgaccccagagcagattgaggaggctgtggaggctgctattaacaggcaccggccccagctcctggtggaacgttaccatttcaacatggggctgctgatgggagaggctcgggctgtgctgaagtgggcagatggcaaaatgatcaagaatgaagtggacatgcaggtcctccaccttctgggccccaagttggaggctgatctggagaagaagttcaaggtggcaaaagctcggctagaagaaacagaccggaggacggcaaaggatgtggtggagaatggcgagactgctgaccagaccctgtctctgatggagcagctccggggggaggcccttaagttccacaagcctggtgagaactacaagaccccaggctatgtggtcactcccacacaccatgaatctactaaagcagcacctggagattactggtgggcaggtacgtacccggttcccgccagaacccaatggaatcctgcatattggacatgccaaagccatcaatttcaactttggctatgccaaggccaacaatggcatctgttttctgcgttttgatgacaccaaccctgagaaggaggaagcaaagttcttcacggccatctgtgacatggtagcctggctaggctacacaccttacaaagtcacatatgcgtctgactattttgaccagctatatgcgtgggctgtggagctcatccgcaggggtctggcttatgtgtgccaccagcgaggagaggagctcaaaggccataatactctgccttcaccctggagagaccgtcccatggaggagtcactgctgctctttgaggcaatgcgcaagggcaagttttcagagggcgaggccacactacggatgaagctggtgatggaggatggcaagatggaccctgtagcctatcgagtcaagtatacaccacaccaccgcacaggggacaaatggtgcatctatcccacctacgactacacacactgcctctgtgactccatcgagcacatcactcactcactctgcaccaaggaattccaggcccgacgctcttcctacttctggctttgcaatgcactggacgtctattgccctgtgcagtgggagtatggccgcctcaacctgcactatgctgttgtctctaagaggaagatcctccagcttgtagcaactggtgctgtgcgggactgggatgacccacggctctttacactcacggccctgcgacggcggggcttcccacctgaggccatcaacaacttctgtgcccgggtgggagtgactgtggcacaaaccacaatggagccacatcttctagaagcctgtgtgcgtgatgtgctgaatgacacagccccacgagccatggctgtgctggagtcactacgggtcatcatcaccaactttcctgctgccaagtccttggacatccaggtgcccaacttcccagctgatgagaccaaaggcttccatcaggttccctttgcacccattgtcttcattgagaggactgacttcaaggaggagccagagccaggatttaagcgcctggcttggggccagcctgtgggcctgaggcatacaggctacgtcattgagctgcagcatgttgtcaagggccccagtggttgtgtagagagtctggaggtgacctgcagacgggcagatgctggagagaagccaaaggcctttattcactgggtgtcacagcctttgatgtgtgaggttcgcctctatgagcgactgtgagtgaacagagctggggtgggggcaggtacaagatgcacattgcctgctatggctgcccagctgggggtatgaccttcactttggctgcagattccagcacaagaaccctgaagatcctactgaggtgcctggtggatttttaagtgacctgaacctggcatcactacacgtggtggatgcagcattagtggactgctctgtggccctggcaaaacccttcgacaagttccagtttgagcgtcttggatatttctccgtggatccagacagccatcagggaaagcttgtctttaaccgaactgtcacactgaaggaagacccaggaaaggtgtgagctggaagcactgaacctacctcatcctcctggagggtgtggctaccctcgccaccccaaattccatgtcaataaagaacagctaaattctcctagaaaaaaaaaaaaaaaaaaaaaaaaaaaaaaaaaaaaaaaaaaaaaaaaaaaaagggggggggcgccaaaaaaaatcccccgggggggcccccaagatcatagcggaccacccgacgacttatttgacaacaaagggggcccccataatgagggacgccactaataaaacacgacagagaacgacggccgccgctggtataaccacgacaggcgaggagcacgaggagaaacagcggcaaacgaggggaactatgatggaaaagaccaccatacactacggagggggggagaacacaaataggcgcgcagcgaaacacactaccacaaacaaggaaagaatataaaagagccgccccagacagggaacatcatacatacacacaacaaagaaacaacgaccaaaagaggggggggacgtaaccaaaccgagaagtaaagaggataaggcagggcagaagaaaaaagacggcgcacaacaacgaggaggaccaccaccacagagcaacagatgctccaagcacgggaggg

SEQ ID NO: 520280 - DNA, 552 bp, Homo sapiens
gaagttcttggagaaaactggttttaagttagcatgatctttcctcaaaaaacttatagtcctgataagaacttcccccagaattccagataaggcagcccaggccttgctgtttgcccatgcccatgcggtcagcttttttgggtaccgtggcatgcaaatgcaaacgctcacccaagaccccctgtagtgctgattactggctgaagaccctgaaaatttgaaaaagtttggaggtttgacccccccaaatttcatgttgaaactaaattcccagtgttggaggtggggcccggtgggaggggtttggattgtgggattggatcccttatggccatcttggggccatccttgtggtaatgagcaagttctttatttactagttcctgagcgatttggttgctaaaaaaagtttagaagcatcatccgctccctttcctccttttttaccatgtgatatgcacccccggggtacccttcccctattgttccagccccccgctttatggacagcctgtaaaactttgagccaaataaacctctttttttttt

SEQ ID NO: 520281 - DNA, 403 bp, Homo sapiens
ccaattttactgggtacagatctttcccctcaccacacatatgcttttcttttttgttcttgactttctccttttctatatgaaattttatgatcatagtgtcaagttttctccaagacagctcttgcacaaggccaggagtggtggcccacgcctataatcccagcactttgggaggccaaggtggttggattgcttgagctcaggagttccgaccagcctgggcaacatggggaagccctgtctctacaaaaattagccaggtgtggtggtgcacccctgtggtcccagctacttgggaggctgaagtgggagcattgcttgagcccagtaggtcaaggctacagtgagccatgatgatgccactgccactccagcctgggggacagtgagaccctgtctc

SEQ ID NO: 520282 - DNA, 2739 bp, Homo sapiens
agcggagaatagtcagagcaaaaccacgcctgtgtcttcctcctgcctcagggacgaacaccttccttccaggtccgtggcaaatatctccaaaagccctgccgcctgccaacaccccttcaagttcccagttccacggaggcggaagcaaagcccccggaaaggccggtttgtccgccctgtgttgtttaaaggggatagacgaccttggagcgccccgccccctcccgccaaggaaggaccccattggctctccccggaggcttcactctcattggtcagcgagtgaatgccgacctgcagactggggcctaagtttcttttagtttccggtgtctctgcaatggcggctctagactccctgtcgctcttcactagcctcggcctgagcgagcagaaggcccgcgagacgctcaagaactcggctctgagcgcgcagctgcgcgaggccgctactcaggctcagcagaccctgggttccaccattgacaaagctaccgggatcctgttatatggcttggcctcccgactcagggatacccggcgtctctccttccttgtaagctacatagccagtaagaagatccacactgagccccagctaagcgctgcccttgagtatgtgcggagtcaccccttggaccccatcgacactgtggacttcgagcgggaatgtggcgtgggtgtcattgtgaccccagagcagattgaggaggctgtggaggctgctattaacaggcaccggccccagctcctggtggaacgttaccatttcaacatggggctgctgatgggagaggctcgggctgtgctgaagtgggcagatggcaaaatgatcaagaatgaagtggacatgcaggtcctccaccttctgggccccaagttggaggctgatctggagaagaagttcaaggtggcaaaagctcggctagaagaaacagaccggaggacggcaaaggatgtggtggagaatggcgagactgctgaccagaccctgtctctgatggagcagctccggggggaggcccttaagttccacaagcctggtgagaactacaagaccccaggctatgtggtcactcccacacaccatgaatctactaaagcagcacctggagattactggtgggcaggtacgtacccggttcccgccagaacccaatggaatcctgcatattggacatgccaaagccatcaatttcaactttggctatgccaaggccaacaatggcatctgttttctgcgttttgatgacaccaaccctgagaaggaggaagcaaagttcttcacggccatctgtgacatggtagcctggctaggctacacaccttacaaagtcacatatgcgtctgactattttgaccagctatatgcgtgggctgtggagctcatccgcaggggtctggcttatgtgtgccaccagcgaggagaggagctcaaaggccataatactctgccttcaccctggagagaccgtcccatggaggagtcactgctgctctttgaggcaatgcgcaagggcaagttttcagagggcgaggccacactacggatgaagctggtgatggaggatggcaagatggaccctgtagcctatcgagtcaagtatacaccacaccaccgcacaggggacaaatggtgcatctatcccacctacgactacacacactgcctctgtgactccatcgagcacatcactcactcactctgcaccaaggaattccaggcccgacgctcttcctacttctggctttgcaatgcactggacgtctattgccctgtgcagtgggagtatggccgcctcaacctgcactatgctgttgtctctaagaggaagatcctccagcttgtagcaactggtgctgtgcgggactgggatgacccacggctctttacactcacggccctgcgacggcggggcttcccacctgaggccatcaacaacttctgtgcccgggtgggagtgactgtggcacaaaccacaatggagccacatcttctagaagcctgtgtgcgtgatgtgctgaatgacacagccccacgagccatggctgtgctggagtcactacgggtcatcatcaccaactttcctgctgccaagtccttggacatccaggtgcccaacttcccagctgatgagaccaaaggcttccatcaggttccctttgcacccattgtcttcattgagaggactgacttcaaggaggagccagagccaggatttaagcgcctggcttggggccagcctgtgggcctgaggcatacaggctacgtcattgagctgcagcatgttgtcaagggccccagtggttgtgtagagagtctggaggtgacctgcagacgggcagatgctggagagaagccaaaggcctttattcactgggtgtcacagcctttgatgtgtgaggttcgcctctatgagcgactattccagcacaagaaccctgaagatcctactgaggtgcctggtggatttttaagtgacctgaacctgcattagtggactgctctgtggccctggcaaaacccttcgacaagttccagtttgagcgtcttggatatttctccgtggatccagacagccatcagggaaagcttgtctttaaccgaactgtcacactgaaggaagacccaggaaaggtgtgagctggaagcactgaacctacctcatcctcctggagggtgtggctaccctcgccaccccaaattccatgtcaataaagaacagctaaattctc

SEQ ID NO: 520283 - DNA, 255 bp, Homo sapiens
aggatctccccagtgtagactatccaggaatgaagagtcattacgaatatgtgttgcactctaattcctagaactgtaatcaactggccttttgatttgagtgatgtctaaggagcattaagagtcctgaattggaaaaccgttctttccacagggggcagtcaaaagaaaagccctgaaacatcactctttgtccaactagaaaggagtgtgactgttaataaggcgcaggagtaagttgttaggtctacctgg

SEQ ID NO: 520284 - DNA, 2640 bp, Homo sapiens
agcggagaatagtcagagcaaaaccacgcctgtgtcttcctcctgcctcagggacgaacaccttccttccaggtccgtggcaaatatctccaaaagccctgccgcctgccaacaccccttcaagttcccagttccacggaggcggaagcaaagcccccggaaaggccggtttgtccgccctgtgttgtttaaaggggatagacgaccttggagcgccccgccccctcccgccaaggaaggaccccattggctctccccggaggcttcactctcattggtcagcgagtgaatgccgacctgcagactggggcctaagtttcttttagtttccggtgtctctgcaatggcggctctagactccctgtcgctcttcactagcctcggcctgagcgagcagaaggcccgcgagacgctcaagaactcggctctgagcgcgcagctgcgcgaggccgctactcaggctcagcagaccctgggttccaccattgacaaagctaccgggatcctgttatatggcttggcctcccgactcagggatacccggcgtctctccttccttgtaagctacatagccagtaagaagatccacactgagccccagctaagcgctgcccttgagtatgtgcggagtcaccccttggaccccatcgacactgtggacttcgagcgggaatgtggcgtgggtgtcattgtgaccccagagcagattgaggaggctgtggaggctgctattaacaggcaccggccccagctcctggtggaacgttaccatttcaacatggggctgctgatgggagaggctcgggctgtgctgaagtgggcagatggcaaaatgatcaagaatgaagtggacatgcaggtcctccaccttctgggccccaagttggaggctgatctggagaagaagttcaaggtggcaaaagctcggctagaagaaacagaccggaggacggcaaaggatgtggtggagaatggcgagactgctgaccagaccctgtctctgatggagcagctccggggggaggcccttaagttccacaagcctggtgagaactacaagaccccaggctatgtggtcactcccacacaccatgaatctactaaagcagcacctggagattactggtgggcaggtacgtacccggttcccgccagaacccaatggaatcctgcatattggacatgccaaagccatcaatttcaactttggctatgccaaggccaacaatggcatctgttttctgcgttttgatgacaccaaccctgagaaggaggaagcaaagttcttcacggccatctgtgacatggtagcctggctaggctacacaccttacaaagtcacatatgcgtctgactattttgaccagctatatgcgtgggctgtggagctcatccgcaggggtctggcttatgtgtgccaccagcgaggagaggagctcaaaggccataatactctgccttcaccctggagagaccgtcccatggaggagtcactgctgctctttgaggcaatgcgcaagggcaagttttcagagggcgaggccacactacggatgaagctggtgatggaggatggcaagatggaccctgtagcctatcgagtcaagtatacaccacaccaccgcacaggggacaaatggtgcatctatcccacctacgactacacacactgcctctgtgactccatcgagcacatcactcactcactctgcaccaaggaattccaggcccgacgctcttcctacttctggctttgcaatgcactggacgtctattgccctgtgcagtgggagtatggccgcctcaacctgcactatgctgttgtctctaagaggaagatcctccagcttgtagcaactggtgctgtgcgggactgggatgacccacggctctttacactcacggccctgcgacggcggggcttcccacctgaggccatcaacaacttctgtgcccgggtgggagtgactgtggcacaaaccacaatggagccacatcttctagaagcctgtgtgcgtgatgtgctgaatgacacagccccacgagccatggctgtgctggagtcactacgggtcatcatcaccaactttcctgctgccaagtccttggacatccaggtgcccaacttcccagctgatgagaccaaaggcttccatcaggttccctttgcacccattgtcttcattgagaggactgacttcaaggaggagccagagccaggatttaagcgcctggcttggggccagcctgtgggcctgaggcatacaggctacgtcattgagctgcagcatgttgtcaagggccccagtggttgtgtagagagtctggaggtgacctgcagacgggcagatgctggagagaagccaaaggcctttattcactgggtgtcacagcctttgatgtgtgaggttcgcctctatgagcgactattccagcacaagaaccctgaagatcctactgaggtgcctggtggatttttaagtgacctgaacctgagcttgtctttaaccgaactgtcacactgaaggaagacccaggaaaggtgtgagctggaagcactgaacctacctcatcctcctggagggtgtggctaccctcgccaccccaaattccatgtcaataaagaacagctaaattctc

SEQ ID NO: 520285 - DNA, 1079 bp, Homo sapiens
tattcccggttttgatcacatacgggactaggggttatcacggtcacaccatatgcggaagtgccctctagatattatgtgatagaatagatatcatcattctctggccgtttcatgagacgttaaagctactacgtctgcccctagcggctcgattccaagtttacttgcccttcttgtaattcaaagcactggaaagtgacgagctcacgcagattcggaggctccttggacaatgattcctgcagcttgcagatccttgatcgccggaaaaccactggccagggaccaatgggcaaagggaaatccaggtgagtcagtcttccgagcccttgacgcagttcgataaactacgcaggagtcaggggagcttcagccgctcaactcttcagaactctcatcagctggtgtcagggaactggatctagacaaagggccattgaagaaagcagagccccataccataagacgacaccttatcctgattgcgctgtcctgctgctagatgtgcgtgatagagagtcttaccagcagtgtcacattgttggagcttacagttacccagattgcaagctctgtctagaactaatgaacccgttattcaaatgatattcttgaatatagataattgcccatggcaagatcatcagtctgttaatcgacgatgatgaaaggctggccagtcaggcggccaaccaccatgtgcgagcgtggatattgaaaacctcttcatgctttaccggaggtgagccaaggtctaaaagtcttagctcagaaattcccggaaggactgattacatggttccctgaccagcatcttgccagcatggcaccattcctctctgggtcttgcccggaaatcgatgccagccccaaagggccacccataccagctgagaataaatggagatttaccccagaagacttaacaagaagatagaatatcatctggaagaggagcaagggcctgcagatcatcctagcagactgaacacaagctaactgcctccggaagagagtccaaggtgcctggtgcgccgaagcgctcagaatctgccaggtggctgccccgccagcaa

SEQ ID NO: 520286 - DNA, 2597 bp, Homo sapiens
agcggagaatagtcagagcaaaaccacgcctgtgtcttcctcctgcctcagggacgaacaccttccttccaggtccgtggcaaatatctccaaaagccctgccgcctgccaacaccccttcaagttcccagttccacggaggcggaagcaaagcccccggaaaggccggtttgtccgccctgtgttgtttaaaggggatagacgaccttggagcgccccgccccctcccgccaaggaaggaccccattggctctccccggaggcttcactctcattggtcagcgagtgaatgccgacctgcagactggggcctaagtttcttttagtttccggtgtctctgcaatggcggctctagactccctgtcgctcttcactagcctcggcctgagcgagcagaaggcccgcgagacgctcaagaactcggctctgagcgcgcagctgcgcgaggccgctactcaggctcagcagaccctgggttccaccattgacaaagctaccgggatcctgttatatggcttggcctcccgactcagggatacccggcgtctctccttccttgtaagctacatagccagtaagaagatccacactgagccccagctaagcgctgcccttgagtatgtgcggagtcaccccttggaccccatcgacactgtggacttcgagcgggaatgtggcgtgggtgtcattgtgaccccagagcagattgaggaggctgtggaggctgctattaacaggcaccggccccagctcctggtggaacgttaccatttcaacatggggctgctgatgggagaggctcgggctgtgctgaagtgggcagatggcaaaatgatcaagaatgaagtggacatgcaggtcctccaccttctgggccccaagttggaggctgatctggagaagaagttcaaggtggcaaaagctcggctagaagaaacagaccggaggacggcaaaggatgtggtggagaatggcgagactgctgaccagaccctgtctctgatggagcagctccggggggaggcccttaagttccacaagcctggtgagaactacaagaccccaggctatgtggtcactcccacacaccatgaatctactaaagcagcacctggagattactggtgggcaggtacgtacccggttcccgccagaacccaatggaatcctgcatattggacatgccaaagccatcaatttcaactttggctatgccaaggccaacaatggcatctgttttctgcgttttgatgacaccaaccctgagaaggaggaagcaaagttcttcacggccatctgtgacatggtagcctggctaggctacacaccttacaaagtcacatatgcgtctgactattttgaccagctatatgcgtgggctgtggagctcatccgcaggggtctggcttatgtgtgccaccagcgaggagaggagctcaaaggccataatactctgccttcaccctggagagaccgtcccatggaggagtcactgctgctctttgaggcaatgcgcaagggcaagttttcagagggcgaggccacactacggatgaagctggtgatggaggatggcaagatggaccctgtagcctatcgagtcaagtatacaccacaccaccgcacaggggacaaatggtgcatctatcccacctacgactacacacactgcctctgtgactccatcgagcacatcactcactcactctgcaccaaggaattccaggcccgacgctcttcctacttctggctttgcaatgcactggacgtctattgccctgtgcagtgggagtatggccgcctcaacctgcactatgctgttgtctctaagaggaagatcctccagcttgtagcaactggtgctgtgcgggactgggatgacccacggctctttacactcacggccctgcgacggcggggcttcccacctgaggccatcaacaacttctgtgcccgggtgggagtgactgtggcacaaaccacaatggagccacatcttctagaagcctgtgtgcgtgatgtgctgaatgacacagccccacgagccatggctgtgctggagtcactacgggtcatcatcaccaactttcctgctgccaagtccttggacatccaggtgcccaacttcccagctgatgagaccaaaggcttccatcaggttccctttgcacccattgtcttcattgagaggactgacttcaaggaggagccagagccaggatttaagcgcctggcttggggccagcctgtgggcctgaggcatacaggctacgtcattgagctgcagcatgttgtcaagggccccagtggttgtgtagagagtctggaggtgacctgcagacgggcagatgctggagagaagccaaaggcctttattcactgggtgtcacagcctttgatgtgtgaggttcgcctctatgagcgactattccagcacaagaaccctgaagatcctactgaggtgcctggtggatttttaagtgacctgaacctggcactcactacaacccggtggacagcagcactatactggcctcctcttatcgaccctggctacacctatcacccagcttccgtttagcactccccgaccatt

SEQ ID NO: 520287 - DNA, 3463 bp, Homo sapiens
agcggagaatagtcagagcaaaaccacgcctgtgtcttcctcctgcctcagggacgaacaccttccttccaggtccgtggcaaatatctccaaaagccctgccgcctgccaacaccccttcaagttcccagttccacggaggcggaagcaaagcccccggaaaggccggtttgtccgccctgtgttgtttaaaggggatagacgaccttggagcgccccgccccctcccgccaaggaaggaccccattggctctccccggaggcttcactctcattggtcagcgagtgaatgccgacctgcagactggggcctaagtttcttttagtttccggtgtctctgcaatggcggctctagactccctgtcgctcttcactagcctcggcctgagcgagcagaaggcccgcgagacgctcaagaactcggctctgagcgcgcagctgcgcgaggccgctactcaggctcagcagaccctgggttccaccattgacaaagctaccgggatcctgttatatggcttggcctcccgactcagggatacccggcgtctctccttccttgtaagctacatagccagtaagaagatccacactgagccccagctaagcgctgcccttgagtatgtgcggagtcaccccttggaccccatcgacactgtggacttcgagcgggaatgtggcgtgggtgtcattgtgaccccagagcagattgaggaggctgtggaggctgctattaacaggcaccggccccagctcctggtggaacgttaccatttcaacatggggctgctgatgggagaggctcgggctgtgctgaagtgggcagatggcaaaatgatcaagaatgaagtggacatgcaggtcctccaccttctgggccccaagttggaggctgatctggagaagaagttcaaggtggcaaaagctcggctagaagaaacagaccggaggacggcaaaggatgtggtggagaatggcgagactgctgaccagaccctgtctctgatggagcagctccggggggaggcccttaagttccacaagcctggtgagaactacaagaccccaggctatgtggtcactcccacacaccatgaatctactaaagcagcacctggagattactggtgggcaggtacgtacccggttcccgccagaacccaatggaatcctgcatattggacatgccaaagccatcaatttcaactttggctatgccaaggccaacaatggcatctgttttctgcgttttgatgacaccaaccctgagaaggaggaagcaaagttcttcacggccatctgtgacatggtagcctggctaggctacacaccttacaaagtcacatatgcgtctgactattttgaccagctatatgcgtgggctgtggagctcatccgcaggggtctggcttatgtgtgccaccagcgaggagaggagctcaaaggccataatactctgccttcaccctggagagaccgtcccatggaggagtcactgctgctctttgaggcaatgcgcaagggcaagttttcagagggcgaggccacactacggatgaagctggtgatggaggatggcaagatggaccctgtagcctatcgagtcaagtatacaccacaccaccgcacaggggacaaatggtgcatctatcccacctacgactacacacactgcctctgtgactccatcgagcacatcactcactcactctgcaccaaggaattccaggcccgacgctcttcctacttctggctttgcaatgcactggacgtctattgccctgtgcagtgggagtatggccgcctcaacctgcactatgctgttgtctctaagaggaagatcctccagcttgtagcaactggtgctgtgcgggactgggatgacccacggctctttacactcacggccctgcgacggcggggcttcccacctgaggccatcaacaacttctgtgcccgggtgggagtgactgtggcacaaaccacaatggagccacatcttctagaagcctgtgtgcgtgatgtgctgaatgacacagccccacgagccatggctgtgctggagtcactacgggtcatcatcaccaactttcctgctgccaagtccttggacatccaggtgcccaacttcccagctgatgagaccaaaggcttccatcaggttccctttgcacccattgtcttcattgagaggactgacttcaaggaggagccagagccaggatttaagcgcctggcttggggccagcctgtgggcctgaggcatacaggctacgtcattgagctgcagcatgttgtcaagggccccagtggttgtgtagagagtctggaggtgacctgcagacgggcagatgctggagagaagccaaaggcctttattcactgggtgtcacagcctttgatgtgtgaggttcgcctctatgagcgactgtgagtgaacagagctggggtgggggcaggtacaagatgcacattgcctgctatggctgcccagctgggggtatgaccttcactttggctgcagattccagcacaagaaccctgaagatcctactgaggtgcctggtggatttttaagtgacctgaacctggtaggttcatgaggtttggggtgagggaggtaggcctccctggttggatggttgcctgagttccctgcctgcagcatcactacacgtggtggatgcagcattagtggactgctctgtggccctggcaaaacccttcgacaagttccagtttgagcgtcttggatatttctccgtggatccagacagccatcagggaaagcttgtctttaaccgaactgtcacactgaaggaagacccaggaaaggtgtgagctggaagcactgaacctacctcatcctcctggagggtgtggctaccctcgccaccccaaattccatgtcaataaagaacagctaaattctcctagaaaaaaaaaaaaaaaaaaaaaaaaaaaaaaaaaaaaaaaaaaaaaaaaaaaaagggggggggcgccaaaaaaaatcccccgggggggcccccaagatcatagcggaccacccgacgacttatttgacaacaaagggggcccccataatgagggacgccactaataaaacacgacagagaacgacggccgccgctggtataaccacgacaggcgaggagcacgaggagaaacagcggcaaacgaggggaactatgatggaaaagaccaccatacactacggagggggggagaacacaaataggcgcgcagcgaaacacactaccacaaacaaggaaagaatataaaagagccgccccagacagggaacatcatacatacacacaacaaagaaacaacgaccaaaagaggggggggacgtaaccaaaccgagaagtaaagaggataaggcagggcagaagaaaaaagacggcgcacaacaacgaggaggaccaccaccacagagcaacagatgctccaagcacgggaggg

SEQ ID NO: 520288 - DNA, 377 bp, Homo sapiens
  misc_feature (196)..(196): n is a, c, g, or t
  misc_feature (232)..(232): n is a, c, g, or t
  misc_feature (281)..(281): n is a, c, g, or t
ggtgcggtggctcatgcttgtaatcccagcactttggaaggctgaggcgggaggttcacctgaggtcaggagttcaagaccagcctggccagcatggtgaaaccatctctactaaaaatacaaaaattagccaggcgtggtggtgggtgcctgtaatcccaactattcggggaggctgaggcagaagaatcgcttnaagccaggaggcagaggttgtggtgagctgagattnagccactgcactccagcctgagctacagagcaagactctgtctcagaantaacaataaataatctgtccctttgtccttacatgggagaaattaatacatgccaagtcgcttctgtatcccctcattgtctgaatttaggggata

SEQ ID NO: 520289 - DNA, 2492 bp, Homo sapiens
  misc_feature (2335)..(2335): n is a, c, g, or t
agcggagaatagtcagagcaaaaccacgcctgtgtcttcctcctgcctcagggacgaacaccttccttccaggtccgtggcaaatatctccaaaagccctgccgcctgccaacaccccttcaagttcccagttccacggaggcggaagcaaagcccccggaaaggccggtttgtccgccctgtgttgtttaaaggggatagacgaccttggagcgccccgccccctcccgccaaggaaggaccccattggctctccccggaggcttcactctcattggtcagcgagtgaatgccgacctgcagactggggcctaagtttcttttagtttccggtgtctctgcaatggcggctctagactccctgtcgctcttcactagcctcggcctgagcgagcagaaggcccgcgagacgctcaagaactcggctctgagcgcgcagctgcgcgaggccgctactcaggctcagcagaccctgggttccaccattgacaaagctaccgggatcctgttatatggcttggcctcccgactcagggatacccggcgtctctccttccttgtaagctacatagccagtaagaagatccacactgagccccagctaagcgctgcccttgagtatgtgcggagtcaccccttggaccccatcgacactgtggacttcgagcgggaatgtggcgtgggtgtcattgtgaccccagagcagattgaggaggctgtggaggctgctattaacaggcaccggccccagctcctggtggaacgttaccatttcaacatggggctgctgatgggagaggctcgggctgtgctgaagtgggcagatggcaaaatgatcaagaatgaagtggacatgcaggtcctccaccttctgggccccaagttggaggctgatctggagaagaagttcaaggtggcaaaagctcggctagaagaaacagaccggaggacggcaaaggatgtggtggagaatggcgagactgctgaccagaccctgtctctgatggagcagctccggggggaggcccttaagttccacaagcctggtgagaactacaagaccccaggctatgtggtcactcccacacaccatgaatctactaaagcagcacctggagattactggtgggcaggtacgtacccggttcccgccagaacccaatggaatcctgcatattggacatgccaaagccatcaatttcaactttggctatgccaaggccaacaatggcatctgttttctgcgttttgatgacaccaaccctgagaaggaggaagcaaagttcttcacggccatctgtgacatggtagcctggctaggctacacaccttacaaagtcacatatgcgtctgactattttgaccagctatatgcgtgggctgtggagctcatccgcaggggtctggcttatgtgtgccaccagcgaggagaggagctcaaaggccataatactctgccttcaccctggagagaccgtcccatggaggagtcactgctgctctttgaggcaatgcgcaagggcaagttttcagagggcgaggccacactacggatgaagctggtgatggaggatggcaagatggaccctgtagcctatcgagtcaagtatacaccacaccaccgcacaggggacaaatggtgcatctatcccacctacgactacacacactgcctctgtgactccatcgagcacatcactcactcactctgcaccaaggaattccaggcccgacgctcttcctacttctggctttgcaatgcactggacgtctattgccctgtgcagtgggagtatggccgcctcaacctgcactatgctgttgtctctaagaggaagatcctccagcttgtagcaactggtgctgtgcgggactgggatgacccacggctctttacactcacggccctgcgacggcggggcttcccacctgaggccatcaacaacttctgtgcccgggtgggagtgactgtggcacaaaccacaatggagccacatcttctagaagcctgtgtgcgtgatgtgctgaatgacacagccccacgagccatggctgtgctggagtcactacgggtcatcatcaccaactttcctgctgccaagtccttggacatccaggtgcccaacttcccagctgatgagaccaaaggcttccatcaggttccctttgcacccattgtcttcattgagaggactgacttcaaggaggagccagagccaggatttaagcgcctggcttggggccagcctgtgggcctgaggcatacaggctacgtcattgagctgcagcatgttgtcaaggtgagagccagctgcagccttcctactgcagtgcntgctgggccaagagcttgtctttaaccgaactgtcacactgaaggaagacccaggaaaggtgtgagctggaagcactgaacctacctcatcctcctggagggtgtggctaccctcgccaccccaaattccatgtcaataaagaacagctaaattctc

SEQ ID NO: 520290 - DNA, 355 bp, Homo sapiens
gagctcggtaccccatgcactttgtcacagctactagatagtgctgaggcagagaattgcttgaatccgggaggcggaggttgcagtgagccgagatcgtgccactgaactccaacctgccaatagagcgagactccgtctcaaaaaaaaaaaaaaaaaaaaaagaattagctttgaaaaaaatcccgcacttcagaggaaagctttttttctgcttggtgtctttccaaagaatagaaatatttgaagcctatgtttcctagccgattgtgtggatgggggtgagctggctgaggcatcgctcaagctggggggtggtgtgtaaaaagcacttgaagcccacaagaggcccccc

SEQ ID NO: 520291 - DNA, 197 bp, Homo sapiens
cccaaagaagggaacaatagttacctattcagggtgggggtgggaagagggtaaggaatgacaaaccattcttgggtactacgctcactatctgagtgatgaaaaacaaaactccagtgacacacaatttacacatgtacaaacctgcacatgtaccctaaaacttaaagtataattaaaaaaaaagtactgtaacc

SEQ ID NO: 520292 - DNA, 397 bp, Homo sapiens
  misc_feature (14)..(14): n is a, c, g, or t
  misc_feature (37)..(37): n is a, c, g, or t
gcacacactataangtggatcatacattaatcacggngcataaacactgaatagtttggggattcggacgccgagctcttagtagcagcctgtttactacccactaggagatttacacacacagtccttcatttgactgagatactcatttcatctctaaacacctctatgcacacaaactagaaatctagagagacaagaaattcctagactctacaccatctcaagactgaaccaagaagaaattgattccctgaacagaccaataatgagctccaaaactgaataaaaataaatagcctaccaaccaaaaaaatcccagaaccggatagatccatagccaaattctactagatgtacaaagaagagctggtaccatccctgttgaaactacccg

SEQ ID NO: 520293 - DNA, 3123 bp, Homo sapiens
agcggagaatagtcagagcaaaaccacgcctgtgtcttcctcctgcctcagggacgaacaccttccttccaggtccgtggcaaatatctccaaaagccctgccgcctgccaacaccccttcaagttcccagttccacggaggcggaagcaaagcccccggaaaggccggtttgtccgccctgtgttgtttaaaggggatagacgaccttggagcgccccgccccctcccgccaaggaaggaccccattggctctccccggaggcttcactctcattggtcagcgagtgaatgccgacctgcagactggggcctaagtttcttttagtttccggtgtctctgcaatggcggctctagactccctgtcgctcttcactagcctcggcctgagcgagcagaaggcccgcgagacgctcaagaactcggctctgagcgcgcagctgcgcgaggccgctactcaggctcagcagaccctgggttccaccattgacaaagctaccgggatcctgttatatggcttggcctcccgactcagggatacccggcgtctctccttccttgtaagctacatagccagtaagaagatccacactgagccccagctaagcgctgcccttgagtatgtgcggagtcaccccttggaccccatcgacactgtggacttcgagcgggaatgtggcgtgggtgtcattgtgaccccagagcagattgaggaggctgtggaggctgctattaacaggcaccggccccagctcctggtggaacgttaccatttcaacatggggctgctgatgggagaggctcgggctgtgctgaagtgggcagatggcaaaatgatcaagaatgaagtggacatgcaggtcctccaccttctgggccccaagttggaggctgatctggagaagaagttcaaggtggcaaaagctcggctagaagaaacagaccggaggacggcaaaggatgtggtggagaatggcgagactgctgaccagaccctgtctctgatggagcagctccggggggaggcccttaagttccacaagcctggtgagaactacaagaccccaggctatgtggtcactcccacacaccatgaatctactaaagcagcacctggagattactggtgggcaggtacgtacccggttcccgccagaacccaatggaatcctgcatattggacatgccaaagccatcaatttcaactttggctatgccaaggccaacaatggcatctgttttctgcgttttgatgacaccaaccctgagaaggaggaagcaaagttcttcacggccatctgtgacatggtagcctggctaggctacacaccttacaaagtcacatatgcgtctgactattttgaccagctatatgcgtgggctgtggagctcatccgcaggggtctggcttatgtgtgccaccagcgaggagaggagctcaaaggccataatactctgccttcaccctggagagaccgtcccatggaggagtcactgctgctctttgaggcaatgcgcaagggcaagttttcagagggcgaggccacactacggatgaagctggtgatggaggatggcaagatggaccctgtagcctatcgagtcaagtatacaccacaccaccgcacaggggacaaatggtgcatctatcccacctacgactacacacactgcctctgtgactccatcgagcacatcactcactcactctgcaccaaggaattccaggcccgacgctcttcctacttctggctttgcaatgcactggacgtctattgccctgtgcagtgggagtatggccgcctcaacctgcactatgctgttgtctctaagaggaagatcctccagcttgtagcaactggtgctgtgcgggactgggatgacccacggctctttacactcacggccctgcgacggcggggcttcccacctgaggccatcaacaacttctgtgcccgggtgggagtgactgtggcacaaaccacaatggagccacatcttctagaagcctgtgtgcgtgatgtgctgaatgacacagccccacgagccatggctgtgctggagtcactacgggtcatcatcaccaactttcctgctgccaagtccttggacatccaggtgcccaacttcccagctgatgagaccaaaggcttccatcaggttccctttgcacccattgtcttcattgagaggactgacttcaaggaggtaaattgtgggggtggagggtcccgtttgctgctgagtctggtactgggaacctttcatctcctcatctctgtcagtccatctacttcctgcttcagatgaaccaatctttgccagacacgggggtagggaagcttccccacttgtttgacccttgcagcctcatgtgtctaccccacttcctatctctaggagccagagccaggatttaagcgcctggcttggggccagcctgtgggcctgaggcatacaggctacgtcattgagctgcagcatgttgtcaagggccccagtggttgtgtagagagtctggaggtgacctgcagacgggcagatgctggagagaagccaaaggcctttattcactgggtgtcacagcctttgatgtgtgaggttcgcctctatgagcgactgtgagtgaacagagctggggtgggggcaggtacaagatgcacattgcctgctatggctgcccagctgggggtatgaccttcactttggctgcagattccagcacaagaaccctgaagatcctactgaggtgcctggtggatttttaagtgacctgaacctggtaggttcatgaggtttggggtgagggaggtaggcctccctggttggatggttgcctgagttccctgcctgcagcatcactacacgtggtggatgcagcattagtggactgctctgtggccctggcaaaacccttcgacaagttccagtttgagcgtcttggatatttctccgtggatccagacagccatcagggaaagcttgtctttaaccgaactgtcacactgaaggaagacccaggaaaggtgtgagctggaagcactgaacctacctcatcctcctggagggtgtggctaccctcgccaccccaaattccatgtcaataaagaacagctaaattctc

SEQ ID NO: 520294 - DNA, 2684 bp, Homo sapiens
  misc_feature (2527)..(2527): n is a, c, g, or t
agcggagaatagtcagagcaaaaccacgcctgtgtcttcctcctgcctcagggacgaacaccttccttccaggtccgtggcaaatatctccaaaagccctgccgcctgccaacaccccttcaagttcccagttccacggaggcggaagcaaagcccccggaaaggccggtttgtccgccctgtgttgtttaaaggggatagacgaccttggagcgccccgccccctcccgccaaggaaggaccccattggctctccccggaggcttcactctcattggtcagcgagtgaatgccgacctgcagactggggcctaagtttcttttagtttccggtgtctctgcaatggcggctctagactccctgtcgctcttcactagcctcggcctgagcgagcagaaggcccgcgagacgctcaagaactcggctctgagcgcgcagctgcgcgaggccgctactcaggctcagcagaccctgggttccaccattgacaaagctaccgggatcctgttatatggcttggcctcccgactcagggatacccggcgtctctccttccttgtaagctacatagccagtaagaagatccacactgagccccagctaagcgctgcccttgagtatgtgcggagtcaccccttggaccccatcgacactgtggacttcgagcgggaatgtggcgtgggtgtcattgtgaccccagagcagattgaggaggctgtggaggctgctattaacaggcaccggccccagctcctggtggaacgttaccatttcaacatggggctgctgatgggagaggctcgggctgtgctgaagtgggcagatggcaaaatgatcaagaatgaagtggacatgcaggtcctccaccttctgggccccaagttggaggctgatctggagaagaagttcaaggtggcaaaagctcggctagaagaaacagaccggaggacggcaaaggatgtggtggagaatggcgagactgctgaccagaccctgtctctgatggagcagctccggggggaggcccttaagttccacaagcctggtgagaactacaagaccccaggctatgtggtcactcccacacaccatgaatctactaaagcagcacctggagattactggtgggcaggtacgtacccggttcccgccagaacccaatggaatcctgcatattggacatgccaaagccatcaatttcaactttggctatgccaaggccaacaatggcatctgttttctgcgttttgatgacaccaaccctgagaaggaggaagcaaagttcttcacggccatctgtgacatggtagcctggctaggctacacaccttacaaagtcacatatgcgtctgactattttgaccagctatatgcgtgggctgtggagctcatccgcaggggtctggcttatgtgtgccaccagcgaggagaggagctcaaaggccataatactctgccttcaccctggagagaccgtcccatggaggagtcactgctgctctttgaggcaatgcgcaagggcaagttttcagagggcgaggccacactacggatgaagctggtgatggaggatggcaagatggaccctgtagcctatcgagtcaagtatacaccacaccaccgcacaggggacaaatggtgcatctatcccacctacgactacacacactgcctctgtgactccatcgagcacatcactcactcactctgcaccaaggaattccaggcccgacgctcttcctacttctggctttgcaatgcactggacgtctattgccctgtgcagtgggagtatggccgcctcaacctgcactatgctgttgtctctaagaggaagatcctccagcttgtagcaactggtgctgtgcgggactgggatgacccacggctctttacactcacggccctgcgacggcggggcttcccacctgaggccatcaacaacttctgtgcccgggtgggagtgactgtggcacaaaccacaatggagccacatcttctagaagcctgtgtgcgtgatgtgctgaatgacacagccccacgagccatggctgtgctggagtcactacgggtcatcatcaccaactttcctgctgccaagtccttggacatccaggtgcccaacttcccagctgatgagaccaaaggcttccatcaggttccctttgcacccattgtcttcattgagaggactgacttcaaggaggtaaattgtgggggtggagggtcccgtttgctgctgagtctggtactgggaacctttcatctcctcatctctgtcagtccatctacttcctgcttcagatgaaccaatctttgccagacacgggggtagggaagcttccccacttgtttgacccttgcagcctcatgtgtctaccccacttcctatctctaggagccagagccaggatttaagcgcctggcttggggccagcctgtgggcctgaggcatacaggctacgtcattgagctgcagcatgttgtcaaggtgagagccagctgcagccttcctactgcagtgcntgctgggccaagagcttgtctttaaccgaactgtcacactgaaggaagacccaggaaaggtgtgagctggaagcactgaacctacctcatcctcctggagggtgtggctaccctcgccaccccaaattccatgtcaataaagaacagctaaattctc

SEQ ID NO: 520295 - DNA, 2886 bp, Homo sapiens
tcggcacgaggctgagcgcggggcttctctcttgacccctctgacctcaggctcagcagaccctgggttccaccattgacaaagctaccgggatcctgttatatggcttggcctcccgactcagggatacccggcgtctctccttccttgtaagctacatagccagtaagaagatccacactgagccccagctaagcgctgcccttgagtatgtgcggagtcaccccttggaccccatcgacactgtggacttcgagcgggaatgtggcgtgggtgtcattgtgaccccagagcagattgaggaggctgtggaggctgctattaacaggcaccggccccagctcctggtggaacgttaccatttcaacatggggctgctgatgggagaggctcgggctgtgctgaagtgggcagatggcaaaatgatcaagaatgaagtggacatgcaggtcctccaccttctgggccccaagttggaggctgatctggagaagaagttcaaggtggcaaaagctcggctagaagaaacagaccggaggacggcaaaggatgtggtggagaatggcgagactgctgaccagaccctgtctctgatggagcagctccggggggaggcccttaagttccacaagcctggtgagaactacaagaccccaggctatgtggtcactcccacacaccatgaatctactaaagcagcacctggagattactggtgggcaggtacgtacccggttcccgccagaacccaatggaatcctgcatattggacatgccaaagccatcaatttcaactttggctatgccaaggccaacaatggcatctgttttctgcgttttgatgacaccaaccctgagaaggaggaagcaaagttcttcacggccatctgtgacatggtagcctggctaggctacacaccttacaaagtcacatatgcgtctgactattttgaccagctatatgcgtgggctgtggagctcatccgcaggggtctggcttatgtgtgccaccagcgaggagaggagctcaaaggccataatactctgccttcaccctggagagaccgtcccatggaggagtcactgctgctctttgaggcaatgcgcaagggcaagttttcagagggcgaggccacactacggatgaagctggtgatggaggatggcaagatggaccctgtagcctatcgagtcaagtatacaccacaccaccgcacaggggacaaatggtgcatctatcccacctacgactacacacactgcctctgtgactccatcgagcacatcactcactcactctgcaccaaggaattccaggcccgacgctcttcctacttctggctttgcaatgcactggacgtctattgccctgtgcagtgggagtatggccgcctcaacctgcactatgctgttgtctctaagaggaagatcctccagcttgtagcaactggtgctgtgcgggactgggatgacccacggctctttacactcacggccctgcgacggcggggcttcccacctgaggccatcaacaacttctgtgcccgggtgggagtgactgtggcacaaaccacaatggagccacatcttctagaagcctgtgtgcgtgatgtgctgaatgacacagccccacgagccatggctgtgctggagtcactacgggtcatcatcaccaactttcctgctgccaagtccttggacatccaggtgcccaacttcccagctgatgagaccaaaggcttccatcaggttccctttgcacccattgtcttcattgagaggactgacttcaaggaggagccagagccaggatttaagcgcctggcttggggccagcctgtgggcctgaggcatacaggctacgtcattgagctgcagcatgttgtcaagggccccagtggttgtgtagagagtctggaggtgacctgcagacgggcagatgctggagagaagccaaaggcctttattcactgggtgtcacagcctttgatgtgtgaggttcgcctctatgagcgactattccagcacaagaaccctgaagatcctactgaggtgcctggtggatttttaagtgacctgaacctggcatcactacacgtggtggatgcagcattagtggactgctctgtggccctggcaaaacccttcgacaagttccagtttgagcgtcttggatatttctccgtggatccagacagccatcagggaaagcttgtctttaaccgaactgtcacactgaaggaagacccaggaaaggtgtgagctggaagcactgaacctacctcatcctcctggagggtgtggctaccctcgccaccccaaattccatgtcaataaagaacagctaaattctcctagaaaaaaaaaaaaaaaaaaaaaaaaaaaaaaaaaaaaaaaaaaaaaaaaaaaaagggggggggcgccaaaaaaaatcccccgggggggcccccaagatcatagcggaccacccgacgacttatttgacaacaaagggggcccccataatgagggacgccactaataaaacacgacagagaacgacggccgccgctggtataaccacgacaggcgaggagcacgaggagaaacagcggcaaacgaggggaactatgatggaaaagaccaccatacactacggagggggggagaacacaaataggcgcgcagcgaaacacactaccacaaacaaggaaagaatataaaagagccgccccagacagggaacatcatacatacacacaacaaagaaacaacgaccaaaagaggggggggacgtaaccaaaccgagaagtaaagaggataaggcagggcagaagaaaaaagacggcgcacaacaacgaggaggaccaccaccacagagcaacagatgctccaagcacgggaggg

SEQ ID NO: 520296 - DNA, 393 bp, Homo sapiens
  misc_feature (217)..(217): n is a, c, g, or t
  misc_feature (220)..(220): n is a, c, g, or t
  misc_feature (222)..(222): n is a, c, g, or t
  misc_feature (244)..(244): n is a, c, g, or t
  misc_feature (252)..(252): n is a, c, g, or t
  misc_feature (283)..(283): n is a, c, g, or t
  misc_feature (310)..(310): n is a, c, g, or t
  misc_feature (317)..(317): n is a, c, g, or t
  misc_feature (320)..(320): n is a, c, g, or t
  misc_feature (348)..(348): n is a, c, g, or t
  misc_feature (370)..(370): n is a, c, g, or t
  misc_feature (387)..(387): n is a, c, g, or t
ccatgaatccacagggttgcgcaccgccgaggagccagatgcggcaggggcgttaactttcgcgtgccgatttggcgcaacgggtcgcgaccgaccattgctaggggctggttctggagggtggaaccgaccgttcccgcttggattggtgcgggaaggcgccgggccgatcttcaggcggctgcttgcctcaggcgaagtactggccgccattggntgnantggtggagccggtgatgaagcnggtatccncggacgcaaggaagaccacgcagcggcgaanttcctccggttcgcccagccggccganccggatnttncgggatgattgcgtttcgttcagcaatnttttcgttcgaaaacctttgancattttcggtgggcgantttaag

SEQ ID NO: 520297 - DNA, 781 bp, Homo sapiens
ttcccatatgagcctggcaagcaagtccggagcgcggtgaggatcaagaacgtcggcaagtcccatgtggcgttcaagttccaaacaacagcaccaaagagctgcttcatgaggcctcccggcggcatacttgctccaggagaaaccatcatagctacagtgttcaagtttgtggagcatcctgagaacaacgagaagcctttagatcagaagtgcaaggtcaagttcaagattgttagcctgaaagttaaagggcctgtggagtatgttccagaatgttcgatgagcagaaagaccaggttgcagttgagcaaattctgcgggttattttcttggatgctgagcgtcctagcgcacaactggacaggctcaagcgtcagctcgctgaagctgaagcagctcttgaggcacgcaagaagcctccagaagacactagtccccctatcgttggtgaagggcttgtgatcgatgaatggaaggaacgaagagagagatatcttgctcgtcagcaggttgaagaggttgattcggtataaacacggtgccaaaaactctgcaaaacatcggttcctgtccatgggttttagctcccgcgaacaaaaatgaggctttgtgtaattaagatttagcttcttcctgggccctacatgtagatagccagtcagtgcttgataataatatcctccgggataaatcttgtacgtggtgttctagatttagatgtgtgatttgtgtccatttcctaccgtgtttcagtcagtgctggttccaatcaattaca

SEQ ID NO: 520298 - DNA, 280 bp, Homo sapiens
gtccggtcttgagttcatgtgactgcaggtactggagatccacagcaaagatccaggacccgctgaaagcctagaaatggtgagattgccagttccgacatctggagaggggcaagggctggttggaactggtgggaagcagctgtggtgggactcaggcctccccgcagtcagctccacaatctgcaccctgagttctccttgcccaggttggcatctgtcccctgcagccataagatggcagctaggctgacagccgggcccccgggcgtcctgtctt

SEQ ID NO: 520299 - DNA, 408 bp, Homo sapiens
  misc_feature (5)..(5): n is a, c, g, or t
  misc_feature (24)..(24): n is a, c, g, or t
  misc_feature (45)..(45): n is a, c, g, or t
  misc_feature (54)..(54): n is a, c, g, or t
  misc_feature (89)..(89): n is a, c, g, or t
  misc_feature (153)..(153): n is a, c, g, or t
  misc_feature (170)..(170): n is a, c, g, or t
  misc_feature (225)..(225): n is a, c, g, or t
  misc_feature (243)..(243): n is a, c, g, or t
  misc_feature (286)..(286): n is a, c, g, or t
accanatttaaagggtacctattngaaaagttttccacaccctgnggagaacangcatacctacaattaagagagtgaacataccccancatcccctcaaagtgtcacaatgctccctcctgatgactccctcccccagaaaacccacccaancggctttcaatttgcantttgtagttttatgtgaatggaatcatatagtatgtcctttttttttgtctggcntctttcactttgcataantattttgagattcatatgtctccatcttgatgctcgtatgaantcattcttttaaatgttgaatattcccttgtatggatataccacaattcatttacccatttacttgttgatgacatttgggtttttttagttttgggatattacaaataaagctgctgtgaa

SEQ ID NO: 520300 - DNA, 272 bp, Homo sapiens
ccgcagtctgcggcgcttggtcagtgaggggttagaggccaaatagtgcagagtacacgatccttcccagtataaacatctctggtttcctgagagtcaggatccaaaataagtgaatttctttcgcgttaaagaccacatcaaggcctggtgaatataaactaaggtagcactcaaaggaatagcctccatatttctgctactgggctgcgggcacagaacagttttagataccctccctttcccctatgggtttgaatgatactggcttg

SEQ ID NO: 520301 - DNA, 551 bp, Homo sapiens
cggtagctacaacgaagtctcacggtaatgcgtggggcgcatatgatgctcagtccccaccagcatggatgccaagtgtgggagggcaagcttgtgcctcaccatacaccatcctggaaggaagaatccgctgattttcctctcttcctctggtaggaggcctggggatgagagcatagtttgtgcccaggaccctgtcaagacaacagtgctcccttccagcataggatgcgaactggtatgactcatgacagagtgtgggtaggacacaggcctgggagccggagccttggaagggcgtgaggaaagaaggagatagggcagtgagcctcttaggcctctctctcctacccgaactctgcctgtgccaagggctggggaggggctacctgggcagtggcagggccaagtgctctccaaccccacagcaccgctgctttgctccgcccatcctctgcctgtgctctcacggtagtgctggggcgcatatgctgctcagtccccaccagcatggatgccaagtgtgggagggcaagcttgtgcctcaccat

SEQ ID NO: 520302 - DNA, 533 bp, Homo sapiens
  misc_feature (212)..(212): n is a, c, g, or t
gaagcatattgaacgaagagaacttgattgacgaagactttcaaaatctaaaactgcggtcgacaggcttcaccaatcttggagcagaagggagcgtctttcctaaggtcaggataacggcctccagagacagccagatgcaaaatcccgtagtttcaagacacagcagcatgccccgccctgactattagaatcataagaatgtggaaccncgccatggcccccaaccatatgtacatatctattattctagcagtgtttagacaagactgcatggagaagtgagcaccacgtaaagactctggcctccgggagtttcttcttccatctagacatactgccagtcctcatctgcaatggcaacgttgtgcaatgtcttgcaaacgacatccacgctcacttgctaaataagaatctatgacattaacatgtagctcgatgctattagcgcttgtcagagcagcgtgcgttccctctcaactcaagctacaaacagtacctgcagacaactcggcttcaccggctacgccaca

SEQ ID NO: 520303 - DNA, 528 bp, Homo sapiens
accggacggacagtgtagcatggaacttagggccactagaacttaacgataattacgttaatacgtacaggtcgattcctgatctgaaatgttcgggatcagaatgtatcagatatcagatgggtggggataaaagaatatttgcgtatacataatgagatatcttgggggcgagacctaagtctaaacacgaaatttatttgtccttcatatgcaccttatatgcatagcctgaagataattatgtattttcactaattttgtgcatgaaacaaaggttgtggacacgaggtcgcgtatgaattactttagtggtggtatcatgtaggtactcaaaatttaacaaattgggagcatattggacttgatgtttggattagggatgctcaacttgcatctaatactcggctagcattattttaatagtttgctaatcacctcaaaatgtcttttatcatagccagtgtgttagagtgcaaaaaaataagtattcacatggcaacacggtctcgcagggtaccgagctcg

SEQ ID NO: 520304 - DNA, 212 bp, Homo sapiens
aatcagccggccctgagttagaggcaaataatagcaatacatgtattgtatcactcatataagtacatacaactgtagtgaggcaatataaatagccatctctagagaaacaataagccaaaatatagctagaacaattaaataggtaagaaaactaatgccaagttaggatagaaaattctacaccgtactatgtcaaaacaacgctggcc

SEQ ID NO: 520305 - DNA, 1098 bp, Homo sapiens
gggaaacatggccggcattgagcggagtcctgctggctgacccgagcgctggtctccgccggtgaaccctgtgggcatggagagtgtctgagtacctcgtgccgctggatgcacgctgcatcgcggagccaggccgaggacgtgagggtggatgggctcctttcccgtgaccatgcttccgggagacggagtggggcctgagctagatgcacgccgtcaaggaggtgtcaagggctgcgatgtacccagtggagttccaggagcaccacctgagtgcggtgcagaatatggatctgaggagaagctggagcaggtgctgagttcccatgaaggagaacaaagtggacatcattggaacagattcataccccgatggagtataagggcggagctagcctagctatgatatgcgggtgaagggtacagttggactctatttgggcaacagtacgtaccatgtgcaaggtcactatcccttgggttataatgaactacgggcaacaaacagatcctagaacctgggctgcatcattacggagaagacacgaccagacactgggggcagcaccagcctcctcctggaaaccatgacgcagttgccacaggcgcgcttgatgacaactggaagctggcaaaggaaaccgcatcggcaacgcacagacacccgacgctccacaaggcgggacagggcacacgggcaacgcgcccaagggaacgccaagcgcccaccccacgacacagggggccgcgggacacacggaacaacaaggctgagcaccaccccagcggcccgagcagacaaaggaacaacctggaggacgagaggtggggccgcccgtggcaggcgggcgaggcaagcaagaggcaaagcgcgtgccgggacgagacgggcagccgaccacacacagatccaaaagaactacggcagaggagaaagggacgtccacatcgaacccaacacgtcggcggtgcccatcgagcgcggcggagcggccagaaagcacggaaaacacagagaactgacatgaatgagaggagaaaggcagccacaacaattcacgtgcgagaaacagtcaacaggaacggaacgagcaagca

SEQ ID NO: 520306 - DNA, 840 bp, Homo sapiens
agccatggcggagctgggcagccctaggttagagtggagacggaggccaggcgcaggggtcacacctcatctggtttccttcccatctcacagcttagcttgtgcttctcaacaccaagtcttctaagagcaataaataactacaccatgaatgtgcgaagtagctattcttatatagggggggggcagggctggactttatgctgtttcatccagaaggacacaaggggaggagagcatcctcttacagtcttttgataacacttacacttcataaaatcccgagaaccagctccatcttctcattaccctattatcaccctttacaacccctacactctcatggagacgttaactatcaagctctgactgttaattgttcgcacaaatttacagagacgtgagggtgcgtcaaaggcttgatacgcacaagcctctgggtagccccacaagtcccgctgacatgagcaacacacaatagctcagcgcggtgacggcaacacttcctacgagagcaatgagcgaactcagcatgcagtgaccccatccagggccaacacccgcagaacactatagacgcaacaaagcgccacagaaaagaacacaggaaaagggagcaatcatgaatggagaccgtagaatacagcatcccaatggtaaaaacacaacaacagccaaaagaaagcccaagggacagaccaacaaacaataggaaagggaatcacccaaaagccggagaagggagccccaaaaggcacaaaccaccaacaggagaagaacttagagcacgggaaccaaagcaatccccaacggcattggggcccagagcatcactccctg

SEQ ID NO: 520307 - DNA, 344 bp, Homo sapiens
ggctgtgaatgtcgatgcctggtcgtatgctgtcccgggttacaactgagtgcgcgtttaccggaatctggtacggtaacggctggcggggcgttatcctgagccacgatgtgcatgagtatggcaatgagagccctggggtttctatgtggagaacagattaaagggagcaaggtcagaagtggggacaagtgttaagaggctctcataaacatccagccgagacataataaaagtttgggccagaataacagtagaggtatggtcagattcagtatatatcaaaattaggatataggtaggaacataaagagatgagagcctgagccctgggagagtccact

SEQ ID NO: 520308 - DNA, 345 bp, Homo sapiens
tagtcacccatagccatcagttctactatcgaacattactaataaggtggcgtcctctataacctctccaccctgtatcagcaagcacaggaccccctctgattactcctgccatcatgtagcccttagggcatagtatgatctatctgcacagtagcagagagcacgcgagcccccttcgaccttggccgatggggagtccgaactagtctcaggcttcaagaccgaatacgccgcaggccccttcgccctattcttcatagccgagttcacgcgcctgattgatatctcgacacgcctacacgagtacgttcttcctaggaacaatctatttcgctacgctga

SEQ ID NO: 520309 - DNA, 165 bp, Homo sapiens
  misc_feature (29)..(29): n is a, c, g, or t
tacttttccacaggttgccacagtatgtnaatgcaatatctgcacagcacaattaagccaagtgcagtaaaatggattgcctgtacttctgtattctaaaataaatgcttatgctgtgatttttagaacaatatgcaaactgcagacatttgctcttaattcctg

SEQ ID NO: 520310 - DNA, 150 bp, Homo sapiens
tggaaataccatgagagtagagggcactgggatcgccgtgccccacggcaggcccctgacaggaaaaatagaggccctatgggtcacctcgactatgtacaacgtcgttgtatggctagctccctaccacagctatactgcaagacagac

SEQ ID NO: 520311 - DNA, 335 bp, Homo sapiens
tattgtaaactaagcaaagtgtccaatttattttatattttagttttattatctttagagatggggtcttactctgtcgtacagactggagtgcagtggtgcaatcatagctcactgcggccttgaactcctgggctcaaacgattctctacctcagcctcccaagtagctagggcaacaggcactcgccatcatgcctgattttttttttttttaagacatggagtcatgctatttggcacaggctggttttaaacccctagcctcaagcgatcctcctatcttggcctcccaaagtgctgggattacaggcgtaagccaccatgctagccttg

SEQ ID NO: 520312 - DNA, 151 bp, Homo sapiens
gaccccgtcgacaaaggccggcggatagccttgcttgagcaaatactcgtggttcgactcacaaccaccgatcagggccagtgccagcaccgcccaagcattacgccacatccacaaactccccggcttcacttgagtgaagtctagaagg

SEQ ID NO: 520313 - DNA, 328 bp, Homo sapiens
catatatataatatataaatactatataatgtgtgtattatatatcatcaaaatatattaataatatgtgtatgtcatgtatatattatcttttatatataaacataaaatttacatacacaaatttaattaaaatataaatatattcattgtgtatcataaacatatcagctcattatatcacagtatacaatttaatcagctcattacaatcatgcaatcattacatatcactgtcacaatttcatattgtatatcacgtataaatcaaacagacatacacatatcatatatatcatgtgttacttaatgattgggtagtcacaga

SEQ ID NO: 520314 - DNA, 510 bp, Homo sapiens
gctgagttgaatggtaattctgagttctttgaggaatcaccaacctgctttccacagtggctaaactaatttacactcccaccaacaggtgtatgtgttccattttctccacaaccttgccagcatctgttatttattgactttctagtaacagccattctgactggtgtgagatggtatgcatttctgtagtgattagtgatgatgagtgattttatatgctttttaaatgcatatatgtcttcttttgaaatgtgttcatgttctttgcccactttctttttaatggggttgcttgtttttcgcttgtaaattttttgaagcttcttatagattctggatattagatcttgttggatgcatagttggcaaatattttctaccattctgtaggttgtctgttacttgttaatgtttcatttgtttgttgtttttgagacggggtctcgctttgacgcccaggctggagtgcagtagcacaaacatgggtcattgtagcctcaacctccc

SEQ ID NO: 520315 - DNA, 175 bp, Homo sapiens
ctccattcctgactgctttcgtgggctggtgttgcatgtctgtggcttttccagcgacacagtgcaagttgttggaagatctaccattctagcgtctggaggatggtggccctcttctcacagctcccaattatatgctggatatacaagagactcatgccccaaactgggacac

SEQ ID NO: 520316 - DNA, 122 bp, Homo sapiens
atatatccaggggacagctctatgctctcatactttgagccaagactgtgcgcggttactccttctttgtgcgacagcttcgtttatgtagctagtatcgaagacggagttagatcgagcta

SEQ ID NO: 520317 - DNA, 345 bp, Homo sapiens
  misc_feature (20)..(20): n is a, c, g, or t
aaattgattatgagctacgnaatgggcagtcagaatgttgagcctatattccataaagatctagatttgggtggtagaggggagtctaacacaattggatgaagggaaagggtgtaaacagcgcttgcccaaggtgagacctcatgaggctctgacttgctgaagaacctacccattgctgtacatcctgaacactttattgggctggccacttgtctaccactgtacgttgctgactgcctggccatgcagcctggtgtgctcccatttcctttgaccgtgagcagcttaggcgagggcgttgtgggtctctacacaggaaggggcttgcaatcggctattctg

SEQ ID NO: 520318 - DNA, 810 bp, Homo sapiens
  misc_feature (810)..(810): n is a, c, g, or t
gagacgttcttcgccgagagtcgtcggggtttcctgcttcaacagtgcttggacggaacccggtgctcgttccccaccccggcggccgcccatagccagccctccgtcacctctctcaccgcaccctcggactggccccaaggcccccaccgccgctccagctggcctggcgcagccaccggctgcgtcgtcggctctccttagtcgccgccatgaagaccgcgtcccacctcgcaggtgcgccagaaattaccaccaggactcagaggcccgccattcaacccgccagatcaacctggaggcttctacgcctcctagcgttttacctgtccatgttcttactacttgagaccgcgatgatgtggcttgtgaaggaacttttgccaaaaatactttcttcaccaatctcatgagggagagggaaccatgctgagaaactgatgaagctggcagaacccaaggaaggtgggcccgaatcttccttcaggatttcagagaagaccaggacgtggtgactgactggggaagaagcgggttgaaatgcaaattgggagttgttgcatttacatttgtgggacaacaaccaaaacttgtccattcagtcacctaacgtgtgattggcaacaaaaatggccacgtggacaataaaatgaaccccccaattgggtgtggacttcatttgagcaccacatttacccttgaatgaagcagggtgaaaagccatcaaaatcaatggggttgacccacggtgacccatttgcgcaagaggtggagcgccgaattctggttggggaaatatttctttgacan

SEQ ID NO: 520319 - DNA, 1709 bp, Homo sapiens
  misc_feature (1616)..(1616): n is a, c, g, or t
tgggtcttggtccaaaattttataaagggtctttagaagagcaacatctccagactctccagaaattacagcgtgccaggggagacccggtgttagtgcgtggtggggacgtggcgtggggcatgtggcagggggctctcgggctttcccaccctttcgtgtccgtgaaagatggggggtggggggcagtatatctctctcattcttgtggggttctccacaagtgcctccgcggtggtctcggggcgagggggccctctcatatagggggcccaatctcttatcaccgagtgtgtgggtctcccgaggggccagccgatgtgatctctatacagcgctgtggtgagtggccacaggagaaacacccgcgtggtgcggtggagcacacaacgagcgggtggggcggccaaacgagagacgagtgtgtgcccacacgccgtgatagggatagtgttattaacgcgggggcgggctccctccgccggacgtgtgtgagaaactaccatctgcggagggcgcacatctcgcgaaacgaagagcctgtcctacgaggtggggggatgttaatgaagacgccgcgctgctgtgttgctcccgctgcgggggaggtgcttctcccgcagagagagcagcacgcccaaagaacacgccgtgcgcgccgagcgccgtgtggggtggcgccccccgagatgcttctcctcgccgagtgagatgtgaaacagcgcgggggaagaccaaaaccaccccaatataagaaacggagggggctctccctccgcgtgccaaacgaagagaaaagaggcgccctctccctaataggagagaagctctggtggggtcacacgcggaccgaggagagagaacccctgcggtgggccgcggtggggggcccaacagtgggggccaccccaacgaagagaaacccctccttcctatgtaggtgtgggggccaccaccccctgtttttctccacagggacatatataaaagagggcctccataaaccagggggggcccgcctctgcgcgtgagaaaaagagtccccaaaaaaaccccctccttctgcctgggaaaaccctaaacacacgaccaagggtcccacaagatctccccccgagcatacatcacgcgggcgggggcgcccgcctattttcttacacaccacaagagggaaacacaaatctcctcggggggcaaccacgggggggggggacaaaacaacaaaaagcgggagatttcacgggcggccccgggggggtggggggggagaaacatctgcgcgcacaccccttaaaagttctccgaaagagaatgaagaccccatacttcttaggaagcacacaagagaccccccccggagatgtaagaaaaacaaagctcagaatcatctcaaggcatacacgccgtcttgtgggaggagatgatcgcacactagagggagacaaaaagacttctcccccctctccggcggagaatagtggggcgagctgcgcacaatgatgtgagcgggcgaggaccgcaccggcgcgagatcaccacacgacgaagggttggaccaccccagcgaattaagtgcgagcagatgatagaaacgcagcaccgcgtgcgtaacatantccagacggaagagacgaggagcccccgtgggcggaggagacaacacactcacgcgcgcagagaaaacaagcatcaggcgaccgcactcgaaa

SEQ ID NO: 520320 - DNA, 221 bp, Homo sapiens
tctaaaaaaaaaaaaaaaattctatagtatgtattcttattttaaaaatctgcttcctttactgagcatagattatccatgttgttttgtggatccatactttattcctttctactgtatggcattaaatttgtttatccatttacctgttggtagacactttcattgcttctgatttttggatatgacaaataaagctgttataaatatccatgtataaa

SEQ ID NO: 520321 - DNA, 3188 bp, Homo sapiens
ataatttactttgtattcttgaataaaaaacatttgtacattcctgatactgggtttatagagccatgtaccagtgtactgctttcttttagtttccggtgtctctgcaatggcggctctagactccctgtcgctcttcactagcctcggcctgagcgagcagaaggcccgcgagacgctcaagaactcggctctgagcgcgcagctgcgcgaggccgctactcaggctcagcagaccctgggttccaccattgacaaagctaccgggatcctgttatatggcttggcctcccgactcagggatacccggcgtctctccttccttgtaagctacatagccagtaagaagatccacactgagccccagctaagcgggtggtggtgccagggcttaacttttcaggaggccagactatccttggagtttcatgagattaggaccctgtctgtccacttcttggagcagagatgccacaaactcacgggctctttcttctcagctgcccttgagtatgtgcggagtcaccccttggaccccatcgacactgtggacttcgagcgggaatgtggcgtgggtgtcattgtgaccccagagcagattgaggaggctgtggaggctgctattaacaggcaccggccccagctcctggtggaacgttaccatttcaacatggggctgctgatgggagaggctcgggctgtgctgaagtgggcagatggcaaaatgatcaagaatgaagtggacatgcaggtcctccaccttctgggccccaagttggaggctgatctggagaagaagttcaaggtggcaaaagctcggctagaagaaacagaccggaggacggcaaaggatgtggtggagaatggcgagactgctgaccagaccctgtctctgatggagcagctccggggggaggcccttaagttccacaagcctggtgagaactacaagaccccaggctatgtggtcactcccacacaccatgaatctactaaagcagcacctggagattactggtgggcaggtacgtacccggttcccgccagaacccaatggaatcctgcatattggacatgccaaagccatcaatttcaactttggctatgccaaggccaacaatggcatctgttttctgcgttttgatgacaccaaccctgagaaggaggaagcaaagttcttcacggccatctgtgacatggtagcctggctaggctacacaccttacaaagtcacatatgcgtctgactattttgaccagctatatgcgtgggctgtggagctcatccgcaggggtctggcttatgtgtgccaccagcgaggagaggagctcaaaggccataatactctgccttcaccctggagagaccgtcccatggaggagtcactgctgctctttgaggcaatgcgcaagggcaagttttcagagggcgaggccacactacggatgaagctggtgatggaggatggcaagatggaccctgtagcctatcgagtcaagtatacaccacaccaccgcacaggggacaaatggtgcatctatcccacctacgactacacacactgcctctgtgactccatcgagcacatcactcactcactctgcaccaaggaattccaggcccgacgctcttcctacttctggctttgcaatgcactggacgtctattgccctgtgcagtgggagtatggccgcctcaacctgcactatgctgttgtctctaagaggaagatcctccagcttgtagcaactggtgctgtgcgggactgggatgacccacggctctttacactcacggccctgcgacggcggggcttcccacctgaggccatcaacaacttctgtgcccgggtgggagtgactgtggcacaaaccacaatggagccacatcttctagaagcctgtgtgcgtgatgtgctgaatgacacagccccacgagccatggctgtgctggagtcactacgggtcatcatcaccaactttcctgctgccaagtccttggacatccaggtgcccaacttcccagctgatgagaccaaaggcttccatcaggttccctttgcacccattgtcttcattgagaggactgacttcaaggaggagccagagccaggatttaagcgcctggcttggggccagcctgtgggcctgaggcatacaggctacgtcattgagctgcagcatgttgtcaagggccccagtggttgtgtagagagtctggaggtgacctgcagacgggcagatgctggagagaagccaaaggcctttattcactgggtgtcacagcctttgatgtgtgaggttcgcctctatgagcgactattccagcacaagaaccctgaagatcctactgaggtgcctggtggatttttaagtgacctgaacctggcatcactacacgtggtggatgcagcattagtggactgctctgtggccctggcaaaacccttcgacaagttccagtttgagcgtcttggatatttctccgtggatccagacagccatcagggaaagcttgtctttaaccgaactgtcacactgaaggaagacccaggaaaggtgtgagctggaagcactgaacctacctcatcctcctggagggtgtggctaccctcgccaccccaaattccatgtcaataaagaacagctaaattctcctagaaaaaaaaaaaaaaaaaaaaaaaaaaaaaaaaaaaaaaaaaaaaaaaaaaaaagggggggggcgccaaaaaaaatcccccgggggggcccccaagatcatagcggaccacccgacgacttatttgacaacaaagggggcccccataatgagggacgccactaataaaacacgacagagaacgacggccgccgctggtataaccacgacaggcgaggagcacgaggagaaacagcggcaaacgaggggaactatgatggaaaagaccaccatacactacggagggggggagaacacaaataggcgcgcagcgaaacacactaccacaaacaaggaaagaatataaaagagccgccccagacagggaacatcatacatacacacaacaaagaaacaacgaccaaaagaggggggggacgtaaccaaaccgagaagtaaagaggataaggcagggcagaagaaaaaagacggcgcacaacaacgaggaggaccaccaccacagagcaacagatgctccaagcacgggaggg

SEQ ID NO: 520322 - DNA, 300 bp, Homo sapiens
atagctggaatcctcaggcagtggagctgcattctgaacccaggatgacttggggctaagtaggagaggagtagcttcgtgtccggtttggattcttcataatagcaacccagacctgtatctcaatcaaaaaataatctcagctccaaccacatttcgggtcagcaccatatttaacttcagctctggtcctgagacatagcactgacataagaatctccctcccttatctccaccgaccagagtcatgtcctcatgacgtgctgtcatgtagtgaggaccgatccgggcgggggggtg

SEQ ID NO: 520323 - DNA, 300 bp, Homo sapiens
ttccccaaaggggggggggggggggcggggggggggtttttttaaccccgcctttttttttggccccccgggtggctggggggccccccccccctttttttttcccccttttaaaccccggggccgccccccccccccggttttttttttggcggggggggggggtttcttttttccccggggccccctttttcccttttgcccttttttggggccccttttaacccgttttttcccaaaaaccggggggggccgggccgggttttcccgggttttttttcccccccgggccgggtttta

SEQ ID NO: 520324 - DNA, 3518 bp, Homo sapiens
agcggagaatagtcagagcaaaaccacgcctgtgtcttcctcctgcctcagggacgaacaccttccttccaggtccgtggcaaatatctccaaaagccctgccgcctgccaacaccccttcaagttcccagttccacggaggcggaagcaaagcccccggaaaggccggtttgtccgccctgtgttgtttaaaggggatagacgaccttggagcgccccgccccctcccgccaaggaaggaccccattggctctccccggaggcttcactctcattggtcagcgagtgaatgccgacctgcagactggggcctaagtttcttttagtttccggtgtctctgcaatggcggctctagactccctgtcgctcttcactagcctcggcctgagcgagcagaaggcccgcgagacgctcaagaactcggctctgagcgcgcagctgcgcgaggccgctactcaggctcagcagaccctgggttccaccattgacaaagctaccgggatcctgttatatggcttggcctcccgactcagggatacccggcgtctctccttccttgtaagctacatagccagtaagaagatccacactgagccccagctaagcgctgcccttgagtatgtgcggagtcaccccttggaccccatcgacactgtggacttcgagcgggaatgtggcgtgggtgtcattgtgaccccagagcagattgaggaggctgtggaggctgctattaacaggcaccggccccagctcctggtggaacgttaccatttcaacatggggctgctgatgggtgagcagggcctggaacggggctatattgttctctctggtcatgccttttcttctgggcacgagtgagaaggaggtgggggaaggaacaggagtgacttaaagtggtctggctgggctcaggctctggttctggtggtcagccaggacctttccttgggaaagaggtggggggagtactcttttttgcctttctgcaggctccttgtgcctatgcttctaggagaggctcgggctgtgctgaagtgggcagatggcaaaatgatcaagaatgaagtggacatgcaggtcctccaccttctgggccccaagttggaggctgatctggagaagaagttcaaggtggcaaaagctcggctagaagaaacagaccggaggacggcaaaggatgtggtggagaatggcgagactgctgaccagaccctgtctctgatggagcagctccggggggaggcccttaagttccacaagcctggtgagaactacaagaccccaggctatgtggtcactcccacacaccatgaatctactaaagcagcacctggagattactggtgggcaggtacgtacccggttcccgccagaacccaatggaatcctgcatattggacatgccaaagccatcaatttcaactttggctatgccaaggccaacaatggcatctgttttctgcgttttgatgacaccaaccctgagaaggaggaagcaaagttcttcacggccatctgtgacatggtagcctggctaggctacacaccttacaaagtcacatatgcgtctgactattttgaccagctatatgcgtgggctgtggagctcatccgcaggggtctggcttatgtgtgccaccagcgaggagaggagctcaaaggccataatactctgccttcaccctggagagaccgtcccatggaggagtcactgctgctctttgaggcaatgcgcaagggcaagttttcagagggcgaggccacactacggatgaagctggtgatggaggatggcaagatggaccctgtagcctatcgagtcaagtatacaccacaccaccgcacaggggacaaatggtgcatctatcccacctacgactacacacactgcctctgtgactccatcgagcacatcactcactcactctgcaccaaggaattccaggcccgacgctcttcctacttctggctttgcaatgcactggacgtctattgccctgtgcagtgggagtatggccgcctcaacctgcactatgctgttgtctctaagaggaagatcctccagcttgtagcaactggtgctgtgcgggactgggatgacccacggctctttacactcacggccctgcgacggcggggcttcccacctgaggccatcaacaacttctgtgcccgggtgggagtgactgtggcacaaaccacaatggagccacatcttctagaagcctgtgtgcgtgatgtgctgaatgacacagccccacgagccatggctgtgctggagtcactacgggtcatcatcaccaactttcctgctgccaagtccttggacatccaggtgcccaacttcccagctgatgagaccaaaggcttccatcaggttccctttgcacccattgtcttcattgagaggactgacttcaaggaggagccagagccaggatttaagcgcctggcttggggccagcctgtgggcctgaggcatacaggctacgtcattgagctgcagcatgttgtcaagggccccagtggttgtgtagagagtctggaggtgacctgcagacgggcagatgctggagagaagccaaaggcctttattcactgggtgtcacagcctttgatgtgtgaggttcgcctctatgagcgactattccagcacaagaaccctgaagatcctactgaggtgcctggtggatttttaagtgacctgaacctggcatcactacacgtggtggatgcagcattagtggactgctctgtggccctggcaaaacccttcgacaagttccagtttgagcgtcttggatatttctccgtggatccagacagccatcagggaaagcttgtctttaaccgaactgtcacactgaaggaagacccaggaaaggtgtgagctggaagcactgaacctacctcatcctcctggagggtgtggctaccctcgccaccccaaattccatgtcaataaagaacagctaaattctcctagaaaaaaaaaaaaaaaaaaaaaaaaaaaaaaaaaaaaaaaaaaaaaaaaaaaaagggggggggcgccaaaaaaaatcccccgggggggcccccaagatcatagcggaccacccgacgacttatttgacaacaaagggggcccccataatgagggacgccactaataaaacacgacagagaacgacggccgccgctggtataaccacgacaggcgaggagcacgaggagaaacagcggcaaacgaggggaactatgatggaaaagaccaccatacactacggagggggggagaacacaaataggcgcgcagcgaaacacactaccacaaacaaggaaagaatataaaagagccgccccagacagggaacatcatacatacacacaacaaagaaacaacgaccaaaagaggggggggacgtaaccaaaccgagaagtaaagaggataaggcagggcagaagaaaaaagacggcgcacaacaacgaggaggaccaccaccacagagcaacagatgctccaagcacgggaggg

SEQ ID NO: 520325 - DNA, 3014 bp, Homo sapiens
ataatttactttgtattcttgaataaaaaacatttgtacattcctgatactgggtttatagagccatgtaccagtgtactgctttcttttagtttccggtgtctctgcaatggcggctctagactccctgtcgctcttcactagcctcggcctgagcgagcagaaggcccgcgagacgctcaagaactcggctctgagcgcgcagctgcgcgaggccgctactcaggctcagcagaccctgggttccaccattgacaaagctaccgggatcctgttatatggcttggcctcccgactcagggatacccggcgtctctccttccttgctgcccttgagtatgtgcggagtcaccccttggaccccatcgacactgtggacttcgagcgggaatgtggcgtgggtgtcattgtgaccccagagcagattgaggaggctgtggaggctgctattaacaggcaccggccccagctcctggtggaacgttaccatttcaacatggggctgctgatgggagaggctcgggctgtgctgaagtgggcagatggcaaaatgatcaagaatgaagtggacatgcaggtcctccaccttctgggccccaagttggaggctgatctggagaagaagttcaaggtggcaaaagctcggctagaagaaacagaccggaggacggcaaaggatgtggtggagaatggcgagactgctgaccagaccctgtctctgatggagcagctccggggggaggcccttaagttccacaagcctggtgagaactacaagaccccaggctatgtggtcactcccacacaccatgaatctactaaagcagcacctggagattactggtgggcaggtacgtacccggttcccgccagaacccaatggaatcctgcatattggacatgccaaagccatcaatttcaactttggctatgccaaggccaacaatggcatctgttttctgcgttttgatgacaccaaccctgagaaggaggaagcaaagttcttcacggccatctgtgacatggtagcctggctaggctacacaccttacaaagtcacatatgcgtctgactattttgaccagctatatgcgtgggctgtggagctcatccgcaggggtctggcttatgtgtgccaccagcgaggagaggagctcaaaggccataatactctgccttcaccctggagagaccgtcccatggaggagtcactgctgctctttgaggcaatgcgcaagggcaagttttcagagggcgaggccacactacggatgaagctggtgatggaggatggcaagatggaccctgtagcctatcgagtcaagtatacaccacaccaccgcacaggggacaaatggtgcatctatcccacctacgactacacacactgcctctgtgactccatcgagcacatcactcactcactctgcaccaaggaattccaggcccgacgctcttcctacttctggctttgcaatgcactggacgtctattgccctgtgcagtgggagtatggccgcctcaacctgcactatgctgttgtctctaagaggaagatcctccagcttgtagcaactggtgctgtgcgggactgggatgacccacggctctttacactcacggccctgcgacggcggggcttcccacctgaggccatcaacaacttctgtgcccgggtgggagtgactgtggcacaaaccacaatggagccacatcttctagaagcctgtgtgcgtgatgtgctgaatgacacagccccacgagccatggctgtgctggagtcactacgggtcatcatcaccaactttcctgctgccaagtccttggacatccaggtgcccaacttcccagctgatgagaccaaaggcttccatcaggttccctttgcacccattgtcttcattgagaggactgacttcaaggaggagccagagccaggatttaagcgcctggcttggggccagcctgtgggcctgaggcatacaggctacgtcattgagctgcagcatgttgtcaagggccccagtggttgtgtagagagtctggaggtgacctgcagacgggcagatgctggagagaagccaaaggcctttattcactgggtgtcacagcctttgatgtgtgaggttcgcctctatgagcgactattccagcacaagaaccctgaagatcctactgaggtgcctggtggatttttaagtgacctgaacctggcatcactacacgtggtggatgcagcattagtggactgctctgtggccctggcaaaacccttcgacaagttccagtttgagcgtcttggatatttctccgtggatccagacagccatcagggaaagcttgtctttaaccgaactgtcacactgaaggaagacccaggaaaggtgtgagctggaagcactgaacctacctcatcctcctggagggtgtggctaccctcgccaccccaaattccatgtcaataaagaacagctaaattctcctagaaaaaaaaaaaaaaaaaaaaaaaaaaaaaaaaaaaaaaaaaaaaaaaaaaaaagggggggggcgccaaaaaaaatcccccgggggggcccccaagatcatagcggaccacccgacgacttatttgacaacaaagggggcccccataatgagggacgccactaataaaacacgacagagaacgacggccgccgctggtataaccacgacaggcgaggagcacgaggagaaacagcggcaaacgaggggaactatgatggaaaagaccaccatacactacggagggggggagaacacaaataggcgcgcagcgaaacacactaccacaaacaaggaaagaatataaaagagccgccccagacagggaacatcatacatacacacaacaaagaaacaacgaccaaaagaggggggggacgtaaccaaaccgagaagtaaagaggataaggcagggcagaagaaaaaagacggcgcacaacaacgaggaggaccaccaccacagagcaacagatgctccaagcacgggaggg

SEQ ID NO: 520326 - DNA, 3318 bp, Homo sapiens
agcggagaatagtcagagcaaaaccacgcctgtgtcttcctcctgcctcagggacgaacaccttccttccaggtccgtggcaaatatctccaaaagccctgccgcctgccaacaccccttcaagttcccagttccacggaggcggaagcaaagcccccggaaaggccggtttgtccgccctgtgttgtttaaaggggatagacgaccttggagcgccccgccccctcccgccaaggaaggaccccattggctctccccggaggcttcactctcattggtcagcgagtgaatgccgacctgcagactggggcctaagtttcttttagtttccggtgtctctgcaatggcggctctagactccctgtcgctcttcactagcctcggcctgagcgagcagaaggcccgcgagacgctcaagaactcggctctgagcgcgcagctgcgcgaggccgctactcaggctcagcagaccctgggttccaccattgacaaagctaccgggatcctgttatatggcttggcctcccgactcagggatacccggcgtctctccttccttgtaagctacatagccagtaagaagatccacactgagccccagctaagcgctgcccttgagtatgtgcggagtcaccccttggaccccatcgacactgtggacttcgagcgggaatgtggcgtgggtgtcattgtgaccccagagcagattgaggaggctgtggaggctgctattaacaggcaccggccccagctcctggtggaacgttaccatttcaacatggggctgctgatggctccttgtgcctatgcttctaggagaggctcgggctgtgctgaagtgggcagatggcaaaatgatcaagaatgaagtggacatgcaggtcctccaccttctgggccccaagttggaggctgatctggagaagaagttcaaggtggcaaaagctcggctagaagaaacagaccggaggacggcaaaggatgtggtggagaatggcgagactgctgaccagaccctgtctctgatggagcagctccggggggaggcccttaagttccacaagcctggtgagaactacaagaccccaggctatgtggtcactcccacacaccatgaatctactaaagcagcacctggagattactggtgggcaggtacgtacccggttcccgccagaacccaatggaatcctgcatattggacatgccaaagccatcaatttcaactttggctatgccaaggccaacaatggcatctgttttctgcgttttgatgacaccaaccctgagaaggaggaagcaaagttcttcacggccatctgtgacatggtagcctggctaggctacacaccttacaaagtcacatatgcgtctgactattttgaccagctatatgcgtgggctgtggagctcatccgcaggggtctggcttatgtgtgccaccagcgaggagaggagctcaaaggccataatactctgccttcaccctggagagaccgtcccatggaggagtcactgctgctctttgaggcaatgcgcaagggcaagttttcagagggcgaggccacactacggatgaagctggtgatggaggatggcaagatggaccctgtagcctatcgagtcaagtatacaccacaccaccgcacaggggacaaatggtgcatctatcccacctacgactacacacactgcctctgtgactccatcgagcacatcactcactcactctgcaccaaggaattccaggcccgacgctcttcctacttctggctttgcaatgcactggacgtctattgccctgtgcagtgggagtatggccgcctcaacctgcactatgctgttgtctctaagaggaagatcctccagcttgtagcaactggtgctgtgcgggactgggatgacccacggctctttacactcacggccctgcgacggcggggcttcccacctgaggccatcaacaacttctgtgcccgggtgggagtgactgtggcacaaaccacaatggagccacatcttctagaagcctgtgtgcgtgatgtgctgaatgacacagccccacgagccatggctgtgctggagtcactacgggtcatcatcaccaactttcctgctgccaagtccttggacatccaggtgcccaacttcccagctgatgagaccaaaggcttccatcaggttccctttgcacccattgtcttcattgagaggactgacttcaaggaggagccagagccaggatttaagcgcctggcttggggccagcctgtgggcctgaggcatacaggctacgtcattgagctgcagcatgttgtcaagggccccagtggttgtgtagagagtctggaggtgacctgcagacgggcagatgctggagagaagccaaaggcctttattcactgggtgtcacagcctttgatgtgtgaggttcgcctctatgagcgactattccagcacaagaaccctgaagatcctactgaggtgcctggtggatttttaagtgacctgaacctggcatcactacacgtggtggatgcagcattagtggactgctctgtggccctggcaaaacccttcgacaagttccagtttgagcgtcttggatatttctccgtggatccagacagccatcagggaaagcttgtctttaaccgaactgtcacactgaaggaagacccaggaaaggtgtgagctggaagcactgaacctacctcatcctcctggagggtgtggctaccctcgccaccccaaattccatgtcaataaagaacagctaaattctcctagaaaaaaaaaaaaaaaaaaaaaaaaaaaaaaaaaaaaaaaaaaaaaaaaaaaaagggggggggcgccaaaaaaaatcccccgggggggcccccaagatcatagcggaccacccgacgacttatttgacaacaaagggggcccccataatgagggacgccactaataaaacacgacagagaacgacggccgccgctggtataaccacgacaggcgaggagcacgaggagaaacagcggcaaacgaggggaactatgatggaaaagaccaccatacactacggagggggggagaacacaaataggcgcgcagcgaaacacactaccacaaacaaggaaagaatataaaagagccgccccagacagggaacatcatacatacacacaacaaagaaacaacgaccaaaagaggggggggacgtaaccaaaccgagaagtaaagaggataaggcagggcagaagaaaaaagacggcgcacaacaacgaggaggaccaccaccacagagcaacagatgctccaagcacgggaggg

SEQ ID NO: 520327 - DNA, 2147 bp, Homo sapiens
agcggagaatagtcagagcaaaaccacgcctgtgtcttcctcctgcctcagggacgaacaccttccttccaggtccgtggcaaatatctccaaaagccctgccgcctgccaacaccccttcaagttcccagttccacggaggcggaagcaaagcccccggaaaggccggtttgtccgccctgtgttgtttaaaggggatagacgaccttggagcgccccgccccctcccgccaaggaaggaccccattggctctccccggaggcttcactctcattggtcagcgagtgaatgccgacctgcagactggggcctaagtttcttttagtttccggtgtctctgcaatggcggctctagactccctgtcgctcttcactagcctcggcctgagcgagcagaaggcccgcgagacgctcaagaactcggctctgagcgcgcagctgcgcgaggccgctactcaggctcagcagaccctgggttccaccattgacaaagctaccgggatcctgttatatggcttggcctcccgactcagggatacccggcgtctctccttccttgtaagctacatagccagtaagaagatccacactgagccccagctaagcgctgcccttgagtatgtgcggagtcaccccttggaccccatcgacactgtggacttcgagcgggaatgtggcgtgggtgtcattgtgaccccagagcagattgaggaggctgtggaggctgctattaacaggcaccggccccagctcctggtggaacgttaccatttcaacatggggctgctgatgggagaggctcgggctgtgctgaagtgggcagatggcaaaatgatcaagaatgaagtggacatgcaggtcctccaccttctgggccccaagttggaggctgatctggagaagaagttcaaggtggcaaaagctcggctagaagaaacagaccggaggacggcaaaggatgtggtggagaatggcgagactgctgaccagaccctgtctctgatggagcagctccggggggaggcccttaagttccacaagcctggtgagaactacaagaccccaggctatgtggtcactcccacacaccatgaatctactaaagcagcacctggagattactggtgggcaggtacgtacccggttcccgccagaacccaatggaatcctgcatattggacatgccaaagccatcaatttcaactttggctatgccaaggccaacaatggcatctgttttctgcgttttgatgacaccaaccctgagaaggaggaagcaaagttcttcacggccatctgtgacatggtagcctggctaggctacacaccttacaaagtcacatatgcgtctgactattttgaccagctatatgcgtgggctgtggagctcatccgcaggggtctggcttatgtgtgccaccagcgaggagaggagctcaaaggccataatactctgccttcaccctggagagaccgtcccatggaggagtcactgctgctctttgaggcaatgcgcaagggcaagttttcagagggcgaggccacactacggatgaagctggtgatggaggatggcaagatggaccctgtagcctatcgagtcaagtatacaccacaccaccgcacaggggacaaatggtgcatctatcccacctacgactacacacactgcctctgtgactccatcgagcacatcactcactcactctgcaccaaggaattccaggcccgacgctcttcctacttctggctttgcaatgcactggacgtctattgccctgtgcagtgggagtatggccgcctcaacctgcactatgctgttgtctctaagaggaagatcctccagcttgtagcaactggtgctgtgcgggactgggatgacccacggctctttacactcacggccctgcgacggcggggcttcccacctgaggccatcaacaacttctgtgcccgggtgggagtgactgtggcacaaaccacaatggagccacatcttctcctgtgtgccggaagggctgaatgaacaaccccacagccatgggtggctggaggactacgggtgatattaccaattttctgcccccaaggcttgggattcaggggccaacttccaatttgaaccggtccataaggtcccttgccc

SEQ ID NO: 520328 - DNA, 2095 bp, Homo sapiens
agcggagaatagtcagagcaaaaccacgcctgtgtcttcctcctgcctcagggacgaacaccttccttccaggtccgtggcaaatatctccaaaagccctgccgcctgccaacaccccttcaagttcccagttccacggaggcggaagcaaagcccccggaaaggccggtttgtccgccctgtgttgtttaaaggggatagacgaccttggagcgccccgccccctcccgccaaggaaggaccccattggctctccccggaggcttcactctcattggtcagcgagtgaatgccgacctgcagactggggcctaagtttcttttagtttccggtgtctctgcaatggcggctctagactccctgtcgctcttcactagcctcggcctgagcgagcagaaggcccgcgagacgctcaagaactcggctctgagcgcgcagctgcgcgaggccgctactcaggctcagcagaccctgggttccaccattgacaaagctaccgggatcctgttatatggcttggcctcccgactcagggatacccggcgtctctccttccttgtaagctacatagccagtaagaagatccacactgagccccagctaagcgctgcccttgagtatgtgcggagtcaccccttggaccccatcgacactgtggacttcgagcgggaatgtggcgtgggtgtcattgtgaccccagagcagattgaggaggctgtggaggctgctattaacaggcaccggccccagctcctggtggaacgttaccatttcaacatggggctgctgatgggagaggctcgggctgtgctgaagtgggcagatggcaaaatgatcaagaatgaagtggacatgcaggtcctccaccttctgggccccaagttggaggctgatctggagaagaagttcaaggtggcaaaagctcggctagaagaaacagaccggaggacggcaaaggatgtggtggagaatggcgagactgctgaccagaccctgtctctgatggagcagctccggggggaggcccttaagttccacaagcctggtgagaactacaagaccccaggctatgtggtcactcccacacaccatgaatctactaaagcagcacctggagattactggtgggcaggtacgtacccggttcccgccagaacccaatggaatcctgcatattggacatgccaaagccatcaatttcaactttggctatgccaaggccaacaatggcatctgttttctgcgttttgatgacaccaaccctgagaaggaggaagcaaagttcttcacggccatctgtgacatggtagcctggctaggctacacaccttacaaagtcacatatgcgtctgactattttgaccagctatatgcgtgggctgtggagctcatccgcaggggtctggcttatgtgtgccaccagcgaggagaggagctcaaaggccataatactctgccttcaccctggagagaccgtcccatggaggagtcactgctgctctttgaggcaatgcgcaagggcaagttttcagagggcgaggccacactacggatgaagctggtgatggaggatggcaagatggaccctgtagcctatcgagtcaagtatacaccacaccaccgcacaggggacaaatggtgcatctatcccacctacgactacacacactgcctctgtgactccatcgagcacatcactcactcactctgcaccaaggaattccaggcccgacgctcttcctacttctggctttgcaatgcactggacgtctattgccctgtgcagtgggagtatggccgcctcaacctgcactatgctgttgtctctaagaggaagatcctccagcttgtagcaactggtgctgtgcgggactgggatgacccacggctctttacactcacggccctgcgacggcggggcttcccacctgaggccatcaacaacttctgtgcccgggtgggagtgactgtggcacaaaccacaatggagccacagaggcagtgtgtgtagtcgtaggtgggatagatgcaccatttgtcgcctgtgcggtggtgtggtgtatactgactcagataggctactaggtccatctg

SEQ ID NO: 520329 - DNA, 316 bp, Homo sapiens
tagaggatcttcaaacacgcagtctaaagaaaagaaaactttaggctgggcgcagtggctcacgcctgtagtcccagaggctgaggcgggcggatactgaggtcaggagttcgggatcagcctgaccaaacatagagaaaccctgctggagatacagagttagccaggcatagtggtgcatgcctgtgatcccagctgctcaggagcctggcaacaagagcaaaactccagctcacaaaaaaaaaggaacgaaggagaagctggcgctggtggataaggccataacccttcctttgggtggaactactttacaaac

SEQ ID NO: 520330 - DNA, 85 bp, Homo sapiens
tactactaaattctgcgacacgtcgacatgaaattgtggaaatttttatttcttctgattttcttaaaatgagtatattacttgt

SEQ ID NO: 520331 - DNA, 3012 bp, Homo sapiens
agcggagaatagtcagagcaaaaccacgcctgtgtcttcctcctgcctcagggacgaacaccttccttccagcctcggcctgagcgagcagaaggcccgcgagacgctcaagaactcggctctgagcgcgcagctgcgcgaggccgctactcaggctcagcagaccctgggttccaccattgacaaagctaccgggatcctgttatatggcttggcctcccgactcagggatacccggcgtctctccttccttgtaagctacatagccagtaagaagatccacactgagccccagctaagcgctgcccttgagtatgtgcggagtcaccccttggaccccatcgacactgtggacttcgagcgggaatgtggcgtgggtgtcattgtgaccccagagcagattgaggaggctgtggaggctgctattaacaggcaccggccccagctcctggtggaacgttaccatttcaacatggggctgctgatggctccttgtgcctatgcttctaggagaggctcgggctgtgctgaagtgggcagatggcaaaatgatcaagaatgaagtggacatgcaggtcctccaccttctgggccccaagttggaggctgatctggagaagaagttcaaggtggcaaaagctcggctagaagaaacagaccggaggacggcaaaggatgtggtggagaatggcgagactgctgaccagaccctgtctctgatggagcagctccggggggaggcccttaagttccacaagcctggtgagaactacaagaccccaggctatgtggtcactcccacacaccatgaatctactaaagcagcacctggagattactggtgggcaggtacgtacccggttcccgccagaacccaatggaatcctgcatattggacatgccaaagccatcaatttcaactttggctatgccaaggccaacaatggcatctgttttctgcgttttgatgacaccaaccctgagaaggaggaagcaaagttcttcacggccatctgtgacatggtagcctggctaggctacacaccttacaaagtcacatatgcgtctgactattttgaccagctatatgcgtgggctgtggagctcatccgcaggggtctggcttatgtgtgccaccagcgaggagaggagctcaaaggccataatactctgccttcaccctggagagaccgtcccatggaggagtcactgctgctctttgaggcaatgcgcaagggcaagttttcagagggcgaggccacactacggatgaagctggtgatggaggatggcaagatggaccctgtagcctatcgagtcaagtatacaccacaccaccgcacaggggacaaatggtgcatctatcccacctacgactacacacactgcctctgtgactccatcgagcacatcactcactcactctgcaccaaggaattccaggcccgacgctcttcctacttctggctttgcaatgcactggacgtctattgccctgtgcagtgggagtatggccgcctcaacctgcactatgctgttgtctctaagaggaagatcctccagcttgtagcaactggtgctgtgcgggactgggatgacccacggctctttacactcacggccctgcgacggcggggcttcccacctgaggccatcaacaacttctgtgcccgggtgggagtgactgtggcacaaaccacaatggagccacatcttctagaagcctgtgtgcgtgatgtgctgaatgacacagccccacgagccatggctgtgctggagtcactacgggtcatcatcaccaactttcctgctgccaagtccttggacatccaggtgcccaacttcccagctgatgagaccaaaggcttccatcaggttccctttgcacccattgtcttcattgagaggactgacttcaaggaggagccagagccaggatttaagcgcctggcttggggccagcctgtgggcctgaggcatacaggctacgtcattgagctgcagcatgttgtcaagggccccagtggttgtgtagagagtctggaggtgacctgcagacgggcagatgctggagagaagccaaaggcctttattcactgggtgtcacagcctttgatgtgtgaggttcgcctctatgagcgactattccagcacaagaaccctgaagatcctactgaggtgcctggtggatttttaagtgacctgaacctggcatcactacacgtggtggatgcagcattagtggactgctctgtggccctggcaaaacccttcgacaagttccagtttgagcgtcttggatatttctccgtggatccagacagccatcagggaaagcttgtctttaaccgaactgtcacactgaaggaagacccaggaaaggtgtgagctggaagcactgaacctacctcatcctcctggagggtgtggctaccctcgccaccccaaattccatgtcaataaagaacagctaaattctcctagaaaaaaaaaaaaaaaaaaaaaaaaaaaaaaaaaaaaaaaaaaaaaaaaaaaaagggggggggcgccaaaaaaaatcccccgggggggcccccaagatcatagcggaccacccgacgacttatttgacaacaaagggggcccccataatgagggacgccactaataaaacacgacagagaacgacggccgccgctggtataaccacgacaggcgaggagcacgaggagaaacagcggcaaacgaggggaactatgatggaaaagaccaccatacactacggagggggggagaacacaaataggcgcgcagcgaaacacactaccacaaacaaggaaagaatataaaagagccgccccagacagggaacatcatacatacacacaacaaagaaacaacgaccaaaagaggggggggacgtaaccaaaccgagaagtaaagaggataaggcagggcagaagaaaaaagacggcgcacaacaacgaggaggaccaccaccacagagcaacagatgctccaagcacgggaggg

SEQ ID NO: 520332 - DNA, 574 bp, Homo sapiens
acctgcatgctctctctgatgccttcctagatgtccccgtcgctgcgtcccccgtatgctggctacatgactgcgcaatgcccgactcaatcaattcagtgccaggtgcaagtctgatcatcttttctctctcaggaagcccttcacaggagccagacagccaagcaggcaggccaggcccgaggagcaccaaccttcagcaggtgcagggcatgggtgacaccgtggaatttgtacagatcactggtgctgtccgggacaagttccactgggatgtgccactcggggagagtgctggtgacagaacatggcgagtgtgctggggaacaagcagaagccagaggtcaaggtcgtgtggttacttagtttgcaagagatcgagtcgccctggaccaagcctgcagcctgacctaatggggcaccatgtgccagcagcatgctcccagagaacgagtcatcccagtgacctgtggggtctcctggcagagctgggaccagctcaccttggggtcaggggcttgctcagctccaagtcctgctctgtagccgaaattgtgtagcttgggtggtcata

SEQ ID NO: 520333 - DNA, 1203 bp, Homo sapiens
actgcgcaaaccagacttcgctcgtactcgtgcgcctcgcttcgcttttcctccgcaaccatgtcctgacaacacccgactactggctgacgcactcgacgacacactccgcactaagctcgaacacctgaacgacagcacagagcacgcacagcagacaacatccacatgcctctccacaagacaaccgactcgcaaccaggacgaacgcacagccacggcgaactcgctcaatgcacggcgtgcgcccgcccaactactgccacctgctcacacttcccaccacagcccactctgcgccctctccttcactcctataccctatccctccctctagcccctgctctctacaccctcccctggctacacgcaactgccacacaccgggacgcggctcgcgccacttccacacgccctctccaaccacacgctgaaccacaatgggctgacccactgggccccaccacttttcccaacccaactccaaccacgcaacaagccttaacccctgtaccccacacccgcaacacggggcccgggccgcccccactgggccgcacctctcgacccacaacactccccttggtttcccctaacgcctcccctaaccctacccctcggcgcgcccctcggagccccaacgctggcgcacacaaccgccgacacacccacgcgaaacacgccacctactcgggcccacctaggcatacccggcggaccccggaaccacccgccggcacaccccgaaccaacgcgccatggaacggagaccagccttgcgacgagcacacgccgcgaagccaccgccgttcggcgccgccgcccgtcggccgccccaccccggacacacccacgcccccgccagcaccagcgtcccgataaaccgccacggcactaacgaccaccaccccccccactaacccgcgcgctctgcgcggcaccccctcccaacacagcacgccggaccgactcggatcacaccgccgatagggcgaccagaacgtacggaccacgtcggcgcccttcacccaccctgggcgctccaaacacggactgacactcacaccacaccccccacagacacgaaacacgagttaggaacagccccacagcctgacgtaccaacaccagcctaccgaccgcaccgcacgcggacgcctacaccaccagagaacgactctgggccgcaggacgacccgcacc

SEQ ID NO: 520334 - DNA, 254 bp, Homo sapiens
aattgccaatacatcaacaactgagaagggtttttttagaaatacatttagtaaagtccccaggacgatagtcttacatttaaacttttttcattaaaacatgggggtgatgaataacttttacacagttatgagtactgttaatatctggaaagtatcttgagatatcagtggaaagctaaacagtctaaattacaatgaagtacttcattttgattgcgaaaataaaaacagattttatcaatgtctttaca

SEQ ID NO: 520335 - DNA, 3061 bp, Homo sapiens
  misc_feature (15)..(15): n is a, c, g, or t
agccaggtgtacccngggttatgggatcacattgacaaagctacgggatctgttatctggcttgttttccgactcagggataccggcgtctctcccttccttgtaagctacatagccagtaagaagatccacactgagccccagctaagcgctgcccttgagtatgtgcggagtcaccccttggaccccatcgacactgtggacttcgagcgggaatgtggcgtgggtgtcattgtgaccccagagcagattgaggaggctgtggaggctgctattaacaggcaccggccccagctcctggtggaacgttaccatttcaacatggggctgctgatgggtgagcagggcctggaacggggctatattgttctctctggtcatgccttttcttctgggcacgagtgagaaggaggtgggggaaggaacaggagtgacttaaagtggtctggctgggctcaggctctggttctggtggtcagccaggacctttccttgggaaagaggtggggggagtactcttttttgcctttctgcaggctccttgtgcctatgcttctaggagaggctcgggctgtgctgaagtgggcagatggcaaaatgatcaagaatgaagtggacatgcaggtcctccaccttctgggccccaagttggaggctgatctggagaagaagttcaaggtggcaaaagctcggctagaagaaacagaccggaggacggcaaaggatgtggtggagaatggcgagactgctgaccagaccctgtctctgatggagcagctccggggggaggcccttaagttccacaagcctggtgagaactacaagaccccaggctatgtggtcactcccacacaccatgaatctactaaagcagcacctggagattactggtgggcaggtacgtacccggttcccgccagaacccaatggaatcctgcatattggacatgccaaagccatcaatttcaactttggctatgccaaggccaacaatggcatctgttttctgcgttttgatgacaccaaccctgagaaggaggaagcaaagttcttcacggccatctgtgacatggtagcctggctaggctacacaccttacaaagtcacatatgcgtctgactattttgaccagctatatgcgtgggctgtggagctcatccgcaggggtctggcttatgtgtgccaccagcgaggagaggagctcaaaggccataatactctgccttcaccctggagagaccgtcccatggaggagtcactgctgctctttgaggcaatgcgcaagggcaagttttcagagggcgaggccacactacggatgaagctggtgatggaggatggcaagatggaccctgtagcctatcgagtcaagtatacaccacaccaccgcacaggggacaaatggtgcatctatcccacctacgactacacacactgcctctgtgactccatcgagcacatcactcactcactctgcaccaaggaattccaggcccgacgctcttcctacttctggctttgcaatgcactggacgtctattgccctgtgcagtgggagtatggccgcctcaacctgcactatgctgttgtctctaagaggaagatcctccagcttgtagcaactggtgctgtgcgggactgggatgacccacggctctttacactcacggccctgcgacggcggggcttcccacctgaggccatcaacaacttctgtgcccgggtgggagtgactgtggcacaaaccacaatggagccacatcttctagaagcctgtgtgcgtgatgtgctgaatgacacagccccacgagccatggctgtgctggagtcactacgggtcatcatcaccaactttcctgctgccaagtccttggacatccaggtgcccaacttcccagctgatgagaccaaaggcttccatcaggttccctttgcacccattgtcttcattgagaggactgacttcaaggaggagccagagccaggatttaagcgcctggcttggggccagcctgtgggcctgaggcatacaggctacgtcattgagctgcagcatgttgtcaagggccccagtggttgtgtagagagtctggaggtgacctgcagacgggcagatgctggagagaagccaaaggcctttattcactgggtgtcacagcctttgatgtgtgaggttcgcctctatgagcgactattccagcacaagaaccctgaagatcctactgaggtgcctggtggatttttaagtgacctgaacctggcatcactacacgtggtggatgcagcattagtggactgctctgtggccctggcaaaacccttcgacaagttccagtttgagcgtcttggatatttctccgtggatccagacagccatcagggaaagcttgtctttaaccgaactgtcacactgaaggaagacccaggaaaggtgtgagctggaagcactgaacctacctcatcctcctggagggtgtggctaccctcgccaccccaaattccatgtcaataaagaacagctaaattctcctagaaaaaaaaaaaaaaaaaaaaaaaaaaaaaaaaaaaaaaaaaaaaaaaaaaaaagggggggggcgccaaaaaaaatcccccgggggggcccccaagatcatagcggaccacccgacgacttatttgacaacaaagggggcccccataatgagggacgccactaataaaacacgacagagaacgacggccgccgctggtataaccacgacaggcgaggagcacgaggagaaacagcggcaaacgaggggaactatgatggaaaagaccaccatacactacggagggggggagaacacaaataggcgcgcagcgaaacacactaccacaaacaaggaaagaatataaaagagccgccccagacagggaacatcatacatacacacaacaaagaaacaacgaccaaaagaggggggggacgtaaccaaaccgagaagtaaagaggataaggcagggcagaagaaaaaagacggcgcacaacaacgaggaggaccaccaccacagagcaacagatgctccaagcacgggaggg

SEQ ID NO: 520336 - DNA, 342 bp, Homo sapiens
gtcatacaatattgtccttttgtgtctggcttctttcacttggcatgtttttaatgttcatccatgttgtcacatttattagtgctgcttttctttttttagctgaataatattccattgtatggatgttccacattttgtccatctgttgatggacatttgggttgtttctattttttgcctattgtcaataaagtttcaacaaacatcctgtataagtttttgtttcaacacctgtttccagttcttttgggtatatacctaggagtggaatcaatggtcatatggtacagtggtccccaaatttttggcaccagtgaccagatttgtggagacaatttt

SEQ ID NO: 520337 - DNA, 1965 bp, Homo sapiens
  misc_feature (1608)..(1608): n is a, c, g, or t
  misc_feature (1615)..(1615): n is a, c, g, or t
  misc_feature (1636)..(1636): n is a, c, g, or t
  misc_feature (1640)..(1640): n is a, c, g, or t
  misc_feature (1643)..(1645): n is a, c, g, or t
  misc_feature (1647)..(1647): n is a, c, g, or t
agcggagaatagtcagagcaaaaccacgcctgtgtcttcctcctgcctcagggacgaacaccttccttccaggtccgtggcaaatatctccaaaagccctgccgcctgccaacaccccttcaagttcccagttccacggaggcggaagcaaagcccccggaaaggccggtttgtccgccctgtgttgtttaaaggggatagacgaccttggagcgccccgccccctcccgccaaggaaggaccccattggctctccccggaggcttcactctcattggtcagcgagtgaatgccgacctgcagactggggcctaagtttcttttagtttccggtgtctctgcaatggcggctctagactccctgtcgctcttcactagcctcggcctgagcgagcagaaggcccgcgagacgctcaagaactcggctctgagcgcgcagctgcgcgaggccgctactcaggctcagcagaccctgggttccaccattgacaaagctaccgggatcctgttatatggcttggcctcccgactcagggatacccggcgtctctccttccttgtaagctacatagccagtaagaagatccacactgagccccagctaagcgctgcccttgagtatgtgcggagtcaccccttggaccccatcgacactgtggacttcgagcgggaatgtggcgtgggtgtcattgtgaccccagagcagattgaggaggctgtggaggctgctattaacaggcaccggccccagctcctggtggaacgttaccatttcaacatggggctgctgatgggagaggctcgggctgtgctgaagtgggcagatggcaaaatgatcaagaatgaagtggacatgcaggtcctccaccttctgggccccaagttggaggctgatctggagaagaagttcaaggtggcaaaagctcggctagaagaaacagaccggaggacggcaaaggatgtggtggagaatggcgagactgctgaccagaccctgtctctgatggagcagctccggggggaggcccttaagttccacaagcctggtgagaactacaagaccccaggctatgtggtcactcccacacaccatgaatctactaaagcagcacctggagattactggtgggcaggtacgtacccggttcccgccagaacccaatggaatcctgcatattggacatgccaaagccatcaatttcaactttggctatgccaaggccaacaatggcatctgttttctgcgttttgatgacaccaaccctgagaaggaggaagcaaagttcttcacggccatctgtgacatggtagcctggctaggctacacaccttacaaagtcacatatgcgtctgactattttgaccagctatatgcgtgggctgtggagctcatccgcaggggtctggcttatgtgtgccaccagcgaggagaggagctcaaaggccataatactctgccttcaccctggagagaccgtcccatggaggagtcactgctgctctttgaggcaatgcgcaagggcaagttttcagagggcgaggccacactacggatgaagctggtgatggaggatggcaagatggaccctgtagcctatcgagtcaagnataaccnaaacaccggaagggggcacangggngcnnnanatccactaagagtaacagccggctcttgtgaatccacgagaggcacttactcacaacacatctggccaagggatcagaggccgagggcctgcacaagactgaggttggacggccggagagcatacgccggcaggcgagagaagtaggccacaccggaaaaaggggatcaaaagaagacacctacacacaggggaccagaacgaccggaaaacatgcgcaacagtgagccacacgacaaactgcggggggtgagaacaacaccaactacgggcaaccacgagtaaaaacaggctagcagactgcgtagtatatctgcat

SEQ ID NO: 520338 - DNA, 158 bp, Homo sapiens
  misc_feature (142)..(142): n is a, c, g, or t
ccggaccttcgctgggcgggcacttagaggtggggagcagagcaatctcttcatcccaaccatccaaccatctgggtccagcattgcaactcttcaatctctggcactcaaagcttgttaagatagttaagcgtgcataagntgcccgcccaatcgaa

SEQ ID NO: 520339 - DNA, 2394 bp, Homo sapiens
agcggagaatagtcagagcaaaaccacgcctgtgtcttcctcctgcctcagggacgaacaccttccttccaggtccgtggcaaatatctccaaaagccctgccgcctgccaacaccccttcaagttcccagttccacggaggcggaagcaaagcccccggaaaggccggtttgtccgccctgtgttgtttaaaggggatagacgaccttggagcgccccgccccctcccgccaaggaaggaccccattggctctccccggaggcttcactctcattggtcagcgagtgaatgccgacctgcagactggggcctaagtttcttttagtttccggtgtctctgcaatggcggctctagactccctgtcgctcttcactagcctcggcctgagcgagcagaaggcccgcgagacgctcaagaactcggctctgagcgcgcagctgcgcgaggccgctactcaggctcagcagaccctgggttccaccattgacaaagctaccgggatcctgttatatggcttggcctcccgactcagggatacccggcgtctctccttccttgtaagctacatagccagtaagaagatccacactgagccccagctaagcgctgcccttgagtatgtgcggagtcaccccttggaccccatcgacactgtggacttcgagcgggaatgtggcgtgggtgtcattgtgaccccagagcagattgaggaggctgtggaggctgctattaacaggcaccggccccagctcctggtggaacgttaccatttcaacatggggctgctgatgggagaggctcgggctgtgctgaagtgggcagatggcaaaatgatcaagaatgaagtggacatgcaggtcctccaccttctgggccccaagttggaggctgatctggagaagaagttcaaggtggcaaaagctcggctagaagaaacagaccggaggacggcaaaggatgtggtggagaatggcgagactgctgaccagaccctgtctctgatggagcagctccggggggaggcccttaagttccacaagcctggtgagaactacaagaccccaggctatgtggtcactcccacacaccatgaatctactaaagcagcacctggagattactggtgggcaggtacgtacccggttcccgccagaacccaatggaatcctgcatattggacatgccaaagccatcaatttcaactttggctatgccaaggccaacaatggcatctgttttctgcgttttgatgacaccaaccctgagaaggaggaagcaaagttcttcacggccatctgtgacatggtagcctggctaggctacacaccttacaaagtcacatatgcgtctgactattttgaccagctatatgcgtgggctgtggagctcatccgcaggggtctggcttatgtgtgccaccagcgaggagaggagctcaaaggccataatactctgccttcaccctggagagaccgtcccatggaggagtcactgctgctctttgaggcaatgcgcaagggcaagttttcagagggcgaggccacactacggatgaagctggtgatggaggatggcaagatggaccctgtagcctatcgagtcataggtagttagcacgcaggacgctagactgataccaggtcgactagaatggttgcatctatctcgagctacagactatcacacattggcctctgttgactccagtcgatgcacattcactcgagctgcacttgctagcacccaaggagattccatgagccccggacgctctatgccatactatcctggggggctttagcacaatttctaacgtgggcaccggtccttaatttgcacctgcttgcacgctgcgagcaggttaattgggcacgctcttcaatacgccgtggctacctaatggaccttgatatagtgcgtacttaacgcaagggtagatgaattcccttcccaagggttcgctaagcccatgcgctagggtggaccttgtttagccgaaggtaccagttgcggagaaattagaaataccgcaagcacgagggcttcgttttctcaacaaacattcaacctgaggtaccgccgtgagctgcaacacgggcagaagagggcattttcccccattacctttgacagtgagccggatcaaggctaaagagtttctcccaagagtaggccccccaatggagcatggggagaagtcttagaacatcggataggggagcagcaataaagtccagcataattgggaagagccgcacgcaatacttttagctaagcaacagcgcctttggtcagtgccgttagaatggatcagcttaaaaatagaccaacaggtgacacccttcggtaagggcccacatcgagattggggggatttggggagtgtccacta

SEQ ID NO: 520340 - DNA, 264 bp, Homo sapiens
ttccccccgggggggggttttttaaattttcccccggggtggccggttgggttcccccccccccccggggggggccccaaaaagaccaaaaacttttttttggggttttgaaccaaaaggcttttttggggggccgggggtttaaaaaaattggtttttggttttttccccccccccccccggtttccccccaaaggaattgggaaaaataaagggatttttgaaaagttttttcccaaggaaaatttaaggggccccttttta

SEQ ID NO: 520341 - DNA, 286 bp, Homo sapiens
agtacggaatgaggatcttatagaccttcagtaacaaggtgggtagataatttctttatggccagtttttacacagaaaagcagaagaaaaattagagtaatattttcagattttatggctggctatggggaaaaggaatagtggtttctataacccacgttggagaacagggcatctagtttcttatagctagcctcaggggaaaatgagactgagaggctgacaggtcagcaagatgcagaggaaacaattttcacttctagaggttgttttttttttgttttt

SEQ ID NO: 520342 - DNA, 177 bp, Homo sapiens
tatgaggtagggaggacaggtgagtctcagtttggtcctgggccgggtgactcagcgggctgggagctgggagccgtggtgtgagaagccagagctgtgtgtcccctcgcttccctgagaccaccctagtgccgctgttcgggaactcgcgccttggtccagttccactatcaccaa

SEQ ID NO: 520343 - DNA, 199 bp, Homo sapiens
agatgcccctcggaaccacccccttctctttgtatccatcagaataaccaaaagcatttcaacgtgttaccattaactccatccagtgtagactccagaaacaaaaatcaacacaaatctttcttttttagatttaaacagatataacaaacaaattctgagggcagagtattccattatggccaggtgtcatgtccaa

SEQ ID NO: 520344 - DNA, 262 bp, Homo sapiens
  misc_feature (34)..(34): n is a, c, g, or t
  misc_feature (93)..(93): n is a, c, g, or t
gggggggggaaaaagggatttggcccccgggaanggtttagcttttttttttcccgcgccccccggggaatccccccccccctggggtttttnccccccggaaagggaggggggggcccccccccccgggggggggccgggtttccggggttttttttttacccccgggggggggacccggcccccttttgttttttttgccccctttaccttttgggccccccaaattttttttttttaaaatttttgggggttttttggg

SEQ ID NO: 520345 - DNA, 918 bp, Homo sapiens
  misc_feature (7)..(7): n is a, c, g, or t
  misc_feature (191)..(191): n is a, c, g, or t
  misc_feature (793)..(793): n is a, c, g, or t
  misc_feature (832)..(832): n is a, c, g, or t
ccccacncctcgccccacagagctctgttcttagcctcctgtgctgcgtgtccatcatcagctgaccaagacacctgaggacacatcttggcacccagaggagcagcagcaacaggctggagggagagggaagcaagaccaagatgaggaggggggaaggctgggttttttggatctcagagattctcctntgtgggaaagaggttgagcttcctggtgtccctcagagtaagcctgaggagtcccagcttagggagtcactattggaggcagagaggcatgcaggcggggtcctaggagcccctgcttctccaggcctcttgcctttgagtctttgtggaatggatagcctcccactagaactgggaggagaataacccagatcttaaggaccccaaagtcaggatgttgtttgatcttatcaaacatctagttccctacttgatgggagaaacctaatgaaatacctgaaacatatattggcatttatcaatggctcaaatcttcatttatctctggccttaaccctggctcctgaggctgcggccagcagagcccaggccagggctctgttcttgccccacctgcttgatcctcaaatgtggagggaggtaggcactgcctcagtcttcatccaaacacctttccctttgccctgagacctcagaattttccctttaacccaagaccctgccttttccactccccccttttccagggacccttagatcacatcactccccccctgccaggccccaggttaggaatagtggtgggaggaaggggaaagggntgggcctccccgctcccagcaactgaaaggacaaccctntttggagcccccccctgaaaggggtgcaggcatgggctgtacccaagctgatttttcatttggtcaataaagctgtttagccccga

SEQ ID NO: 520346 - DNA, 657 bp, Homo sapiens
ctggagatagtctgagagcacgagtgatctctcggatcgcattgtgtggcacagttgtcttgcaagtaccaggccgatgcagtgctgtgaatgtgggggttagggacagccgggtgtggtgaagggatgcagagggatgctggtcaccaggccatgggtgggagagtccaccctcgtgaaggaatcagcaagtggggccaaggaagccgaaggggacggtgggctgggcagggtacatatctgtgccccatgctactcatgcgactgagcattgcctttccatatagctgtatcctaatggccctgatcctgtttgcatcttctcctttccaagaatttaccgcaggggggacccagaatctcccccagttgtgaggagagacgcctccattgaaggaagtagaagagaccatgcctgctccattctctaagacagtggtgaagggctccctctgattgcttcctggaagaggacatgtccgtctccacagaggaagggggtatccagggggcaaagcttcaatctctagctcaaagagcttgagacacagggctttcttcctccagtgtcagctcctcaggctgttctccattgctttcagcatctatgcggcagggggcaggggttctctgacagtaacgatggtgcactatgcg

SEQ ID NO: 520347 - DNA, 554 bp, Homo sapiens
tagcgaatctaaatcggaaggtagcacacagacatatgccagccaatccagctcagaaggcagcactcagacatatgccagccaaaccagatcagaaagcagcagtcaagctgatactagcaagtaagtgaattagggggcattttttttatataataagtatatgttaaaaattgagatgaacaaattgataattaacaattacttgctaactattaactgagtagccacaattagtaaagtactgtaccttaaaacaacctatttgctgatctagtaacttgcgagtatttgtctaaataagacaatatcttctttcctgcagtttagttaatatgtgttgggagtttatttttgggaaacaaaggaaaacatttttggtgaaatgtttaaggagctaattcataaaaaggatctttttgtattctttttcttggagtacaccaaggggaagtttacttttttatttggagatggcacaactagaaactaatatgtatgctgatgaataactgagtgaatgctcgcatagatcacctgggaagaatttgttg

SEQ ID NO: 520348 - DNA, 246 bp, Homo sapiens
cacgaggggtgtcacctcaacatgacgtccttgcgctccggtccacaaggtgctcacacaaaatgagggaatgaacggtatcccattgcccccacccaagcaggagctggtcctggtgccaaccccatccatgctagcctcccgattaaaggcatggtttccaaatgttgagtgtgagcatcatcccccaaggtaaggaagccacagaaccatcatgccctgttggggaggcttcccacagctgct

SEQ ID NO: 520349 - DNA, 426 bp, Homo sapiens
cgcacacccgcacacttacataaacgtatactaggcagctgtaacagagcttactcctcattttttctttcttttttgaaatggagtttcgctctcgtcatccaggctggagcgcaatggcacaatcttggctcactacaacctccgcctgctgggttcaagtgattctcctgcctcggcctcccaagtagctgggattacaggcacctgccaccacgcccggctaatttttgtatttttaatggagatggggttccgccatgttggccaggctggtctcgaactccggacctcaggtgatccatccatcttggcctcccaaagtgctgggattacaggaactcctgacctcaggtgatccacccatcttggcctcccaaagtgctggaattacaggcatgagccaccgcgcccagcctactcctc

SEQ ID NO: 520350 - DNA, 197 bp, Homo sapiens
agactgcatagaggtgggaaggctattttgaggaatatgtctgcttaagggaagagggactgcgtggccttcgtgagaccctgccggaaaggcctctacctatctagtgaaaatgtctacttagactaagagtgattttagtttttgtgactcggggcatgtagagtaaagctaatttgccagtcctgggcgggggc

SEQ ID NO: 520351 - DNA, 669 bp, Homo sapiens
  misc_feature (23)..(24): n is a, c, g, or t
  misc_feature (26)..(26): n is a, c, g, or t
  misc_feature (160)..(160): n is a, c, g, or t
  misc_feature (165)..(165): n is a, c, g, or t
  misc_feature (173)..(173): n is a, c, g, or t
  misc_feature (178)..(178): n is a, c, g, or t
  misc_feature (188)..(188): n is a, c, g, or t
  misc_feature (203)..(203): n is a, c, g, or t
  misc_feature (209)..(209): n is a, c, g, or t
  misc_feature (226)..(226): n is a, c, g, or t
  misc_feature (228)..(228): n is a, c, g, or t
  misc_feature (244)..(244): n is a, c, g, or t
  misc_feature (276)..(276): n is a, c, g, or t
  misc_feature (288)..(289): n is a, c, g, or t
  misc_feature (303)..(304): n is a, c, g, or t
  misc_feature (323)..(323): n is a, c, g, or t
  misc_feature (325)..(325): n is a, c, g, or t
  misc_feature (344)..(345): n is a, c, g, or t
  misc_feature (365)..(367): n is a, c, g, or t
  misc_feature (371)..(371): n is a, c, g, or t
  misc_feature (374)..(375): n is a, c, g, or t
  misc_feature (378)..(378): n is a, c, g, or t
  misc_feature (381)..(381): n is a, c, g, or t
  misc_feature (386)..(386): n is a, c, g, or t
  misc_feature (400)..(400): n is a, c, g, or t
  misc_feature (421)..(421): n is a, c, g, or t
  misc_feature (441)..(442): n is a, c, g, or t
  misc_feature (453)..(454): n is a, c, g, or t
  misc_feature (462)..(462): n is a, c, g, or t
  misc_feature (467)..(467): n is a, c, g, or t
  misc_feature (469)..(469): n is a, c, g, or t
  misc_feature (477)..(477): n is a, c, g, or t
  misc_feature (492)..(492): n is a, c, g, or t
  misc_feature (500)..(500): n is a, c, g, or t
  misc_feature (512)..(512): n is a, c, g, or t
  misc_feature (541)..(541): n is a, c, g, or t
  misc_feature (591)..(591): n is a, c, g, or t
  misc_feature (639)..(639): n is a, c, g, or t
tgggactagtttctttttttctnntnactgaaatgccaacttcagcccagggttttttcacaaccaaactaaaaatgacttactacatgggaacatcaatgcaacaagtagaatttgtaaactcaagccacaaacttagttaataatcatggttaagggncattnccaaagancaacngatgcctcantgaagtttgaaaganactctnctttctgtgacggcagngnagaaatatgcaagcgnttctgcttcaaagaaatttgcatagaaatggnaaaaagccagannctttaacacaagtnnaattgcaaagcctcaacangntcaactcaatccacagggnnccaaatgtttaatgggggcnnnggtnggnntgngcnttgancttccagctatgcnactcgcggggcacaatttcangtgtgggaccatctgtgggnnagctcttttannaacatggnttttngncaccgtanattctaatgcgggcncttttgcnttactgtttgantttcagaggggcacacaaggcaccagagntcttttcaaagttcacctcacaggcaacaatttgcattttttttcccagnccttgggtagccccttttcagttggtctaggcctctgcactgtggggncaccactggacattaaaatccagtcatggg

SEQ ID NO: 520352 - DNA, 703 bp, Homo sapiens
tatagtctgatatcaatatctgtatgtgtaactaatagtgatttacgtgaatctctactggattttgcgcagttcaatgacagtctagtagagtcagtactatgaagagagagatttagttctcgtacgatgagacaacagagtattagcattagatatgttgagagagatatgaaacccaatgaagcagtgtgttggtgagacttgtttttggtactagcctgtccttcagtagcttatctgactaaaggactcatgatgaagtaaatgtagttgagaccttctattctaaagcacagtgttgatttctccgcctcaaactttagtgtgataatttgggatgaggaaagttaggttggatttcatattgctctcagtgtatttagggagatactctattgtctcaggtagagtctgacagacttgtactgtaaggggccgcatggtaaatgttgtaagtcttgtgggctatgcattctctgttgtacctgctactcagctttgctgtcgtagtgaaacgggcagacataggcagtgtgtaagcagatggatgtggctacggttcaatgaaaatttgacaataaacaggcagtagccaggatatggctgttggggccatagtttaccaactactatcctgagcttcagtgttgctgttcagatgtttgaagtatcgttgaccaggtatgtagtataaaatgaa

SEQ ID NO: 520353 - DNA, 148 bp, Homo sapiens
gccccggctcacttcagttcggctcataagtatttaactctcacacctagataacatattaagatttgaaaccagatatatatgaagcgcacgaagtcttatctgttaagtatcattcccctctcaacaagaaaaaaaacaaaacaca

SEQ ID NO: 520354 - DNA, 206 bp, Homo sapiens
ggaggtatgggtacggttcctgatggcgagtggagacgggtgtgctcaaacccggtatggggtcagcttgctccagtcaacgttacaacggaagtaaaatctgtcgaaagtgcaccagtgaagcttggacgtgaagctcttccggggagacaatggtgggcttcaagtgtcaacgaatgtgtcgtgtcaagggatgttcgtcggtg

SEQ ID NO: 520355 - DNA, 1018 bp, Homo sapiens
atcccagcaccttgggaggcctagatgggaggatcacttgagctcaggagttcaagaccagcctggacaacatggtgaaaccccatctccactaaaaacacaaaaaaattaccagggcatggtggctcgtgcccgtagtctcagctacttgggaggctgaggcaggagaaccgcccgaacctgggtgacagagcgggactccgctctcgaaatacacaaacaaacaaacaaacacactaagtggtgggattacaggcgtgagccactgagcccaaccagtcccttcaattttacatcgactggaataatggctcatacttccactggatactggactacgacacactggaaccgctccagtccactctcggtcaagtccgcactggactgctccgggcatcaggcatcacaaccacatgggccgccctactcccatcgaccttaccatggtaggaatacatcggcaccccggctattcggacgctcgctgcaccctgccacacctctaccccagccctaccctacctctgtgcacatcattcatccctcaccgacacctgggacactctcgccacaacggagccactccatcgccgtaaacccatcctcaaaatcaatatcccaacccccccatgcacgcccacgccaccattagggcttaaccccctgcgccatccccaacccaagcctgcgagaacacccacaaactcacgcgaacttccccctcttctacccaccacactccagacggcgaacttgacaccggcgccccttcccgcatccacaattccataccgtcagccaccccttttcaactctctacgccccgcaagccagtccactttagtggacgttgccccaccgcgcgcccccctcccacgcgaccatacctaagtgtccaccctaccacttatagggacgatctcatgtaacacgcgagcgtgcacccacatcttccacaacttgtgcaggctctccagactacactttcggggacacaccatccacacccgcctca

SEQ ID NO: 520356 - DNA, 244 bp, Homo sapiens
cttgtatcagcacgctggagtcctgaggctggggcagttacaaggtcaggagttcgagaccagcctgacgaccaacatggtgaaacctcgtccctactaaaaatacaaaaattagccaggcctggtggcacgcgcctgtaatcccagttacacagaagactgaggcaggagaatcgcttgaacgcaggaggcagaggttgcgggagctgagatcgcgccattgcactccagcgtgctgatacaa

SEQ ID NO: 520357 - DNA, 127 bp, Homo sapiens
tcgatacgacttttcttccttcttttctcttattctttctttctcacttccttgctttctttccttttttctcccgtcctccctccctccttttcttccttcctccctcccttctgtcgtcttctcg

SEQ ID NO: 520358 - DNA, 174 bp, Homo sapiens
acgcatttatagccttgaggatattaagtttgaagtaatactgttaggttagcaataggtttacgatgtatcactatcatgcatgctaccattgataggtactgcagctcttcgagtacatttctgagtcatatcaatgatagttcatccctattttgaccccatgagaaatgc

SEQ ID NO: 520359 - DNA, 306 bp, Homo sapiens
tttccggaattggtcccctttagttttttttagtccagaacctgagtggttttggcaccttcttttttcctctaatgaacttaaggtttgttggtttttcccctttaaggatttttcccccctaggcccttaaggataggttttcccgccccccgaataaggttaagtccccccaaatgggctgtggtttttttttaaaaactttacccctttttttttccccccatttccccaaaaaaacttaaaaaaccaaaacttttggcccgggggttaattccccctttaaattaatgttttttaaaggga

SEQ ID NO: 520360 - DNA, 2350 bp, Homo sapiens
gcaacatggtgaaaccccatctctactaaaaatacaaaagttagctggccatggtggcacacgcttgtagtttcagctactgggaagctgaggcaggagaaacccaggaggtggaggctgcagtgagccaagatggtgcaagataatcaagactccatctcaaaaaaaaagaaaattctgacatgagagtgctctgtgaatatcctagtttgataaacaggattgtggggctgatggatgatgtgggagttcacagatggtgcaactttcctaggccaacaatggcatctgttttctgcgttttgatgacaccaaccctgagaaggaggaagcaaagttcttcacggccatctgtgacatggtagcctggctaggctacacaccttacaaagtcacatatgcgtctgactattttgaccagctatatgcgtgggctgtggagctcatccgcaggggtctggcttatgtgtgccaccagcgaggagaggagctcaaaggccataatactctgccttcaccctggagagaccgtcccatggaggagtcactgctgctctttgaggcaatgcgcaagggcaagttttcagagggcgaggccacactacggatgaagctggtgatggaggatggcaagatggaccctgtagcctatcgagtcaagtatacaccacaccaccgcacaggggacaaatggtgcatctatcccacctacgactacacacactgcctctgtgactccatcgagcacatcactcactcactctgcaccaaggaattccaggcccgacgctcttcctacttctggctttgcaatgcactggacgtctattgccctgtgcagtgggagtatggccgcctcaacctgcactatgctgttgtctctaagaggaagatcctccagcttgtagcaactggtgctgtgcgggactgggatgacccacggctctttacactcacggccctgcgacggcggggcttcccacctgaggccatcaacaacttctgtgcccgggtgggagtgactgtggcacaaaccacaatggagccacatcttctagaagcctgtgtgcgtgatgtgctgaatgacacagccccacgagccatggctgtgctggagtcactacgggtcatcatcaccaactttcctgctgccaagtccttggacatccaggtgcccaacttcccagctgatgagaccaaaggcttccatcaggttccctttgcacccattgtcttcattgagaggactgacttcaaggaggagccagagccaggatttaagcgcctggcttggggccagcctgtgggcctgaggcatacaggctacgtcattgagctgcagcatgttgtcaagggccccagtggttgtgtagagagtctggaggtgacctgcagacgggcagatgctggagagaagccaaaggcctttattcactgggtgtcacagcctttgatgtgtgaggttcgcctctatgagcgactattccagcacaagaaccctgaagatcctactgaggtgcctggtggatttttaagtgacctgaacctggcatcactacacgtggtggatgcagcattagtggactgctctgtggccctggcaaaacccttcgacaagttccagtttgagcgtcttggatatttctccgtggatccagacagccatcagggaaagcttgtctttaaccgaactgtcacactgaaggaagacccaggaaaggtgtgagctggaagcactgaacctacctcatcctcctggagggtgtggctaccctcgccaccccaaattccatgtcaataaagaacagctaaattctcctagaaaaaaaaaaaaaaaaaaaaaaaaaaaaaaaaaaaaaaaaaaaaaaaaaaaaagggggggggcgccaaaaaaaatcccccgggggggcccccaagatcatagcggaccacccgacgacttatttgacaacaaagggggcccccataatgagggacgccactaataaaacacgacagagaacgacggccgccgctggtataaccacgacaggcgaggagcacgaggagaaacagcggcaaacgaggggaactatgatggaaaagaccaccatacactacggagggggggagaacacaaataggcgcgcagcgaaacacactaccacaaacaaggaaagaatataaaagagccgccccagacagggaacatcatacatacacacaacaaagaaacaacgaccaaaagaggggggggacgtaaccaaaccgagaagtaaagaggataaggcagggcagaagaaaaaagacggcgcacaacaacgaggaggaccaccaccacagagcaacagatgctccaagcacgggaggg

SEQ ID NO: 520361 - DNA, 1582 bp, Homo sapiens
agcggagaatagtcagagcaaaaccacgcctgtgtcttcctcctgcctcagggacgaacaccttccttccaggtccgtggcaaatatctccaaaagccctgccgcctgccaacaccccttcaagttcccagttccacggaggcggaagcaaagcccccggaaaggccggtttgtccgccctgtgttgtttaaaggggatagacgaccttggagcgccccgccccctcccgccaaggaaggaccccattggctctccccggaggcttcactctcattggtcagcgagtgaatgccgacctgcagactggggcctaagtttcttttagtttccggtgtctctgcaatggcggctctagactccctgtcgctcttcactagcctcggcctgagcgagcagaaggcccgcgagacgctcaagaactcggctctgagcgcgcagctgcgcgaggccgctactcaggctcagcagaccctgggttccaccattgacaaagctaccgggatcctgttatatggcttggcctcccgactcagggatacccggcgtctctccttccttgtaagctacatagccagtaagaagatccacactgagccccagctaagcgctgcccttgagtatgtgcggagtcaccccttggaccccatcgacactgtggacttcgagcgggaatgtggcgtgggtgtcattgtgaccccagagcagattgaggaggctgtggaggctgctattaacaggcaccggccccagctcctggtggaacgttaccatttcaacatggggctgctgatgggagaggctcgggctgtgctgaagtgggcagatggcaaaatgatcaagaatgaagtggacatgcaggtcctccaccttctgggccccaagttggaggctgatctggagaagaagttcaaggtggcaaaagctcggctagaagaaacagaccggaggacggcaaaggatgtggtggagaatggcgagactgctgaccagaccctgtctctgatggagcagctccggggggaggcccttaagttccacaagcctggtgagaactacaagaccccaggctatgtggtcactcccacacaccatgaatctactaaagcagcacctggagattactggtgggcaggtacgtacccggttcccgccagaacccaatggaatcctgcatattggacatgccaaagttattcactgggtgtcacagcctttgatgtgtgaggttcgcctctatgagcgactattccagcacaagaaccctgaagatcctactgaggtgcctggtggatttttaagtgacctgaacctggcatcactacacgtggtggatgcagcattagtggactgctctgtggccctggcaaaacccttcgacaagttccagtttgagcgtcttggatatttctccgtggatccagacagccatcagggaaagcttgtctttaaccgaactgtcacactgaaggaagacccaggaaaggtgtgagctggaagcactgaacctacctcatcctcctggagggtgtggctaccctcgccaccccaaattccatgtcaataaagaacagctaaattctc

SEQ ID NO: 520362 - DNA, 597 bp, Homo sapiens
cccactcctatagatcagtgtattacaaaagctggtttcccaagaccgtcacacaaaaccatacaaaaggcggggcacagtggctcagacacaacattattaagaaaaatcaggaaaaaacaatttgaggccaggcgcagtagctcacgcctgtaattccagaactctgggaggccaaggcaggtggatcacctaaggtcaggaattcaagaccagcctcgccaacatggcgaaaccctgtctctactaaaaatataaaaattagccgggcatggtggtgagcacctgtgatcccagttactggggaggctaaggcagagagttgcttgaacccgggaggtggaggttgtggtgagctgagatcgcaccactgcagtccagcttgggcaacagagcaagactccgtctcaaaaaagaaaaaaaaatactgatctataggagtggtgcaccactcctatagatcagtctcctatagatcagttggttggaggtgtgcagctgtatctctaagttctctattctcttccagtggtctacatgtctatttttgtactagtaccatgctgttttggttgctactgatctataggagtggtg

SEQ ID NO: 520363 - DNA, 582 bp, Homo sapiens
tgcggtggctcacacctataatcccaacacttggggaggccgaagcaggaggatcacttaaggtcaggaattggagaccagcctgctaacatggcaaaaccactgtaatcccagctactgggggaggctgggcacaagaatggctgtgagcccaggaggcagaggtggcagtgactgtgagatcgcatcattatactccagcctggtgacagagggagaccctggtctcaaaaaaaattccccttaaacgtagaattaccctatgttccaccaatgccattctaggtatttatccaaaagaaatgaacatcactgggtgcagtgtgctcatgcctgtaatcccagcacttgtgggaggccgaagcaggcagaccacctgaggtcaggagttcgaaccagcctggcaacatggtgaaacccaatctctactaaaaataccaaagttagctaggcgtggtgtatatgcctgtaatcccagctacttgaaaggtgaggcagaatgtttgtgagccaggaggcagaggttacagtgaactgagatggtgccatgtgcattcggcctgggcaacaaagagcgaaatc

SEQ ID NO: 520364 - DNA, 1933 bp, Homo sapiens
agcggagaatagtcagagcaaaaccacgcctgtgtcttcctcctgcctcagggacgaacaccttccttccaggtccgtggcaaatatctccaaaagccctgccgcctgccaacaccccttcaagttcccagttccacggaggcggaagcaaagcccccggaaaggccggtttgtccgccctgtgttgtttaaaggggatagacgaccttggagcgccccgccccctcccgccaaggaaggaccccattggctctccccggaggcttcactctcattggtcagcgagtgaatgccgacctgcagactggggcctaagtttcttttagtttccggtgtctctgcaatggcggctctagactccctgtcgctcttcactagctacttctggctttgcaatgcactggacgtctattgccctgtgcagtgggagtatggccgcctcaacctgcactatgctgttgtctctaagaggaagatcctccagcttgtagcaactggtgctgtgcgggactgggatgacccacggctctttacactcacggccctgcgacggcggggcttcccacctgaggccatcaacaacttctgtgcccgggtgggagtgactgtggcacaaaccacaatggagccacatcttctagaagcctgtgtgcgtgatgtgctgaatgacacagccccacgagccatggctgtgctggagtcactacgggtcatcatcaccaactttcctgctgccaagtccttggacatccaggtgcccaacttcccagctgatgagaccaaaggcttccatcaggttccctttgcacccattgtcttcattgagaggactgacttcaaggaggagccagagccaggatttaagcgcctggcttggggccagcctgtgggcctgaggcatacaggctacgtcattgagctgcagcatgttgtcaagggccccagtggttgtgtagagagtctggaggtgacctgcagacgggcagatgctggagagaagccaaaggcctttattcactgggtgtcacagcctttgatgtgtgaggttcgcctctatgagcgactattccagcacaagaaccctgaagatcctactgaggtgcctggtggatttttaagtgacctgaacctggcatcactacacgtggtggatgcagcattagtggactgctctgtggccctggcaaaacccttcgacaagttccagtttgagcgtcttggatatttctccgtggatccagacagccatcagggaaagcttgtctttaaccgaactgtcacactgaaggaagacccaggaaaggtgtgagctggaagcactgaacctacctcatcctcctggagggtgtggctaccctcgccaccccaaattccatgtcaataaagaacagctaaattctcctagaaaaaaaaaaaaaaaaaaaaaaaaaaaaaaaaaaaaaaaaaaaaaaaaaaaaagggggggggcgccaaaaaaaatcccccgggggggcccccaagatcatagcggaccacccgacgacttatttgacaacaaagggggcccccataatgagggacgccactaataaaacacgacagagaacgacggccgccgctggtataaccacgacaggcgaggagcacgaggagaaacagcggcaaacgaggggaactatgatggaaaagaccaccatacactacggagggggggagaacacaaataggcgcgcagcgaaacacactaccacaaacaaggaaagaatataaaagagccgccccagacagggaacatcatacatacacacaacaaagaaacaacgaccaaaagaggggggggacgtaaccaaaccgagaagtaaagaggataaggcagggcagaagaaaaaagacggcgcacaacaacgaggaggaccaccaccacagagcaacagatgctccaagcacgggaggg

SEQ ID NO: 520365 - DNA, 1603 bp, Homo sapiens
tacggtttggcgggggaccgggtgggaccctgggccggggtatctggaccccttgtcctactaccgtacacggctacgggtgacgtggtacgagacacgttttttacctcacggacggtggtactgacgtgggtccgtcacggcggacactcgggggtactgccggttcgacacttcctacacacacccgcgggcacggttaccaccgtacgggttctgggtggaccacacacactactgtgtggtgtgtacacacgtcccacggggagacacacgtgggtgtcactactgcgttggtggccctacgagacacacacttgtgtgccgtggtgtgcgacggggtgtgttcacattactcacacatacctggagacgcgaggtctccgcgggcgctaactagacacacacactacgggggcccacacggtgggcgacccttgtgcggcgagatacctacgggacgcgtgtgtgccacacgctcgtgagctcaccatacatcgtctcggcgccacctcccccctaatctccgcgcgcacccggggctcccccacggggggtatctccgacgatgtgcgcacttcccgcgacacccaccgatggcgagcagcacatcacccctcacataccctctaaacgcgatggcccacaaaggggagaacacacacaagatctaaggagacacagagaactgatacacattccaacgcaacgggataaggatacaccctcaacgacgcgccaaacgacacgcaccaaacaccagctcgtataggaacagaacagaagtacacacacacacgcggaccgccacaccatcaaaaaataaaacaggcacaacatcgggtcaaagcacacacaaatacgaacataagaacgaagggcaataacacagagttgcgcacctcaccccctccctctccccacccccctgctctcctgctctcccctatcaccctctgccctcgactcgactcgtacgtcccgccctcacacccgccacgacacactctccgccgaggtgacgcgctgcgcccccacccctcggcttcttcacaggccttcgcccgttccccctgctcgtctccttgccccaccccgcatgtggctctgacccccaccacacccgtccgtgctgtcctacggcttttccccgggtgtaccgacccgtccgacactctacggccccgcgccgcgcctcgccgcggctcctcccctgacgcacaaccaccatcggtctatcgccatcacaacgctcggcctacgcgcgccctagccgccgcttcctcccgctccccgccctcctactccgcccccttgcttccaccgcgcgtcgcccccgccccgccatcgcgttcccgcgcgagcgcgcactatcgcgatcagcccggctcgtctgatctcgcaccaacgacgctccgcgcccgccaatcccggcgacatgcagaacacatacccgccgcgacgacgcgcgcgaaacgcgccggaatccacacgcaatccgagccgtcacgacgacgacgcacgcccgacacgcgctctaccgacacgacaaacaccgcgtctccgcaacgcaccagcgcaccccatccgtcaacctctccca

SEQ ID NO: 520366 - DNA, 233 bp, Homo sapiens
tatccaccacgtaatctgggtcacttttacatgtgtatgatgcgttcactgcagggttacaagcacacaacaagttagctggatacacgtggaagaaacgttactgagaagtacacactgactttatggtgagattagtgcttgggatgaactacagcagaattccagaaactatctggacaccatcagtcatgggtggatggcgaccactctcaaattccaagttcaactga

SEQ ID NO: 520367 - DNA, 600 bp, Homo sapiens
gagggctgtagacaggcacccgctcccctccggcgggacactcttgcagcctcccaggtctttcacagctgcgcttctcagcacgcccaccacccccacctccagattcagtgcctgtctattttgaacaggttctctaggctgggtcaggtctccctcagctccaagttaatggtggtggtggtgagttgtcttcccccagagagggttcaaggcagaggaagtagagccttgcgggatccctgggcacagccctcctgcgcactttagacttacccaagggcgtatactcttgtgggttaaaggaacaggctttcggatcagacagacttggttttcgattctgactgccactcaccagcagagcatcttcacctcttggagcctgcctgccacagtggaggcgagtagcaccagggctgagaggcaggaaggccttcccagagcctcgctgtgcatttgggagggcccgcggtttgattgtgagaccgcacagcagcctttggagggggtatggtttttatcaccccacttcacaggtggggagatggagtccttgggcatgactggctagaggtcccacagccaaatggagagctg

SEQ ID NO: 520368 - DNA, 231 bp, Homo sapiens
cggtccattcgcggcgcgtcgtacatccgtggtatcatcagaggtgatctgccgggcctgcagcgggctgatcaccgtctcgccgttgagatcgcggcgtgattggccagatagacgaagctgcgcgccagctccacgcagctcatgcgcagcgcgcagtagtggaaataggtttgcaggacggtgatcacgtcgttctcgaagttgccgaacgacttcatcaggtaggcg

SEQ ID NO: 520369 - DNA, 476 bp, Homo sapiens
  misc_feature (17)..(17): n is a, c, g, or t
  misc_feature (24)..(24): n is a, c, g, or t
  misc_feature (404)..(404): n is a, c, g, or t
  misc_feature (431)..(431): n is a, c, g, or t
  misc_feature (438)..(438): n is a, c, g, or t
attcggcacagggttgngagaaanaaggagcaggtagaggaatagtcaatgatatatttgtctcacgcccagtaaatcagctctttatataagataaggtgagcatagagtagctacctgtagagatatttaaccttttatctgtagctttctgcttaggaacaaaaggaagggtatcttcttgcatgaaagcgtccagcttattttttttcctttggcatagtaaattgaggcaccaagtttttattttccgttcacatttcttcccctccccttttaaaaaaagtcttcagaaaatggcattttagaagaaaatgcgtctctagtcttggggttttgtctgggtctcttgtggactaagacagtttatttctaggacaggtcccacgtgggttaagaaagcnccattttagcaggttgtaaagtctccnggacccngaagggaaaaaataggtgggagggagagagagagaaac

SEQ ID NO: 520370 - DNA, 205 bp, Homo sapiens
tcatcatatcctaagcctggacatgggctcttgacaagagggctaataaaaacataaaagccgtgagaatatcaggaataaagacattcctttctaagaacagttgacaactttatagccacttaaaatacaagaaataactcacataatagtatgcaatttatgatgcagataatattattagtcaagattttttgtcttctag

SEQ ID NO: 520371 - DNA, 312 bp, Homo sapiens
  misc_feature (73)..(73): n is a, c, g, or t
gaattctggatcctccctctcaccccgtattttagctcttggctcgatgacactccctcaacttctatcttanttctcaatattttcaacatacttatccttcaatatactgatccttcaaacactaaggcctccaattacattaactcatctcctccgatggcctttctttcatccttcctcagccactcactcccatggtcacactctagactttacttgccattaccaaaaactcctttttctcaatttcatgcatctcactttatggccactatattctagtcttcctgttcagtccctcataaacac

SEQ ID NO: 520372 - DNA, 459 bp, Homo sapiens
gtagtaagtgtatggaaagggcgtcccacacagtatgctctgaagtagatgtgaagaaagcatttagtaaaggggttccaaaaaacattttttgaccaagatatctgatccaggatcttatgagattatataatatcaaggtagaaaaattaccaattcttatttagtaggtctggaaggagaataacattttgcatttctggctgggtgtggtggctcacacctgcaatcccagtactttaggaggccgagactggtagatcacttgaggtcaggagttcaagaccagccttgccaacatggtgaaaccccacctctaccaaattagccaggtgtggtgcacacctgttagtcccagctacttgggaagctgaggcaggagaatctcttgaaccagggaggagcgaggttgcagtaagccgagatggcgcccctgaactccagcctgggtgacagagt

SEQ ID NO: 520373 - DNA, 857 bp, Homo sapiens
tacaagagccacaaagacatggaacactatacctattattcggggcatgagctggagtcctaggcacagctctaagcctccttattcgagtccgagctgggccgagccgaggcaaccttctaggtaagcgacactatctgacgaaacgtttatcgtcacagcccatgcatttgtaataatcttcttcatatgtaatacccatcataatcggaggcttggcaactgactagttcccctaataattgtgtgcccccgatatggcgttaccccgcataaaacaacataagcgttctgactcttacctccctctctccatactccgtgctcgcatctgcatatagtggaggccggagcaggaacaggttgaacagtctagcctccattagcagggaactactcgcagcctggagcctccggagacctaagccatcttctccttatacctagcaggtgtctcctctatcttaggggccatcaattgcatcacaacaattgatcagtataaagacccctgccataagcccaataccaaagcccctcttcgtctgatccgtcctaatcacagcagtcctacttctcctatctctcccagtcctagctgctgggaatcactatactactaagagaccgaactcaaaaacacgttcttcgaccccgcggaggaggagacccattctatacagcagctatctgaatgtttcggtcacccggaagtgaatattcttatcctacagggtcggatagtctcccatattgtaatagtacggcgaaaagaccttggttctaggatggcgggaggcagaaaccagggtccaaggtcggggggccccacattttgaggataggctgagaggatt

SEQ ID NO: 520374 - DNA, 224 bp, Homo sapiens
tctctggacagcccttcccctaggtcagtcgctgacccctggcacatcatgtgagcctctctgatcctaaatatctttaggctcgtgtaaggcctctggggtaccgcaggtctctccttcacccttgtaatctggtcgcttgatattcgctctgtcttagccacacacttactgctctattctacttaactcatgacttctatctcatagtccacgcgggtacc

SEQ ID NO: 520375 - DNA, 654 bp, Homo sapiens
  misc_feature (31)..(31): n is a, c, g, or t
cagtgcacaaatttcttgaagagcttagcancaagtcgttatgatagttcaggctcccacgtacggtgccatctcgtgactcatcctttagatcgcgaggtttctcggattcatgaagtcgtcctaaggtaacttccagagaactctgtgcatcttgacaaggtttcaatgatcagttctaaagtactctgatcagcgctagtttcatgttcatgagaccaaacctcatgacaatgcagtatctgggtacactcccaaacggtgtgtatatgtaagtctctatgctgaccatgttcctcgggctgaatctttcaggtagtaccttcgcagactctgtccagtactatgggtcacgttaaagagcatagcttggactcttcatcgccaccccagtgggaatgatcatcccattgatctcatcatctctttgacagaccctctcaagtctcatagcaattggaaataatctgagcgtttcattccccaccatgtcaagatgctccatctgtagctcagtatcataggtgggtggtgccttactgggtagacctgcatcaatttcctactgcagtctctgctggccatcagggtgagtgtccagttcatacatattgaagcacagatcactgctcgtggtttcatagccagcgcaag

SEQ ID NO: 520376 - DNA, 243 bp, Homo sapiens
  misc_feature (33)..(33): n is a, c, g, or t
  misc_feature (40)..(41): n is a, c, g, or t
  misc_feature (59)..(59): n is a, c, g, or t
  misc_feature (62)..(62): n is a, c, g, or t
  misc_feature (80)..(80): n is a, c, g, or t
tacaggatggaagcggagagtatgcggtgggcngagactnngtcactgcactccagccnggncgacagagtgggactctntctcaaaaaaagaaataaattattaggtgtcaacagcggtgttctgaacttaactttgtcctaactatacagatatacaaaatttatgtaatgaaggattatttcgtcggcaaaatacgttaagagggaaacaaaacagagatttccttcctcttaactaagg

SEQ ID NO: 520377 - DNA, 303 bp, Homo sapiens
cgagcctcacttatccaccagcttgaggctcctatgtagagcgattgctgacaagtgtctgtgctacaatcctgatattgcaatggcgcttcttgccatactatgtttacaatcatcatcgtgtggacttgatgaagaactgaaagggggctgtagacagttttgatccaataagttcttacgagagagtactccttcatggctggaggttcacaaagtgccatgctacaggccctgcttgacaaccaggttgcttgtcagaacattcataatgtgtcgcatgttccgctgtcctcggacaga

SEQ ID NO: 520378 - DNA, 404 bp, Homo sapiens
gatgacatcaagacattcgtccagcgtctggttgcgtttcagggtaatcatctgggagcgggggatcatgatgctccgaacgcgttggtctgcgatgtccatcaccccttcgagcatatcgcgcgtatcttcgtcgataaggtcgttctgcccggaatcacggatcagcgccagcagttcgtcacggtttttcggttcaccgtggaaaagttggctgagtaacagggagaaaaatcccttcttgttgcttatcgtgtcactactgtgtgaattgtcgtcgctcatggcgtcgtatgggttctcatgttagttaatcaaaacgccgtcgttaatcaccaacggcggggacgtctgccagtcaaatgcctggcaaattattctttctcggcaatgtacggatccgt

SEQ ID NO: 520379 - DNA, 133 bp, Homo sapiens
cctgaacgccaccgcccccgcacccaccccgccacaaacccctcgaccaacgcacgccacgacccatcccaaacacagcataaagaaaaagcaaaaacagaaaaaagtaaaatatgaaaaaaaaataaagaaa

SEQ ID NO: 520380 - DNA, 354 bp, Homo sapiens
ttgcccccccgccccccaaaaccctggggggtggaacttttcctccccccagccgcctttttttccccccccctaggattggggctttgccggttaggcccattaaagggcccgagggtttcctttttccccggggcactatataaacccaaatttcccatataaaactggtttggggtttggggggggaaatttttgaatatttatttttttttaaaaaacccagatagggccttgggccatggttttttgggaatgcctttccaaaaatccggctttgggggggcctctccccccccccccccattgttaaaaggccttttagggggtttaataaaggggttttttttttta

SEQ ID NO: 520381 - DNA, 338 bp, Homo sapiens
ctgtaacactggcctagagcaggtgcttttctccatgaaaacttccaccttggtagctcagccgacatagacaacacgcaagcgcagtctagacttctgtccttatcttcacacagtgacattcacaccaggtgggccaacagaagagaaggcagaggcgccccatgagctgatgctgcgcagtccttgggggatcatacctcccgtctcactggggacgaaaccaggttctggaggctctaccctgacagacagcttgtcaccggcacttatgggtcctctgggatttcagacaatacccaacttctgtaggttcagaaagtgcttcaaagacattt

SEQ ID NO: 520382 - DNA, 313 bp, Homo sapiens
gccgaattcggcacgagggcacgtgggaaaacagcagtcaccagtgaaatgcactgtggcttgccgttctcaccagttctgcctgacaactgatgttccagaggcccttgagctgtgctccctatattctctccagtcctccagccctagagctgccccttgtccacaccactggtacaaaacattagaggcggagaacagaaaacagcaagagacagtatttcttgttgactgtgtaggtgaaactaaaggctgaggctagtcactagcaaagtttcttggtccttagttcttgtgcttccattgggtcaag

SEQ ID NO: 520383 - DNA, 298 bp, Homo sapiens
gtgatactgaagatctgattctctcttgccacttaataactagtaacaggtttaacataggaactaatttagtctgttcatttgctatgcacatggctggcttcaccagtaaagtgaacgtgtctctcatttagttatctaaatgatctggatagactatccagtctaactacattccaactcagcaggatgttcttcggacgagagtgaagacacaggcattgtagagacacatttcaccttcaaggacctatacttcaagtaggcattagccttctgctaggggtgcaaatcaagg

SEQ ID NO: 520384 - DNA, 218 bp, Homo sapiens
tacccgtggcctggcaggtttcgacggtgctgctgggaaacagggagcgagtgaccggggcaaccagcgcgacgtcatccccgaccttgaacacctgttcgacgtccagcgcggagaagctccaaaagcttttggcccactcgtcaaaggtgttcaagcaatcgcgaaagtcacggaagacgccctcgacgtcgaccgtttccacgttcattggcgtc

SEQ ID NO: 520385 - DNA, 419 bp, Homo sapiens
  misc_feature (1)..(1): n is a, c, g, or t
nggaagcagcagccaatacccagcagacacttactttctatgaactggaccttggcttaaatcatgtggttcggaaatacagtgaacccgatcaggaacatggcaacttccttattacagttcctggagggtcagatatttccaagtggagtgctaatctgctctgagaattatatcacctacaagaactttggtgaccagccagacatccgatgtccaattcccaggagacggaatgacctggatgaccctgaacgaggaatgatttttgtttgctctgccacccataagaccaagtccatgttcttctttctggcccaaacggagcagggagatatctttaagatcactttagagacagatgaagatatggtaaccgagatccgcctcaagtattttgatactgtgcctgttgctgc

SEQ ID NO: 520386 - DNA, 131 bp, Homo sapiens
ccagaggatccccggaagcacacggcaacaacatctgataaaaggtagaaccaagatgccaatacagatctgtttagcttcaaacaccacctcctcccaggctaaatcctttatgttgcagtgtgcttccg

SEQ ID NO: 520387 - DNA, 397 bp, Homo sapiens
tgacggtacccaaagaaatgaagtagaagtgcactaaaaaggtcggaaaagtgtcataacagcatggttggtaatagtcccagacgggaaacaacccaaatgtccattaacagtgaaatgaataaataaactgtggtatattcacatagtaaaacgctgcatagcaatgaaggtttaaaaatgctacagatggtgtggtggctcacgcttgtaatcccagcacttggggaggctgaggcgagtggaacacctgaagtcaggagttcgggaccagcctggccaacgtggtgaaaccccatctctactaaaaatacaaaaattagccaggctgggtggtggacgcctgtaatcacagttacttgggaggctgaggcaggagaatcgcttgaacccagga

SEQ ID NO: 520388 - DNA, 140 bp, Homo sapiens
ttattaaccccacgatcacagcatcacccttctgctatacttatctgcccacttctctcacaaggctggcaaggggtcacacctctgctgttcactagcagtatcccatagcacacagacaatgaacattttcatgagca

SEQ ID NO: 520389 - DNA, 263 bp, Homo sapiens
  misc_feature (76)..(76): n is a, c, g, or t
  misc_feature (172)..(172): n is a, c, g, or t
  misc_feature (196)..(196): n is a, c, g, or t
  misc_feature (215)..(215): n is a, c, g, or t
gcaggcccacgggcaccccagacactggaactccctgcctttgagcccccaactggacccctttcaagaacacccnccgccaccacctcccacatccctgaggttggggactgtttacactcctcccccgagaccaccccccccctggggaagggttgattactgtcccctnccttggaccatcccgggtaggggnggcagcccccagctccccncagtgttgctgtcagtgtagcaaataaagtcatgatattttcctggca

SEQ ID NO: 520390 - DNA, 119 bp, Homo sapiens
tgtcgcgtgcatgtttcacttttaaaaaaggacaaaatggaggacaagaatggtggctcactcctgtaatcttagcactttgggaggccgaggcaggaggatcgggtaccgacgctcga

SEQ ID NO: 520391 - DNA, 287 bp, Homo sapiens
tacccagtcctgttgcagaggttatcccgagacgcttacagagaatggaaccttgactctgatatatgtcattatcgcgaattgagcattacgagacattattcagaacgaatataacatttctgctctagagctcccacagagctacaagcagctgacatataggatgaagcataaaaagctgtataacttcagaatctgggccgtagcggagtatctctagccagggaagctcacactccaagagaggtcacgggctgtcttccctcctttggactgagaaacac

SEQ ID NO: 520392 - DNA, 304 bp, Homo sapiens
  misc_feature (110)..(110): n is a, c, g, or t
agtatttgttgatgctcctctgcatgtttgtgaacagagggatgtcaaaggactgcactccagcctgggcgacagagcgaaactccatctcaaaataaataaataaatanataaataaataaataaataataaagctgtttttttgagacagacagggattgtcagaatgaataaaaaagcaagacttcctatatgctgcctacaagaaacaccgctttaaacataaaggacacaaataggcttaatccttgtttccttggtttaggaaaaaaaattgcagctcactgccagcggttcatttac

SEQ ID NO: 520393 - DNA, 742 bp, Homo sapiens
  misc_feature (2)..(2): n is a, c, g, or t
  misc_feature (20)..(20): n is a, c, g, or t
  misc_feature (42)..(42): n is a, c, g, or t
  misc_feature (67)..(67): n is a, c, g, or t
  misc_feature (118)..(118): n is a, c, g, or t
  misc_feature (151)..(151): n is a, c, g, or t
  misc_feature (213)..(213): n is a, c, g, or t
  misc_feature (220)..(220): n is a, c, g, or t
  misc_feature (225)..(226): n is a, c, g, or t
  misc_feature (233)..(234): n is a, c, g, or t
  misc_feature (255)..(255): n is a, c, g, or t
  misc_feature (261)..(261): n is a, c, g, or t
  misc_feature (282)..(282): n is a, c, g, or t
  misc_feature (294)..(294): n is a, c, g, or t
  misc_feature (296)..(296): n is a, c, g, or t
anactcttagaagaaaatgngtaaatcttcatgaacttgggnttggccagcattctaagatatgacnttcaaaacacaagcagcaaaagaagagaatttggacttcattgaaatttanagcttttgtgctttgaaggataccatcaagaangggaaaagacaccctacagaattggagaaaatattggtgaatcatatctaatacagactcangaaatanctttnnaactggnncaaaggatctgattagacatnttcccnaaatatatcaacatggccaantaagcacatgananagatgcttgacatcattagtcatcagggaaatgcaaagcaacaacacaatgagatatcacttcacacccactaagttggctaaaataaacaagatagtcacaagtgtagaccaagagatcgtaaagagatcggaaaccacagatactgctggtgagactgtcaaatggtgcagacactttaggaaaacagttgcaatttctcaataatgattattcccgagctaagctatacctataaatcctctcctaggtattaaccaagtacatgatcactatgtccaccggaaactgtaactgatctttaacaacatgtcgaataaccataagtggaacggtcacattactcatggtgatgatctgactgagatatttaaaggaattatctcccaatgaggagaactgtactgccacctctaccctcctcataatcccactgggatcacatg

SEQ ID NO: 520394 - DNA, 689 bp, Homo sapiens
  misc_feature (2)..(2): n is a, c, g, or t
  misc_feature (20)..(20): n is a, c, g, or t
  misc_feature (42)..(42): n is a, c, g, or t
  misc_feature (67)..(67): n is a, c, g, or t
  misc_feature (118)..(118): n is a, c, g, or t
  misc_feature (151)..(151): n is a, c, g, or t
  misc_feature (213)..(213): n is a, c, g, or t
  misc_feature (220)..(220): n is a, c, g, or t
  misc_feature (225)..(226): n is a, c, g, or t
  misc_feature (233)..(234): n is a, c, g, or t
  misc_feature (255)..(255): n is a, c, g, or t
  misc_feature (261)..(261): n is a, c, g, or t
  misc_feature (282)..(282): n is a, c, g, or t
  misc_feature (294)..(294): n is a, c, g, or t
  misc_feature (296)..(296): n is a, c, g, or t
anactcttagaagaaaatgngtaaatcttcatgaacttgggnttggccagcattctaagatatgacnttcaaaacacaagcagcaaaagaagagaatttggacttcattgaaatttanagcttttgtgctttgaaggataccatcaagaangggaaaagacaccctacagaattggagaaaatattggtgaatcatatctaatacagactcangaaatanctttnnaactggnncaaaggatctgattagacatnttcccnaaatatatcaacatggccaantaagcacatgananagatgcttgacatcattagtcatcagggaaatgcaaaagcataaaaccaacaattgacgaatactcatctttcaacatgcccaactaaagtttaggcttacgagtaataacagagactagataatcaacgctgtttgaccaatgatgacttgtcagacgagagttggaaaggccaccagaatacctgactggatgacgaactgtcacaatgggtgcaagccatctataggaaaaacaagttgctaatttctcaaaatgaattcaaacacaagagataagccatattaacctaagaaattccgtctcctaaggtatataaaccaagttaaaatgaacaacaaatgtcctcacagaaaactttgtaaataagctctaactgtttgtttccgctgg

SEQ ID NO: 520395 - DNA, 162 bp, Homo sapiens
cctcaaggtcgcaggaagcaacgtgtttactgtcgcatccaaaagaataaaatacctaggagtaaacttacctaaagagacaaaagacctgtactctgaaaactataaggaactgatgaaagcaaccagagatgacacaaatagatgcctgcgaacctatga

SEQ ID NO: 520396 - DNA, 108 bp, Homo sapiens
cggagcccagagactggacagagccagtgagacaggcttgtataggaggggtgaagcccagctgctcatgagcgagtttgagtcagccaagggtgactccgagaaagt

SEQ ID NO: 520397 - DNA, 340 bp, Homo sapiens
ctggagaatattcctgtgaagcccgcaattctgttggatatcgcaggtgtcctgggaaacgaatgcaagtagatgatctcaacataagtggcatcatagcaaccgtagtagttgtggccttagtgatttccgtttgtggccttggggtatgctatgctcaaaggaaaggctacttttcaaaagaaacctccttccagaagagtaatttttcatctaaagccccgccaatgagtgaaaatgatttcaagcccccaaaatcctttataatttaaaggctcccctttaaagataccccaaagcccccgttgttacccaagttattaaactattataaaactca

SEQ ID NO: 520398 - DNA, 835 bp, Homo sapiens
  misc_feature (170)..(170): n is a, c, g, or t
cacgtgcttctttttctgtttaaagcccatgtaattggggaaggcttggatgctctaactgtattctactattatgaaactcaggttttctaaaacaatctcaagtgtgcggcagtgccctgtgagaatagggggccccctcattccccaaacataagaggtatatgctnttcttctttttatctatcccgcgagagatatgtctatctatatcggacactaccccgtatctcattcgacacacagcttttagcatttttaacaatgatgacccaactgtcattctcacagcttagatacacctaatgggactatgtgagccacttaaaagccattaaaaaccaagggttgtggaatctatggctgtgaggggtgccttcagataacaaaagaaaagttcaggtatcagtaggatagaggtagacatgtaatgaatatatccagcagatcttacatcccataaaaaccagtaggtgtgtcgtatacatacggttaggggtaaagtaccaaagaagtttgatacgaaaagcactacagagggaagcatacatctcttgggaataggatttgtccactcccttagagccttaaaagtatacctttaagaacttacttcccgccgctggcctaaagacagaacgccacttagggcctggaaatagttgctatgttccagtgttgctgcgggccataggccacggtgcgcccccccagtctggcagacagccccgttacattttccattgcacccaggcccggtgcccggctaaaacccctaaacccctttcaacatttgccccggggacgtcacttatacagggcctataatccctcc

SEQ ID NO: 520399 - DNA, 851 bp, Homo sapiens
  misc_feature (214)..(214): n is a, c, g, or t
  misc_feature (261)..(261): n is a, c, g, or t
  misc_feature (321)..(321): n is a, c, g, or t
  misc_feature (636)..(636): n is a, c, g, or t
gggcctcgcctcggagcagccatgatggaaggcctggacgacggcccggacttcctctcagaagaggaccgcggacttaaagcaataaatgtagatcttcaaagtgatgctgctctgcaggtggacatttctgatgctcttagtgagcgggataaagtaaaattcactgttcacacaaagagttcattgccaaattttaaacaaaacgagtttncagttgtcggcaacatgaggaatttatctggcttcatgattcctttngttgaaaatgaagactatgcaggttatatcattccaccagcaccaccaagacctgatttngatgcttcaagggaaaaactacagaagcttggtgaaaggacgaacggggtcaatgaccgacaggaaagacttcaccatagatgacccaggaactggcagctgaattattttggcaaatattccaacgaaggacagttgcgactgctgaacgtgttccttgtgtcgtgtggccagcacatcctatttgtgagaagagatttacattcccatgtcttcttggaatataatccaagatttgagtggtgcgaggaaaaaataaaaaagagaaacttgaagacttctttaaaaacatggttaaatcagcagatggagtanccgcccggagtacgggtgtacattgattcctgtgagcagaacgaaattcttgggggatctaacgggtaagggcatcgcgaatctggtgatgcagatccccaaagtggggcgatgctacagagatggccccatttgttcggcccgtctaagtttgcgttccaagcccaacgggcaaaaaatacgcggtctggggccccaccgttaatacaaccagg

SEQ ID NO: 520400 - DNA, 284 bp, Homo sapiens
tagagttgccagaaacttatgcagcagcactgaccatgagagactaggtgggccctcactaatacatttctccctctctctctctctcttttttttttttaatttggtttcagagacaaggttggctcggtctcctaaaacgggagtataggggcacgatcatagctcacagcagacttgaactccggggctcaaaggatccttcctccgtgcctcagccccccaagtattaaatagcggggataccaggtgctgaaggtggagtaaatgcagatgttgagaaa

SEQ ID NO: 520401 - DNA, 880 bp, Homo sapiens
  misc_feature (214)..(214): n is a, c, g, or t
  misc_feature (261)..(261): n is a, c, g, or t
  misc_feature (321)..(321): n is a, c, g, or t
  misc_feature (465)..(465): n is a, c, g, or t
  misc_feature (511)..(511): n is a, c, g, or t
  misc_feature (665)..(665): n is a, c, g, or t
gggcctcgcctcggagcagccatgatggaaggcctggacgacggcccggacttcctctcagaagaggaccgcggacttaaagcaataaatgtagatcttcaaagtgatgctgctctgcaggtggacatttctgatgctcttagtgagcgggataaagtaaaattcactgttcacacaaagagttcattgccaaattttaaacaaaacgagtttncagttgtcggcaacatgaggaatttatctggcttcatgattcctttngttgaaaatgaagactatgcaggttatatcattccaccagcaccaccaagacctgatttngatgcttcaagggaaaaactacagaagcttggtgaaggagaagggtcaatgacgaagggaacgcaaatttccaaccaaaaggaattggaaataccaagggaaacctgggaagctgaatatttggcaatattcaagaagacagtntgcgatgcattgaaagtggttatcccctttttgggttggttccagntggtgggcaagcaacaatcctatttgtgagaagagatttacattcccatgtcttcttggaatataatccaagatttgagtggtgcgaggaaaaaataaaaaagagaaacttgaagacttctttaaaaacatggttaaatcagcagatggagtanccgcccggagtacgggtgtacattgattcctgtgagcagaacgaaattcttgggggatctaacgggtaagggcatcgcgaatctggtgatgcagatccccaaagtggggcgatgctacagagatggccccatttgttcggcccgtctaagtttgcgttccaagcccaacgggcaaaaaatacgcggtctggggccccaccgttaatacaaccagg

SEQ ID NO: 520402 - DNA, 272 bp, Homo sapiens
ttcagcacgctgaggttaaccgacgggtggaaacgcagcccgcccttgtacgggccaatggcgctgctcatctggatgcggtaaccgcgattgacctgcaccttgccctggtcatcgacccaggacacgcggaacagtacagcgcgctcgggctcgaccatgcgctcgaggatgccggattgcaggtagtgagggttggcttcaaggaatggccacagggtgcgcaacacctcttccaccgcctggtggaattccggttggccagggtcacg

SEQ ID NO: 520403 - DNA, 480 bp, Homo sapiens
tctgctgctattctccgagacttcgcaatgccggctaagtgacgacaagaagaagaaggacgctgggaaagtcggccagagaaagacaaagagccagttgaactaatccgggggcaaggccatagaaagaagaagtggtccacaggcaaagttcgggacaagctcaattaacttagtcttgtttgacaagagctacctatgataaactctggtaagggaagttcccatactaggtaaacttataaccccaggctgtggtctctgatgcagacgtgaagattcgatggtctccctggccaggggagcccttcaggagctccttagtaaaggacttatcagactggtttcaaagcacagagctcaagtaattttacgaaccagaaatacctaagggtggagatgctccagctgctgtgtgaagatgcagtgaataggtccaaccagctgtacatttggaaaaataaagactttagttagaat

SEQ ID NO: 520404 - DNA, 322 bp, Homo sapiens
tgctgcaggtcatctaaggatcccgtttggcgtgaggccaacaaatcaagtcgtatacctgaggtgcaccggaggtgaagtcggtgcacttctgccctggccccaagatcggcccctgggtctgtctcaaaaaaaggtgggtgatgacattggccaaggcacgggtgactggaaagggctgaggattacagtgaaactgaccattcagaacagacaggcccagattgaggtggtgctttcttgcctctgccctaatcatcaaagccctcagggaaacaccaaagagacagaaagaaacagaaaaaaattaaacacgtgtgga

SEQ ID NO: 520405 - DNA, 649 bp, Homo sapiens
tgtagtgcatatattaagtagctagatttgttctatccacgatgtatatttactatctaaaccatcatgtatgttacattgacgataatcacagctttgatcctgttagctcagtttttaaacaatgtcaaatattccaactagactctctgttgtagtttttgaaattacaacttggaggctttgaggaactgattagaggtctcttttctgtttcaggctttcatatccaaaccatagatctttagaagtaacatctgttaattaattattaataaatagtttgagtctttattaattcatggataacttgaccattttctctctccttttgcttagataatcccagatcatggccgggcacagttagtcacgcctgtattcccagcagtttgggaggccgaggcaggcagatcacttgaactcaggagtttgagaccagcttgggcaacatggcaaaaccctgtctctattaaaaatacaaaaattagctgggcatggtagtgcatgcctgtagtcccagctacctgggaggctgaggtgggaggatcgcttgagcctgggaggttgaggcttctgtgcgcgatgattgctccagtgatcacgccattgcactccagcctgggtgacagagtgagaccctgtctcc

SEQ ID NO: 520406 - DNA, 571 bp, Homo sapiens
  misc_feature (4)..(4): n is a, c, g, or t
  misc_feature (84)..(84): n is a, c, g, or t
  misc_feature (116)..(116): n is a, c, g, or t
  misc_feature (137)..(137): n is a, c, g, or t
  misc_feature (139)..(139): n is a, c, g, or t
  misc_feature (143)..(145): n is a, c, g, or t
  misc_feature (148)..(148): n is a, c, g, or t
  misc_feature (152)..(152): n is a, c, g, or t
  misc_feature (171)..(171): n is a, c, g, or t
  misc_feature (176)..(176): n is a, c, g, or t
  misc_feature (178)..(178): n is a, c, g, or t
  misc_feature (182)..(182): n is a, c, g, or t
  misc_feature (184)..(184): n is a, c, g, or t
  misc_feature (314)..(314): n is a, c, g, or t
  misc_feature (319)..(319): n is a, c, g, or t
  misc_feature (321)..(321): n is a, c, g, or t
  misc_feature (336)..(336): n is a, c, g, or t
  misc_feature (364)..(364): n is a, c, g, or t
  misc_feature (366)..(366): n is a, c, g, or t
  misc_feature (390)..(390): n is a, c, g, or t
  misc_feature (402)..(402): n is a, c, g, or t
  misc_feature (405)..(405): n is a, c, g, or t
  misc_feature (451)..(451): n is a, c, g, or t
  misc_feature (456)..(456): n is a, c, g, or t
  misc_feature (461)..(461): n is a, c, g, or t
  misc_feature (467)..(467): n is a, c, g, or t
  misc_feature (533)..(533): n is a, c, g, or t
cagncaggtccccacggtggagccgagtgagctgggagggatgggtgcttacttcgtttcaaagagatctacatatctacaganaggatggagaccagaaaggaattgggaaatgnaatcatgagggctgcccctcncncccnnnacncccngcccaccccccacgccaangcatnanaaananacttcacaggatgcacagaggaagccagaggtgtgggcgggcccggggggccggggctgcgagggacctcaagggcgaatgccactggcctgtccaaacgaggcaggagaaaaaataaaaagaggaaaanaattnanaacataacgattttnatttcgtcagccgttcccccgacgcctntngaaactggccatttcgttttttantaagggcaaaangtntcctgctcaagccacccctccgctcagggaaggtcactgcccggcnaagcntcgtnttttanggcggtgccttccctgggcagaaaggggctgccccggccctggggctccatggcagggcacaaaangaaaggtaaaacccaaaaaaggaagggggctcctgggg

SEQ ID NO: 520407 - DNA, 950 bp, Homo sapiens
ggtcaacccaacacagagcatgctcataaggaaaggtttcaaaaaagtaaaaggagactcggcaaatctgaccccgcctgtttaccaacaaagcatcacctctcagcatcagccagtattagatgcgcagcgccggcccagtgacacatgtgtaacggccgcggtaccctaaccgtgccaaaggtagcataatcactggtgccttaaatagggagctgtatgaatggcatccactgagggttcgagctgtctcttacttattaagcacagatgaaagtttgatctgcaccagtgaagaggcgggcatgacacagctaagacgagaaagaccctatggagctttaatccattaatgcaaacagatacctaacaaaaaccacaggatccgtaccatgtagctcgaatagtctcgcacttaaaaaacatcttccgcgttcgcgggcggagccttccagggatggcgaggaacctctaaaatcgtcacgatgctaggtgacatgctataaggatcttcaaccagtgcaaaagacgaactagtatactcaatcgatccactgacttgaccgagcggaacaagttaccctaggggatgacagcgcatatcctagttctagaagtccatactcaatcgaatatgggtctcacggacgctcgatgttggatcagggacatgcccgatggtggcagcgttatgtacatggttcgttagtttcaacgagtacaagtcctacgtgatcctgggtgcagaatcggagtaatccaggtcggttctatctagttcaaaggctccctgtactaaacggcctgagcaataaggcacttcaaaaaggccttccccggaatgtttctctcactgggttatgccaacccccggaaccgttgttagtgggagccggaatccataaataaacttgcagcgtcatcctttaacaccgggaccttcttttgca

SEQ ID NO: 520408 - DNA, 140 bp, Homo sapiens
  misc_feature (135)..(135): n is a, c, g, or t
gatactgcaacttgaattctgggttatagtaatcctcccacctcggctccccagcagctgagactacaggtgcacatctcaatgcctaggtaatttttaaattttttgtagagatggagtcttgtctatgttacnccagc

SEQ ID NO: 520409 - DNA, 1079 bp, Homo sapiens
  misc_feature (405)..(405): n is a, c, g, or t
  misc_feature (408)..(408): n is a, c, g, or t
tctacccagtattttcctgtttcctgtccatgtcatatgtagcactagatttacatatttatacatatctgttgggtatataattgaaagtagaattgctgagataaaaatgcatgcttaattatgattaacttcttgactttttttttcttaatttttaatttttttaagttttatttatttattatatttattttattttttttggaaacagaattttgcccttgttggccaggcaggagtgcaatggcatgatcttggctcactgcatcatccaactcccaggttcaagcgatggctcacgcctgtaatcccagcactttgggaggccaaggcgggtggatgttctgaggtcaggagttcaagaccagcctgaccaacatggtgaatccctgtctctactanaantacaaaattggtggacatggtggtgcatgcttgtaatcccagctactggggaggctgaggcaggactttaaatttttttgaagtgtattttcttaatttccaaaattaaagatattttagttacattttttaaatttcccttacttctactaaggctggatcatatattctttatgatattgaatcttttcaaatttactgagtcttgatttatgtcccaccacatgtcacttcaaataattattaacaattcaatatgctctaagaaaatgtcttttagttgatatatatgatacatatatatatgcatgcgtgtgtgtgtatcgtgttacaagtttccattcgttaactgtgttcttctaatgttctatggcattactcattatttgctcctctttttaaagtttgtttagatttaatggaagtatctgtgtatttacatttaaataaaccaccttattttatatttcttttatattggtccaacctgttttattgtacaacctgttttaaaagtattcctttaggtgatggctgtcttacatgaaaacattattgatagtagttataaatgctgaactgatggtagctggagtgggtagacattttgcatgttgtatcctttggagtataaataaatcaattattaaaaatttaacttattaaaatta

SEQ ID NO: 520410 - DNA, 174 bp, Homo sapiens
cgtctgtggggtgatggttgctctaaggtctgggtagcctgcgtagtgccccaccatggtctcgtgtaggatggtggctttagacctcaagctcaggaacaggccggctctcctgaacctctgcttctcacttgcggagtgctccacgccgcagtctgccaggggccttgcgtg

SEQ ID NO: 520411 - DNA, 364 bp, Homo sapiens
ctctcgtactctagagatcacgaacattgtggtctatagtcatagatattgatagtatgctgggatggcgctaatgaacccaaccaatttccgaggtgagaccactcgaaccccacagtgccactggggagccagccagtgtgccagagcagccacaaaagaaactccggggaataatcaaatcggaacatgttgtcatcatcttccacatagttctcattcaggagggtgtacagttcttatagcacaccacgatcgcccagtgccaaagcatcccaggtgaagcccctgggccagggttgtaagggcttcctggcggaatatagtcctatgtcaggctccacggggccatggggtgtcacca

SEQ ID NO: 520412 - DNA, 651 bp, Homo sapiens
  misc_feature (52)..(52): n is a, c, g, or t
  misc_feature (70)..(70): n is a, c, g, or t
  misc_feature (119)..(119): n is a, c, g, or t
  misc_feature (168)..(169): n is a, c, g, or t
  misc_feature (172)..(173): n is a, c, g, or t
  misc_feature (181)..(182): n is a, c, g, or t
agttaggagggaaaaaccgaattagcttaaaacctgtgtgcatttaagagtnactaatgttggtaacttntatgccttcactttacaaattcaagccttagataaaagaaccgagcaantttctgctaaaaagtccttgatttagcactatttacatacagccatacnnacnnagctattnncgtgaagtggaggacctattatgagcttgaatttattgttatatcatctttcacttatacgtttaactgtctggttgcgtttctagtcaccctcttctaaatcttcttaaatgtatttgtctacgcaattcttggggctaagaactttttttattgacgtactacttatctctcttgacagtttctacgcgggtcaacttatgcctttctttttaattgaaacatcgttgaaagtctcatactgattgggcatactggcaaaaccaaagagaccaactacagaagaaagaacaaaagacccaccgacaacaaaaggcgagggaagcgagcacgaacctactaaaaagaattcaccaaccgcaagggagcacaccaagacgattagcccgaggcaacgacagcagacacacgtgagaaaacaaagcggggcccaccccaaagaggacgcacgacaaaaaaacagcaaagg

SEQ ID NO: 520413 - DNA, 992 bp, Homo sapiens
  misc_feature (22)..(22): n is a, c, g, or t
gggagggcggtgctccgcgggncggtggaggttgcgtatcgcttcgcagaatctactcaggcatgcagctgagaatgagttgagggaaagtgctggtagctagggctctgcaatacgccaaggataacgtgcagccgaaaataatgatatcgcccacctatctagcttcagtgtgaagatggccacgttgcaagatgcttgctgcctcgctactttgcctaggagtacgttcattcatgctaagagctcagacgttcattgtcgtgttaaggaggatattatcaagcgtccattgtctaacaacagctagttcatgctcagtccgttaatcgttggtggttggaccatctgcattacactacgtacatcccactagattgatttgagcaggattgcgatggcagcggcggtgtacagtcacatttggtgcataatcggctattgccgtgattttgtcgccgactcgggagcgcccttaatgtgtaaccgttagaagacttgcctgatagccaattccacagccggctcgcttaaccactaaacaacggccgtgatgacggtgacgaggaaacagcaaggttttgctaaggtcttattaataatgcattttcaaggtcatgacgtaacataacggtacttgagagcgtatttgctgatattgtactttggggatggaaaccaatcaacctctctgagttccaagcactgtcaatctccccgttctccagactttgccagctcctttaagatttgtcctgtgacagcagccccgagcgttgtgtcctggtcacccctgtccgaagaacctttctactgctgagctgtgggcaaaggtcaagcctgtgttgccagtgcgggccaagactgggccaagctggaggctggctgctgaagcaggctcaccggggcaaggaccggcccttcgttgtcaggggcactacctcactggtgggggtcatgccccggaggaggcttgacccaaccacaaaacg

SEQ ID NO: 520414 - DNA, 2720 bp, Homo sapiens
cgggagatccagaagtgaaacgccaggctctctggaggccaggagatgactctgttgacgttcagggatgtggccatagaattctccctggaggagtggaaatgcctggacctcgctcagcagaatttgtacagggatgtgatgttggagaactacagaaacttgttctccgttggtctcactgtctgtaagccaggcctgatcacctgcctggagcaacgaaaagagccctggaatgtgaagagacaggaggcagcagacggacatccagagatgggatttcaccatgctactcaggcttgtcttgaactcctgggctcaagcgatctgcctgcctcagcctcccaaagtgctgggattacaggtgtgaaccaccgtgcccagccaggcctcaatgtttctgtggacaaattcactgcactgtgctcacctggggtgctgcaaactgtgaaatggtttttagagttcagatgcatcttctcactagctatgtcttctcattttacccaagaccttctgccagagcagggcatacaagatgcattcccaaaaagaatactgagaggatatggaaattgtggccttgataatttatatttaaggaaagactgggaaagtttagatgagtgtaagttgcaaaaagattataatggacttaaccaatgttcatcaactacccatagcaaaatctttcaatataataaatatgttaaaatctttgataacttttcaaatttacatagacgtaatataagtaatactggagagaaacctttcaaatgtcaagaatgtggcaaatcctttcaaatgctctcattcctaactgaacatcagaaaattcacactggaaaaaaattccaaaaatgtggagaatgtggcaaaacctttatccagtgctcacactttactgaacctgagaacattgacactggagagaaaccttacaagtgtcaagaatgtaacaacgtcattaaaacttgctcagtccttactaaaaatagaatttatgccggaggggaacattacagatgtgaagaatttggcaaagtatttaaccagtgctcccaccttactgaacatgagcatggtactgaggaaaaaccctgcaaatatgaagagtgcagcagtgtctttatctcttgctcaagcctttctaatcaacagatgattcttgctggagagaagctctccaaatgtgaaacatggtacaaaggttttaaccacagcccaaatccttccaaacaccagagaaatgagattggagggaaacctttcaaatgtgaggaatgtgacagcatcttcaagtggttctcagaccttactaaacataagagaattcacactggtgagaaaccatacaaatgtgacgaatgtgggaaagcctatacacagtcctcacacctcagtgaacacaggaggattcacaccggagagaaaccctaccaatgtgaagaatgtgggaaggtcttcagaacttgctcaagcctttctaaccataagagaactcattctgaagaaaaaccctacacgtgtgaagaatgtggcaacatctttaagcagttatcagacctcactaagcataagaaaacccatactggagagaagccctacaaatgtgacgaatgtggaaaaaactttacccagtcctccaaccttattgtacataagagaattcatactggagagaaaccctacaagtgtgaagaatgtggcagagccttcatgtggttctcagacattaccaaacataagcaaacccatactggagagaaaccctacaaatgtgacgaatgtggcaaaaactttacccagtcctcaaaccttattgtacataagagaattcatactggagagaaaccctacaagtgtgaaaagtgtggcaaagccttcacccagttctcacacctgactgtacatgaaagcattcatacttgagaaaaaaataaacaaatataaaaataggcaaagccgttagtatctgctcgcatcccactttacatcagagttcagacttaataaagttatcataaatgtaattactattgaaagacctttcatgaaatataagtctccagagcacacaagagtatttcttctgaaaaaaatgttacaattatactagatggaagacttgcatcagttgcttaaactttcagaaaatttgtagagaaacccaacaaatctcataaatgtggaataacatttgttcaaaaatgatagcttagaaaacactagagttcatactaaaagatattttgcaaatacactaaatggaaaaataagcaaaatccaatttaagtaaacaatggaggatttgaaggagaaaggaatagagcacggacacgttcagaaatgacactgaatccctgtgttgagtctacagagacatctagacttaaaatagatcatttatatttaagtttaaaaggaggatgagactgagtttttgtagagttataattacattcaaaatatacttttttgcattgaaaaaatgttaaatttttgaaaagcgaatattgatgtcattctattctcaaatcagtagatgctgtgtcttcatttctagtgctgatgtgaaaacacatggtcagttgttgctgcgtcagagatatgagaaattcttttctcttaggtgtgcatcactgatatacttgtccgtgaaaggtgaaagacactgaaatgtaagatgcgtgagtaaaatcttggtagagagaaaa

SEQ ID NO: 520415 - DNA, 638 bp, Homo sapiens
tgcaaaaaactcgtttgagaaatcactttcattccgttagatagaaagattattgactatcatctatctagcccagcatgtagccactgctgatttcacatatttattacatgcctcctaagtgctaggcgctactctagatgatgtgactataccataacataagactgacttggacatactaacctatatcaatcagccagcacatatgttcacatggtgacaactgctatgctcagaattagaatgaatgatgtcatcatcagtgactgggtatctagattgtacggccagaaatgccctctctaaaatgatggcatttagcatgggctctggctagcaagcaggagccgaccatacacagagtggtatcagtgcactccagtgtcccagtgggcccgataatggatgtaagcattaatgcaaacttatgctgttgtagagacagaggacgtgtgcacctgcagcatagtagggtagcagatagacagtacgcagtggtcttagacaggcgtccacaactgcttcatgcagagctgggtgtgatggttcacccctacaatccaagccctttggaaagccaaggtggtcgaatagcttcagtctcggagttcctaaagccgaattcctgcagcccg

SEQ ID NO: 520416 - DNA, 204 bp, Homo sapiens
ctggatacacacgtgtgctacatacctgggtattttgcattctcagtggagagggagtttcaccatgttggccaggttggtcttgaactcctgacctcaggtgatcctcctgcctcggcctcccaaagtgctgggattacaggcattagccaccgtgctcagccgcaaaattctttatgaattttacacttgtgggcgctcgtg

SEQ ID NO: 520417 - DNA, 226 bp, Homo sapiens
ccaggactggaagaaagcacaagtctcgtgtgccagggcagcgagggcgccgtcggccacggagggggccctctgccaggactccggccccgcgccgaccgtgtgcagcaccaccgtgccagggaccgggccatggaggccaggaagacagcgaggcgccgagacagcgcatccggtgacgcagccaaggcagaggccaagaaagagacagaaccggctgcggccg

SEQ ID NO: 520418 - DNA, 332 bp, Homo sapiens
  misc_feature (24)..(24): n is a, c, g, or t
  misc_feature (28)..(28): n is a, c, g, or t
  misc_feature (46)..(46): n is a, c, g, or t
  misc_feature (51)..(51): n is a, c, g, or t
  misc_feature (59)..(59): n is a, c, g, or t
  misc_feature (74)..(74): n is a, c, g, or t
ccgtgtcccctcccccagtaaagncacnaaaagaggactgtcgacngccgnaaattagntttaccctatgtccntaaaattttaacaattgaattacctcagtatgtactcttttgtcttcctttctctcaataaagtgccctatgagattcatcctaccttgttcccatgtgtcagtagttcataatttttattgttgtctagtatccccttgtatcaatgcactacaatttatttatccattctcctattgagggacatttgtgttgtttccagttgttggatatatgcattgtcaatctcttcaatcagtctgtggcttgtcttttcac

SEQ ID NO: 520419 - DNA, 193 bp, Homo sapiens
acctagtgccacattaagctcactctgtcttactgaggaggagtaggtagtggacgtgagtcttcctatgggtaggagtaggatttctagctgccacctccagcacataatctcctctgtatatgtctttacctaccctgtgtataggatcccgcaattctatatactataagagttaaataccaatgtacat

SEQ ID NO: 520420 - DNA, 392 bp, Homo sapiens
ttcattacgcacatctgacataggaatgtctccaacatggcagtgcctcactttcctccctcccttaagaccacaccagataaccagactccacaagcacaaatacttgcacccattttctctgtaagggtgggggtgggaccttcaggctgctatctttgccatctgatgttctaacttgtgttttacgctcctcttgatcgcggattgtgtcttttatagatttgatctcttttattgtctcatctgacttgttcttcattttgcccgctgcccgtctctgtggttttcttggggattcttatcaggtcgcacttcttgtttgcggtgtgcttgctatccggaatgttcttcttgcaccagcttgagatccctttattctcctgcctgaa

SEQ ID NO: 520421 - DNA, 139 bp, Homo sapiens
aagtgcagaagggctcttcaacttttctttagacgatatcctctgtgccccaagttagaaaaagagttgcagtgatagtagtcctccttaaacagtcacagactcaatctggaaagagtggcagaaacccctctccccc

SEQ ID NO: 520422 - DNA, 326 bp, Homo sapiens
taagataaacatatgctatcattttttcttctgtgaacctgaaagatatcatttgggtcatagctctgctctgttcagattatgttaactctgagtctgtccaaatgagtatacacttccattctccacatttaaacgcaatcatattttcaatttatactatagtatttcttactattatgaccaagaattttatcggcattaattatttcacgtgtcgcttagttgctccaaatcactgtaatcatcaaaatgatgcatattgtcacactactattaactaggcttcagtatatcagtgtacatttcattgtgttaaatgtata

SEQ ID NO: 520423 - DNA, 101 bp, Homo sapiens
tggtcttactagaggatccccagcgctgcgcaataccatgtatttggggaggaggtccctctactggtcatggagaccagattctcccctcgcagcagcac

SEQ ID NO: 520424 - DNA, 880 bp, Homo sapiens
agccggaggtgcgcggggcggcgcgcgcgcgtgcagtgtcgcagctgtgtgctcgagtgtgctggcagtgtgctggcgggactggctggggatcgccgtggactagcgtcatgtgggctgcctgcattccctgcatcagagccgcgagtgtgaccagactaaatcctgtgcctgtcctgtgccctgcttccatccatctgtggcctgctgccctgtgatccagctgctgggtgcctggctgttgctcccttcgagcgtacatcgtgcaggccaacctgcggagaattacggcggcgctttgactcccgggctcagtgattacacgactgtaccccacgtggttagccccgtgcactagccctagtacggtccgtattcctcgagctcagaaccgtaggcacccgtgagccatttggcgcccttggcctagcatatgaacacgctgtatcatttgggccaccccactaggagctacacgcctggcacagcaagattaagagcacaggagcaagacaagaccaaacaaaagaagaaggataatacatgcacagacgaggaagactaatgcgcacctcacaataaataagacacagagagtagcactgcacagccacactagaactagcccagcaccacatattgcgtcacacatgattcactaaaccgaacaaatacacaccaccaggaagatcagacccaacgactcgacgaaatatgcagacccatcgtgataccaacgacacagtccacaatattctgagaagaatacgcaagacacagcaacaacatgaaatacagaccacttatgggcacaccaccttcacacaagcacccaatagaacactacaggaaacactcaagtacacctagcaaacaatcg

SEQ ID NO: 520425 - DNA, 108 bp, Homo sapiens
agattgcgcgcttggttgatgagcatctgcgcttcgttctgagctggcggatctggttgttgatctgctccagtgtgcgaaccgccgtgagcgtgttctgcactagat

SEQ ID NO: 520426 - DNA, 433 bp, Homo sapiens
tttacaaccccttgatcacactctacattctatgaggtgactacagtcacctactagtattcccaagtacctagcacagtgcctagtacaagatatacattcaatattttcttttttaaaaaaaacattttccccccgggtgcggtggcttcgcgcttgtaatgccagcactttgcggaggccgatggcgggcagatcacgagttctagagatcgagaccatcctgggcgacatggtgtaaccccttttctactatatctacaataattagctgggcgtgctgccgggtgcctgcagtgccagccacttggagattacaggcataagcgacaatgcctggaccccttaaatattttctaaattattaacccaaattggtacttaattactttggatggaactcagaacctcagaagacacaaaaaaattcaag

SEQ ID NO: 520427 - DNA, 146 bp, Homo sapiens
agggtaagtctgaagaggtgtaggtaaatgtaaggagcacctcccggcagatcaacgacatccagttatccagggacatgaccatgtgagtgaccgcgtccaaggacaacacagccaagctttttgactccacaactcttgaacat

SEQ ID NO: 520428 - DNA, 382 bp, Homo sapiens
ctcctgttgggtcacaaggcctggctgtggtggctgacatctgttggtatccctgtcacaggctgaatgtttgtgctcccccaaattcagatgtggaagccccgaccctcagggtggctgtatttggaaatggagcctctaaggaaatagttatggttaagtgaggttctcagggtgggcccctgctctgctaggattagtgtcctcacaggaggagaccccagagagtgcgctgtctccgtcacgtgagctctcggccagaaggcagccgtctgcaatccaagcagggagccctccacggaaatcaaccctgccagcaccttgatcttggccttccagccttaagaactatgagaaaataaatttctgtgtttaagccaaa

SEQ ID NO: 520429 - DNA, 558 bp, Homo sapiens
  misc_feature (82)..(83): n is a, c, g, or t
  misc_feature (270)..(270): n is a, c, g, or t
  misc_feature (325)..(325): n is a, c, g, or t
  misc_feature (332)..(332): n is a, c, g, or t
  misc_feature (385)..(385): n is a, c, g, or t
  misc_feature (436)..(436): n is a, c, g, or t
  misc_feature (458)..(458): n is a, c, g, or t
  misc_feature (483)..(483): n is a, c, g, or t
  misc_feature (490)..(490): n is a, c, g, or t
  misc_feature (544)..(545): n is a, c, g, or t
ctcgttcccggcctgtttggtggccgcgatccttcgggcaaccctcttgatggattcggcgtcggcgaccgaggacccgccnnatttctggacgactcgcgtcatcgctcctcctgcatgtgcggacactgcagtttaacctctcctgacggatgagacgggaaccacctcgcccagcacggatattgacgggcagaatcgtgttctcccacatgggatgttccggcatcgtgagcagtttggccgaactggcctcgagccgtcggccanttcacttacagtgtccccatgagcaccgttggtaggagcattctccatgcctganttctcantgacgtggcagcggggcatacacgccgtcaacggcgatcgcaccggtgacttnttctcatggtcgacggacggatcaccgcccagatcacctgttaacagctgngcccgggccttgtgggtctgantggtggtgctgatccaccccagctnaccgagnacctgcacacatttctcatggaacgtgtgctcaccagctgcgctcggagggctnnaagtgcatgcctc

SEQ ID NO: 520430 - DNA, 319 bp, Homo sapiens
  misc_feature (310)..(310): n is a, c, g, or t
aatgtatcaaaaagcatcacagagattggggctggttcattggaagaggcaggtaggcttttgatgtcaggcttacggggaactgaaaaggatccttctgggacttggctaggtaattagcattttagtgtgcgcatgtgatgatattatccgtaatgaatgtatttcaggccaaatggcggtggccctcacatccaacagctcacatctttgaaaccagtggtaattgatctatgggtattctataagtttctatttatttaggcagcacccatttatttctgtggtatcatctgctgaacgattttgngggtagatg

SEQ ID NO: 520431 - DNA, 237 bp, Homo sapiens
ggtcgactatactaatacctttttttaaaataaattgaattagctccaagtctagtaacattaacaacaagatgctagttcaatttattttaaaaaaaggtattagtataaatgatagaaggtatgtcactatcctaaaatttagaattcatgatagtggatactatttgctatgtattcatattttccaggtaaatcaaggaacggcagctagcatgccttatttcaatgtcgacg

SEQ ID NO: 520432 - DNA, 991 bp, Homo sapiens
gttacacgtatctgaaaactggagggcttcaaggctctcatcggtgctcagtacagcggggctcagtgtccgcgtgctctccagtcaccatcccacttccattgttggtccaaagcaactcgcagccctgaaatttctcacgctaaatttcctgccggcaaggtacccagtgatttagagggtgatgataggattactgtagtgtttgagagcaacggctcgattgcctacttatgatgtagctaatgaagaggagtcgtgcaggggaaggtacttccagtaggcagcaagtccctagagtgtgttgctagctggagtgaagtcttttgcatgactctctcgattatacgctgcccctcagtcctagtaccttggtggtgttccctcgagcattggggcatcatgtgaccacaacaaaacaggcgcgacatgaggaatgccatggaggacggaaggtgagggcgaacttcgttggtgagcttgctaggtatttgcatataactattgcatacgaacggagtgcaacgtatttatcttgcggtgggggcagagaaccggagttggacagtgtgtgcgttgaactagtcgacaagattgttgtcttagcgacgctcctggtttgtgggcatctaagttaatgcgacggttttcatacgtaggccctttcttttccgtcccaagtggcctttattctcgcaaaattatctcaatagcccgcattgggtttttcgcctcctaacgcgtgggctatttaaccaccaaggcacccaaggtttcccggggccgtggatcttgtgcggggggaaacgctgggagataactttgttggttggatgacatggaattcgcggccccaaggtttttcgaattgggtgttagaaagaaaggctcttttgcaatgaagggagcccccaaaatggcttaattacataaagggatgaactaagccacgcgggtgtcacatcggatggacacggggctttccaccgtg

SEQ ID NO: 520433 - DNA, 1108 bp, Homo sapiens
ggagagagacactgtctcaaagaaaaaaagaaagaaattaaaggccagccataggtgtttctttttttctttgagacagtgtctctctctgtcacccaggctagagtgcagtggagcgatctcggctcactgaaacttctgcctcccgggtacaagtgattctcctgcctcaacctcccgagtagttaaaattacaggagtctggctaatttttttttttttttttttcctgaaagggacgcctggcttctggtcgcccaggctggagttgcagtgtgattgcaatcttcggctctaaacgtgaaacctctccgccttcccgggtttcacgtgtgatttccccataccttcagacctcccgaagttagcgtgggactacgggcggcccggccacaaaacccggaactaagttcattcggagatttacagctaaaggggggggttcacaccaatgtggcgctagagagtgcgctctctcgactctcctgtgattcgggtatatccacccggcctcggagctcccaaagctgcgtggagaattacaagcggcatatgtatccacaccagggccacagccaaattccgcgagattacacacgataaacgagcaaggggctacttcacccaatcgatggcgccacggcttgttcctacgaaacgtccctaaacagattcacgagaccgactcttgtgcctcgccctttgggcattcccccaaagtgctgcctgcggcaccatccacggagcccctgcaacactcatacggggacccctggacccagccggggccccccgtcaacaccgcgcacggacaccaccacgcggacataaaggccccccgggccatcaagcgaaccatcccacagtcggcaatccaaccgcgcaccatacaacacggacaggagacacacatcggggcacaaacaccacaacccacgcccaacccccaccaccccgcacacgaacaacaaacgccaccacgaccacccaaccacccccgcgccgccccaccccccacccacccacgctcacagcacaccgcgcccccccgccaagccagcaaccgccaagaaccaaacacccccgacaccaacacggcccacgaccc

SEQ ID NO: 520434 - DNA, 223 bp, Homo sapiens
ttcctttaaaccaccacaatgaatgaaaatgtatgcatgagtgaataaatgagccaatatatttattaaaaatggcaaagattccatgttgatatgctatcaattgcaatctaagaggtgcatgcaattggggagggtcgcagtggtgtgccaccacctactatcttgggttaccccagagtatttttccattcaggcttcttcttgaaagcgcttgtaaacc

SEQ ID NO: 520435 - DNA, 367 bp, Homo sapiens
  misc_feature (211)..(211): n is a, c, g, or t
ggggcgacctagaggacccggctatcacatatcccaaagtatatttacttgcataccttgaaattgccctacaaagtctctgtgggaaaaatccatattctatagagaatcccctttccctttggtttccttccttccttcccagatacaagagatataatcaactaagagccaggcacccttttaagtctgataagaaatattttacaanctgctctctctgaagtctgctatctgagagcttcctctgcacaataaaacttggtctccacaatcctttatcttaacctgaacatttcctttctgttgatcccaggtcttcagataaactcaaccaattgtcaaccgtcaaccagaaaatgtgata

SEQ ID NO: 520436 - DNA, 176 bp, Homo sapiens
acgcgtgattccatgtcagacaagtctgaaaatctatgaacagatgccgagttcttgactcagctcacgttttcacgtcgatgaatatgaatctacgtcacaaatttagcgacgtgaattagacgttaagcatggggacgtcgacttttggcagcagcctcgaagtgaagtagcgg

SEQ ID NO: 520437 - DNA, 464 bp, Homo sapiens
tcgactctaaggatcccctctagtagttctagatacttgagctattacttcctgcattctttgtcttgcagattcacctactaaccttgatgaatctccatctggtacagtcaatggccatgacttttggctatctgattctcaagatgtctaacttcgtcttataactctttctcaacaacttctctctccaatttaaattctttctgcgtgagcagtctgaatagccttcactctttttcacaacttaagcttctgaattatttgtccttagtcatagctccctacgtcgggagtctgtgactaacccaggatggacacatctgttacatgacaaggcatacaggtgacatgacaaccactgagttacgctttgggacagactggagagaagtggcatatggattaagctagtcactaaaaatcaactcagtctagcacccacattcacactcagaccctca

SEQ ID NO: 520438 - DNA, 318 bp, Homo sapiens
ttcggtctcactctgttactcacgcggggatgcacaggcacagattcggttcactgtaacctcaccttccaagctcttgcatttctcctgtctcagcctcccaagtagctgggattacaggcacacaccaccatgcctggctagtttttgcatttttagtagaaatgaggtttcaccatgttggccaggctggtgtcaaactcctgaccttaaatgatccgcccgcctctgcctcccaaagtgctgggattacaggtgtgagccattgcacccaccccaaaagatgggtgtttaatgatactctgctaaactgtgaat

SEQ ID NO: 520439 - DNA, 273 bp, Homo sapiens
  misc_feature (44)..(44): n is a, c, g, or t
accgtcgcacagcttctccagcctgggcacagagcgagactccngtctcaaaaaaataaaaataaaataatatttggggccacagctggacttggtagctcacgccgtgtaatcccaacactttgagaggcccaggcggggcaatcacttgaggccaggagttcgagaccagcctgaccaagatggtgaaaccccgttactacaagagatataaaaattagccgggcgtggtgacacacgcctgtagtcccagctacttgagaagctgtggcg

SEQ ID NO: 520440 - DNA, 889 bp, Homo sapiens
gtgttgtgccgtttttgtctgcgcttttgttcgggtggttcctctcttggctgtttgtcggtgggccacagggtccaagggccggtccttctcacagaggactttttggggaggtcacacgtcccgccattgtgtccgtagtacccaggccccaccaattgtttgggcccgccgcttcctccgagtattttgggaccttgatatgcccaggccccgggggatcttcacgcactttacgtgcccccccgacccccaggacggcattcgtgtttgacccgtccccgatgtcatcctccaggaccacctgaaggctgcgcctcttctgagggcacggggccttgcgggatgggccccccccgactttgtacccccccacgccctgaggaagatgggggccagaagatcacgctccccgcctgttccccccccgcttttctcctctttcctctctgttgttctcagctccccctgtcccctcagctcccgacgtaggggaggggttcccccggcctccctgtttgaagcctgcccttgtctgagatgctggtgatggccctggtacccccttctgggcatctgttctggtttttaacccttgtcttgttctgtgatgaaggggaaggggggcacacttctgagtctcccaggctgcgtcttgaggggcccctgcttctccacgcctggacccccacgctttgccccacaccccgcccctgccccaacgccccagtcccaaagtttacagggagcctcctgccccgtccccccaccccagccgctcggaggcccccaagggaaaagcaccagaagcgtgagacgccccccatcctgggaacccccgtccccctgctcatttctcgtagctttttaaaaaaatgaaagttaagga

SEQ ID NO: 520441 - DNA, 138 bp, Homo sapiens
agggcggcaagcactggctaaggcactgggccgctcaacgtgtttgcaagccagaggcactgaggtttccccaaaaagggacactgtctgtatggaggactctgcccggagatcgcacctggggtacgagctcaattt

SEQ ID NO: 520442 - DNA, 263 bp, Homo sapiens
cctgagatcagccactgcactctagcctgggcgaaagtgcgagactccgtctcaaagaaaaaaaaaaaaaaaaaaaaaatttacccgggttggggggcttgtgcctgtagccccagcaacccggggggcgggggcatgagactccttgggcccggggggggggggtttgcggtgagccaaaattgagccattgcactcaagcgggggtgacagagcaagattctctcaaaaaaacaaaaaacaaggccattttcaacccaaat

SEQ ID NO: 520443 - DNA, 1548 bp, Homo sapiens
  misc_feature (1)..(1): n is a, c, g, or t
  misc_feature (26)..(26): n is a, c, g, or t
  misc_feature (829)..(829): n is a, c, g, or t
  misc_feature (1146)..(1146): n is a, c, g, or t
  misc_feature (1230)..(1230): n is a, c, g, or t
naacgttgttctctcgtgggggagtnaaagatggttgttctcagcgtggttgtgctgtttggtgtgcggccccccccgcaggagtgggtggttcgttcttgtacagtggtcgtctcgttccattactctctagtgcctgcttgtggtgctggggtagttgcctccctcatactacttctcctcgccctgggggggcgcccatcagtttgtggtcaaaacggtgtagttttctcccttcttcttccttgttgcgggggcccgctacttacgtcctccacccccccgccgggtgtgttgctcaggcccgcctccctgttgtgttgtctttttgggggtgccgccctccgagagcggtcgggcaccaccatcttctcggatgagtgatcctcctccccgccgggggcttgtattttatttgtcgccacgcagtgtgtttcgcgccagcacgccgtgtgctttaggacaacaaacaaccgcccttgtggttggtcgtcatacaccatgatcgtggatggcgtctcttactcttccctcgcatatctcccgctgttgtttccaccaaagggttcttcttcgcgagattttaatatttttgggggcgcccctcgctccccccccactagggggttgtacctcaccaatcttggggggctctctctctccgaggagtggcgtcgtcctccccccttggggaggggcgccccctcgtggggctcttttgagcaccaccgcggttcgtcatctgggggagctcgtcttcgcgttgttcgcccccccctcgtggtgtctctccccgcggatttttttttcacgcgccccacacccgcgngggtagcgcacctctcttcttgggagacactcctgtgtcccccactcgggggatttccctctgataaaacttcgcgcactctctctgtagccccctctcttttcgccgctctgggggcgtcttgcacacacggagacgcctctgttgtgtgtgtgttttgtccccaccgtgtaaccccacaaacccctctgggaagagccccacagcgcacccctcagacacacacacgcacactcttgtgtcccacagagagagaaagagaaataaaatgccccctcttataactcatctatagaaaaccgcgcgagaagaatatntgagaaccacatatatcacactctcaccgaggggagattctctctttggggaacacctcgggcttatatttctttctctaaagnccaccccgccccacaattgtgccctataaccgcaaatatattttttttataaggagaaaattaaaacaccttatgttaaccacaaattttttttttctttataatgtatagagatgtaaaaattatcccacaggaattctccccttggtctcttggtttttttaagcgtttttttgcaaaatgttttgtaaagccaccaatttttttgtaataaaagtctcccgtgtcttcttccgcgtaatttcttgctgcctgttccctaagagctgagcgccttgccatttctttgatccacccgatgatttaaccttgttttta

SEQ ID NO: 520444 - DNA, 577 bp, Homo sapiens
tcagcctttttgtggctggattatttcactgaacatgatgttctcgaggttcatccgtgttgcagcatggtgtcagaatttccgtcagttttaaggctgaatacttgtccattgtatgtataaagcacattttattagtccatttctccatgatagacacttgggttgcttccaccgttttgtagactgccttttgtgattgctttcatgaacgatgctgctgtgaacgtggctgtgcacatatctcttcaagaccctgctttcactctttttggtcatataaccagtagtagaattgctggatcatattttaattctgtttttagttttttgaggagctgccatattgttccccacagcagtggctattttacattaccgtggacacaagggtcccaatttctgcatatcctcatcaatacattttattttctgggtatattttctttttgtagtagtcatcctaagggatactgaagtctgaagggtccttataattataagtttgctctaaactgaaacaaaaaacagaatcatccacttttacctccattcaccacaaaggaatttaaaactg

SEQ ID NO: 520445 - DNA, 249 bp, Homo sapiens
gtaattcgcataatatttaaaacgtttttcattattattatgtctgttatggtgatctctgatcagagatttttgatgttaccattacgattgtttttcaggcagaatgaactgtgcctatataagatagcaagcttaatttttttaagataaatcactttaagttctcctttctatactgaatcctctactactgacttttatcagttattccattgtttcttaataaaatattatattggctatatt

SEQ ID NO: 520446 - DNA, 483 bp, Homo sapiens
tgggcggaaaaacacaacacagtatcaccctataacaaacgccacaaaaaaaaaaaagggggaccgggggaaaaaaaaaaaaaaaccaacccaccccccccgcccccctaaccaaaataaactacagctctgaccaacaaaatccccgccccccaacaacagcttaaccccccaaattccccacaaagcgccccaaaacccaaccacgcccccgcgaaacacaccccacccccccccctccaccccctcccacacacacttacaccaccccacaacacactcacctcctccgccgccccccccacccacgcaaacctcccacaccccctccccctacccaacacccccccacaaagcgacactctgccccagtccaccctcatccaactccacccccccaccacaccacatcacccccacccgaccccccaccccaccctgtcccgccccacccctacccaccccacccgcgcaccccccccg

SEQ ID NO: 520447 - DNA, 927 bp, Homo sapiens
gtccttgcgcgccgatatctctgccgggtgactagctgcttcctttctctctcgcgcgcggtgtgggtggcagcagtgcgcagccagcctcgaaagtgcacgaatcgacgccggcgatttcgtggacctgtacgtgccgcggaaatgctccggtgggcaatcgcatcatcggtgccagggaccaggccatccattccagatgaagggtggccgagggttgaacaagggtcaccatggcaggttttgacgtggccaagtcgttacacacacctaatgcgtacttcgtggggagtgcccaactcaccgctacgcgcagtggcggctggaagcctcagaattgcattgtccccaattttcctgtccccggaattagtgcgtcccgaagggcgcccgtgaatgtggccaattcggtcctttccaatagagcaacgctttcttgcgacactgggcaccggaaaggcacagttccaccaagggcatttgttgggacacactaaagttgcgggcaccaattacacgttttcagaccatttacagcttggacacataaccccaaagaagacataaggcacaggaggacagagacaggggccaagactaccatatgaatcgcgaaccccgctggcacgatcgacggcacacacatccttggcgacaccaggtctgtgcagacggagagacgtatgtcgtaaccaaaccacacaaatatggcgtaggatgaagcgacgcccaccggtgacgccacagaaggggaccagtagacaaagtgaacacaaggctatgatccccatacaacgtgcgaaggccatcacccggacaagcgacagccaacctcacggcagcgcaacatactcaccagacgccggcgagctgagactactcccacgaacgagaaattaaacacaaacacacgccacctagtggtga

SEQ ID NO: 520448 - DNA, 760 bp, Homo sapiens
  misc_feature (2)..(2): n is a, c, g, or t
  misc_feature (73)..(74): n is a, c, g, or t
  misc_feature (80)..(80): n is a, c, g, or t
  misc_feature (100)..(100): n is a, c, g, or t
  misc_feature (117)..(117): n is a, c, g, or t
  misc_feature (135)..(135): n is a, c, g, or t
  misc_feature (144)..(144): n is a, c, g, or t
  misc_feature (176)..(176): n is a, c, g, or t
  misc_feature (240)..(240): n is a, c, g, or t
  misc_feature (243)..(243): n is a, c, g, or t
  misc_feature (269)..(269): n is a, c, g, or t
  misc_feature (333)..(333): n is a, c, g, or t
  misc_feature (346)..(346): n is a, c, g, or t
  misc_feature (357)..(357): n is a, c, g, or t
  misc_feature (407)..(407): n is a, c, g, or t
  misc_feature (412)..(412): n is a, c, g, or t
  misc_feature (440)..(440): n is a, c, g, or t
  misc_feature (451)..(451): n is a, c, g, or t
  misc_feature (469)..(469): n is a, c, g, or t
  misc_feature (484)..(484): n is a, c, g, or t
  misc_feature (493)..(493): n is a, c, g, or t
  misc_feature (505)..(505): n is a, c, g, or t
  misc_feature (530)..(530): n is a, c, g, or t
  misc_feature (592)..(593): n is a, c, g, or t
  misc_feature (598)..(598): n is a, c, g, or t
  misc_feature (610)..(610): n is a, c, g, or t
  misc_feature (625)..(625): n is a, c, g, or t
  misc_feature (742)..(742): n is a, c, g, or t
gncagaccactccaaaataggaaaagacaatctagtgcaaatagacagacacagtctaggcattgaggaaacnngctgtnttcccagacaagaaaaactncaccccccatgaccgancagctcaggcttcccttncctagccancctaagtagcgtcctagcgaaactctggatcncagcctcagctccagctttgcctggaccttgctagggggggggagggacaggacgcacagaggnggngaggagagggatgtgatgtctttctnaggaaagaaaaaaaggcacagtgatgagccataagaggtgagtcactgagacgcaacaagaggnagtgatgaaagcnaggaataattntcattcacacaccaaatcctagcggcaagctttgacaatgtaacatcttnatctngtggttaggaaaatggacctagagagangatgtggtgtngcccaaaatcacatagcnactaagtgcagtagnactttctanaacgaccaactngcctatccacttggttggaaaattnaaaaaccaaacctgtcgtaatctatctgtgctgccccacccgcctgtttcatgagaagactnnaaatnccaggaggccanaaactcaaacaagancctagccgttggcttatgacgcggtggctactacaaacctacagaccagagcccagggtagtatagagtcccaactctgggccctgactgcaggtcattcaggtcccagtcacagtnaaagcagactcattcagc

SEQ ID NO: 520449 - DNA, 290 bp, Homo sapiens
gcaggaggaatggctttgtgctggcagtgtctcccacaagaagcttctaaatatgacttcacagagatttcttatatctgcaaagatggtacttttttgcatttaatacgtgaagaatttgcttgttcttgtgctcaacgacagacaagacatttttacttgttgtgtgttgttgttcttatgagattggagtgtcgctcgtgtcgcccaagactggagtacagctggcatgatctacggctcactgcaacctctcgcttcccaggttcaatgtgattctctctgactta

SEQ ID NO: 520450 - DNA, 343 bp, Homo sapiens
gaacctttttctagaccagagttcaattcccagaaacgacatggtggctctgtaatgggatccaacgccctcttctgctaagtctgaagacaccgtgtactcacatacataaaataaactatgccaagttaattctatagagttcagccccttgtagagagcattcaagcaacactgccgagtcctctcatattcactcacataaacaacccctttttaatactactttttatattgtatatattcaatgtataaaatggtttgatgattccatttccactggtttataaagtactttgaccaaatgtaaaaagatataataaaaaatgtttatttcctagta

SEQ ID NO: 520451 - DNA, 107 bp, Homo sapiens
ctcggatagccaagatcgccattgcactccagcttgggcgacagagcgagagcctgtcccaaaaaataattaattaattaaaaaaataaaagattgggccttatcga

SEQ ID NO: 520452 - DNA, 540 bp, Homo sapiens
  misc_feature (432)..(432): n is a, c, g, or t
  misc_feature (515)..(515): n is a, c, g, or t
caatgatattcaatatattcagagttaagcaaccataaccacggtcaattttgaagcattttcatcactctatatataaagcaatcacactccattttctcccttctctcagcccataacaactactaatctactttctgtctttgaatttgtccattctggacctttcatataaatggaatcatacaatatgtcgtcctttgtgacaggcttcttttatgtagcataatcttttcaaggttatctgcgttgtagcttgaaccaggtacttcattccttttaattgccaagtaatattttattgtagggatataccttattttgtttatccattctatcagctgatggacattcaggttgtttgtactttggctattatgaatactgctatgaacattcatgttaaagttttttgtgtggacatagttttgnttttaccctttggcatatatagccaggactagacttgctggatcatatggtaactctatgttaaccttgtgaggaattgccanactgttatgcaaagcaacttcccct

SEQ ID NO: 520453 - DNA, 1595 bp, Homo sapiens
  misc_feature (389)..(389): n is a, c, g, or t
gcttccgagacaagcgctgcgcgctggatctccatcaatcgagttgggctcggttgcataacctactcgatcggtcatggctgcccgaggtcatccaacggacgtggtacgcgcactggagctggcagcccttgttttgatgtcaaacggccatgattcttcaaggccacactgggatgataaattgcacctatagagatggtggacaatcctgtggtttcatggtgactcggtcctatagctcgtgggtgtcatggattgagtgcatccggacatggcctctactaacgtagcgtacagacgacagtgaaaggaaaaagctgcaaatccgtgtgagactgtcccttggacccatcaatgcgtctcgcagcgctcaatctatcactcantggcccctattcaccgttggacgccctcgtcgaaggcgacccttgatacaatggcgtggctatagccagaatgtatgacaagactgatatgactcatgtgacctgggggacacgacctgtcagaacgacagggcatgtggacctaatcttcctgtggccacacaagggcttgtcgtgtttggatgggtaggaacctccacttgatccctcgctatggagatatctacctcgtggggtctttggtggccttcgtgcgttcgctcgaatcctgtaaggggctcaagttccgaatcgaaaggcacaaccaagagggggctcgaacctttggttcctatcaggcattgctccatcgtgcattaagacaatgggcactcctggcttatccagtgggtccccaagtgcggtggatcgcaccacctgtccccaaacgggcacttttttggacgttattgcggatccattcgaagcattgggggggaattcgcacgcggtttgggagggctatggggcacatatcattcattattcgggtggcccggcccgataggtgaaagctaatagacaacccaagtagagccgccacaagaggcctgcgtcactgtagccggagccccgtatgcaagtccccttttcccagttgccttttgcccgtattcttgggcctgggggtccaaacccgcgcacaggcgggggattcccgcattggttgatttttcgccttgttggggcgggggccctttggggttcccgggcccgctcgcgcggggtgagacacaacggatttgtcgcacgaccggaccgtttgcttcatccgggcgcgctctcggcggcgttggcacccaccacgagtgattgcggtcctgggcgcggccagttcgcgagaagtgggccctgcctgttaggaacaacccatgtgggttggccaaattgcgggggacttggaccagcggagaacgccgacaaatgtatgacgcgacgactgtttggaatatagttccacaaggagagtgtgtgcagctgtgtaaacaacagagcaccactaacgtttccccacacatatagatgcaagacgggagacgctcccactcagaatgaagcagccaacgcaccacggctgtagtgtggccaccaagaagaacgtctgtctcacacacgaccaccacacgaactcacggggcgagagcgccaaacaagatgcagactgta

SEQ ID NO: 520454 - DNA, 331 bp, Homo sapiens
agttgtaatggaaagcgcacctctctggaactcgggagtcttggatcctacacatgattctatgcataaatagaaatgaaattagcttcctggatactaagctagtattaatcaggtgattctaattaaaatcactctgctagctaaacactattcagcaagattttggttaccccaagaacattctgagacaattgtatctataattgataagacttgacaataatctttcttcctgaagtgtgttgttaactttttggttgactcttagcaaagtacatagcatatagtaggcattcaataaatgttcattcattttttgcatattttc

SEQ ID NO: 520455 - DNA, 182 bp, Homo sapiens
ggtagtttcacattccttataaaggatacataaatggtatacttaggatgcctaatatttagaatttaaacacggtgcatttcttttcctcaaatggaagcaaagttatagtttctaaacgagcatttacttctgcacatctcgaattcctgcatttcacgtgggctgcagcactgtgttac

SEQ ID NO: 520456 - DNA, 172 bp, Homo sapiens
  misc_feature (59)..(59): n is a, c, g, or t
gttttcagaatattttggtaactgtccaatgatatatatacctggttttacctttccgnttgtggatatcttttggaagatgtaattgaaaaaataaggtatgttccagaacaaaaagaacacagatcccagtttaagaggggtttcatgcaagggcatgtaaatagacaag

SEQ ID NO: 520457 - DNA, 414 bp, Homo sapiens
  misc_feature (58)..(58): n is a, c, g, or t
  misc_feature (72)..(72): n is a, c, g, or t
ttcaccgtaggtggcctgactggcattgtattagcaaactcatcactagacatcgtantacacgacacgtantacgttgtagcccacttcccctatgtcctatcaataggagctgtatttgccatcataggagggttcattcactgatttcccctattttcagggtacaccctagaccaaacctacgccaaaatccatttcactatcaaattcatcggggtaaatttaacttttttcccccaacactttttcggcctatccggaaagccccgacgttactcggactaccccgatgcaaaccccacatgaaacatcctatcatctgtagggtcattcatttttttaacagcagtaaaattaaaaattttcatgatttgaaaaaccttcgcttcgaaacgaaaagtcctaaaagta

SEQ ID NO: 520458 - DNA, 125 bp, Homo sapiens
aaagggcgagcatcagtgggtgcaactttacaaagtccaggaccaggatggcaagtctgggatgaatagtagcctggctgcgcaatgaatctgtgatacacgagccaggccggggctcaggcacc

SEQ ID NO: 520459 - DNA, 120 bp, Homo sapiens
atggtcggtggcgttgctgccggtgcctcgtcgtctgttttcctttctttgcaggctgcatcatttcccgaggtgacgctggggcacttgctgagcggttgttgggagacacgcgcacag

SEQ ID NO: 520460 - DNA, 107 bp, Homo sapiens
tctgtgttccagtgttgggaggattatcgggatgatgaccagtgtatgaggatgacttctcgtaatcagttacgagctgaactagagaaacatggttataagattgg

SEQ ID NO: 520461 - DNA, 867 bp, Homo sapiens
gaaacatcgagactccatctcaaaaaaaaaaaaaaaaaaaaacccaaaacttttattaatgaaaacttggccagtatccttaatggatgtggaaatattggctccttgtggaaatctgggcaaccaccaactgaagatttgggcaaaaataaatatcagtcagactctatattccaaaaggatttatttccacttggtacctgaaactcaaattgttaaattactgaaccaagtgcattagcaagattttacctttaacacatgtgacgatggaacacctgaaaaatattacacttaggaaatacccatttctataacctggtcaaaatgtagtggttcatcacggtcaaaagttacacgtgctttggtgtgtgtctaccccttggctttactcgtatgagaactatttggttgggtcgtttaattatacttacgtttacgggtaccttgtgcccattgtgcggtagtacctttttctacttgtgcctgcctgtgcgctgccccataacattccattatcgtgttacgtaggaaatgcttctgactttgacactctgcgtactaacataccggtctgactgtgtgactctcctgtaagacttgcacttatttcactgggcctcttctgctagggtttcaaaaatatgatgggccatggctccgccgggatttatgtactgcctggaaggaagctggtccctccatggccctgggtccgtaaggcttaggggggattaacatgcggcatttcaaacggtccaatgaacaagtggtagactcgcggtccatgttggcgtttaacatattaaaaaaccgaatgtatgacccacggcggtaaagaaaacacggggcccgagggggcagcca

SEQ ID NO: 520462 - DNA, 942 bp, Homo sapiens
gacattttctctaccttgactgttccgttccccatgtctgcctgctattattgtactctgtcacagtacctggtgcctatatggactatcctgtattatcgaatccactgattggattgttgtctaattgaaagagatcagttgtgaagtgtgctgactttcatctagactgagaatcgtggataccggccttgtgcttttacatgaatctggtcatagtcatgcccagcagccgcgtgctccagttgagcccgtacctgtggaggcagaatgtgctggaatcttgctttggccaggctactctctgaactctaattctccacctctaaactgatgacaatatttgttcagtaagtatttcttgaatgcctattatgtgcttgtgattcttagtattagttgaaattatcttaagaagaactctgctagcccagtctccaattttacagaagagggagagccccagagagagaaggtgacttcagtttagatcaccagctaggaaactgtgcagatgtgaataaaacctagtacgtctgactctccatccagggaccttcccactgtacgtcaacagccatttatctctttgactgactgattgtggagaagagagcagagagagcaagcaagggaagccagctacccagtctgagcaggcctgtgacagatcaatttgggctgagaatattgccgcaaattgggtcaggtgcagacctcaagtggattggctgtctcctcaattttgttattctcaaattctcctagcctgtgcaggaactcatcaaagacgggacgggttgggcgcccccaatgactggctccagttccaagccggaaaaaagagcgggccgccattgttcaacgaacaaccagaaccctccatctcttaggaacttgaaccacacatctgcccaactacactcacagggttcaaacctc

SEQ ID NO: 520463 - DNA, 403 bp, Homo sapiens
agtgcatgtgatcctgtcctgagatcttagacttgagtagcgctgctgtcactgatatactatgatgaaagagacattacagcatatcaagtcaagaaaataggaactccaactcagtgtgaccagttttctaccagtatttttgatgccatactttcaggaaaacagatttaatgtgtgtgtggactttacagtatctacgtcctaactgaaaatttaacaaagcagtcagatggaattacatgtagtattacaaatgtgttcattcaacactaatgagcacccactctgtgcatagcactgggctaccattttacaagttgagtttaacgtctttatcaagcatgaccttagtgtgaggtaaaatacattaaattagcgtcaacgcgtaagtctgctagcg

SEQ ID NO: 520464 - DNA, 170 bp, Homo sapiens
gatttgatgcttgcacatcaaaagagtctgatatttttttacacctcacacgaagcagtttattatctgcttggagaatgcatgatttaacaacagtgcaagaggtaaccctttagcagggtaagattaggcgggatcacagtagctcccaccggtaatcccagcacttg

SEQ ID NO: 520465 - DNA, 126 bp, Homo sapiens
tggttacaactttttttaaagatatagggctataactgtggtgtgcccgggcgtgcaggtgagcgtggtgattgcaccactgtgcacctccagccgtgggcaacagaggtgagacccgtgttctgt

SEQ ID NO: 520466 - DNA, 537 bp, Homo sapiens
  misc_feature (517)..(517): n is a, c, g, or t
  misc_feature (519)..(519): n is a, c, g, or t
aaaagcagcacatttaatttcattaactaaaatttataataaaactttccagtaacatgtttctacaaggaactttgtacctaggactcagaacgtgggcagatatttgttttcttctacttaaaagggttggcagtctatttgtgtagcctctcaggctcaagcagtcctcccactccagcctcccattgagtacctgggactataggtgtgcaccaccatgctcaggtaattaaaaaaattttttttgtagaggcaaggtctcaccatattgcccaagctgttctcaaactcctgggcttaagtgatcctcctgcctcagactcccaaagtgttgggattactgatgtgagcccttgcatccagccagaactttctattatttatggtgtgtggatcaaagctgatttagcatgaatacatatgattttggagttctgttttcttctggtgaaattttaaggcagcaaggttgacatttggtttttaattcattttcactggaggtaaaattaantnctaaacctgtgccgagat

SEQ ID NO: 520467 - DNA, 102 bp, Homo sapiens
gcggccgcctactactactactgctcgaattcaagcttctaacgatgaacggggacatgcagtccccctcagttcgtgctgcaataaaggccatcttctctt

SEQ ID NO: 520468 - DNA, 146 bp, Homo sapiens
agaaagtctgtcctttggtagaaatgaatctttcaaaggtttcccaaaccactccttatgagcgagtgaatattcaagagagctacatttgagagcctgtacaaaagcttatccctgtaacacatgtgctattgaaacttctaaag

SEQ ID NO: 520469 - DNA, 979 bp, Homo sapiens
acccacgctgtgcggaacgagaggatactcaactcctgcacagacctgatgaaggtgagtgggctgtgacccggggtgggtctgcacctggagtggccaccagtcattgctgtcttggtctcggcagtgctatcctggctcctggtgactgacatccactagcctgcagaaggcagatcgtggagatgcggcagtggtgatgggtgcctggctggcagcatgtggcacagtcgcacaagggagccttgaccccacaggcctagtgccaaccctgtggccattgagaacctctcacacccacgtaccacatgggagtgcctcatgggattgcgcccttatggccagaagtgacgtggggacgatgggccgcttagaggggcccctttcccacctcttggtgtcacttgaactggcaatgtacctgcccttgttctcgccgtcagaccactagtgtgggcagcccactgcagcagcgacatttacgccaagaactcagcgctggaccgcaaggcctcatcttcggacctcccaaggctgtgcggcctgcggagccacacagcttggtggagtgcagctgaccaagggtgcgtgccttcacacggtgcaagttctcgacggagctccatcggtccttgcttcacaaccgagatcgcagaccagcactggccccactggtggctggccttccaaagcgtgaatggccaagcaaagcacaagcccccacgctgagaccgcctgcaaggaactgtcctcgcaacaggtcaactgagagggctgccaatgttggtggcctcccaccaagtcaggccaggaccacaatatgaggcacacgagaacgcgcatggactttcctcctggacatggtcccctcattcaagcatgacagaagcccgtgcacatctgagctcccggatgcatgtcctgggtagctggcctacgcagctggaggctgaccccaccgggctggcggagaggggac

SEQ ID NO: 520470 - DNA, 210 bp, Homo sapiens
tgcatgtgactctatgaggatccccaacatgcgaacggactgatcaggaccatttgcagtagtgaactcccaggttgcctttgatggcagcagggtttccaccgtgaatgatgcatctctataacatgatcatccgacgctactctgataaaagtgggaacatggattttgacaacttcatcagctgctagatcagtccgttcgcatgtt

SEQ ID NO: 520471 - DNA, 974 bp, Homo sapiens
tcgtccgattttgcggattttcgccccaccctccgtgtctttgtttacccgcgccctttgctctttactgggcccgtttctcccctccttatgtacctccccgccttacactggtggtgttccttccaccttcctataccgtctcttcatattagtccttcttaccccacacgaccgataccacaaatacccccgtgggggcgcatgtttaacccggtctgagcacaaatttcccacatggccacacacagcaccacacctggtcccaaaagtccttttgaatacgggggatatatcctcttgtttttacccccagagaggttttttttttccccacgggagattttttgagccccttttaccaccctccacgcctttgtgccgcccttcctccccccactttttggaggggccgtgccgcccccaacaagggcgaatttcccccccgttatattccccttaggtggtcgcccacctctccttaacaccactcccggttttatctctgcactaccaggaggtgattcacattatcacccctgggcgtcacccacatacttttgttatatatggaaacccaccccgggtgaccccccataatttcttcagccccctgcggttatttaccaaaatttttctcgggtcttcctatttttacacctccttacaagaactctcgagagtgactttctgatgttttcctcccttctacacacttttctcgacagggatttttacgcgctctcaccaatgttttgtgtgagcaccacaagggcttctccccggaacttctacagtctaaattattgggtccaacattctctccccatatttgccttttatcccgccgccagtaaaattttccctttaaaacccaaaaaccctttgggtttgaaaccccccccctaaattggccttttttaaaattggtttgaatatttttttaatttcccaatttttgaagagggttttta

SEQ ID NO: 520472 - DNA, 260 bp, Homo sapiens
  misc_feature (174)..(174): n is a, c, g, or t
atgatgaagagtcccttgagtgcctttgtcgtctgctcaccaccattggcaaagacctggactttgaaaaagccaagccccgaatggatcagtatttcaaccagatggaaaaaatcattaaagaaaagaagacgtcatcccgcatccgctttatgctgcagacgtgctggatcngcgagggagcaatgtgggtgccacgccgaggggatcagggtcccaagaccagtgaccagatccataaggaggcgggatcctctaga

SEQ ID NO: 520473 - DNA, 135 bp, Homo sapiens
ccctaatcgcagcttgccttagctttatgaaataagttgcctgaacagagacttgtagaatggtggtatgagggctttccttgcttgtacatttagtggtgctaaactttagaatatgtatttccttaatgcata

SEQ ID NO: 520474 - DNA, 548 bp, Homo sapiens
agatgtactgtggacattgctgcggtgcgtgatgatatcgatgattctgtcttcgattagtcccgagtcccttcatggctttccgcagcgacttatggatctgcgatcagggtaagaagtctattgagtggccgcacagttcccttcagctctactcgggccactgcactaggttcccacatctgataggccacctgcgctgcctccgggaagaactggccagcagcatcatcttttcccccagacagcttcacgaagagtcttcttgtactcgccagaggtgtcatacttgatcatgctgtagagggacttctcatacttggtccggaagatctcccgaatgtcgagcatgtccaactcactacgggagaccatgatgcggatcaggggtgtagtcccgagtccccaggcccttcatagccttgaagagcctttcagcacaatattccgggggtgctccggattaacttcgtgggcagcctgcccacaaagtggcccccgagtgatctgtgaagaatgccagggtgggggtcggaggaggagtatag

SEQ ID NO: 520475 - DNA, 147 bp, Homo sapiens
tgctgcgtgtcgctctcgcggctccccctcggtggcccgcgccgtgcccacattcgtgctctttctggtcccccttccgcagtccggtcttttttttttggcagcagggcagtctccatctggtcccctcaggggtcccggcggctc

SEQ ID NO: 520476 - DNA, 988 bp, Homo sapiens
  misc_feature (840)..(840): n is a, c, g, or t
aattcgtagggtaggtgtgtttatagggaggaagagaggggccctaattggaaagactctcttaattctccacggctacaacatcttctacattcatgctgtagaagctatgaaagttttgggaaactatagagtcatcactgcaaactcaagcactggatacgtgccggagagcactttgacctagccgttagaagaaatggagaaacggtgacctctcagaggccgtatatgaattggctgagggagtctccaatagtgcgctaacaatgattggaaaaaagaataattatcatttgtttggacttggtatttgctctgactgagaaagacgttaactgttgagagctgcgggaggttaaaatctactgttagtagtggtttaatagtagacgatgaaaaagtcatgggagtgtaggccaggatcgccggctgctaggactttatgggaggctatagttcttggaaccctcactcactaaactaactagcgcgcgagttgttaggggtggtgtcgggtaggcgatgaactatattcaaaggggggtaagatccgtttacgtccatgggtcgggtgggaaaaccgggaaaatataacgtagaacgcctatagggtcttatataagggcgtatgaatccggttataaggtgcggcgttctgctacgtttatatagtagagctgcccgttcccgggaaagaatataatgtaagaagaggagccctgtgtgtagattcggaggggatattggtgacaatagatgttaaggtgcacatagcagagtgggccaggactacggccctcgcgttgcgtcggcgcttgttctccggtctagttgganaagaggtacgtgatgtcaactacgtcaactatgatgaaggagaaggagttttatccatgttgcgccgcgtatatatacacatccgcgtgcgaggttgaccggtgacaacgtctatgagtgatagcataacgccacggcaatgttagag

SEQ ID NO: 520477 - DNA, 422 bp, Homo sapiens
gcagggaaaggccttatcgctgtgtgtgtgtttcagtctacgtggattaaacattacttcgctccgtctacctgcattaatgaatcggcaggcaggcctcacttctccgtacgcagtgatctggagatcgctacggacctaaaatacccatagccccttcgccccctgaacaggcacttctccccaacgtgacgacgtgtgaaatcaatacagtagactgagaaagaaacccagaagaggaacgaagagagaaggaaacaggagatacagcgactggctactacagcggggcaatagagcagtggcgacgggagtgaaacacactacgagagacctcaacagcgagggagtcggcacacgccctgggaacccggcccggcggaaagccccagggcccaaaggaagtagaagggggagaaaca

SEQ ID NO: 520478 - DNA, 461 bp, Homo sapiens
tctgtaaccataatcactggtctagtctattcctagcttcagctaacacactagtagaaggagatagagactttatagtatgtctgaatatttggtagaggtagacctactctacatagcttatctttcgcaggtattcctagctacttcttacatttttatccttccgtatgaatgtgtgtatcagtttaggctctagaaaaaatgtaaggcataaactagaatcgcattaagtatattaatataacttgaggagaactgacatatttatgatattgagtcatcttttccaagaacaaaagatgacttggcttatttagggtctacttctatgtctttcaggagtgttaatgtattcctcatacagactttgttgctcttgtaaatgggtttactctacattacatcctctacttgattatcatttatgtatatgacagttactgatttccgtatgccaa

SEQ ID NO: 520479 - DNA, 347 bp, Homo sapiens
gtctgtgctgcggtgactctagaggacccagcggccgcctttttttggtgctccgagctcgcggtcgtccgggtttttttacgttttaatttccaggacttgaactggccatgtcctctgaagaaggaaagctcttcgtggggagggctcaactttaacaccgacgagcaggcacgggaagaccacttcagcagtttcggacctatctctgaggtggtcgtggtcaaggaccgggagactcagcggtccaggggtttgggtttcatcaccttcaccaacccagagcatgcttcagtggccatgagagccatgaacggagagtctcgggacggtcgtcagatcgggta

SEQ ID NO: 520480 - DNA, 328 bp, Homo sapiens
tgcggtatgagttcacccccacaagtttaggtattttcagaattttaagtgttataaaagcttgaaaggcaattttgcagattcatagctgcaaataaggccatgcacagttattaaagatagtcttcactcaccatccagtctgttcaaatatttttactaacctagtcacaaggagcgtaggtagagattgatatatttaatttaagtaagtttagtttagtcctgcaattgctggctttattaattctatgtacaaaaagtagatagttccttttaaaatccattctgttgctcaaagttggattaaagggttgactgatcagca

SEQ ID NO: 520481 - DNA, 460 bp, Homo sapiens
ctttgttgaggcatttcttcaggtcgctcaatgtctccagacaagatacccagtgtaagacattatcaatggggcagatgtccaagacatgggcagcacgggagcatggcagcggacgtgaagcgggacagcaagaagccaccacccccacaatagggtgggtaccgctcattctgagtcaccacctctggcacatagtacttgctccaaaaagcccggatggggcccacgtttcggatcagttgccccacgacagaggtggcggccagggtcatggtcctgcatgtagaagaccatgttgtctgtgtgtgcaaagacgtcatcatccccgttgagcacgaagctggagttggcgcaccttgtctcctgccactgtaagaacaggacctgcttgagcgtgaggttgacgaaggagtcgtggcagtcccactgccggatgtctccgtgagggggatctcta

SEQ ID NO: 520482 - DNA, 223 bp, Homo sapiens
  misc_feature (12)..(12): n is a, c, g, or t
agtgatggggtncttgtctgtcgacccaggctggtacaatcataactcgtcatttgccaaagtcttgaactcctgggctcaagtgatccttcctccttagtctcccgagtagctgaggcaggagaatggtgtgaacctgggaggcagagcttgcagtgagccgagatcgcaccactgcactccagcctgggcaacagagacaaatccgtctcaaaaaaaaaaa

SEQ ID NO: 520483 - DNA, 420 bp, Homo sapiens
  misc_feature (6)..(6): n is a, c, g, or t
  misc_feature (42)..(42): n is a, c, g, or t
  misc_feature (53)..(53): n is a, c, g, or t
  misc_feature (312)..(312): n is a, c, g, or t
  misc_feature (387)..(387): n is a, c, g, or t
  misc_feature (414)..(414): n is a, c, g, or t
cagccncataggaacgtagctaatcagccgtcgtcccgcatngctgctgacanggaccaacagctagctgcatttaggggatggaaaacccgtggtcactcgtagtgctaagcgtatagctagccgtatctggaaacggcaatgcaagcgtgtacgtacgggttgtgagcaacggtgcgcaaagccgatggttaggcctgtttggacgggcgtcgatgtcggcgtcaccaaccatcagatacagcgctattggacttgcttggtaaaacggttctaattacgcaccgtctcacgtgagtgccatggcttttngtacccgaattagtgaacttcgatacatcgcgactcgtcacacgggcccctgatgggttgacacgataggtgttncatagttcggaatttgaacgccaaccnttttac

SEQ ID NO: 520484 - DNA, 335 bp, Homo sapiens
cgcagtggctcacgtctgtaatcccaaaactttgggaggctgaggcaggtggatcgcttgaggtcaggagttcgagatcagctggccaacagggcaaaatcctctctctactaaaaatacaaaaaaaattagctgggtgtggtggcatgtgtctataatcccagctactcaggaggctgaggcaggagaattgctggaacccaggaggaggaggttgcagtaggttgagatcacgccactccactccagcctgggcgacagggcaagtgagactctcaaccgcagccataagggtctaacgcccatcctggtttggtttatttcgtttcctctgt

SEQ ID NO: 520485 - DNA, 712 bp, Homo sapiens
gcaggaacaggcgaaacctaagacgggtccatcacttcctttttctcaggagtccctgcatccctaatggcttctctctgatctcattcagccaacggggctgttcctgatgtcctgcagcagggccggttgctggttgtggactatgccacctgctccagctctgcctggtggggcagcagcgtgaaaaccagtatgatctgtgctgggggtgatggcgtgatctccagctgcaacggagactctggcgggccactgaactgtcaggcgtctgacggccggtggcaggtgcatggcatcgtcagcttcgggtctcgcctcggttgcaactactaccacaagccctccgatcttcacgcgggtctccaattacatcgactggatcaattcggccacagtagtggggtctccacttaagctccctggatatcgtcctagcgatagctttggaagggtgacagaagacggaggccctaactaagtctagtgatccataggtcgaggtactcacctgcagtaacagctccaaataggccagatggtaccaaatctgcggagggtccctgatagccaacagcgtgggtcctgcacggactgtgccactggatacagatcctccaggatctaccgggtgaatgctggggcagcataacctctacgttgcagagtccggatcagctggccgtcagtgtctctaagattgcgggaagca

SEQ ID NO: 520486 - DNA, 340 bp, Homo sapiens
gacttgatttttcattttgcccctccattttcaaacccccccccctttcccatcctactcctgccatgcattgaaggggcaatgccttttggggtgagctttgggtttaggggccccctccatccctcagataccctggatttttgcccccctcttcctcaaagccccccctgaggggccgtagccccatctagggctgtggaaggagcagactggttcctaactctctccccccccccgcccccccccctcaaaaaaatcttccccccccccctctctgcccttattttttgatttgggccccctggaactaggggtttatggaataaaggagaatgga

SEQ ID NO: 520487 - DNA, 504 bp, Homo sapiens
aggactttatttttacacttgtatgcttcgtctaataaaaatgcctttcatcattactagtttaacggagaaatctgaacatttgtatcatcgttcccctttacatgttcgcagttgtttttcgatcaacagcaggatcctatagcactgagtagaggagcacacattcattcacgttcatgtttccatacacagtaagtagtgtcattcactctgttcctcgtcaatctaaagggacatatttggctttattttttttgttcagaaagaaaacctgaagacagtactagaacattcaaccaaatgtggtgtttagtgaatttttaataatgtacagtttttgtgactttaaatttgttcctttctatatttttaggaccaatatatcgtttttaagaggcgacattaaatgaccatgttgtttcaaggtaatgtaacacacgtgcatctgtagaatgtactgtaagcggaaataaaaccacatctagtagacgaaaaaaaaaa

SEQ ID NO: 520488 - DNA, 998 bp, Homo sapiens
tgggggctccagtcaaggaaggggacattttattggagggctccaggggccagggggccggggcaggaggctggcccttcaagggaaaagaacaaccttatttggaccttcttctggggaccgcaggtggtgggtgtggaccacacttcttctggcggcagtggaacagccagcgagagggtgcagagggcgaagtctatagaatctgggcggcagaatcattctggtgtcgcaggtgtgtattttcggggccaagtcgtgggcggaagaagaagaggtctcaataagtggccactctgggcgagggcgcaaacaccgagggggccgagggtgtggcacttctttcgcgtgggagtggtgtgatagttcgtggacgaagaaggtggcggccattccctcacaggcgtggtgtgggcgcggcacaaatatcagaacgccgtggggggggctcgacgggtgggtgaaatcacccttcctgtgggctcttggcaacttggggggcttttggcaaatttcttcaagagggcgtgatttacttacccagtgtgcacagtggaatttccccaaaagaacacacattaaattgtgggactctcaaacacagaacgcaacgccaaaagagggctttaaattaatatgagcgatttcagtccgcttcataacaatattttgtgaaaagcgcaaaggtgtcaagcagaagacaccataattacaggcgtgggtccccccaaaaggcgttgttccggtcgggaacgcccgtattaagaagccgccggttcagatagattagctaaggcttacgtcgggactgttcttaacccctttcaagaaactccatgggggccatggtccaatgcggccgaatttattccaaggtggaaccccgcttattctacgggaaatagaaagttcttaccgttctgctataatatgctaaactcttcccgctacgaagtcgttccgttaaattcataaccactttgcacacggccacggga

SEQ ID NO: 520489 - DNA, 536 bp, Homo sapiens
  misc_feature (7)..(7): n is a, c, g, or t
  misc_feature (25)..(25): n is a, c, g, or t
  misc_feature (43)..(43): n is a, c, g, or t
  misc_feature (71)..(71): n is a, c, g, or t
  misc_feature (82)..(82): n is a, c, g, or t
  misc_feature (101)..(101): n is a, c, g, or t
  misc_feature (209)..(209): n is a, c, g, or t
  misc_feature (302)..(302): n is a, c, g, or t
  misc_feature (361)..(361): n is a, c, g, or t
  misc_feature (369)..(369): n is a, c, g, or t
  misc_feature (391)..(391): n is a, c, g, or t
  misc_feature (428)..(428): n is a, c, g, or t
  misc_feature (449)..(449): n is a, c, g, or t
  misc_feature (516)..(516): n is a, c, g, or t
tgttggntccccaaccgcttgggcnccaaccttgggtggaatncctgcaagtgtgcctaacttggttgctnaacatcttgcnacctccaagtgctttgtcnccactcagtaccttggatcagagctgctgagttcaggatgcctgcgtgtggtttaggtgttagccttccttacatggatgtcaggagagctgctgccctcttggcgtnagttgccgtattcaggctgcttttgcctgcctttggcccagagagcctggttgaagatgtttgtaatcgttttcagtcctcctgacaggtttnctgtgccccctgtggtggaaagagggcacgaacagtgcccagcgcagcgttctgggctncctcagtncgcaggggtgggatgtgaagtncatgcggattatccactcgaccacagttatcagctgnccattgctccctgtctgtttnccccactctcttatttgtgcattgggtttggtttcctgtagttttaatttttaataaagttgcaatnaaatcatcaaaaaaaaaaaa

SEQ ID NO: 520490 - DNA, 270 bp, Homo sapiens
tcacgtactctacgtagactacaggagtgtctaggcctgtgtagcctaagcgtacagtgtggataaagtctcaggtagagtacagtgagtgttctaggcctggtgtagcataagtgtgtagtgttgataaagtctacagtacagtacagtgagtgttctaggcctgtgcagcctaagtgtgtagtgttgataaagtctacagtagagtacagtgagtgttctaggcctgtgtagcctaagtgtacagtgttgataaagtctacagtagag

SEQ ID NO: 520491 - DNA, 925 bp, Homo sapiens
acggcatcgctgggcgcgcgcggtactttattgagtaagctcgcagattcctgtgttgtggaacatcagcgcgggctcacctgggctctcatcgggactggttttaccaagcgcacaaagtcggactgttcccaatggcaatcaccggtggcccccacaagtgtgtcgcgccccccgaacttttcgggcgggacccccttttcccggtgtgggttccctcattttccggggcacttaatctcgggacatccgcggatctcaatgggcccagagggcccccggtaacccctgtgcgtacgaagggagaatctccccccgtccgatagcagggttgatacccaccacacagtggaccaactacagcgcgaacctaaacagcacccaggacgggctgcaatccaccaaaggggacccctgcccaccttaccccgtcccttgaggccgagccgacgcaacactccccccgcgtgtacgtctgtccacgcagaaacgaagggcgaccccgccactatgcgacccccaagcaccccccttgagcaatgccaccggggggaccacaccggaatccccggccccccttctggtggaagcaacgggtgtaacaccccctcccccagcgtcacaaagttccaagccgctttttatcatgacagcatacttcctgtcatctggggtggagcccacaggtgtctgcgccacaccaaacggagagatctcggatcatcaggacagccccccgtgatggagttcggaaacccaagtagagagtgagcgagaggcaggctcggccgcaagaggaatattatccgggagattagtcttctgttctgtgcaattccggccccctataaccacccaccgtttaccgcgcgattatcttcgccccaccagggaaaaaaaacgtatattttcttccaacaaaaca

SEQ ID NO: 520492 - DNA, 101 bp, Homo sapiens
gtttatgttactgtactgtactctctgactccttactaacaatgaattgttacataatcttctacatgtatgattgtgccactgatcttaaacctatgatt

SEQ ID NO: 520493 - DNA, 995 bp, Homo sapiens
gagagtacttcgagtctccctttcatcatttccgggggggagtctggagacgacgtggagaaatgggaactcgaaaggggaaggaaaagaaggagagaacagaggtctattagagctcgggaagctcagaggtgggtgtaagggagaagaaatggattttgggtgggtttggcactatttttggcattcttcaatggaaacattttggtccatggtctactgtgaatctttctgggcaaaggaaaacacttctgtgccggggtgtaatggggtggggatgtaaggggtaaagaggcagagatacggagaatagtgaattcttcacacactatgtgctggctattgtgttggggctggaccagaggatgtgtgtggcccagagagaggtgtgcacagggagaggctgggggatatctaagccgcggcctatcaacaaatctacaaagatctcggggcgcacaaaaggagaggagaaatataggagacacatagaaccgcctgggagacctggggggggccaaggtctggggcctctacgatagcgccttgtgccgggtcccggggtacatgagagaatctggggcgggggagattgggacggaagtgtgtcaagccaccaaatatcgcgctctttgagcaactgcggcactctgcgaagggaagacggggggggggtctgcgccggggtggtctgcggcgggctctgtggtggaaacccaggacatttccctccaaaacgtatttttagctggctgctacagtacgaacgatggcgcgtcttcactggtgtttcaaacacagcaatatcaagacaaaacaaaggggggggggggccagcgatacatcaaacaagagaatttcacccttcacggagggggggcgccacccacgcacgtttaattacgcacggtttacaccccacgggatgtatcgttcggggacaccccacaaggaggtgggcccccctcaataaagatgaaagggcgggccattaa

SEQ ID NO: 520494 - DNA, 109 bp, Homo sapiens
agataggaatataaacatcgattgtattcaagttaaacattttatttacgaaaataggcgggaggaaaagggttgcgcccccacattctctcccgaggtgatcttctga

SEQ ID NO: 520495 - DNA, 1175 bp, Homo sapiens
atcctgaaacaagggctgagaaaacctcatagctccagctgagaggtagtagtggatttgccatttttaaagcagttgcctacgaaaaaacgttgaagaatatgcagcagacactatatgtggccatgtcaagcctagcaatatctactaaaatatttacacgaaaacagtttgctggtccttgtgagaacaatgcagttcaaaaaaggatacagaccgaagcatcctcttacaatcacggaatgtagtttccactctcgtgggcaccgaacaagatggacaacgagaagtaaccaaacttcaactcttacaagtatctgtcgcaccagaactttcacttcggacttagttccgtcctaagattatttatcaacgatgacgtccggaacagcaaagccacgaaacctgcccactcacccaaaacttgtttaaaaagagaccactcaagggagcttcattatgccgtatggcacgatgtctgcagctcgcagcaaatcacattccagcagaaggtctcgcgctcggtgcaagacagccaggcgcttactctaacgagatacagggcgccctgagcagacaagccagggcaggctcttcatccacgagcaagacttcatacccacagcaagctgaccccacgaaacgcgcagactacacctcctggcgctacctagatacgcccacacagccaactcggacatagggcaactggccaaaacagacaacatccagcggcaacccgcatcgggccaccacaccagggcagcacaccatgccggcaactaaggcaggcctaaagtaacccaaataggccacacactatgggccctccagcccactaccacacaacccgccccaccacggagcgtaggcaccctaggaacagtatccagaaacgccccttgcggaaacttacccgtcacaccagataaacacaaaggagaaagagtacacacagggccactataagcccaggatcaactcccaaacacaccggcgccatccaccccccctcttcccacggcgaacccgtgcaaccgtcctccatcgacgaacgcacacctagagcgcacaccaaccaacgcaagacggtcaataatcaccaatcaatccgaccatacccggtactaacaaaacgagctcacgatagtatcgaatcacccatgacaccatac

SEQ ID NO: 520496 - DNA, 100 bp, Homo sapiens
cgtaaagaacgagggtcaagatgcccccgggacaaatacggtcaacggtattacttatctctctcaaatccatcttttccagttagcacctagttctaat

SEQ ID NO: 520497 - DNA, 282 bp, Homo sapiens
  misc_feature (280)..(280): n is a, c, g, or t
caggcggatcacctgaggtcaggagttcgagaccagccaacagaagaaatgtttaacagttcagttcatattactttaatgccttaagtactgggtgagagaatggaagaaaaatattatatgaagcagtaaaattataatgaaaatatccgaaagtggcaggggaataagatcaggttatggcaaattatgagatacatgcatctagtcactgggctgcaggggcaggtagtaaaggtttttacaaacatctactagcaactcacaggcacgacatgtncg

SEQ ID NO: 520498 - DNA, 529 bp, Homo sapiens
gtgttctttggggatggggaatttggccgggtgtcgtttggcgtggtatgctggtgcctagggcctgggccagctggctctgtgctgcggtgctctggttggccgaactgcgatggtgtagtgccgagctagcgtgcacgcgagccgtcggcacggcaaacgccgtgttgggccgagacgcactagccatgctgtgacgcgtggacctgcaagcgaacgaactagcctgtggggacgcacggcatccgtgcaagctggtgggagagcgtccggacagccagggctgcactcctggagcagtctggtccatgtacgacaatttacgtggtctgtaggagatggaggacacggctgcaggaccctggagaaggagcaagccatgccctgagggtcatctcctgaggctcttcctgctgctgctctacctggacgaccggcctacgaggcaaccctggggcccaccagcgcctgccatgctctcaccatgcatatcctaggtttgaagagatatacacagatggcatactcg

SEQ ID NO: 520499 - DNA, 234 bp, Homo sapiens
tcttaccacaaatttaatatcaccaccaaccacgccccttagagataccaaaatgatgtgatttcaaaaagcaaataaagcaaattcaaaagattttcttatttgagtgcaaaatgggtcataaagcagcagagacaacctgcaacatcaacaatgcatttggcccaggaactgctaacgaacatacagtgcggaggtgtttcaagaagtttgcaaaggacatgagagccttca

SEQ ID NO: 520500 - DNA, 107 bp, Homo sapiens
atcatttgcaggataactgccactaacaaaaaggaatgatctgatttagaaaaaggatattcgtgttggcaaattaacatttgccttcttccttcctttataaattt

SEQ ID NO: 520501 - DNA, 525 bp, Homo sapiens
tcaacatcctcatgtttcccttgtctttcccttgtaggacttataactcaactcattttgctttaacttaaatggaatttttccttaagtttctagatttgtggaattttatttttttgtctgttactgatttctaatatttttacattctggtcagagaattaaattactatgatgttaactcttctgagagggaaatattagttcttaaactacaattatcaatctatctgtttttgtcaattgttgctttatgtgttttgaggttcgctgttaggtgcatacatgtttaggttttttgccttcttgatcttttcctccctttaccagtatgtaacatccctcataacccctcatgttgtatttcaccaaaaaacctattttgtctgacatgaaaattgctataggccgggcggtggctcactcctgtaattgcagcatttggggaggctaaagtgggaggatcgcttgaactcagaggttccacaccagcctggacaatgtagtgagacatcatctcaaaaa

SEQ ID NO: 520502 - DNA, 722 bp, Homo sapiens
gaacaatctgttcctctggctctccacagtgatccagtactaagggacactatctgctcctattcagtgatggagctctgcaccaaaggtcttgggaaccaagaggaagtgctaaagaccacagggatcaacctctcctgcgttcggacctgagaggtggtgtcgaatgagaggcaccacgttgcactccagcagtccttctctaagctcttcaaagacatcgggctgtacccgcgggctgtcagcaccacttttggatcaagagtcaatgtggcaatatgtttacagagaacctcaacgcctgatgcgactactgtgtatgtggttctgtaatcactctcacagtctggaaagattttacctggagtgaaagtgggtattgctaattctgtgaccgagccaggtggagactctcaccctggagagatattggtgatcaagagccatacagccagcggctactacaccatatatgatatcgagactcttttagctgatcatatcaacactactctcagatttggagatgcagctcagacactctgggctctgacaggataccttggttttgtgcgccggaccgtgctcacagcggacactggagagagtatgatgcactggatgtggtgggagcactggatgcactggagctgataggatacgatccacccactagatttgagactccgggtccggatcacagatgattgtgatgtgccggt

SEQ ID NO: 520503 - DNA, 284 bp, Homo sapiens
gggggccccccccccgggggtccccccccggaggggggggggccctttttttttgccctggcccccggggggttttgaaggattcggggggcccccccccccttttttgtttggggggaaaaaggaaaagggggtgggtttcccctttggggaagggggggggaattttttgggggcccccccggggccctttttttggggtttttttcccccctcccctttgggttttttttgggggttttttgggggggggggggaaaaaattttcccgtttggggccccca

SEQ ID NO: 520504 - DNA, 628 bp, Homo sapiens
  misc_feature (103)..(103): n is a, c, g, or t
gaatttgacctgctgcgggaactcccaggagtctcataaacacactgtccatcaagattgggctactgtaggaaagactgatcggctcagcccttttagtttnattgtcagaagtgccccaacagggactgttcctcatatccgaataagccgggaaacaacacgtgtatcccagatatcagtggtgttactatcggccagtggatggtccaacgccgcaatatagaaggcactgtgtccgtggacttctctccagcattaaatacaattgttttgattaacagactgaaacttctatacgtgctccatgtagaatagcagcagaattatcgtctacaagaacatgactgaattatatcaatcactagccagcctattacctttccagctatccttctagatggcatgccatccatacatagtgccgtctccgagactttactttgtgtaacttacgtcacccatcacggagatcttcattatgtgcattacgttccatacacgtttacccgtatcaggcatcgctttacggcatgtcataattcaatcattaagcaacacatgctttatgaatagtaaacaagtctgaatcaatggtggggcaaaagtcaataggagtggggtcaac

SEQ ID NO: 520505 - DNA, 366 bp, Homo sapiens
gtgatatagaaaataaactttatatatatgtgtctcagagatgacactgtgcaacactcacagatttgcatacaatacaggtatggattggctattcacaatttacaggagtggtttttcctcttggaaaatataagtaccaaagctaagtaaacaatgagggactggcatttgggaatttttacatggcttagcttaaagaactcggctttagcaaatattcaacagatcaacctggataaaatagtcaattaaatgctctaatttatcagaaaaaatctcactaagtttcacctcaaaatgtattgcgcaagtgtttttaaaaaatcacccttaaaataaataggaaaggtaagccggtcttta

SEQ ID NO: 520506 - DNA, 376 bp, Homo sapiens
  misc_feature (1)..(1): n is a, c, g, or t
natctctgcaggagagagaactggggagtctgagctgagcagcgaatcaacatgttcgtccaccaccccgagctggctagagcccctcttcccatccaaagctaaatattaaaaattcccttacgttcggaaagaatgcacgaatcatgctcactgcggaactggcttcagatccctcgcagatgcgggttgggcactgtgagagaaccggagcaggttcccaaaacgaaggctatgatgggggttcgtgctggggcggacgaagtgggactgaggtgggtaaggagagaccaaggagaacagtgcactctggagacaggcaggcttggagaaactggggcaggggaaaatttcacactcacagctataaatagtc

SEQ ID NO: 520507 - DNA, 101 bp, Homo sapiens
aacctctagaggaccccggttagttgtgcataaaaatgattacggatactagtataagagatcaggtcgtcctttagtgttgtgtatggttatcatttgtt

SEQ ID NO: 520508 - DNA, 198 bp, Homo sapiens
  misc_feature (37)..(37): n is a, c, g, or t
  misc_feature (73)..(73): n is a, c, g, or t
  misc_feature (122)..(122): n is a, c, g, or t
cagggggcccatattttaaaatttccaaagttgcttncatttagattatccagcccaatcataaagtgaatgncaaaccctttgaatgaaattgtggcccaaaatctgttcaggttggtgtnccgtgtaaaatggggatggggtaaaaatggttaacgtactgttggatccacaaataaaggttccagttttgtaaga

SEQ ID NO: 520509 - DNA, 195 bp, Homo sapiens
ttggggatggccctccccacccgacaaaaatgcaggggccagggaagcccagcgctcggtgccctttgtccagggttaaaatcggcctgtggggtgtggttaaaaggcaggttgtgcgggtgttgaccgatgtattttttccttaaagttattataaaaatgggtaatttgtcaataaagcattcctttggggga

SEQ ID NO: 520510 - DNA, 114 bp, Homo sapiens
atattttctacctaaggtttcttttcccttggtatgagatgtaaaatgatacccagattccggtatccaattaacattatgctggcgggttcgatcagcccggtgggaaaagta

SEQ ID NO: 520511 - DNA, 495 bp, Homo sapiens
  misc_feature (1)..(1): n is a, c, g, or t
  misc_feature (30)..(30): n is a, c, g, or t
  misc_feature (37)..(37): n is a, c, g, or t
  misc_feature (110)..(110): n is a, c, g, or t
  misc_feature (156)..(156): n is a, c, g, or t
ngtggagacactgccacttgctgtgccaantggaacnccggggataaagtcagccatgggagcactggggcggtgccagtctagagctcctggaaggtaaagtccttccnggggtggatgctctcagcaatgtttagtattttctttcctgccttnggttcctgtgctcctaagtcaacctagtgttttccacatctccatttggtgttagcgcaagattcagctagtggctgagatgtggcaccaggaacccttaaacagttcacagcatctcagctcgtctttactgcatcaggatttgtctgtgttcttcaagatcccatttaaattccttagtgactaaaaccattgtgcattgtagagggcgtctatttatattctgcctgagaaaggaagtgagctgtaaaggctgagctctctctctgacgtatgtagcctctggttagcttcgtcactcactgttcttgactcagcatggcaatctgatgaaatccc

SEQ ID NO: 520512 - DNA, 468 bp, Homo sapiens
  misc_feature (12)..(12): n is a, c, g, or t
  misc_feature (153)..(153): n is a, c, g, or t
  misc_feature (222)..(222): n is a, c, g, or t
  misc_feature (386)..(386): n is a, c, g, or t
  misc_feature (447)..(447): n is a, c, g, or t
  misc_feature (452)..(452): n is a, c, g, or t
cggggcaaaaanggtgaggactcagaacgcagggagaagccggcacaggcccagaggatgaggggctgtgggtcagagaatggcgggaacctccccaaatcccaagttccctgaggccagcccagggccagccttgtgtgcgggtgtttctgngaatggcgcgtctctgcatgagccttgtgtgtcatgtgcaagagtgtgtgttgtgtcctatgtgtgggngggagctgccggcggtgcatttgtgggggccgagggcagttcaggatgtgccattagaaccacgtggctcctgaaagcaagcccgtgattaccagagatacctggttagtagcatctatatctggattagctgtacatctcttggacagttcttttttaaaagncatggagtggaagaaagacataaacttccggattttgcgtaagtggagcttggccaactanggganacactggagttttatt

SEQ ID NO: 520513 - DNA, 166 bp, Homo sapiens
cctgcacttgagccaacaagtgtgtgtgtgtgtgtgcgtgtgtggtgacgtgtgtgtgtgtgtgtgctcatgaggctgattccatgtttggatttttgttccttcggctgtgtcatcaattaagctcggccatttcggcgtatcttctccatcttcatcaccatcc

SEQ ID NO: 520514 - DNA, 700 bp, Homo sapiens
  misc_feature (378)..(378): n is a, c, g, or t
tggttagaacacctcagcaaaataaaattccggtttatggtgggacaacttggtttcacacatacttcaaacgggccaaaaaaattaaacagcaatttcttagacaaaaagggaaaaaaaaggaaccctttatcttgggcctttttaaaccattcttcatacaaaccaacttactttatagtatacagcttaagttacattacacaaaaaagtttcactgggaagtgctcggaataagatttggtttccgtgtggctcatttgggccttttttaacagggtttttttccctccttggaggattataatgcaactgtggttcacaccacaagttaaaagctcagaagtttggcacagagaaacgcgtccgaaaggcggngttgggctcactccggaggactcctcttaacaaaagggggtgttgaccccttcaaacaaaaaaaaaacgaacacaacaacaaaaaaacaagaagaagaaaaaacaaccaaacaaacaaaacaaacgagggggggcggcggcgcgctacaaaaagaaaatcaccccgggggggggcgcaccaaaattattagaacgctaccccccggtttttttgtagaaacaaggggggcgccccaaaaagagggaggggaaaaaaaacgagcaacggccgggcccggaaacaacacgtgcgcgcgggggaaaaacacgtcagggcgccttc

SEQ ID NO: 520515 - DNA, 175 bp, Homo sapiens
aagacctttccctctccctcgcccctagaccaaccagtactaccaggtcccacccttggtgctgccttctcttcccacagcctctaactcagtgttttgtacttccctgaattgtgatggctagacacttcctggatagtttgtggacatcatccaattaaacatactgcttaac

SEQ ID NO: 520516 - DNA, 206 bp, Homo sapiens
  misc_feature (13)..(13): n is a, c, g, or t
gcaagtagccggnaattacaggcatgtgccaccatgctgggctaatttttgtatttttagtggagacggtgtttcaccatgttggccaggctgttcttgaactcctggcctcaagtgacccgcccacattggcctcccaaagtgctgggattacaggcgtgagccccgtgcccagcaaggattgctgttttaattcttgtatcttc

SEQ ID NO: 520517 - DNA, 1742 bp, Homo sapiens
gcacaggtgtcgtgctacacgtacccctaacagccaacacgagataccggcaaacgcctcatatcaacaatagtgcggtcatacgcacacgtacgattcgtggcaagtccaccacatagctggccactctgactctataacactgcggtggcatcgatcaaaacgaaccagttcgaaacaagtttgagaacggaggctgctgagatggggaaagcggctcctatcaagatatggcctgggtctagggataaaacgtgtagaaatctgaggcgtgacacgtggtgatcaccaatctgatactcgtcgctatgtaggacacctttgagaaccagtcccgatactactgtgagatatcaatcgagtgccgccaggaagacaagagaccttgtatcacaaaaaagcgatgagttagcaagaggaccaatctacacgggcgtgaccatgatgcctgatctctagacttcgctaggacgtgctggagtagattccgactcgaacatatcgacaagcctgggctacttcatccgaacgacactggagccagaccgccagacagacgcgaaatgaccgcatatcctagggcctatagcaacacacatagagacatagacagaaaacgcagaccttcacattacgcctccgggagagctataaaacagagaacacaagggggcagttcacacgaaacctatggcatgcgacgacacaccgaaacacaacggcacaacagagagaccacaagcaaataactgcaccggagcacaccacactactgcactgtccacgggcgacaacgagatttccaacgcccaccgtgccacacagcccaacacgaaacagccaagatggggccctacccgagaaagccccatgtaacaacacaggaaaaacccacatttcactgaatggcccatcaaatttgatcaatagcgcttaatgggcaaagtttgagatagacccgacatcaaatatgcttaaggacaaagcacatcaaaggataggattgcataccgacatataggcccctactggtgcaccaccaacacaggcgacgcactcagtgcgtacagatgatgctaccgcccctcctggctaacccgcgactcatgagcacaatttgcgcgcaaataaccaggaaggaaccacaagagcaatgagctcttaaggagcaacaaatcgtcccaagaacactttcgtagttcaccaaacagtccaaccgaaacaactgggtcccagacaaggacgatcagagccacattatgcgccacagggcaccctctccctagggcaagctcactacccaacacacctgggcgtgggcaacaacgcgaccacacaaagacaccgccggaaccatggaccacagacgatacaaaagccctgaagcgggtcaccacaacacccacccggaaaacggaggaacaacccataggcccctgacatcaaagatcacaacacagccacataacaacctgaatcaacacaaccagagcagacaagcaagaacatcaacccagcgcgacacagaacgtaccatcaaatcacaatagtatacaacgataacagcacacctacaacgctagtcagacaacaaataacaccatacacagagccgcactcacacatcacctagtaaacaaaacgcacaaatctagacacaactaaccacagaacacaaagacagaacaactcgttactagctagcatgctagtagactatcgtctcgctcactccagcaacc

SEQ ID NO: 520518 - DNA, 164 bp, Homo sapiens
ccatagagttacccccaaataagtgaaaagcgctcgacgtaggggtctggaaagaagaaagcaaaaagcagcctattcacgctcacagactaaaaatgtaggctaaattgtaaacctgctcaaagaaaattctagaaaggccacctccccttctgtcgtcttct

SEQ ID NO: 520519 - DNA, 409 bp, Homo sapiens
tctagaggatccgaggagagagactgattgagtggtctcatctgtctactctggatctggatcatggcttcgtggagtgatcctcataaagaaggctggagatggatcaaagaagatcaaaggctggtgggattccatccacgttgtagaagtggcggagaaatcccgggggtcgcaccgcccattacaagttgacctccacggtgatgctgtggctgcagaccgacaaatctggctctggcaccatgaacctcggaggcagccttaccagacagatggagaaggatgaaactgtgagtgactgctccccacacatagccaacatcgggcgcctggtagaggacatggaaaataaaatcagaagtacgctgaacgagatctactttggaaaaacaaaggatatcgtcca

SEQ ID NO: 520520 - DNA, 239 bp, Homo sapiens
gtacttaggacaaatgatagaagcatggatcagggtgtggcacagggacttgtcaggtacctagctttgacgtctgggcgcaattgaagcaacttccatcgtgaatctttataatgaatgactgtggtgtatagtgcagcgaacaaatagtgctcctagttaagtatttgtcagcatccttttgtctctaacgtgtgtctatttgtacagccacgcaattcttggcacgtgtcttaaga

SEQ ID NO: 520521 - DNA, 196 bp, Homo sapiens
aattgtctcctgttgcccgaggatggcctcttgatctgtccataggccatgaacttaatagctgactcggggacaatcttgagtacattaataccattgccgtgcaaccagtgagcgaatacctccctcaagaaccatgtttcgaagccccctgaggatgttcagcgggttgatcctaagaggctattggagctag

SEQ ID NO: 520522 - DNA, 461 bp, Homo sapiens
  misc_feature (41)..(41): n is a, c, g, or t
  misc_feature (89)..(89): n is a, c, g, or t
  misc_feature (118)..(118): n is a, c, g, or t
  misc_feature (443)..(443): n is a, c, g, or t
  misc_feature (445)..(446): n is a, c, g, or t
cccctgccttattttaaaaaaatcaggcctggaacacgggnttgtacgccctgtaatccctagcaagttgggaggcccgagaacggggnactgcttgaagtcctggcaagttccaagncccagtctggacaacaaggcaaaacccccatctcccacaaaaacaaatagaaaaattagctgggcatggtggtgcatacttgtaattcccagctacttgggaggctgaggtgggagggtcacttgaaccccaggaggcggagactgcagtaagccataattgcaccaatgcactccagcctggacaatggagccagactgtctctcaaaaagaaaaaaaaaaaaaagcagaaagaaaaaaaaattttttttgtagaaatggggtcttgaactcccggcctcaagagatcctcccacctcagccccccaaagtgctgggattacananntgagccactgtccca

SEQ ID NO: 520523 - DNA, 81 bp, Homo sapiens
ataaagtgctttattggttaaaaacaaatacacaagaatgccctaaagaaatttcagtattaccccttctgtcgtcttctc

SEQ ID NO: 520524 - DNA, 298 bp, Homo sapiens
tcacgtccagtccatgtaggatggtgtcgtagacagaatgactatgagatccgagtgatattacatagaaactccttatgttagtgcaaagttgagtaatttattaatgtcataggatcatattagcgataaccagattcagaatccaaagactatattctgactctatctagccactccataagtttaatccaagacctcatggaactgattggatctcttccttgcatcatccaaagatcttcctctctctaccaaccgtagaaccactttttcccatcgactatgtacactgata

SEQ ID NO: 520525 - DNA, 281 bp, Homo sapiens
gatctcctgagcagctgggatacaggcatgcacaccacacccaaatactcttctatctttagcaggcacaggatttctccacattggtcaggctggtctcgaactcccgacctcaggtgatcctcccacctcggcctcacaaagtgctgggattacaggcatgtgccgccacgcccggcctaattttctaattttttttttttaacctgaagaaggaccccgcgtcgtcatcggtgcctacttaccccattacggacctgcgcgtctagacatcgtgggac

SEQ ID NO: 520526 - DNA, 564 bp, Homo sapiens
  misc_feature (544)..(544): n is a, c, g, or t
gagcgcgggtcaaatcgcttcgcttcgccttgggtattttgagttctgtgcatccccatctgttacagtgcacatgcaaacaaaagaacactgtgcttggcgaccacttttttcccccttttaataatggtattgagagctttaagtctaggggcagatttggaagctgtgtgtgggagacagtcacagatgggacagtacagtttcctcacttaatgcttctgtgccagcataaaattatcagagggacttcagttgaggttaaagtcaggatgaatttcctggctggatactatcctagaattttccgtatagttaaaacattaaacagttccatgccatttggaagaaatttgcctctggcgttggcatttccttcattgtgggtggtgggaagcctgttcagaggcggggtcctggaggtactggttgtcttgtctagttgtgcagcttgtgtgtggactggtgcccttattgctgaagagggggtggtacctggcaatggaggacaacctcacttcagctgcagggcagagacttggantgtctcatccctttggttgt

SEQ ID NO: 520527 - DNA, 289 bp, Homo sapiens
  misc_feature (208)..(208): n is a, c, g, or t
  misc_feature (238)..(238): n is a, c, g, or t
  misc_feature (281)..(281): n is a, c, g, or t
aaaaacacaaaaattagccaggcttggtggtgcatacctgtaattccagcactcgggaggctgaggcaggaggatcacttgaacccaggaggtggaggctgcagtgagcctagatggtaccactacactgcagcctggggtgacagagtgagactctgtctcaagaaagaaaaaaaaaaaaaaagaaagaaaaagagaaagaaagaantaaggttcaaaggccgggcatgatggcttnacacctacaatcctgggcatcattagggaggcccagggcggcnagttccac

SEQ ID NO: 520528 - DNA, 806 bp, Homo sapiens
agcgggctgaggatccggaaactgcgccgcagagtggtgcggcccagaggaggccgccgggcctgggaagggccgggctgggacgggaaacgttagtggcagctggccccctgtgggtgatggtggtgcctgagctggactggtgcatgtggcccctgagtgctgaactcctgccctgtgatgagtgaatcaaatgcatgtggtgtgcatgtgctgctgtgctgtctcccagctgcatgcttggcatggttgtgtgcatgccctccttccctgaatgcttctaggactggaatggccccatgtgtgttcccctgatgattgccccaaaccacagtggctgggtggttgcactggccacctggccctcgtggatgaatgtttggtgctgtgcccctggtgctgaccaccgtgggacagaagtaggcctagcggtcagtgttgcagcgctgtgtcttgcttgatgcacacgattgtgggtacgcacctgtgaacccccttgtgaacctgcaaaactcctgattcgccttgttccccagtcaccctgaggcgcttccttttctcctgatatttttgggccccgcagacgccctgaatgccaattcatcacgcgattgcaacttgacaaattgaaaccgctggaggttccaagttaggcgggacttgggaaggcaacgccttggacttcccataccttcgtggtgacagccaatggccctatggccaaagttcctcacgggcacgtcagccctggcgattttggggttgccctacacaccaacttcacaaagtgccatccctggcccccg

SEQ ID NO: 520529 - DNA, 1210 bp, Homo sapiens
  misc_feature (322)..(325): n is a, c, g, or t
  misc_feature (327)..(327): n is a, c, g, or t
  misc_feature (330)..(330): n is a, c, g, or t
  misc_feature (352)..(352): n is a, c, g, or t
  misc_feature (356)..(356): n is a, c, g, or t
  misc_feature (362)..(362): n is a, c, g, or t
  misc_feature (369)..(369): n is a, c, g, or t
  misc_feature (373)..(373): n is a, c, g, or t
  misc_feature (396)..(396): n is a, c, g, or t
  misc_feature (431)..(431): n is a, c, g, or t
  misc_feature (476)..(476): n is a, c, g, or t
  misc_feature (515)..(516): n is a, c, g, or t
  misc_feature (518)..(518): n is a, c, g, or t
  misc_feature (567)..(567): n is a, c, g, or t
gcttggaaagatggcgtcccgcaaggaaggtaccggctctactagcacacctcttccagtctccaccgcacggcgcagcagggaaaggactaaaggcaaaggcggactcgggagaattcaggccggtgaagcaagtgcagatagatggccgttgtggtattaaagataatcaaacattatcaagaagaaggacaaggaactgaagttgtacaaggagtgcttgtggtgtctggttgtagaatgatcggcttgacacattaccaacatgctttccatttgccctacaggcacacagacggatgagtgctgacatttgatggannnntncantatccgatggaaatgctgcggngcgnttcgcnatgtaancatngatcatcttcacgtgggctggtntcagtccacatactatgtgctcattcgttacccgngcactcctggactctcagtttagttaccagcatgccattgaagantctgtcgttctcatttatgatcccataaaaactgcccanngntctctctcactaaaggcatacagactgactcctaaactgatggaagttngtaaagcaaaaggatctccccctgaagcattgaacaccgcaaatatcaccttttgagtacatgttctgaagaagtggcgatccgcacttacacaattcacatctgatcactgtccttatggtgggaacttggaaacagcaagttcacggctgtgtgcagatcaaccctgcacctgctccagcctaggccaggcaccccatcaatttggcgcggcaacacatctcacagttgcctgatgcgaccccgaccgtgccgacatgagccccgataaatcgctccacaaaaccacatcatcacaggacacatccacgcacacaaacacagcgccggcaaacactaagcactagaaaggctgccacgagccggcgaaactgcaggcccgaagcgcagcgaaccccggcacccgaagagggacacgtgcccaccccgtaaccacaacggcccccgtacagcgggacgacccgcccactagagggaacaaaaacaatggccgacacagcagatagtcgccccaaggacaagccaccgcccccgcaacataacaacgcaaagatagccagacaagcaacccgtaccgcaccgagaaaccgacaacgagcagatcgcgcgaacacaacaacaaaccgccgcgcgccctacagat

SEQ ID NO: 520530 - DNA, 596 bp, Homo sapiens
agtgattctagaggatccctgagagacgtgtagcatgcctgtaattataagtgtggtatgtgttacatcatgcataactgtctcatttgtgattagttagtaacttatttcaagtacttgtaagctcagtctgcctcagatgtaatcataatagatgaattaaattaatcaaataaaggaacagcaattcagaaagaaacacactttaagaaatcaaaattctcaattcaggcagtctgtatctatcatgaggtattctactcctttagaaattgcagtatcgcccaacaaaaagtgggttatttgcactggtatatggagatgactgaacagatgaaggcatcagatgccttcatcagctggtattttgcctaagatctatttaagataaccttttcttatatttctcacttaatattgggcataatcgtatcattcaagattaagtctgggttatttctttgataagaactgaatgtggccgggcgcagtggctcacgcctgtaatcccagcactttgggaggccgaggtgggtggatcacaaggtcaggagatcgagaccatccattgcaacacggtctctcagggtaccgag

SEQ ID NO: 520531 - DNA, 705 bp, Homo sapiens
  misc_feature (487)..(487): n is a, c, g, or t
  misc_feature (594)..(594): n is a, c, g, or t
  misc_feature (668)..(668): n is a, c, g, or t
tgtgatgactcatgcctgaaatcacagcactttgggaggccaaggtgagtggatcacttgaggccaggagttcgacaccagcctggccaacacggcgaaaccccatctctactaaaaaatacaaaaaattgccagaagtggtggtgcacgcctgtagtcccagccactctgagactgaggcaggagaatcgcttgaacctgggaggcagaggttgcagtgagccaagatggcgccactgcactccagcctgggtgacagagagaggctccatctcaaaaaacaaacaaacaaacaaaagtgtgcctcttgggctcggcgcagtggctcacacctgtaatcccagcactttgagaggctaaggcaggcagatcacctgaggccaggagttcgagaccagcctggccaacatggtgaaaccgtgtctctacttaaaatacaaaaattagctgggtgtgcttgtgtgtgcctctagtcccagctacttgntaggctgaggcacgagaatcagttgaactcaggaggcggaggttgcagtgagccaagatcacaccaccggacttcagcctgagtgacagagtgagatcctgccccanaaaaacctctcataacatgcattgcggcccgcaattcggggctcactttggtcaatttcgccctaatagtgagncgtataaccattcacttgctcggcggtttccggcgcg

SEQ ID NO: 520532 - DNA, 382 bp, Homo sapiens
tccggtcgcatgttcccaggaggctctatctcttgactctgacactgcctggctcccaaagagctggaatcacaggcgtgacgcaggcgcccggtgaaaaaatatattttctattcattaagtggaagtgaagagatcgtcataaagatcttcgtgttgagaaaggagaggaggaggaagaggagggattgatcttggtgtctcacagcttgatagaggcagaagaaaatccaggagtataagtggacgcgtacagttcaaaccgtgttgttcatgggtcaactgtactttgaaaagtgctccctctggtggctgtggggggtgcagggagaccagaacagtctagatgctggtgctgggtagtggggaaacatggcgaaag

SEQ ID NO: 520533 - DNA, 767 bp, Homo sapiens
  misc_feature (5)..(5): n is a, c, g, or t
  misc_feature (93)..(93): n is a, c, g, or t
  misc_feature (95)..(96): n is a, c, g, or t
  misc_feature (123)..(123): n is a, c, g, or t
  misc_feature (147)..(147): n is a, c, g, or t
  misc_feature (166)..(166): n is a, c, g, or t
  misc_feature (216)..(217): n is a, c, g, or t
  misc_feature (221)..(221): n is a, c, g, or t
  misc_feature (223)..(223): n is a, c, g, or t
  misc_feature (227)..(227): n is a, c, g, or t
  misc_feature (236)..(236): n is a, c, g, or t
  misc_feature (302)..(302): n is a, c, g, or t
  misc_feature (308)..(308): n is a, c, g, or t
  misc_feature (316)..(316): n is a, c, g, or t
  misc_feature (318)..(319): n is a, c, g, or t
  misc_feature (323)..(323): n is a, c, g, or t
  misc_feature (331)..(331): n is a, c, g, or t
  misc_feature (335)..(335): n is a, c, g, or t
  misc_feature (370)..(370): n is a, c, g, or t
  misc_feature (372)..(372): n is a, c, g, or t
  misc_feature (374)..(374): n is a, c, g, or t
  misc_feature (382)..(382): n is a, c, g, or t
  misc_feature (409)..(409): n is a, c, g, or t
  misc_feature (412)..(412): n is a, c, g, or t
  misc_feature (437)..(437): n is a, c, g, or t
  misc_feature (502)..(502): n is a, c, g, or t
  misc_feature (511)..(511): n is a, c, g, or t
  misc_feature (516)..(516): n is a, c, g, or t
  misc_feature (539)..(539): n is a, c, g, or t
  misc_feature (607)..(607): n is a, c, g, or t
  misc_feature (615)..(615): n is a, c, g, or t
  misc_feature (680)..(680): n is a, c, g, or t
  misc_feature (687)..(687): n is a, c, g, or t
  misc_feature (744)..(744): n is a, c, g, or t
gctcncgttccctcttggtcaggtggtttgttttagagctactcgatatttataactttttataagccccggtcatttttagaaaacaaaatngnnttgtccaacaaagtaaacaattttttnctgtgtggcagtttctttttttanaaaacactgagctaaaacncagaatgtgtatttgtttggatctgaacccaatcttttgaaatccccccnncccngnaganccctgaagncatttacggggctttttaatggtttcttaaatactagttgtatacctcataatgtctaaggcggcnattttntttctccngnnggtngcatttcnttcngaggctgccccgagtttaaattacaccatagtatntncnttctttcngcccatccttctttctgttttgccgtnttntccaacccgagccatattggtggcncccacgtctgccgttcatgccccccccgctctgatattttatggatacatttgtataaagcaagncttcttgcnctganccctgggtgaccacaaataaatngagaggccatgattattggacgctgagagaaagtagcatacttaaacccacagtacagataatccggnggcaagcnaaaacaaagctataacttggcagtggtattcacccaccacttattccaaaaacatattttgcttnttaaatnaagggaaatatggtccagttttgcaatgttaatagctgccagtctctcatatttttnataaatatcatttcctgactagc

SEQ ID NO: 520534 - DNA, 400 bp, Homo sapiens
  misc_feature (107)..(107): n is a, c, g, or t
agaaatctagaagaatttggagcattatctccactggtactatttagctggactgttaagtattttcttccagaacttaagaaacgccactctgggtcagagagctntggtctgttgtatctctagtcagttcagtaggagcattttccctacaataatggcaccttccccagatgaacatttttgaagatcagaaataaccttagaatctcaggaacatcttctgacattcccaacttccctcatctcctattatatattatttttcgtgaaattccctcttaagctcattgtgttttcacccagttcactagaccaacagcaataccagtaccagagttatgttttagaaagtctactagctgtccacaaagtcgtagttcattaactttgacccaaa

SEQ ID NO: 520535 - DNA, 529 bp, Homo sapiens
cagtccaacatctgtggatatgggtttaagaccctccctaaagagggttccgtcctattccctgagggaaggaatgcccaagaggactggggttcaaggagcttccagaaagctgaacacggtagaggtcaccgggggttgcacccggggaagcatggaagatccatgccccttccccgtacataccttgccttacggtctcttgaccggcatccttggcactatgctttatagtaaactgataaatttaagtgtttctctaagttctgtgagccgctccagcaaattaatcaaacccaaaggggggggggtgggtgtcacacctcatgtagcccataaatacgtatacctactatgtacccacaaaaacaaaacaatttaaaaacaaggagggggccaggcacagtggcccacgcttataatcccagcacttggcgaggccaaggcaggtggatcacttgaggccaggagttcgagagcagtctggccaacgcggtgaaacccctctctaataaaaatacaaacatta

SEQ ID NO: 520536 - DNA, 928 bp, Homo sapiens
gcgtaccttggccttcaatgtgcctgggcggaggttgtggctgtgggcctggctggacagtatggtggagctgtgggcctggcgagaatggggcacggctgactgccttctcttgcccaccatgtgtctttgttgcctcgcgtgcgcctgtttccgtgctgtgtcggggttgccatgtggacgtgacggctggacgcaggactggcatgagtggctgatcgcggtggctgtcggtactatcagacgcgcgatggcgatcagggactctacataaatctcgttcagcgtttcccagtggggcttcagaggtcagggctacttggaatagtcgcgcaggatgatcctgcccatgcggctggctaagtccccaatggatatttggtcgaagtgtgtgcacgaaagactgaggtccatctgcgagaggcatgcgagcagcatcaacggaagtggctaccacttcacggtcccatcctggcatccatgctccaaggagttcgcagaatgcgcttgatgactatgcgcacgtgtggccctatcttcgccaggagagtctccttggtgttctggcctcagtagggaatttcacagatgcatgcctttggccacagggcaagctgctgacagcaggtcaccacaagggcagacagactttccactgtggccaactgagctgccgagggacattgagggcccttgtgagctgctgtagttttcagcactgatgtgaggcagcctggccaccgggggccgggatcagagtctcctcttgctgggcacgtgagggaacatgcaaaaccccgtgttttgatccaacgtccgttccttgcctgtcaccgtgacttgggtcacttggctgttgccttggaccaaaagataacctatcttgatatcctggtccagtgatggtcctgtgggagctctgggaaca

SEQ ID NO: 520537 - DNA, 384 bp, Homo sapiens
gtgccgatatcacatgacatctcctcttctctgatttctccttctgtgtgtcttcttttttagtgtgtatcttttttttggtgggggggacatagtcagtgctctgtcacccagactggagtgcagtggcatgctcacagctcaccgaagcccgacctcccgggctccagcaatcctcccacctcagccccccgagcagctgggaccacaggcatgcaccaacacgcaaggccaatttttttatgttctgtagagacagggtctcaccatgtttcccaggccggtctcaaactcctggactcaagggatccacccgccttggcctcccaaagtgccgagattacaggcatgagttcgagaccagcctgggcacacattatggag

SEQ ID NO: 520538 - DNA, 513 bp, Homo sapiens
  misc_feature (2)..(2): n is a, c, g, or t
  misc_feature (358)..(358): n is a, c, g, or t
  misc_feature (367)..(367): n is a, c, g, or t
  misc_feature (396)..(396): n is a, c, g, or t
  misc_feature (453)..(453): n is a, c, g, or t
  misc_feature (500)..(500): n is a, c, g, or t
cntcaggtggttgttaaactgtctctgtaaaataataattggttgcagccagctccaagcaaggacagtctctcaatagatacaaaacaccctgatctggtgatcagccgcttcccgataagatctcaggagctgggcaagcagcctggagcatgcgcaccaagaggcaaaatggcggaatttaaccagtatatgacctaccttcctctgggaacgcacgactgggtaaggggaaaaatgcctcaagtgagcatgcgcgcaacttcagtaatcacactgtgcatgcgaccccttccaagtgctgggcaggtcaccacatacgccggacaagcctgctgcaagggaagaatcaggggangatgagacngtaaatcccaggactatgccaaaattacnataaaacccccaagtttaaggggtcaggcagggcactttagatcttctcaaggttgncttgcctgaccccaggtgtagtgtacttccttttggttcctggctcnaaaactttttaat

SEQ ID NO: 520539 - DNA, 196 bp, Homo sapiens
attagatgtctactctggtcctccaaatattttttaccctaaacttaaaatgggctcacatagttacttggtctattgcaccaccatcttctagctttcttcctgagcaggttaagtgtacatcctccgtttttagtagacacctaattcttccgggacctaattacttactcaacctatatgttcttctgtagtg

SEQ ID NO: 520540 - DNA, 225 bp, Homo sapiens
  misc_feature (63)..(63): n is a, c, g, or t
  misc_feature (118)..(118): n is a, c, g, or t
gctcggtacccctgtcgtgcagcagctgatcagccatggtgcgagcgaagggaggaagagcanagggagcgagggtggctgcaccaacgcgggggctgcgacggcgggggtacctccnatgctgctgctgctgctgctgctgctaaggcgcgctgtgcgctatgccgccgccgccgcctgcgccgccgcctgactacgagtaacggcacgggggtccacgacact

SEQ ID NO: 520541 - DNA, 1499 bp, Homo sapiens
tattggagttcgtgaattgctggggttatgttacatgtctcgtttgctgtgtttttcgttgtggcctcttctagtggtgtgattcttgttgtctctgtgttgctgtagtgtgttttcagtgctggtcgtcgtgttcaatgtgttttgtgcttgttttccactgtctccttttctcgttttgtggatctggggatgtcttgttattacgcgcctgggtgtctcacccgttttttttttcttgtttgagttttttgcacactttgggccatcttggtgttaattcgggtttggtactgtctctggcttgctctatgcttcacgctgaatggtgcgctcttcgagtggcctcttctttgagtcattaggcatcgggaatttgaataaatgccgtgttctctccgttttctcgccgtgcacgactagttgtcaaactttccccctactctggtgatggtttgtgggtttttgcctcaacagtctagtgttgtgtccaatatttctatgcgacctcctcctaatttatttgtgtctctcgcttgggcgtcatatactatgtttctgatttgggatgtataactcaggccgttttgcttgtgtatacaatttgctggttgagaatgtttcttgtgatgtgaccccaacttcggggtcataccggcctttgcggcccgtgttttaaacgtgatgtgtgtaatcacgctatgggattgtgttctgctctacgtgtttaagcggtggttgtgtgagagtaatgcttgtgtaaggtgtggtgtaaaggggattatttgtaggctgatgttgtaataagtgtgtgcgccattttgccttaatattcggtgagagtccatgttctagttttttgtttttttgggttgtgatctcgggagaggaacaagtgatgtttgagtcctgtcgactgttttgtcggtagatctcgctcctggtagaaaggtgctagggaacacgttagttgctagtgtagacaccactggcatctggcatgtcagtagtccatcgagcttatgttcacttgctgaccaaggccttactgtagtctgtctgtaagcaggatataactcatccacactatgtctgatccggctacagtgtggagtgaccatctccttgggagcaggtacttctttagatcacgtgcaacgaaggtgcagtcacctacgtgggatggggtgcggctggtagtctggtcggtccgaggtaccctggtgacacttgatcctatacttcggataggacatgtatccctggatggggggaccataggggtcagaaggaggcagacagaaaaccataacattttcagctgacgaaagccgccctccctgctctaagaaggggctccgtgaagttcttgcccagataccgacgctgctctgcagtgagttcgtgaccttctcttcagtgtgctgtaaatctgtaatataccattctctgtggcctgtttttcctggaagaagcgaataacagcttggcaggccatg

SEQ ID NO: 520542 - DNA, 818 bp, Homo sapiens
gggccaaggctcctatgtacccctgacttcggtgacacggacatgcagtgtgagcctctgaagtccgcagtggctacaggattcaaggccagccagcaggacgactccatgcagggtcctgtactacatggagaaggatgctggccaacttcgacccattctcgacctggccccacccagatggccgtgtgtgagctgggaccatgcagctgcacacgtcagcctcaccgtaccacgacaggcacgacttggctgatctcgagcccttcccaggggaccctgaccactcaaccaccgatccggcgactgacgcgagtgtggcgtggaccaacatcccaccccctgggagatcccaaagggggacttggcgaaccaaggcaagcccccgcccaggggcagacaagggccacaggcgagggagctgggcagggtgacgccagaggcaggacgcaccagagagacccacggcacaaccgggtggtgaaccgaccaccatgaggaaaccggaacgcatacaaacaccacagacgcgaaagacaacaacgacaccgaaggttccaaggggcaaggacaagagggtactcaccgcgaacggacgccgtacgacactggagcgtggcgcgacagcggcacggacaatgccctgacgagccacatatgcgacggtggcaccccacacggcacgggcagagccccgacagtcgaccctgtgtgaaccggaacggcttccgtaagctacacgcctaaaaggtcaactagcaatattcgcgaatcggtgaacacttataccaccaagactgccatacaccacgggatga

SEQ ID NO: 520543 - DNA, 859 bp, Homo sapiens
  misc_feature (41)..(41): n is a, c, g, or t
  misc_feature (80)..(80): n is a, c, g, or t
  misc_feature (193)..(193): n is a, c, g, or t
  misc_feature (244)..(244): n is a, c, g, or t
  misc_feature (272)..(272): n is a, c, g, or t
  misc_feature (282)..(284): n is a, c, g, or t
  misc_feature (297)..(297): n is a, c, g, or t
  misc_feature (318)..(318): n is a, c, g, or t
  misc_feature (320)..(320): n is a, c, g, or t
  misc_feature (348)..(348): n is a, c, g, or t
  misc_feature (359)..(359): n is a, c, g, or t
  misc_feature (375)..(375): n is a, c, g, or t
  misc_feature (382)..(383): n is a, c, g, or t
  misc_feature (392)..(392): n is a, c, g, or t
  misc_feature (400)..(400): n is a, c, g, or t
  misc_feature (405)..(405): n is a, c, g, or t
  misc_feature (439)..(439): n is a, c, g, or t
  misc_feature (447)..(447): n is a, c, g, or t
  misc_feature (495)..(495): n is a, c, g, or t
  misc_feature (502)..(502): n is a, c, g, or t
  misc_feature (509)..(509): n is a, c, g, or t
  misc_feature (554)..(554): n is a, c, g, or t
  misc_feature (562)..(562): n is a, c, g, or t
  misc_feature (679)..(679): n is a, c, g, or t
  misc_feature (776)..(776): n is a, c, g, or t
  misc_feature (831)..(831): n is a, c, g, or t
gctcctctccgcagtaagttattccaatgtctctgcaggtntctgatggtcgtagtagagtgtagctcctctctgctggnaggtggtctctgtagctttcagcggagaaggtactcctctctgtagctggtcaccccaccgtctccagctatcagcagagagggtactgctctctgcagctggtcatcctgtnccctcgtctctaccatcttcatcctctggctattctctgggctgctctggntgagcctagggtttttatggacctcagnggggaagaannntgtgctgattggnccattggcaggcccagaaaangntccaagagtatccactctggtcagaagnaatggaagcanagaacccagaattaangaactgnntggattganggtggggntttantggggaggccaccccctttctcctgttgctattnatggttgnaggttttggtttcgttttccctttaagatcagagcagttgctggagtngagagangccaggnagtggaagcagacacccctgagcctgcagggatggagggtgaagnttgctgtncttcctgggatggccgatggtgcaggctacagagatgccctcgtcctgtgcctgggggggcagccacagctgcacctgggagctcccaccccgccaacttggaagaggcagggcttncacttgtccctggctcctgcctgcgcggctgcagctgcatctggaagggcaaattctgcctgttcccggctcccccaggagcagagaggctcggatncacagctgcagtttggggtggctgtagccctgcccaagagggtggggctcctgcntgctccatagagcagaatggctgggtct

SEQ ID NO: 520544 - DNA, 2093 bp, Homo sapiens
  misc_feature (5)..(5): n is a, c, g, or t
  misc_feature (73)..(73): n is a, c, g, or t
  misc_feature (273)..(273): n is a, c, g, or t
  misc_feature (303)..(303): n is a, c, g, or t
  misc_feature (547)..(548): n is a, c, g, or t
  misc_feature (610)..(610): n is a, c, g, or t
  misc_feature (1579)..(1579): n is a, c, g, or t
atagncttatccgcagaggacaccgcgaccacgcaactccccttaaccgctcctcgatcacaacagctagcantgtgatccagacaaagtaggcttgtcacacgctctgtaacagtgctgtcttgaagtatgagccggcatcttacacctaagctcttgccccagtagagtagcctcacacccacgctgctagctcaaggccaacctcatctgttcagaccatctatgtgattgctttcccttaagtgaaatcaagatgggtgcggctctccntcttcatccaggagccttcctggcccctcnctccttaccccaggggtcctgctggccagacacagctggcatctcctagggcttggtggatgccggtggatcctgttccctccaccccctctgctgaggcctcagtcctcccagacctgctagagtggaccccagactcccaggagaccccagggtgcaggagaggggagaaggctggaaaggttgcggggagggagagggctgggccaggagtcaccggggcaggctgggggtcctggcccanncggacccgctgatcatctagttagtgggggaggggcccaccaggggtcggggcccggggcangcctccagggccagacaatgtgtcttcctcaggagtcccagcaacagaggggcctaccagtgaggtcacagagctccgtggtgccgttggggaagagagccaggagactctgatgatgaattctgaccagaaggcagtgaaattcctggcaaatttttacatcaatggaggcaaacactggacccatggtcacctgaggcagacacaaccagagcccacccagcccaaggcatctgtgctgttgttgggcccggagccggggatggcctgggatgagacacagcccccaaagatgaaggagatcccagttggcctcaggttacagacgggcaccccccaggagtccctgcccacctacacccagaccctgagggaactatagggcggtggccgcagggcatggcagactttgtggttccagagcgaaagccccttcacgcagaaagctgacttcgaccaagagcaaaagtggccctcgccagcccactaccagctgctcagccggccggccttccccgccttcagcttcagaggctgccactccgcttccaagacacctgaaggccaacccacctagggctgcctggggctagggggctgggcctcagggtgcagccccagtccctgcttcaggcctctttgcaggcacctggcaagagatgccctggccccaacacctacaatatccttcctgggagccgcctgcagagcccccgctcgccggcttctcgatgagccgtcccctgcgttcacctcctggctcagcacctcccgaacccctggcccagccgcctaccacgtggaggactgcaactcacgcttcccttcggcgcctggcgtggtcatccagggtgtacgcagacccaagcgccacgacacaggccccttctgcacgctctagagccagctgggcacaacctgcttggcccggccaccgagtggaaccatggcctcccccggggctttccnaggcctcccctgggacttgggccccagcctggccttctgaccctctgggcaccccgatgcacccttctggctggccaacccttctatgggctgtggacaaggctggcccagcctggatcccccatctgcccatctccccgctacactgagatgctgttggttttcccgagctctgtggtgtgcagttgtctgtccgtcacccgggggcgggtcctagagatatggctgccagctgggtcatttccggctttccctgttgaggggtctccattcagctgcccctgaagggtgctctcttctctagggtggcagcctgtgactgaccctgagctctagcctggagcgagatgggaggtgggctctgtggacacccccacccagccgtgtcactcaggggcctggtctagctgctgtccacctgagtgtcagctgcttgcacgagccagggaactgggaaggaggcgtcaaatgccctgagccgcacacctccaggtgggtcaggcctggccagacc

SEQ ID NO: 520545 - DNA, 789 bp, Homo sapiens
actagttctagatcggcgcggatgtgctatgctggggtcccagggtggcagcagcagtcagggtcactgtgggagccctggggtggagtgacaaagcgcattgtcctgtgcccgccatggcagaagcgcagcctttgtatggaggcccaatcgcgctcccgtctggagaagcggcttccggggatgtggctgccgggtcggttctggtccacagcacggtgccggggctgcaggttgttgagggctgtgactccgtgggtgctcagccaggctccagcaggtgtcagacgtgctgttgaagagcaaagccacagacgatgacttgtccatactcagtggatgctccatgctgtggctacacagtagtgctgttgacatgtccacgggtttcgcagtggcccggtggccttgggagctgctttctcctccgcacttggcgtgggcgtgcattctggccctgtgctggaggcctttgctttgagggtgctgtgactcggctcttcccccaggccctccccagccgacgacagccaccgggagacggagctcggagcacgattgtctcagatgcggggcgctgtgcggtgacgaacgctcgcagggattctcgtatcggtgcccttggtgactcgtggaggtgccgtgaggcggcggtgctctggacctcggtgtacactgacctttgtttcacttgcctctgtcgactccgacagcaggaaacccggccgtggcctggcagtccgctccatgccgacgctgggtctggcttgtctggagcgtggggccccc

SEQ ID NO: 520546 - DNA, 2062 bp, Homo sapiens
  misc_feature (5)..(5): n is a, c, g, or t
  misc_feature (73)..(73): n is a, c, g, or t
  misc_feature (273)..(273): n is a, c, g, or t
  misc_feature (303)..(303): n is a, c, g, or t
  misc_feature (547)..(548): n is a, c, g, or t
  misc_feature (610)..(610): n is a, c, g, or t
  misc_feature (1006)..(1006): n is a, c, g, or t
  misc_feature (1076)..(1076): n is a, c, g, or t
  misc_feature (1078)..(1078): n is a, c, g, or t
  misc_feature (1081)..(1081): n is a, c, g, or t
  misc_feature (1083)..(1084): n is a, c, g, or t
  misc_feature (1089)..(1089): n is a, c, g, or t
  misc_feature (1098)..(1098): n is a, c, g, or t
  misc_feature (1548)..(1548): n is a, c, g, or t
atagncttatccgcagaggacaccgcgaccacgcaactccccttaaccgctcctcgatcacaacagctagcantgtgatccagacaaagtaggcttgtcacacgctctgtaacagtgctgtcttgaagtatgagccggcatcttacacctaagctcttgccccagtagagtagcctcacacccacgctgctagctcaaggccaacctcatctgttcagaccatctatgtgattgctttcccttaagtgaaatcaagatgggtgcggctctccntcttcatccaggagccttcctggcccctcnctccttaccccaggggtcctgctggccagacacagctggcatctcctagggcttggtggatgccggtggatcctgttccctccaccccctctgctgaggcctcagtcctcccagacctgctagagtggaccccagactcccaggagaccccagggtgcaggagaggggagaaggctggaaaggttgcggggagggagagggctgggccaggagtcaccggggcaggctgggggtcctggcccanncggacccgctgatcatctagttagtgggggaggggcccaccaggggtcggggcccggggcangcctccagggccagacaatgtgtcttcctcaggagtcccagcaacagaggggcctaccagtgaggtcacagagctccgtggtgccgttggggaagagagccaggagactctgatgatgaattctgaccagaaggcagtgaaattcctggcaaatttttacatcaatggaggcaaacactggacccatggtcacctgaggcagacacaaccagagcccacccagcccaaggcatctgtgctgttgttgggcccggagccggggatggcctgggatgagacacagcccccaaagatgaaggagatcccagttggcctcaggttacagacgggcaccccccaggagtccctgcccacctacacccagaccctgagggaactattgctggagcaacgccncctgatcacagctgacctggaagtccccagccccaccaggtaccagtgccgagcccgtccgtacgagagncntcncnnacccncactacagnatcggctgcaagcaccagggccgagagggcggtggccgcagggcatggcagactttgtggttccagagcgaaagccccttcacgcagaaagctgacttcgaccaagagcaaaaggcctctttgcaggcacctggcaagagatgccctggccccaacacctacaatatccttcctgggagccgcctgcagagcccccgctcgccggcttctcgatgagccgtcccctgcgttcacctcctggctcagcacctcccgaacccctggcccagccgcctaccacgtggaggactgcaactcacgcttcccttcggcgcctggcgtggtcatccagggtgtacgcagacccaagcgccacgacacaggccccttctgcacgctctagagccagctgggcacaacctgcttggcccggccaccgagtggaaccatggcctcccccggggctttccnaggcctcccctgggacttgggccccagcctggccttctgaccctctgggcaccccgatgcacccttctggctggccaacccttctatgggctgtggacaaggctggcccagcctggatcccccatctgcccatctccccgctacactgagatgctgttggttttcccgagctctgtggtgtgcagttgtctgtccgtcacccgggggcgggtcctagagatatggctgccagctgggtcatttccggctttccctgttgaggggtctccattcagctgcccctgaagggtgctctcttctctagggtggcagcctgtgactgaccctgagctctagcctggagcgagatgggaggtgggctctgtggacacccccacccagccgtgtcactcaggggcctggtctagctgctgtccacctgagtgtcagctgcttgcacgagccagggaactgggaaggaggcgtcaaatgccctgagccgcacacctccaggtgggtcaggcctggccagacc

SEQ ID NO: 520547 - DNA, 2331 bp, Homo sapiens
  misc_feature (5)..(5): n is a, c, g, or t
  misc_feature (73)..(73): n is a, c, g, or t
  misc_feature (273)..(273): n is a, c, g, or t
  misc_feature (303)..(303): n is a, c, g, or t
  misc_feature (547)..(548): n is a, c, g, or t
  misc_feature (610)..(610): n is a, c, g, or t
  misc_feature (1111)..(1111): n is a, c, g, or t
  misc_feature (1181)..(1181): n is a, c, g, or t
  misc_feature (1183)..(1183): n is a, c, g, or t
  misc_feature (1186)..(1186): n is a, c, g, or t
  misc_feature (1188)..(1189): n is a, c, g, or t
  misc_feature (1194)..(1194): n is a, c, g, or t
  misc_feature (1203)..(1203): n is a, c, g, or t
  misc_feature (1817)..(1817): n is a, c, g, or t
atagncttatccgcagaggacaccgcgaccacgcaactccccttaaccgctcctcgatcacaacagctagcantgtgatccagacaaagtaggcttgtcacacgctctgtaacagtgctgtcttgaagtatgagccggcatcttacacctaagctcttgccccagtagagtagcctcacacccacgctgctagctcaaggccaacctcatctgttcagaccatctatgtgattgctttcccttaagtgaaatcaagatgggtgcggctctccntcttcatccaggagccttcctggcccctcnctccttaccccaggggtcctgctggccagacacagctggcatctcctagggcttggtggatgccggtggatcctgttccctccaccccctctgctgaggcctcagtcctcccagacctgctagagtggaccccagactcccaggagaccccagggtgcaggagaggggagaaggctggaaaggttgcggggagggagagggctgggccaggagtcaccggggcaggctgggggtcctggcccanncggacccgctgatcatctagttagtgggggaggggcccaccaggggtcggggcccggggcangcctccagggccagacaatgtgtcttcctcaggagtcccagcaacagaggggcctaccagtgaggtcacagagctccgtggtgccgttggggaagagagccaggagactctgatgatgaattctgaccagaaggcagtgaaattcctggcaaatttttacatcaatggaggcaaacactggacccatggtcacctgaggcagacacaaccagagcccacccagcccaaggcatctgtgctgttgttgggcccggagccggggatggcctgggatgagacacagcccccaaagatgaaggagatcccagttggcctcaggttacagacgggcaccccccaggagtccctgcccacctacacccagaccctgagggaactatgtgagtgagggtcctggccaccccacccccaagctggtctttggggggctgtgggaggggcccgctgaaaggagcccaggcccagagcttgcttcctgtggccagtgctggagcaacgccncctgatcacagctgacctggaagtccccagccccaccaggtaccagtgccgagcccgtccgtacgagagncntcncnnacccncactacagnatcggctgcaagcaccagggccgagagggcggtggccgcagggcatggcagactttgtggttccagagcgaaagccccttcacgcagaaagctgacttcgaccaagagcaaaagtggccctcgccagcccactaccagctgctcagccggccggccttccccgccttcagcttcagaggctgccactccgcttccaagacacctgaaggccaacccacctagggctgcctggggctagggggctgggcctcagggtgcagccccagtccctgcttcaggcctctttgcaggcacctggcaagagatgccctggccccaacacctacaatatccttcctgggagccgcctgcagagcccccgctcgccggcttctcgatgagccgtcccctgcgttcacctcctggctcagcacctcccgaacccctggcccagccgcctaccacgtggaggactgcaactcacgcttcccttcggcgcctggcgtggtcatccagggtgtacgcagacccaagcgccacgacacaggccccttctgcacgctctagagccagctgggcacaacctgcttggcccggccaccgagtggaaccatggcctcccccggggctttccnaggcctcccctgggacttgggccccagcctggccttctgaccctctgggcaccccgatgcacccttctggctggccaacccttctatgggctgtggacaaggctggcccagcctggatcccccatctgcccatctccccgctacactgagatgctgttggttttcccgagctctgtggtgtgcagttgtctgtccgtcacccgggggcgggtcctagagatatggctgccagctgggtcatttccggctttccctgttgaggggtctccattcagctgcccctgaagggtgctctcttctctagggtggcagcctgtgactgaccctgagctctagcctggagcgagatgggaggtgggctctgtggacacccccacccagccgtgtcactcaggggcctggtctagctgctgtccacctgagtgtcagctgcttgcacgagccagggaactgggaaggaggcgtcaaatgccctgagccgcacacctccaggtgggtcaggcctggccagacc

SEQ ID NO: 520548 - DNA, 1588 bp, Homo sapiens
  misc_feature (13)..(13): n is a, c, g, or t
  misc_feature (368)..(368): n is a, c, g, or t
  misc_feature (438)..(438): n is a, c, g, or t
  misc_feature (440)..(440): n is a, c, g, or t
  misc_feature (443)..(443): n is a, c, g, or t
  misc_feature (445)..(446): n is a, c, g, or t
  misc_feature (451)..(451): n is a, c, g, or t
  misc_feature (460)..(460): n is a, c, g, or t
  misc_feature (1074)..(1074): n is a, c, g, or t
gggctagggacangtagaggggacaggctgtggggcatgtggctgggagcggcgggggctgagacagtggctgctggtctcccttgcaggcccaaggcatctgtgctgttgttgggcccggagccggggatggcctgggatgagacacagcccccaaagatgaaggagatcccagttggcctcaggttacagacgggcaccccccaggagtccctgcccacctacacccagaccctgagggaactatgtgagtgagggtcctggccaccccacccccaagctggtctttggggggctgtgggaggggcccgctgaaaggagcccaggcccagagcttgcttcctgtggccagtgctggagcaacgccncctgatcacagctgacctggaagtccccagccccaccaggtaccagtgccgagcccgtccgtacgagagncntcncnnacccncactacagnatcggctgcaagcaccagggccgagagggcggtggccgcagggcatggcagactttgtggttccagagcgaaagccccttcacgcagaaagctgacttcgaccaagagcaaaagtggccctcgccagcccactaccagctgctcagccggccggccttccccgccttcagcttcagaggctgccactccgcttccaagacacctgaaggccaacccacctagggctgcctggggctagggggctgggcctcagggtgcagccccagtccctgcttcaggcctctttgcaggcacctggcaagagatgccctggccccaacacctacaatatccttcctgggagccgcctgcagagcccccgctcgccggcttctcgatgagccgtcccctgcgttcacctcctggctcagcacctcccgaacccctggcccagccgcctaccacgtggaggactgcaactcacgcttcccttcggcgcctggcgtggtcatccagggtgtacgcagacccaagcgccacgacacaggccccttctgcacgctctagagccagctgggcacaacctgcttggcccggccaccgagtggaaccatggcctcccccggggctttccnaggcctcccctgggacttgggccccagcctggccttctgaccctctgggcaccccgatgcacccttctggctggccaacccttctatgggctgtggacaaggctggcccagcctggatcccccatctgcccatctccccgctacactgagatgctgttggttttcccgagctctgtggtgtgcagttgtctgtccgtcacccgggggcgggtcctagagatatggctgccagctgggtcatttccggctttccctgttgaggggtctccattcagctgcccctgaagggtgctctcttctctagggtggcagcctgtgactgaccctgagctctagcctggagcgagatgggaggtgggctctgtggacacccccacccagccgtgtcactcaggggcctggtctagctgctgtccacctgagtgtcagctgcttgcacgagccagggaactgggaaggaggcgtcaaatgccctgagccgcacacctccaggtgggtcaggcctggccagacc

SEQ ID NO: 520549 - DNA, 661 bp, Homo sapiens
tgcggcgcccattgatggcgagcctggcgctgtgcgagtgtcggagatggcggggcattcagcacctcggccgtcctgggccgcacgtgacacccccgctggggccgatgcccaacagtgacatcgacttgagcaacctggagcggctggagaagtacctggagcttcagacctgataccggcgccgcagcagagcatgtgctggcgcagtgccccagcactggtggctggacctacctgagagtatttcggggagaagacaagatcccaaagagaagattgatattgggctgctccacccaaatgtctcccgtgacccaacagctactggaacggaaacaggccatccaggagcttcgggccaatgtggacagaggagcgggactgaccgactccgcacagccagtgtcccgactggatgccgatgcgggcacgagtgggagaggacctgtgagacacctacacacaagacagcggtctggcattgagtattaccagtgacttcattaccgaggaagcatgtatccactggttcgccacgttattagtgcccccgaggataccaccatagcaacggtgggcttaacgctcgatggagttgaggactgacctggatgccttggtgtacatgtggcaatgaggggtgatccaaaccgacggc

SEQ ID NO: 520550 - DNA, 211 bp, Homo sapiens
  misc_feature (37)..(37): n is a, c, g, or t
  misc_feature (100)..(100): n is a, c, g, or t
  misc_feature (108)..(108): n is a, c, g, or t
  misc_feature (136)..(136): n is a, c, g, or t
  misc_feature (170)..(170): n is a, c, g, or t
  misc_feature (180)..(180): n is a, c, g, or t
cttgatgtatgtccccttacacttggtattgaaactntgggaggtgtcatgaccaaactaattccaaggaacacagtgggtgcctaccaagaagtctcanatcttttntacagcttctaataatcaaccaactgtnacaatcaaggtctatgaaggtgaaagacccctgncaaaaggcantcatcttctgggtacatttgatctgactgga

SEQ ID NO: 520551 - DNA, 295 bp, Homo sapiens
  misc_feature (10)..(10): n is a, c, g, or t
  misc_feature (124)..(124): n is a, c, g, or t
acgggtctantactgtggtgtaccgtgggagagagtataacaccacagctcttcggacagggtcgaggcagcgggacagttggtccactccgagtcagttcggacccaatactcagttggccgngggagctggtcgattttatgtcagctcggacccggtaccgagtcggtcgggatagctcgtggaccccacagctcctcggacctgggtccgacataggccgtaagtgtgggtcgacccggcggcagttgcgacgcgaacaacgttgtcggcctgacgggtaaacacctacag

SEQ ID NO: 520552 - DNA, 160 bp, Homo sapiens
  misc_feature (134)..(135): n is a, c, g, or t
aggtaagtataagttgatgaagtaaacaagggggagtgtgtcctgggcagagagtgggaacagcatatgtaaagcctgagatcaaagaaggccaagtgcagacaaaatgccatgggcacacacacaatgagacnngtggctgaggaagtcagcagtgggc

SEQ ID NO: 520553 - DNA, 120 bp, Homo sapiens
  misc_feature (1)..(1): n is a, c, g, or t
  misc_feature (23)..(23): n is a, c, g, or t
nctctttccctttctcgtccgtnctcgccttctcgttcctttccagctctctctctctctctctctctctctctctctactactctctactacaactctctctctctctacaaaaaaaaa

SEQ ID NO: 520554 - DNA, 310 bp, Homo sapiens
atcccagcaagcaacaccatgcaacaattgttgcaagcagtcatgcccaacagttgcatttggtgcagccaacacattcccgtgctttccgtggaggtttttcacagcaatcgtcctattagctagtatctctcagcagctctcacttttccaacatcttgcacgcactttcaaacaatggtcacatttttatacatagtcagtcatcatcactgtaaggctcaccttcataattgtaatattgcagtaaaggcaatcgtgtgctcaccatccttgcccagcatttcttcttctttgattcttcatcttg

SEQ ID NO: 520555 - DNA, 832 bp, Homo sapiens
gggcccggaaggggctctgcgttcttgtagtggcgctgttgggcccgtgaggattgtaagcctggctggtttgcggctgggaagagcggagagagggttcggcatgtgttcggtcgggatccccgcgaaggatggagtgctgcctgagagtctcacccggcatggggtgaagctgttcatgccttccccgagatgaggatctggtgatctagcaatggggaggcaggagacttgggtaatgaagagagaaaacgaaagagttcttgagacttatgggtgcgggaaatgaacagaacatactggtcgtcttgttactaggagatcacaaatcaacatctcacttccgaaccggggaagaagacccaagaaaacttactgaagaactggagtctcaatatcagcaaagtatggccagtacaacttatcaggaagatatcggcgacattgtggactgtggcttcagtgaggtagaagaccatgatggagaaggtgatgtggctggagatgatgatgatgacgatgattgattcacctgaatcctgaaagtccagatgattcttgaaagcgattcagagtcagagaacagagattctgtgaagaatccaagtgtgagaaccctgatgaatgtggggatcccaaaacaaaaaaggtgcaaaagcaattataaactgtgttctgtaaatccagtgggtcattactcccaaagttaggctttgttttaaagtaagctcttggtcaatgccgtggggctggttgagcagacttgttttattttaaaagctttaaattcaagaggtggttcaatgcggtactttggcgcgtccttggaggg

SEQ ID NO: 520556 - DNA, 212 bp, Homo sapiens
atatctatacacaaaaactaggacattacaagccagctcttactaaaaggattactaaaggatgtacttcagcagaagaaagtggactcagagaagatccaggaacaataagtaggaagcagaagaaaacagacacgctaggaaacaaaaagctaagggccaaatgtacaaacttagaagaaaattggaagatagaaagcagataggtgttc

SEQ ID NO: 520557 - DNA, 324 bp, Homo sapiens
ccccttttttttaaaaaaagggggattttttttgggggggtttttcttttgggggaaaagggggggggcccccccttttcccccccccccccgggggggggggggttttgggttccctaacccaggggaaaaaccccccccccggggggggggaaaaagggttttcaaaaaggggtttttttttggccccggggtttccctttttttttttgggccccccaaatttttgggcggggttttttttttttggggggtttttttaccccccgcccccccccccctttttcccccccctgggcccaaaaaccccaacccccttgggga

SEQ ID NO: 520558 - DNA, 743 bp, Homo sapiens
  misc_feature (25)..(25): n is a, c, g, or t
  misc_feature (31)..(31): n is a, c, g, or t
  misc_feature (60)..(60): n is a, c, g, or t
  misc_feature (62)..(62): n is a, c, g, or t
  misc_feature (91)..(91): n is a, c, g, or t
  misc_feature (97)..(97): n is a, c, g, or t
  misc_feature (175)..(175): n is a, c, g, or t
  misc_feature (195)..(195): n is a, c, g, or t
  misc_feature (197)..(197): n is a, c, g, or t
  misc_feature (202)..(202): n is a, c, g, or t
  misc_feature (246)..(246): n is a, c, g, or t
  misc_feature (264)..(264): n is a, c, g, or t
  misc_feature (299)..(299): n is a, c, g, or t
  misc_feature (317)..(317): n is a, c, g, or t
  misc_feature (323)..(323): n is a, c, g, or t
  misc_feature (353)..(354): n is a, c, g, or t
  misc_feature (358)..(358): n is a, c, g, or t
  misc_feature (364)..(364): n is a, c, g, or t
  misc_feature (367)..(367): n is a, c, g, or t
  misc_feature (422)..(422): n is a, c, g, or t
  misc_feature (425)..(425): n is a, c, g, or t
  misc_feature (431)..(431): n is a, c, g, or t
  misc_feature (434)..(434): n is a, c, g, or t
  misc_feature (450)..(450): n is a, c, g, or t
  misc_feature (461)..(461): n is a, c, g, or t
  misc_feature (465)..(465): n is a, c, g, or t
  misc_feature (473)..(473): n is a, c, g, or t
  misc_feature (530)..(530): n is a, c, g, or t
  misc_feature (544)..(544): n is a, c, g, or t
  misc_feature (571)..(571): n is a, c, g, or t
  misc_feature (626)..(626): n is a, c, g, or t
  misc_feature (628)..(628): n is a, c, g, or t
  misc_feature (635)..(635): n is a, c, g, or t
  misc_feature (637)..(637): n is a, c, g, or t
  misc_feature (643)..(643): n is a, c, g, or t
  misc_feature (666)..(666): n is a, c, g, or t
  misc_feature (721)..(721): n is a, c, g, or t
tatgtagaaaaacaatttattccantttaancacttacacagttagtcatggagagtaanangcctgctggtgaaaaaggtcacccaaaanggaganggcatcaaactagtggtcaaggactaactcctaaaaaaaaaagcaactcttatcaaggattaatttaatttttaaaanaaatacaagttattgattcncncttcncaacttgacagtctacctgtggtataactgtcaggtaaaaacanacatctttacaacttggnggtccccagttaaaaaaaaaaaaaaaaaaaaaccnacaacaaaaaaaaaaacncccttncccagacaggaaaaaaacaacatgaaaacnncccnagaaanacnccaacgggcaaaaatttttgaatatttgggggaagggggccgggttgttttgccntanctgaanaancccaggggaaactggnccccgtttganaatntgcctccnggaaagtcgggggtcaagattttcgggtgggaatctttacgccttggatcccccccnttttcctgaataanggtgccccctttcagtatttatacttnatggctcagacacctacctcatttggctctattccttactcactctagcctttantnaagaganantgaaanacttgggggatatagcgtaagangaaaaataatcacacataatattcccctttctgtagctactttagacctgggtgnctagaaaattcctgaagagaat

SEQ ID NO: 520559 - DNA, 324 bp, Homo sapiens
tgactctgaggatccccgcggtcaagtaactggatgcggtaaagtactaactcagcatcctcaatggggtatagatgtgagactcttttctagctctctagtgtactgctaaatcaccatacctgaactgctttataaaactgatatgctgaaatttaactatactgtttacgcttacgctctgataccaaacaaaacttagcataagcttcttctatctctgggtccatctcatcatcaatatcatccaagtatggatcaccagccccggataaatctgtgccattttcttcataatctggaaaaagagtcctctctttcaag

SEQ ID NO: 520560 - DNA, 924 bp, Homo sapiens
cgcgcgctcttctgctgcgtgttgtctacttcctcctgcttccccgaccgccggcgccgccatcatgagggaaatcgtgcacttgcaggccgggcagctgcgagcaaccaaagtcgggcgccaagtatatgggaaggtgagtcagcggatgagcgacggcatcgaccccacgaggcacctaccacggggacagcgacctgcagctggaacgcatcaacgtgtactacaaggaggccacacggcgggcgaaagtagcagatggccccgcgccgtgactcgtgggatctggcagcccggggaccatggaactccgtgcgctcggggacccttgcgggacagaatcttccggaccggtacaacttacgtgtcttgcggtgcaggagtggtagctgggatagcaactgtggtccaatggtggcgaactacatcgaggataggctgcgggaggctgggtggcaactcgtgtgccattggcatagttttgatgaagtacacaggtaggcattgaagaagacttggctggaacattggccttgtctatgtgggcttttcacaatgctttggactcctacatacacacgttgtgagtttgtgtcggtgtgaaccttgcgcgctacctagagcgaactgtgcgattagcgccgtgcccttccatgtgcgaaggcacaagggatcgtgcgcggggtaaagggcaacgctaccacgccatgaacacacgcggaactcctacgttggaaaaagccatgcgggattatgataacgaactggtgttgcggagttggccaccattaattccggcacgcgcaatagtaagggctgggttccagaggaacgcacatcaatgctatgggagcattggcgcaaacgtcccacccattaccgtagacgctgtccacccacaccccaccgattcatttccaaggg

SEQ ID NO: 520561 - DNA, 646 bp, Homo sapiens
ggcgctggagaccgcgatggcgaccgggagcggctgggttccctggctgcgctgcccttcgtgccagtgccgggagcctgcgccagtcggagcccccggcccagcgtggtcctgcctccctctcggatgtccacctgccctgtgatgtacttgccatgctggtggcattgacctgtacccatccatgtggtgctgcctgcctgccctgtgctgctctgcatgtgcctgctggtgattgaatgaatgaaaagccctggctgccgcttctgaccctggatgctgatggatgtttgaccctggagcggaggagttgaccctgagtgaggaagcgacctggagtgaagaggcgacccagagtgaggaggcgaccagggcgaagagatgaatctggagccaggaggtgacccgggaccgaggagtcgacccggagcgaggaggtgaccatgggaggaaatggcgtgcagctggtgctcacctgttgacttgtcacccaacagcaatgagaagcacgaccttcatgttacctcccagcaggggcagcatgtgaaccagttgtccaatgacctgtgcccagggttgtttgacagaggtcataggggggttccacagtctttttcatgaaactcatatttacagggcacaatct

SEQ ID NO: 520562 - DNA, 125 bp, Homo sapiens
tgagtagataagataattgccttatgccagttacttcatctatttgagcttcagattccgtcatttgtaaactagcccaatatgtttcctcacatataaacatctagtcctactcgtcccccttg

SEQ ID NO: 520563 - DNA, 109 bp, Homo sapiens
  misc_feature (51)..(51): n is a, c, g, or t
aacatacgtgcagatccactgggtatgttagaatacatcaaaagcaagcancaagcaaacgctgaatatatctgcaaatgagttctatcacctttaatgttaagtgaaa

SEQ ID NO: 520564 - DNA, 389 bp, Homo sapiens
  misc_feature (150)..(150): n is a, c, g, or t
gagcccctgagctccgtgtgggggccggcccccagttttgctgttgccgcatcagggaaccctttcccgtgggaggtggacccccccgtgttttaagtgcccaacgggtacagggtgttgggcatggagggcaacgagcccctccgggangaggggaatgacctcctgcagtttgccatccagcaggaggaggaggacttacagcggttcctgcagctgtcactccttgagcattgagccatagccccgggaggggtggccaggcccctccctgcccgcttttgtaatttttttatttataaactttttgctgttgaggttggggcctggagccccaggaatgagcaggcaggggagatttaaatggaaataaaaagactgtcgcagca

SEQ ID NO: 520565 - DNA, 226 bp, Homo sapiens
  misc_feature (121)..(121): n is a, c, g, or t
gctatagtccttccctcccaggctcgcttcccagcttctgagaaggagtttaggggatgagcgctgcgtggagagcagacacctcccagcagaggggcaggatgtgggcaggagagtagcnaaggtgacatcttctcgggcggagctgagactgcgcaaggctggggggctatgggcccgttccaggcagaaagagcgagagggcagggagggagcacaggggtgg

SEQ ID NO: 520566 - DNA, 407 bp, Homo sapiens
caggggacctcagaagctgctagaagccctgagtgccttctcttgcccctgggagagttgggtcagggcagcaaggtgcgtgagcaggggcttctggcggcagctggcccttgactgtcctgccccctggggctcatccccctgggaggtcagagatgcaagcccaggacatacacacagccgcacccctggggctcactgctcccagggtatctcgtcgtgggcagcccctccctgggcctggtgcccttctgggcagtccccccatccccagcctgcatcctcattgaaatccctgggccatggtgatgatgtgggaagacaggcggggcttggtgacgggctgaagctgggggctgggccaggtgacttcctgcttcctaacttcctcctttgtgcccccagaa

SEQ ID NO: 520567 - DNA, 216 bp, Homo sapiens
tgtcgatctagaggatctgtccctggtatacccatccgctaggatcaggactgggtcaagctgcatgaaaccaggcctggagcaacctgggaatggctggaggtgtgagagaacctgacttctactttaccctctaccctacctccaacattactttgaactctactcctgttgcggatcttcttgagcttgtttcacctgcttgggttggggcta

SEQ ID NO: 520568 - DNA, 895 bp, Homo sapiens
cgtgtcaaggtgttcatgcccccttttccagctccatattcgaattgtgtcccactctcagccgttttttgcaggacggctaccttattaacgggtcttaattctgcttaaaccatttcctgatgcatgggtattcagccgttacggccatacctctagcctaattcgcttagtttctagggataaacaggccatcttgggcagacctgtgagcatgctctatcacaggggcaagcccaacgggccaagtaacctgcggagttcatgtaggttgcacacattggtaccagcagaacccttgttggttctctcataagaccaagccttgagtactcgcacactgcacaataactcctcccagggtcttatgaacatttgtgtctagtcttctcaaagaccaggtcgcaatgagcttttctggacagtctggtcgtagtctatcagagacaccagtcttccttcagagagcagatgcttttggcggggaggaggaaatcccttcaaacttgaacgcttttctaattgcattatttattgcttattctggggatatggcgtaagtacagagaagccatcacctcagatggcagcttttaaaagatgtcattttttctctcaacaccaggatttccgtttaacaacatgtgtccagcattcccaggtaggccaaggtgtcctacagaaaaacccttgggattagacctacagggggtctggctggtgttaacagaagggagggcagagctggtgcggctggaccatggagaaagctgacattggctggtgtggtacagagaagccagcttgtttacatgcttattccatgactgcattgccctaagcagaaagtgcctttcaggatctagttttggagaatatcacgccatgtctgatc

SEQ ID NO: 520569 - DNA, 121 bp, Homo sapiens
tccctttataaattcttctttatagaagggtgctgggcaggattccccaaagaaaaaaagggttccaaaattcctttaattgccctgattaaagggcactgttccagcagctagttcccaa

SEQ ID NO: 520570 - DNA, 207 bp, Homo sapiens
  misc_feature (5)..(5): n is a, c, g, or t
  misc_feature (53)..(53): n is a, c, g, or t
  misc_feature (57)..(57): n is a, c, g, or t
  misc_feature (61)..(61): n is a, c, g, or t
  misc_feature (70)..(70): n is a, c, g, or t
  misc_feature (73)..(73): n is a, c, g, or t
  misc_feature (110)..(110): n is a, c, g, or t
  misc_feature (139)..(139): n is a, c, g, or t
  misc_feature (165)..(165): n is a, c, g, or t
gaagnttcgctcttgttgcccaggatggaggtgcaatggcatgatctcaaaanaganaganagaaagacnganatagaatagacactgttctaaagaagattcacaaatnaccagtaagcacatgacaatatactcacntgtcactaatcattaggagaatccanatcagaactacagtgagttacaagatactgccttacacccgt

SEQ ID NO: 520571 - DNA, 139 bp, Homo sapiens
  misc_feature (2)..(2): n is a, c, g, or t
gntttaaggatataggtctgggtctaggaattaaaacatccagaaaatggtcctaagttactgtgatcttggctgaagaaaatacattttcttcatgtgttatataaaaaacttacttggtaataattatgttggtggg

SEQ ID NO: 520572 - DNA, 295 bp, Homo sapiens
aatcgcttgaacctgggaggcagaggttacagtgagctggagatctcgccactgtactccagcctgggtgacagagtgtgactccctctcaataaataaataaataagagtttatcaaagttcagtgtgcacacaaatgacctgagatctcattaaaaatccaggctgcaggccgggcacagtggttcaggcctgtaatcccagcactttgagaggtcgaggtgggtggaatcttgagctgaggagttctagaccagcctgggcaacatagcaagactctgtctgtactaaaaat

SEQ ID NO: 520573 - DNA, 250 bp, Homo sapiens
aggggttccagggggatctatagtttcatgtcacatcttcaggtgcctataggtcctgcctgcaggaatgacacctctcggcttagtaagggctgcgtatagtgggaatatgactcccatctggaagaccaggtggagacttctcaccgtcaaagtaaaaaacctatggtccatgtcaagggcaaagctgatgtgctgttcctcaaatgagtaaaacacacttctgtagtgctggaagaggtcagcgtag

SEQ ID NO: 520574 - DNA, 389 bp, Homo sapiens
  misc_feature (22)..(22): n is a, c, g, or t
  misc_feature (103)..(103): n is a, c, g, or t
ggaaccagaccctttcgggaancagtggtaagctctgtttaagacaactgtcaaacccaagagaattcttaaattgtggcagttaaaaatgtattaatccccncgagggccgggcgcagtcgctcaagcccgtaatcccagcactttgggaggccgaggaggcggatcatgaggtcaggagttcaagaccagcctgaccagcactgtgaagccctgtctctactaaaaacacaaaaaaaattagccaggcgtggtggtgggcacctgtagtcccagctactcggggggctggggcaggagaatcacttgaacccgggaggcagaggttgcagtgagccgggatgacgccactgccctccagcctgggtgacagttgttggactgccgtc

SEQ ID NO: 520575 - DNA, 356 bp, Homo sapiens
tgtggcttggtgacatctgagggagggcaggtgtgtgatggctgggccgggtctggacccagacccaacccctagtcccaactcacgctggtggtgaggacgctggcggccgccttgtaaaagtggaacgctcggacactgcgcatgccgtcggtgaagagggaattgcccagggtacaacccacgaacacgtacctcggtgctcaataggtgaccatctgaggaagggcagatgtgtgatggctgggccgggtctggacccagacccaacccctagtcccaactcacgctggtggtgaggacgctggcggccgccttgtcaaagtggaacgctcggacactgcgcatgccgtcgg

SEQ ID NO: 520576 - DNA, 83 bp, Homo sapiens
agggagccaaggtgggctgcctgacacacttgccgctctcgtgtgaatccaagaaactgcgttcctcaaagggaaaaaaaaaa

SEQ ID NO: 520577 - DNA, 668 bp, Homo sapiens
gcaggattcggcacgaggaataaagaaaataatgctcttaaagtactcagagccaccacgccaggccaagacattttatttaatatagtaacacattgattccacaaaagaacactgagggatagatgttaatttttccatttacatgtgaggaatttaaactgaaaggtgaaataattggttcagcattatgctcaaaaccaaagcgttgtctgcatttttatttagcagttctacttccgcagtctcttagtggaacattttaataatattctgcattataaagtacaaaattagttcctattctcatttcctttttaatgtcgggtttctttttgtaaagtctttagtatctcaactcttcagttcttacacctcctccctcagatcttttgtttcaaaaactgactacttcaggttattctactgtaaagaaggctaagccttcttttccatttgaaaaggaaatagatttaatgggaaagaatatatagtagtgactcagatttaagatgcttaatcttatttaacatgaacatgactatacatgataacttaaaagtatttctaaagagggtattctacaaatgcacttaatattaattttctaattatttgcatatatctttcttttaggatccttcctgagcgtttcctggcagttttaa

SEQ ID NO: 520578 - DNA, 949 bp, Homo sapiens
  misc_feature (229)..(229): n is a, c, g, or t
  misc_feature (297)..(297): n is a, c, g, or t
  misc_feature (311)..(311): n is a, c, g, or t
ggagaaaagagatgagacctgctagtgtccgtcactgttcaagacattttttgggggggtgctgtgggggacggagtctcgctctgtcgcccaggctggagcgcagtggcatgatctgggctcactgcaacctccacctcccaggttcaagcaattcttctgccttagcctcctgaatagctgggactataggcacccgccaccatgcctggctgattttttgtatttnaagtagagacagggtttcaccgtgttggccaggatgatctcggtctcctgacctcgtgatccacccgnctctgcctcccaangtgctgggattacaggcgtgagccaccacgccaggccaagacattttatttaatatagtaacacattgattccacaaaagaacactgagggatagatgttaatttttccatttacatgtgaggaatttaaactgaaaggtgaaataattggttcagcattatgctcaaaaccaaagcgttgtctgcatttttatttagcagttctacttccgcagtctcttagtggaacattttaataatattctgcattataaagtacaaaattagttcctattctcatttcctttttaatgtcgggtttctttttgtaaagtctttagtatctcaactcttcagttcttacacctcctccctcagatcttttgtttcaaaaactgactacttcaggttattctactgtaaagaaggctaagccttcttttccatttgaaaaggaaatagatttaatgggaaagaatatatagtagtgactcagatttaagatgcttaatcttatttaacatgaacatgactatacatgataacttaaaagtatttctaaagagggtattctacaaatgcacttaatattaattttctaattatttgcatatatctttcttttaggatccttcctgagcgtttcctggcagttttaa

SEQ ID NO: 520579 - DNA, 614 bp, Homo sapiens
gcaggattcggcacgaggaataaagaaaataatgctcttaaagtactcagagccaccacgccaggccaagacattttatttaatatagtaacacattgattccacaaaagaacactgagggatagatgttaatttttccatttacatgtgaggaatttaaactgaaaggtgaaataattggttcagcattatgctcaaaaccaaagcgttgtctgcatttttatttagcagttctacttccgcagtctcttagtggaacattttaataatattctgcattataaagtactctttagtatctcaactcttcagttcttacacctcctccctcagatcttttgtttcaaaaactgactacttcaggttattctactgtaaagaaggctaagccttcttttccatttgaaaaggaaatagatttaatgggaaagaatatatagtagtgactcagatttaagatgcttaatcttatttaacatgaacatgactatacatgataacttaaaagtatttctaaagagggtattctacaaatgcacttaatattaattttctaattatttgcatatatctttcttttaggatccttcctgagcgtttcctggcagttttaa

SEQ ID NO: 520580 - DNA, 119 bp, Homo sapiens
  misc_feature (3)..(3): n is a, c, g, or t
  misc_feature (58)..(58): n is a, c, g, or t
atngcccagcatttcgtggttttcagttcacattgtcattccattccaggggcatccntctcagcagtcgcacgtgccaggccatgccaagctttggccactggcccgtctgttttcac

SEQ ID NO: 520581 - DNA, 1963 bp, Homo sapiens
ggtcagttgttggtgggtgctcagtggctatttcgttagtcgtgtcgatggtttcggtatggtgcagttcatggtgtggttatagcgtgtcggcactgggctgtctgatagatactatctcgcttcataagtatgaccacgccgttgtgtgtcgacaacaaccacggtgtgtgggggtgcacccatatttttattgcggtgtgtgggtccatccacgttgtggtgtccgcatactacaatatcagcgccgggttgtttttttttcctcgctgccctctcatgtttttttgtccgcgggctccgtctttgtgtttgttgtgtcccgcctttctggtgggtgtgtctatttttttggtctactctcactggttgtggtgtggggctgtctcgttttcttcttgttggtggctgtcttccgcgtgagtgttggtggtcctgccccggtggggtgtttggttctgttgtctgtccgtgcctctcgttctgtggtgtcgttagggttgtgggggactcaccagtctgtcgttcgtacgagacttgctggtggcgccgcccctctcctctgtttttagtgtggtgttgtggtgcggctctccgctcacttcctgtcggagagttgggtgcggcccacgtctgtagtgttggtttgtgtggtacttcagctccctctaggttgtgtcggtggggcgcagctctccgcagttgtggtcggcactacgtggggttggtctgttttttgttttcgtggttgtttgttggcggcctcgccttctgcctcctctgcgtcactgcagcggttgtgtttgttgtttgtctggtgccaccccacagcataggtggtgcgtcactccccgccctgctctccgatctctgttgtgctgggttggcggattgttggttggtgttgtttttcctcttcttttggtgggtgacgacccacaccacaccatcggtgggggtgcgtcactcccgctcatcgtctcttgctgggggggagtcctctctctttgtgatagagtagagtgatatatttgttttcttggtcgcacgctctctcagttggcgctctctctctctcttctctctctctctctctctgctcgctgctctctctctctctgctgaggggacactcacacccgccctctctctccctctcactctgctcgctcacactctctctctctcccgtctctctcatgagtagagagtgtacacgcacacacactactgctgtgtgctgcgggagagtggtgccgcgcgcaccacacacacaccgcggtgagctactctctcagctctcttctgctcttgtgttgtggagagagtgtgtgtcctcgactcagagagagagtggtggttgtgacgacgactcactgcgcccgctcgctctgcctgccctccggtgtgtgtgtgcgccctctcttatagataagagagagtagttcacgccaccgcacgcgcgagagagagaggaggaggtatatatcacatcactctctctctctctcgaatatcgcagatgagctgtgacgagatgatgatagatagagatagataaaatagagagagagagtagtatagatagagagagaggggaagagataataaatagaactcaccacccccctcgtgtgttctcctctcgctctctcggttgctctgtctcctcgcgtcgtctctcgcttgttgttcgcggtctgtgtgttataagtgtatttggaggggtgggtctccctctctctctctctgttgatatttgtgtgggctgggtggccacatagattgttgtgtgtggccccccctctctctattcgcctgttgtttggtggtgttggttgttgttgttgtgtgtgcgtgcgcggagaaatgaatggaaaataatacaccatgttgtgttctcccaccacaatattatatatattatatataaataataaaatataatataatataaattata

SEQ ID NO: 520582 - DNA, 446 bp, Homo sapiens
taccaggttctccaggtcgtggtttatgtactaaatacaatatccatcctataatagctatttctaccatggcaagcttatacaagtctaggaagcacaaggtggaaatggaagttgtagttctcatgatcatccctagtgatccactaacacaatataaacaacatccccaaaatctaaggcactactgctctagaagtcttagttccacaggaagaagtgcttccaccagggacacaatgataccatagaacactcagattagaagactgccacttgaccacttagagctcctaatgccactaaatgaatggcatatcaagaaaggggttactatactggctgtgtagactgaatcttgactatcacagggaaccttcaattgttaccatgaaatgaatggctatatctaaaatgcaggagaccctctagggaaacttaaaata

SEQ ID NO: 520583 - DNA, 168 bp, Homo sapiens
aaccggagatgtagtgcatcaaatggacctcacgcccttcctgttacggcggttggacctccaggctctctgctgtacatccgtggatccatcatgtccatttcgagaccagaagatagtcttcaggagagacacccaaaggtaaactatccagagggtaatgacaac

SEQ ID NO: 520584 - DNA, 244 bp, Homo sapiens
tcgatgtctagaggatcacaccgcaatagctcggatcaccccaaaactacttatggcgattaacaatattcagcagagtagcaggatataatgattaacattcagaaatcaggggagttcccgtcgtggcgcgtgggaaaacaaatccgactaggaaccatgaggttgcgggttcggtccctgcccttgctcagtgggttaatgatccggcgttgccgagtattgcggtcccgagtattcggtc

SEQ ID NO: 520585 - DNA, 381 bp, Homo sapiens
  misc_feature (377)..(377): n is a, c, g, or t
gtatgcctctatgatacttgttactggggcacagttggctctggatgtctaccgtgctgaaggtcagccaaataggcaggtaagactacctaggcctcttcatatgcctaactaagatcacagttggacaaaacaacgtatagaaaaagaaacgaacgtggttttttttttctaaaattacctttttggtttccttggaagagggaggtaaaccatctccattcaaaagaatttggagagtctgttaatgccatacactgaagtacaccattaaccaaaatagccctatggttggttctcaaagagctaccatcctagtggtgagagacaattaataggcgagtaactatgtagtagggggaaccgaagctcgaatncgaa

SEQ ID NO: 520586 - DNA, 765 bp, Homo sapiens
cctcacgcgtacggcagcccaacctgttatccctgatccttccgcgtgacacagtggcctctagcacttctgcctctactggaaccgacatgctgggagattacatcttctctatggacaagcgtgacttacttgactgagtgacaaagacctctagacctacctactgcttccagcacacaggaggagagcctggctcaggggccccctgttgtatagcacacttctagtacacctcctggtggagccctcagaacatcaggcgtgcccagtagcacagcacagctatcacacttctaccattccacagtacctccacacacggcctgcatacacaatgcctacggtggaccatgtgcgagctcaagcagggacctcacagctgacatcagacagttcctgatcgcatccgccagacagagctccaaggacggcccatacggcttgcacaccagccagcacagcagtctgcagagcctgagaagatcacgaaactgacactcatggtgagacattcatggagctggacactggtgtaccctccgaggcagcgactggatcaaacgcaacgagctgtggaagctactagcccacaagactggcctcccaggaccctgcaccattccccctccaccgacacggaagtcagcgcaataccgacacgacacaacggacgttactcaggcagcagcaagcgctcacaccccatcctccaccgcaagtacacacactggccgatatcatagtggaatgtaagaacaagag

SEQ ID NO: 520587 - DNA, 162 bp, Homo sapiens
ggagcgcagtgccattgctcgtgtgcatatggggcagctgctgcaccagctgctgcggtgctgggcatctgtctactgctcagtactaccaagggtggtttgaaacctggtgagtggttgttgacatcagaagtgccgtgccgcacaccaaggtgtgcctat

SEQ ID NO: 520588 - DNA, 259 bp, Homo sapiens
gggaggaaaaagaaagaaaaaagagaaagaaagaaagaaggaaggaaggaaggaaggaaggaaggaaagaaagagaaagaaagaaagaaagaaagaaagaaagaaagaaaaaggaaggaaggaaggaaggaaggaaggaagaaagaaagaaagaaagaaagaaagaaagaaagaaagaaagaaagaaagaaagaaaaaggaaggaaggaaggaagaaagaaagaaagaaagaaagaaagaaagaaagaaagaaagaaag

SEQ ID NO: 520589 - DNA, 453 bp, Homo sapiens
atgtatgtcttcttttgagaagtgtctgttcatatccttttcccactttttaatggggttgtttgtttttctcttgtacatttaagttccttatggatgatggaactcataggctcaagccatcctcctgcttcagcttcccaaattgctgggtttgcaacggtgagccaccatgcctggctaacacctataatctcaacactttgggaggccgacatgggaagatcttgtgaggccaggagttcaaggccagcctgggcaacctaataagaacctgtccctaccaaaaaaaaaaaaaaaagttagctgggtatggtggcacctgcctgtagtcccagctatttgggaggctgaggcaggaggattggttgagcccaggagttcaaagttgcagcaagctgtgactaggccactgcactccagcatgggcaacatagcaagatgctgtcactt

SEQ ID NO: 520590 - DNA, 111 bp, Homo sapiens
  misc_feature (76)..(76): n is a, c, g, or t
ctaggtgaagcgacgtctaggtggagttgcgcttgatcagggcagtcatcacagcctccggcctgtctccagcccncagcgacaggggagccacgtccagcagcagcaggt

SEQ ID NO: 520591 - DNA, 149 bp, Homo sapiens
ccttacgtcctggactccaccagaaaccttctccctcctccacgcaactcccaaaggtcgcatagatttctcacttcacataattcaagtcgctactccgatgtactcttcagagaagctttctcccaccaccctaagatcacatcctt

SEQ ID NO: 520592 - DNA, 438 bp, Homo sapiens
tagtgcatagcgttctgaggatcccggtgtatcctttgtcttcattcattaatcacattatcagacattccctgtgtatcctgtactgttatacatgctgaagctacaaatcaaatgtccgctttgcctccaacaagattccctgtacctaagtgaaccaaggaatgaggtgttccacgcctgggctcacatctttttttttttttctgtaccccaggttggattgcaatggcgcgacctcggctcgctgtgccctccgcctcgaggatacaagcgattctcccgcctcagcttcccgatgcatgttgggaccacaggcgcccgcaaccaagcccagctaatattttggtatattaagtagagacggggtttccccatgttgcccaggatgttctcgaactctgggcctcagtgtgatctgccagcctcggcctccca

SEQ ID NO: 520593 - DNA, 263 bp, Homo sapiens
tatgactggagatggcgatggactaactcaggacctgagcttgtggagacatgacagcaggagatagaaccttccagaagtgggcagctgtggtggtgccttctggagaaagaagctgaaatactcatgccatgtacagcatgaggggctgccgaaagccctcaacctgagatgggagccgtcttcgcagtccaacgtccccatcgtgggcattgttgctggcctggctgtcctagcagttgtggtcatcggagcttgttggg

SEQ ID NO: 520594 - DNA, 309 bp, Homo sapiens
cagcgtgttcgagaactgtgcagttggggtaggcttccgtcaaaaatgcttcttgatcttttctgactctgcatatttggagattccattgatgaagagggttcgcttcaccagatcattcttcccttgtagcgcattcttgtaggtgtgtcttaccgcatgctgtagaacggtgagcaagcagatacagcaaggcgaacggaggtgtgcaggcatagcaggttgttccctgattttcacgttggcaatggtggttctcctcaaagctggtaacattgttcttccagcaggtcccctgagaagttgaca

SEQ ID NO: 520595 - DNA, 244 bp, Homo sapiens
  misc_feature (171)..(171): n is a, c, g, or t
  misc_feature (179)..(179): n is a, c, g, or t
  misc_feature (207)..(207): n is a, c, g, or t
agactacatgcagaacatggagcagaagcgaaggcagctggaagagtcccaagactcgctcagtgaagagctggccaaactccgagcccaaggtaagcaattgaccactattgcgggtgtccagcttctgtggcctaaaccagacactctctatgttggctggactcatgngtgtttanacttttgctcagttaaacgcatttctanggtctactgcaaaatgggggcagggtgacggggaaca

SEQ ID NO: 520596 - DNA, 769 bp, Homo sapiens
  misc_feature (57)..(57): n is a, c, g, or t
  misc_feature (285)..(285): n is a, c, g, or t
  misc_feature (766)..(766): n is a, c, g, or t
atgaggtttcctaatactgtcactagaggatcctgacttagctgcccagcgcggtancttgtgggcagcaccgattcggccattatggccgggggcatatctctttgccagtgtgacgccgcgtggatagtgaaaaatggtgagacactatataaaatttcaaaaagaaagcatctggatttacagatttattgtgagacacaaattcactgctgcctttacactaagagatgtatatgttaaccatatatgctgtatttttcttgtcaggaggggggctttaanttcactcagaattttcaattagatataaagatgtatcaattaccatatataaaaatattactttaaaatgacttgtttcctttgaaaatacctgtgtactgagggttatgattcgtgtcaaaaattgacataagtgcttttacaggcaccaaaggtgaatgaatcttcaacaaaatgtatttaaagtctatgttttcagttatgactcaggttaagaattgtgttttaggatctacttgctggtttatctttttgatccaaatgtgggatctgccctgaacaattacaaggtttagggccatcttcccccccattttcaaagagaagaaaaaaggagatccccggggcactatgtaataaaatgaccctactttggtgttaggaaatagatgaagggtgcctgggaaaatgcccctttggcataaaaaaaaaacacttttaattggtgaacggggggacccatttaaagaatttacctggncgg

SEQ ID NO: 520597 - DNA, 603 bp, Homo sapiens
gtcattcctaattctgatacttaacatcctcatttctatcatattcatccccacccccatgggttccatacttgccacactaggctggtggccttctttctattacgtgtatgtcttttttatagagttttaattttttatttttgagacagggtctcaatccctcatccaggctggactgcagtgatgtgatcataaatcactgcaacctcaaactcctaggctcaagcaatcctcccacctcagcctcctgagtagctgagactacaggtgcgtgcaccacacccagctaatttttttattttttttaaatggcgagtgatgtctggctatttgtggcccaggtggtgatcctctataactccggggctcaaggggccctccgtgccttgggtttcccaaagtgcggggaatagaggtcatgagccattaggacggcgcaaacactatttcagacagtcggatgtctaccacgttcacagtctacttatatcctctcggtaggcttttataccaataaagtcttggacatccactcgtggcaagcatgctctggccacaatacctttattcccttgaacattagcccttgtgtatactccg

SEQ ID NO: 520598 - DNA, 643 bp, Homo sapiens
cagacagggtcttgctctgtcatctaggctccagtgcagtggcacaaccatagcccactgtagccttgaattcctggggtcgactgattctcccacttcagcctccccagtggctgggactatagatggcatgccaccatgccaggctcattatttttatttttatttttggagacagggtctcgctatgttgcccaggctggtcttgaactcctggcctcaagctatccttcctcttgtttgttgatgaaaaagagtcaaactctggctgagcccaggctcacacctgtaatcccagcactttgggaggctaaggcaggaggatcacttgagcccaggagtttaagacccgcctggcaatatggcgaaaccctgtctctacaaaaaatacaaaaattagctgggcatggtggtatgcacctgtagtcccagctactcgggaggctgaggtggaaggatcacctgagcctaggaggcagaagttgcagtgagccaagatcatgccatggtactccactctgggtaacagaatgagactcctctcaaaaacgaaaaccaaaacaaaacaggccgggcgcggtggctcacacctgtaatcccagcactttgggaggccgagatgggcagatcacctgaggtggga

SEQ ID NO: 520599 - DNA, 455 bp, Homo sapiens
taaaactgggtattagagtgctttgattctccttcacccctcacccctggtctcatgttcttgatcaaatcttccttgctctgtccccttgtctcatctttagtcccctccaacctggggggcaggggtgtggagaagccaaagaggcctgagatttcagtctgtctctccgtgccgggagtcccagaggagggcaggaggaagggggtggtgtgctccgaagacgcccccagacatctgaggaagaacgggaacattacttggcgtgcaatttcacccactccctttctccctttgtcccccaggactggggccacttgctggcatggtcgccagtggttcccaagatgggctcactagcgtgctcaatgtaccgaacctaacaacacaaaacatcagccctaatcacacttaccacttcagggtgtcgtcagagaagacaaccaaaacaacgg

SEQ ID NO: 520600 - DNA, 126 bp, Homo sapiens
gtgggcagcagcaggtgccctgggcacagggccggtgccttctcacgccaggttcccacgcaatgcaccatggtcgcgcaggagccgtggctggcctccagtctccagtggtggaatggtccacat

SEQ ID NO: 520601 - DNA, 184 bp, Homo sapiens
cgttcgacggcgcggagccggtggcgccgtagggaacttgctcttgtgatcgtggaagctgcttgacatgccgagctcggtgagcacttgctggccgcagtatctcgtccaccttcatgatctgatgtggcgtgtggctcgtgtcgctgtgtgcctgggcaccctatgtctcgggttatcactg

SEQ ID NO: 520602 - DNA, 418 bp, Homo sapiens
ggttttagcaccgtggtataatagccatgaaacaccactccattttttttgagacagtcactgtcgcccaggctggagtgcagtggcacgatctctgctcactacaacctccgcctcctggcgattcccatgcctgagactccagagtagctgggattacagacatgagccaccacgccgggctaatttttgtatttttagtagagatgggatttcaccatgttggtcaggctggtctcaaactcctgacctcagttgacctgcctgtctcagcttcccaaagtgctgggattagaggcgtgagccaccgcgcccaggctttctggtttttggccgtgtagagctaccacggtgctataacgccggtgaagcttcagggggtttggatgagaatggctgttaccacggtgctataacg

SEQ ID NO: 520603 - DNA, 210 bp, Homo sapiens
taacatttccagtagtcacatgtgattgttttgttttcgtaaaagaatactgcttttattttgaaaaaagagttttttttctttttatggggttgcagggatggtgtacaacaggtccagcatgtatagctgcatagattttttcccctgatctttgtgtggaagatcagaatgaatgcagttgtgggtttatattttcccctctcctta

SEQ ID NO: 520604 - DNA, 180 bp, Homo sapiens
agcatagcgttaccttgtgtgtacattataagaccttttactgcagatttcacgggggaggctttccatatggaagtgaagacataatggcatatatcttccactctttttctaacagttgggagtactgttatgttgctgactgggtatggctggatgtgcctgccccatcctatgttg

SEQ ID NO: 520605 - DNA, 357 bp, Homo sapiens
gtatcgccggaattgtaatgggtatagagacatatcatattacgtatgctagggtgagtggtaggaagttttttcataggaggtgtatacgtggtcgtaacggaatcgggcgtatgctgttcgaattcataagaacaggcaggttagaagtagggtcttggtgacaaaatatgttgtgtagagttcaggggagagtgcgtcatatgttgttcctaggaagattgtagtgctgagggtgttcattataataatgtttgtgtattcggctattaagaatatggcgaatgggcctgcggcgtattcgatgttgaagcctgagactagttcggactccccttccgcaaggtcgaacggggt

SEQ ID NO: 520606 - DNA, 149 bp, Homo sapiens
  misc_feature (58)..(58): n is a, c, g, or t
  misc_feature (112)..(112): n is a, c, g, or t
ctggtgctctacaggatctgagtactggtctcgtgtagtggtagctatcaggaagcanaggcagaaggatggcttgagcctggagttggagatcagcctaggcaacacagcngaagacccatttctccaaagtaagactaaacaccacg

SEQ ID NO: 520607 - DNA, 81 bp, Homo sapiens
  misc_feature (30)..(30): n is a, c, g, or t
  misc_feature (50)..(50): n is a, c, g, or t
cgggcaatattgtgttcagttcaagctgtnaagaaaaatatatatcaatnttttccaataaaatacagtgactacctgaaa

SEQ ID NO: 520608 - DNA, 425 bp, Homo sapiens
aatgtggactcagcgggcggtggggcaggctgcggtcacgtttggaagaactgttggtccatgtggtgtgctaacgtggttccgctagatggtcagtgtccggctcacaaactcctgggtcacatgccgggtgagggagccgcctgcctccaggtgctgagccccccgggtcagcccatccactaggaagggctcggtggcgctagtgtgagtagtggtcatgctgctgtactcgctttgcaggcgcgtgctggaagagcccggaacgggtgcccagctacgggaagggtcctccatcctgggactctatagtgatgatgccctcacgctctggaccaaagccctcagtgttcctggcctgaaccttgaacttatagaggcacgttctcactagaatccacattttaggggtaccgagctccaaa

SEQ ID NO: 520609 - DNA, 706 bp, Homo sapiens
tccagtcctatggtttttgtggaaaaggggtctgtattgtttggcaaaaaaaaaccaggaaaaaggccctgggggaaaccccggccttttgtcccccgctcactcccaatggggccccgtgtttattgagcaccggggggggcacacacccccattccccaaccttgttccaggggtcctcccgtgcggccagtggggtggggttgtgggagtgtgggacccatgtggccgggtgggggaccttcgctctcattcccgtgatgtggtggacattcgacttccgagcggcgtctccaagttatgttggctgatctcgcgagttcatcttgcgggttccccgcgacctcgcggggacccccgagcgcgtgccaacagaaaacccagagggagaactccggcgccgcgcgggtcatcccaaagtgtggggcctgaagttcacccaagtggggaaccatcttcttacgaaccacagagtgtgctcgggggcaagacgatgtgccaagaaacgcaaggggcttgcataccgtggaaagttgcttctgggcgcggggggggggggcattctctcccaaccaagagtctcggggaccaaagaaaaatttccctgggtgctcggggcatttccccagtggccatatgggctcctttgccccagaaagcccccattttcaccttgaggaaaactttcaaaggccaaagttcccag

SEQ ID NO: 520610 - DNA, 1505 bp, Homo sapiens
gctaccgctgtccgccgtctcttaggtcgcccgggtccaccggccgccacctatgcctcgtgggaagccgcagcgcggcctcccggccagccagccgccccgccgcgcccccttctgggaccaagcacgagcaaataacacataacagaatcatataagaactataagcaaaaaagacaacacacactatataagatcacatacacatgggaataacatggataacacattaggacacccaatataatgcatacgataacgacggacatcagatagtaaaaaacgatacaaggaaccagcgacacaaaaccagacagccatacagccgaagaaagaagaaagacaacacactagcaagacatagaaagaaacaaacaagaacaaaaaaaaaacagaacataacacaaaaaagactacaaacacaaaaagacctcacacacaaaaaaaaacaaactacaccaatcaagcacacaaaaacacatcgaacaatcataacaacaataaaacaccaaagaaaaaaaacaaacacacacaaactcatcaaataaaaatacaaaaaaaaaaatatcaaacacaaaaataataccacacacaaccaaacaccattataaaacaatatacactcaaaaataaaaactatctaataaataactaaaaaaaaataaactaaactacaatacaacataactaaaaaaaaaataaataaaaaaataataaaacactacaacataactacatatatatacaatattaaacaaaacaaaaaaaaatatttaacataacaaaaaacaaataaacaaaaataaaaataaaacacaaatacataaattataaaacaatcaacaataataataaataaataaacatcacaaaatatccaaacaaaccaaatctaaaaactaatacaaaaaaatcaataacacaaaatcacaataaaaatataaaaaataaaaaaatcaacccaaaacacaataatcacataactaacaaacccaaggacccaaacaaaaatgaaaaagaaaaaacacacgagaagcaacgaaaaaaacaaagaagaaaacggaaaaaaacaagccaggaaaacaagaagacagaagtaagacaggaacaagaaagcacaaaaaagaagaaaacaaagaaaagcaaccagaaaaacaagaaggagaaacacggaagtaaacacgaaaacacaaacataactcaaagaataaaaaccaataaaacaacataattaaacaaaacaacaaacctaaactcaaaaaaaaataaacaacaaatacaacacacattatactaaacaaatataattcaaaacataaacaaataaaatatcaatacaaaaatcaacacacctacttaataaacaataagatacaacaatcacatccaaacacaaataaaaacaacacataaacaacaacacataacctctacaccaaaaacaactaaactaacaacacaaaaaaacaaaatataaaaaacaacacaaataaacaaccagaaac

SEQ ID NO: 520611 - DNA, 727 bp, Homo sapiens
  misc_feature (286)..(286): n is a, c, g, or t
  misc_feature (288)..(288): n is a, c, g, or t
  misc_feature (290)..(290): n is a, c, g, or t
  misc_feature (295)..(295): n is a, c, g, or t
  misc_feature (305)..(305): n is a, c, g, or t
  misc_feature (314)..(314): n is a, c, g, or t
  misc_feature (317)..(318): n is a, c, g, or t
  misc_feature (367)..(367): n is a, c, g, or t
  misc_feature (392)..(392): n is a, c, g, or t
  misc_feature (404)..(404): n is a, c, g, or t
ttcttccccaatgttttttaagaaaagttttacaaaatttgttgttgaaactgcattccaaaactgtccttgggccaacaagcagcccgtcattcatgggtaagccaagttaagtataaagtaattatcttatcttttctttttgttttgagacaaagtcttgctctgtcacccaggctagattgcagtggcatgatctcagctcactgcaacctccgcctcccgggttcaagcgattctcccgcctcagctactgagtaactgggattacaggcgcctgccaccncncncggcnaatttttgtntttttagtnganncggtttcaccatcctggccaggctggtctccaactcctgacctcatganccacccgcctcggcctcccaaagtnctgggaatacangtgtgagccactgcacctggccagtagttatcttttctttaagttatttacttgttttttaaattgatgtataacattggatgcatttattatatatcacatggtaaaagaatccctctaaataatacttctctcttggattatatgaatctttgtcatttaaagctcagcataagtaaaaaaaaaaaaaaatacaatgaagagattacttcattcacaaataagtatcgaattttagttcttaaaaagtaaacaaggtgggctgggcgtggtggctcacgcctgctatctcagactttgggagcactggggcggcagggggt

SEQ ID NO: 520612 - DNA, 118 bp, Homo sapiens
acctggatttcctctaccttccaggggctgaccgatatcaactggttggcatataagggcagtattcctatcgttaccctctggttcctctttaccttcggggtcaatatcgctaaaa

SEQ ID NO: 520613 - DNA, 1130 bp, Homo sapiens
agcggaaggggttggatgtggcagaggccaggccccagcctggtgccgctcgagacttccgcgccgcgtgtctgccgccgttggtcccagtccatggccagtcctatccagtctggctctggccaagcccaaggctcagaagtatcctttaaggaagcgggccagcactgcagggctacagctgcagctccaggagctgttcaaccgctcactggcttaagaagcgaagcctccagtagggtgccccggtaatgaggttacccccgacggagaagccgccaattgagatcagccttggaaggagagcagagcgcgcaaggaggctggaaggcggggcacgagtcagagaccaagtgagcttgttcagaggccttgagaagcgcaagaactaagttcgtgtccgttcgcgcgcccaatgtcaaggaagtttccctgacatgaacgggacacggtgaacgtcgtgatccctaacaaggagtcctatcagaggggaaacacggggtggacgggcgcgcatggggggatgaacccagagaaggccctggcgagagaaagcctgtttgagttgttgcgattgcgataaccggagcgaaggtttgccatcgcgaggggtcgcactcgaatcgtcctagagagcgaagggacggaaacttcgtagcgggagtggcccaggttacaccaagaccccttgtgtggggacttgccttagacccaatagaaagtcgttgcgattgcaagtgggcgcgtccttcctgtcccaatttccctgggcgcacgtaggacgcttatcccattggaggtcccgcctttggttcaccccctttgacaaggaactgccttttcctgtggcccaccactaaagcaaagaccccggtgggcggtttttataccgtcttgggttctaagggccccagattcgttgggggccttggggaaatagaataggccccttccttgtggggaatgagaaccccccaggcgggaatcctccttaattgagtaagaacacccaaggggggttgcgcctcgccggtaaaccaatcgccgcgccgtttgtgttggagctcccctaagtgacttaggccagttgggccccccccgagtggagtggttcgacaccactcacttct

SEQ ID NO: 520614 - DNA, 131 bp, Homo sapiens
ctactggctctgagaccccgtcacagcctcaccccgctctgagacccccatcacagcctcaccccactctgagaccccatcatagcctcaccctgctctgagaacccatcacagcctcaccccactctgag

SEQ ID NO: 520615 - DNA, 765 bp, Homo sapiens
ggccttgtccagtgaaacaccctcggctgggaagtcagttcgttctctcctctcctctcttcttgttgaacatggtgcggactaaagcagacagtgttccaggcacttacagaaaagtggtggctgctcgagcccccagaaaggtgcttggttcttccacctctgccactaattcgacatcagtttcatcgaggaaagctgaaaataaatatgcaggagggaaccccgtttgcgtgcgcccaactcccaagtggcaaaaaggaatgggagaattctttaggtttgtcccctaaagattctggaaaaagagaatcagattcctgaagaggcaggaagcagtggcttaggagaaagcaagagagaaaagcatgtccttgtgcaacctgatcacacaaatgatgaaaaagaatagaactttctcattcatctttgaataacgtctccttgtttaccctggtattctagaatgtaaatttacataaatgtgtttgttccaattagcttgtgtgaacaggcatttaattaaaaaatttaggttaaatttagatgttcaaaagtagttgtgaaattggagaattgtgtaagactaattatggtaacttagcttagtattcaatataatgcatggttggtttcttttaccaaattagtgtctagtctgctaaaatcaggtcattgcagtgtgttctaattacaagtatgtgtattgagattggtagattgtggactgtgccatttaattggggttgattatgggcatggtgc

SEQ ID NO: 520616 - DNA, 607 bp, Homo sapiens
ggccttgtccagtgaaacaccctcggctgggaagtcagttcgttctctcctctcctctcttcttgttgaacatggtgcggactaaagcagacagtgttccaggcacttacagaaaagtggtggctgctcgagcccccagaaaggtgcttggttcttccacctctgccactaattcgacatcagtttcatcgaggcaacagaggcatggttcctttgggcaaccctgtgatcacacaaatgatgaaaaagaatagaactttctcattcatctttgaataacgtctccttgtttaccctggtattctagaatgtaaatttacataaatgtgtttgttccaattagcttgtgtgaacaggcatttaattaaaaaatttaggttaaatttagatgttcaaaagtagttgtgaaattggagaattgtgtaagactaattatggtaacttagcttagtattcaatataatgcatggttggtttcttttaccaaattagtgtctagtctgctaaaatcaggtcattgcagtgtgttctaattacaagtatgtgtattgagattggtagattgtggactgtgccatttaattggggttgattatgggcatggtgc

SEQ ID NO: 520617 - DNA, 144 bp, Homo sapiens
tggtacccgcgcgagggttttttggcttagcgcataaatattcgagaagaaatgtggtcctgctggatgatggtacggcaacgctcagaattaaacgctacaataatctcactgctcggggcgtcgtgaagtcggttttcctca

SEQ ID NO: 520618 - DNA, 621 bp, Homo sapiens
  misc_feature (575)..(575): n is a, c, g, or t
ctggttcacagtcctggtttgtgaccccctgctctgaggttcaaggaggtccaccaagttcagcaaggccaggttccagcagcagcagcaattagttactatcttcaccttacacaggatgatcattacccatgggggctccacagaagtggccttattctcataactttgctcagagtcaaggacctctaaaggatcctctcttcctggtccctggacagttaactgtctcctgggtcggggtctggtcagggactaattggagtctggatgcttgcatgctaaaagctttattttattacccatgctcacaatttattttcctatcttaaaattctcttaacataatattttagtcttatgcatgaatccatacttcgtatactctaataaaaaaaactccaaagattttttcccccaaagctgcaatgtattgttttctaaagcctgagatcttctgctgcacctagttctatccttgataagtttcaaatcctcttaacatttctatcaggcgtcttggaggcaacggcactcaaaattgttggtttggtgttttcttatggggaatccangactctgagaaaaagagatcttgtcagatgaactttgaaaagaatt

SEQ ID NO: 520619 - DNA, 376 bp, Homo sapiens
ttatcgcctagtacatctgtaagtaactggcagagtccagacactgatgtaacacgcctcagctatcttctagcaagtcattcatgtgcatcatcataatgccattatcatgcctcagacaattaggttcactgtcaggttcaagttatcataaaacaaggtctcctatactacataccatgttcctaatgtatgtccaaaacgcacatgctctaatacagttaccaatggattaccattgcttaggttcagctcctctccaacttaggtgcacaaagagcttgtgcaacttgagtgctcagcgctcctccggggatcagatatcaaggaccgaatccatgcaattttttaaaaaatgcaaatgatcaactgtaat

SEQ ID NO: 520620 - DNA, 171 bp, Homo sapiens
cccccctttatggcctttggggccttggggataccccgcccactttcccccctcaatggaactccatgggccttgctggttttgggggggttatttaatttttgggataggggaaccaatttttttggattaaaattaataaccaacccattaaagttttttgggccccca

SEQ ID NO: 520621 - DNA, 316 bp, Homo sapiens
gaaatggtgcagggagactcgaacgtactctgaggcttgtaggagggtaaatagcgcccccgtatacttgtactccgccgtgcttgacttctttggtttcggttgttttctattagactatggtgcgctccggtgcttgatactcctgatgcgagtaatacggatgtgtttaggagtgggacttctaggggatttagcggggtgatgcctgttgggggccagtgacctcctaattggggggtaggggctaggctaggagtggtacaaggctcagaaaaatcctgcgaagaagaaaacttctgaggtaataaatagg

SEQ ID NO: 520622 - DNA, 100 bp, Homo sapiens
  misc_feature (71)..(71): n is a, c, g, or t
  misc_feature (84)..(84): n is a, c, g, or t
catgaacgacaccgtaactatccgcactagaaagttatgaccaaccgactacttcagaggaaacaaatggncattgatgtcttnacccgggaagcgacag

SEQ ID NO: 520623 - DNA, 534 bp, Homo sapiens
gccgccgcctaccactactcaattagcgcccggtcgaccagaactgaaattccaacggccaggataggcaagcacagctgccaactcctatgtacctgcagaacccaaattggcgctcgtcactcagactcagaggtatcaatggcgtgagcccaaaggttcgacaggtgttgcagcttcttcgccttcgtcaaatcctcaatggaacctttgtgaagctcaacaagggttcgattaacacgctgccgattgtcgagcgatatattgcatcggggtcaccaatctgcacgtcagtaaatgaactaatctacaagcgtggctatgcgaaaatcaataagcacggaattcgtttgacagataacgctttgcctgctcgatctcttggtaaacacgggctcatctgcatggaggatttgattcatgagatacatactgttcggaaacgcttcaaccagccacataacttccctgtgggccttccaattgtcttctacacgaggcggaattgaagaaaaagcccaaccattttcgtag

SEQ ID NO: 520624 - DNA, 423 bp, Homo sapiens
  misc_feature (2)..(2): n is a, c, g, or t
  misc_feature (229)..(229): n is a, c, g, or t
  misc_feature (421)..(421): n is a, c, g, or t
gnttccacaggtgtcctagcttgtctttattctgttttttctttttctttttcaaagcagattacaatgttgccctaatttgcattttaattagttgttacaagacactgcacattctcctgagggcacacaatgatttccaagatgccaggtccctcttccaatcagtgaatggcgagctccctggcaggtgcagggctacttcctgttttccaatggtgtgcctganatagcgctttgcgaggtgggcgtggattatgtggacacaattttgaggcaatctcccttacccatttggtagaagactgcctaacttattcttactattagtgtattagtgttgtttttttttgaagacatattatattccattattctgcttagctcaaggggggataaagaatttgggccaaaattttancc

SEQ ID NO: 520625 - DNA, 1087 bp, Homo sapiens
aaattaaaaaaaaaaaaaaaaaaaaaaaaaaaaaaaaaaaaaaaaaaaaggggggaaaatataaaaaatttcccccaggggccccatttttaccctgcccccgtttttgttgtgtcccacggcgggcccccgctattggggagagtctgcttttttatatcgcgcccagcgcccgtggccgctctctgcttttataagcacgcgcgcgacgagcgtgggaaaacacgtgtccagccttgtggtgaatcatcttggtgtgcaacgcgaaccctatatatctctctgtgtgggggggagggaacacactatagatgtgtggacacaaccctataccctatagcagagcaatattatataaagtgcctctctcaggaggtcgacaacttatataaccacatcttttctacagcagagtgtcatatatagggtgtgtgtctcaacaccaccatacgcgctgagcgctatattatctgcggcgacgagcagccgagacgcgatctgaggagaactactatgtctatgcgcgcgctataacccgctgagagaatatataatagtatgttaatatgtagagagaacactatgttcttttattatatacccacaccgcaagagaggagcaaacgctgtagttagtaaaaaataaaaccgcgaaggtgagagactgcaacactgaagtgaatataaacagccgaacccaatatccactcacaacaacacatacacgacgaaactaccccaccatcaaccaatatcacgtacagtaacactcagcactaacataaaactactctctcatctaaaaacacaccaactacatataataataattaaaatacatcactacacctaaatctaatactacatcatagatacatatcttaactcacagagcaatatcaatactacaacactagtactctcaagccaatacagcaaaaatcatatagaacaacctcagtaattcagatactaccatacacaacaccatacatataacactacccacatagacaaacaacacacacaccatcacacaacatacaacacacatcaaactacacatacaaacacaccatacaatcaa

SEQ ID NO: 520626 - DNA, 118 bp, Homo sapiens
ctttgcggtttccagatgagaaggggtgaagcggggctcctcctggataatgtcaaagttggaagagctcaatggggtgttaaatgataatatcagggctcaacagggagagccatcg

SEQ ID NO: 520627 - DNA, 345 bp, Homo sapiens
gtgggaaatccttagtggcttttatggtgttttgtgggagggcacaggggactgacgtgtgaatgccaggtgtcattatcactgtcaagtgtctaattcagtgctgggtcatagacaggtttagaagtgccttagaattcagagttaatccagagtgggccacaggttgatggcattttgctttattcttcaatgctttccttttctctttagaatattgtcatcccttttaccccttcccccttcctcggccattttccccagagggcagaatggcttgagctatttcctgcctgagttttgatgtcgagacccctgcctgcccaattcctgcaacaatgaccc

SEQ ID NO: 520628 - DNA, 121 bp, Homo sapiens
ctcatgtcatacatctaccccattctcctcctatccctcatcccagacatcattaccgggttatcctcttaaaagaatgaaaaaagtctaattataataacatttgagtgaaccgtgaggg

SEQ ID NO: 520629 - DNA, 157 bp, Homo sapiens
caaaggccggagagatcttctcggcggccggcgcgctctcacgaagctcggggagctgacgatgcagctgatccgcggccgatcttctctgcgggtgcgaagtggacggagacggaaatagagatgctgagggctgctgtcaaggatttcgggacga

SEQ ID NO: 520630 - DNA, 446 bp, Homo sapiens
ggccggtatcggaatctgttgaacatgaaatatcatcaatgtgattttctggactacactttttatggaactactaaagcaattcagcttgaaataaacacgttttgtaaagtagcatgcaaatataacagtctagccgtggttgcagtggctcatacctgtattccctagcactttgggaggccgaggcaggaggatcacttgaggtcaggagttcaagaccagcctggccaacatggtgaaacctcatctctaccagaaacataaaaagtagctgggcatggtggtgcacgcctgtaatcccagctactcgggaggctgagggagggaattgcttgaaccaaggaggcggaggttgcagtgagccgagattgcaccactagactcaagtctgaatgacagagcgagactctgtctcaaaaaaaaaaattctgaagcttaaaatg

SEQ ID NO: 520631 - DNA, 169 bp, Homo sapiens
ccaaggaagcacgcagggcgcgtgaagagcgcctccaggccatgagggaggagatcatcaagaattttatccagggaggaggagaccaggaaataaaacctcccatttgtgtctgtacttcctggcctctgtgattccttagatcagccattaaaataaaacaggccta

SEQ ID NO: 520632 - DNA, 122 bp, Homo sapiens
gtaaaacccagcccatgacccctaacagggcccctctcagccctcctaatgacctccggcctagctgtgatttcactttccacttccattaacggtgtctcattacttagggcctacttacc

SEQ ID NO: 520633 - DNA, 177 bp, Homo sapiens
gatgcttcctatgcagcctgcagaaccgtgggtcgattaaacctcttttcttcctaaatcaccctgtctcaaaaaaaaaagtttttgatgatatggaccaaaaaaaaagtttttaatgatatgtacaaatacttacattaggtcaaaatttttcaaattataatctctagtaccaaa

SEQ ID NO: 520634 - DNA, 645 bp, Homo sapiens
taagcgccgagccgcgcaccggccccggtcggaccggcggcccgggcgcagggcgggatataggccgcagccgggggaacggagtgcagagggaaagggcagctctgccctctgcccaagagcggccaccctaaagacgagggaacaggggaggaggaactggggacagtgtggtacctatctgccccacctctgaagtggttgacaagggaaatgggcaccgtgtttttcacatgaaatgcaaggacaagattgtcacatcactgttaaaacctgaatatgcttctacattcgtcagatgtcactcaacctggaggacacggagttgcagatgaagctagacatgagatccggataagggaaggggactgtaaagcttataacaatctgatcaccaaatgaaaaaaaagataatagaaagtcaacaaaaaaactaataaatatgcaaaaatattatgatcaatcagcatacaattagtgaaaatacaaaaaaaagataaaataagaaacgcatagtgatagaaagaagaaaaaaacagagagaacataatgatgaagaagctactcctagaaagaacccctaaaattagacgagactctcaatcaatgacaaccaaattacatcaatgagcatagaaacacaca

SEQ ID NO: 520635 - DNA, 376 bp, Homo sapiens
cggttactgaagtttcacatccacatgtgcttgctacgcataaggtcattattatcagagagctttacaaccatacgagcagcttcatccaagtcatcacaagcaagtatttaaagtccactgtccgttatcagtgccttagcatcatcgactcgtgtaccttgtcaccgtaccacacacaggtattttaatttccaagtcttttactgccatgactataccctgtgcaataacatcacagcgcatgattcctccaaaaatgttgaccataatagccagtacctttttatctgaagtgataagcttaaatgcttctgttacttgatggactgtaccaccaccaccaacatcaaggaagttggctggtccgtgacag

SEQ ID NO: 520636 - DNA, 200 bp, Homo sapiens
gacagaggcgacacacagtgccccacacaggataggcacccaggcctatattgttactataataaagtatgtagtatatctaggtcatttgcagatcacacgatcgcaaaataacaaaatgaacacaaaggcagatagagctggttggggagcacagacatatggatggccttgaaagcagctttatccccttaagatct

SEQ ID NO: 520637 - DNA, 251 bp, Homo sapiens
ctgacaatcctctagctgatcacttagagtatccccgccgaacgtgggattcagctgggccaccctacagtcagaagagatatgaggaaattgtttaccgaagtcagcactgtactttaagaaaattggctacaacccctacacagtatcatatgtgccattttctggtttgaatggtgaccacatgctggagccaagtgctaacattccttggttcaagggatggaaagtcacccgtaaggattgcgatg

SEQ ID NO: 520638 - DNA, 223 bp, Homo sapiens
ttcgaatcgagctcggcccgatacctaattacgcatgtccaatgtacttgagaaataattactctgagcacagcaggacaatatttaacaataacggaatgctgcttgttaatcccaattgctctcttctggttttactcttttaacagcaactccccagtcctttactcagggtctcagctcatacctggccttaaaatgaatgctttaaggagttcccttc

SEQ ID NO: 520639 - DNA, 127 bp, Homo sapiens
  misc_feature (55)..(55): n is a, c, g, or t
  misc_feature (88)..(88): n is a, c, g, or t
tgatgaggtgatctagaggatccgtgtcatcccccttcgtgggagggtcgaagtnaacatcaggggaggtcagctgtgattgacatgnagaacatgattatacctcagggtctagcttcgaggatat

SEQ ID NO: 520640 - DNA, 170 bp, Homo sapiens
agcagttatcgtaaggatgatagagttgggcgaacgattacctattcaatttaatggtagagccggtcgtgcgtgagcggcgtgatgcgagtgctagtggcatttgtagcagactgggctggggatgaacgaacgcgggtttacgccgatgcgggggtccgagtcgaatc

SEQ ID NO: 520641 - DNA, 365 bp, Homo sapiens
cacgtccaccttactaccacacaactcttagccaatccatttatccgcataacttaagtctagagcgatagaaattgaaacctggcgcaatagatataggtaccgcaagggaaagatgaaaaattataaccaagactattaatatagcacggactaacccctataccttctgcataatgaattaactataaataactttgcaaggagagccaaagctaagacccccgtaaatcagacgagtctacctaagaacagctaatagagcacacccgtctatttagcacaatattgggaagatttataggtagaggcgacaaaactaccgatcctggttattgctcgttgctcgtaaccgatcttaaatt

SEQ ID NO: 520642 - DNA, 275 bp, Homo sapiens
tgcgtcttcataagcatacttaataaaatacacttttttcaacagaagtataatgtcaacccagttctttgaatcatcaaccttctgtccaatttctaaatcttgagaattctctgaactccattcttgggaaatctaaccatgttattggcactccctttagaatgaaaaggggtttgttccttacagtggacttatcagtttttcttcctagccccagaatctggctcaaactctccaacataaatcaagaaacaataatattttaagagctg

SEQ ID NO: 520643 - DNA, 358 bp, Homo sapiens
cacaggcatagtaagagattaccaataatacctaataatacaatagagcaattacaccaacatactataatagaaattataggagcctgggcgtggtggacgcctgtaatcccagcacactgggaggccgaagcgggtggtcaggagtttgagagctgcctggccaacatggtgaaactccatctctactaaaaatacaagaattagctgggcgtggtggtgagcatctgtaaccccagctactgggctggctgagccagtagaatcgcttgaacttaaacccaggtggcagaggctgcagtgagccgagatcgcaccgctgtactccagcctgggcaacagagtgagactctaactc

SEQ ID NO: 520644 - DNA, 891 bp, Homo sapiens
  misc_feature (706)..(706): n is a, c, g, or t
  misc_feature (709)..(709): n is a, c, g, or t
  misc_feature (733)..(733): n is a, c, g, or t
  misc_feature (744)..(744): n is a, c, g, or t
  misc_feature (776)..(776): n is a, c, g, or t
ggctacattgaggaccagaaactggtgctgagcgagagggcgctcactcgcagcttgtcccgcccgagctccctcattgagcaggagaaaaaaaagaagaacaaaaccagccgctctcagcccggtgatggtcccgcgtcagaagtatcagcagagggtgaagagatcttctgctgaccctcttcctctctgctgaggcagctgcctcctgatcctggccagcccacctctcctgctgtccccgcgtgcacaagtctcttacactggacgcccactgctcctcagcgtccagtcctcctgggcggccccaggtcctggacaataagcagcgcagcctggagaagcagcgccaggacctggccaacctgcagaagcagcaggcccagtacctcgaggagaagcgcaggcgcgagcgtgagtgggaagctcgtgagagggagctgcgggagcgggaggccctcctggcccagcgcgaggaggaggtgcagcaggggcagcaggacctggaaaaggagcgggaggagctccagcagaagaagggcacataccagtatgacctggagcgactgcgtgctgcccagaaacagcttgagagggaacaggagcagctgcgccgggaggcagagcggctcagccagcggcagacagaacgggacctgtgtcaggtttcccatccacataccaagctgatgaggatcccatcgtnctncccagtctgaggagccccctcgcnatctgaccttncatagcaatcaggctcattggcactcagactntcagtgtcccaaaaggacagctctctcgggacaccacaaagaataggggccttttcacatactgagttcaccagcagacaacaaaggaccagaaggcagagcaagccctggtcac

SEQ ID NO: 520645 - DNA, 745 bp, Homo sapiens
gcataggccggttctaatttacaatgaacaccgcggcctgaggccggagagtcccttcaacccgggaggcggcggctgcatgggagccgagacggcgccattgccctccagcctgggcaaaaagagcgaaactccgtctcacaaaaaaaaaaaacagggccgaaaccaggaagctgcgcgagtggcgccaggggccccttcttctcccggcctgtgctccggaaggttccccttccgaggcgccccgggctcccgcaagcggaggagagggcgggacgtgccggggccggagctcagaggccctgggggccgctcaggctctcccgccatcgcaaggggcgggcgcttgacctgagggccatccccgcaaagggtccccagaggcggcggcaggcggcggcgctgtgagaacccgcagaagaacgctgggcgcgcagagacccggtccacccccgcgagggagagacttccacagaggcacgcgttcccacagcccaaagccacgtccctcagggtgatgcagccccagtaagtcccgggcggggaagctcagggcttgtcaaacgaactcttcgctccagccgtgcgcacgagggggacggcgtggcgtgaggctgccgcccgcacgtggttcatctggatcagtttgccgctgcctagttcggcttggggcatctccgcttgggtctcaccgccatcacgccgtctctccctccgtggctttccttttacctttagaacccaa

SEQ ID NO: 520646 - DNA, 214 bp, Homo sapiens
agtcactctgtgctgtgcgctagcaaatcagggtgctcttgataaaaatcttctcaaattaggcagctcatcacgattcacttcttttagctaatatctcccagggttccaaaacttctttccagataagggccctgccctacttcctccaaatcgaggtgcaccaaacccctcggtcccgggccgcgagtctcgggtcaactcgaaataaccc

SEQ ID NO: 520647 - DNA, 390 bp, Homo sapiens
tggtagtctgtgaatgacatgaaagtatcagcgagtattgattttggggtacaaataaatttcagtgactaggtaagttgacaaatataaaagctaggaatgagaactaatggtatgctggcatttaataaagtttctaaatcaattgtaatggtaaacatattttaaaaaattcataacttggtgggcatggtggctcatctgaggtcaggagttcgagaacagcctggctaacatggcgaaaccctgtgtctactaaaaatacaaaaataagccatgcgtggtggcccgtgcctgtaaatcccagctactcgggaagctgaggcaggagaatagcttgaactcaggaggtggtggttgccgtgagtagaggttggggtgagccgagat

SEQ ID NO: 520648 - DNA, 559 bp, Homo sapiens
  misc_feature (3)..(3): n is a, c, g, or t
  misc_feature (48)..(48): n is a, c, g, or t
  misc_feature (140)..(140): n is a, c, g, or t
  misc_feature (163)..(163): n is a, c, g, or t
  misc_feature (254)..(254): n is a, c, g, or t
cantttcagaactttttaaaagcacacgtgggagcaacatgtacgccnatccatcacacctatttacagcaacttcttggagccttacacccaccattaccagcaactgtagctggtcgaaccaccagtgaccttttccncctcttccaagtcaccattatantttcacctaacatatgccagtttccaagaactattaagtccccttatcgcactttttatgccatgcccacgaaaaagcactttcttccgcntacagtatcagatccatgggacaaccacagacaactaagagcagcattctcccgttaattttcttgcacaaaagtataagtctcattgcccactgccataaattttgtctcgtcctcacagaagcaacatgcactggctcattttatgtgcaaagaaaagacttccccattacaaaaattaacttggctaggtatggtgtctcacacctgtaatcccagcactttgggtggctaaggcagatagactgcttgaacccaggagttcaagaccagcctggacaacatggtgaaaccccatctcttta

SEQ ID NO: 520649 - DNA, 1329 bp, Homo sapiens
ggtgactaggctgggtgtgcagctgcagcgtatccacaggccccagggatgcattgccctggtgctactcctctgcattgtagccctcctcgggcacagcagctgccagaacccctgtctctagtcctccgccgtgatgtgaggtgcgtcgccagatccccgacagcacaggagcgctggtggagagaggacggatccttttcttcaaaagtcccctggtgaaacatagacttgggcagcagggcatgatcgtaccaatttacagtgactagtgatgctgataccggggatagcgactccgagccactgaagcccgcaggatccgaaacgctgcatccttggtcagtcctcgtgcacctgttgggacatctggcacctgtcgtcggttccatcctcagcgtgggaagccgtgtagtcagcggaaacagcaagtctcaatcagttcaccgtgggactcttcttactcattgacgttgcatacaggcgaggccacagactatcacattggtaaccgtatcagagggagcctcctatgatcgacggactcaacattgcccctgccagagaagagaacactcaaagaagttgcactcctcgggatacgtctgatgcacagaaagcaagggcttgcgggcagtaacacaaactcgcaaggactttcatgatggggcaaccttcttagcgaacaacacgatcagtagtgcgtgacaccaagtgacccaagaagatcacttgaccgggcgcaaaaccctctcggcttgggaaccttgcccaaggacgatcgaaggaagaatggggtggcaggacgccaaggattgacaccaggggggaaaaggcttcggacgcgaggtgttacccaagcagagacgggggacaaattttccacctggactagacagcaatccaggacatttccgtaccattatccttccgagaatggtgaggcatggcacgtttccacacggggggagacacggttggggtaaaacgacagaggctacatcgacgtttccaactgacagatagaacttctcccccattcaggaaacggaggaagtatcatcattaagacgttcttgaggactttcggaacgcatagagacgtaggacagccccgtaagcaacaggcggagttaccccccagttggcaattaggatacggagaaccccgatttaccaggcggcaaatagatattctaacgcgcctcatcattgcgagcttattggggagcattacgaagagatcccgtccaggtgcctttgcagaagagatttggcgccacacgtcctggcctctcttgcaccgtgcagggccattgatagttaata

SEQ ID NO: 520650 - DNA, 715 bp, Homo sapiens
ccatcgccacccgctggtctgcccagcactgccggtgactgctgctgtggccatccagctccccgtgggtgctgttgtgtgtgttgctcctgctgtgtgcctggtgcctcgtgtgattctgccctgccgcttcccctggggatgcctgctgctgcaaatgccagtgttgggtgcgcctggtgccctggccagctgccctctagtgcagcaggaatgtgcatgcttgctttacatcctgtcctcccctgcctcgcagagttgggagaatgtgcatgggtggggggtgtggaaaaataaaatggaaaatgtccttgcaccatgtagatcagcgtcccccactttggcatccctggcctgtgcctggtggacctcccagtctgcgtgccatgaacgcgagcatgctgaggtgcgagagcttcgctgggctcgtgtgcaaattccagggtggcacaacgtgtgctggtggatgcttgactcccgacatccatatcttgcgtgcatcttgcaagcagcagtttaacaacctggatgcctttgtagctcacaagcaaagtggctagccagctgacaggcacatcctgcagcaggccccagcacggtccagtttgtatcggaggaaacatgtgcctgccacccagactcagaccacaccagaaccatcacctcggagagccagacaatcacagtttcagctccagaatttgtctcttggacc

SEQ ID NO: 520651 - DNA, 254 bp, Homo sapiens
acgagttgaggtacagctagtgtgggatcgtggaggcttgatgggagcacactgtcgtgactggtctggcctgtgtagagcgtttggtgaagcagggcactgagtcacaggcaggtcgtcaggatccacgcccagctcctgcagcatgctgtgtggtctcctgggcactcgggccactggcttttctgggactcacccacgcccagctcctgcagcatggctgtggtactccggcttggtctccagcagtttca

SEQ ID NO: 520652 - DNA, 125 bp, Homo sapiens
aagcagattaatacagactcagtgttgtgattagatgcaggagagctcgcggtcttacccagccgtgtcaccaaccccaaaactaacatatcagaaggaagctacgtggacgatgtcaaacatca

SEQ ID NO: 520653 - DNA, 507 bp, Homo sapiens
  misc_feature (437)..(437): n is a, c, g, or t
  misc_feature (474)..(474): n is a, c, g, or t
agacatccgagtagatcccgtgaaaagtctcccacgtggggctgtggacagggcccaagggtagcagagctagcagaggcagtgacggactgtgtggcaggtcatttgcaaggagaaaagccgtctgcctcttaatttgtggctcaagtttcagaatttttttcctgagggactttagaaattacttcaggcttgccacctaaccttaaaccacccccttggagactggctaagtgttattgtgtttctgttagtctatcaccatcgatactggtatgactggtgtgtacatggttagcccagcaagtattacttctccagctaacagatgggaactaagcccagagacatgagttgacaccccaccccagagctagagtctcccttcttcgctcctcatctccacagataaatgcaattaatcagactagtgggangcctccgtgggtgactaactgcatccgcgtttcaccnactttgatcaggacttcgcccctctctcttcct

SEQ ID NO: 520654 - DNA, 649 bp, Homo sapiens
  misc_feature (19)..(19): n is a, c, g, or t
  misc_feature (62)..(62): n is a, c, g, or t
  misc_feature (64)..(64): n is a, c, g, or t
  misc_feature (96)..(96): n is a, c, g, or t
  misc_feature (99)..(99): n is a, c, g, or t
  misc_feature (106)..(106): n is a, c, g, or t
  misc_feature (149)..(149): n is a, c, g, or t
  misc_feature (153)..(153): n is a, c, g, or t
  misc_feature (158)..(158): n is a, c, g, or t
  misc_feature (163)..(163): n is a, c, g, or t
  misc_feature (193)..(193): n is a, c, g, or t
  misc_feature (204)..(204): n is a, c, g, or t
  misc_feature (212)..(212): n is a, c, g, or t
  misc_feature (216)..(218): n is a, c, g, or t
  misc_feature (237)..(237): n is a, c, g, or t
  misc_feature (258)..(258): n is a, c, g, or t
  misc_feature (262)..(262): n is a, c, g, or t
  misc_feature (296)..(297): n is a, c, g, or t
  misc_feature (376)..(376): n is a, c, g, or t
atttcttgtaaattaaganaagcgaggggctgagtgtttgtttgtagtggtcttcttcagtntnaggccccttcggatggggttcagcatgtgttnttnttgtggngtatcccttgggctcaggtctgcagggtcactcttctggtatntggnctggngaganagtggtttttgggggttcccgttcctggtnttcagcttcantttttggnattnnntgtttgttctcctcagtgnatactgggcttcgggcctggnagtngagggttaacggatagtttggccgctccacattnnggagggcatgctggtgacaccttgggggccctcacccacagatggcgactcagggctgtgctccccccgctcttctggnccatctggaggggctggcaacacccctgggaggtctgggacggttggggtcttgacagggatcacgggtgtcttgatggggatgggaccagctccaatggttccccggcggacagaaggcttggtggaaggggtccgtcgtgatagttgcaacccctggagtgaccatagcaggtcccagggtggtggggaggccagcagttgaggctggacgcttggcttggaacaaccgtcggtaggactggctgatgtcgctgtttcttggaatggtgga

SEQ ID NO: 520655 - DNA, 600 bp, Homo sapiens
gagcatggggatatggggaactggcaggcacagccatcctggtggattcgtgtagtgcttcacgtagcattcacggactttccgtcttgggccttttttggcgggggggtccagttggctgctcgtggtgtacaggtccccggaggcatccctggctaggtgggaagttcctggcggcacgttctgtccgctttcgctccaggtcacactgagtgctcctgggggaagaagccctggaccaggcattcgacgaccacgttcccatcttggggggtgctgtcgaggctcagcgggaagaccttggggctggtcggggattctgaagagacggtgaccgttgtcccttgggcccagatatcaaaagcatcttcatgcctttcaggcctcgacatactccgagcacaaaagtacagggccgtgtcctcggttgtcaggctgttcatttgcagatacagtaacttctttgagtcatctcttgagatgggtgatctgggtttcacagacgcgggtattctgtcgggtaactattatctttgtttctactacgggcaacccactcccgtaccaggggtccgcggccgaattcgaatctagtcatag

SEQ ID NO: 520656 - DNA, 1682 bp, Homo sapiens
gttggatccccggcgcgatcagccaccacggagccgtggggctcgtgccattagggtgtgctgttacgcaagcagtcagcgagcagcagcagcgagcgagcagtcgatcccgcaggtgtctgaggaaagtccccacgcaccaaggtccacagctctggcaggaagaaatgaggagccaatggagccacgccagagtggcagcgagcactgatgtccagcgtacagacgtcaccaggccgagagccaagccatcgctgcctgtccagtctcgcctggcgtggacaccttgtggactagacgacgcaacagaagactggacgatgcgccatgcagtacgcggaccgcatgggactgtgtgccgcaaatgtcctgggttgtggatgagcggctaccttactactcctggacgaaagaccaaatcaggaacttgacacggctgacatgacacaggcagcatgacccctcggtccgcgtcgtcccgcgaccgccacgccccgcacgcgacccgcgctcagaacacgacgagacgcgactcaccacgcgctcgaccttgacgcaccccttcggacgtgcgcccactggaccactccagacgaacaggacagcgaagcccacacctgcacaaaacccaacccgccaccgcacgcgaccccacccaacaaccaccaccgccaagacccaccacagacacacggacccacacgccgcccgacgcacacccaccagcacgcaccacgcctaaccacgaacaaccgccgggcaccaccacgcaaaacgcaacacaggacacagccacccccacaaccagaaccaaccacacctcacacccaagacaccacgcccacaccacgctctaccccaacaccactgcagacaaccacccttatacgcgaacaaggcacacaccacagacaaacacagaacacacaagcggaagcgaacaaccaaacagagcagcgcaaacacaccagaaaccaacaagccacacacagcagacaacgtccacaacgacacatacaccaaaacgcaagatcaactagcccagcaacacaagcccaacaaaacacaaacgcagcataaccaaacaaacgcacaacacacacaacacacaaacccacacaagacaaaccgacacgccacaaaccagacaacaacaacacacaacaaggcacacgaaacaacaacgacgaccatcacaaccacgccacccaaacccaaccaccaccaccgacaaacaactacaaaacgacacccgatcacattcacccataccaaccccaacacacacatacccaaaccaaaacacaacaccaaattcaaacacaatcactgaacctcgatcaataatactaacaactacctaaaacacataaacatcctcccacaaacctatcatatcaagcccacatctacaacgacacatacataatagtaaataaaaataaacaccaaatactacactctcccaaccaatacctcacaacactctatcataaacaaaaaacccaaccacaacaacatccccatactacacaccacacaacaccatcagcacacacaacataaatcaccataacaaataatacataatataacaatatatataaccgacctaatctgtcacaacatactaactaatcatatataaaaataatacaactcgttatcacaacaaaaacaat

SEQ ID NO: 520657 - DNA, 116 bp, Homo sapiens
tgtctatgtctctgtttttatatcagtaccatgtctttttttttttgggctatagttcggtaatatatttggaagtaaggtaaggtgttccctagagttttttaatgttttttttt

SEQ ID NO: 520658 - DNA, 124 bp, Homo sapiens
tgcaacggcgacatcgagggagaacagcatctcagtggtgatttccaaccaagcctttgttttcggtgtggggttatgggggtttgctttaatgtttttgaaattgtaaatgttggcttcatgt

SEQ ID NO: 520659 - DNA, 325 bp, Homo sapiens
ccggcggctcagcccggctctgactggtgctccctgcagtgccttctccatggccccgccctccccgcgtgtgtgccaggcttggtgtccccctgggagagcagagcttgcgcctcgggcatagggacgtggggtgcaggcgccaacatcagtggcagtagccagggcccgagtgtccagtcccactcggcggatggagtggtgcctggcggacaaaccagtcactcggggcagtggaatgctggcatggagcgctcattccattctatataattgcagtgtacaaaattgtgtcagtatatagaataaactgtctgttgacacg

SEQ ID NO: 520660 - DNA, 713 bp, Homo sapiens
tcgggggatgtgggcggtcgcagctgccggactcggaactgctgttgcacccgggagctgcgtgtcccaggagttccttctcctcactctgggagcagaagaacatagctgttgaaacgtgatgtaagagttagacaacatgacagtcttactgatcgctttatgtccaacatgcaataccattgcctcagagggatttgccgaagaatagatgggggaaaatgatggaaaagaaacagagaacaatcgatgagattgaataaatgagactaataaggagtagcactgtagatgggttagaggaaaagacccctcatcgtattagatggaagttcaacaatgtacagagcatacaaagtgtagacatacagacgagacgacatggagataatgatcgactgaagcctcccccgcaggcgagctttaccatgtaatgcctttaggacaagattactcaagattcctcttgcgaggtgtgtttcaccccctcaattatgttgtgcttgccacattatgcactgatgaagctaataaaactggaacacaagtaactaatgacgctaaatagaagcatgacttaaggcataggaaaagtccttcaggccctgtgaagtcgccactcattgtcccctgttggaactactccagtgaagttaaacgagagctgctcctagagaagaggcagaggccatgaataagctgaagcccccaaa

SEQ ID NO: 520661 - DNA, 110 bp, Homo sapiens
ataattgcttgattatacagatcactagagagctggtctaacccaaaacaagtaggtagagggcaaaggatcccttttccctagttgttacctggaccacccaaggaagg

SEQ ID NO: 520662 - DNA, 614 bp, Homo sapiens
tattttctttatgagtaggtccttttttttcaaagtcgtgaaacatcttcgtttgtaaaggctctttatgttataagtagaattcatccattagaagctttttgatgctctggatattttgatctgtatacgtggtatagatgttagccagctcctggtgggagttgtctttggcgttgggttcagccctagatctgctgtgccaaagtggcctttcagtggagtcagtttgtgttgccgttcggtgcactcttctttgcgttttctgctggagacgttcgtagcgccgtgtgtctggactgggttctctcttgctttgtcgcttgctttgggtctttacctcttcgaaattgtatccccctgggaggcctctctgtcttccccttctcgtcagtgttgcagtgccttctgatctgccgcttcttgccagtgactgtttggatcgcaatccccatcggttcgcggctttctgcttggggtttctatcgggccaatcttgttgctccttgcttaaggtgcgcctggtctatcggggttgtgggtttgcttcggtctttgattcgttgctttcgtcttggtcaatgcgttgggtttcattgtggttctcctttctg

SEQ ID NO: 520663 - DNA, 83 bp, Homo sapiens
  misc_feature (83)..(83): n is a, c, g, or t
ggtaccctggctgtgctgatcatgtgggcacctgagcctccgccttctcctgggtcttccagctcacttagttgagtgtctgn

SEQ ID NO: 520664 - DNA, 237 bp, Homo sapiens
gcacggaagaggacagtggtgtgtagacggggtagatgcttcaaggaggcggaggctgtggtgttgtcaggtaagagtgttgtttcagtggagcctgggctgctgtggaaggtagtagattctggaccaaggtgatgatgctgtgtgtactgtcagggcgacagtgttgtgtcttgtggagccttgggcttgctgtgggaagcctgtagattcctagactgacgcctggcactggtg

SEQ ID NO: 520665 - DNA, 159 bp, Homo sapiens
caagaacgactaagagctactgagtccagagactactgaagggcccctggcaaagtaatagggttgctggctaagcctctccctccagccatgtaggcagcgtgttcttaactatcctaacaagccttggaccaaatggaaataaagctttgtgatgca

SEQ ID NO: 520666 - DNA, 527 bp, Homo sapiens
  misc_feature (395)..(395): n is a, c, g, or t
ctccacccgagcggggtgaaggtgtgcttaaaaagaacaaacaggccaggcgcagtggctcacacctgtaaatccctagcactttggtgaggccgaggggggtggatcacgaggtcaggagttcaagaccagcctggttaacatggtgaaaccccatctctactaaaaatacaaaaattagccgggcttggtggtggtcgtctctaatcccgctcctcggaaggctgaggcagataattgctcgaacctgggaggcggaggttgcagtgagccactgcactccagcctgggcaacagagcgagactccgtctcaaaaaaaataatgggacaagcaacccagttagggggatttcattaaccaatggaggacggcctcccttgtcccctgccaggncctgcggggaaggtccacggccatgtcctttttaacgaaagccaggtcatcagggccctcccggtgtttgagacgctagagtccgtcaaggaagcccggtttcctatgggcgccgcctagggacgtgactca

SEQ ID NO: 520667 - DNA, 697 bp, Homo sapiens
aatccgtcccgaactagatgatattgactaccactgacatgactttccaaaatggcacataatttgaatgcaacagcaagccagccacaggctaattattagcatcatccctctgctatgttgaaccagatcaacaacaagctatttagctgtgccccaactttttctccgagcccctaagcaaggccgctcctaatactaactatctgagtcctacccctcacgaatcatggctaagcctagaagccagttatccagggaaccaatttatcacgaaaaaaacttcctacctctctatagtaatctccctacaaatctccttaatgatgacattcatagcccagagaaataatgcatatcttatagcttcttcgagaacacacttatacccacgtggtatcatcaccgatgaggcaaccagggcagaaggcctgaaggcaggacatacttcctagtgctacagcctagtagggtccctttccctgatcatcggactaattaaaactcacaacggcctagggtcactaagattctactagtcagtctcactgccagaatataaaattcctgggcaaattatttgctacgtaacatagtttcaaggaaggtacctttggggcggttgatcctaagcaagtgagcctcgtgtgaaactgcggactgaaaaggaggaaaaccacttaccgaaaaggccttg

SEQ ID NO: 520668 - DNA, 749 bp, Homo sapiens
ggaggttgcagtgagccaagatgcaccatgcactccagcctgggtgacaagagcaaaactctgtctcaaaaacctccgactcaaaaaaaaaaaaaaaaaaaaaaaaaggaaaagaaaaagaaaaaaaacaagggggcctggccggggaataaaagggatggggccggatgcgtgaggtttcacaaaaggattagggaaggtcccccggagaaagcggtgactcatttctgttttgggtcctgctttacaccttttggattaaaaggggtgaccttttggagttaaagccccttgaaggagggtgaggcaagggaagcccttgttgctctagtgcggggaaaggagcattcccagggcagaggggaacaacgcgatgtgcaaaacgcccttgagctgggagaattgtctagactttgtccacagggaattagtgagggaagaccctttgtgggcttggcgagagagggtgtagacttagaatgcggagaaaactgtggcgcgacaactggtggcgcacaatgcaagtggtgcacagaccgcagaacttcgggagacctggtgggcgccacggggtggaggcgacttgggcgctttgggtcccacaggcgatggttgggtctatagacccagggggtgaggagacccaattttatcccggcgggggccaacagggatccctctgggatgcttggtgaccagcccagcctagggggcgccacacgaaaggcacccggaaccctgcaggaagc

SEQ ID NO: 520669 - DNA, 233 bp, Homo sapiens
cctgggccggttacttcgtctctcttgcgatagcgggtgctggatggcttcttttcgcgttgagggtggatgatgctctgccctggtccttttctctttcggtcctgcgcgcctttggatcggtctccgtcgggctcttgcgctactggccgtcgttatagactttggcccgatgttggcttttagcgcgtctgatcctggctcgaatggtcacttgtggtggtccgagcgga

SEQ ID NO: 520670 - DNA, 227 bp, Homo sapiens
agcctttctgggcaagctcctccacagtgcctaaaagagtttctcgtagatgtgtcaggagtgaacagatatattgtagggtgagaatttgcatagaacatttctctttgggtctagggggaaaagtctggttcctttaagggcagagattgcagtaaataaatcacctaaaggctgactgacagtgtaaccatgaggaggataacacgaagggaaaaggtcgacgc

SEQ ID NO: 520671 - DNA, 231 bp, Homo sapiens
gaactggtcaacgccaacaccgtgggcctcgccgtgctgtggatcgacctcgacgccctcaaagaggtcaacgaccgcctcggacatagcttcggggacatcgtgttggcgacgatcgcgacccggcttcaacacactgcgcgccagtatgacgtcgtcggccgcctcggaggcgacgaattcgccatgctggtcacccgcgtcaaggatctcgacggaaacgcggggctg

SEQ ID NO: 520672 - DNA, 429 bp, Homo sapiens
gctcgaatccctacataataatagatcaaatcggccgtggggaacatcatcgctatccagctctttgagaaccgctaccatcagcatgtacaatggtaccctcgtgtcatctgcagcgagaacttcaacgtttgccaaatcaacccaatgtggtgacaaccacacctccgaaatctgctccaaaagatactccagtttctgccgaaatgttttattgtagaacagccctatcagcatcgacaggaatgccgtccaatgcggcactttagatggggtaactcccagcgcaagctgatctcgcaagtgcattcctagacttaattcatatctgctcctcaactgtcgatgatgcctgctaaactgcagcttgacgtactgcggaccctgcagtccagcgctcgtcaggaacgcaaacgctgaaaaactcca

SEQ ID NO: 520673 - DNA, 156 bp, Homo sapiens
aattaaccagctaccatgtactattgaaaaatgttcagtttgaaatcaaatataattttatggttctgtgagtcccccatatttaatatttaatattcaaacgcatgcatatcgacagagcatgcagtgaagagtattaaaaaaaaaagcttcgta

SEQ ID NO: 520674 - DNA, 140 bp, Homo sapiens
aattttgcccacagaaccctctaaatccccttgtaaatttaacttttaggccaaagaggaacagctctttggacactaggaaaaaacctttagagagagtaaaaattaaacacccatagtaggccttaagagccaccaat

SEQ ID NO: 520675 - DNA, 440 bp, Homo sapiens
catacctggaccttctggcatacctggaccttctggcatacctggaccttctggcatacctggaccttctggcatacctggaccttctggcatacctggaccttctgggttctttccagcccttggagccaaaagctctctgaatctctaggcatgtttcccatccagaaatttaggcagtgggtcagtggatggcctctgaggggcctgccagctctgatgttctgaagacctggaaagagcaaagagcccaatagtttttaatgtgtgatccattgagccctagggaatcccacagaggtgtttcaggggctgccatgagcagttctgattctgtcttttatatattagagatctacagatgatttttgtttgcaagggagtgccacttctaaatacaaacaaagagaaacaaaacagaaactttaaagcccctgaac

SEQ ID NO: 520676 - DNA, 111 bp, Homo sapiens
caaaaacagtatggctaccccttccgtgatacgtatccctatgaggcataattataacaagctccatcgtgcctactgacaaacagacctagaatcggcttatatgacgtt

SEQ ID NO: 520677 - DNA, 280 bp, Homo sapiens
  misc_feature (59)..(59): n is a, c, g, or t
gggtgatctcagagatcccaccagaatcttcagtgctaccactggtcgtcacatttgcngaggaacgggtgataatcatgtggcagacttcacatttgcgatgactggccagactaaaaagatgatagataactttttgtcaacatatcttgaagagtttatatcacgcacagtttaaaatcatgatgagatgctgatggttggactatattcatgtctcgtatgtggcaccatatgtgggttcacagtttatccatgatggagcatgccaagagaacat

SEQ ID NO: 520678 - DNA, 408 bp, Homo sapiens
cggccattatggccgggggtcaggcctttaaattaggtagccagaggcttggccatcggttaaaccactttccttccttttggctgaaggcattatgttaaccaaaggaaccctataatcaggccccattggacgttaaactttttaaatacctataagggaatattctccattcgttacactgttaattagggtagaaggaggcaccttttcccctataactatgccatggttaacatccagccttcttggatatcatacccgaattttggcggttaagcctcctacctgaccatcttaatatatgcataaggctgtccagttaataatctagcacttctgagaagggtattacaaaggcattactgagttgggaaaaattaaatttaggataggggtctggtagaa

SEQ ID NO: 520679 - DNA, 1361 bp, Homo sapiens
ggcgccgcggtcgcggtggctggcggagcgggaagctgggtaccctcttctgtgcctgctggttctctgacccacccacctgcagacgcacgtggtgtgtggctgctcacatgttgtggcacgctgctctgcgtgtgccggtgggcggatgtgtttgtgacaggcgacgtgccgaggagcttgtggagccgctggtccactgcgtgggctgtctcgcaggctgccctcgggctgatgtccttgtgctcgcctcctcgccctcgtgtcgccctgtggctgcgctctgcatcctaatctggctccttcagagcccccctcatgaaaccaaggggaggaattccgcagttcacttcccatcacaaacccaaatccttcatctgtctgcctcgggaacagcgcatcctacagcccctgacgccagctccttctgcactgccatgccctgattcttccccgagctgggttctagggccctgacgaggtgaacccctcctctgctgggtgagggagtggagaagagttcgagtaaagattaatcaatatgctgaggacagcggtcttgcatagtgtgtcctgctacgggcaactcgaccgcatcacggcacgctggaagcatgccacacaccagcaagctacgcacacggcgctacgcgaagcgtgctttcgcctgcagccataccaagcactgacgcgcccagccactccaatcagcacctgtccacatattcccattgcataccgcacgtaaccacatgggtcggtacatattgcaaactaccataactacttaggcttgtacacaatcaacagcaatgacttcatgccttcttggcatctcgctacgacatgacaggcgccccaggtcacatagccctcaagacctagcagagcgcatattttatggtccaataatatagaccacacgtgcaaacgatctacacataacccacgggcgaccctgctcacaacttacccttggacagattacatgaaacgaacaccacgtcgtacgctaacatcctccctttacgcaacgatgagacgacgcatacaactacgggagcgtaagtttgtgacaacctagtcgtctctcagcgcgcgtcgtgaggggctagagactgacagagcccaacccagcaaagagatacacgtgcgaactaaaaattgactcatgttctcgccgtgtcggttaactgccgtcagtcgcctcttcctctgccatcactaccatgtctcactcgtgcacccccgtcgcccgcgacacaccccgcgccgggccgcaccctatgcctgtctacgctccctcgaacgtgacgctactatacgcgtcacggctagtaacacacgagcagcacgagggt

SEQ ID NO: 520680 - DNA, 133 bp, Homo sapiens
gagggtgtcaatggctttggtgtgagcaatcaccatcctcccacgagtatgggtcggcggggatgtcgtgcatcaggtacggccaccagaggttggcacccagcgaccttcgctcattgaggttccagatgga

SEQ ID NO: 520681 - DNA, 220 bp, Homo sapiens
caacccatggcccacgatgactttgaatgcgtcgcaaacccgtaaactttcttaaaacgttatgagattttttgagtttttttttaaagctcatcagctattgttagtgttttttttgttttgttttgtttttgtttgagatggaatctcactctatagcccaggctggagttcagtgagctataatcacaccactgtactccagcctggatgacatcaa

SEQ ID NO: 520682 - DNA, 120 bp, Homo sapiens
  misc_feature (1)..(1): n is a, c, g, or t
naggggctgacgtcagatctttgctcctgacgtccctcagaatgcacgtagattgaccacaccaagggcagccgtccgaaggcgagagcaggaaatgttttgacctgagtccgcgaggga

SEQ ID NO: 520683 - DNA, 391 bp, Homo sapiens
gctaacgtattcccaaaactacgttcgaaaagataacgtcaatgaaggtagaaactaaaacccctagagagtggctttggggttattttacggtccaaagtctcttttactggtagggataacctctttaggtattaggccttctttgatgaggtatcgtttacttcaaagaaaaaaaattgttataattttgccataagttatgcatatttagatggctgaataactgttactttgaagagatgaacctgaccacctcagttttttacaggttccctcaggatgacttcccaaaataggactcggtatgaatttgttaagtaatctgatttatgaagttagctgaacaagtttagataagaattatgtgtatgaagcattaaaaaaaaaa

SEQ ID NO: 520684 - DNA, 155 bp, Homo sapiens
tccctttgtccccccgaaagaaaaaaaaaaaaaaaaggggggggggggcctttttttgggtcctttagggggggggggaaacccttaggggccccccttttgggtgggaaatttttgggggcccgggggttttaaacccctttttttttccccta

SEQ ID NO: 520685 - DNA, 377 bp, Homo sapiens
  misc_feature (96)..(96): n is a, c, g, or t
ggagtcctgctcttctccctctcacaccacaccagacaccgatccttcctgtctctttctttcctccaactgtttcctcccaatttccctcctccntttttttttttacaaaattaatggctttccaattaacttttttgaggacaccttccctccataactttttttgagacacctctttgtgaaccaagggtatatagggattgtgacatgggtaacacaatacagtagcccagacttttgagtacagtgaaagacccccatttaaacacgctcatctcaggttatactctgtctcacagatctaaaaactccatgtgctctccctggaggagggctattttcaagaacatgagattcatttctctctccacaca

SEQ ID NO: 520686 - DNA, 254 bp, Homo sapiens
ttttttttttagtagagatggggtttctccatgttgtcaggctggtctcaaactcccgacctcaggtaatctgctcagctcagcctcccaaagtgctgggattacaggcatgagccaccgcgcctggcctaaattggtttatttttaagattaaaatgtgtaggccgggcgcgtgacccgtgcctataatcccaccacttttggagccaaggcacgtggatcacctgaggtcaggagttccagataagcctgac

SEQ ID NO: 520687 - DNA, 389 bp, Homo sapiens
aagatatctgcgctaaaggggagcatatcatggaggacagaactcaggttcacagagatctgtctgttaaccatggtcataatctgaaggccatacaccgatatacctgaagcatctgagtccgagagtgccaatatacgtggcacatgataccgctcgcagtcaagtggcctagcccttgcacagctacactatggaagacgagatgttagcatggcatacatggcgcaagctgctttcaacagagcagccagtggaggacctgagcgacatgtggtgagccatattctggaaatgttggctgacagaatgtagttccaagctctgtaagagacctgacaagttaagctatgagacccggcacatactggtatcctatcgttgcagcg

SEQ ID NO: 520688 - DNA, 681 bp, Homo sapiens
  misc_feature (9)..(9): n is a, c, g, or t
  misc_feature (62)..(62): n is a, c, g, or t
  misc_feature (162)..(162): n is a, c, g, or t
  misc_feature (289)..(289): n is a, c, g, or t
  misc_feature (359)..(359): n is a, c, g, or t
  misc_feature (463)..(463): n is a, c, g, or t
  misc_feature (472)..(472): n is a, c, g, or t
  misc_feature (479)..(479): n is a, c, g, or t
  misc_feature (482)..(483): n is a, c, g, or t
  misc_feature (485)..(485): n is a, c, g, or t
  misc_feature (489)..(489): n is a, c, g, or t
  misc_feature (491)..(491): n is a, c, g, or t
  misc_feature (494)..(494): n is a, c, g, or t
  misc_feature (496)..(496): n is a, c, g, or t
  misc_feature (530)..(530): n is a, c, g, or t
  misc_feature (544)..(544): n is a, c, g, or t
  misc_feature (556)..(557): n is a, c, g, or t
  misc_feature (560)..(560): n is a, c, g, or t
  misc_feature (568)..(568): n is a, c, g, or t
  misc_feature (574)..(574): n is a, c, g, or t
  misc_feature (576)..(576): n is a, c, g, or t
  misc_feature (579)..(579): n is a, c, g, or t
  misc_feature (583)..(583): n is a, c, g, or t
  misc_feature (585)..(586): n is a, c, g, or t
  misc_feature (596)..(596): n is a, c, g, or t
  misc_feature (619)..(619): n is a, c, g, or t
  misc_feature (621)..(621): n is a, c, g, or t
  misc_feature (650)..(650): n is a, c, g, or t
tcaaacccnttcccggccaaaagaatttcataaaataaggaggaaaaaaattggagtcagtnggagcggggtgcctggtcattcctagaagacaggcagtgtctttatgatggttagactttgagcaacgctgggattcttatctgggtcctatggcctgcnatgttgagagcaggcagcaggatggggacctggaagaaggaaaaagaaaaaaagtaataggcttcttggcgctgcacatgaacgtgtgttttacaggcgcacaggttgtgcattttccttgtgcttnaagcctccatctgccatcctctccctgacagcagcctaatacttcacacctacatttctttctgctggcntctggcatccgcgcaaaccaagcgtttctccaacagaactgctagctgattagcgcaacactgcaaagcgctaactgctgtgatttgcgcaacactgcaaaggnaacagctgntccaggnggnntnagananaananttaagaagttgtttgctccaattagatatccttnattttttttctctnttaaaacaacannctnctgacagncattgngnctnaagngnngcatgccttnaattctgctattacgcttaaagngncttcttttttgcattcttagataaaaagnctttaatagatagaggctatttttgcagctg

SEQ ID NO: 520689 - DNA, 428 bp, Homo sapiens
catcattccagcgtatgtaggatgaatcgaaaatagattctggaatttatgatgaactgtaagatgtgatgttgagcatcgtttgtgatctttaggtgcctctaaaagtatcatcatgcgagtcgcagccgtctgccactgcagaacatgatggccagcctaaaatatataaggtcctttcctgtgaacaccctggctacagggcacggttccggctcttgtgtaagaattttgaccgcagagcccagtactttggctgtgtgtaatgaaaagggttgggatgagttagggagagctagcgtggtggcagcttctagggctgtttttaaggaatggaaagaggagtggcgaaaggaattaggatctatggggtcagctaggtttgctaggacagaataatgggttgtggagggaggtattgaggatag

SEQ ID NO: 520690 - DNA, 91 bp, Homo sapiens; identical to SEQ ID NO: 486805

SEQ ID NO: 520691 - DNA, 218 bp, Homo sapiens
ggatttgctggtgcagtacaactaggcttaatagggctcgaattcggcctcgaattcgaggtccctagaaaaagtagttctcggctgggcacggtggctcacgcctgtaatcccagcactttgggaggatgaggcgggcggattgcctgagctcaggagttttgagaccagcctgggcagtatagtgagacgacccccaccccacccccgtctttaaa

SEQ ID NO: 520692 - DNA, 246 bp, Homo sapiens
agacagtagaggatccccgcgaacaggacacgcaagtgcatggaatgcggaatcaatcttacacacagcttccaatatttaactgggatttatttaacttgaggacgatgtgcatttccaaaaggcatgactatgagacgagcagcggcccatccttatatatgtgcgtatgccgactagtagagtcctaaagaattggcatttactgaatacttgggaaaaatagcttttcagagatggacccag

SEQ ID NO: 520693 - DNA, 969 bp, Homo sapiens
tgccaccacgttggtggctatttcctctcgcggagccttccacacattgtagattattcgggttggctcacacctggccgagcatttttcacccaccgaaggggccaccaacattggtgtccggcgtgctcccccctcgtgggggattatgtgttcgtctctcgagagtggttttttacccgggtgcccgtctatgatccgtgggcctatatgtttgtgcgcgtctgcccccatatgtgggtggccgcccccccttgagctgtggccccccccgctgtgtgatgtgatgtgggtcacacacactgtatgatcctctgtggttggtacagcacagtgacaggtgttagacgcatgttcgtggcgcttcttatgtgcgaggcggttgttccccgcgcgattaaatggagatcgtggcccgccccccgctttttgtctcgtggggtaagattgtgtgccgcctccgctcttgtatgtggttgactcactggttgtgtcgtgcgccctctgttggcacgcgagtttatatgatttcgattactgccgcgctctctttgttaagggatggttggccccacaatcttttgttgcgcagtttttttctcagcccacggggagttcacttaggcgtgcgccgccctctctttatagttgccgccaaagtcttaactcacgtggtggatatgataagccccctcttcgttaggtagttataagaatatccctcgtcaacccactgggcggtccactgcttcttcctggttgtccaacatgcatgtagtgaggagcactctcttcgaatatgaatttagttttgtcaatcgtttgtataagggtggcgcaagaggttgcccctaaatgatggttgtatgttggcccaccgtagggaggttgttttgagggccccgggtccttttgtttttgttaatatatttttttttaaaattttgtgaaaccggaaaaaataaatta

SEQ ID NO: 520694 - DNA, 1010 bp, Homo sapiens
ctatcatatagtaaaacccagctcccgtgacccctaacaggggtccgctcaaccctcctaatgacctccggcctaggcatgtgatttcacttcgcatcctcgcattaaactgctgggcctcatacttagggcctactgaaaccaacacaatatctgcgttcaatcccgccaactaatgaatttcatcgttaacattccaggagatcgatcgaactattggctatcgaaggtccggccgccatgatgactggcatattgtagcatgtggcttggacgcaattgcttgctatgtcttcgcatctactggatgagcgcgtccgtacaataaacagtatatcaaagagaaaacattttcgcggcgccgcctaggaggccacacaaaaaagtgctgtgcccgacacactcccgcttggaagagccggcgtgccaccaaatgtctagttgggacccggggcgcccagcgggggtcccacaagcacaatcctgcgagtaccacggagcacgggaggagagtccccgcccaagagaaaaaccgccgccgggggcacaacacggacgggatgtcagcaccaagaggccaaagggggagtctgggagaccacaaaccgcagatgcgacacaagaggcgaggtcgaaggggagcccgaaaaaacgaagaatttccccccggagggcggggggtaataacattagagcagccggcggcggaaaagaacaaagcaaaccacaaaaaacaaaaaacggaagagggaacggagactgcaagaaagaagacagcacaaggcgatgagaagtcaagcgaagcgcaaagtggcgtgtccgaacacgacaacaagacgacaaagctaaaaataacacaaaatgatacagcagcatgagaatcgagtactgactgagcggaacaaaaatcaagtcactaatcacaagaacgacccagaccaattgaccaacaacgaaccgatacgagttagacacatatcaacgcgcaagccagtattcgaaaaagacgc

SEQ ID NO: 520695 - DNA, 365 bp, Homo sapiens
  misc_feature (41)..(41): n is a, c, g, or t
  misc_feature (75)..(75): n is a, c, g, or t
  misc_feature (86)..(86): n is a, c, g, or t
  misc_feature (115)..(115): n is a, c, g, or t
  misc_feature (331)..(331): n is a, c, g, or t
tggcttagactgttctgacaatttaacttgggattattaantgttgagccattttccccaaagcagggaaaccantggtctttgantgcctttcccacagacacagcacaaatgntaggcttttgttgcatggttgtacaaagaacataagagtccatatttttagtggatttgtaaaataagtgtgtgtgagacacttgtgtttgaagaaagatttagggtttcgggttttttgcatttatatgtcagaaaaggggtgatatgttgttgaggggtgagtgcatatgagtgtggccttgaggaccagggctggcagatgttgtttacctgntgaagaataaagattttttttggtaaaaaaaaaa

SEQ ID NO: 520696 - DNA, 104 bp, Homo sapiens
gtttacccctcttgtcttcctgcagtaccacacttttgtcctcttaacctcctcgaggcgcgttctctggtaaggtcttttagggtttggggggacgataaggc

SEQ ID NO: 520697 - DNA, 699 bp, Homo sapiens
  misc_feature (8)..(8): n is a, c, g, or t
  misc_feature (82)..(82): n is a, c, g, or t
  misc_feature (104)..(104): n is a, c, g, or t
  misc_feature (129)..(129): n is a, c, g, or t
  misc_feature (167)..(167): n is a, c, g, or t
  misc_feature (208)..(208): n is a, c, g, or t
  misc_feature (213)..(213): n is a, c, g, or t
  misc_feature (217)..(217): n is a, c, g, or t
  misc_feature (295)..(295): n is a, c, g, or t
  misc_feature (311)..(312): n is a, c, g, or t
  misc_feature (367)..(367): n is a, c, g, or t
  misc_feature (393)..(393): n is a, c, g, or t
  misc_feature (402)..(402): n is a, c, g, or t
  misc_feature (404)..(404): n is a, c, g, or t
  misc_feature (422)..(422): n is a, c, g, or t
  misc_feature (466)..(466): n is a, c, g, or t
  misc_feature (478)..(478): n is a, c, g, or t
  misc_feature (495)..(495): n is a, c, g, or t
  misc_feature (504)..(504): n is a, c, g, or t
  misc_feature (516)..(516): n is a, c, g, or t
  misc_feature (518)..(518): n is a, c, g, or t
  misc_feature (639)..(639): n is a, c, g, or t
  misc_feature (655)..(655): n is a, c, g, or t
  misc_feature (660)..(660): n is a, c, g, or t
  misc_feature (683)..(683): n is a, c, g, or t
  misc_feature (686)..(687): n is a, c, g, or t
  misc_feature (689)..(691): n is a, c, g, or t
acataaangagtcaatatatttaaccatgtttgacactcttcttttatccctttttaatacaatcaccacaacatagagtanaatttaggtttcaactgatgtnaaagcacatttctgtctctggtggnttttaaaaaaattacatattatatatttgacattttanaagacaacagaaacaattttacagattactccacctttacncccantttnagctgaaaggttttaagaaaaatcttgcaggttatgaggaccagatggtagcttaaaaacagatccggaacttttttnttgaaattttatttgnnttttttttttgtatctcaagaatatcttaaaggaaaaaaaaaagggttctatganccagaggaattcccaattcactttgnagattaccntncctattttgccatattanacatttcaattctgttaactaaatgaactacataatatccttanaaatcagccagntaagagtaaaacaaatntcgtcttcnttattgactttnanccaaaacttattctttcaaaggagtagtttaacctactaaatatgtctattataagatcttctttcttatgatagtagtattccttctttttcattcctgaaatggtatttcttacacttnaacaagttatggacanttgtnagctaagtatcagttatgataanttnntnnnattaaatt

SEQ ID NO: 520698 - DNA, 330 bp, Homo sapiens
aggaaataaagcaattgcaagaagtaaaatcttggaaaaaaatttagacgaatgtataactagaataaccaatacagagaagtgcttaaaggagctgtgggagctgaaagccaaggctcgagaactacgtgaagaatgcagaagcctcaggagccgatgtgatcaactagaagaaagggtatcagcgatggaagatgacatgaagcgagaagggaagcttagagaaaaacgattacaaagaaacaaacaaagccacccacagctgcagctgcaacccatcccgcaccagctgccagcagagtccatcccaccacctccttgctgcctctg

SEQ ID NO: 520699 - DNA, 160 bp, Homo sapiens
atttgttcacccccgggtccgggggggccccctggggtttttttttgccctgccaactttttattgcccgggccgggtggtttaaaggcaaataactcccctttggtacccaacggggggatggccccaagcgggcctttttaatccgccccccctaaga

SEQ ID NO: 520700 - DNA, 155 bp, Homo sapiens
agataaactataattcgagggcgcaaacccttcgcgttgggatgcgtactttatcagatcaaacaagccggtcagcccctctgcggcccgtgcgaggacgggcgccggctgatatggtgactctagataacctcggtgcgatcgcacgccccccg

SEQ ID NO: 520701 - DNA, 206 bp, Homo sapiens
acatcgagacggcttagtttattcaatgcaaaagaatcctgttgagtcaacacatgttgattaaacacgtgaagttactgggaggagtccatgatgctggacgcactgtcaaagacaatcatctccgcaatgttcgtgggcttcaggctctcttgctggctgcagataaagatctgccccatctgtcgtcttcgtgcacctgtata

SEQ ID NO: 520702 - DNA, 775 bp, Homo sapiens
agcgggcgcttgccagccagtccgcccgtccggagcccggctcgctggggcagcatggcaggggttcgccgtctgctctgggggccgcggtgccgggggcgctcggccttttggtgcttgctgctgctcggcctgtttcggccgccccccgtagctctgcgcgcggccggtaaaggagccccgtcgggactacgcgcagcgtctccgtccttggctgagactggtgctcctcgccgcttccggcggctcagtgcccccgaggtgacggcggccgggggcggcgcaggagctggcgctgggcgctggcgcatctgctggaggccgaagcgtcaggagcgggcgcgggccgaggcgcaggaggctgaggatcagcaggcgcgcgtcctggcgcaacctgctgggcgctctggggcgccgcccctgtaacatctgattccggcatcatgggctctggacgacgaccccgacgcgccttgcagctgcaggcgtcgctctgcgcttctgtgtccgcgcccggcttgacccctggcgacctcgcaggccagccttgtcccagcgcccgataccaggcgtgggggtccgatgcatggacccctgggcgtacgtacaaaggtccagtgcggcccgccgatgcagtgggagggtagggcagaggaggatactccgaccgcaggaacccctgaaacagtacgagagtacctagctagcgcaacggatacaagcagggcaaacgcgaaatgcccagagcggcgttgggagccccgcgagggacccc

SEQ ID NO: 520703 - DNA, 1359 bp, Homo sapiens
ttacactacagcctgttgtctacaacagagcagctctgtttgtttactagatataatcacagtgttgccattctcacacggaggtggttcacttaatactacgtaatgatcatcaacgctggtggaacacgcgcggcatttttccctatttgcgggggaaaaaaacaccgggcggaactaaacccaacaacaggtgggaggggtgccgcgtacacaatgggccgcggtgtgtgttggaaacccgcgcgcgggggttcccaacaaaggacccacgagtggtgtgcacactatgttgtgtattaccccgccgccctgtgatatgctgggcgcacttctctattattaatttccgggggggctaatacaaatcacaaatagtaaagggtttttaaacaaccctgggctgtattattttcttttgcccgctgtaaagcttatgggaaactgtgccagagaactgtaagtagatgtgtgtgaagtgaggttaatgaaccacagcggtgggtcttaaacgggggccacccaacggggccgtttgtaacgctgttagggactcctccaattcgggggatgaaattgggaatagactctttctgggaaaaattggtgtgcaaagacttttggggtaataggttaaaatccgggttaaatggtaacttacggtgttctctggtgttggtaatatggtttttggttaaaggtacaccccacctaaaatgcgtaaaatttttaaagagggagctccccaaaattgtgcaacatgagaggccacggcttcaacacaagggccttgtggttgccccccgggttaccctatgcaacagctgcgcgagacccacaagggaatttgcacaccccgccttcggggcccacacgtggttgggggccctggccctggcacagggtctactcctgtggcttcggagggcccacttcttcgggcaacaaggggcccacacctccggccccaaccccttccacggacaccgggcttcaacggcttaaccttcaaaccattcctcggcttgcgggcgttcttgttctgaaaccacacgcacgggggccttgagggacgctttgtctgtcgtgaatggggcacaagggcaacaagtcctggaattgttgtgtgtgtcgaagagggcccaaaggctggtggcaaagtgcaccggggcacacacggagagtctgtcctgtgacgcgcaagttctgagggttctgggcggcgggcggctgggtctgtgcatattctggttgcaccgcggcgcttcccagcacccaacatagtaaccggcatagtttccagcagaagaccaaaaagaccaacatgaaagtttagaaattaaactggttaaaccccca

SEQ ID NO: 520704 - DNA, 428 bp, Homo sapiens
ccttctgcctgcttatgggaaagtccccccatctcgtccgttttcttctttccttgaatgaaagagagctgatctcacccaatctaatatcaacctatctcattcgactgctcatccctaggccatgccaggatccatttaattcctacacccgtccagcttagagtgtacatacataaacagtctgcacctagctcttaggtcaggctgggtctcatcttagctgtgtacggcctcagctaaatgaaattcttatcggccgggataggctttcccctaaccaccgtatgttcgctccctcttatcaagctctccattaaacggaaccgtacatataacttcataaaacttccttcaatgtttatttatgcttttatatgtatgtacctggtgtgtgtctcttccaaccaatgaactataaagagagg

SEQ ID NO: 520705 - DNA, 1024 bp, Homo sapiens
  misc_feature (137)..(137): n is a, c, g, or t
gtagcttcagggcagaagagccacagagccaaatgctgcagagatgaagggagacggaaggagccaaatgctgcagagatgaagggagatgaaaggagccaaatgctgcagagatcaagggagacggaaggatgtcncctccagagctggggccacgggcagcgccagggcaggttcatcactgatggcaagtctgtggctgaccacgttcacaggggtggccctgagcaaaggtcggacatgaggacccaggagaattcaggccccggctctgggacggctgtgcacccccaccctggccgtggctggcacctcagaaggcacagctgtccttcactcgcacggagcaacctcgggacagatggtgggagaggaagggcaactcgaggaggcacattttaggaaactgcccacggagccagtttcgattctccaaacctcgtcagcatgcagaggctccctgactcggcagcaaggagggcctcaccagccgacccccatgcccggcacccccttcaccagtggcagggtcctgaaaactccagagagcagtgccctgtgcattaaacacagactgcgcccttgtactcaggaggatgcaattctctctctaaagtcgagagctcaccaccccgggcgttcgtcactgcagacatcactgcagacacagagacggccattagagctcaccaccccgggcgttcgtcactgcagacatcactgcagacacagagacggccattagagctcaccaccccgggcgttcgtcactgcagacatcactgcagacacagagacggccattatgcagcctcacgtggtcactcctgggggcggtaggatattttatcctaaagagaaaacaccttaaattctcacatcagccacccccatggcgactcttaacaccttaatgtagcaccttccaacttttcctgggcatttatgtacaaattgtaataaaattgggttcttactgcatacgctgcttgctggtttctaaataaaattgggttcttactat

SEQ ID NO: 520706 - DNA, 898 bp, Homo sapiens
  misc_feature (137)..(137): n is a, c, g, or t
  misc_feature (804)..(804): n is a, c, g, or t
  misc_feature (808)..(808): n is a, c, g, or t
  misc_feature (814)..(814): n is a, c, g, or t
gtagcttcagggcagaagagccacagagccaaatgctgcagagatgaagggagacggaaggagccaaatgctgcagagatgaagggagatgaaaggagccaaatgctgcagagatcaagggagacggaaggatgtcncctccagagctggggccacgggcagcgccagggcaggttcatcactgatggcaagtctgtggctgaccacgttcacaggggtggccctgagcaaaggtcggacatgaggacccaggagaattcaggccccggctctgggacggctgtgcacccccaccctggccgtggctggcacctcagaaggcacagctgtccttcactcgcacggagcaacctcgggacagatggtgggagaggaagggcaactcgaggaggcacattttaggaaactgcccacggagccagtttcgattctccaaacctcgtcagcatgcagaggctccctgactcggcagcaaggagggcctcaccagccgacccccatgcccggcacccccttcaccagtgggtaaactatgctcgccaccactcagcactcacctcttgggctcagagggcagaaagtctgacccttctctcttaaaagcagggtcctgaaaactccagagagcagtgccctgtgcattaaacacagactgcgcccttgtactcaggtatgaccatttgtcctggacaaaaattaaactgatgagggaacaaaatagggccttatagaaggtgagtggaacaagcagggaaggcaaaccccaaaattccaggagggaggatggaattggcctggggagcngagncaggangttctgtggacagggctggtggagctctggggggagcagaggcggaggtttgtggacatggttgatggacctctgggggaaaga

SEQ ID NO: 520707 - DNA, 572 bp, Homo sapiens
  misc_feature (33)..(33): n is a, c, g, or t
  misc_feature (61)..(61): n is a, c, g, or t
  misc_feature (229)..(230): n is a, c, g, or t
  misc_feature (237)..(237): n is a, c, g, or t
cgcaactcaggccattcctaccagaggaagaanggctggtctctccaccccctggtagganaggcctgccttgtaagacaccacaattcggcggaagtctgaagtcttgtgttttactaatggaaaaaaaaaatacagaagaggtttggtcctcatggctgcccaccgcagccgggcactaaaacagcccagcgctcacttctgctgggagaaatattcttggctctgnnggacatngggctggagggtatcacgttgccaggttctccagccagtgtgggcacacttccccatgttggtcagtgaccgggaaggcctgaactagttctcaagagtctcatccagagagcggccaacgagggaggcttcattacgaggtgatctgccgaagaaataccctttatcatcaagtgataaaagggcccttgaaaggagaatgccttcatcagccttttaagaaccccataatcctgagcaagggtgccgcttcgggtctgattcccaagggattgtctctggggccccagctccctcctgtgttcctacaggtgttttggacccattgctagatt

SEQ ID NO: 520708 - DNA, 430 bp, Homo sapiens
acacgctcatcatccccaggcaacttcctgatacagatcggtaaaaacaaccccttcttccaggaggatgcaattctctctctaaagtcgagagctcaccaccccgggcgttcgtcactgcagacatcactgcagacacagagacggccattagagctcaccaccccgggcgttcgtcactgcagacatcactgacacagagacggccattatgcagcctcacgtggtcactcctgggggcggtaggatattttatcctaaagagaaaacaccttaaattctcacatcagccacccccatggcgactcttaacaccttaatgtagcaccttccaacttttcctgggcatttatgtacaaattgtaataaaattgggttcttactgcatacgctgcttgctggtttctaaataaaattgggttcttactat

SEQ ID NO: 520709 - DNA, 1102 bp, Homo sapiens
  misc_feature (137)..(137): n is a, c, g, or t
gtagcttcagggcagaagagccacagagccaaatgctgcagagatgaagggagacggaaggagccaaatgctgcagagatgaagggagatgaaaggagccaaatgctgcagagatcaagggagacggaaggatgtcncctccagagctggggccacgggcagcgccagggcaggttcatcactgatggcaagtctgtggctgaccacgttcacaggggtggccctgagcaaaggtcggacatgaggacccaggagaattcaggccccggctctgggacggctgtgcacccccaccctggccgtggctggcacctcagaaggcacagctgtccttcactcgcacggagcaacctcgggacagatggtgggagaggaagggcaactcgaggaggcacattttaggaaactgcccacggagccagtttcgattctccaaacctcgtcagcatgcagaggctccctgactcggcagcaaggagggcctcaccagccgacccccatgcccggcacccccttcaccagtgggtaaactatgctcgccaccactcagcactcacctcttgggctcagagggcagaaagtctgacccttctctcttaaaagcagggtcctgaaaactccagagagcagtgccctgtgcattaaacacagactgcgcccttgtactcaggaggatgcaattctctctctaaagtcgagagctcaccaccccgggcgttcgtcactgcagacatcactgcagacacagagacggccattagagctcaccaccccgggcgttcgtcactgcagacatcactgcagacacagagacggccattagagctcaccaccccgggcgttcgtcactgcagacatcactgcagacacagagacggccattatgcagcctcacgtggtcactcctgggggcggtaggatattttatcctaaagagaaaacaccttaaattctcacatcagccacccccatggcgactcttaacaccttaatgtagcaccttccaacttttcctgggcatttatgtacaaattgtaataaaattgggttcttactgcatacgctgcttgctggtttctaaataaaattgggttcttactat

SEQ ID NO: 520710 - DNA, 709 bp, Homo sapiens
agcggaggtctaagaaggagagtatgaggcgagctccggaccgggtgcgggcggtattcagcggcacagagcgccggtgttgccacgccatctaacgctgcgccatgccaggcccgaagcgcggatggtgcagttggaggctcgagtgtgaacacgggtgtccgatcgggatagaaggaaggtgaatatataactcaaagtcttggaccggatagcagtgagattcacttcaaagtgaaaaatgacaacacatctcaagaaactcaaagaatcatactgtcaaagaccagggtgttccgaatgaattcactcaggtttctctccgagcgggtcagcagaattgcctgataactcatactccaacaagaacctgggaatggcggaagaagatgtgatagaagtgtatcaggaacaacccggggggtcattcaacagttcagataattcggtctgaagtctggtgcgttttccctcaagtccgttgtagctattgttttgaacaaagtaggtcgttcacgtaccgtggtgctttcaaaacaggaaattgaaccagacctggcgacccccatcgtctctcgaaacacatctggatcaactagctgaacatcctagtgctcaatccatcccataaattgacactgcgcaacccatagctgccttgatccctctgggatggaccacagccgatccagccccccttcatatacac

SEQ ID NO: 520711 - DNA, 1348 bp, Homo sapiens
  misc_feature (137)..(137): n is a, c, g, or t
  misc_feature (804)..(804): n is a, c, g, or t
  misc_feature (808)..(808): n is a, c, g, or t
  misc_feature (814)..(814): n is a, c, g, or t
gtagcttcagggcagaagagccacagagccaaatgctgcagagatgaagggagacggaaggagccaaatgctgcagagatgaagggagatgaaaggagccaaatgctgcagagatcaagggagacggaaggatgtcncctccagagctggggccacgggcagcgccagggcaggttcatcactgatggcaagtctgtggctgaccacgttcacaggggtggccctgagcaaaggtcggacatgaggacccaggagaattcaggccccggctctgggacggctgtgcacccccaccctggccgtggctggcacctcagaaggcacagctgtccttcactcgcacggagcaacctcgggacagatggtgggagaggaagggcaactcgaggaggcacattttaggaaactgcccacggagccagtttcgattctccaaacctcgtcagcatgcagaggctccctgactcggcagcaaggagggcctcaccagccgacccccatgcccggcacccccttcaccagtgggtaaactatgctcgccaccactcagcactcacctcttgggctcagagggcagaaagtctgacccttctctcttaaaagcagggtcctgaaaactccagagagcagtgccctgtgcattaaacacagactgcgcccttgtactcaggtatgaccatttgtcctggacaaaaattaaactgatgagggaacaaaatagggccttatagaaggtgagtggaacaagcagggaaggcaaaccccaaaattccaggagggaggatggaattggcctggggagcngagncaggangttctgtggacagggctggtggagctctggccacttcctccataaactagagacgtgatccccaggccaggtctgtctctgaggtcataccagctgggacaggaggatgcaattctctctctaaagtcgagagctcaccaccccgggcgttcgtcactgcagacatcactgcagacacagagacggccattagagctcaccaccccgggcgttcgtcactgcagacatcactgcagacacagagacggccattagagctcaccaccccgggcgttcgtcactgcagacatcactgcagacacagagacggccattatgcagcctcacgtggtcactcctgggggcggtaggatattttatcctaaagagaaaacaccttaaattctcacatcagccacccccatggcgactcttaacaccttaatgtagcaccttccaacttttcctgggcatttatgtacaaattgtaataaaattgggttcttactgcatacgctgcttgctggtttctaaataaaattgggttcttactat

SEQ ID NO: 520712 - DNA, 1666 bp, Homo sapiens
  misc_feature (409)..(409): n is a, c, g, or t
  misc_feature (449)..(449): n is a, c, g, or t
  misc_feature (636)..(636): n is a, c, g, or t
cggaagaccgctgcatgcccttgctaaggttcagactgtaatcccaaatagtgaatcaggctcttgggtagcactacagaaagaaatccgttgtagagagtaagaagtctatatagattattaacacgcacaataatgtgtagtgctcttacaagaacacgcacgaccataaattgtaatgaagtagcatgtccctaggcttctagcgaccgcaacttaccatagaggacaattccgctatacaccataataagctttgcaaactccatcctattaccctcaatttttggtgagcgcctaattcattagtcgacaccttaactagaaagaacatatcatgcgcttatgtttttaaagtcaagcgatgtgagccatacgattcattctcatgcctcgctattacaactcnttgcggttcacgtatcacatagtcaactcgaaccctgaanaatattctaaactatgatcgcaactcatactaaacaaacttgcaaaaactcaaacctaaatgtcaattgttaatataacgcgcctctatctggatacatagcgcctaaccaatcgaaggacattgcagtcgataagtggaagacacagcggtatacccgctcatacaggtctcatagcagggaaaancgtactgagtcgatacattcttaaaactcacacgggtcgcattgactaaaggggcgacacacacaacttagtacgacccctccattagggccactaccaacctcagggtaatctaaggaaggacgagggccgccctctcgctctctacaggtgaaaacactagtggtctttctagaacggaggcacgggcagagggtagcagcgctctaaaagccctcgctcgctacaacggtggtgtacgccgaatagaatcaaccaattttgctattcccctcattagaagagttgaggagagtagcgctttgatagagttggaaacctgggggcttcgcaaacaagaaggggggggtacatcaaggatcaggggtaccgtaccttttaaacattatttctcaaactcaccaacggattgtacaagtcatttctggtaggacatggtaccttcccggtttgctacccagggacgcggtctgaagagtgccaagttggtgaaccaaccccacggacaccagacggcaagtccgaagagaacaagaaactcccctaaactggggacacaggccttttttcacacttcacaaatttcctcaatttggccactcaacacaatttacctcggttaaaggcaatgaaacccccaagcaacggggattcggcttacacaacggtcatacccaaaaataccccttggacacaattatacgggcacaaatatcggcggggcaggagagagggcaaacaccacagggagaactgaggaggagaccccccaaagtaccatccgcaaggggaaggtgacccacggggtgtacgagaaactataaacacaggtcagaaagaagagaaaccaaacccacataaacaaagtgcaagagagcccacacagaccacatgtgacccgagcggcgaagaaagggattacccccacggggcgcatacacggacgaagacgacgacttatacagaagccagagcaaacgaacaacggggtgcagacaccaacaggagaagacagcaaaaccgacagaag

SEQ ID NO: 520713 - DNA, 315 bp, Homo sapiens
gtagtagcacaacctaggtcagttttgcatgtggtaagccatttaccaagatagttgtaggtaagaagggcagatttattagagaaattgtgtaatatgttgcagtgggcagctcagcagagaaggggctacctgcaaagaggcaagggctggaggaaagttttatagggtcctgctgaagggtgctacgtgtggaatgaggtcattgtgcccgcaggttgtttgtgattagctgtctctaacaattgttcatacaataattgttcattattgttctcaacttggggctctccccaacctggggacccttcctta

SEQ ID NO: 520714 - DNA, 458 bp, Homo sapiens
ggacggcgatctttaaggtgtcattaatcaagttgtactttaggattcgcgctcattggtcagctgctggacagttagagacggggacgcattcacctcgatcagccaggccttcagccttgtcgctcgatcataatctcttatcccatatctttcctcgtgtgtgaagtcattgttcatcaccggcgccacagccttcagggactgcacgatgatccagtggatctcgtcgaacagcttgctggtcacctccttgccgcgggtgctctccaggtagagccgcaggttactcactgtccacttgcccccatggatgtggttgtagtcttccccgtgtttctggatggcgacgttggtaagatgaacgaacatgttgtccagctcactggtactcggggtgtatttcactgtgcagaaccggcaaaacccaagcttgtacatgtaacagcgcagtggac

SEQ ID NO: 520715 - DNA, 184 bp, Homo sapiens
gttgctctctcaagaaaggtgaggggattctggcggttccaagccccctgaggccacttcttggctgtgtggcttgggcgagttacttaatcctctctgggcctgtttcgccagctgttacatgggagtgctccgaacagaactgccttcgtggggtcactatgcacctccactcccgtaccag

SEQ ID NO: 520716 - DNA, 244 bp, Homo sapiens
tcccgagcgtagagtccagtctgtcgcccaggctgaagtgcagtggcatgatctcggctcactgcaacctgcatcttctgggctcaagcaatcctcccacctcagcctcctgagtagatggagctacaggcacgtgccactaggcccggctaatttttgtattttttgcagacagggttttgccatgttgcccgggctggtctttgttctcctaagagttgttttctccatgaaagttggtcga

SEQ ID NO: 520717 - DNA, 173 bp, Homo sapiens
gtgccaggaggcccctgccgcgcggggggctgggtctggttgagtcgctgttttcccgaggcagcgcagggatccggggaagctgcggcagggagcgggtgccggcttcgtggctcttgaggtgtaacgggggtaggctccctccctcggaggacatcggtctgtgtccaggt

SEQ ID NO: 520718 - DNA, 127 bp, Homo sapiens
tatgaaaaagagctttatccccttctcctatagggaagcggatttgtcttggtgaaggcattgcccgtgcggaatagttcctcttcttcaccaccatcctccagaacttctccgcgatcgaagtgtg

SEQ ID NO: 520719 - DNA, 271 bp, Homo sapiens
gaattgaattagggcccgtccagacaagcaatctagaagtccattctcattggttgaccttctgtggtgttcctgaaattgccttgtagccaatcagacactaagtaaacccagagagccttgtgaacctctggacctcagttttccttgactcactgattttccactggtctggtgcctcagaagaaccagattctcctgttcagtcgtcacttcccttctgctgcttccctgctttagaaactaagccctgtcttgcttttgtcaattt

SEQ ID NO: 520720 - DNA, 380 bp, Homo sapiens
  misc_feature (155)..(155): n is a, c, g, or t
  misc_feature (274)..(274): n is a, c, g, or t
  misc_feature (317)..(317): n is a, c, g, or t
  misc_feature (345)..(345): n is a, c, g, or t
tgagactgagtcttgctctgtcgcccaggctggagtgcagtagtgcaatctctactcaccgcaacctccccgtcctgggttcaagcaattctcctgcctcagtctcccgagttgctaggactacaggcgcgtggcaccacacccggctaattttntgtattttttagtggagactgggtttcaccgtgttagccaggatggtctccatctcctgacctcgtgatccgcccgcctcggcctcccaaagtgctgtgattacaggcatgagccactnggcccagccaatatcagctattataatgagccaacaaacattnaatcgcaaatcttagccaacatcttcgncttttccaaattttggggactttttgtttgaactg

SEQ ID NO: 520721 - DNA, 295 bp, Homo sapiens
ctcaaaagaacttaggccatcagtacagagacacacttagatggaaaagctatgctctagcgctcaatagcatattagtgaggatatagttaacaatagcttattttatatttcataacagccagaagaatggtaatgttcccaagacaaagaaaagacatatgtttgaggtgatagatatccaaatcaccctaatttgatcattacacaacgtatacaggtatcaagatgtcacatgtaccctcgaagtacgcacagctgttatatatcaatacaacttaaaaaataaagaagc

SEQ ID NO: 520722 - DNA, 414 bp, Homo sapiens
actctggcttcaaggcttctctatgctccgatcgtgccttgccatgggcacatgctgggtcgctgatgctttatagatctgcgtggggaagtcaggccctggggaggcaggcaggcaggagtccacgagcccagctcctcctcccctagacccaggtgtccagcttcaggccccgcctccctcagacccagaagcccaggccccagcctctcctccctcagacccaggagtccaggccccagccctcttccctcagacccaggagtccaggcccccatccctaatccctcagacctgggagttcaggcccccatccctgctctctcagacccaggagtccaggccaccagtgcttcctccctcagacccaggagtccaggcccccatccttcccctctcagacccaggagtcgc

SEQ ID NO: 520723 - DNA, 588 bp, Homo sapiens
cttttggtgcggtctcctcgcctctctgggagcctttaattagtgtcctgtctgcggatgtataagaatattgaaagggtattctggtgtctcttcccacacccgtggaaggacgcggcctgtgtgcgggcgaaattattctgacgataatattggtgggcatttgtggccgcctcctcttggcggtgcttcaataaacgtatttgagtgcaccaccaccggtgtggggagatagcccctcctgtgggactcggagatcatttccctcttctcgtcgtggaacagtgggtggcacaagaagcctttttgtagaagtgccgctttgggcgaaaacctctcctttccatggcccatacaatttctttgtaatcccgcatgaaatgttgtttgttgggatccacaagaagggtaaggcaggcccagatgtttcaccccaacgtttcttattaaaacccatcatcacctgcccgctttctatgatggagaacgcccgaatcaatagttgtgtgtcgtaatatgtagtttttccaactattttcagcaataactctccaatatacagaccccagacaattaacaaacacaaca

SEQ ID NO: 520724 - DNA, 203 bp, Homo sapiens
tcgctcgtgaactcatcttttttatgagtcatttggttcatctttggaatccttaagtataaatccccttagtgaacccacagagaggagatacatgatttggggggaaaattaggcatttttggaccctttgatatatttccatcaaaattcaactcattcatctactcaaaaaaatagttattaaggagttcttactgtgg

SEQ ID NO: 520725 - DNA, 382 bp, Homo sapiens
tgagacagactcgctctggttggccaggctggagtgcagtggcgcaatcttggcttactgcaacctccgcctcccaggctcaagcggttctcctgcctcagcctcctgagtggctgggattgcaggtgtgtgccaccatgcccggctgatttttgtgttttaagtagagacggagtttcgccatgttgaccaggctggtctcgaactcctgagctatggtgatccacccggctcggcttcccaaagtgctgggattacaggtgtgagccaccgggcacagcctgacggttcttaatattgagatacttaacaaggcatttcggggagcagagaagtgagggactgactttcacggtcttgggaaggaggaggttcttggcat

SEQ ID NO: 520726 - DNA, 250 bp, Homo sapiens
attccattccagtcgattcaattccattccattccattccgttccatttctttccatttcattccattccattccactcgggttgattcagttctattccattacattaaattccattccacatggtttgattcaatcccattctattccattccatcacactccattccattccattccattccattccattccattccattccatgccattccataacattccattccattccattctgctccgctcc

SEQ ID NO: 520727 - DNA, 174 bp, Homo sapiens
ctagaaaagtgtcactgtcataggttctgttaacacaggcttttcgacagattctaacacgggcttcggcaacgccttggggttcataggaggtctttgtcgagtccaccgtggcgatggcctctaaaaggggagacacactagctgtctccgcttgaacaaaaaacacaagag

SEQ ID NO: 520728 - DNA, 385 bp, Homo sapiens
tctccttactgtatctaacgtatgctatctccgtcatgccccggacgcattgaagccaggctgccttgaagaagctctcccagactgcccttttccccaaggacaggctcatgatttgccaaaggtttcgtgtgtgtgttagcaagactggagtcagagcaggcatcaaactttacatcccatatgtcacacctcaccatagacctgggtgccaaatagcctgaagagtctgaactcacgttggcagttaggaaagtgctcctacagacgcatctacggttaacatagcatccctatggccactgtctcccttgatccccacagccattctaggagaaaggcagaatgtcataatttgctaaaagggatgctgaggctctgggag

SEQ ID NO: 520729 - DNA, 152 bp, Homo sapiens
  misc_feature (136)..(136): n is a, c, g, or t
tctgcacagtaactcaaagtacggctctacaatgtacccttaaactggcaggacgtggaaatcaaaattgcacaaaagaggtcacgaacagccatgtatccatatacggcaatcaaataaggaacttatgacctanagcaaaggtaaacttt

SEQ ID NO: 520730 - DNA, 252 bp, Homo sapiens
caggctctgctgctcctggaaatgtcaggatgcttccagcttccagcagattgttttttttggaaacagagtcttactctgttgcccaggctgaacggaaatagggcgatcgcaactgagtgaaacctttgcctttggggcttaaacaactctcctgcctaagcctcttgaggagcgggaactataggcacacaccactgcaaagggttaatttttttttttttttgggaaaaaaggggtttcccccatgtg

SEQ ID NO: 520731 - DNA, 995 bp, Homo sapiens
ttgatgccactgacaatgaattgctggccctctgagaggtggaaacatggctgtgatgtcgacatataatatgagctacaagaagattatttataactgaatgatgtggttatcagcatcccactcccgtctggtgtcggcgcgcctgttatcggtgagatcgatggggagtatctacatgacagtcgacgcaaataccctggagtggtgcctgctgtgattgatgccaaaaataagagtggccgcctggagtgctagcatagctgggcagtgccggatgacttcttaccctgttcaagtttcctactgtctccgagaccacaaatcactgtaacatacaggttatcacagtgacccaggtagatggaacacagccccgtgcaggttgccacagtagacccacttacctagtggataagtatgaaggttctgtaatagcaagaagagggagctgaacaaggaaaattttcagattaataaacgaagacgccaatgatggctgacagagtttgttccagatttacaaagccactggagaccccttttttctgatacaatgcacgattctctgcgcgcaaggacccttcggactcgaccccatgttcagtgtcacagagaaaattctttgataagggaatggccccacacattcaggaaaggtgctaatttctttggcagattgtattggcagcacgaaagcagctctcagagaatgaccccggtgtaaaactcctcttccctgagccagagtggcccgaaaataatcaacaaagtacacatagaccaccggacgaggagacacatgctaccaggcacgaagcaaggataaacaagaaaggaacacaggccgggctaagaggcagcaacaagacggaaggacaagaccacaccagaatcggaacaaacaggaacgaccaaggaaactaaagaaccgaccctggaaagcacacgaaaaatacgaacagaacgaaaaacaaagagagaacaaatattac

SEQ ID NO: 520732 - DNA, 1592 bp, Homo sapiens
tggaaacggagttttcgcctcgggtcgcccaagcgtggagtgtgcagtagcagggctcctcagcttcttgtgcaagcctccgccctcccgaggtttcacgccatttctcctgtgcctcagaacttccgtggtgttagcgtgggagttcacgggcacctgtgccaccagtgcgcggaaataattttttatatatatattttttctataaccaagagaacaggtgtctcctcaggtggtgttaagctcgaggaagtggctcttcgaactcctccgtgaacctcgggaactccgcccgcgacctctcagcccctccacaaagagggggcgtgggacattatcacgagggcggtgaagccaccagcgcgggcaccacgagaaaaaggggagggtgacacgtgtggcggggtgttatatacccgagaaacaaataagaacgtgggtctttgtgaactaatccacgaggggggatctccaaacgagaggcatcttcttcccgcaaacactctgcgagagccctctccaccaacgaggtgcgcgtgggaatatataacacgagtgcgaggaaaaggcgcggaacataaaccgccaaggcctataattacaacaacatattttctttattccctctaataagagacaccgagagggacctccattgttgggggtaatgcccccagaggggcgtggtgacaccctgctgacaacgtgtagaatataaccacatcctaactataatgctattcgacatgtagacacagccgctatcaaaatatttttcccccgagggggcgaaaaaacggagagctgagacattctatttaactccaacacctctccaagactcttttttccacacataggtataacgactgtaggagggctcccggaaaagaaagtgcacatgttgccccaagtattaacaaccacccagagagtatacatatttataaaaacaaaaacaaaaaattttatgtgtatgacctacttagtttgagagaacacgaacgcttctactgagcacatttattgagtttgtgcccccccaaagtactttatgctaaatgttgtcaacaacttgagtcgtgctgcgataactcccgcgggcgcatcccaaagtggacaaagacttcaccacaccctcccacgggactacaccacaacgcccccaaaatatcgtcacgagacgccctacagacccacccccagacgaaaagcagctgtggaaaccacaacaagggtaggtcccccgccaccaccaaacaacgcccgagagacaaacaatatcaaacggagcagactactcaaaagcaacaaaacaagcggagggatccgacacacggtgaagtactacccacaggaagaggggctgctgaaaccccaccgtgacacacagtaaaacgacacaggagaagtgggaaccaccccacaagcagtggagcaaacaacaaggcggaactaaccacgagccagcgaggcacacttaaaaaacacttgtagcaacacgatagccgttggccaacaacccaaacaaacaacgcggacacatagaggcgggcacaccagacaaacagccgaacgacagctacacacat

SEQ ID NO: 520733 - DNA, 856 bp, Homo sapiens
aggctattgggcagttattgccacctgtacaaagagaccctttgtgccttacatgagaaagagagcgcacacctggattgatattaggatagggtgctggcatagaaatatatcctgggagtaagtaggggttccctgcgtgagaatggacccgctgttgcagggaacgggctcctcattaaagctgacgcattggccgagacacgtgtgcgtttctaggtagatattgcactccatctaagacttattgagcagcctactgtgtgccaggcactgctctgggaactgagccgcgtgactcaaaggcatgtaaataaagctgggacagaacacagttcacgctttgcctgtctactgacaggtggcaagtcctcagcttcagttgtgtgtgataaaagtttgattatacgaaggagaaagggaagatactagaagcttccaggaaggaaagaaacagatgtgtcatatacatagggatcaggaaagagaatggcgttgaaactagtttcagcagacaatactggaagcgtagaagacagggttggtttaatgccttggaagatgggaaggacgactacttttcagcctagaaatctaacatccagcgaagctaatcaagcaagatgtccagggactgcagtaagtggttccttagacgataaagtctcagtgtacgtctcggtatcaagtttataagcgagaggtgctccaaccaaaagacgcgttaaatcgggggaccggggacccaccagatcatggagatgccggtacctaatggaagaagtcttgaagagatctccggacagaagacgggggccccgggcctgggccaaaataaggggcgggcccagggagt

SEQ ID NO: 520734 - DNA, 120 bp, Homo sapiens
tctcgtatactaaattattaataacgcgctgtgcgtggggtctgagtgggggacttcggctacgcgggatgctttaatgcaaattaaaatactatgtgtcgctttgccgtaaaccactaa

SEQ ID NO: 520735 - DNA, 306 bp, Homo sapiens
aaaattttataatgttttcaaaaaaaaaaaaaaaaaaaaaaaggggggggaaaaaaaaaaaccccccttgaaacccaaaatttaaaactccaaaaaaaaggggcaaaaacaaccccggggcaaaccccccggggaaacccccccccaaaaatataagggaaaaatttcccaaaaaggggaccccccgggggcctttttccttttccaccccaaaatggggggcaaaaaaggggggcgccagatctcccaaaaaaacgggggcccccccgaaaaaaaaaaaacctaattttaaaaccccgtgggcca

SEQ ID NO: 520736 - DNA, 169 bp, Homo sapiens
tgttggggctgctggccctttaagagggcattctgcccaccgcctgaatgccccctcccctagccactggagaagagatccgtttcttggcaacaggaagctcttggtttactgtgtcacccagagcgacgtgggcagccatggtcgctgctctgtggacgtgagcctg

SEQ ID NO: 520737 - DNA, 1172 bp, Homo sapiens
ggcagcagtagcagaggctgtagcatcggacaccctcctctctcccgcaatccaggttcctcttccccctccttctcactgtttgttgtgtgtttgatgtgttaaagcaggagacgagaacccgagcagacgccatgagacaacacataccgatcgatccccagcacatgcaggtccgggccccagccgagacgggcccggatggcggaggtggtaggtggcggcggaggccggacggaaccgaggacaatccaggtgacataatgtctccccgagcgctagactctgagcagatgcggactcactacggaaatcctaggcaagaatcgacgaactgcgcctcttcccagaccggactgaattcgacctatatgaccagatacatcaatctcgatgttctgacttaagataagattccatgaatccaagacatcacagcagatatgatggcaacacgcaatcttgaacaaacacattgatatagcagatagacagcaggcgtaggatagatcgaaccataatgcagaagtgaaacgcaagcacgaacaagaaaacgaagaaacataaaacagcataaggaaagatagaccagcaacaacccctgggagaaaccgacatgaagcaagcaaaccgaatggaacacacactgacacaatcgaagtacaggagtacaaccaagaatgaaaaaaaaagaaaagaacaacagaaggcacccagactaatgcacaggccaggactaacagacaagaagcgaacacaccagaacaaaaaccgaaacaccatacaaccaaaaataggagacagaacacacggacagaaagaaagaacacaccaggaaacgacccaagatgaaaagagaaaccacgacaaaacgatggaacaccaacacacccagcagacacaaaaagaaagtacaaaacaaaatagaagacacaaagaaacagaaaagcaaaccagacaaccaagagacaccacaacacctctacacacccatcaaatctagacaataaaacacacaccaactaactataccaccattaagaaaacaacataacaatccacatcatgcaaacaataaccaacaaaaagtaacccaacaacatactcctccacataaaaaaaaataaacctacacacaacgccacacccgcaactatctgtattgaacaaca

SEQ ID NO: 520738 - DNA, 587 bp, Homo sapiens
caagcagttatacagactcagcaagacttcagattcctttataatcagccacacagactcaaaaacaatcatgcttaagataagagacacctttggaaatctcttcaagaaacaggagaattaatactgttaaaatgtccatactacccaaagtgacccacagattcaatacaatccccatcaaaattccaatgacatttttaacaaaaatggaaaaaataatcttaaagttggtatggaactataaataaacccaagtagtcaaagcaatcacgaacaaaaaggacaaaactggaggcattatactatcagacttcagaatgtactacaaagctatattaatcaaaacagcatgatactggcataaaaacagacacataggccaaaggaacagataaaaagcccagaaacaaattcatgcttttacaattaactgattttggacaaggtgccaaaacacacaatgaagaaaggaaagtcccttcaataaaaggcatagggaaactgggatatccacatacagaacactgaaatgagacccttacctcacactatatgcaaatatcaacctgaagtacattccgaac

SEQ ID NO: 520739 - DNA, 239 bp, Homo sapiens
acatatggagcaatgacaacaagaccatgttccgaagcagactgatgataaccagatatcgatataaaatacagcactgtgcaagtaaaacctgagagccaatacagtgcagaggacaatatccagtttctgccttatggtggtaagtagacagcaaatagacatattggcagtacagttcaacactgtcatgttcaaaaactttctgcaatcccccaaagcacttgatgctaggacga

SEQ ID NO: 520740 - DNA, 125 bp, Homo sapiens
gcgcgttacctgcagctctctctgatggggtgttttgtcactggcgcggagcagactacagggacctgtagccctgacattccatcattttatgaccatgaggaattacagatcctgggcattgc

SEQ ID NO: 520741 - DNA, 100 bp, Homo sapiens
tgtacccagctggtgtgacggagcaagaccctgaaaatagttgacacatttattactacctctttatagatgaggaatcgtgatagtcccaagaggtgga

SEQ ID NO: 520742 - DNA, 234 bp, Homo sapiens
caattccagttcatccaggttgcagggcggtcaggagataagatatttataggtaatgtgaacaacagcggcctgaagattaacctgtttgatacccccttggagacgcagtatgtgaggctggagcccatcatctgccaccggggctgcacactccgctttgagctccttggctgtgagctgagtggatgcactgaacccctaggcctgaaggacaacaccatccccaacaag

SEQ ID NO: 520743 - DNA, 119 bp, Homo sapiens
atctagaggatacccaccggtcctatctggcgactgtacacggtttaattgccaagtgtctaaagcttaatatgccgtgctatgtaaatattttatggatataacaactgtcatatttt

SEQ ID NO: 520744 - DNA, 141 bp, Homo sapiens
  misc_feature (61)..(61): n is a, c, g, or t
gtttttccccctttttaaaaaaaaaggggggcaagggccctttcccccccccccccagaanggggcgggtcccttggttaccaccgggaaattttggaaaaaaaaaggttttggcccgggaagggccccccaattgggttt

SEQ ID NO: 520745 - DNA, 454 bp, Homo sapiens
tggaaagggaatctcgcggtaacccaggtgggagtgcaggggcgcgatctgggctcacggcaacctcgtgcctccgcgggttcaagtgattctccggcctcagcctcctgagtagcggggattacgggcatgcaccaccattccgggctaatttgggctattttaagtagagagggggttccaccatggtggataaggcggggtctcaaactcctggacctcatgatcggcccacctcaatctccccaagtacggggatcacgggcgtgagccaccgcacccagccgtggtttggtccttaattaacttaatccgaccctgagggggggtactactatcggtccggtggatagggaaccagagacaaatgtggagggcactgggggggcagagctcttaagccatggcctaaaatgggccaggtacaatagtcctcccgtatcggctcggggag

SEQ ID NO: 520746 - DNA, 200 bp, Homo sapiens
ggtttagaagagcaagaagaaggaggttcctgctgtgacagacacccttaagaaaaagcgaaggaatttcgcagagctgaagatcaagcggctctagacaggagtttgcccaacagtagcttcgaaaggacaaggagggaaggttatctatttactcaaggcaaagcactatcacacagggtatatgggagagtgtgcag

SEQ ID NO: 520747 - DNA, 716 bp, Homo sapiens
  misc_feature (171)..(171): n is a, c, g, or t
  misc_feature (305)..(305): n is a, c, g, or t
aattttacttcttttagctgtgtaacttggtacgatgcaaagaggttggatcaagtttaaatgactgtgctgcccctttcacatcaaagaactactgacaacgaaggcctgcgcatgccttgcccatctgtctatctatctggctggcagggaaggaaagaacttgcatgntgtgtgaacggaacgaacgtggggtgcgaagaagtggcggtgggcacgacagtggacaatctagaggtaaaaacaagcttggcccaaggtgtcctgcaggctgtaatgcagtttaatcagagtgccattttttntttttttgttcccaaaattgatttaatttattggggaaatgccccaacttttttttcaattatgccacactttacaaaacaaaaacaaacacaacaacaaacatttgttggcggcgggactcgccgcccgagaaaaaagctttttctagaaacccctctcccgtgtggggccgcccgcgcacccagtcagggtcgagtggaccatggggcccaaagagcgtgtcccagagacgaactcgcggcgacgagggacagaggtggctggggtttcctcacgcaaagaaaaaaggcgcgcggggggaacaccgcagggggttctgggaaccaaatccccgaagggagatgcgaagcccaaacgggcactctaccccagggccccagcgagccgattaattaccgcgcgggcggaca

SEQ ID NO: 520748 - DNA, 499 bp, Homo sapiens
atagagaggattaccccatttcgttcacagcggactgttttttcagtccttaaaaggtccacaagtctgggattagcagctagcacttaattattggcacgacacaatgcttattaacaatgtgatacaatcacaaaaaattacaaggtgttcctggattgttgagtgatgatatgcacgcatatggtttctaataagcaacttagatgtgaggtgtcatactcctagctacagatgtgtcaacatcacactatcactagagacaaccagcatcggtacaggtcaactgagtgctgaagcgagagcaataaagggccttgtcgacattgttgaaaaaacatgccgaagatggtacttgcccacgaacaaaatgagcagattatgttgcacgattgtgaccgggaccggtgactcggattctgaggcgtcattcttatgtattggaagcaagaacgtataacgtgtatcagctgaccaaagattacaggatgcatggcta

SEQ ID NO: 520749 - DNA, 123 bp, Homo sapiens
ctcatcaggaactgcagcattgggtcctctgctgcactttcatcttcatcaaatacctagactagctagatcatgtgatagatgcggtagcgagtgggtctaggggatcctacaagggacaag

SEQ ID NO: 520750 - DNA, 1096 bp, Homo sapiens
cacatgccaacggtcttactacatattggcacagaagataatataggaggtgaagagggtaagcatgaggtttggcactaccctgaagaacgggagggactcgtcttggaatgtgctaaggaagttgatgtcgccgaaagtaataggaggttaaatctcagtgtttcgagtgcttgcgaagaatctcaagtatatgtacatgctctatatgatgctcgatgtgtgttggacatggctggagaaagttggcataacgatgaacatgtgagacatgggaggaggatatcacgggagaactggaattttcaattggagagagggttgaatcatgttgatcagaccctactgtagggatgattctacttgtctctgaaaggtatctggtgtataagataatttgcagtaatgcggtaagctatctattgtgtcattgcttgtgatgtatctagctgcggctagttctgacattatcagtaagtcatagagaacagttgagtatgaatataattgactaaagtgtatgcctcatcttgagaagtaagtaaataaaaccgggaagttgatgaaaccatgcctttcactgttattactatgaactgcatgcgctgttctactaggatctcctgtcttgccaatgctaagaacttggttctggagggcactttaacatgtacccacttaccacgcatcggttcaccaaagcaatcattacaaggcaagagtggaggccctcgtggctttcaacaatgtcgagcccttttgggggggtcccactccctcggtggaaatggaacggctttgactcaaaaatacggtgggaacacggcttggtctattctgtccttgaaggctgaaactgtaggcgaagaactcgggcctctactcctttggataatacactgggtgcagtcctagtaattccttttcccccagtggaaaatcctatcctggctcctcaagtcggatttctccaagaatggtcccgcccatcttaatttacccttgcacctggctcattcaggcggatcgggtatctggaagcatgcccacgaccgctctggtcattttactctcagcacctccattgcatgacaaa

SEQ ID NO: 520751 - DNA, 817 bp, Homo sapiens
ggattgttatggtgttgtgggcacagaggtgacagatgtctctgcacggcactcaggcaagctgattctacacttggaactcacatgcaagctatccgatctcgtaataccagggacaggcgcaaggccggacctgaatgccagatccaagccaagttactctcaacatgtgattacttggctggttcctggctcaagtcacctgtgcgtgtctacagagcgtgtatgtagagagacaggtagcgagcgatcgcgcaccatcgcgcgcgcgagcgcggcgcccagcaagcgaacgcaatatgaccgaagagtgcgcaagagaaccaggcggcatactggcgaactctctcggttctctcgggcgtaaccttctctgcctgaacgtcataatgctgacgagaagacacgttcttccacgcccgctaaggtcgtccgccaagcagaacgacccgctaacggcagtgggatccccggcgcgcgcagctgggaggcacccccaccaacaaagcaacgggcacacttgaaggacgaccaagcgtataccgtggggaacacaacggcgggcggcaacgaccaccgggccaacaacggtatggggaaacggacaagaacacaggaacccagtgccgccccacacaaggcgggggccacaacaccaccggccccccacgagaccggtgcgacggcacacccttggcgccacgccacggcaccccggcacccgccttggcacccagcccggggcccccaaagtaggccggccgcccccactcgtcgcgggcccccacacacaccccccaaaacgtgggacgcgact

SEQ ID NO: 520752 - DNA, 101 bp, Homo sapiens
tccgtttacccatctgttttatcacttcccaacatcagcccaggcagcggtggcagcaatccatgtggggcatcgtctcagcagtcgcactgccaggcatg

SEQ ID NO: 520753 - DNA, 972 bp, Homo sapiens
ctgtttcgtggaggagtttgttcggtgcagccactctgccggggcgccggtattattggtccgccccggctttgtggtgccccctccttttgttgggtggtgcgccccaccatgggggtgctcagtagttggcgcacgacgcaccgttttgttgctgcagaacgttctacagggggtagcatgcttttggtcttcccccgtctctcggtgggtcaaaccaacttggtgagggcctgggcgcccctcgatctttctcttgttgaaatctgtcgggtggtacggcgtccccctcaatgtgctgaataataggttttctctcggcgcaaaacgcaccacacagttgcgttgttgagcagaaaggatgtctctcccagaagttagtgctccaccgcttttggtggctgctctgttgtcctgtgtttgtgtggagacataatgagggagcacgcacacaaacgtttgtccgggtgtggggttgcacactcacacaacccacgcgtgtggcacacacaaagatagcagggtgtctttgcgaaatggtccgtgcacagagaggttactccaaacattgttgtcccccgaagatgtctctctgagagggggtttcgatgcgaactatcatcccgctatcgacctcgcgaacccgccacttgttgtaatccacaagggtgtgtagagaacacgtgtctttagagaatgtgtttgttttcccatacatgcgccccatgagaaagttcaggtagaatagaagaacaggggtgaagaaagaaaacaccatcgccgtcttgtctaccacccttctctgaaagaagaaaagagagaaaatcttttttggccaacaccatcttgtttttttttttgtggggtggcaattttaaatttttatttttttaaacaatcacttttttaagggaacaaagggccccaaatttttcccaggaatttggaaccccctaaaaagataaaaagaga

SEQ ID NO: 520754 - DNA, 103 bp, Homo sapiens
cgtgacccactggtgagcaagtgacagcagcatcctttaggctgacacaggggccgtggctcagtcatgacgcgcttggtcgagacaggcggagaaccagagt

SEQ ID NO: 520755 - DNA, 87 bp, Homo sapiens
cagacctctctgtacttctgtgccagcagtttacagggggctcggtacgaacagtacttcgggccgggcaccaggctcacggtcaca

SEQ ID NO: 520756 - DNA, 209 bp, Homo sapiens
  misc_feature (86)..(86): n is a, c, g, or t
aggtcattgattattaatagttctatccagttatctggactttaatccaaaagagtatatctataaagagcatctactctataaangggggtaaactcaaagggtagtaaatacagtattcagtctgtaaatattacctcactgtgtccatgacatttgtgaactcagtaaccaaatttaaggatttactgtgttagcttgttgttaac

SEQ ID NO: 520757 - DNA, 88 bp, Homo sapiens
ggggggaacccccttttccccccccattttttttgcccccctggggcttttttttaaaaaaggggtttttctgtggggggccccccca

SEQ ID NO: 520758 - DNA, 1293 bp, Homo sapiens
  misc_feature (35)..(36): n is a, c, g, or t
  misc_feature (54)..(54): n is a, c, g, or t
  misc_feature (72)..(72): n is a, c, g, or t
  misc_feature (87)..(87): n is a, c, g, or t
  misc_feature (102)..(102): n is a, c, g, or t
  misc_feature (105)..(105): n is a, c, g, or t
  misc_feature (108)..(108): n is a, c, g, or t
  misc_feature (111)..(111): n is a, c, g, or t
  misc_feature (129)..(129): n is a, c, g, or t
  misc_feature (133)..(133): n is a, c, g, or t
  misc_feature (135)..(135): n is a, c, g, or t
  misc_feature (163)..(163): n is a, c, g, or t
  misc_feature (165)..(165): n is a, c, g, or t
  misc_feature (177)..(177): n is a, c, g, or t
  misc_feature (186)..(186): n is a, c, g, or t
  misc_feature (188)..(188): n is a, c, g, or t
  misc_feature (212)..(212): n is a, c, g, or t
  misc_feature (252)..(252): n is a, c, g, or t
  misc_feature (265)..(265): n is a, c, g, or t
  misc_feature (271)..(271): n is a, c, g, or t
  misc_feature (274)..(274): n is a, c, g, or t
  misc_feature (286)..(286): n is a, c, g, or t
  misc_feature (300)..(300): n is a, c, g, or t
  misc_feature (310)..(310): n is a, c, g, or t
  misc_feature (318)..(318): n is a, c, g, or t
  misc_feature (321)..(321): n is a, c, g, or t
  misc_feature (330)..(330): n is a, c, g, or t
  misc_feature (338)..(338): n is a, c, g, or t
  misc_feature (385)..(385): n is a, c, g, or t
  misc_feature (393)..(393): n is a, c, g, or t
gtctgcggccggcggtgtagacgccccttcgccgnnacctggcacccgaatccngcctgccgggcctctttntgcagcgccttgctnacgcccagggttctnatntanaancctacaccagggcctgangttntnaaactcatggcagtccacgcctgaaaananaaggcctgaaanaaaaggaanancccatgggacttgccacggttttnacttacatctgcaactccaaggctacaggcaggaagtaanaacagtgctcaantggcancanatactgactatngcttcatttcacancttcacacancagggtancanaaaacaaanaatgtaanattggacccagttgctgctgttcaccaactctgtgatcttcaaaaanccatatancttctccagacctgttaatcagggaagaagcagataactgaaggctggctttgagaagtttcgaggtaacataggaacctgctcatgcaggcactctttccatctgacttgggccaaggtgctccgtgattgacaagcagccagcctctgggagagcactctgatcagatcattgatagaacattcactactctacttatcatacccatttacttatctccatcttctgttagactccttaaaaacagcagcccacagcaggtgtggggataaaacagtcctgggcagtgctcattgtactcacactatgccaggcactgtgccaggaacattcaaatttctaagaatctacaaagtagatacctcattatacatcttacagagagcatcattggtgtttccaaggtcacagggctaggcaagggtggaacctgagtctgcttgtctgtttgccccatgacagcccaggggtggtggcctcactccacctccaggcacccacaagaatataaaatcttgtacaaggatgtcgatattactattgccattcccaagtgcacctgcacctgtagtatcaggtggtttgcagccttggctgcatagctgcatatgagaatcacctgggaagcttttaaagatcccagtatccccacctcttccccagttacagtggagtcttgcgggtggtgggggacatcattatttttgaagcttccaagtaattctggtgtgcagtggggtgaccagctgtcccagggacctcctttaaaaaataatatcccgggcacatgacaggccaattgccctaatgcaaccaaggttaagaactactggtttaatgggagatattttttctgtgcttgattatactgttttattaaactctgaatccatttaaaa

SEQ ID NO: 520759 - DNA, 128 bp, Homo sapiens
tactaccactcagaatttatctagagtctgcttatattataactgccagtgtccaactaaaacctagtcaggtctcacatattatgtagttaacggaatccagttttcacatgactcaaacgacagga

SEQ ID NO: 520760 - DNA, 525 bp, Homo sapiens
  misc_feature (442)..(442): n is a, c, g, or t
ggtgttatcgatgccaccggctcctccaccttcttctttccttcctatttgggcttagttttcaagagaatcttaagttagagtcatatattcattagcctgtgatgtaggaaacaaatgaggctacagtgacagcattaataaaggaggcatacttactattttaaagttagcttttaagaggtgaaactttaaaaaaaaaattgggagactgggtctcgctctgtctctcaggttggagtgcaatggcatgatcttggctcactgcaacctccacctcccaggttcaagcgattttcctgcctcagcctcttcagtagctgggattacaggtgcccaccaccatgcctggctaatttttgtatttttagtagagactaggtttcattatgttggccaggctggtctcgaactcctgacctcttgatccacctgcctcggnctcccaaactactggtattacaggcatgagccaccgaacccagcctgaggtcccccactattatggtgtggcatcgataaaca

SEQ ID NO: 520761 - DNA, 783 bp, Homo sapiens
  misc_feature (5)..(5): n is a, c, g, or t
  misc_feature (64)..(64): n is a, c, g, or t
  misc_feature (73)..(73): n is a, c, g, or t
  misc_feature (145)..(145): n is a, c, g, or t
  misc_feature (157)..(157): n is a, c, g, or t
  misc_feature (161)..(161): n is a, c, g, or t
  misc_feature (163)..(163): n is a, c, g, or t
  misc_feature (165)..(165): n is a, c, g, or t
  misc_feature (183)..(183): n is a, c, g, or t
  misc_feature (189)..(189): n is a, c, g, or t
  misc_feature (193)..(193): n is a, c, g, or t
  misc_feature (264)..(264): n is a, c, g, or t
  misc_feature (270)..(270): n is a, c, g, or t
  misc_feature (293)..(293): n is a, c, g, or t
  misc_feature (350)..(350): n is a, c, g, or t
  misc_feature (384)..(384): n is a, c, g, or t
  misc_feature (472)..(472): n is a, c, g, or t
  misc_feature (474)..(474): n is a, c, g, or t
  misc_feature (554)..(554): n is a, c, g, or t
  misc_feature (561)..(561): n is a, c, g, or t
  misc_feature (582)..(582): n is a, c, g, or t
  misc_feature (603)..(603): n is a, c, g, or t
  misc_feature (607)..(607): n is a, c, g, or t
  misc_feature (636)..(636): n is a, c, g, or t
  misc_feature (644)..(644): n is a, c, g, or t
  misc_feature (661)..(661): n is a, c, g, or t
  misc_feature (665)..(665): n is a, c, g, or t
  misc_feature (700)..(700): n is a, c, g, or t
  misc_feature (702)..(702): n is a, c, g, or t
  misc_feature (732)..(732): n is a, c, g, or t
  misc_feature (736)..(736): n is a, c, g, or t
  misc_feature (750)..(750): n is a, c, g, or t
ttganttctgttagttggagagttatatttgatcaggagaacgtggtttctagcacagagagtnctcccagtnggttaatagttgggggtaaggcgaggttagcgaggcttgctagaagttatcaaaaagctattagtgggagtngagtttgaagtncttnananaggattattatgcgactnttagtncgtncgtagtttgagtttgctaggcagaatagtaatgaggatgttagttcgtgggcgattattaaaattactgcnccggtnaagcttcagggggtttggatganaatggctgttactacgagggctatgttgctgattgaagagtatgctatgagcgattntaggtctgtttgttgtaggcagatggagcttgtnataattatgcctgagagggatagtacaagggaggggtaggctatgtgtgtggtcgagggggttgagaatgagtgtgaggtgtatgatntnttagccgcctagttttaagagttctgcggcaagtgctattgacccagcgatgggggcttcgacatgggcttgagggagtnataagtngagtgcgtgaagaggtatctntactatcaaagctattgtgtnagcnagtcatatcaagtagtgggctcaggagtntgagagtnctcgggcagtcagagtnagtngtagaatgtctagtgagcctagggtgtggtgagtntnaattagtgcgatgagtagggggagggagcntacnagggtgtagaatanggagtatgttaccttcctccatgcgtactggct

SEQ ID NO: 520762 - DNA, 107 bp, Homo sapiens
cccatgtcttcttgtcttgaggttagggagcaattagcatcaagggtttggatcgggaaaccactacatttgtgtgcccaatcatggacagtgacctgatagcctat

SEQ ID NO: 520763 - DNA, 321 bp, Homo sapiens
ttgagtctggaaacagcctccttgtttcactacttactttagtgtgtgactccatgaaaactcccccttaccctaaaaagcttcagggttatgtctatgttcattctatagaacaaatccaccctatcactgtacttaatatctcctcttctctcatgaatagaaatttatgtagacgcaagcaaaatacttttgcccacttagaaagcgcatatctcactttatgccgctataatcttttgttttttcagttagagtacaccctgttgtgattatctttatcccgtgttaatatatctttcatcttgaatgtaataagaa

SEQ ID NO: 520764 - DNA, 537 bp, Homo sapiens
tgctggagactgtattctacaacatgtgactacaattagcaagcactatatgatatacttgaaatgtgtaggagggtgagatcttaagtgtgctcatcagctagattagctgaaaaagaagggaaagaaaggaaggaagaaagagagagagaacaaaagaaaatggtaactatgtgaggtgatggatatgtatatgatatatatgcatattatatatatatgattagatatggatatacgcatatatatgcataattgaaatatgtacatatttaaagtgtacgacatgatttgatatgcatatatatgcatatatatccatatatatgcatggatatggatatggatatatatgcatggatatatatgcatatcaaatcatcatgttgtacactttaaatatgtacaatttccaattgtcaattatatctcaatatgggaaaaagtcttgtcatgaaggagatgcttaataaatagtagttaatgttattatctttgattgatttgtctttgaataaatttctgtgcccatttcaa

SEQ ID NO: 520765 - DNA, 592 bp, Homo sapiens
caactcagctagtattctcttaaaaggctcatttcaactttattttagtgcatatcccttatacaccaaacgtgcataacttctgaaaagttatgcttttaccagtattatcatgtcacgcataactctggcagtgaaatttctcactggttatgcataatcgcttttctttccaaaaccatttctcttttcataatacccttaatgacacaactaatttgcactcactaaatgtatatttctcactatatcctgatggacattttcatcaacaaatgatattaatatgttaacatataatctctttgcaccctccatttaagtttaaatcatctatcacaagagactgtgacatcatcctattgtaagttcatatcagtacacctttttataatctacccaataaaaacccccaatgtgttaaaatcccatcaacaccattacctccagatcaatatactgaggccttcccgtagaccataccaattaaattgtttatcttttggcataaaaaacatttgttaatacaacccttaattaaataaaaagagggggcattgaggatacatatagatagttaataaacataagg

SEQ ID NO: 520766 - DNA, 188 bp, Homo sapiens
tttctcctaaacggctcacaagcgagaaggttttgggattcgaattctgtgggacaagcaaactcgtccttccttcataaacagatggaatcctggctctacaacctgccctatgccactttcacagaacatccgatggctggcgcagactgagaagacagcatcctctgctgctcagcttggaaagc

SEQ ID NO: 520767 - DNA, 634 bp, Homo sapiens
  misc_feature (5)..(5): n is a, c, g, or t
  misc_feature (77)..(77): n is a, c, g, or t
  misc_feature (79)..(79): n is a, c, g, or t
  misc_feature (81)..(81): n is a, c, g, or t
  misc_feature (83)..(83): n is a, c, g, or t
  misc_feature (93)..(93): n is a, c, g, or t
  misc_feature (110)..(110): n is a, c, g, or t
  misc_feature (116)..(116): n is a, c, g, or t
  misc_feature (124)..(124): n is a, c, g, or t
  misc_feature (133)..(134): n is a, c, g, or t
  misc_feature (136)..(136): n is a, c, g, or t
  misc_feature (138)..(138): n is a, c, g, or t
  misc_feature (189)..(189): n is a, c, g, or t
  misc_feature (192)..(192): n is a, c, g, or t
  misc_feature (195)..(195): n is a, c, g, or t
  misc_feature (199)..(199): n is a, c, g, or t
  misc_feature (206)..(206): n is a, c, g, or t
  misc_feature (208)..(208): n is a, c, g, or t
  misc_feature (212)..(212): n is a, c, g, or t
  misc_feature (214)..(214): n is a, c, g, or t
  misc_feature (216)..(216): n is a, c, g, or t
  misc_feature (229)..(229): n is a, c, g, or t
  misc_feature (233)..(233): n is a, c, g, or t
  misc_feature (239)..(239): n is a, c, g, or t
  misc_feature (243)..(243): n is a, c, g, or t
  misc_feature (247)..(247): n is a, c, g, or t
  misc_feature (253)..(253): n is a, c, g, or t
  misc_feature (275)..(275): n is a, c, g, or t
  misc_feature (284)..(284): n is a, c, g, or t
  misc_feature (287)..(287): n is a, c, g, or t
  misc_feature (290)..(290): n is a, c, g, or t
  misc_feature (294)..(296): n is a, c, g, or t
  misc_feature (300)..(300): n is a, c, g, or t
  misc_feature (303)..(304): n is a, c, g, or t
  misc_feature (312)..(312): n is a, c, g, or t
  misc_feature (316)..(316): n is a, c, g, or t
  misc_feature (346)..(346): n is a, c, g, or t
  misc_feature (353)..(354): n is a, c, g, or t
  misc_feature (362)..(362): n is a, c, g, or t
  misc_feature (368)..(368): n is a, c, g, or t
  misc_feature (374)..(374): n is a, c, g, or t
  misc_feature (378)..(378): n is a, c, g, or t
  misc_feature (385)..(385): n is a, c, g, or t
  misc_feature (427)..(427): n is a, c, g, or t
  misc_feature (449)..(449): n is a, c, g, or t
  misc_feature (454)..(455): n is a, c, g, or t
  misc_feature (458)..(458): n is a, c, g, or t
  misc_feature (501)..(502): n is a, c, g, or t
  misc_feature (506)..(506): n is a, c, g, or t
  misc_feature (511)..(511): n is a, c, g, or t
  misc_feature (513)..(513): n is a, c, g, or t
  misc_feature (516)..(516): n is a, c, g, or t
  misc_feature (524)..(525): n is a, c, g, or t
  misc_feature (535)..(535): n is a, c, g, or t
  misc_feature (539)..(539): n is a, c, g, or t
  misc_feature (634)..(634): n is a, c, g, or t
tcagntgattgccaggtgaacatcaccatcttactcctctgaataactagacacaaattacatagcaagttcgaatntntncncacccaaganacagccagtaaaaagtnaaaaanaaagaaanagccaactnnangngctccagctttctgcccatcttctctcagcagttcctcccatctgctaagntgngcnttcntggtggntntttntnanggtgggtcagggntggncaaggngggntggngcagtntaggtccaccatcacctcccantgggcaccngtnggncagnnngggnatnntttttgtncatnttttgtttcccccttttatctccctctttnttctccnnaagttgtngctttntttcantttnatgtaanaatgggcttagtgtccattaaactgcctgagaagtggtttgngcctgacatattttcctgggcnaaaannggnaaagtacctctgtggccttcttgccattaagatcaagttaaanngggnctagnantantgacaagnntcacgctagntaanccttagaatcctctctccaccccgtgaaggtttctctagctgtagctcttaagggtacaagacggcaaatattctggggtgaaggaggtataatn

SEQ ID NO: 520768 - DNA, 330 bp, Homo sapiens
  misc_feature (31)..(32): n is a, c, g, or t
  misc_feature (46)..(46): n is a, c, g, or t
  misc_feature (48)..(48): n is a, c, g, or t
  misc_feature (50)..(50): n is a, c, g, or t
  misc_feature (52)..(53): n is a, c, g, or t
  misc_feature (58)..(59): n is a, c, g, or t
  misc_feature (66)..(66): n is a, c, g, or t
  misc_feature (68)..(69): n is a, c, g, or t
  misc_feature (80)..(80): n is a, c, g, or t
  misc_feature (125)..(125): n is a, c, g, or t
  misc_feature (155)..(156): n is a, c, g, or t
  misc_feature (165)..(165): n is a, c, g, or t
  misc_feature (253)..(253): n is a, c, g, or t
  misc_feature (277)..(279): n is a, c, g, or t
  misc_feature (291)..(291): n is a, c, g, or t
  misc_feature (302)..(302): n is a, c, g, or t
ggaggtgggggctggaggtgctggtagctgnngggacgggcaagcncncncnnagggnnggaagtncnnggaggatcctnagctgctgttgcagtctaacccactaatcagttcttagattcccnggaagggcaggcaccaacaactcagaatcnnggctttccnggagggcgcctagtccccccagctctaagcagccaggcgggacctgcatctaagcatcccggttgccatggcaatcgcatgccccccngctactgtatgcccccgccccccnnngaggcagaatgnacccatagggngctgatcgtaatgtttatcatgttactt

SEQ ID NO: 520769 - DNA, 177 bp, Homo sapiens
tccttctgcacatgatgcttgtcttctttcccttctaccatgaggggaagctttctgaagtccctaccagacgcagatgctgatgccacacttctgtacagcctgcagaaccatgagccaaacaaacctcttttcttatataaattacccagcctctagtattcctttatattatag

SEQ ID NO: 520770 - DNA, 669 bp, Homo sapiens
cccaaaaatgtggaagtgacttggaactggttaaaggcagaggttggaatagttaggagggctcagaagaattcaggaaaatgtggaaaagttggaacttcctagatatttgttgaatggcttagcccaaaatgctgataaggatatggacaataaagtccaggctgtggtggtctccaatggaaatgagaaactttttgggaactggagcaaaaatgacttttgttatgttttagcaaggagagtggtggcattttgcccctgccctagagatttatggaaatttgaacttgagagaaatgattgagggtatttggcagaagaaatttctaagcagcaaagcatccaagacgtaagttgggtgctgttaaaggcactcaatttgaaaagggaaggaaagcataaaagttcaggaaatttgcagcctaacagtgagatagaaaagaagatcccattttccaaggagaaattcaagccagctgcagaaatttgcatatataacaaggacccaaatgttgatccccaagacaaacgggttaaatgtctccagggcatgtcagaggtcttcacagcagtccctcccagatgcctaggagggagaagtggttagtgagccgggacagggtcctgtgttatgtgcagccggggacatgggctttgtgtccagta

SEQ ID NO: 520771 - DNA, 99 bp, Homo sapiens
gagcccattctgcactctctctccctgaggtacatgtgcctttccaaactaatatctctcactttttcccttctgtcgtcttctcgcaacacagtatac

SEQ ID NO: 520772 - DNA, 303 bp, Homo sapiens
taatccacagacactatgcattagcccatgaaacgcccaatggaggaggacggggaggagaagtcgcccagcaaagagaagaagaagattcagaagaaaggtacaggcgtgagccactgtgcctggccttgttgctcctttctttgtgtccatgtgtactttatgtttagctcccacttgtatgtgagaacatgtggcatttggttttctgttcctgtgttaatttgcttaggacaatggcctgcagctccacccatgtgctgcaaaggccatgatctcatttttaaaaaaatacctgtatag

SEQ ID NO: 520773 - DNA, 320 bp, Homo sapiens
  misc_feature (16)..(16): n is a, c, g, or t
  misc_feature (31)..(31): n is a, c, g, or t
  misc_feature (119)..(119): n is a, c, g, or t
  misc_feature (161)..(161): n is a, c, g, or t
  misc_feature (224)..(224): n is a, c, g, or t
  misc_feature (269)..(269): n is a, c, g, or t
  misc_feature (289)..(289): n is a, c, g, or t
  misc_feature (313)..(314): n is a, c, g, or t
aacctcaaacagtttnccgtcattagagatngagagcacgatgtttagattcatattttaatacaagctatttcataagagcttgctggagaagaaaatcttgcttcatgtctgtgacncttataaaaaccaacacatgaaaaaaaatccgataataaggnccggagcagccttcattcaagtaaaattttaaaaatcatagtaaaaaaatctttctattattncctaaattttaattgctcaccagcatcttctatggatggggttgngcaggttttctaacacaatntggtataatgtaccctactttttnntaatag

SEQ ID NO: 520774 - DNA, 414 bp, Homo sapiens
  misc_feature (399)..(399): n is a, c, g, or t
  misc_feature (414)..(414): n is a, c, g, or t
gcgcgatctcagctcactgtagacactgtgcttcagattcaagtgatactcctgtctcagactctcgagtagctgtgattacaggcatgcgctaacacacccagctaattttgtatttttaggagagaccagggttctctcatgtgtcgacaggctgtgctcgaacttccaccttagacttccaaactggtgggattacaagtgtgagcgcacacgtgaccaggccatgtgccttcttatagtgtgtactcatatggctttggtctggccagtggtaacaatgggataacgcctgctacacatcttcattgtgaaaccctctccctgtgctgagagtaaatgagactcttagattattaaataggatattttccttgacaggctaacggttgatgagtntaggctctatggttn

SEQ ID NO: 520775 - DNA, 1100 bp, Homo sapiens
  misc_feature (741)..(741): n is a, c, g, or t
  misc_feature (788)..(788): n is a, c, g, or t
  misc_feature (932)..(932): n is a, c, g, or t
  misc_feature (942)..(942): n is a, c, g, or t
  misc_feature (967)..(967): n is a, c, g, or t
  misc_feature (971)..(971): n is a, c, g, or t
  misc_feature (980)..(980): n is a, c, g, or t
  misc_feature (984)..(984): n is a, c, g, or t
  misc_feature (988)..(988): n is a, c, g, or t
  misc_feature (992)..(992): n is a, c, g, or t
  misc_feature (996)..(996): n is a, c, g, or t
  misc_feature (998)..(998): n is a, c, g, or t
  misc_feature (1003)..(1003): n is a, c, g, or t
  misc_feature (1005)..(1005): n is a, c, g, or t
  misc_feature (1007)..(1007): n is a, c, g, or t
  misc_feature (1010)..(1010): n is a, c, g, or t
  misc_feature (1014)..(1014): n is a, c, g, or t
gggtgtccctgtcacctgctcttgttcgtgcctcccagtcgttgccgtaagcgtctcctggtggtggtcctatcctttgtcgtactccctgtgtgttcctgtgtcctctgcgcctaatcgctgcgccccttgttgttgttctgtgctcatcttgcccacgctttattgtttgaatatggccaccctatgggtcctccttgagctgtttcttcgcgtctcttcctcaggtcgaactgtgactctctttaacggcctcggaagtttgtacgctgtttcacatgaacggatcgctcgtccgtgctgaccagatgttcatttcagctgtgcacctcttgcgtcccacttacttgtctcaccataccaattcaacaacggactaaatacgatgtaatgccttaaaaattatctagttcttggcttccttagttctatgtgattggagatgattcaattttactctagatattatctgtttttgtgtatattggccgtatgatgtatattaacttctttgtagcctttaatggtataattctggttatactattgaattcgatttataatttggtgtgactagatacaacttgtaagattgtagcaataagctggactagtgtcctaaacaaatggctaactgatgaattagtaagcctatctgacagcaggccacttagtgacagtttcttttgtgttcctatggaaacattttatactgtacatgctatgctgaagacattcaanacgtgatgttttgaatgtggataaaactgtgtaaaccacataatttntgtacatcccaaaggatgagaatgtgacctttaagaataatgaaaacttttgtaaattattgatgattttgtaattcttatgactaattttcttttaagcatttgtatattaaaatagcatactgtgtatgttttatatcaaangccttcatgnatctttcatacatatatatatttgnaacnttgtaaagnatgngagnagtnttangnaaagnangnttntacnttaagccaattaaaccccaaacctttggtccatgtgtggtgggccaaaccacctgatataatcccggattttcgctttaaaaaaaa

SEQ ID NO: 520776 - DNA, 259 bp, Homo sapiens
  misc_feature (58)..(58): n is a, c, g, or t
ccccccttttttttttttttttttgggggggggggggcccgcccccccccccccccanaatttttcttcttttttttttttttttttgtgggcccgcccccctctttttttttttttgtgaaaaacccccccccccccccccccccaaaaaaatattttttttttcccccccccccctttttattaaacgggggggccccttttttagaaaaaaatttttttcctcttttttaaaaaaaaaaaaggggcccgcggcgca

SEQ ID NO: 520777 - DNA, 199 bp, Homo sapiens
tttttttttttcccccattgctaacatagaccctgttggggtcccgatggcttccccaacccactgttgggttttttatgtccctgtggccccgtcccacccccgggggtatactgtttgcggggcccatatggttccctttaaagctaaaggaatccggggccccccccgctaatcctaataaatcccatgttttcga

SEQ ID NO: 520778 - DNA, 251 bp, Homo sapiens
tcgcagatggaaggagcagaagctgggagctgtactcagagtggcctgggggcctggggagtggcacagtgctgaaatgcagctcccacatcattgaccgtctgactccaccagaacagtccccccgactccctagccctactgaccctgcaagagcactcccatcatctgcccccatgaccatcagagagcagcctcctgcacctcctcaaccaatgaccctgtggaccatgcacaaccatgtggtgtgt

SEQ ID NO: 520779 - DNA, 796 bp, Homo sapiens
aagcgctccgggcctggaatccctacgcgtcccttggggtgtagcacgatgagctcaatcgggcactgggtatgacctgtcaggctctagattctctcctgacggaagagtttgtcaaggtgaatatgctatgaaggcggtggaaaagtagtagtacagtatggaatcagatgcaaagatggggtgtctgttggggtagaaaaattagtcgttggctaaacttgatgaagaaggttccaagaaagagacttttgtaatgtgaggcgggatgtggaatgggagtagcaggttgtggcagatgctcgtgtcttgtagcagacatagcaagagaagaagcttccaacttcagatctaactttggctacaacatgccactaaaacatctttgcagacagagtggccatgtcatgtgcatgcgtatacgctctacagtgctgttagaccttgggctgcagtgtcatgtagggtctaacaggtgaatgacgggcgcaatctacatgatgacccatcaggtgtttcattaggtgattggggctgtgcatcggaaagggaggaaggtgcaagacggaatagagaagcttcagatgaatgaaatggcctgtcgtgatatcgttaagagtgggacattattacatagtgcatggcgagtagggtaagctttgatagaactcatggtggggattatatggggactgaatgtcgagttttgaaaaggggaagtgtagattgggggaagaactgtgttttgtcaacaagttgtttaatagcacgaggaaaagcggtaaaggacaatgtt

SEQ ID NO: 520780 - DNA, 580 bp, Homo sapiens
ctgaaaaaaaaaaaaaaatttttaaaaagggaaaaaaaaaaaaaaaaaaaaggggaaaaaaaaaaaaaaaaaaaagtaaaaaaaaaaaaaaaaaattgcttgcggccgcatttggggctttttggcccattcccccttttggggggcgttcttccattccttggcccgtgtttttcccccgttttgtcgggtaaacccttggtttcccccctttttttcccttgggggtttttccctttttccctgtttggtgtattcccaaagggccctgcccgtttggtcttccctaatggtggcccccccttattggttccgggaatgtttccccttatactttgggttaattttccctttaatttttggtctcggttctttttttcccccattggccacatgtggctctctctttgttctttgctcatttctcccggttttgtgttttggttttcccgtttggccccgggtccccctttttcagccgcgggtctttcccccttggggggtcccccccttttctgggggcttgcccccttgggggccccctcccctttttcttgtttcttggggctccgggtcccct

SEQ ID NO: 520781 - DNA, 118 bp, Homo sapiens
tttatcactttggtacctagttttcttgtctgtgaaatggaggtacaagtgataactctagacaagtctgcatgatcacttctgagacactctagtactgctgactatgagcatcagt

SEQ ID NO: 520782 - DNA, 333 bp, Homo sapiens
tcccgagtaacccacaagggcttcttgtttaattccaccctacatttttgacacctttagagctcaacacagttcccttcttagtgaccaaaatggtggcctactggctggtctagctgacagtggtacttagcaaaggccactgtttccatagtgaccagctgatacctcttccttgcccctctagtgtgcaatatgggtgtttcctcagtttccctcccagctcaggtttaattagatcaaagctgtttttgggcaccaaggttgcccacttaaatcaccagccaaaatggttcctttttccaccagaggtcaagttcacctctctggtgc

SEQ ID NO: 520783 - DNA, 771 bp, Homo sapiens
gatctctctcgggtggagtctgctgacagctggtggcctgcccggagaaaatcctcttggagctcaatcatggttgttggtctggtcgccaggaacgtgtagatctcaaacctggagaggtgccgtttcgagtgcgaggagaagtgtggctcctgacggcttaaggagcttcggtgttggaacctgggccaattagtaccaggcaagagagaccctgtgccctggaactgtttcatacccctctgccttcaaacggccccaaggggtgaacgccaaaaagccaatctgtgttgctagacaagaaatgtgacgggcgggggccacttgtgggtagcccagattgcatgggaaagagactggatttatcccattcaacgcctgtgaacatgtggtagcgcaagacgggtgtgcattcaccgcttgtcggtaccagaggggccaagctctgttgaccgtgtcaatagtcttgcccaatggtttggattacagaattttgaaagttgtcccaagaagcgggacctttaagtgcttgggagggccattccaactttacattggcgtaagtgttgaaaacgtgtggactttacacaagatccaacttttgttgtgggccttttggagttgaaagtcaaggccatgccccgtgggccccccaattaagggggcagttggcttgtgctccccttcttgaacacaatatgagttacacactcacttcgaaaaacaacattggataatttagacattcaacttctgttagacacatctctg

SEQ ID NO: 520784 - DNA, 224 bp, Homo sapiens
tttttttttttcggggctaagggatgtggggttttcttttgtggtgatgaaacatttttggaactagattggggtgatggtcgcacaacactgtgactactgtgttttttacttaaacactgttaaggtggccaggcacagtggtttttttttgtcattccaggtgctaagggggctaaggtgggaggattacttgggcccattaggaagaggttgcctagtgc

SEQ ID NO: 520785 - DNA, 257 bp, Homo sapiens
  misc_feature (57)..(57): n is a, c, g, or t
  misc_feature (175)..(175): n is a, c, g, or t
cctaggagggcaccatgccagagacgcctggaccccatgctaggctcagtgcctgtnatactcttgggagccagcactttccctctccatcacatggcatacttgccattatttgttgtgtaaaatattgtccttagttttcacctttcctaggagacacaggcagagccttgancactacagcttctggcacacagtaggtaggtgcatcacaaacatctgctgagttcacacactcttgccttctcaaaacttct

SEQ ID NO: 520786 - DNA, 901 bp, Homo sapiens
  misc_feature (901)..(901): n is a, c, g, or t
gactagttctagatcgcgagcggcctccatgactttttcaaaaaaaaaaaaaaaaaaaaaaaaaaaaaaaaaaaaaaaaaaaaaaaaaaaaaaggggggggggggcaaaaaatttccccgcggggggcccccttgtttatcggtacgccccgcgtgttttttgtggtgacgaggtgggtcgccctattatgagggaggcggttgttattattagtactagaggcactggggcgcggggtttttatatcaccggtgctggtggtgttgggaagaaactttgggcgcctcgggggctttttggggaagagaccctatttttgggtgggggcggcgctaattgtggggagaaacatcatctctatcaaagaggtagtattataagcgctttctaggggggacataattatatacatgtattgagggggtgtatatgggtggtgtagcaactactagcacggagctaatttatcgtgctggccgcgagggtaggaagaaaattcggtgcgctcatcgaggagtggtattatattttttatagagagagaattattttatatatactggggtagatttatagtattataaaaaatggtggtagtattgtataatagaatagttgtgccaactgcgaagaaaaacatgcatgaaccgcactgagacatggtaaaactagaggcgaagcagagagatgtgagcaggtagtcggaatgtataattggacaagtaatgatacggaatagtgcattagcgtgtaactatgtcgctacttttcacataccgactacgacgctatgagagactctgcgcgctaagcacaacacacccgcgcagcgtcacccgtcgggttacccatacaacatgtcgtctcatggcgctaccgacacctactcgcagcgctagn

SEQ ID NO: 520787 - DNA, 102 bp, Homo sapiens
gtaccttcgcgacgaccactttctccccacccccacgaaacctcttgtgttcttgcctaggcccaggtgttcctggcagtcaaatcgagtctctcattttct

SEQ ID NO: 520788 - DNA, 182 bp, Homo sapiens
tgaaaaatattccccatttatacttaattttactatctttggcccataatcatgaatatattataaaacatgttggtcttagaaaatagggatgatgatgtataataagttcctggcatgataaatgcaaaataggctgttttctttcaaaaaataaatatgctcatgcctttgaaaaatta

SEQ ID NO: 520789 - DNA, 392 bp, Homo sapiens
tgatcgtaacttggttggcaacgcagctcataatagcctatttgacgtaatttgtactaacaaatagaaatcccggttccagaccgcagacccaccccgtctatccaagcgctcgcaacgccgccagaacatctcggtgcccaccaacatgccgctaatgaagtaacaccacccccgcaaccgttgtgtagattccctggcaattgtgctaacatgtttgtcgttggggcagttcccaaccgttcgaggaatcttgagcgcgcacacggccgtgccgagcacggccgtacggccatgtttcggcatccgaaagggagttgagacatcacgcatgtccttgagctacgttgactctggaatcattctgcgtacccctgccggtatggggtcgg

SEQ ID NO: 520790 - DNA, 220 bp, Homo sapiens
agcagtgttgattcggctgatctggctggctaggcgggtgtcccttcctacctcactgctcatgtgcgtcctcccgaagctaggcgctcggtcgaaagaggacgaccatccccgatagaggaggaccggtcttcggtcaagggtatacgagtagcttgcgctccctggtagaacctccaaacaaggtctcaaggtccatttgtaggagaacgtagggtag

SEQ ID NO: 520791 - DNA, 384 bp, Homo sapiens
atttttttatggggtttttgtttaataggtcctgtgagatttacgctttaaacaggttctattttggtgtgtttcaaggattttttcaagatttagagctccttttagcagttcttgtagggctggcatggtactggcgaattctttcagcatttgtttatttgaaaaagactatctttcgttgatttatgaagcttagtttcactggacacaaaattctgggctgataattgttttgtttaaggaggctgaagataggcccccaatgctttctagcttgtagggtttctgctgagaaatctgctttatcattttgtaaatttgactattttgtattcagcattacttgaccccttatgggcagggcaatgtattaaaatgtgg

SEQ ID NO: 520792 - DNA, 863 bp, Homo sapiens
cctgaatatcgagatgtgtaatcataagcatctgcgaatggaagcatcaaaacggatgatgaactgaatcgcagggtgacttgtgcttggttattttggccacatgtgtgagaaagcgagggagacgaacgaagtgtgtcacaatattgatggacagagagtttaaaatccaacaagcgtgagttgaaaagtcagccgcagggaatcgggggtgtagacagaaagaaagcgactaatttcctccaattaaaaaccccttttagtgcgaaaattaggcccagggtttgtacaccagttagaagacgaccacagaatttcttttggagaacttataatgtgtagaacaacgtgacggaacatcggtacagtggtcataacaactcccagaagccgacttgaaacaacacagttttacaagcttttgctccactgggaaaaaacgggttgtaacaaaggggtgaacacacttagtcccattattcaaccaagtctacaaacggtgctattcatttggcgcataccgaaacattccgcgaatgaagccattcaatcacggcggggccacagatttgttgaacttacagcgccgggattacacaactgggtgcttcaatttctatctctctaaccggtctttaacaacagggccggtacactactccatgcttgaaccagagtcgtggtaaatacagcgtaccatcgcagcgcaaacttgacctgcaaagctgcatccaaaagtgttcttttacggatgcccatggggatattatcaacgcgtggtattatccacgagattcattactccacttttaagctttccttactcctgaaagatccaatacttcggatggcatacctttaca

SEQ ID NO: 520793 - DNA, 1090 bp, Homo sapiens
atataaagataagaagaaaacgactcagacgaaacctgcaaacatgcatgcatgcatgtggcagcattaagcaagcagtggtccaagtcatgaatctcgaattttcaaccaaatgcaggcagcacacagtcagcatcagagcatgcatcgcacactgcaaggctcatttacgcagcgagactcacataaagcccgtcccacgttgtgagttctcacgcagccttgcaagtcgttgggccagcaagcaagaggtcatgcactagcatcatgctccatcgcacaggcaagtctacaagtgacatatgtacccgcagaaggttgccacagcaataaagtgcctattcaccatattccacggatacagctccggccaggtcagacggaatctcattcaaccaccaatcatagactaccagtcattattctccaatcaatcaccaccgaccaagaacaccatcgctcacagtacacatgccagcggctactctcgggcaggagcctgaacagcattgccgggcgtcgccactctgggccttggatggtgactaatgggtgattggcctgcacaatttccacgcgcatggcctacgcaattggtgctgctataactgcacggctactcaactgcgttccgtactacatgtgctgcgtcccgtcatggagttggcctccatgaacttaggtacactcttgcctgtcactactacaacgcgttggcctatgcccgttaagcacggctggcccttactaatgccatggcacagccaatactggagcaaccttggacagggccacaggacattccatggggccaataatgtgccgaaacaccgggttccccaatgagcggccacattaggaccacaccagcacgcaacacacccagtgcacagggtcggcccccgcggcaacaaaggcgcacccgcgaaagggtggcgcccaagagcgacgaagggcaccctgtgacaatacccccacgaggcgagatcaccctacccaaggcaaagcgtgcgagcacaaagtggccatcaggacaacatgcaacgatacacccacataatcacaacaaccaagcaggggcgtgccacaa

SEQ ID NO: 520794 - DNA, 129 bp, Homo sapiens
gtttttatttttgacttttttaaaattccgggggggcggccccccctttttcgcagggttttaaaattggggggggggggggaaccccggggaatttaaacccaaaaaaaagcccccctttccctttta

SEQ ID NO: 520795 - DNA, 522 bp, Homo sapiens
  misc_feature (336)..(336): n is a, c, g, or t
  misc_feature (365)..(365): n is a, c, g, or t
  misc_feature (377)..(377): n is a, c, g, or t
  misc_feature (388)..(388): n is a, c, g, or t
  misc_feature (397)..(397): n is a, c, g, or t
  misc_feature (422)..(423): n is a, c, g, or t
  misc_feature (429)..(431): n is a, c, g, or t
  misc_feature (435)..(436): n is a, c, g, or t
  misc_feature (438)..(438): n is a, c, g, or t
  misc_feature (454)..(454): n is a, c, g, or t
  misc_feature (456)..(456): n is a, c, g, or t
  misc_feature (459)..(460): n is a, c, g, or t
  misc_feature (465)..(465): n is a, c, g, or t
  misc_feature (477)..(477): n is a, c, g, or t
  misc_feature (482)..(482): n is a, c, g, or t
ctcggctctaccttgtctggaactcctgacctcaagtgatccccatgacttaggcctcccaaagtgcttggattgcaggcgtgagccaccgagcccagcctcattaatgtgctttggaccttactagtgagacccacattttgccaccatccacttcatgttgacaggagccctggtctctgtcagccttatgtgtttatgctggagcctttcacttggttctgagtgatttgccaaagcatacagtttccacgtttggagatttaggccctagttactcttagtcttaaagatgttacaggatagtttgaaacagtttaattctctggctagacnaagtttagcccatgctttttcaattgggntagattggcagnttcctagcttnaggacatgnttaagttctgaccttcatgatttannctttannntttnngnggaataggataaacantnggnngaaanttaaaccaggtnggaanaaagggggcaatgccgaatcaagtaatcttttacccttgg

SEQ ID NO: 520796 - DNA, 657 bp, Homo sapiens
  misc_feature (477)..(477): n is a, c, g, or t
gcggggactccgcagcggctccctagttatggggcgccccggtgggttccagcttgaagggtcgcaggagcggctctggcatcacctcggagctgacgaaacgggaagagccccgcaccagtgctgcccctacagagctctcggcggggggtggaggtgaggttactgctcgtccctacccccgtcttcccctccgccgctgggatccgtgagccgcccccgcggagaggtcggggtggctgcgcgggagtgggctgtggcggtgtagcgggcgggtccgcaggccctatgtggtgcggggcccgagccagagtcgagtccctgacgcgggtgggggaaggagagacggttggcgcgacctctgtccccgcctcgtggggccggagcccagggtccccaagccctgcggagcgcgaagacactgcctgaatattccgccgaggctacctgtgcgacttccaggccagtgccttgcanccgggaaatctggggagacccaggccacggactgtcgccgagctggagttggcgggccgtgtcgggaccacaacctacagggtttactagtagaggtaatcgtcgtgaccccatgtgagccacaaaggaatatccgcggctttgccacgggggtgagggccagacagccatgtggagaaa

SEQ ID NO: 520797 - DNA, 350 bp, Homo sapiens
  misc_feature (179)..(179): n is a, c, g, or t
  misc_feature (219)..(219): n is a, c, g, or t
tgtctagagatccggcgagtgatggtcgaaactgacattctgagcacaagcaggcttccggctcggaggacgcgctcagtaccggctctgctaacctgcggcaaggtgcttccaggttccatgatccccgactactgtttccacagcagcagggggatctgggcctgggcaccccagancagaagcccttccagggcctggagagccgcacccagcagncttcgctaacccctctgtctactattaaggcctttgccactcagtcgggctcccaggacctgaaggccctcaataccagctaccagtcccagctcatcaaacccagccattgcactccggccgggtaccga

SEQ ID NO: 520798 - DNA, 653 bp, Homo sapiens
gattgttgcaagatggccgcgcccagtgatggattcaagcctcgtgaacgaggtggtggggagcaggctcaggactgggatgctctgccacccaagcggacccgactgaggggcaggaaacaaatgatctggatggcctgtagtgcttattgtggtgcgtgtgatggggccagtctggagacagtcaaggtagggaagacgtatgagctacgtcgatacgtgtgactaagcatcgaagtctagtattgttgacagaatggacgggcacccgtgtgggaagcgcggggctagatatcagccgagcagagtttgctgatgctgatggatagtccaccgtgagggcgagctggcttgctacaggtttatatccattacacagaagaatgttctgattgaagtgaatccccagacccgaattcccagaacctttgaccgcttttgtggcctcatggttcaacttttacacaagctcagtgttcgagcagctgatggcccccagaagcttttgaaggtaattaagaatccagtatcagatcactttccagctggatgtatgaaagttggcacttctttttccatcccggttgtcagtgatgtgcgtgagctggtgcccagcagtgatcctatgtatgtggtaggggcctttggccatg

SEQ ID NO: 520799 - DNA, 1177 bp, Homo sapiens
  misc_feature (650)..(650): n is a, c, g, or t
gaaaccgctaatcgctatctatatgtagatcgtgtgctaggtcgagtatcccattacacttgtatgagccatcactcttggtccctcggagagtccctttttattcatcttggtgatgaagtagtggtgcactttctcggtgcacgcgtctgcgttgctcgtttgcgagtctcgatatgcacagatctacctcgtgcatgtatgatggcgtgaagcacgggacgatggtcgatcgacgggcatgctgaggatcatctgtagctcaagcccgagtgtctcttacactatagattttcttcttcggaaggtcatcggcctcaatcgatagcaccgtctcgggtatgtgataccatcgttgtcgtgtgctcctcgccagaagtctataacacatcggggatagcttgttgcgtgcagaaaccccttgtggcgatgaataacagcgcccaggttgactctttcgggaaacatgtctcgatcacgacgccagctaactatagcaatgtcacaacactgcctgttgtcacttcgattaacatttggacgggggtccctgattgccaggacactgacctactcggagatttaacccacagcagcgtttatatactaggaaagagcgagccttgagccgactacctttccttgcgtgntatattttgacatctcccagaaacgccttcacctctcgtcatgggtggatcgcccaccagcttgacgcgccttgcacttggtgacagccacaggatgtcatgtgtaatcaaccgattctagtagcgtgaccgattccaccagggcaccttcactttgtaggagccagtttcacgtttgccgcaaacagtttgtacaatcggaggagggttaggaaggcacatagtggcgcaaacattgcgcggtccacagtagcggtagtgataccgcgaaaacaggtatcgctcatatgatatttagcatccgggcgataccaaaggcacacgcatcggcggagcgctagtgcgcatacagaccattgggtggacactagccgccaaaggtatcaccccttggagatagcgagtagacagcggtccagcgcaaatacttggtggcaatgcggacctgatcggggagaccgctatagggattggcgttgggtgccatcactatccagttacatcgcacatctacatggcccttacga

SEQ ID NO: 520800 - DNA, 126 bp, Homo sapiens
cacagcaggcaggcagcacagcaggtggtgttacaacttttattgcacgctgcagtgtacaacagtagcagaggtacccctcttgctgtccacctcctctgtgctgtccacctcctctgtgctgta

SEQ ID NO: 520801 - DNA, 457 bp, Homo sapiens
  misc_feature (5)..(5): n is a, c, g, or t
  misc_feature (448)..(448): n is a, c, g, or t
aaagnaactcaacttggtttttgtcccttaaaaaacctatctcaatcccaatggtatgaagggcaactggaaaacaaaccaccctggttcaaatccctggcttggtcacttaatttggccaagtggccctgatatggtttggctgtgtccccacccaaatctcatcttgaattgttagctcccataattcccatgtgttgtgggagggacctggtgggagagaattgaatcatgggggcggtttcccccatattgttctcatggtagtgaatatgtctcacgagatctgagggttttataaggggtttctcctcttgcttggctctcattcttgttttgcctgccaccatgtaagatgtggctttgctcctccttgcctttgtcatgattgtgaggcctccccagccctccccaggtgacacattggaactgtgagtcaattaaacanttcctatat

SEQ ID NO: 520802 - DNA, 668 bp, Homo sapiens
cttttgcgtcgccagcccgagccacatcgactgagacaccatggggaaggtgaaggtcggagtcaacggagttcggatcgctataggtgcgccgggatcaccagggtctagcttttaactctggatagaagtggatattagttgccatcaagtgaccccgttcattgacctcaagctagcactggtttatcgagtgtgccgaattatgagttccaccctagtggcaaattccatggcaccgtcaaggcgtgagaacgggaagctatgtcgtcaactggaaatcccagtcaccatctgccaggagcgagatccctccaagaatcaagtggcggcgatgctggcagctgaatacgtcgaggagtccacttggcgtcgttcaccgaccatggaggaaggcatggggctcattatgcagggtgggagccaagaagggtcatcatctctgtcacccatctggctgaatgcccccatgattccgtcaatgggatgctgaaccagtgagaagctatgacaacgagcgctcaagatcatccgagcaatgccatcctgggaccagccaagcatgcggcatgcaccccatgagccaaggtcaagccactgacaactcagggtatcgaggaaggactcatgaccacaggccatgccatcactgcacccagaagacgtgg

SEQ ID NO: 520803 - DNA, 315 bp, Homo sapiens
aacccccaccactttggaaggctgaggcaggtggatcacttgaggtcaggagtttatgaccagcctggccaacatggtgaaaccctgtctctacccaaaaaatacaaaaatgagccgggggtagtggcacacacctgtagtcccagcctcttgggaggctgagtcaggaaaactgcttgaacccaggaggcggaggttacagtgagccaagatcgcaccattgcacttcagcctgggcgacagagtaagacccatctcaaaaaaattaaaacaaaaaaacactaacaggtattgaggtgttgggcgataacatca

SEQ ID NO: 520804 - DNA, 877 bp, Homo sapiens
  misc_feature (695)..(695): n is a, c, g, or t
ataccaccaaatattaagtcatgcattaattaaggtcgcactcaaaaattctagagaggcatccagattgccacaggcaaaatggtgtctgcagatgacaagattgtatgcatcaaaaattctaagaaatccactagaaaactattaaaactgataaagcgagttcatccaggtcgtagaatacaagaccaatgtgcaatgatcatttgcatttggtttcggtcggtggtttttttgtgagacagagtctcactcttgtcgagactggggtgtagtggcgccatcttggctcactgaaacctctgcctcccaggttcacgcaattcaacatgcctcagccacctgagtagcagggcattcacacggtgtgtgccaccatgccttggtaattttagtattcaacgtcagagatgggatttcccttgttggccaggctagtcatgaactcctggcctcaagcgatccacccatcttggctcccagagtgctgggattacagtgtgtgaatcaccatatcagactcaattgtatttctgtacactctaataaatggcatacattccatgttcatgaatccgcagaacttaagattgaccatacttccccaaatggtttaacggtttaatggttattcccattattccagggggtcctgtgcggatcacaaatccattggaatttcggcacccgaaatngggacaaccttgacagggttgatggcccacccttctggattaggttaggacaacggcatcgaatcttgctgggtaaacggcacataagggacatcatacgggcgcaaagtgaattacaaaacgccgtgtgtggtgagttacacaccggaccacgtagcaccacaccacgttgtgtgatttaa

SEQ ID NO: 520805 - DNA, 723 bp, Homo sapiens
  misc_feature (176)..(176): n is a, c, g, or t
  misc_feature (203)..(203): n is a, c, g, or t
ttttcataaggttaggtctcaatacaagttgcaaaagggtgttccagacttgtatatttttagtctttggctagcttggagagagttgacaggggatgttttcctgcaatgagttaaggtaaggttgcatcttgagtggccggcatcaagttaagccgtgagtgccttcaatgcancaagttgtcatagcatcgtgcattgtnacggcgtttattttttagacctattgtggaggtgtagctgtatggcatgtttcagggtacgcctcattcatgagacaacaatcagtacagccggctctgcctattatggtgtataaaaccttgcagtgttttgtgacacattacttacagcgaagtcttctctggtgccatgagatagtgttgaaagactctccgtcatcgtcgcaagttatagtactcaatgggggctgcatgaggtgtggccatgcgcatgtgaatctgttaaggtggtggtgccgcgaaaaacagcatgtgatcattgagcctcttgggaagtcgtagatcaatagtgaaaaagggatatactgtgggtagggaggttcatcatcctgtccagtatgttttttaaagatcaaagcatgagtgagtgcacttctgtggggattcattagcttcaatagaagagcattgcactcgtgaaggttgtgtttcctggagcgaacagcgagctgtgtgttcatgtctcaataaagagataatt

SEQ ID NO: 520806 - DNA, 851 bp, Homo sapiens
taaaggttttcatctttaatgaaatgacttgggaaataacgtaaaattcccatgacaccaatactacagttttcggagtcacagtaagatacacagaaattacagtccggtaacttaatatgtaagtgcccaaccagtgtgtttaaggcagataaatgtgtgcttacagtggacgaagagcaaacatcaagaaagagcatacacatcaaactaataagaagaccctatagctttcagcacgaagggcaatatcccagggatatgcttagtgtagaaacgagcgtgtgttgtcttcagcagaaaagagggtattcgtgggcattataccacaacgtggaataaggggctggccaaacgagccgtggtctccataataaccacgcaccaagagagccagcacacatcgcatatgcgtggtgtggcgggcacccgtgtcaccaaaataaattctgtgggaggcagttagtcaagtggtcctcgtgggcagtgaagtggggacggggtttcgtgcaaacacgtccccttgggggaattagcgtgcaagacaaagacccatttccgtggggcccccagtatagaatgtagccggtatgaaaggcccgtcttcacaagactctcataaagtaacgcgcttccgtgggtcggaaggagtaaacagcttggtactggcacgaaaatctggtgcctcactggttttgcccaacctcctgagaaactcccaaggacttccggcgaattcaagaagaagggggggggactgactggggccacaagccttttgggggcgcaaggctgaaaccatattcttgttcaatcttctttcgggaggaactggcggccgtctttggaaa

SEQ ID NO: 520807 - DNA, 178 bp, Homo sapiens
  misc_feature (131)..(131): n is a, c, g, or t
acactgggttcgagttctagaactcgggggtcagaaggggatgcagctctgggaccatcagcaagaaggacattatcaacccggacaagaaaaaatccaagaagtcctctgagacactgactttcaagagngccgagggcatgcaccggggaagtctattgccttgtttctaattctt

SEQ ID NO: 520808 - DNA, 277 bp, Homo sapiens
cgtgctcctatgtgcacggcaggccatgagaccagctcagcatctcgcccaggctaccttgagtagcaccttccttgggatacggcgccgggctcgaaggccataggcttgtagaccacttgggcaccgggttgggcaggtgtttccctgtacgtcggagaagtcgaagtccatctcacacccccagggtcatctgagcgacgatttagcgttgcccctatcgttgctgccgccgtagatcgctcggtcttgcggcatttttgaaggtaggtcgggg

SEQ ID NO: 520809 - DNA, 100 bp, Homo sapiens
cccgggatcgcagcaccacagcacacgtcctccgaattctcaaacgacacctggagactgtcccgatacagcgacgctcccctgagaagtttctggggcc

SEQ ID NO: 520810 - DNA, 128 bp, Homo sapiens
cgactctagcacggatccccacacttcgatcgcggagaagagcaaaagtattctcgaacacctgggtaagatttaatcttgggaggaacttgtgattgcattgacattctcatataatatatgttcta

SEQ ID NO: 520811 - DNA, 172 bp, Homo sapiens
actctacaggatcccctgctagcagacactagcacctgtgatgctcccagtatttctactacgatggggagctcttcctctcccaaaacgtgtgagactgagtgaagtggactagtgccctcagtcctccagagactcagaacctatggccaatgagacgtcagagaagttt

SEQ ID NO: 520812 - DNA, 234 bp, Homo sapiens
tccgggcgtttgcacgaatagtcaccgtcagagtcgcaggtcgcctggttctaggaatacatgggggaagtatgtaggagttgaagattagtccgccgtaatcggtgtactcatcaggtacagtaccattggtggccaattgatttgctggtcagggagggatcgttgacctcgtctgtaatgtaaaggatgcgtaaggaatggaagggcgactgacggacatacggatgaatg

SEQ ID NO: 520813 - DNA, 197 bp, Homo sapiens
accgtatcatcagacaacacaaagacctgcggaccagggcttcatcctagagtcgtgccgcagcattggtgaacctcattgatcgtgatggcaactggaagctgggcctggtggagttcaacatcctgttggaaccgcatccggaattacctgtccatcttccggaagtttgacctggaccagtcgggcagcatgag

SEQ ID NO: 520814 - DNA, 121 bp, Homo sapiens
ttgagaattagtatttgggtttcacagatgttatttttacagtcaaggttttgatgatttaatgacttgagaaatagagaggacctgagggagtaacaacaaactgtaacaaattttagac

SEQ ID NO: 520815 - DNA, 290 bp, Homo sapiens
ggcccggtccccggttactgtcatcacacagcctgtttcaccctctgtgacccgcctcctctgagggagtggactggaccactgaatgtcactgttccttgaatcatgggcctagcagattgcctgccagaggcgggactgagccagcccttctgggccccagggacaagccagacacggacgtgacaccaaagagctttgtacactatgtcattgagaggtctgactgccccaagcctggacagcaggaaacacgccctcccacaaacacccgaggagccacatgaccc

SEQ ID NO: 520816 - DNA, 105 bp, Homo sapiens
tgcactgtagttcatacctgtcactgttgttcatacctgcacgtgttgattcatacctgcacttgttgttcataccatccttattcattattatattgcagctgt

SEQ ID NO: 520817 - DNA, 456 bp, Homo sapiens
  misc_feature (291)..(291): n is a, c, g, or t
  misc_feature (371)..(371): n is a, c, g, or t
atagctggtgacagtacccctcaggcagcaagaagattaaattagtcacctgaatttgaccctgccttctagtattgaaaatcaaatgatgtccttgtgatttttttttttaacacttatgtttacttttggctacctgtaaagtctctacccttttagtttttaaaagcatacaggccaggcgtggtggctcacacctgtaatcccagcactttgggaggccaaggcgagtggatcacgaggtcgagagatcgagaccatcctggccaacatggtgaaaccctgtctctnctaaaattacaaaaattagctgggcatggtgatgcaggcctgtagtcccagctactcaggaggctgaggcaggagaatcncttgaacccgagaggcggaggttgcagtgagccgagatcacaccactgcactccagcctgggcaacagagcgagactccatttca

SEQ ID NO: 520818 - DNA, 179 bp, Homo sapiens
cacagacattcacacacacccctggcacacacacccccaccatgcactcccatgcacaccctcgtgctccatgccaagcacacacaccccatgtgcctatgcacccccgagcatgtgccaggcagtttgtagcagagagcgtggtgatgccatccagcagccgtgaggaggtggaagtc

SEQ ID NO: 520819 - DNA, 114 bp, Homo sapiens
gcaaggttgggctggtgctcacagctgtaatcccagcactttgaggttggctgggagttcaagaccagcctggccaacatgtcagaactactaaaaataaagaaatcagccatg

SEQ ID NO: 520820 - DNA, 460 bp, Homo sapiens
acagaaaaaaaaaagcacagaaaacacacacaagaaaaacagtcttcatgttttttgggttaacacgagttgggcttcccaaagcctgatccacccaagccttcctccacctccccaggtaaccttaaaatggagttccctatcctctgaaactaaaaatcaaatggctatgtcaagaaaaattataggtcgtggtaacattatgtaccacattacatgtaccaccccgaccacacttcagggccagggcatacaccaccagacacggcatttggtcccactaagcccagaaggctacttctatatcctctacacagcgctccaatcagctacagtcaatggattgagagtgggcagaagagctcaaaacctcattttccctgctgcaaaatacacagtgcctgacacaagaatttgaggccaggcacgggggctcacgcatgtaatctcagcactatgg

SEQ ID NO: 520821 - DNA, 941 bp, Homo sapiens
cgcctaaatactgccggagtctgcgctagttgtgacgcagtactatagcgctgtattcctgcactgataaacgaaaagcaatccaccaggtctcgcggagctaactttccggcactacttatgcccgagcgtgtcgctcccagtgcgcaatgtgcacgcaggtggactgcactggggggcgcgggagtgagtgaggaggaggaggaggaggctggggtggggccggcgagcaagtgctgtgatgcgtcttccgggggatggggccgtcgggtagatgtggctgaataccatgtttcccgatgcggtcaacggcagcgatggcgattatgacgttgttgtatgtggtgaacaaagctggcggcttgatttaccagttggacacgctacgcgccacgggctgacggctgagaaaactttcagttatccgctggatctgctgctcaagctacacgatgagcgtgtgttggttgctttcggccagcgggacgggcatccgagtggagtcatgcattgtctggccatcacatggcatggacgtgaatggcaggtacacggacgacgggcaaagaggtgctggagtatctgggtaaccctgctaattacccggtgtccattcgattttggcggacccgggctcacttctaatgagaagcttatgctggctccatgttccactcggctctttgccatcggtcccagtgtctcctgagcaggcaagctcatggcattgagatgctggacgacagcacacatttcaacattgcactttgtaccagacaactgagcagggatcacgtttgtggtctaagcaagatcctagggcaagctggaatagattctcttctcgaaaagatctactgagatttactccagactttggcctcaaagaatccaatctattcttagaaaatggcccatcaaggtgtgagctcttgacaaaa

SEQ ID NO: 520822 - DNA, 347 bp, Homo sapiens
  misc_feature (245)..(245): n is a, c, g, or t
  misc_feature (325)..(325): n is a, c, g, or t
agacaggatctcactccagttgcccaggctggagtacactggcacaatctcggctcactgcagcctttacctcctgggctcaggtgattctcccacctcagcctcccaagtaactgggactttaggcatgccatgcccaaccagtttttttgttgtttgctttttgttttggtatttttagtagagacggggtttcaccacgttgcccagggctagtcttgaactcctgggaatcaaacaatctngccttgcttcagccttcccaaagtgttgggggttacaggtgtggagctaacttgtaaccccgggccttaattttattatnaaaggatttctttaatctgttc

SEQ ID NO: 520823 - DNA, 212 bp, Homo sapiens
agattatgctcacgcgtggtaatcccagtagctttgtgaggccaaggtgggagtgtcacttgcagcccagcgagtttgagagcagccacgagcattcaaactagagatgatgtcacaaaacaattagccaggatgatggtggtgtgtgcctctagtttcagggtcaggctgctcaacagaggattgcttatgcttgcgtaagtcgaggcctg

SEQ ID NO: 520824 - DNA, 124 bp, Homo sapiens
  misc_feature (123)..(124): n is a, c, g, or t
agctcgggaaaaggggaaagggttgtgaggccttttacctatgtgacatctctatattttatccccggttttataaaacgaggaaactgaagttctgaaaatctccttccagggccccagggnn

SEQ ID NO: 520825 - DNA, 1037 bp, Homo sapiens
agattctctacgactacatgtgactgttggcatcctagatatatgtagcgtgtcggaaggcatgaggaaatgttaccagatgtatatctggtttcttgtacttttacacatatttccattgagaaatgatagccattctgtttaccattgactagagtaggtgcaaaatgactagggaaaaacctcacattttcgtgtaactgacgcttcaagctattgtaaactagacctcattttgcagcccatccaagttggtattagatcacgaatatattgttgaggggatcgtatcgtaataagtatacttatgtgcgtagcactacttttacagaagaggttgtaacgaaatattgaaaagcgatgtaagctttaatcttaggcaagatattgcggtttagactttccggggcttttttaaaatttctgagaaggggtacccagggcactttcaaactaacttaatgttcccataaggaaaattgttcaatacaagtttggaaacctaaaaagaattgattgacaaggtaattttttgattggtaaggaacgagttagggaagttgtgagttcgggagaagtgacgttttctggcgttttcctggggggtttaaaaaaaccgtttaaaggacagttttgtaacttacgtttttccctgtcatttttgggggttaaaattgacggaaacttcttattcagacggtccccagaaattgtccttaggttacagcgcaaccatcttaagctctacaaatccgtaaccccttttagcttggagcgttcacttgcgtgccacgcgtttacaagcggtggggacagggggaacgccttttaaatggttaaacagcggaggcccaataatttgttacacttgccagtgctaatctctggtagagttaatgtgagtttaaggagggacaaaagggtaagagcaaagaatgaagggcttggaaagggtattaattcagggtgctttatgaaacttgggggaggggcaatataattagtgggcacaaaaatgtatgcgctggggagccagg

SEQ ID NO: 520826 - DNA, 390 bp, Homo sapiens
  misc_feature (91)..(91): n is a, c, g, or t
  misc_feature (107)..(107): n is a, c, g, or t
  misc_feature (125)..(125): n is a, c, g, or t
  misc_feature (175)..(175): n is a, c, g, or t
  misc_feature (218)..(218): n is a, c, g, or t
  misc_feature (221)..(221): n is a, c, g, or t
  misc_feature (262)..(262): n is a, c, g, or t
  misc_feature (355)..(355): n is a, c, g, or t
  misc_feature (390)..(390): n is a, c, g, or t
atattagtcagcggaggaaaaaaaaaaaaaaaaaaaaaaaaaaaaagcggccgctcgaattgtcgacgcggccgcgaattcgcggcgtgcnttaaacggctgcgagnaagacggacagaaggggnacgttcagccagaccgagaccagttcccagttcccagggggaaggcctgncaggcccctgggcccctttccaccaccttctggcccttccgtntgncagaccttcgttccattctggcaccagggctctggcctttnacttcccccaagtctttgggaaatttgttcttttcctttgaaagtcacattttcttttaaaattttttgttttgcatccgaaaaccgaaaagnaaataaagcggtgggaaggcaggccattgtgttgn

SEQ ID NO: 520827 - DNA, 175 bp, Homo sapiens
ggacgttaatactgctttacaagaggttcttgaggactgccctcatccacgatggcctagcacgtggagtcgcgacgtgcccaaagccttagacaggcgccaagccatctttgtgtgcttcatccacctttatgagccattgattgcaagttggtgaggcctttgtctgacacca

SEQ ID NO: 520828 - DNA, 182 bp, Homo sapiens
ctagagcgcattccctcgctaccataatcatgctatccccaccggtgtcaaagtatttagctgactcgccacactccacggaagtcgagagtacggaagtcgagagtacggaagtcgagagtacggaagtcgagagtacggaagtcgagagtacggaagtcgagagtacggaagtcgagagt

SEQ ID NO: 520829 - DNA, 276 bp, Homo sapiens
cttttgctataccaatcgccaaacttgtcaggactggctaatgcggattcggactctccatcatgatgggtaggattgttggcaggccagcctgcagtgagcagtcagacatggctttgatttgcttacatgagatgaaaacaaccagtcctatctcaggggacatgacttggaagttaccattatgatggtggtacaagcattatgtgaacttcattgtcctggagctataccgggacttgctgtctggtcatcatctattgttggaacaaatct

SEQ ID NO: 520830 - DNA, 524 bp, Homo sapiens
  misc_feature (254)..(254): n is a, c, g, or t
tgtgctcatctctctctctcccccggacctcctcgccatggccagcctggagctgactctgtgtggtgtgtgggtcactgccaggaacccacgtggcagccacctctcaccccaccatggtcacagccctggtgtgcagcgtggtggcctctgctccctccaccttctctcttgatggggaccctggcccggctctgcccagccctgctgtgcttatcaccgagatgggagccaagggcctgagacaccagcgntgtgtgccacggcccactcgccatctggcacgtctcccagaaacatcaacgaagcacgaggcaggaagaggacgacacaggaacagcagacgaggaggagctgaggaggcccctgtgcctgcagcaagtgaaaatggatcccgaggctctccgtgttggggaagaggacgtgcggtcccccgaaagccagtccatctccgtgtcgttctggggacgccggacacatactggaaatatccagagttcgggaagagagcgggtcaggcccct

SEQ ID NO: 520831 - DNA, 132 bp, Homo sapiens
gtattatttttctgatcatccagaatagatgcatttgtaactgcagttggttagaccagccactgggccattagacctaagcatgtccctacgctgcctgagtctctcaagagtagaataaatgcgtcgaca

SEQ ID NO: 520832 - DNA, 299 bp, Homo sapiens
gggaaggaggaactggagagatgtgtgtgcagtgagggaggtcagggagatggagcggttctcagtgatatagctgagtgggtggggagcccatgtacctggaggactcagagagcaagacagtctcagagcatggtgagagggactggatgacagccaagaagtctggaaccaggggactcattggggccccctgaggtggactttgacaggctgctggcagcctgcggatcttagtgaggctggtggtagagggtgacacccaagcgacaccagtgcccgggggggtaccgagctcg

SEQ ID NO: 520833 - DNA, 103 bp, Homo sapiens
gagtcgtggcttgagccctgtgcggttcctcaggagttatgttcgccaacaacctggtgtatgacaccttcggacagcgatgactcggatgagcaggagggga

SEQ ID NO: 520834 - DNA, 980 bp, Homo sapiens
gaattcagcaatatttcttccatttgcttttgaaagaagagaaatatggctctgttccgcctggctttttcccggcggtcagagtttaaggttatctctcttgtttcctaaacattgctgttatactgttcttttttcaaggtgcccagatttcatactgtttaaacacacatgctctacaatttgtggagttaatgcaattatcacagggtcctgaggcgacatacattctcctcggcttacgagatgacaggattaagagattaaagtaaagacaggcataggaaatcacaagggcattgattggagaagagataagtgtccttgaaatcttcacaatttatgtttagagattgcagtaaagataggcataagaaattataaaagtattaatttggggaactaataaacgtccatgaaatcttcacaatccacgttcttctgccatggcttcggccggtccctccttttggggtccctgacttcccgctacagcctcagcctcccaagtagcggggattacaggcaccagccacaatgcccagcaattttttgtatttttagtagagagggggtctcgccatttgtccagtctggtcttgaactcctgacttctatatgattgtatttgttttttcacaatgtatttcatacattgaaatggtgggcaagtggaaaatcatattctcaatcctctggttttataaggtcaattatcataattaccttccggtcttgctcattttacttctccccacatttttggtggtcatggccaagcatttgtgccagacgtgccccgtttggggtaacggctaactcatggaaagggagccgcttactgggggtcatccttggaaacccctcggaaatatgtaacccgggcagaaaaaacgcagaaaataaaaagccgaagaagagtagtgacaccacagaaaagatgtacaaacaccaagctttgtcgtcacataagatattaa

SEQ ID NO: 520835 - DNA, 753 bp, Homo sapiens
ggggctggggtctcctgaggttgttgccaggtgtgggaaaggagagaaactcctacgcactgcccccgagtctcgaccgtgcccccgcacccgctgtctcagggctatccttccctgacgtcaggcttgaaaggaaacagggaagtgaagccatgctgagagacgctccataactccttcagggagaggcggggagggctcagggtacctgggagccggcaggacagtggtgggattgggggtcccaggtctccggggtgggggcagtcactcactatgagtgaggagtcggcgcgaggattggaggagggaaggatgttgtcagctggggagccagcgtctgcaccgcaaaatcccgaggtggagcgtgttcatgcagatctgggcaaacctccatcatcatttgcccggtgaccctggttatattccctctcatcactgtaggctcaggctgctcctgtggtgcctgtggctggagctgaacgctgtgtatcccccttcccggggagggcttgactggtctctgatggcacccccgtctttccccagcgccggcatcggcgtacaggcaccatcattgtcatcgacatgctcatggagaacatctccaccaaggggcctggactgtgacattgacatccagaaagaccatccagatggtgcgggcgcagcgcttcgggcatgttgcacgacggatgcgcagtacaagttcatctacgtggcattcgccaatcattgaaaccattaagaaaa

SEQ ID NO: 520836 - DNA, 152 bp, Homo sapiens
agtactggttctcgtgtctgagtttgatcataccgaataaaatgaggatgtagtccgtgggcgattatgagaatgactgcgccggtgaagcttcagggggtttgggatgagaaatggctgtgaccacgatgaaccccaggtactcgggtacc

SEQ ID NO: 520837 - DNA, 316 bp, Homo sapiens
  misc_feature (194)..(194): n is a, c, g, or t
cggcacgaggcagcctagggacttggtgccgtgcgtctcagctcctccagtggtgactgaaaggggccaacatagagctcgggctgctgcttcatggggtggaagtcccaaatcttggcagcttccatgtggtgttgagcctgcgagtacatagaagtcaagaattggggtttgggaacctcaatctagatttnaccgtgttggccagggtggtatcgatctcctgaccttgtgatccgcccaccttgggctcccaaggtgttgagattacaggcgtaagccactgcacccggcaataaacctctttcttttgtta

SEQ ID NO: 520838 - DNA, 204 bp, Homo sapiens
gccaggtcatcaccattggcaatgagcggttcggtttcgaggcggcttgttcagcttcctttctggtatggaatcttcggcattcacgagaccaccttcaacttcattatgagtgttacgtggacatcgcaagacctttacgccaacaggttcttttgggcggcaccaccatttaccggcattgcacagtattcagagggagat

SEQ ID NO: 520839 - DNA, 204 bp, Homo sapiens
ttatgctggtcgctctacaggatcccctgctctggtgctgtacccgtcggattcggagtcgtgtgctgctgatgtactagtcggcgtcgcccagcacctggccggagctgatttcgcgctgggcataaccgcgactgcccacttcataagcgcacctgcaacttcggcgcgtcatagccggtgtgcgtgacatagttgaccgag

SEQ ID NO: 520840 - DNA, 167 bp, Homo sapiens
  misc_feature (8)..(8): n is a, c, g, or t
  misc_feature (15)..(15): n is a, c, g, or t
tgagcggnctgcagnctacaccacagcatagcaacacagatctgagcctcgtctgagactacaccacatctcagtgcaacaccggatccttaacccattcagcaaggccagtgatcgaacctgcaacctcatggacactagttggatttatttccattgagaccgct

SEQ ID NO: 520841 - DNA, 332 bp, Homo sapiens
  misc_feature (126)..(126): n is a, c, g, or t
  misc_feature (132)..(132): n is a, c, g, or t
  misc_feature (327)..(327): n is a, c, g, or t
  misc_feature (332)..(332): n is a, c, g, or t
cccttgccccttattaaataaataaataaataaatagttgggcaactgtggcctcatatctgtcatcccccagcattttgggtttgcccaatgcaggaggattgcttgagcccccaggagtttganacccancccgggcagaatagcaagactccatctctacaaataataaaatattaacccaggtgtggtggtgtgcaccctggggtcccagccacctgggaggctaaggtgggaggtttgctcgaggctgcagtgaactgtgaatgcaccactgcattccagcctaggccacagaacaggaccttgtctataaataaagaaagnggtcn

SEQ ID NO: 520842 - DNA, 1582 bp, Homo sapiens
  misc_feature (936)..(936): n is a, c, g, or t
gtcttgtaccatcacaaagttgtccagcagaagctcctcctgcttatactcctcaagctgctgaaggtcactacactgtatcctatggacacagattctggggagttttcatcagttggagaggagtaaataggaatcattctcagccaccgcttcttgagaccttagggcctggatgcagatgaatggatttggataccaaatggagtacagatttcctcagtaaatcctgcaggggaggttagtgcaccttcgtatcctgggtaccttcgaattgtgaggtaccgggataattctctcgatacggttctaaaccgtccatcccgggctttcttcagagtctgtcgactggtatatatcctctagtacctgatagatctccggttctgaaatgtactgcgggacgcttacatgttttcctgatacaagtgctacaagcagcaggatgccatagcgaggggtcgacctgtcctctgagttaccacacgcgatgacagaagaggccccgaagcaccggcaacgccaaccggtcgacctatagggatcaggcaactggacaccgcgccacaaaacagacaggatgccaatcctggacacactaagacaccaccttcgacactaaagaaagctatgggcactgatggtaaccgctggcaccaggccaacacggctgacgaccacagaacccggcgcaaaggcacagcacccacggagcaaccaccgagccaatgacacggcacgcccacaactcccaagctactactagagggaccaagtgaaccaaatgcgtcggctcatccgaacttagtaccaaaccgactaaccgagctaccaccggacggtacctcgtgaactacacaaccagtcatacgtaccaaatcaacctagtacaacgatgtggtctttctcttctcactatctgtttatctatctttntcctctcctcacagatccatcgatcgagagtcatcaatgcagtccaaaacacagcagtcgcagcgcaacacatacaccgagaaacaacgtgacaagacggaaacgacgggccgagcagcgaaccacaagacacagcagagcaacggcaagaagaagggaagcagaacgagaagaacagcgaagaagcagcgaacgacgagacagcgacacgaaacgcctacatggacgagcagcaacagacgaaccaaacagagagccagcaaggagaccagaagcaacacggaaacaacggacagacgaacaaccagacgaggcagcatgatctcgatacagtacgacatgacaaaagcacacatatgaaagctactaagtaccggtctcaaacagcattgatgatcgaaccttcaaaaccaaccaactctaattactcacatcaacatactattagcaatactcacatgacacatctgcagactaactccaatccatacaatagtataaccagcatagtgcctcgcatatacactactgcatacatcataatatactagcaaccatactagaacaccgcacaccatcattgcgagcggtagatactaataggctaatagcacagccgaaaagcgagaacaaacagggagagctt

SEQ ID NO: 520843 - DNA, 357 bp, Homo sapiens
caggcaggttctcgtcacagcgctcagctcgcactgatgtttataccatgagtaggcctgagaaataaacatgcttagcttgcattccacgttctatacactaataaaataaacacctcgtgccagagaagctggcatctagtatatccgtcacgcaagctatcgcatccataatccttctaatagctatcctcttcaataatatactctccggacaatgaaccataaccaatactaccgatcaatactcagtcattaataatcataatggctatagctataaaactaggaatagccccctttcacttctgagttccagaggttacccgaggcacccctctgaagaacctgcctgcg

SEQ ID NO: 520844 - DNA, 284 bp, Homo sapiens
  misc_feature (252)..(252): n is a, c, g, or t
atccaaagaattcggcacgaggcggctgagccgcaccaaaaatcagaattttgcgaaaacccctacggggaagaccaactaccccctgaggggttaaccccctggaaacgaaatgaaaaagttaaaggccaagaacccaggaaaaggaaggaaatttcccccgatacagcagagaccgttcttttttcgtgtcaagcaggcccgtaagaagagacgcgactcattgtagttacacaaatatttcatagaggnggtctttcttgtcatctttgtttgtggaacac

SEQ ID NO: 520845 - DNA, 744 bp, Homo sapiens
gtgagccgcgctccctgtgaggtgggcaagcggcgaaatggcgccctccggtggtcttgcagttccctctggtcagtcctgtgtgctgttgctttgggtgtgctccctggacgcacgggcggctggagcagcgttctgcgtcatcactggacgacaactggagagaactgcgtggaacgcgagactggattgatagaattttatgccccgtggtgccctgcttgtcgaaatcttcaaccggaatgcggaaacgttttgctgccatgcgtgagactatcttgaggttacttattgcgaacattacgatgtcacagagcgagccaggacgtgagtggacggtaatatatcactacactgctcttcctactatttatcatctgtatgacgatggtgaatttaggcgctatcagggtccaacgggactacgaaggacttcataaactttataagtgataaagagtggcaagagtattgagcccgtctcatcatggtttggtccatgttctgttctgatgagtagtcatgtcagcactctttcacggctatctatgtggatcaggacgtgccataactactttattgaagaccttggattgccagtgtggggatcatatactgtttttgctttagcaactctgttttccggactgttattaggactctgtatgatattctgttggcagattgcctttgtccttccaaaaggcgcagaccacagccatacccatacccttcaaaacaaac

SEQ ID NO: 520846 - DNA, 81 bp, Homo sapiens
atcttaaatgaacaggtttcagcggatgttctctccagctttcaacagaccttgcactcaacttgctgaatcccattccaa

SEQ ID NO: 520847 - DNA, 203 bp, Homo sapiens
gtcggcccagcgttcttcactcagcctcctaagtagctaggactaacagacacatgccaccacacctggttatttttaaaattatttgtggagatggggtctcaccatgttgcccaggctggtctttaactcttgggctcatgtgatcctgccatcttggcctccccaaatgctgggattacaagcatgagccgactgagcca

SEQ ID NO: 520848 - DNA, 386 bp, Homo sapiens
  misc_feature (352)..(352): n is a, c, g, or t
aaaacttgggagaaatcagatggcctttaacgggtggctggtgaaacagtggatggtgcctctatgcccggaatactactcagcgataaaaaagaactaattactgacatgggcaaccactgggatgaattccagagaattgtgctgagtgagcaaagccaatcataaaagtttgcacactgtatgattccatttacataacattttgaaatgcaaaattataggaatggagaatagattaggggttgccaggggaggagtggggagaacaagagagttgggcataactattaaaagggtagcacaagagatcccttgtgggtgatgggacatattccagtatctttgaccnaatcaatgtggaaaatcccggggttggggatatt

SEQ ID NO: 520849 - DNA, 157 bp, Homo sapiens
aggagaagacggggtatctagcccaggagaggggctcaggaggaaccagccctgcccacacctggatctcagacctccagcactccagtgcctagtaggagacatcaactgtgtttcgtttctaagcctgcccagcctctggtattctgtgacagca

SEQ ID NO: 520850 - DNA, 285 bp, Homo sapiens
acacaaagacagcaatagaagatctaagaactgaaattgcactggccaggcgcggtggctcacgcctgtaatcccagcactttgggagaccgaggcgggcggatcacgaggtcaggagatcgagaggagatcgagacaatcctggccaacacggcgaaaacccgtccccactaaaaatacaaaaaattggccgggcgtggttgcaggtgcctgtagtcccagctacccagctattccggaggctgaggcaggagaatggcctgaacccaggaggcggaccttgca

SEQ ID NO: 520851 - DNA, 924 bp, Homo sapiens
ggactgctggaggagtctcgctgagctcgaggtaggtggcgcgatggagggactgggaaggaagaatggaggtgtagtccaagtctgcgttatgagatagtatccttgtaagtatcagttgagcattatgaacatttttttcctagataagcgttactaaaagatcattggatcccatgtgccgatgaaagactggctactaaaaataaggtaagagtatttgatgaagagcaatatagagagagtttgaaaggaagttaggatttgtacggaagaggtaaaagatcatcatcgagtatctgaaggcacaatagaccgagacgagttagaaatcgatactatattgcagagagggataacaatcgatagtattttcatttgcataacctatgaaggaggccaggtcataaggcgcctttgcacccgagtctcacttcaacccagcatgcggataggggggcaaaacttgtctcctttccactcactttaccttcccaggcctttgcgttgaaatagaattcccttggatttaataatgttccaaatttgtcccaattaaatgttgtgcaagagtggactgctttccaattaggataagtagccaggcgtagctattgacccattactgccaggtatctccatgttccgggagaggagatcgagaggcaagacaagcgcatcattttgagaggtaaactcttaaaatggaggcgccaagtggtatgcatactgggagttccccattaatggggagagcccctcaaatctatttctgtccgggtaaacaaccaagggttgggtcatttaaggccaaaccaccgggaacctttaatcaaaggtcgagacagagtttcgtccctggatacactggcattcaattcaagacgaatccttttaaggaggaagtttagcaggattggccaa

SEQ ID NO: 520852 - DNA, 696 bp, Homo sapiens
atggcacatgcagcgcaagtaggtctacaagacgctacttcccctatcatagaagagcttatcacctttcatgatcacgccctcataatcattttccttatctgcttcctagtcctgtatgcccttttccttaacactcacaacaaaactaactaatactaacatctcagacgctcaggaaatagagaaccgtcgtgaactatcctgccctgccatcatcgcgtaggtcctgccatcgccctcccatccctacgcatcctttacgataacgagagcgaaggtcaagggatccgctcgccttaccatcgaagatcaatgggccagcaagggtactgaacctacgagtacaccgactacggcggactaatcttcaactcctagatacttgcgccattattcctagaaaccagggggactgggactccttgacgttgacaagtcgagtagtactccccgattgaagcccccattcgtataataattacgtcacgagacgtcttgcactcatgagctgtgccccacattaggcttcaaaaacagatggcaattcccggacgtctaaaacaaacgtcttgcagcgatacacgaacgggggtatacgtacggtcaatgctctgaaaatctgtggagcaaagcacagtttcatgccaatcgtcctagagttagttcccctaaaaatctttgcaatcagggccg

SEQ ID NO: 520853 - DNA, 331 bp, Homo sapiens
  misc_feature (331)..(331): n is a, c, g, or t
agacgccgggcctacaacgggagcgtgaggaaagccgtgcgtttgcgtttccaaggcatctgttaagcccgccggagtatacaccatgagcaaagctcaccctccgagttgaaaaatttatggacaggaggtatcattgaaattaaatgtggcagacatgtccacggatattgcggggatttgatccttatgaccttgtgataatgaatgtgtgagatggcgactagtggacacagacaatattggatggtggtatacgaggaatagtatcatcatgttagagccttggacgagtattaataatggctgttcagcagagaaccatgtcctn

SEQ ID NO: 520854 - DNA, 252 bp, Homo sapiens
ccagtcttcgtcccatcagaacatgctcttaaacaaacagcaagcttcctccattaataagtcctgatgggacgcagatcgtcttctcccatcagtccctcaaccacatcttgtgtgacacgtcgttgactgctattttgataaccacaagaggtcaatgtatagaaatccgctgatggacgcccatcttctcccatcagcaattcctgcaaaggggttaaaaatttaacttggtttttacatactggatgg

SEQ ID NO: 520855 - DNA, 309 bp, Homo sapiens
  misc_feature (70)..(70): n is a, c, g, or t
gatttcagacaaaggcttcacttttcctaaccagttcacaaaatcagagaatttttgattcccacctatngacctgtgagctcctgcttcaagatattccaccttttttaggccaaaccaagtgtataacctccaagtgtcgatttacactttcgactgtaacttctgctttcctgagatttacccctgcctttaaaaacccttgcttgtaatccctcagggaggccgtgtatttattaatcatgagctgcccaattctccttgcttggtgccctgcaaataaacacactcttttctcccactgcaaaa

SEQ ID NO: 520856 - DNA, 670 bp, Homo sapiens
ttctgtgataggaaggcaggactcctgaatgggaagggggtaagggcatgatgagtgtgtcatcatccagagaagaggggtacgggagccccagtatttcagaatatgggaagggggtaagggcatgatgagtgtgtcatcatccagagaagaggggtacgggagccccaatatttcagaatatgggaaggggttaagggcatgatgagtgtgtcatcatccagagaagaggggtacgggatccccaatatttcagaatatgacctcaagccaggaggaggcttcctcctctccaggtaacttcagtctctcttggccacagataaagcagaccatcttggtgagaaatggaatgagccctctgttactttgtaaaagcaagaatgggccaggcgcagtggttcatgcctgtaatcccagcactttgggaggctgaggcgggtggatcacctgaggtcaggagttcgacaccagcccggccaacatgatgaagcctcgcctctactaaaaatacaaaagattaactgggcatggtggcgggcacctgtaatcccagctactcgggaggctgaagcaggagaatcacttgagcccaggaggcggaggttgcagtgagcggaggttgcgccattgcactccagcctgggtgacaagagtgaaactccatctc

SEQ ID NO: 520857 - DNA, 137 bp, Homo sapiens
agcggatccttattcgcgacttgggactgaccggacactatcatccagctgacaaagcagagcacatgaagcgacaaagacatcccatgattgcgccgccaggtcggcccaggtctatctttcccgtccctcccact

SEQ ID NO: 520858 - DNA, 1441 bp, Homo sapiens
  misc_feature (1441)..(1441): n is a, c, g, or t
gatcgtcgttaagtcggacttcccaacatggtcgcagtctcatctcacatccacggagctgcaatccttggctgcacggcttagacaatgctctagaggacactagctggcaccaggaatgtggagtctctatgtccgacgtccattgcgtcagcttcaacagtggtaacatgaccagagtatcgtggaagccaacggactgtcgtgaacgtgctgacagctaagagcacatggaggtggaaacgaacttagatcgttccccacatgatcggagtttctactgatacttgtaccctgggaaagctttgcatgaatgtggcacatccaccgttgcttcatcgaactgttgggaaacttgggagtatcgtcatcgtacacgaactacgagctgacgcgatgccctaatggggacactttcttctccaaaggaggtgcaacgacctagtgactttatatcgtaataccgaaatgccacgtacttgggacgaacagaggtccgatccaaggccttcgtttcacggacgaaaagggcacggcccacttgcaagagcagggccccgtgtccatgggcaaacgattgtatggcacttccggcacaggcattttcccaaggggaggttttccaccataggccccgttgggcgaggcaccagacttcccaggtgccttaagcgttgtcttaaaagggcctcttggcacgcaggttcatggcttggccactcggaccacattcgcggttggcccaagaaggagtgaagcaaccccctttttctggggaacgatcgagtcttccccttgggctatgaatagggggacatcgaggcgtactaaggcgatgggattttgtgtaaaaagtatgggtccccaacatatttaaagcaatgttgacttgacaccaaggtcttttgtggaatcccacagcgatactaccaatttgcatttcggtagagtcaacatgtcattagcgacacaactcgagcacatcgtcggagatgggtgcgcagtcacagctacccatgtggcgcgcacctacggagaaagacatgaacctatactattggtcacacgatacgcaccatacttatggagtacagataggcggaccacagtgctgcgagacggccatcagcaaaacaacgaggcatggacccgccacgcacaccagcgatctggcgcacatagtagcagaccaacagtacacgcacacggacaagacaaacagcaagaggctgaagcactaacaaacaggcatgacaaagcgacgagacgagggtaaatcacccaccagaacaaagacaaaaaactaatcaaatccacacgccacagggggacagctagagccacacaactgacgatcccacaacacaaccaacatgcgaaaacacgatgtgcgaccaacctaacgacaagtagagacaccacagacggggaggactgtaan

SEQ ID NO: 520859 - DNA, 959 bp, Homo sapiens
aacggcagcctgcagaaggtcaatgtaggggttctggggccacagaggagagggcacttcccaccaggacccccaacatgaaggtctaggcctcaggggctcccgcgcttcttcctccagacagcgggaactgccactgctctcccaggccctgttctggaggctaaccttggttcctggagagtgtgcccctaccacctccctccagacagccctgatcacaccatgagagccaggaacgggtcaccctgactgaagatcactctgtgccctgggggaggagccaagccctcaccccacgaggggcaggtgggggcttggttgctgacccggccgagtccccacagagcaccttctgtagctccagacttgtctccctggcttctctttgaaggagaaaaatgtgaaatatgcactgagaaagccagccccgacctgcttagtcagccccggcagcagggtcacgtcgcatggagaactcaggaaaagcaggaaccctttccgaaagcccagagatgccctgggactcagatctgtaattctcccaggagctgtgatagagcaggccgacaaagatgtccctacgcctccctggtgctcccccagatgcctgtgatggcatcacattccccacattgattatcatgcgatgcggcatgacagggactctttagattgcatgaaattatttcatagtgaacggcttcttcacgagagaacaccacaccggaacttcagtagcatttggcattccctggttaagaatcaccaatatttaaaataacaaactttcctgaaatgggacctgtcatgttatccagtatggtggtacttcgccaccattgtcccctgctggtcgggaaccacacaggacctgcgtgtgagcgtgctgactctcacgcccggctccagagccgtcctgtcttgaagctggagcttggttgatccttcgaacggcg

SEQ ID NO: 520860 - DNA, 251 bp, Homo sapiens
cccccatattcaccatgatgccagggagaaccttgattttaccaatagaggtcgccctctactcactaaaaccccatcactaatcaacaggttggattacagcgagggaatcagaggctatttttagattggtcagtactcagctcaccacccataagaccatatctcctctgcgtgtggcactagtcttagatatactgtaatttctttcttccccaggacacttaagatacagtttcatttccatgaca

SEQ ID NO: 520861 - DNA, 988 bp, Homo sapiens
  misc_feature (80)..(80): n is a, c, g, or t
  misc_feature (640)..(640): n is a, c, g, or t
  misc_feature (710)..(710): n is a, c, g, or t
  misc_feature (875)..(875): n is a, c, g, or t
  misc_feature (896)..(896): n is a, c, g, or t
gctgtaggatgatccattctggtcccctggacgtgatagctaggacactaaggtgctatgcaacgttatgaatcagctancgcgcggtgctatgtatatggtcgtctatccactggggtgacatcgagaagcatcctcactgagaaattctctagtaaggcatcacgagagtgccttatgaccggaattaacactaggccgatatggatgacatggactgtgatgaaggcttcatccgcatggttgcaagcatgactcgctcacctagtagcagtggatgatcgcggcttgcgagtgtgaccaattgaatgcctgtgcgcagagtacaatgggctgagtgaggtttacggaggtcaggagagttgtgctatgtggcattacccctaattgtactctactttattggtagacttgccttgaaataaagactctcagaactaggaactagcccagaaagtctcgaagagtagagtgagaagcagtttgaacgcagcgagtagacgaccgtgagtgttacccttggcaaaggatacaggagatgccttctctcttcgacgtaatgattttcttcaactatacgtctggactagttcccgagtcatgtcgcatgggggggttggagccgcgtgcgccaagcggncggctgccgcgctgactagcccgtggtgatcatacccattgctggatggtgcgcacatatgcctaacaanattgtattggctcttgcacccaattctgtggaccatgagttgagtcccatatggctcaggttatgagaggcttctaaattgcaagtgaccagcggatccgttggagtttagctgctcgccggacactagcctaggttagcggctcacaatgcgtcttgttggtantaacgtacggaataggccctnaagttgccctgggcgtgagggttgcccttggccgagccactagtcttttgcgtgttgagccgttgtgtggaacgcgttcgcgtcattattct

SEQ ID NO: 520862 - DNA, 681 bp, Homo sapiens
  misc_feature (1)..(1): n is a, c, g, or t
  misc_feature (4)..(4): n is a, c, g, or t
  misc_feature (8)..(8): n is a, c, g, or t
ngcngccntggccccaaagtgctgggattacaggggtgagccaccgcacccggccactactgatttaatgagcagatacatgcaaagcccttatcacagtgcaagggaaattcaaagcgctcagaaagtattagctcaataagtgatgactgtgtgccagacactgtgctaaactcctactcaagagggataagagtctaggggcaagtggcagagactctagaacgagattgcctgggctcaacgcccacctcaccacttacttatgcaagctagttctctgtgcctcagtctcctcatttgtaaaatgggcataaccacagcaccttctttataggattatgtgaaggtgtggtgagctaatacgttaagaattggagctcaataacatgttggctgtcattattacatatatctgtgtttcattcttgcctctggctggaatgttcttcccagctctccatatggctgatttctcatccttcgggacttgccccattctccaaccccatcactagttttatctttttcacttatttatgcagtctgctcttgtcctaggacatgagctccaggagggcgggaaacatctcgctttgtacactgctgtgccctctgtacccagcaaggcgcctgtgtataataggtgctcaataacataaaatgaacaaataatcctca

SEQ ID NO: 520863 - DNA, 899 bp, Homo sapiens
  misc_feature (177)..(177): n is a, c, g, or t
aaaaaaattacgacatagatacgagaccggatgttcatcctatcaacagctacttacgctgagacggtgcgctggcaagacacgatgccccgggctgtgatttgtagacattggaacccacagatcattgatgaagttcgcacatggcacctaccgccagacatcattccaccctgnagcagcatcatcacaggcaaggaaggatgctgccaataactatgcccgagggcactacaccaattggcaaggagatcattagaccatttgtgcttaggaccgaattcgcaagctggcatgaccagatgcaccaggatcattcagaggacttcattgagttttccacagacttatggatggagggaactggttctggagttcaccatccctgctcatggaacgtctctcagattgattatggcaagaagtcacaagactgagagttctcccatttaccacagacaccaccaggtattccacagctgtagatatgagacccatacaacatccatcctcaccaaccacaccaacctggaagacactctgatagtgccttcatggtagacaatgaggccatctatgaacatctgtcgtaagaaaactcgcatatcgagacgcacaaactacacctaaccttaaccgcctctattacgccagcattgtagtcctccatcacatggattcccctgaacgatatggatggagcactgaatgttggacctgaacagactaccagagcaaactgagtgccatacacacgatacactaccctcctggccaatttgccctgtcaatctcggtgcagaaagctaccaagaacagtgctgaagacaaatcaacaaaggtggttgaacaaccaaacaaggggatagactccctggaaactggtgggctgacgcgga

SEQ ID NO: 520864 - DNA, 201 bp, Homo sapiens
gagctcggtacccagtgcatgctgcatctggcgctgatcgacgccggttgaactagccatggcggcagcgatccagcccgcctcgccccttccggtccgggcggattatgaaagcctgaaggtcgcggccgaatggtacgcgcgcctgcagaatgccgatgccagcgcgcaacaacgcctcgcctggcagcattggctcga

SEQ ID NO: 520865 - DNA, 620 bp, Homo sapiens
  misc_feature (1)..(1): n is a, c, g, or t
  misc_feature (4)..(4): n is a, c, g, or t
  misc_feature (8)..(8): n is a, c, g, or t
ngcngccntggccccaaagtgctgggattacaggggtgagccaccgcacccggccactactgatttaatgagcagatacatgcaaagcccttatcacagtgcaagggaaattcaaagcgctcagaaagtattagctcaataagtgatgactgtgtgccagacactgtgctaaactcctactcaagagggataagagtctaggggcaagtggcagagactctagaacgagattgcctgggctcaacgcccacctcaccacttacttatgcaagctagttctctgtgcctcagtctcctcatttgtaaaatgggcataaccacagcaccttctttataggattatgtgaaggtgtggtgagctaatacgttaagaattggagctcaataacatgttggctgtcattattacatatatctgtgtttcattcttgcctctggctggaatgttcttcccagctctccatatggtcacttatttatgcagtctgctcttgtcctaggacatgagctccaggagggcgggaaacatctcgctttgtacactgctgtgccctctgtacccagcaaggcgcctgtgtataataggtgctcaataacataaaatgaacaaataatcctca

SEQ ID NO: 520866 - DNA, 146 bp, Homo sapiens
ttcaggcacaccgaggtgatgcatctaggcagccagcttgtacacagaaaagcagctttgctttcgctctggtctttgccttcgcttttaacactcaagccggccggtaggccggtgtgctcttgcttttgatcttgatctgcggg

SEQ ID NO: 520867 - DNA, 721 bp, Homo sapiens
gtctcgctcagttgcccaggctggagtgcagtggcgcatctccgctcactgcaagctccgcctcccgggttcatgtcattctcctgcctcagcctcccgcgtagctgggactacaggcacctgccaccacgcctggctaatttttgtatttttttagtagagatggggtttcaccatgttagccaggatggtctcgatctcctgaccttgtgatcccagcactttggaggctgaggcaggaggattgattgagctcaggagttcgagaccagcctgggcaacatggcaaaaccccatctctactgaaatgcaaaaattagccgggtgtggtggcacacccctgtagcgccagctattggggggttgaagtcaggaggatgtgctttggccccgggaagtcaaggctgcagtgagccgtgatcatgccactgcatccagcctgggtgacacagttgagaccttttctcaaaagaaaacagagattagcacaaagaatgtgcatcatggttcaacgagaataggggtcgtgggaaatgaggtaaattcagttcaaacccgtgggtcgtgccaattttattagcttgaaatagcctggccttggtgtagtcacttaacttcgggagttctttattccttatttttaaaaccaggggttagggtacctaaggaaaggcatggggagaatttagcacgcacagtctgcgtaaaggcatttggcagg

SEQ ID NO: 520868 - DNA, 247 bp, Homo sapiens
ccccttttcccccccccggggtttttttaattaaggggttttaatcccttttttggtcccccggtggaggtgggaaccccattttgttttttaaagttttccccgggtttttttttttttggggttttttttttgggccccgaatttttttttttgtcctgggaaagttaaagggggaaatttaaacccttccggtttgttttggtatggccgggattttttcaaaaaatttaaaaatggggtggga

SEQ ID NO: 520869 - DNA, 733 bp, Homo sapiens
  misc_feature (19)..(19): n is a, c, g, or t
  misc_feature (64)..(64): n is a, c, g, or t
  misc_feature (212)..(212): n is a, c, g, or t
  misc_feature (214)..(214): n is a, c, g, or t
  misc_feature (258)..(258): n is a, c, g, or t
  misc_feature (285)..(285): n is a, c, g, or t
  misc_feature (302)..(302): n is a, c, g, or t
  misc_feature (304)..(304): n is a, c, g, or t
  misc_feature (310)..(310): n is a, c, g, or t
  misc_feature (317)..(317): n is a, c, g, or t
  misc_feature (474)..(474): n is a, c, g, or t
  misc_feature (496)..(496): n is a, c, g, or t
  misc_feature (602)..(602): n is a, c, g, or t
  misc_feature (611)..(611): n is a, c, g, or t
  misc_feature (613)..(613): n is a, c, g, or t
  misc_feature (615)..(616): n is a, c, g, or t
  misc_feature (618)..(618): n is a, c, g, or t
  misc_feature (621)..(621): n is a, c, g, or t
  misc_feature (623)..(624): n is a, c, g, or t
ggggattgctgcaggctcngactcccgtcctgcgatgggttgcgacgggggaacaaaccccaanaggcatgaactggagaaggggccgaagaaggttgagaaggtcgacaaagatgccgaattagtggcccaatggaacaattgtactcaaagtcaggaaaaaaaaagacgaccaaaagttgcctgtgaacttggcagactataaaacaaanangccgtcaaagaatttcccctggacaaacctgcagaaaaggcccntgggaaggcagcatctcacaaaaaaancaaaaagaatgtgacananccgaanccttccnaaaaaccagcccgggaaggggaaaaaggaaacacaaaaggcgacaagcacgacgacccccagcgggcgcgtttcaaccgccccgttgtgggcctggagatgaacggccgacacaggttccgcctccttcggtgcagcggctgagtgtattcagaacnagccttgaaagagaaaaaagcngaagtttgccacacgtgtggggcagccttccaggaggatgaagtcatcgtgactcaaagagcaccaaggaggatgtggacgtgctgaagacaaggatggaggaganaaggctganancnnanttntnnaagaaaacaaagaaacccaaggcagcagagtctgtttcaaaaccagatgtcagtgaagaagccccagggccatcaaaagttaagacagggaagcctgaagaagccagcc

SEQ ID NO: 520870 - DNA, 347 bp, Homo sapiens
tcagtagcgagcacggtcggaaaggcttggattctagtcgatgcagggttagcggatggtcagtctggccaaatgtctcgcccctgcactgttgtgcgcatgaacaaagcccagctcgacaactattacgccatccacattgccaagcattgcccgacggcgacgatctttatcctgtgcgtcaacggtctgagccataacgaagccgaagatgcccggcaccgatgtgctgctgcatgccatgctggctcggtgacagagcgcgggatggcgctttgcccgacccgtcagtagggtcgaatcgttgcaacttgttgcggtagcattgcgcttgctccgcttactga

SEQ ID NO: 520871 - DNA, 1015 bp, Homo sapiens
gtgctgctgccgccaggcgcccggcgccgaggccgcgcccgtcgcccgccgccgagccgccgcccgccctggacgtggcctcggcctccagcgcgcagctcttccgcctccgccacctgcagctgggcctggagctgcggcccgaggcgcgcgagttggccggctgcctggtgctcgagctgtgcgcgctgcggcccgcgccccgcgcgctcgtgctcgagcgcacccggctctgcgcctgcactcagccgccttccgtcgcgcccccgcgcgcgacgagaacgccctagcgccttacgccttactcccgcaccccgggccggggcccagcgccgaccgacaccccagctagcaccgaactatacagccgaatggcgccctggagtaccgaagacaaactgaccttgacttgtaccgacttagggcctataccagtggattaggaaaacgcggtattcgaccaggaatcactgtgctcactaccggaataacgagcccgatacaaccgccataagaacatgggcacacagcaggcactagccatgagcggcgcgcgacgccgaaggacaccacatgatccaccaacgggtacaattacacgataggacaggggataaagaacacgcattctgggaaagccatgagagggcgccaccccacggacacaaatacttggggggtaggagcattggggaagagcgccaaggaaagagcataaggaaccgatagataggggattagaggtaacacaagagagggctattcggaggacgtaaaaaaagcgccgaggggggagaacgaacataataggaataggttaggaagaaagtaggagatagacacgtatatagtataagcgcacggatacgacctattacagaaaacaaataaagacgatggagacgggatgagaaaacagggcaggcaaagccgcataagacttagcttgggagcgcgggagtaggatagaagaaaggggagatgaggcaaaaagaacggtggagatgaagtatga

SEQ ID NO: 520872 - DNA, 535 bp, Homo sapiens
tatgcaaagtgtcagaaggctaaagacaaaataatacgacgagtaacaaatgctggagaaagatgtcgagaaacggatcctcatatattcattacagctacagcaagaagtagtttaacattttatttcagaaaactaaacatgcaactaccagtgtgacccagcaaatgcattcctggatatttatcccagaggaataaaaacacagccacatgaaagccttcacctgagtatttatagcaactttattcataatggctccagaatgaaaacaaccaagatgtccttcaatgggtaaatggttaaacaaattgtgggatatccaaaccatggaatactatttatcagtaaaaagaaataaactattaacccacacaatagactctccgcatgaatctcaggagaattatgctgagttttttttaaaagccaattccaaaaggtgacatactataattccgtttatataagattcttcaaatgccagaattatagaaatggagaacagattagtggctatcaagggttaaggaga

SEQ ID NO: 520873 - DNA, 344 bp, Homo sapiens
ttgtgcacagctgtctgcttcatagcctaatgtcagggaagcccaacccagagggacacatgtctcgtgtgtgccccactgttcattgcctgtgaaccagggcatagtcctcagtttctcccaataaattctacagaccctgtactctcattgagacttaaagcactcctcaatatgaattcttggattacacagttcaaggagaaaaaagtgttaagacctgtccaaatagatccttgcttttataagttaagtttgttcccttcctctcttgtataggtgaggaacacaagatccgagcgttagggggcctaggagagtcttccatagctagtggcgtgctg

SEQ ID NO: 520874 - DNA, 301 bp, Homo sapiens
tacattcaggcgtaggtagcaagtagcaggttaaggcagggtgcatggtggctatgatgggggggcatgatgaggctattgttttttgtgaattcttcgatacatggccccatttgggcaaaaagcctggttagcgggggcaggcctcctcagggagaggagggtggatggaattaagggtgttcgtcatgttagcttgtttccggtgcgagatagtagtagggtcgtggtgctttacgtataagttgagctacgtaggacctgcggtacgtagttaggatacatataacatagttaacac

SEQ ID NO: 520875 - DNA, 390 bp, Homo sapiens
ctaagctctgaaaagggggtggtgcgggtgctgggctgccctcataaggtgctcccagacaggagtgcagtgggcctggaatgtaggaataggcagagaggcccagctgggcaggagagcagtacaggatagcgtctgccctctgctgggcttggagtcggctgtgggcggctccatcctcagacccacgggcctctgctttgtggactctctgttgctccctggtgagcagcgccacagcggggcaacctaggcacttagtagcgtgtctgggaagctgggctccgtgaagccccgttgcagggaggcaggccccgggagcacataatcccccataaaactgaggccgagcctgtgtcctaagattgatcccggagaggccaggggact

SEQ ID NO: 520876 - DNA, 353 bp, Homo sapiens
  misc_feature (53)..(53): n is a, c, g, or t
  misc_feature (89)..(89): n is a, c, g, or t
  misc_feature (128)..(128): n is a, c, g, or t
  misc_feature (132)..(132): n is a, c, g, or t
  misc_feature (146)..(146): n is a, c, g, or t
  misc_feature (191)..(191): n is a, c, g, or t
  misc_feature (210)..(210): n is a, c, g, or t
  misc_feature (213)..(213): n is a, c, g, or t
  misc_feature (339)..(339): n is a, c, g, or t
ctggttctcctcttgtgctcttccattttccaaggttgttccaacttggtggngggggggtatgtgggtatttcaacagcccctctgtntctctttctacccaacattaacttagcaggttggttttnaganccggcagcttagcntggggtattgctgtgttctgtgggtgccgggcaggttcttaattnagtgcacaggggtcttganttncggggttcttctgttcttctcggaacatggttgtccttccagggttgtgcatctggccttgctgtttaagttccatcaggggcgccttccgttctagagtatctgctttccacggcatcagggccngctttccggccttc

SEQ ID NO: 520877 - DNA, 394 bp, Homo sapiens
  misc_feature (193)..(193): n is a, c, g, or t
  misc_feature (196)..(196): n is a, c, g, or t
  misc_feature (382)..(382): n is a, c, g, or t
cgtgtgtggatttgagaccgagctcaatgtccagtttgtcagccacatgtcactccacgtggacaaggagcagtggatgttttcgatctgctgcactgcctgcgacttcgtcaccatggaggaagcagagataaagactcacattggcaccacacacaggggaagacaggaagacccccagcgaatcaaatanccnctcttcatcctccctctcagctctgagtgattcagccaacagcaaagatgattcagatggctcccagaaaaacaagggcgggaacaatctgctggtcatctctgtcatgcctgggagccagccctcactggaacagtgagggaaaagccagagaaagggttcgaatgtgtttttttggcaactttntctggcaagacg

SEQ ID NO: 520878 - DNA, 85 bp, Homo sapiens
  misc_feature (26)..(26): n is a, c, g, or t
  misc_feature (59)..(59): n is a, c, g, or t
aaaactttaaggtgttggtgtatttnccagctttatttgctgtactttatttgtatttnccattcagttctagcttttaagtata

SEQ ID NO: 520879 - DNA, 135 bp, Homo sapiens
atctcggcacctagctctacgaggtccatgcatacttcatattatacttaaattcaatacgggctgtccgatcaatagcgagctattcatcgtgcaccgggtcatagtattgtgcgtgtgttgaattcaactacg

SEQ ID NO: 520880 - DNA, 312 bp, Homo sapiens
  misc_feature (13)..(13): n is a, c, g, or t
  misc_feature (66)..(66): n is a, c, g, or t
  misc_feature (180)..(180): n is a, c, g, or t
  misc_feature (278)..(278): n is a, c, g, or t
  misc_feature (282)..(282): n is a, c, g, or t
  misc_feature (287)..(287): n is a, c, g, or t
ttggacctctctnaggatttcgttggaaacgggataaacttcccagaactacacggaagcattctnagaaacttctttgtgatgtttgcattcaactcacagagttgaaccttgctttcatagttcagctttcaaacactctttttgtagaatctgcaagtggatatttggaccactttntgccttccttcgaaacgcgtatatcttcacatcaaacctagacagaagcattctcagaatgtttcctgtgatgactgcattcaactcacagagggtgnacantcctnctgatggagcagttttgaaactcct

SEQ ID NO: 520881 - DNA, 1385 bp, Homo sapiens
gagcttatatgtctcgatcgttagggtcaattcatgacatcaagatctctgacttcatggagaccaccgactacttcgagaccactgacaatgagataactgacatcaatgagaacatctgcgacagcgagaatcctgaccacaatgaggtccccaacaacgagaccactgataacaacgagagtgctgatgaccacgaaaccactgacaacaatgagagtgcagatgacaacaacgagaatcctgaagacaataacaagaacactgatgacaacgaagagaaccctaacaacaacgagaacacttacggcaacaacttcttcaaaggtggcttctggggcagccatggcaacaaccaggacagcagcgacagtgacaatgaagcagatgaggccagtgatgatgaagataatgatggcaacgaaggtgacaatgagggcagtgatgatgatggcaatgaaggtgacaatgaaggcagcgatgatgacgacagagacattgagtactatgagaaagttattgaagactttgacaaggatcaggctgactacgaggacgtgatagagatcatctcagacgaatcagtggaagaagagggcattgaggaaggcatccagcaagatgaggacatctatgaggaaggaaactatgaggaggaaggaagtgaagatgtctgggaagaaggggaagattcggacgactctgacctagaggatgtgcttcaggtcccaaacggttgggccaatccggggaagagggggaaaaccggataagggttttccccttttggggatcacctctctgtatcccccacccactatcccatttgccctcctcctcagctagggccacgcggccccacattgcacttctggggggtgaccgacttcgtacacgggtttaaagtttatttttatggtttagtcattgcagagttcttattttggggggagggaaagggggctagtccccttcttttggccctccgcccccgcaggcttctgtgtgctgctaactgtatttattgtgatgccttggtcagggcccctctacccacttctcccagtcagttgtggccccagcccctctccctgtgctgtgtggagtggacaccctgacccccgaagcggggagggccgctgtggccttcgtcacagccgcgcagtgcccatggaggcgctgctgccaccttcctctcccaagttctttctccatccctctcctcttcccgccgcgccgctagcccgcctcggtgtctatgcaaggccgcttcgccattgcggtattctttgcggtattcttgtccccgtcccccagaaggctcgcctctccccgtggaccctgttaatcccaataaaattctgagcaagttcaaaaaacacaaa

SEQ ID NO: 520882 - DNA, 1371 bp, Homo sapiens
atagaatcgagctggctaccgtacattcgtgtccctctgacttctggagacaccgactacttcgagaccactgacaatgagataactgacatcaatgagaacatctgcgacagcgagaatcctgaccacaatgaggtccccaacaacgagaccactgataacaacgagagtgctgatgaccacgaaaccactgacaacaatgagagtgcagatgacaacaacgagaatcctgaagacaataacaagaacactgatgacaacgaagagaaccctaacaacaacgagaacacttacggcaacaacttcttcaaaggtggcttctggggcagccatggcaacaaccaggacagcagcgacagtgacaatgaagcagatgaggccagtgatgatgaagataatgatggcaacgaaggtgacaatgagggcagtgatgatgatggcaatgaaggtgacaatgaaggcagcgatgatgacgacagagacattgagtactatgagaaagttattgaagactttgacaaggatcaggctgactacgaggacgtgatagagatcatctcagacgaatcagtggaagaagagggcattgaggaaggcatccagcaagatgaggacatctatgaggaaggaaactatgaggaggaaggaagtgaagatgtctgggaagaaggggaagattcggacgactctgacctagaggatgtgcttcaggtcccaaacggttgggccaatccggggaagagggggaaaaccggataagggttttccccttttggggatcacctctctgtatcccccacccactatcccatttgccctcctcctcagctagggccacgcggccccacattgcacttctggggggtgaccgacttcgtacacgggtttaaagtttatttttatggtttagtcattgcagagttcttattttggggggagggaaagggggctagtccccttcttttggccctccgcccccgcaggcttctgtgtgctgctaactgtatttattgtgatgccttggtcagggcccctctacccacttctcccagtcagttgtggccccagcccctctccctgtgctgtgtggagtggacaccctgacccccgaagcggggagggccgctgtggccttcgtcacagccgcgcagtgcccatggaggcgctgctgccaccttcctctcccaagttctttctccatccctctcctcttcccgccgcgccgctagcccgcctcggtgtctatgcaaggccgcttcgccattgcggtattctttgcggtattcttgtccccgtcccccagaaggctcgcctctccccgtggaccctgttaatcccaataaaattctgagcaagttcaaaaaacacaaa

SEQ ID NO: 520883 - DNA, 334 bp, Homo sapiens
ttgactctataggatcccctgccatttactccatggctggcaacaagagtgaaactccatctccaaaaaaaaagaaaagaaaaaagaaaaaaagaagaatgtagaataaagaaagaaatgaaggaaagaagcaagcaagcaagagagagagcaaaaaaaaaaaaaaaaagggaggattgaaaaagaaattaaaaggggggcggaacttgggggttaaaacttttaatccaaacttttggggaaattgaaatggaaaaattatttgagcacaggagtttgaccccagccttggaaacatagggaggctttgtttttattacaaaaaataaaaatt

SEQ ID NO: 520884 - DNA, 1353 bp, Homo sapiens
cgtccggaatcgtcgtcttggtgaaggaagttttcaaccgcctgctgggcaccagcatggtgagggaaactcagccttgtccccgctgaaccctggagagctcctgaccacaatgaggtccccaacaacgagaccactgataacaacgagagtgctgatgaccacgaaaccactgacaacaatgagagtgcagatgacaacaacgagaatcctgaagacaataacaagaacactgatgacaacgaagagaaccctaacaacaacgagaacacttacggcaacaacttcttcaaaggtggcttctggggcagccatggcaacaaccaggacagcagcgacagtgacaatgaagcagatgaggccagtgatgatgaagataatgatggcaacgaaggtgacaatgagggcagtgatgatgatggcaatgaaggtgacaatgaaggcagcgatgatgacgacagagacattgagtactatgagaaagttattgaagactttgacaaggatcaggctgactacgaggacgtgatagagatcatctcagacgaatcagtggaagaagagggcattgaggaaggcatccagcaagatgaggacatctatgaggaaggaaactatgaggaggaaggaagtgaagatgtctgggaagaaggggaagattcggacgactctgacctagaggatgtgcttcaggtcccaaacggttgggccaatccggggaagagggggaaaaccggataagggttttccccttttggggatcacctctctgtatcccccacccactatcccatttgccctcctcctcagctagggccacgcggccccacattgcacttctggggggtgaccgacttcgtacacgggtttaaagtttatttttatggtttagtcattgcagagttcttattttggggggagggaaagggggctagtccccttcttttggccctccgcccccgcaggcttctgtgtgctgctaactgtatttattgtgatgccttggtcagggcccctctacccacttctcccagtcagttgtggccccagcccctctccctgtgctgtgtggagtggacaccctgacccccgaagcggggagggccgctgtggccttcgtcacagccgcgcagtgcccatggaggcgctgctgccaccttcctctcccaagttctttctccatccctctcctcttcccgccgcgccgctagcccgcctcggtgtctatgcaaggccgcttcgccattgcggtattctttgcggtattcttgtccccgtcccccagaaggctcgcctctccccgtggaccctgttaatcccaataaaattctgagcaagttcaaaaaacacaaa

SEQ ID NO: 520885 - DNA, 2031 bp, Homo sapiens
gggagtagagcgggcgctgtgggagggaacgccagagcgaggtggtgaggagagctggttgcgtgagtctcctcagctctgcttaccggtgcgactagcggcagcgacgcggctaaaagcgaaggggcgagtgcgagtcccctgagctgtacgaacgcggtcgccatggaccgcccagatgaggggcctccggccaagacccgccgcctgagcagctccgagtctccacagcgcgacccgcccccgccgccgccgccgccgccgctcctccgactgccgctgcctccaccccagcagcgcccgaggctccaggaggaaacggaggcggcacaggtgctggccgatatgaggggggtgggactgggccccgcgctgcccccgccgcctccctatgtcattctcgaggagggggggatccgcgcatacttcacgctcggtgctgagtgtcccggctgggattctaccatcgagtcggggtatggggaggcgcccccgcccacggagagcctggaagcactccccactcctgaggcctcgggggggagcctggaaatcgattttcaggttgtacagtcgagcagttttggtggagagggggccctagaaacctgtagcgcagtggggtgggcgccccagaggttagttgacccgaagagcaaggaagaggcgatcatcatagtggaggatgaggatgaggatgagcgggagagtatgaggagcagcaggaggcggcggcggcggcggaggaggaagcagaggaaggtgaagagggaaagcagagagagaaatgccgagaggatggagagcatcctgcaggcactggaggatattcagctggatctggaggcagtgaacatcaaggcaggcaaagccttcctgcgtctcaagcgcaagttcatccagatgcgaagacccttcctggagcgcagagacctcatcatccagcatatcccaggcttctgggtcaaagcattcctcaaccaccccagaatttcaattttgatcaaccgacgtgatgaagacattttccgctacttgaccaatctgcaggtacaggatctcagacatatctccatgggctacaaaatgaagctgtacttccagactaacccctacttcacaaacatggtgattgtcaaggagttccagcgcaaccgctcaggccggctggtgtctcactcaaccccaatccgctggcaccggggccaggaaccccaggcccgtcgtcacgggaaccaggatgcgagccacagctttttcagctggttctcaaaccatagcctcccagaggctgacaggattgctgagattatcaagaatgatctgtgggttaaccctctacgctactacctgagagaaaggggctccaggataaagagaaagaagcaagaaatgaagaaacgtaaaaccaggggcagatgtgaggtggtgatcatggaagacgcccctgactattatgcagtggaagacattttcagcgagatctcagacattgatgagacaattcatgacatcaagatctctgacttcatggagaccaccgactacttcgagaccactgacaatgagataactgacatcaatgagaacatctgcgacagcgagaatcctgaccacaatgaggtccccaacaacgagaccactgataacaacgagagtgctgatgaccacgaaaccactgacaacaatgagagtgcagatgacaacaacgagaatcctgaagacaataacaagaacactgatgacaacgaagagaaccctaacaacaacgagaacacttacggcaacaacttcttcaaaggtggcttctggggcagccatggcaacaaccaggacagcagcgacagtgacaatgaagcagatgaggccagtgatgatgaagataatgatggcaacgaaggtgacaatgagggcagtgatgatgatggcaatgaaggtgacaatgaaggcagcgatgatgacgacagagacattgagtactatgagaaagttattgaagacttgacaggatcagcttctcgggggaccgcc

SEQ ID NO: 520886 - DNA, 548 bp, Homo sapiens
  misc_feature (488)..(488): n is a, c, g, or t
  misc_feature (546)..(546): n is a, c, g, or t
agtaataatgagttgttttacttcagaatagataactggaacagaatatggcagctggaaatgagctgctgtggtaatcagaagctacaatatgtgacacgactgtgaggctgacctgtaactgggcctcaaggagaccattcatgcaacctggaagggcatcaagactcttggtcagggcctgaaggacggtgagaaaatgtcattggaaactggagaaaaggtctgagagttacttgctgagggactgtgggaaaactatggccacaacatggaaactgaaagggcactgcaccatctcagggatctgcctaaggagacatctgggaagaacatggaaagtgctaccagcctcccctaactgtcactgaataaatatgacaggagagggacatgatctaaagaagaaggttcagttttcaaacagaatttagagaaaatataaagaaataatttcttgtctcaaaaggccaaagtaaaaaaaaagnaaagaaaacaaaagaaaaatgaaaaagaccactctatgccataagaaagcaggagtcngt

SEQ ID NO: 520887 - DNA, 1023 bp, Homo sapiens
tcagttttgacagaggcaggtatcccacactgccttcctgcctccctccatctccctctcattctgtgggcttgcttgagtacacccacacacactcttggctgtttgttccaagcagaggcgctgacaagttgtcccaggccgctaaaaaccctggctatggtctctgttcccttttagagtgacacctatctgctcatctaactgccttcctccatttccccttccttgcttctcccctatgcaggcatccagcaagatgaggacatctatgaggaaggaaactatgaggaggaaggaagtgaagatgtctgggaagaaggggaagattcggacgactctgacctagaggatgtgcttcaggtcccaaacggttgggccaatccggggaagagggggaaaaccggataagggttttccccttttggggatcacctctctgtatcccccacccactatcccatttgccctcctcctcagctagggccacgcggccccacattgcacttctggggggtgaccgacttcgtacacgggtttaaagtttatttttatggtttagtcattgcagagttcttattttggggggagggaaagggggctagtccccttcttttggccctccgcccccgcaggcttctgtgtgctgctaactgtatttattgtgatgccttggtcagggcccctctacccacttctcccagtcagttgtggccccagcccctctccctgtgctgtgtggagtggacaccctgacccccgaagcggggagggccgctgtggccttcgtcacagccgcgcagtgcccatggaggcgctgctgccaccttcctctcccaagttctttctccatccctctcctcttcccgccgcgccgctagcccgcctcggtgtctatgcaaggccgcttcgccattgcggtattctttgcggtattcttgtccccgtcccccagaaggctcgcctctccccgtggaccctgttaatcccaataaaattctgagcaagttcaaaaaacacaaa

SEQ ID NO: 520888 - DNA, 362 bp, Homo sapiens
gtagccagatgctgtggcttatacctgtatttccatcactttggaaggccgaggcgggtggagcacccaaggtcaggagcttgagaccagcctggcaaacgtggcaaaaccccatctctacaaaatacaaaaattagctgagcatggtggcaggtgcctgtagtcccagctactccggaggctgaggcaggagaattgcttgaacccaggaggtggaggttgcagtgagttgagattgtcccactgcactccagcctgtgtgacagagtgagactgtctcaaaaacaaaacaaaacaaatgaatgtaaacatttagtgaagtgactggtagctagtgagggttcattaagcgcttatatgac

SEQ ID NO: 520889 - DNA, 1709 bp, Homo sapiens
  misc_feature (1677)..(1677): n is a, c, g, or t
  misc_feature (1684)..(1684): n is a, c, g, or t
  misc_feature (1694)..(1694): n is a, c, g, or t
gggagtagagcgggcgctgtgggagggaacgccagagcgaggtggtgaggagagctggttgcgtgagtctcctcagctctgcttaccggtgcgactagcggcagcgacgcggctaaaagcgaaggggcgagtgcgagtcccctgagctgtacgaacgcggtcgccatggaccgcccagatgaggggcctccggccaagacccgccgcctgagcagctccgagtctccacagcgcgacccgcccccgccgccgccgccgccgccgctcctccgactgccgctgcctccaccccagcagcgcccgaggctccaggaggaaacggaggcggcacaggtgctggccgatatgaggggggtgggactgggccccgcgctgcccccgccgcctccctatgtcattctcgaggagggggggatccgcgcatacttcacgctcggtgctgagtgtcccggctgggattctaccatcgagtcggggtatggggaggcgcccccgcccacggagagcctggaagcactccccactcctgaggcctcgggggggagcctggaaatcgattttcaggttgtacagtcgagcagttttggtggagagggggccctagaaacctgtagcgcagtggggtgggcgccccagaggttagttgacccgaagagcaaggaagaggcgatcatcatagtggaggatgaggatgaggatgagcgggagagtatgaggagcagcaggaggcggcggcggcggcggaggaggaagcagaggaaggtgaagagggaaagcagagagagaaatgccgagaggatggagagcatcctgcaggcactggaggatattcagctggatctggaggcagtgaacatcaaggcaggcaaagccttcctgcgtctcaagcgcaagttcatccagatgcgaagacccttcctggagcgcagagacctcatcatccagcatatcccaggcttctgggtcaaagcattcctcaaccaccccagaatttcaattttgatcaaccgacgtgatgaagacattttccgctacttgaccaatctgcaggtacaggatctcagacatatctccatgggctacaaaatgaagctgtacttccagactaacccctacttcacaaacatggtgattgtcaaggagttccagcgcaaccgctcaggccggctggtgtctcactcaaccccaatccgctggcaccggggccaggaaccccaggcccgtcgtcacgggaaccaggatgcgagccacagctttttcagctggttctcaaaccatagcctcccagaggctgacaggattgctgagattatcaagaatgatctgtgggttaaccctctacgctactacctgagagaaaggggctccaggataaagagaaagaagcaagaaatgaagaaacgtaaaaccaggggcagatgtgaggtggtgatcatggaagacgcccctgactattatgcagtggaagacattttcagcgagatctcagacattgatgagacaattcatgacatcaagatctctgacttcatggagaccaccgactacttcgagaccactgacaatgagataactgacatcaatgagaacatctgcgacagcgagaatcctgaccacaatgaggtccccaacaacgagaccactgataacaacgagagtgctgatgaccacccaggnattcttnatcacctccnattcttccgtccctg

SEQ ID NO: 520890 - DNA, 225 bp, Homo sapiens
ccgaggatccccatcgaccctgaatttattatgcaggtcaaatactagtcgctaaatagtttaaggttgtaaactagcttttttctgttttaggagatggagtctggccctatcgccagactggagtgcagtagtgcgatcttggcaacagggtgagactctgtctcaaaaaaataaaataaaataaaataacaccaaagaaaaaaacaattaaaatcttagggc

SEQ ID NO: 520891 - DNA, 1563 bp, Homo sapiens
gggagtagagcgggcgctgtgggagggaacgccagagcgaggtggtgaggagagctggttgcgtgagtctcctcagctctgcttaccggtgcgactagcggcagcgacgcggctaaaagcgaaggggcgagtgcgagtcccctgagctgtacgaacgcggtcgccatggaccgcccagatgaggggcctccggccaagacccgccgcctgagcagctccgagtctccacagcgcgacccgcccccgccgccgccgccgccgccgctcctccgactgccgctgcctccaccccagcagcgcccgaggctccaggaggaaacggaggcggcacaggtgctggccgatatgaggggggtgggactgggccccgcgctgcccccgccgcctccctatgtcattctcgaggagggggggatccgcgcatacttcacgctcggtgctgagtgtcccggctgggattctaccatcgagtcggggtatggggaggcgcccccgcccacggagagcctggaagcactccccactcctgaggcctcgggggggagcctggaaatcgattttcaggttgtacagtcgagcagttttggtggagagggggccctagaaacctgtagcgcagtggggtgggcgccccagaggttagttgacccgaagagcaaggaagaggcgatcatcatagtggaggatgaggatgaggatgagcgggagagtatgaggagcagcaggaggcggcggcggcggcggaggaggaagcagaggaaggtgaagagggaaagcagagagagaaatgccgagaggatggagagcatcctgcaggcactggaggatattcagctggatctggaggcagtgaacatcaaggcaggcaaagccttcctgcgtctcaagcgcaagttcatccagatgcgaagacccttcctggagcgcagagacctcatcatccagcatatcccaggcttctgggtcaaagcattcctcaaccaccccagaatttcaattttgatcaaccgacgtgatgaagacattttccgctacttgaccaatctgcaggtacaggatctcagacatatctccatgggctacaaaatgaagctgtacttccagactaacccctacttcacaaacatggtgattgtcaaggagttccagcgcaaccgctcaggccggctggtgtctcactcaaccccaatccgctggcaccggggccaggaaccccaggcccgtcgtcacgggaaccaggatgcgagccacagctttttcagctggttctcaaaccatagcctcccagaggctgacaggattgctgagattatcaagaatgatctgtgggttaaccctctacgctactacctgagagaaaggggctccaggataaagagaaagaagcaagaaatgaagaaacgtaaaaccaggggcagatgtgaggtggtgatcatggaagacgcccctgactattatgcagtggaagacattttcagcgagatctcagacattgatgagacaattcatgacatcaagatctctgacttcatggagaccactgacaatgagataactgacatc

SEQ ID NO: 520892 - DNA, 117 bp, Homo sapiens
cgtaatatctatgaggatgcgggttggatcctgtgcctcactcagtgggttaaggatctggtgttgccgcaagctgcgtcgtaagtcacagatgcggcttggagaccgatcttaccg

SEQ ID NO: 520893 - DNA, 302 bp, Homo sapiens
caaaaaaaaaaaaaacccaaacccccccaaaaaaatagggcaagtgaaccccaaaaagatgttttgggggtttttttaaaaagaagtcttgttagcttttttgttcctggaacaaagctgttttcgaacgggcccaaaaaacatgggggctacccaccagacccccatgggactttccaactgaaaaaaaaatttgtcccaaaaactttgttgtcatagttaagttgattgtaaaggggaattgaaaaaacccctttgaaaatatttcctcaaggatgtttcctgccccttgtgatccctta

SEQ ID NO: 520894 - DNA, 739 bp, Homo sapiens
gtggcccacaaattcctgtgacgggtttctttctggatactggacatgctagtcaactttgggagaggagaatttaaaggatgtctccccgtgagattgttggacacagtgccccaatgaagggccgtccaatccaattggccagaaccttaggatagtaatgggtaacatctccaggcccattaatgtgttttccaaggcgcctattcccccacaggccattgttggtaggttccctgctaagctgtaatgccgtgaagaagatggtggggcctttttagtaattggaactgtgaccattaatttacccagaattgagacccgggatgtctggatgctgacccagggagagccccagtactgttttatgccctccatcctttaggaaggaattgcgtggtttttctgaacatgtgggggaaagggtggtttcttgctggatttcactggcccctaagtaaatttaaatgcctcactttttaaatttggatgtttctgctagagacccttgaatttggaaaattagttaattttgcactgtttgtccacccgtataatgtatgagaaatagaaaaaaaacaccgctttttgtaaaaacccctaagatttgtatatgttcatctttaggctttttgaaagggagagaaatcatattggaaatccgtgttggtgttttgaaatctgcttgtaaaactctcatctccttttaccttgatattataaaccttttaaccgtgga

SEQ ID NO: 520895 - DNA, 1609 bp, Homo sapiens
  misc_feature (319)..(319): n is a, c, g, or t
atttgtggttttattgtttgacgacgtacagacccaactgtgttgtgatctttccgcttggtttgaatgaaccccactacaggcggcgctcgttggttgaactcttctttgggtacgaccatgcctgatctacgatccactgatgggggggggagatttgttttgttggttgggtgtgttttttgcgttgtgtgtcgtccaccatccagttatgtctctgtgttgttctgcatgatttggtctgcctccttctgttgtttgtttctttttttttgcgtgcgactaccagcaccacaccccccgctctgtcggggggggnggtttttttcttcgtggggaggcggggaaaattttggtgtgtccacacactgcgaccctacccgtatggagcggatgtttttgtgcgcccttcttttatacccccccacagggggggcgccctttgtatcaagcggtggtgtactcctttgtgctctcctcgtgtgtgaggccccccacctccttttgttggggtgtggcggccccccttttttggagacacgtctgttgccgcagctgttcttctctgtgttccccctacagtggtagggggagtttgtcccccaccgtctttggtgacaccagaggccttttgttgttgtctctcccggcgtgggtccccaccacgctattatataacctctctgggggcacctcgcaggcgtcttgtgttgtctgctctcgctcttcgagagattgatatagggtgtctgtcatcacagcaccctctctctttttctgtgtggtcacactctctctatgtgcctcctgctcatccgcggccagctctgttcagttattgtttctcacatcttgtggacacacacacgacacacatctcttcacgcgctctctcgctgcgagaaatctcttgtgtagagagacacaccacgctcgcgcagtgttcacacctcgagagccacgcgagactctctcttgagataaccctctcgcgagcaccacgctggggtgtgctcacacacacacgggggtatacacgcctctcgcgcacacgtggtagacacacacgcccctcgctcacacacacgcgctcgcacctcgcgccgcggataacacacacgcgcctcgccacacacacgcgcgcgcgcctcgcgcaccgctgataacacacaccgccctctccgcatacacctctgtgtctctttggccacacacacacacaggtgttcacacgtgtcgcacgcgctctcaacaggagaaaggctcctctataaaagagagcgtcccctcttttctcgtgggctccacaggagctctcacagagaactcctctctgtgggtctcacatggtccacacacatcccgggaacccacaccacggagggcccaggccggcgagagccccgtggagatgagagccctcacggaacccctgggttgcccacacagcgggagaaaagggaataagagaggttgggtttccccccctttatagagatggggccacaccccctgggggttaccaagattgttataggggccatgaataacatttcttgtaattaggattggaatttaatagccacgaattagagtttattttcaaaat

SEQ ID NO: 520896 - DNA, 127 bp, Homo sapiens
acagcaccacatcacatggaagcagctgtggcctctgctcctgcgctcacacggtatctactgcaaccaagtgatctgacggcaggtgggcttccatgattctgctgccccacttgtcagaaattca

SEQ ID NO: 520897 - DNA, 119 bp, Homo sapiens
cttccgccatcgatgcattccagacccccgatgtcttagttcgcaagtcatcctagcagccttctccaaagccacatgtacagacttggttatgtttatctaatgttaggtctacctgg

SEQ ID NO: 520898 - DNA, 481 bp, Homo sapiens
  misc_feature (32)..(32): n is a, c, g, or t
  misc_feature (442)..(442): n is a, c, g, or t
tcccctatcctaaacccagccccaaactatanttactttattaccagacaaccataacaaacccggtggacctagtgaaagttttaaaaatcccaactcacacctcccgcaacaccaatagtatcgaaagccaaagcatataacattatacccaagcacaatatatcaaggcccaacccctataccttcagcataatgcaaaaactcgaaataactcccccacgcatagccaaacccaaaaccctccaaacccagactactctccctaccatacagctcaacgagcacaccctgtctatcaagcaaaacactcgataacacttactaacttgaggttaaaaaagtataaaatagtagtaaaaaaagaaaatacccaatccccactttctccgctacaactcccccccctccctctaaaaaaccactccccccagttgtattngtaattatagaaatataggtaatactttacattctccca

SEQ ID NO: 520899 - DNA, 513 bp, Homo sapiens
atgcgctcttactgacagatttggtcataggtcaggggtgacacattgtcaacagatgtgcaccagaggaccagggcataatttgctctactagaatgcatcaggacatcaacaggtataggccagtgaggcacgattcgatgagtatacttctgctgactgctatggtctcagatatattgagaacaatgggcatatctggtctacgcctgatcttctgtgatgatatgagccatcacgcccagtcaattcctcagatgctgtgatgtaacaacatgttcagagcgacctccatacttagtccaaacgtgatgtaggatgtgtgatcctacaccgaatctcgtatggaatatgtcctctcgcaatgtaaggggagggggctggtgggagatgataggagaataggggctgatatctcataagtggttaagcagcatcccccttgcaactgtcctcatgacagtgagttctcatcacggtcatttaaaagtatgtagcaccttcccactctct

SEQ ID NO: 520900 - DNA, 289 bp, Homo sapiens
  misc_feature (79)..(79): n is a, c, g, or t
  misc_feature (275)..(275): n is a, c, g, or t
ctgtaacttgcggctgaatgcgtccaagccatgagttgtcccccaagctcgtgagttgtccccagctcaattctgcctnttttggagagtgacgtcccacacacctgtgcaaccttgcatgccaaaaggactttgcagacatgactgaggaccttgcatgcgggaggtgatccccacgacacctgtggacccagtgtcatcagggtccttgtaagtgaaagaggcaagaggaccccagaagaggaggtgtgatgacagaagtggaggtcggagtnacatggagacggga

SEQ ID NO: 520901 - DNA, 377 bp, Homo sapiens
  misc_feature (244)..(244): n is a, c, g, or t
ccattgtgatagtgtgaaagtatgtagtagtttgatttgcatctctctaataattaagtgatggtgaacctcttttcatgtacttgctgggccatctttatgttcctccttgggggatatgtttattccagtcctttgccaatttttaaattgggttttgtcattgttgattgatcgatttttggagacagatttcggtccttgttgccaggagtgccatggcatgatctcggctcactgcaanctctgcctccctggttcaagggattctcctgcctcagaatcccaagtagctgggaatataggcatgcaccaccataccaggctaatttttgtattattagtagagacaggtttcaccacaatggcacgtggat

SEQ ID NO: 520902 - DNA, 304 bp, Homo sapiens
  misc_feature (12)..(13): n is a, c, g, or t
  misc_feature (25)..(25): n is a, c, g, or t
caggcgtggtgnngggcgcctgcantcccagctacctgggaagccgaggcaggagaatctgcgtgaactcgcggaagcagaggctgcactaagccgaaatcacgccactgcactccaatcctggtcgatcactgtcgaccacgttggtccgaccagtcttgacagaggtcactgatatatcttcaattggaccattttgacactctatcttattcattttctcagtgtctgtaaagccaggtgaggaagtgatcccaataatgatgtacaatttgaatcaatatctatttgacatcagtggatc

SEQ ID NO: 520903 - DNA, 492 bp, Homo sapiens
cctctccccaacactatgatacaggaaaccaggaaacgtgaatattttctcccacgatcgattagactgggatgaacacagttctgccggcagatatgtttcaagaccctgtaaacctctgaaggaatttatgctttctcaagatgttgaacatgagggtctctttggcctccttcagaaaatggtggaggatgatcccgcccaaaaaatttctctcaaagaaacccttaaggctcccttttttggcccttttaaagaaaaggaataagattgggaatggggcaggcctcccgaaaaagattttccagactggatcagtctaatttttaaattttaaggtattttggacagctttgtaaatttttaacatttttataatgccatgtttattttgtttggggaatttgggtccttaaggacatagctaagggaatgaacatctttttcaggaattgtaaagtgatttattcagaataaattttttggggttat

SEQ ID NO: 520904 - DNA, 187 bp, Homo sapiens
  misc_feature (157)..(157): n is a, c, g, or t
  misc_feature (160)..(160): n is a, c, g, or t
gtcaccaggctggagtgcagtggtgtgaacgtggctcactgtcgtcactgcagccttgatatctcaggcccgggtgatcctcccgactcgaccacctgagtagctgtgccaccacacccggctaatttttgtattttttgtggagatggggtttcgnctngttgcccaggctgatcacaaactcctg

SEQ ID NO: 520905 - DNA, 889 bp, Homo sapiens
  misc_feature (3)..(4): n is a, c, g, or t
tgnncccagagctgcgacgaggggggggatagattaccgtggagggggatgctacgcgtgtcctgttgtggctgctgttgcacgcccgcgtgtgtaattcgactgtgcacgttattggccgccgttctctgggcccgaggcgccccattgtgcgtggaaagaccggtgtggcggttggtggacagttacacgtggcttttgggcccccaatcggtttgacgtatgggtccgcgcctgtctggtggcgtctggaaatgtgaacccaggggttcctggtgtgaggttgaagaccggcggccgtggtttgggggcatgcggggaggtggaaaatatatctttgtacgagggggcatcttaaagtctttgtgacccttcttgggccagaactgtgtttgtgccccccgcaacgcccccctgttgtgttcgcgggaacatacatgtggccgctagttggacagcaacacttgggggcccgctttgccccggggggcccaatggcggtcccgctgagatctatacaggcctcttttgtgggaacaggggggtgtgagggttgagcaaatcattttagccccgttcacttggcataacccagtgtggtatctatacttggctataatggcgcacaaacaccccctggccaaaccgcaaagtcctctgttcaaaagataacaagaaaaggcaccccaaattttcccccattacaccctggtttcgcatatttgggggcaggttcatcaggcaacccgacactcgtgcccctcgggaaccccaacacagttacagtctgaaagaactcctctggctgtgtccctcctcgcccagattctttcttttgacttttaatttttttccccacaaaaactccccttggaataagcccaacaaa

SEQ ID NO: 520906 - DNA, 401 bp, Homo sapiens
agttgccaaatacttccagtcagctgatctttgacaagcaacaaaaacataaagtggggaaaggacacccttttcaaaaaatggtgctgggataattggctagccacatgtaggagaatgaaactggatccttatctctcatcttatacaaaaatcaactcaagatggattaagagcttaaacctaaaacctgaaactataaaaattctaaaagaaacattggaaaaacccttctagacaatggcttaggcaaggatttcatgaccaagaacccgaaagcaaatgtaataaaaacaaaggtaaatagctgggacctaattaaactaaagagcttttgcatggcaaaaggaacagtcagcagagtaaacagacaacccacagaatgggagaaaatcttcaca

SEQ ID NO: 520907 - DNA, 325 bp, Homo sapiens
cagtactgatgacaggtgatagatcaaaatcattgccacatttgttaccattttgccattcctaaaccatccttcaacgaaactcatatatggggtcacaacatcctcacggtagtccaatagagcactcatgccatctggattcatgtttccaccaatcaagaactggtagttaaagacatgagcaaggatgtgcttgatttagttctgcaagcccctgtacataaaaggtataactctttactaggtctctgttcttcaagtttcccttagattgatttcatgtaatcttcgatgtacttcttgtaggctacttttcatataa

SEQ ID NO: 520908 - DNA, 396 bp, Homo sapiens
atcgcttataccaggcagacactcaccgcttagtatagatgctctcatggtacctgcaggtctgagccatgcaaaaccttccattgttgaggatgtgcatgagaacttgaagcaatcccaactacaccagcacgttctacgatggcacccgtactccatcaaagaacacctctgctgtgtttgaagccttgatgcccatcttcttctcagggggcccacctgtgtccaggcagtgtgggaaagcagaggtgtgttcaacacggttgtcactgggggacaaacttgctccttcgctccttatgcaccagggaggaatgacgaccactagactattagaggctacagacaccactttaccctcaggcccctgagggctaaggaggcctggctatgttc

SEQ ID NO: 520909 - DNA, 169 bp, Homo sapiens
cgctgtatctggccacgcctgtccattaacactgaatctgagactgcgtgatgcttataccggcgcacccgcgttaggcgtaaatcggagacgtaccagaaggtgcatcgacaaaggtgtgaccattcacacatccccggttacctatgaagccatgggccgccgagtc

SEQ ID NO: 520910 - DNA, 245 bp, Homo sapiens
aaaaaaaacctttaaaaaacccccccttaaaaccaaaacatctttgggttttgaacaaaggaattttcaaaatttgatgtgggattttgtttagaagttaaggaaattttccacccaaaaaacccccctgttttaggcccttctaattttaaggttgggggatggggggagggcaggggtttttttttttttttttaaagggggggggaacaaatggaaaaaaaccagggcctgtgaccctttta

SEQ ID NO: 520911 - DNA, 212 bp, Homo sapiens
cttgcaagaacatatgtgggttatggtcctcattaccatgttgcagcgggaggttcctaatgtcagtttgtccattataggtgatactgaggagtttttaaactaccacaacattgttctcataagtcctcttgtcttaggtagacagaggcaacatgggacacaaagcaaggggtaacctctgtggatactctttctcccttcctcccaga

SEQ ID NO: 520912 - DNA, 149 bp, Homo sapiens
tgagtatctagaggatccgtgtcatcccccttcgtgtatgtgatgtataatgtctagctgagtactcttatatgacgaattaatcccatgattgtgttattagaagtgcgaatgggcgaactcgggtcaatggaactcaggctccaaag

SEQ ID NO: 520913 - DNA, 140 bp, Homo sapiens
gataaagatgtcagaaatgccccacatgtgattaggtacatggatatagtggcagctcattctaatattatagcttgcaactccctactcctggatccctagactctccaatcctattattctcgtcaatactcagaagc

SEQ ID NO: 520914 - DNA, 897 bp, Homo sapiens
  misc_feature (207)..(207): n is a, c, g, or t
  misc_feature (209)..(209): n is a, c, g, or t
  misc_feature (219)..(219): n is a, c, g, or t
  misc_feature (231)..(231): n is a, c, g, or t
  misc_feature (233)..(233): n is a, c, g, or t
  misc_feature (243)..(243): n is a, c, g, or t
  misc_feature (245)..(245): n is a, c, g, or t
  misc_feature (250)..(250): n is a, c, g, or t
  misc_feature (261)..(261): n is a, c, g, or t
  misc_feature (278)..(278): n is a, c, g, or t
  misc_feature (302)..(302): n is a, c, g, or t
  misc_feature (304)..(305): n is a, c, g, or t
  misc_feature (331)..(331): n is a, c, g, or t
  misc_feature (337)..(338): n is a, c, g, or t
  misc_feature (355)..(355): n is a, c, g, or t
  misc_feature (382)..(382): n is a, c, g, or t
  misc_feature (386)..(386): n is a, c, g, or t
  misc_feature (390)..(391): n is a, c, g, or t
  misc_feature (395)..(395): n is a, c, g, or t
  misc_feature (397)..(397): n is a, c, g, or t
  misc_feature (419)..(419): n is a, c, g, or t
  misc_feature (442)..(442): n is a, c, g, or t
  misc_feature (446)..(446): n is a, c, g, or t
  misc_feature (451)..(451): n is a, c, g, or t
  misc_feature (454)..(454): n is a, c, g, or t
cacaatatcaaagaaaccaccacccttcttcctaacagcattttatgccttttattccacattaaatgggaattgtgcctacttaggagtgcccctccaattaattacatgtgtccaagaataatccaagctagagacacaaggtgggaaaacatttcaaaaaaaaaaaagtcctcttaaggccagtaatttatctgaaaaggtatntnatcacacctntgacaccttatntntgagcctatnangagcngcaggtggttncatagggtaaaatccangaaaagagaaggatgtgtggggtncnnatagaagataatttggtcctcatttnaccttnncttttatgatccttctntgctagaacaggttaattctccaaatnggtnggtnnggtnangtacatataagggaactctttngcaaaagcaagggtcggatgtanatancattnaangtatagtggcacttaacttccccgggactggtgccaatctggactaattggtcaatggcttagagtttcccaattaccactggtgtactaaatgctatgatgtaagtctgctacagtttttcaggcccatttagaacttaagaacaaccattttaacattaatggatgggttactatgagcaacttcgctttcagaaaccccctggtttaagctctattgacaacgcttatgcgcattatgaggtcgagcaactatgagacactctgtatcagcgcactctttaaaacacgcttggctgtacttgtgaagatttagcaaacaaccttgagatttttaacggtaacctttttacacaggtttaagattaagttatcaccagtggttccagagcctctgtacattaatccctttggtacccagttggtccactctaccagtcccc

SEQ ID NO: 520915 - DNA, 1227 bp, Homo sapiens
ggtgcgcgtcgttggtccgtgtgtggttggtggtgttggtgtggaattgtctttcctgtggtagtgatgataggtagaagtaatgaatgaagaaaactaagagcgaagacgaaacaaaaaaaaaaaagacagcagcacgaacggtgcatgtaccgtatgatgtagcctgcgtaagtgctactgttgtgacaatgcgtctgtggataagcagtagaagtgtctgtcgcactatggtgttggggacctcctctcctatgggtggccgcgcgcgcacctgttggtggggcatcgataataattggtcgccggagagccgcctccttattgatgaacatttttggcccacggagtgtgtgttcccccccggaacgaggtcgggggggggggcggcgccttttctcctccgctgattattatctgccggatataattgggtgggttctgcccctcttgtgtgggcgcgcccccttataatgttgccgcgcttgttttccaaagcggcgcctccccctcttggtgtgaatgactccatggggggggttgcccccgccccccccgtgtgggtgttagaggggacttatccttggcggcggtccaaagcgctggttggggacgccgcccttttgctgggctcaccctctcaagattggtcggtggacgaacgcggggctgctcgccgaatggatgaagagagtttctttgccgacgcgggttgtccttgatatcgcttccgccgacatgcttctccgcctagggtggtgcaagaattagtctatggggctccacccctgccccctccccgcccgatatacacatggccgcggtagaattttcttgaaccattgaagaaatttttggagtagagaacgtgaccacagcctaatttcccaaatctgggtgaaatttgtccccccttcgagccccgcgccccactttttttgggataaattttgttttgatgatacacacgagggaacactcatacatgtcttttgtaggaagacacatcttgataagtatgggggttctttattctactaacaccagtgatgaggggcagcgccatacatgtaccccccacgttgtttgcagccgccgcaagcaatggagttagattctgtggaggactcgcgaaatagaagatcgaacatagacagtagtgcatgtggggccagaagaaaagcgagaagaggagataaagacagcccatcaataggacagagaata

SEQ ID NO: 520916 - DNA, 775 bp, Homo sapiens
  misc_feature (125)..(125): n is a, c, g, or t
  misc_feature (270)..(270): n is a, c, g, or t
  misc_feature (583)..(583): n is a, c, g, or t
  misc_feature (650)..(650): n is a, c, g, or t
  misc_feature (684)..(684): n is a, c, g, or t
  misc_feature (757)..(757): n is a, c, g, or t
  misc_feature (763)..(763): n is a, c, g, or t
gcccgtctgttccccttcgggtccgaagcttttggctcctccttgttccgagcccgaaggcccgacccttcacgtactcggagctcggatcccagtgtgtcagctggactcgaatcccgttgccngatcgctgctctcggcttctgctccgtggtgcttcttccctgccctgccctggggccctgaccagtggcttcttcccccgtgccttgatctgcgcagccctgtgcggtgtcgcccaagaagtgatgcatggctggcgcgtggggngcgcgctgggcgggggagtgcgtggcctggagctgcggcggcaagcgggcgtgggactgctcggccgcctcctgcccggcgagcagctcagaccatgtcgcctgaagaatggacgtatctagtggttcttcttatctccatccccatcggcttcctctttaagaaagccggtcctgggctgaagagatggggagcagccgctgtgggcctggggctcaccctgttcacctgtggcccccacactttgcattctctggtcaccatcctcgggacctgggccctcattcaggcccagccctgctcctgccacgcnctggctctggcctggactttctcctatctcctgttcttccgagccctcagctcctgggcctgcccantcccacgcccttcagcaatgccgtccagctgctngctgacgctgaagctggtgagcctggcagtgaagtccaggacctgcatctggcccagaggaaggaaatggctncaggcntcagcaaggggg

SEQ ID NO: 520917 - DNA, 696 bp, Homo sapiens
  misc_feature (125)..(125): n is a, c, g, or t
  misc_feature (270)..(270): n is a, c, g, or t
  misc_feature (504)..(504): n is a, c, g, or t
  misc_feature (571)..(571): n is a, c, g, or t
  misc_feature (605)..(605): n is a, c, g, or t
  misc_feature (678)..(678): n is a, c, g, or t
  misc_feature (684)..(684): n is a, c, g, or t
gcccgtctgttccccttcgggtccgaagcttttggctcctccttgttccgagcccgaaggcccgacccttcacgtactcggagctcggatcccagtgtgtcagctggactcgaatcccgttgccngatcgctgctctcggcttctgctccgtggtgcttcttccctgccctgccctggggccctgaccagtggcttcttcccccgtgccttgatctgcgcagccctgtgcggtgtcgcccaagaagtgatgcatggctggcgcgtggggngcgcgctgggcgggggagtgcgtggcctggagctgcggcggcaagcgggcgtgggactgctcggccgcctcctgcccggcgagcagctcaggtcctgggctgaagagatggggagcagccgctgtgggcctggggctcaccctgttcacctgtggcccccacactttgcattctctggtcaccatcctcgggacctgggccctcattcaggcccagccctgctcctgccacgcnctggctctggcctggactttctcctatctcctgttcttccgagccctcagctcctgggcctgcccantcccacgcccttcagcaatgccgtccagctgctngctgacgctgaagctggtgagcctggcagtgaagtccaggacctgcatctggcccagaggaaggaaatggctncaggcntcagcaaggggg

SEQ ID NO: 520918 - DNA, 230 bp, Homo sapiens
tgtttctatgcctcgcatctcagttgttttctttatccatcccagtgatgccttatttgaaagtgggcttaaactgaaaaaagaatgaagttggatttaggaagctgttagatcattgagtggtgttgagagtgaagtttcactagcagggaagtttccttgagcctaaaataaaaagaaaaaattaaaaagaatcagtttttttaattaaaaaaatagaaagctgttag

SEQ ID NO: 520919 - DNA, 578 bp, Homo sapiens
ctcggtacccatgccaataacctccctcagcctcccgagtagctgggactacaggcacccgccaccgtgcccggctaattttttgtatttttagtagagacggggtttcaccgtgttagccaggatggtcttgatctcctgaactcgtgatctgcctgccttggcctccccaagtgctgggattacaggcgtggcctattcatcattattttcaatacgggagaatggtcctgaactgctctggctggggaagatgttctggcttctatgttccagcctctaaggatatagtcacatgtctctgtggtaagggcacagcctttggagcctcaaccagggcatgctttgtctcctaatcacagaagcacagccacctctgcccaggtgtcatctgttgtcctgcccttcccaggctactcaaggacttggtcatgtgctctctattctagcaccatgctgaagagttctgttcaattcagaaaacacattgtcatccatccatccatccacccattcacccacccatccagttatccactaacccacccaggaggttattggcatgggatactctagag

SEQ ID NO: 520920 - DNA, 357 bp, Homo sapiens
attggagccagaagtgactagcccggtcatttcatgacatcttgggtcatgctcgcaatgctatacacttcatcaggactgctcttcgttatcactgattctgcactgggattgcataacttctggacggatcaggggtctaatgatctggtttcacatggacgtgatccatgtcgtcggttacatcgtctgtcgcgttctcaccattatgtagccaggacgtcaatggaggcgattgatacagagcgtagtatatagtggagagtgaataagtctcatgagatcggccgggattaccatgaagccctgcgtgtgcgtcatcgtagtttgctcatgtatgaccccagtaaaaagtgc

SEQ ID NO: 520921 - DNA, 407 bp, Homo sapiens
acatccaaccagcgaagcagagcaatccttctggaagcttctctccacggggggctggctgctccttcatcactcccatctgagggcttctgcttgcagccgtctgtcacgctgagcagctctgtggtggattctgtgctgcttgctctgtgtctattttgtcaagatcgccactctctctggattctctcctctgggttggcccacgctcactcatccggctttggaaggacatttgtcctctagcttcctccaggagggggatttgtcttagagagtggcactttctcttccctccccagcccctcgtgcaccttctgcagggaggggagtcccctggtgctgagaggagaggtaggagagccaggtagggcctgtgggagccctagcagaggtgccctggccac

SEQ ID NO: 520922 - DNA, 822 bp, Homo sapiens
  misc_feature (347)..(347): n is a, c, g, or t
gtgactccgggctgaaatttgccacaggctagctgatcttttacttcccccaccagagaagttagttctcatccgtcccggtccctgctgccactatgtactggttctcttggagttcaagtgttctctgtggtccattacatggccaggttttctgtaggtggaaatccctcagctgagaccaactcatgcgggagcttggggaactgagtctgctggccacagctgccgcctttgtgcttccaaccgtctgtcgtgccaatgtgctttgcaggcactcctcaggcgaatgcaccctggcaggggcagcagctggatgcaattcctacaagctagctgtggacaanagtggtaggctgggcctgggtctctgaggccctcgtcgtgagtcagcgccttcatctcattcttctctggtgtaatcataaggcccttatgtgctacagataccgatcgcgtactcagtcgtccgtgcgcttacagcaccggcgtcatggtgccgtccgtgagtgacccgagaattaggtccacgtcaggcagctgatggctttctctctgctcatgtctgactgcactgatgtgctgactcgtgctgggcatgctgaagtgctggtatcatgttccgccaggggttctgcacagatatgtgcctgcttctggtccagggcttccatgcgggtccccaggaatgtgaaagccaaactagcttgaagggtctttctcatgttcttagcaggctgccaggctgtactcttgccagagctggccacgcttctttccttgctggtgggggcctggtctggcctgtcttgtgtggtgccg

SEQ ID NO: 520923 - DNA, 619 bp, Homo sapiens
atgccagatgtggaggaggaggcataggggggctgcaggtgcctgggaagtgcttcttactgaggaacttggtgagctcccaggaagcatgggggccacctgagaaaggggacgggggaggagtgccaagcgggaagtgggctgtgtgtcaccactggccaggaacagctcccgtgggaactgtggtagatgactggaactttacaattgatttactccttcttttcgtcattcacaagtagtcattaagcacttccgtgatctaggtcctgggaatacagcagtgatcccaacagacaaagccttgtcctcacagagcttaccttctagaacgaacaaagaaacacataaacacacaaaatgtcagatggtgggatgtgctacggggaaataaagcaagcattccctaccctacacttccttgtaagaggtaagagtgggttgctagtttgtatcaggtgttcagggaaggccttactgacatttgacctaaaagaaaggtaagaatgtgacacctgatgataaatagggaaagagtatttcaggcaggaggaatggcagtgcaaaggccctgaggtagacgtgtacctgacatggtcaaaaaaaagcattgcggccg

SEQ ID NO: 520924 - DNA, 736 bp, Homo sapiens
  misc_feature (69)..(69): n is a, c, g, or t
  misc_feature (71)..(71): n is a, c, g, or t
  misc_feature (73)..(76): n is a, c, g, or t
  misc_feature (80)..(80): n is a, c, g, or t
  misc_feature (82)..(82): n is a, c, g, or t
  misc_feature (84)..(86): n is a, c, g, or t
taagtaacgggtcggtaagggcttatctctagaaggtccccgcagatgaagtgagggccaggggcctgngnannnncagngntnnnctgtgaggcagtgctggccgcgccagggcatcagtgctgatgtgggagctgtgcttccacctaagccgttggtaggggactgtggcatttaagaatgtagagagcgcatccttttggatctccggggcggagtgaacctgcaggggccaccccagaaacctgtggtcctgatgcacttgtgcatgcaatgtaaccagcttctcactccagtttcaagtgggctacttactgtaacttatatacatttcaaagccacttggtgacatagaacctacatgacaaccatacacttggtgggcccacggacaggttaccagaagtggtaccaggatgtggtttggaccccgggtgagctgatggccccggcccggctctgggcacatttcggtccgggtccccagcactccggtcggagagagtccaccatcttcagctccggggggacactctcccgggtacccctgactcacgcacagggacttttaccgaagtttactgttcctctgcgaccagaaatggctgtagggggttttttccccccatctttgggctagagcggcgatggatacacgttcctggctctctcacctcaataacgagggccctctctggttcccttcccaaaaatccgccctttcgacaacatcgtg

SEQ ID NO: 520925 - DNA, 931 bp, Homo sapiens
agcggcgcgcgggcgcgccgcctcccccggtgggagcggtggttgggccaggctgcggcagagcgtacgctcggagatggcggagcagccgcgaacgcggcccgtggccccagaaagcagggaagccgtggcagcaccccgagaaacagcggcggagccccagggggacaagcgagggacgccaggccgaggtcctccgggctatgaagcctaaaatgcaggcggctaagaaaacggcggcgctcttggcgaaccctgtggacctacggggcccttgacggttcggaattgccccgaaggccacttcacagaaccacatagctcgcattcacctggttcgctggattcccttggggagccacaagggctaacaacgcgtgcaacacgcaacgcactgtgccgacacccatctcagcgtggggaccccttatggcaaaacctgaccagcaacaaggccaagccactccaaccgcgccacagcggaggacaccccacacggggcgagcaagcagaaaccccccctctgcggcacaaacaccaaacttcgtggcccacggccccactgggaaagcgacaccacaccagagcaccaacacaaccggaacatgccacaatatgagcgaccgcgaacaccagcgtggaccgcacgaaagcgatctggatggaacacaatatacaatgacgataccattagagacagtgagggacacacccacccatctgtgcactatactcaccgccagccgatacacccattcaccgcagattccaccgacgctactaactcacccaattgctgcccccataaccgcatggaggacagtgaaaactatatccggtgcgagtccgatgccacctgaaccacctgttagaccgactaaaatcagaagtcgcggacaaccagccatctagccacacagccctaagacag

SEQ ID NO: 520926 - DNA, 1668 bp, Homo sapiens
  misc_feature (1319)..(1319): n is a, c, g, or t
cagacacccaggacttatttaaactctgtgcaagtgcaataaatctgacccagtgcccccactgaaaaaaaaaaaaaaaaaaagagaaaggagacagcaaaaaaaaaaatcacacaacaaaagaagagcccaaagaataaacagagcagaaccacaagaataaacattagaaacaaaaagatagacacacacataataagaagaggatcagcatacataagagctaagcgcacaggagccggccgtacaccacgggcagggctcgatgaacatggggaaaaaccccggcacgagccctgggcacacatcatagaggagggaaagggaacaacctatatcacaaccatgaggcgaagtatgacccagctacaaccgggcacagaacacaatacgctatacacagcagcaccttgaaaaggcacgcacaaacaggagataaaagctacctcacaacaccatccctcacaaacagcaccagataatagaccgcgagcgctaaccaccacagacagccctagacaatacgagagaaaagggcccgcgcacagcgacacacaacacatacaggcacaaccaccacgaaaccacacatagcaacaccacaaccagacacacacaccgactatcacaatacccaacccacgggaacccacagaatggagagacaataacgagagagacacaacaacgcagcgacaagatgaagaacacaccaaaaacaggagacggacatccagcaacgaacagaaccaaagcaacgcagaaacacaacgaggagacgatgaagcagaagagagacaacagacagagagaaataagagagcaacagaacagagagaaacgaacgaaagagaagcaaagaaagagccaagaagaaaaaaaaagaaaagagaaacgacaagaaaaaagacgaaaagaaacaaaaaagaacaacaaagagaacgagaaagagaacagaaagagaaaaaaaaagaagcaagaagaaagaagcaacccgcgcaaagaccaacggacagaacgaaggacaggaagagcgacagagagcaaaggaaagcggaacacaaagcaaagaaaagacgaaaacaagaacgaaaaacagagaaaacagaaagaagaaaaaaacggagagaagaagagaaaaacgaggcaagagacggagaggaagagaaaggcaaacaagagagaaagagaagaaaagaagaagagagcaggagaaagagaaacagaagaaacaaagaaacaagaaagcagaaagcaaaaggagaggcaaaaaagaagcagaggagaataagaacaaagaagaaaaggagagcagacgnaaatataacagcagaaagagacgaggagaaagagaaagagaagatgagagcagagagacagacagagacgaggaagaaaaaaagaacagagagaacagagaagacaagacacatacaagaagaacagagaaccagagaggaagaaaacacaaaagagagacagagaacacacaacaaaacaaaagtacaggacagaaacagagacacaacgagagagagcgagacgcaagcgaagagagacgacaagacatggagcagaagaacgaaagcagaacgaaggcaaagagagcacgcgaaggacacgaggcagcagcgaagagacacaacgagagaagcgcaatgagaagac

SEQ ID NO: 520927 - DNA, 845 bp, Homo sapiens
  misc_feature (9)..(9): n is a, c, g, or t
  misc_feature (75)..(75): n is a, c, g, or t
  misc_feature (95)..(95): n is a, c, g, or t
  misc_feature (132)..(132): n is a, c, g, or t
  misc_feature (135)..(136): n is a, c, g, or t
  misc_feature (185)..(185): n is a, c, g, or t
  misc_feature (189)..(190): n is a, c, g, or t
  misc_feature (192)..(192): n is a, c, g, or t
  misc_feature (196)..(197): n is a, c, g, or t
  misc_feature (212)..(213): n is a, c, g, or t
  misc_feature (238)..(239): n is a, c, g, or t
  misc_feature (245)..(246): n is a, c, g, or t
  misc_feature (248)..(250): n is a, c, g, or t
  misc_feature (257)..(257): n is a, c, g, or t
  misc_feature (259)..(259): n is a, c, g, or t
  misc_feature (281)..(281): n is a, c, g, or t
  misc_feature (286)..(286): n is a, c, g, or t
  misc_feature (291)..(291): n is a, c, g, or t
  misc_feature (315)..(315): n is a, c, g, or t
  misc_feature (349)..(349): n is a, c, g, or t
  misc_feature (356)..(356): n is a, c, g, or t
  misc_feature (374)..(374): n is a, c, g, or t
  misc_feature (387)..(387): n is a, c, g, or t
  misc_feature (404)..(404): n is a, c, g, or t
  misc_feature (411)..(411): n is a, c, g, or t
  misc_feature (418)..(418): n is a, c, g, or t
  misc_feature (420)..(420): n is a, c, g, or t
  misc_feature (426)..(426): n is a, c, g, or t
  misc_feature (431)..(431): n is a, c, g, or t
  misc_feature (440)..(440): n is a, c, g, or t
  misc_feature (454)..(454): n is a, c, g, or t
  misc_feature (486)..(486): n is a, c, g, or t
  misc_feature (502)..(502): n is a, c, g, or t
  misc_feature (653)..(653): n is a, c, g, or t
  misc_feature (742)..(742): n is a, c, g, or t
  misc_feature (780)..(780): n is a, c, g, or t
  misc_feature (844)..(844): n is a, c, g, or t
tcctttganatctgaagaaatcatttcctcctttcttgccatctccataagaacacctctggaagtatgctatgntcaacttatactcacacatntagatttgctcataggttgaacagtgaagtttaagtnaannccattgcaaagactgttcctttcatcacagaaaaaaagaaggtgagggngagnngntatnnggggactggcgaatnntgggccaagggtacatgctcccttnnttgttnntnnntgggagngnttgctccatgggctttttttgnttttnttgtnagggggagatttagggggggattnaaggggtgactgagccttgggcctcttccatggntacaggnatattgttcctgcaggtnctatccagatttnagctctagatgtaactnaaaaaanctgaaantntgaggnaaggnatctaaggnttatagtgcttgantactgatggggaacaactgcagcgaacagcancagggaagctggaggntgctcagtaggtgaatcgcatcttttgtgagtagcccagtttgtccaagttgggatggcaggccagctgcaccattgggggtggcccacaaagcagtaccagcacatcatcccctggagcgggcaggtgttcccggatcatgtcggcagtnacaaagcccttgctgtaggcccaatcttttggggggatgatccagagtgaaccagagcttaaagcgattgggatagcgggcctgcagtncctctaagttctcccgcaagatgatatccttttctgtntggttggcaaaagcagaaagcactgggttggatcttcagggactttcaggatggcccggatcanc

SEQ ID NO: 520928 - DNA, 278 bp, Homo sapiens
ctatgttagaagtttcaatagcatctatagatatgctaacggaaatgtagttactaaaaaatccatcagtgacttagccgaattgcaagaagagtacgaaaactatcgcaaagcagctatagaacgcgagcaaaaagtgcgtcgccagttgcaggacgaaataaataaacaccgttaaaccaatgcgtattgatattatatcggtagtccctgaactgatggagagcccctttgcctactccattatgaaacgtgctattgaaacttctaaaactagg

SEQ ID NO: 520929 - DNA, 1187 bp, Homo sapiens
ggtcagggtttgagatcagcctgaactttacatggtgaaaccctatctctactaaaaatatagaattagccaggcatggtagcgcacgcctgtaatcccatcttcttgggaggctgaggcaggagaatcgctagaaactgggaggtggaggttgcagtagccgagatcgcgccactgcattccagcctgggcaacaaaagcgaaactctgtctcaaaaaagaaaaaaaagaaaaaaaagcacgtgaccttatgaggctctcgctgtacttgttattttaaggactataaagagtttgatttaaaattatgcagggcccctatgtgggatttattaaaaagcaaactggtgtgtattctcatgtggtttgcacagcccagcctcacagcactattgtaaaccctgcatcttactgtctcgctagacagatttatcacgtatcatgtatacttattttctggtatgtaacaaaagtaaagaagtagtagtatgtctttacagctgaaaccaaccagcaagcccttgatgaccaagaggcgtatacttctcaaagctatagggcacaaacaattgacccatacattgactcacgttgcaatacttctgcagcactaattacattcagaggaaccaggacttctccgcaaactaagcaaacttaccctaccggagtgatatactctttgacggggacgtagcatgaaccccttcagcttgcttagaatcaagaaaaacgcctaaatgacataaccattacatatgcactcactgggcctacaacaacgacctgatatattaaagtgcttcagaccaaaccaacgaaaaacccacaaaaaaatatgacgtctttgttatataaacaaaaacaacccccatctctgaaacacttgtgaacattcttaatcacaaaaaacaaaataaccttattcaaaaacatctaccatatttgagaatccacaaaccatcacaaaactgactcagttcatcaattcccgatccaggccaccaataacctcccccactctactccatgccaccatcagacaactcatcataaagacaacacttagcaacaatcataaaagatctaaatcgataacctttataagtaagacaaacacacaaagcataaatatatcagatacgatataaaccaaacaaccaatcaaatcaaacaattaataatac

SEQ ID NO: 520930 - DNA, 301 bp, Homo sapiens
  misc_feature (9)..(9): n is a, c, g, or t
attcgcggncgcgtcgacctgtaatcccagtactttgggaggccgaggtgtgcggatcacttgagctcaggatttcgagaccgagcctggccaacatggggaaagcgtgtcctacgagagatgggccgggtgtggtgtcatgcctcgggaggctgatgcaggagaatggcgtgaacccgggagccggtgatcccagggaggctgaagcaggagaattgcttgaacccagaagttgaggttgcagctgagattgcaccattgcactccaccctaggggacagagtgagtaagactccatctc

SEQ ID NO: 520931 - DNA, 220 bp, Homo sapiens
  misc_feature (177)..(177): n is a, c, g, or t
  misc_feature (200)..(200): n is a, c, g, or t
ataaataaagctctacaaccagtggccgggctcagtggctcacacctgtcatcctagcacttccggagctgaggcaggtggatcacctgaggtcacaagttcgagaccagcatgacaaacatggcaaaaccccgtgtctactaaaaatacaaaaattagccagggcgtcatggcggngcacctgtgggtcttacaggctnaagcagggagaatcacttga

SEQ ID NO: 520932 - DNA, 1215 bp, Homo sapiens
  misc_feature (801)..(801): n is a, c, g, or t
aagtcgatgcctgaatgtatcacaggttttagttagaatgtctggcttctactcacacaagatatgtcgttgcggatcacaaatagtgtggcttgccaacgaatattccgcacaacaagggcgtgtaaagagacaaataatttcttgctcgctctgaggggtgaaatatttgttaccgcacggtatctcaccaccgcctgatgtgtgtcgcctctttgtgtgggagacccacccccaaaaagattgtgggtcgacaacgataactgttgtgttaaggagcagtccttctcttgcccagaagtaaccgcccgtggtatgccacattttttcagagccgcacaatacccgcttgtaatacacagtgttttgacccccacgtgtggtggtacccaataaaaagatcagtgtaacccagttaacgtattaaataatataagttggctttcctttctttcccccacgcgcctgcttgttttgtgcacggttgacaccgcgagttatgtaatgtttgggcggggtagaatgttgcccctgttcgctcactgaaacacttttaagggactcttcccctcgtagtttcccccctttcacgagcggccaccttttgtgagcacccgcaggaccactttgcactctttctgtggaagatagaacaacctcgtgggtgtaaaaaaacaaagggctgtatggaacctatacttggggcttacaatgttcaccaccaaatggggttataaaccacattttataggttcacccacgattctagaaatatacgaggtcccaacaccacaaaataancccgcgttcaatataacaacacccttgtcttttgtattaaccccgcttttccacctcaaagaaactgtgccacacaaaccccccccataatcccagagtcgccactgtaacgtcgaacctttttcccttatggcgcattcctgcaaactgctaacgcgttctcacaccggcgacaactgaacacgtgtttaaccagaataccactggccaacattcacgggagttatttctccaataatgcgtcctcaaaaaggcggagaggcactgtgaaaaatacacccccctgtgtagcaaatcatcacaaaaataaccctttaaatgggcgcacccacaaccctcggggcttctttgtcctatggaggatgaacccttttttattcccttaattttttaaaaaacttgctttaaatttta

SEQ ID NO: 520933 - DNA, 535 bp, Homo sapiens
  misc_feature (516)..(516): n is a, c, g, or t
gtttgctctttctgaagacagctcatcaacttcatcctgaatctcctcgagccactgcatgcacattgtatagcaggagagagactgattcatgcgctcataaatcacacggaggtttgtcataacttgttaccgtatttaaacggctttcttgggatccactatgcgcacatgctcgaaatgctttagggtgtgctgtctgtccttctgttctgcgcggacatacttctttagcatattgaacacgtgacgaggccgaggaggaacagcctgcagagcggtgatgtagttctccagggccaggcggcggcggtcattgagcatggcttccactctggccatgtgtgtctccaccagctgctgtctctcgttggctgcttcctgttccaaagattccactttctcctggaaatgctggataactgccttcttatcagctttaggcaagttctttgcttgacgttctgcctcttcccattctctcatgacctgggacattctctctcggtgcttggncttgccatatgcaacggga

SEQ ID NO: 520934 - DNA, 215 bp, Homo sapiens
gccccccaagctgtcctcaaaagcaaggcaaatatatactgacttcataggaaagggcagcttccaaagagataaacataggattttcaaaccaaaaactttgatttccccagcattataaaagaggcttacaagtggcttcttttaaacttcccagggaagggttttcacgctttgatgggggaaaacacctctatttctctttttctctgtga

SEQ ID NO: 520935 - DNA, 559 bp, Homo sapiens
  misc_feature (3)..(3): n is a, c, g, or t
acngtgcaaacgccccagtcacgacgtctgaaaacgaaccacattccacattttatggcttccaccagctagcccaggaaatacgtgaaattttcattccaattagtgttgagcctctcgattgtgtcatttaccaattaaataactgagacctaagtctgggaacagagccacgaatctgcctttgagatgctggcagatctcaaggccatcaattattgggggagggagggacaaacactcccaatcatccaccagtcagactgaatgtgtagctggcgaggaattacttccacttctggcccagcacaagccctgctttggccacctgtctgcaagagaggcggcccctgtgcttgcaacgcttacgtgttgatcccagtgtccttttccaaatgagtgctgtagctttagaagtggccctctatagaaagaagtcaaaagatgaggccccttctagaatctaggataacacgagtgttgacagtttgaggagtcgaattgagattcatcatcaaagagcaatgcagcgtcgttaaaataaaaactgtgcctttta

SEQ ID NO: 520936 - DNA, 180 bp, Homo sapiens
gcgcgttgtggcaggaacctgtaatcacagctactcggagatgctgaggcagtgagaatcacatgaagccaggagtgcagaggttgccgtgagccgagattgagccattgcactccagcctgggagacaagagcgagacttcatctcaaaaaaaaaccacagtacacagcatataagact

SEQ ID NO: 520937 - DNA, 175 bp, Homo sapiens
ccacgcgcttatggactttgctttgcccctggaggtagctcctgggtgaatgggggccaatcaggagtgtccggggggttgacccgctgcgatgtgcgacggtcctacaggaaacccccaacaaaattagttacagaggttgtccagagaagcgcatgtaagcagtggctcactc

SEQ ID NO: 520938 - DNA, 273 bp, Homo sapiens
tcccgtctatattaagtgacaacggatctgctgatcccctcagagtagacttcaagcttggcgaaacctcttattggcacaggcataccttgttcacttgacagggtgaagctgtaatttttcacaaaacagtacaagctggtttctcctaaactattttccttgtggtagtagggatccgtgggtcagaaacaactcctgtacactatgggttccttttgagccgcgtcattcggcggcatttctgtacaactagcacaggtctcccgctgt

SEQ ID NO: 520939 - DNA, 97 bp, Homo sapiens
ggatttgctggtgcagtacaactaggcttaatagggctcgaattcgaggcaatcagtgttaccaaaataaagaatttatgagtcattgcccaaaaaa

SEQ ID NO: 520940 - DNA, 216 bp, Homo sapiens
  misc_feature (13)..(13): n is a, c, g, or t
tgaacatcgtgtncatagggaaaccccatctctacaaaaaaaaaaaaaaaagtacaaaatttacccagcaggtggtggccacttgcttgtaattctcagtctactcaggaggctagggcaggaaattggtttaaccccaggaggcgaatttggcagggagttgacttcgcttcattgcacccagccggggttacagagcaaatactctcattctcg

SEQ ID NO: 520941 - DNA, 1059 bp, Homo sapiens
  misc_feature (1059)..(1059): n is a, c, g, or t
agcgggctcctcctgcacacctccctcgactctcccacagccacgtggcacccaggccccggacacccgttctgttgcacgcgagaaatggatacgtcatcacacgctgtggattgggtactgtggcccatgctggtggggtgctggtggcgaccttggcaggcaggcatctcggaggcctggagagttctccgtcgcagcgccaatcttccagcaggatcatatgattcctgggagtcgccttgggttcagacagcggcgcctcgtacttcctgaagtcgaatgcatggcctccagagtgagaatgaatcggcggcagtgtgtccatggtgctaagtcctagtggtgtggacacctcttgtgcaccggagtattgggttggttcgtcaaatccaatgaacttcctacccttccatcagtgaggaaacgcgagttgtgaagactctcgaaactcgatgcgtgcttgctatgcgccagcgcgggatcactctcggtctctcatacacagcttgcgcgtgaggtcctggcatcgtgcgtggacatgcaccctatcctacctggtgtcaacgtggttggtgaagagcactgatcgtaacagaagcaatggttacagcagctgtcatcgtatctaggtccaagggccatgtgaaatggcgctcgcttgcgtcggcaggaccttttggcgacagttggtctcaacacatttctaacgacgtgcggaaaaaccgctagcaactctcgctcagaggggcgtgatgcttacaatggtaggacacattcccaacggacctatctggcgaagggccccgagaggtgctatcaacgggaatgaatcacctgataggttcttgccatgtccctaacacgcagaattgggatggtatagaacggagaagatagtagagaagtccgcgcaagggcctgatgtcctgggtcaatcctggtgcccaaggcaagagttgaccccgcaatgctggtgggtatggtctctgcatcttgttgcctttcccccgtaggcctcagttgtcgcttggttttcccccggctaaaatgttcccn

SEQ ID NO: 520942 - DNA, 1847 bp, Homo sapiens
gtatattcagaagatcctagacacatggagactagtaagcagtacttggtggatagcacgcgcagaatttggtggatctgaccagaaggagcatagagagttactggccatcgcgcacgagaatatctccctgaattgacctatctgggaatagtggtgacggcttcaactgctttaacacatagactatccagatctcctggtaatccaatattctgagagtcacgaatggacagtgcaggtcctatacgcctcatgtcataatggtatacgatgataccatcatagggtctactaaagcactgatattaggtcaaatcaagaacaatactatagacagacaaaaaccaagattgtcatctacatagcatatgtcataccaattttagtgtacatatgatggaccttactgataaggtatcacttcagtaagtaagttggtcagtatcatacacacaatcaatgtggtactcgtagctatcctaacacggttaccacacgggagatcggatatatgtgaacggcgaactcatgtaacagccgccgaggctctcagggaaatgaacgcttgtatctgttgccacatgccacacgctcgcggattcgctgtggacaatgggtgcggatttggagacccatgaacagcgcttgaacggacccaatggatagggtgaataatgtaggtggcacattccgattctccaaaatcgttcaattcacatagcgaacgggttccacggacgaaacctttttggatacattacccgcttattggatttcacttcacatatcggcgaatctaaggaattattccaactaaatatggtcaatttacatcctggaggggtcctggacttaagtttggaatccccttttcctagtgggtgagacacacatattgaaccaacgtcttaacttaccaaccaaggatcgacggtggacggggctctaccataccacacgcgcgttcccaaaacttcttctgcgttgcctttttatattcgtcgcccccttgtagtactaactattgtccctaccacacactactttagttcaagagggcccccttacttaacataatccgtccgtctgcacattcaactataatacctcaccaacaactatccaatggataaaaacgcgtatccttgacaatttacaggtgtacgaaccgtctttggtattatgaaacccaagcccgagtacggcggacttgttgcaaccgggacagagatgttacgaaaaaaagcaactctaacaaccgagagggcaagggacatcctatacacaacgcattgtgagtccatcgcctacctcagcataacccacggtaagtgaccccaatatcaccacacctcgcgtggaagaaccccaacaacaaaagttctgaccgcgacccaatccacccacacgcagacggctaaacacaagtcggccaaacaagcagacccactataatgacgaaacaacgacacagcagatacacaccaccaggcgtgaaaacacacacgtgcggtccaatattgtgctcagaatcccaagtcaacacacaagggactgataggcgcactccagcgcacagatcagttctctccatgccacaatctattatctctccaagcgtccagtcactgcaatgcgtctcccccatcactacgcttcgcactagccatcacccacttgcacatccccaacacagattacacacatcactcggtcacccaatcaccacctcttctccaacacatgagacggacatccttcctcaccacattcctcaactccctcaacgttgaactttccaactctcccctcagctcttattaagtcacattcatcacacgtcc

SEQ ID NO: 520943 - DNA, 149 bp, Homo sapiens
aacaatatgactaaccagtaccccagagctcttgtctctagctgcatatatatcaaaagatggcttagtcggccatcactggaaagagaggcccattggtcatgcaaactttatatgccccagtacaggtcgacgcggccgcgaattta

SEQ ID NO: 520944 - DNA, 225 bp, Homo sapiens
aatggcccagtcctctcccaagtcttgttattggcgtggctagcaagtgagttttgtctgctattttttattcgcttatcttattgttgtttagttgaatggtgagcctcgtatcatcttccccttatgtccttattgagatgttgagctttggctgctggagtgggtgagcaccagggttactgtaactgacttgagaccagttgaataaaagtgcacacctta

SEQ ID NO: 520945 - DNA, 315 bp, Homo sapiens
  misc_feature (120)..(120): n is a, c, g, or t
aggtttttggggtccccctttggggcccccccccctgtgttcccccaaaatttaaagaacccccctgggggtgggttgtttttttttgggccccgggccccccggctttttccccccttntgcctgggggggggggggatttgggtcctccccccccccccccccccccgtttttttttccattttcgggggggccgggggggcccgttcccccctttggcccccccctttcggccccggggttttcccgtcccgctttcccggcctttttttggggcccccctggggggttttttttttttttgggccttttta

SEQ ID NO: 520946 - DNA, 310 bp, Homo sapiens
tgtattgacggagctccccttttttttttttaataactcctaacaggttttgatggaaaagacatcgacttggggggttattggggaggaattgacagcgtacctttaagtagcagttttggggcccaggcccagccttgggagccacctcctccagttgcccgcagggagtttgggcccaggacagacatcactgccagcatgagcaggctgttgtctggcatctaactgatcatttcccatctggctggttggctccttagagccgcagtgctgagaacacatgtgtgctgtctgcgtacacacagaa

SEQ ID NO: 520947 - DNA, 282 bp, Homo sapiens
tccaagacaagtatgtcatatcaaaaggatagctacaaaatgtgttatttactacctctacttttaacatacttggtgcacttctaaacatctagaaagactagatgtttcaaataaggacttaagttggtccgctatatacacagtagggttgaataaactacacacatgtaacaatggttatatctgatagtgtcttctaattacgaacattctggtctagaacccttcattccttccaactcctctccaccaccaacctgatggcgtggggtaggaggt

SEQ ID NO: 520948 - DNA, 1627 bp, Homo sapiens
tatttgctggtattctgtcatgagcaaagtaggacgaatcgagtgtgtatctgacaagccttgatgcgtagaactgatatatgcctctcagcgtactctacgcgctatagatagggctatctgcatgagtagatagaaagcgtgccacgtgatcacacttataccagtgaacaaactagtgccaattaatactataaacacaaccgaagaagactatcagacttggcctatttcgtgagaagatgaaatgcgagccagtggcgtgtattattcatggtaagcaagttatcttggacagtttactgttggctgtaaagtattgctatggggtgtgttcctcagtagtggctaggtggtctatctgtgtacattgtgtaatcagagaggctcacatataatggttctgtggttggcactatttcagcgcctcatgtgcatgcattccatcaataaggcttctcctaacgaaacaaacgttcggcatcagtggatccgttgcataatgggttggggcgaacgtcgcgaggcccttgactaactagttatgcctggcatgtagtatctaccaataccaaatgtgatgacggatgttgaggggccttatattggctcgacttagtcatgttgtgtgtagaatcctgagaaaattatcgtacccatgagaacactatgtggacctaattagttcacactgaacatgtgatatggttgtgacctgagccgtaagttatttcgattctccaccgatgttcgagttattaagcttcacaggtttaaaaccttcaaaataatagctttggtaggcaagcttacgtcgtttgtcaagacacaaccaggcttgattgtagactaacacagaacaaaggtggttgagtggacagtgccgtgccaattctaacaagctcgaagacgagtcgactagacatttgaccctgtgtgaatcacaaaactttgggaaagtaaactcggtgaacacctttgaggacatgtctggctgtaagacactgtaaggcaggcaagcgacgcatttaggagaggtaactccgataagatggaataacacgagagccaactcaaaagccccccagccgttaccaggatacaatgcagcgggtgtgtgcaacagagccagtaagcacgagcatgtcacaattggccacgcagacccgagaagaagacgaggagtacatagaagcagaggcatataccatggagaaagtcagatcgatacgtggagaacaaacggagaacaactagaaccacaagcgaagagagcagcacacacaacagaatacgagacacagactaagaccgacaaagagacgcgcacggaacaccaagacatcgtcaacagagagcgctcaacagaaacgcggcggacacgcagcatagagacagcacccgagacgcagaaagcagacgagcaaaacgagaacgacgaaagcagaaacggcaacaacaaacagacgacagacgaaacgaacgcagcaagcaaccgactgagagcggacacgaccaaaggaaccgaacaacgagagactagacagatagacgagagaagagcacacgaaagagacatcagacaacacaatgacaaagcaacaaagcagtagacgcatgacaaaca

SEQ ID NO: 520949 - DNA, 241 bp, Homo sapiens
atggcggtgaagagccactgacaagactttaagcaagagacggagagttagcatctaatctggaggaagaccctggaaggaggcagccccttcccccaggctgacctggtatacaggcctttcttctgccaagtgtcaccagcaacccatggtgatagagagatgtaatcactggtttcgtggcctgagcaaggacctccaagattctgtggcagatgagagatgccttggtccttgggct

SEQ ID NO: 520950 - DNA, 883 bp, Homo sapiens
cccgtttatctggcctcgtgcgccgttgtgggcccctttgtgcacatatcccggcccacatgcggatccctcccgggttcctggggccgaaaccgggtccggcgcccccccccctgcccggtgtgttgccaccggcccatgtgtcttccccgggtgccccgcggcaagtcgcccttgccccggggcggcacgccacaacggtgatcgtcccgctttgcccccccttgtgtcacagcttaattgtgcccgccctgtccttcgttagcaccctgagggttgcgccagacttcttgccccacgactacctgtgtacaggcgtggggccccaacatggcgttccatatattcggcgaggggccccacccgtttcaaggtgtacctggggccttacccaaatggctccctctgctatgtcggggcttgcacgcttgtccaaccccacgcacagggggggtccctcttggtaaccccgacggaccctggttatcgcccggggtccccccagggccgcatatgtctaccgcagtcgtctcggccccccacgtgtcgtagccaccagtagggcaacattttcgtctggaggcccctgcgcgccagggccggaactttcagagtcccgcggcccccacaaggaggtcccaactttcactaagaacagggggcgctgacaccagcagtccacgggagccgagattgcaacacacagggtgcggtgaaaaagcaggctcagacacacagggacacccgtgcggcagaagacaagaccccggctgcgcccccttgagaacaagtagccgggcccccacccccacagggggggcgcccccaatggcgaccccccccttttaaccccccccaatttattcccctccccaacataaca

SEQ ID NO: 520951 - DNA, 106 bp, Homo sapiens
cccgtcccccagggtcggctgaaagaagtccaaccaaaaaaggggaaaaaaaaccccaaattttggggcccacccaaattaaaatttccttttggggtattgggcc

SEQ ID NO: 520952 - DNA, 191 bp, Homo sapiens
cggaagtaaatacagcaattaataatgtttataagctgggcatggtcgctcaggccagtaatcccagtgacttaggaggctgaggtgggaggattacttgaaacccacagtttgagaccagcctgggcaacatagtgagaccctgtctctaaaaaaataaaaatagaaataaagtagtgcttattgtttgc

SEQ ID NO: 520953 - DNA, 1545 bp, Homo sapiens
taaaaaaacccgtggtgtttcgggggggggggggggtttaatcacaagagggaggagagagagaattttctttcgcggggggagaggggcgctgggggaaagaagaggtcttttatttttgtgatggtgctacggaaggggagagagaatatggagagagaaaaaagaaacacacgcgccgcgcgggcgtacacacccgcggtcgcgagaacacccgaacacatcgcgcggagagagaacctttaacgcgcgggagaaccaaaagcacaacctcttataaaagagcgcgggggccccccagggggagagagagcccgcggcgccccaacacctggagcgcgcctgaacacacctctatgaggggcgagaagtgtggcgctctccaaaaaagagagagaagaggcgccgggtgaaccccccctccgcaggcgaacacgtggcgccccgggagcgcacaaagatcaagcgggcgagcgcaacaccacagagcgagagatataacgacagagcagacccgacgcacaaacgagacgcgcgcgcggcgagagcagtctcctaacgagcgagacgggcacgacgcgcgcgcgcgacgagacgcggaggcgcgcggcgcacccgcgcgccccaccagagagagcgccccccaccacaaccagcgagaaaacttctctaacacgcacgggccaaccagcaagggagacgacaacacctcacacacgcaaacccagagcggtggaggcgactagtccggcaaacacgcaacacaacgcgtggagagcgcagccatcacatcacaacacaccatctcgcaacgcaacggcccccacaacaaagaggaggaacaccatccccacaacagcatcgagggccaagggcagcatccaacggccccccgcccgcccaactacctcaccacagcggcgggcgcaagcaagacaacaacaccgacaccgcggcgaccacacaccacaaaccagcaacccaccacgtcgacacacccccccccgggcgggcacacaccaacaacaaaagcacgaggccgcccccccctacatcagccgtaagccaccaacaagcagcaccaccaagccggcaccaccagtagcggcgaccaagcagaacagaaagaagcgcacaccacgcgcgcccgcacaaacaacaacacacgatgctacctactcaggcaggccacggcggcgcgcgccccacacaaaaccagacggaggcgcacgaccgccacaccacgcgcaagagctgtctagcgaagaaacaccaacgcggccgcgcagcaaaacaacctagccccacacgactctacaacactcactcacaaacccgaccacctaaaacaagacacaagacccgcaaggtacacgactaaccgcccactggaacgacgaacaaaacacctccgtagcgagcaccacagaacacacacctcgctgactgaacacaaaacgcacacaactccacgcgcagacgccacacccacccagcccggcagagacaaccgccactgacacccacaacccccccccacagcag

SEQ ID NO: 520954 - DNA, 178 bp, Homo sapiens
tgactactagtctcaatctccaaagacaatatggcctagactacgtacataaccctaaaacctacctccaatgcctaagactaaatcgatcacaaaacaacttatattcactaaccactgtacaaatgaactattcacaaagaaagcacataatttcgaatcaacacaaaacacacca

SEQ ID NO: 520955 - DNA, 779 bp, Homo sapiens
gaatgacgctacttcccctatcatagaaagagcttatcagctttcatgatcacgccctcataatcattatccgcttatctgccttcctagtcctgtatgccctttgcctaacactcacaacaaaactaactaatactaacatctcagacgctcaggaaatagaaagccggtctgaactatcctgcccgccatcatcctagtcctcatcgcccgtcccatccctgacggcatccgtttaccataagcagacgaggtcaacgatcccgtcccttaccagtcaatagtcagagttggcgcaccaagtggtactgaagcctacgagtgcacgcgacatacggcggaacgtaatcttcaactcctacatacttccctccatgaattccgtagaagcgaggcgaccatgcgattccttgacgttgacaaatcgagtagtacgtcccgcattgaaggccccattcgtcataataattacatcacaagacgtcttgcactcatgagctgtccccacattcaggcttgaaaaacagatgcaattcccggagcgtctagaccaaagcactttcaccgctacacgatcgggggtatactacggtcgaattgctctagaaatctggtggagcaaatacctacagattgcatcgcccatcgtcctagaattaattcccctaaaaatctttgaaattaggggccgtgtatttaccctatagtagcccctctaaccccctctagagtcgatatagaaatgggggattgtgacccttgtcgaatgtgggcccaac

SEQ ID NO: 520956 - DNA, 283 bp, Homo sapiens
ggaagtactttgaaaaactacaacaacaagcagttattagtagcagcagcatattataatttttgggaaaactaagattcttcttgtcagattcctcctttcaacttcctaactgttgtggtagaagttttgcggagttccaagatgatggtgttaacagtgttcctagtaaggaaggaaggggccctctttatccttatctgtggagaaaaaacaggcgtttctaggcccctttgttgtcctgggctttgtacccacttccatttttttattaccataactt

SEQ ID NO: 520957 - DNA, 2541 bp, Homo sapiens
agaagatctaggaaagaagattgctttggccttgaacaaagtggatggagccaatgtggctcttaaagactctgaccaagtagcacagagtgatggggaggagagccctgctgctgaagagcagctcttgggagagcacattaaagaggaaaaagaagaatctgaatttctaccctcatctggaggaacatttaatatctctgtcagtggggacattgatggtttaattactcaggctttgctgacgggcaattttgagagtgctgttgacctttgtttacatgataaccgcatggccgatgccattatattggccatagcaggtggacaagaactcttggctcgaacccagaaaaaatacttcgcaaaatcccaaagcaaaattaccaggctcatcactgcagtggtgatgaagaactggaaagagattgttgagtcttgtgatcttaaaaattggagagaggctttagctgcagtattgacttatgcaaagccggatgaattttcagccctttgtgatcttttgggaaccaggcttgaaaatgaaggagatagcctcctgcagactcaagcatgtctctgctatatttgtgcagggaatgtagagaaattagttgcatgttggactaaagctcaagatggaagccaccctttgtcacttcaggatctgattgagaaagttgtcatcctgcgaaaagctgtgcaactcactcaagccatggacactagtactgtaggagttctcttggctgcgaagatgagtcagtatgccaatttgttggcagctcagggcagtattgctgcagccttggcttttcttcctgacaacaccaaccagccaaatatcatgcagcttcgtgacagactttgtagagcacaaggagagcctgtagcaggacatgaatcacctaaaattccgtacgagaaacagcagctccccaagggcaggcctggaccagttgctggccaccaccagatgccaagagttcaaactcaacaatattatccccatggagaaaatcctccacctccgggtttcataatgcatggaaatgttaatccaaatgctgctggtcagcttcccacatctccaggtcatatgcacacccaggtaccaccttatccacagccacagccttatcaaccagcccagccgtatcccttcggaacaggggggtcagcaatgtatcgacctcagcagcctgttgctcctcctacttcaaacgcttaccctaacaccccttacatatcttctgcttcttcctatactgggcagtctcagctgtacgcagcacagcaccaggcctcttcacctacctccagccctgctacttctttccctcctcccccttcctctggagcatccttccagcatggcggaccaggagctccaccatcatcttcagcttatgcactgcctcctggaacaacaggtcctcagaatggttggaatgaccctccagctttgaacagagtacccaaaaagaagaagatgcctgaaaacttcatgcctcctgttcccatcacatcaccaatcatgaacccgttgggtgacccccagtcacaaatgctgcagcaacagccttcagctccagtaccactgtcaagccagtcttcattcccacagccacatcttccaggtggccagcccttccatggcgtacagcaacctcttggtcaaacaggcatgccaccatctttttcaaagcccaatattgaaggtgccccaggggctcctattggaaataccttccagcatgtgcagtctttgccaacaaaaaaaattaccaagaaacctattccagatgagcacctcattctaaagaccacatttgaggatcttattcagcgctgcctttcttcagcaacagaccctcaaaccaagaggaagctagatgatgccagcaaacgtttggagtttctgtatgataaacttagggaacagacactttcaccaacaatcaccagtggtttacacaacattgcaaggagcattgaaactcgaaactactcagaaggattgaccatgcatacccacatagttagcaccagcaacttcagtgagacctctgctttcatgccagttctcaaagttgttctcacccaggccaataagctgggtgtctaaaaggacagcttctcttccactcaatattgccatttttccaaagaaacatgttaaaaaaaaaaattataagacatggactagtcctcattagcatgtttgcatagcaaccagtcaagagcatttacactatttctgctgatatactcaccttagaactgctcagaaccctggtgctttatttttgttttaatcttttgttgccagtgatgattttcctattctgcaaatagtgtatttcctggattacacatagtatggtttcctgaagtattctgataaatgtgttttttaaaacctcaatatactttttagaaaaggagcatctggttatgcataaagcagagctaaaactaaatttctttcatgtcctccctacttcctcagtgtcaatcagattaaagtgtgtaatccta

SEQ ID NO: 520958 - DNA, 2565 bp, Homo sapiens
agaagatctaggaaagaagattgctttggccttgaacaaagtggatggagccaatgtggctcttaaagactctgaccaagtagcacagagtgatggggaggagagccctgctgctgaagagcagctcttgggagagcacattaaagaggaaaaagaagaatctgaatttctaccctcatctggaggaacatttaatatctctgtcagtggggacattgatggtttaattactcaggctttgctgacgggcaattttgagagtgctgttgacctttgtttacatgataaccgcatggccgatgccattatattggccatagcaggtggacaagaactcttggctcgaacccagaaaaaatacttcgcaaaatcccaaagcaaaattaccaggctcatcactgcagtggtgatgaagaactggaaagagattgttgagtcttgtgatcttaaaaattggagagaggctttagctgcagtattgacttatgcaaagccggatgaattttcagccctttgtgatcttttgggaaccaggcttgaaaatgaaggagatagcctcctgcagactcaagcatgtctctgctatatttgtgcagggaatgtagagaaattagttgcatgttggactaaagctcaagatggaagccaccctttgtcacttcaggatctgattgagaaagttgtcatcctgcgaaaagctgtgcaactcactcaagccatggacactagtactgtaggagttctcttggctgcgaagatgagtcagtatgccaatttgttggcagctcagggcagtattgctgcagccttggcttttcttcctgacaacaccaaccagccaaatatcatgcagcttcgtgacagactttgtagagcacaaggagagcctgtagcaggacatgaatcacctaaaattccgtacgagaaacagcagctccccaagggcaggcctggaccagttgctggccaccaccagatgccaagagttcaaactcaacaatattatccccatggagaaaatcctccacctccgggtttcataatgcatggaaatgttaatccaaatgctgctggtcagcttcccacatctccaggtcatatgcacacccaggtaccaccttatccacagccacagccttatcaaccagcccagccgtatcccttcggaacaggggggtcagcaatgtatcgacctcagcagcctgttgctcctcctacttcaaacgcttaccctaacaccccttacatatcttctgcttcttcctatactgggcagtctcagctgtacgcagcacagcaccaggcctcttcacctacctccagccctgctacttctttccctcctcccccttcctctggagcatccttccagcatggcggaccaggagctccaccatcatcttcagcttatgcactgcctcctggaacaacaggtacactgcctgctgccagtgagctgcctgcgtcccaaagaacaggtcctcagaatggttggaatgaccctccagctttgaacagagtacccaaaaagaagaagatgcctgaaaacttcatgcctcctgttcccatcacatcaccaatcatgaacccgttgggtgacccccagtcacaaatgctgcagcaacagccttcagctccagtaccactgtcaagccagtcttcattcccacagcccttccatggcgtacagcaacctcttggtcaaacaggcatgccaccatctttttcaaagcccaatattgaaggtgccccaggggctcctattggaaataccttccagcatgtgcagtctttgccaacaaaaaaaattaccaagaaacctattccagatgagcacctcattctaaagaccacatttgaggatcttattcagcgctgcctttcttcagcaacagaccctcaaaccaagaggaagctagatgatgccagcaaacgtttggagtttctgtatgataaacttagggaacagacactttcaccaacaatcaccagtggtttacacaacattgcaaggagcattgaaactcgaaactactcagaaggattgaccatgcatacccacatagttagcaccagcaacttcagtgagacctctgctttcatgccagttctcaaagttgttctcacccaggccaataagctgggtgtctaaaaggacagcttctcttccactcaatattgccatttttccaaagaaacatgttaaaaaaaaaaattataagacatggactagtcctcattagcatgtttgcatagcaaccagtcaagagcatttacactatttctgctgatatactcaccttagaactgctcagaaccctggtgctttatttttgttttaatcttttgttgccagtgatgattttcctattctgcaaatagtgtatttcctggattacacatagtatggtttcctgaagtattctgataaatgtgttttttaaaacctcaatatactttttagaaaaggagcatctggttatgcataaagcagagctaaaactaaatttctttcatgtcctccctacttcctcagtgtcaatcagattaaagtgtgtaatccta

SEQ ID NO: 520959 - DNA, 710 bp, Homo sapiens
atataaatgggatcgtgtagcatgtacttttgtaatggttcttcacacacaaggactttgaaattcaccaggttgcagtgtatcagtagcttatgccttttattgctgagtagtgtcccatgtatgtgaatatgccattatcttgtttactactcacctgttgatggacctgggaatggtatccagttcggggctactgtgaataaaactgttaggaacatttgtgtacaacgccacttgtgtagacataggtttcctttctcttgggtaaatacctaccagtaaaatggttgggttgcatggcagattttctgtttacataaagtaacttgccaaacgtgttggtttaccaaaggggctataccctttatattcccaccaggttgtatagagttccaatgtgccaacactcagttttcagccattctgatgggaatctagtggtatctcattgtggttgatttgcatttccccgggtgactaatgctggtaagccatcgttttaaggtacttcttgcccaagattgtatatcttcgtgtgaagtggatgtcaatctgttgcacattttaaattggatggttgtcttattgagttgtaagagtctttaatatataggtgtataaggtccttgtatgacaagaaataaaagccataagaagaagaaagaaagaaaccttttagtgggagataagcagagaaggattttaga

SEQ ID NO: 520960 - DNA, 2580 bp, Homo sapiens
agaagatctaggaaagaagattgctttggccttgaacaaagtggatggagccaatgtggctcttaaagactctgaccaagtagcacagagtgatggggaggagagccctgctgctgaagagcagctcttgggagagcacattaaagaggaaaaagaagaatctgaatttctaccctcatctggaggaacatttaatatctctgtcagtggggacattgatggtttaattactcaggctttgctgacgggcaattttgagagtgctgttgacctttgtttacatgataaccgcatggccgatgccattatattggccatagcaggtggacaagaactcttggctcgaacccagaaaaaatacttcgcaaaatcccaaagcaaaattaccaggctcatcactgcagtggtgatgaagaactggaaagagattgttgagtcttgtgatcttaaaaattggagagaggctttagctgcagtattgacttatgcaaagccggatgaattttcagccctttgtgatcttttgggaaccaggcttgaaaatgaaggagatagcctcctgcagactcaagcatgtctctgctatatttgtgcagggaatgtagagaaattagttgcatgttggactaaagctcaagatggaagccaccctttgtcacttcaggatctgattgagaaagttgtcatcctgcgaaaagctgtgcaactcactcaagccatggacactagtactgtaggagttctcttggctgcgaagatgagtcagtatgccaatttgttggcagctcagggcagtattgctgcagccttggcttttcttcctgacaacaccaaccagccaaatatcatgcagcttcgtgacagactttgtagagcacaaggagagcctgtagcaggacatgaatcacctaaaattccgtacgagaaacagcagctccccaagggcaggcctggaccagttgctggccaccaccagatgccaagagttcaaactcaacaatattatccccatggagaaaatcctccacctccgggtttcataatgcatggaaatgttaatccaaatgctgctggtcagcttcccacatctccaggtcatatgcacacccaggtaccaccttatccacagccacagccttatcaaccagcccagccgtatcccttcggaacaggggggtcagcaatgtatcgacctcagcagcctgttgctcctcctacttcaaacgcttaccctaacaccccttacatatcttctgcttcttcctatactgggcagtctcagctgtacgcagcacagcaccaggcctcttcacctacctccagccctgctacttctttccctcctcccccttcctctggagcatccttccagcatggcggaccaggagctccaccatcatcttcagcttatgcactgcctcctggaacaacagaaaaccagtctatccaagaccaggcacctatgttggaaggtcctcagaatggttggaatgaccctccagctttgaacagagtacccaaaaagaagaagatgcctgaaaacttcatgcctcctgttcccatcacatcaccaatcatgaacccgttgggtgacccccagtcacaaatgctgcagcaacagccttcagctccagtaccactgtcaagccagtcttcattcccacagccacatcttccaggtggccagcccttccatggcgtacagcaacctcttggtcaaacaggcatgccaccatctttttcaaagcccaatattgaaggtgccccaggggctcctattggaaataccttccagcatgtgcagtctttgccaacaaaaaaaattaccaagaaacctattccagatgagcacctcattctaaagaccacatttgaggatcttattcagcgctgcctttcttcagcaacagaccctcaaaccaagaggaagctagatgatgccagcaaacgtttggagtttctgtatgataaacttagggaacagacactttcaccaacaatcaccagtggtttacacaacattgcaaggagcattgaaactcgaaactactcagaaggattgaccatgcatacccacatagttagcaccagcaacttcagtgagacctctgctttcatgccagttctcaaagttgttctcacccaggccaataagctgggtgtctaaaaggacagcttctcttccactcaatattgccatttttccaaagaaacatgttaaaaaaaaaaattataagacatggactagtcctcattagcatgtttgcatagcaaccagtcaagagcatttacactatttctgctgatatactcaccttagaactgctcagaaccctggtgctttatttttgttttaatcttttgttgccagtgatgattttcctattctgcaaatagtgtatttcctggattacacatagtatggtttcctgaagtattctgataaatgtgttttttaaaacctcaatatactttttagaaaaggagcatctggttatgcataaagcagagctaaaactaaatttctttcatgtcctccctacttcctcagtgtcaatcagattaaagtgtgtaatccta

SEQ ID NO: 520961 - DNA, 777 bp, Homo sapiens
  misc_feature (455)..(455): n is a, c, g, or t
  misc_feature (569)..(569): n is a, c, g, or t
  misc_feature (777)..(777): n is a, c, g, or t
atggagtttcacccttggtgcccaggctggagtgcaatggcatgatcttggctcacagcaatctccacttcccgggttcaagcgattcttctgcctcagcctcccgagtagctgggattacagtagagacggggtttcaccctgttagccaggatggtgtcgatctcctgacctcatgatccgcctacctcggcctcccaaagtgctgggattacagacgtgagccaccgcgcccggccctggagaattaatttgaaggggaggaaaattcagtttcagctcagctagggatttagtcttactaaagacgtgggaggaagttctccagctgaccagctttccccaacgtggaaaggaccacggcaaggtcacctgacctctccaacagacattacacgccaagggattcacagtcccgccttggccatgagggagattgtgctcacgcagacggngcagtgcgggaaccggatcggcgccaagttctgggaggtgatctctgatgaacatgccatcgactccgctggcacctaccggggggacagggacctgctgctgaagcgtatcancgtatactacaatgaggccagcggtagcgggtatgtgccccgcgctgtgctaactgatctggagccgggcaccctggactctgtgcgcctccggccctttcggccagatctttaggccggagaactttttcttgggactccccagtacaacatgggctggagatctttccatgttcctctgtacagatctggcttcgatttccagccn

SEQ ID NO: 520962 - DNA, 1481 bp, Homo sapiens
ccccctgttccgaaggatacggctgggctggttgataaggctgtggctgtggataaggtggtacctggggggtcagcaatgtatcgacctcagcagcctgttgctcctcctacttcaaacgcttaccctaacaccccttacatatcttctgcttcttcctatactgggcagtctcagctgtacgcagcacagcaccaggcctcttcacctacctccagccctgctacttctttccctcctcccccttcctctggagcatccttccagcatggcggaccaggagctccaccatcatcttcagcttatgcactgcctcctggaacaacaggtacactgcctgctgccagtgagctgcctgcgtcccaaagaacaggtcctcagaatggttggaatgaccctccagctttgaacagagtacccaaaaagaagaagatgcctgaaaacttcatgcctcctgttcccatcacatcaccaatcatgaacccgttgggtgacccccagtcacaaatgctgcagcaacagccttcagctccagtaccactgtcaagccagtcttcattcccacagccacatcttccaggtggccagcccttccatggcgtacagcaacctcttggtcaaacaggcatgccaccatctttttcaaagcccaatattgaaggtgccccaggggctcctattggaaataccttccagcatgtgcagtctttgccaacaaaaaaaattaccaagaaacctattccagatgagcacctcattctaaagaccacatttgaggatcttattcagcgctgcctttcttcagcaacagaccctcaaaccaagaggaagctagatgatgccagcaaacgtttggagtttctgtatgataaacttagggaacagacactttcaccaacaatcaccagtggtttacacaacattgcaaggagcattgaaactcgaaactactcagaaggattgaccatgcatacccacatagttagcaccagcaacttcagtgagacctctgctttcatgccagttctcaaagttgttctcacccaggccaataagctgggtgtctaaaaggacagcttctcttccactcaatattgccatttttccaaagaaacatgttaaaaaaaaaaattataagacatggactagtcctcattagcatgtttgcatagcaaccagtcaagagcatttacactatttctgctgatatactcaccttagaactgctcagaaccctggtgctttatttttgttttaatcttttgttgccagtgatgattttcctattctgcaaatagtgtatttcctggattacacatagtatggtttcctgaagtattctgataaatgtgttttttaaaacctcaatatactttttagaaaaggagcatctggttatgcataaagcagagctaaaactaaatttctttcatgtcctccctacttcctcagtgtcaatcagattaaagtgtgtaatccta

SEQ ID NO: 520963 - DNA, 494 bp, Homo sapiens
gcaagggtacttttgaggaattttctgaatagtaggctgaattcttcaaccagccaaccaaacaacagcatgaatctatcttatactagatacgtactgcttcttctaaaaggctgcagagagggcagtcgtgggcccagtgaacagctgcattctggtcggtcctctttttcccttcctctgccaggaaccacagcagtgttgaggttctgtaagcacgtgcccagttggcaatgagcttatctctgagcatctgaacagaggagaagcccagagcagcctggctccagggaccccacgggacgcattgagtgctgagctaactcagggaggagaccacaacaaatacaaactctgggaaatcagggacagggcaagcctcttgggattcatccccggcggacatgcccagagactgtctgccacagcttttggcaatgacagatcttaccatagggctcctactaaataccctctggaaaagcactggacag

SEQ ID NO: 520964 - DNA, 791 bp, Homo sapiens
taacatggatggccaatttttaaaacactaaagtggaataaaatgcatgacaatagaaaaatgctgaacattatttgggatgctagctgtgggacataactgtgtaatttctggcttggagatgcaacatatatattcatcttgtgctaatttaatcccagatgtgtctgaatatccttcttcataaatcatgaaaactcatgctgagatagtaaaccatgaaatcgccttttcagtggtgccatgtatctgacagttccatctgggacggttccaaaattacctttaaaatgatctcagaagtcggtagattctcaatgatactgaaagcttggacctcttgtgtagaaaccaggtctatttagaaaatggctttatgataaatgtggcctcctgagtgatcatgaagtgtccctcgatatggtatggtacttaatgtgttaccaagtgccacatttcaatgagtcagagaaaaattaatttctcttcactacaataatagaccaggtagcctattctcttaaaaagtatgtgccagcaaactttattgacgacctatggattactaaatgaaaggatgggttaagtaagacttacatacctttcatcggagcttaagtaccttggaagacacttgggggacgttttcctacatcaattcacccaaacgtttatataagggaaacctctccgaatctgtttacaaatttatgggccagtcattcacaggtaacagggggtcaggctatgtttaaacattttcaagctggcggggagtgacaaactggccc

SEQ ID NO: 520965 - DNA, 198 bp, Homo sapiens
  misc_feature (49)..(49): n is a, c, g, or t
  misc_feature (113)..(113): n is a, c, g, or t
  misc_feature (175)..(175): n is a, c, g, or t
ccgcctggtccggccgggaagcccggaagacggggtcgggctgggagtnatggagccagaggaatgcctggacaaactggccccaagggtgaccggggtttcgacggcctgantgggttgccaggcgagaagggccacaggggtgaccctggtccttccggcccaccaggacctncgggagacgatggagaaaggggt

SEQ ID NO: 520966 - DNA, 2652 bp, Homo sapiens
agaagatctaggaaagaagattgctttggccttgaacaaagtggatggagccaatgtggctcttaaagactctgaccaagtagcacagagtgatggggaggagagccctgctgctgaagagcagctcttgggagagcacattaaagaggaaaaagaagaatctgaatttctaccctcatctggaggaacatttaatatctctgtcagtggggacattgatggtttaattactcaggctttgctgacgggcaattttgagagtgctgttgacctttgtttacatgataaccgcatggccgatgccattatattggccatagcaggtggacaagaactcttggctcgaacccagaaaaaatacttcgcaaaatcccaaagcaaaattaccaggctcatcactgcagtggtgatgaagaactggaaagagattgttgagtcttgtgatcttaaaaattggagagaggctttagctgcagtattgacttatgcaaagccggatgaattttcagccctttgtgatcttttgggaaccaggcttgaaaatgaaggagatagcctcctgcagactcaagcatgtctctgctatatttgtgcagggaatgtagagaaattagttgcatgttggactaaagctcaagatggaagccaccctttgtcacttcaggatctgattgagaaagttgtcatcctgcgaaaagctgtgcaactcactcaagccatggacactagtactgtaggagttctcttggctgcgaagatgagtcagtatgccaatttgttggcagctcagggcagtattgctgcagccttggcttttcttcctgacaacaccaaccagccaaatatcatgcagcttcgtgacagactttgtagagcacaaggagagcctgtagcaggacatgaatcacctaaaattccgtacgagaaacagcagctccccaagggcaggcctggaccagttgctggccaccaccagatgccaagagttcaaactcaacaatattatccccatggagaaaatcctccacctccgggtttcataatgcatggaaatgttaatccaaatgctgctggtcagcttcccacatctccaggtcatatgcacacccaggtaccaccttatccacagccacagccttatcaaccagcccagccgtatcccttcggaacaggggggtcagcaatgtatcgacctcagcagcctgttgctcctcctacttcaaacgcttaccctaacaccccttacatatcttctgcttcttcctatactggacgagcgctgcactaacgcaggatccggctgccgaagtcctcgccagcacagcaccaggcctcttcacctacctccagccctgctacttctttccctcctcccccttcctctggagcatccttccagcatggcggaccaggagctccaccatcatcttcagcttatgcactgcctcctggaacaacaggtacactgcctgctgccagtgagctgcctgcgtcccaaagaacagaaaaccagtctatccaagaccaggcacctatgttggaaggtcctcagaatggttggaatgaccctccagctttgaacagagtacccaaaaagaagaagatgcctgaaaacttcatgcctcctgttcccatcacatcaccaatcatgaacccgttgggtgacccccagtcacaaatgctgcagcaacagccttcagctccagtaccactgtcaagccagtcttcattcccacagccacatcttccaggtggccagcccttccatggcgtacagcaacctcttggtcaaacaggcatgccaccatctttttcaaagcccaatattgaaggtgccccaggggctcctattggaaataccttccagcatgtgcagtctttgccaacaaaaaaaattaccaagaaacctattccagatgagcacctcattctaaagaccacatttgaggatcttattcagcgctgcctttcttcagcaacagaccctcaaaccaagaggaagctagatgatgccagcaaacgtttggagtttctgtatgataaacttagggaacagacactttcaccaacaatcaccagtggtttacacaacattgcaaggagcattgaaactcgaaactactcagaaggattgaccatgcatacccacatagttagcaccagcaacttcagtgagacctctgctttcatgccagttctcaaagttgttctcacccaggccaataagctgggtgtctaaaaggacagcttctcttccactcaatattgccatttttccaaagaaacatgttaaaaaaaaaaattataagacatggactagtcctcattagcatgtttgcatagcaaccagtcaagagcatttacactatttctgctgatatactcaccttagaactgctcagaaccctggtgctttatttttgttttaatcttttgttgccagtgatgattttcctattctgcaaatagtgtatttcctggattacacatagtatggtttcctgaagtattctgataaatgtgttttttaaaacctcaatatactttttagaaaaggagcatctggttatgcataaagcagagctaaaactaaatttctttcatgtcctccctacttcctcagtgtcaatcagattaaagtgtgtaatccta

SEQ ID NO: 520967 - DNA, 2378 bp, Homo sapiens
agaagatctaggaaagaagattgctttggccttgaacaaagtggatggagccaatgtggctcttaaagactctgaccaagtagcacagagtgatggggaggagagccctgctgctgaagagcagctcttgggagagcacattaaagaggaaaaagaagaatctgaatttctaccctcatctggaggaacatttaatatctctgtcagtggggacattgatggtttaattactcaggctttgctgacgggcaattttgagagtgctgttgacctttgtttacatgataaccgcatggccgatgccattatattggccatagcaggtggacaagaactcttggctcgaacccagaaaaaatacttcgcaaaatcccaaagcaaaattaccaggctcatcactgcagtggtgatgaagaactggaaagagattgttgagtcttgtgatcttaaaaattggagagaggctttagctgcagtattgacttatgcaaagccggatgaattttcagccctttgtgatcttttgggaaccaggcttgaaaatgaaggagatagcctcctgcagactcaagcatgtctctgctatatttgtgcagggaatgtagagaaattagttgcatgttggactaaagctcaagatggaagccaccctttgtcacttcaggatctgattgagaaagttgtcatcctgcgaaaagctgtgcaactcactcaagccatggacactagtactgtaggagttctcttggctgcgaagatgagtcagtatgccaatttgttggcagctcagggcagtattgctgcagccttggcttttcttcctgacaacaccaaccagccaaatatcatgcagcttcgtgacagactttgtagagcacaaggagagcctgtagcaggacatgaatcacctaaaattccgtacgagaaacagcagctccccaagggcaggcctggaccagttgctggccaccaccagatgccaagagttcaaactcaacaatattatccccatggagaaaatcctccacctccgggtttcataatgcatggaaatgttaatccaaatgctgctggtcagcttcccacatctccaggtcatatgcacacccaggtaccaccttatccacagccacagccttatcaaccagcccagccgtatcccttcggaacaggggggtcagcaatgtatcgacctcagcatccttccagcatggcggaccaggagctccaccatcatcttcagcttatgcactgcctcctggaacaacaggtcctcagaatggttggaatgaccctccagctttgaacagagtacccaaaaagaagaagatgcctgaaaacttcatgcctcctgttcccatcacatcaccaatcatgaacccgttgggtgacccccagtcacaaatgctgcagcaacagccttcagctccagtaccactgtcaagccagtcttcattcccacagccacatcttccaggtggccagcccttccatggcgtacagcaacctcttggtcaaacaggcatgccaccatctttttcaaagcccaatattgaaggtgccccaggggctcctattggaaataccttccagcatgtgcagtctttgccaacaaaaaaaattaccaagaaacctattccagatgagcacctcattctaaagaccacatttgaggatcttattcagcgctgcctttcttcagcaacagaccctcaaaccaagaggaagctagatgatgccagcaaacgtttggagtttctgtatgataaacttagggaacagacactttcaccaacaatcaccagtggtttacacaacattgcaaggagcattgaaactcgaaactactcagaaggattgaccatgcatacccacatagttagcaccagcaacttcagtgagacctctgctttcatgccagttctcaaagttgttctcacccaggccaataagctgggtgtctaaaaggacagcttctcttccactcaatattgccatttttccaaagaaacatgttaaaaaaaaaaattataagacatggactagtcctcattagcatgtttgcatagcaaccagtcaagagcatttacactatttctgctgatatactcaccttagaactgctcagaaccctggtgctttatttttgttttaatcttttgttgccagtgatgattttcctattctgcaaatagtgtatttcctggattacacatagtatggtttcctgaagtattctgataaatgtgttttttaaaacctcaatatactttttagaaaaggagcatctggttatgcataaagcagagctaaaactaaatttctttcatgtcctccctacttcctcagtgtcaatcagattaaagtgtgtaatccta

SEQ ID NO: 520968 - DNA, 348 bp, Homo sapiens
cttatttcacgggtgtgtttcgtcgagatgcacacacgagagaggttgctcatagggttaaagagatgtgagaagagaaatttcaaaggctctgggtggagatgcgctttgctcagaatcttcagcagtgtgcatttggagatcatgtgaaattagtggatggagtaactggatttgcaaaaacatgtgttgctgatgagtcaactgaaaattgtgacacaatcacttcataccctttttggagacacattatgcacaggtgcaactcttcgtgcctatggtgggctgactgtgtgtgcccccttccccgattggtgagaccacaggttgatgtgtgtgccctggttt

SEQ ID NO: 520969 - DNA, 2245 bp, Homo sapiens
agaagatctaggaaagaagattgctttggccttgaacaaagtggatggagccaatgtggctcttaaagactctgaccaagtagcacagagtgatggggaggagagccctgctgctgaagagcagctcttgggagagcacattaaagaggaaaaagaagaatctgaatttctaccctcatctggaggaacatttaatatctctgtcagtggggacattgatggtttaattactcaggctttgctgacgggcaattttgagagtgctgttgacctttgtttacatgataaccgcatggccgatgccattatattggccatagcaggtggacaagaactcttggctcgaacccagaaaaaatacttcgcaaaatcccaaagcaaaattaccaggctcatcactgcagtggtgatgaagaactggaaagagattgttgagtcttgtgatcttaaaaattggagagaggctttagctgcagtattgacttatgcaaagccggatgaattttcagccctttgtgatcttttgggaaccaggcttgaaaatgaaggagatagcctcctgcagactcaagcatgtctctgctatatttgtgcagggaatgtagagaaattagttgcatgttggactaaagctcaagatggaagccaccctttgtcacttcaggatctgattgagaaagttgtcatcctgcgaaaagctgtgcaactcactcaagccatggacactagtactgtaggagttctcttggctgcgaagatgagtcagtatgccaatttgttggcagctcagggcagtattgctgcagccttggcttttcttcctgacaacaccaaccagccaaatatcatgcagcttcgtgacagactttgtagagcacaaggagagcctgtagcaggacatgaatcacctaaaattccgtacgagaaacagcagctccccaagggcaggcctggaccagttgctggccaccaccagatgccaagagttcaaactcaacaatattatccccatggagaaaatcctccacctccgggtttcataatgcatggaaatgttaatccaaatgctgctggtcagcttcccacatctccaggtcatatgcacacccaggtaccaccttatccacagccacagcggtcctcagaatggttggaatgaccctccagctttgaacagagtacccaaaaagaagaagatgcctgaaaacttcatgcctcctgttcccatcacatcaccaatcatgaacccgttgggtgacccccagtcacaaatgctgcagcaacagccttcagctccagtaccactgtcaagccagtcttcattcccacagccacatcttccaggtggccagcccttccatggcgtacagcaacctcttggtcaaacaggcatgccaccatctttttcaaagcccaatattgaaggtgccccaggggctcctattggaaataccttccagcatgtgcagtctttgccaacaaaaaaaattaccaagaaacctattccagatgagcacctcattctaaagaccacatttgaggatcttattcagcgctgcctttcttcagcaacagaccctcaaaccaagaggaagctagatgatgccagcaaacgtttggagtttctgtatgataaacttagggaacagacactttcaccaacaatcaccagtggtttacacaacattgcaaggagcattgaaactcgaaactactcagaaggattgaccatgcatacccacatagttagcaccagcaacttcagtgagacctctgctttcatgccagttctcaaagttgttctcacccaggccaataagctgggtgtctaaaaggacagcttctcttccactcaatattgccatttttccaaagaaacatgttaaaaaaaaaaattataagacatggactagtcctcattagcatgtttgcatagcaaccagtcaagagcatttacactatttctgctgatatactcaccttagaactgctcagaaccctggtgctttatttttgttttaatcttttgttgccagtgatgattttcctattctgcaaatagtgtatttcctggattacacatagtatggtttcctgaagtattctgataaatgtgttttttaaaacctcaatatactttttagaaaaggagcatctggttatgcataaagcagagctaaaactaaatttctttcatgtcctccctacttcctcagtgtcaatcagattaaagtgtgtaatccta

SEQ ID NO: 520970 - DNA, 626 bp, Homo sapiens
  misc_feature (625)..(625): n is a, c, g, or t
ccgggctgtaggagtagtagatcacgatagcgtctgtagagaggagaaacacaatgagcacatgtggcagcagaggctactcttagacaaaggcccacactcagaagcagaccccctgtgctctgtaaccccaaggccctgctgaagagacactggacctctgaggaacttcttacttccggggcttcgtatgcacaggaagacattcaccagaggtggtgacgccggtggctgggggtttgaggtgccaggaagtaagcgcatgccacatacaagctgtagaccccagaggccctgcaggcgcaacaggaatgggctgtcaggttggcggctctgtcaacgggctcaatggcctgcatgtagactaccggaccgcgaacaatctgagtctgaccggcccacggaccaatgtgaaggaagtcatggaggagttagagtgctcagattctgtgccttccaagccttcacaggcctgtggctgagggaagccacaatgacacacagccatgcgtagacacaggatgccatgcacaaggataggattggacatacgcagactttacgcacatacatgtgtcaagttgagagttatacactgaatgtgggagcccgtatcatatctttnt

SEQ ID NO: 520971 - DNA, 2337 bp, Homo sapiens
agaagatctaggaaagaagattgctttggccttgaacaaagtggatggagccaatgtggctcttaaagactctgaccaagtagcacagagtgatggggaggagagccctgctgctgaagagcagctcttgggagagcacattaaagaggaaaaagaagaatctgaatttctaccctcatctggaggaacatttaatatctctgtcagtggggacattgatggtttaattactcaggctttgctgacgggcaattttgagagtgctgttgacctttgtttacatgataaccgcatggccgatgccattatattggccatagcaggtggacaagaactcttggctcgaacccagaaaaaatacttcgcaaaatcccaaagcaaaattaccaggctcatcactgcagtggtgatgaagaactggaaagagattgttgagtcttgtgatcttaaaaattggagagaggctttagctgcagtattgacttatgcaaagccggatgaattttcagccctttgtgatcttttgggaaccaggcttgaaaatgaaggagatagcctcctgcagactcaagcatgtctctgctatatttgtgcagggaatgtagagaaattagttgcatgttggactaaagctcaagatggaagccaccctttgtcacttcaggatctgattgagaaagttgtcatcctgcgaaaagctgtgcaactcactcaagccatggacactagtactgtaggagttctcttggctgcgaagatgagtcagtatgccaatttgttggcagctcagggcagtattgctgcagccttggcttttcttcctgacaacaccaaccagccaaatatcatgcagcttcgtgacagactttgtagagcacaaggagagcctgtagcaggacatgaatcacctaaaattccgtacgagaaacagcagctccccaagggcaggcctggaccagttgctggccaccaccagatgccaagagttcaaactcaacaatattatccccatgttagaattgcccctactgtcactacctggagtaacaaaactcctactgcccttcccagccatccacctgcagcctctccctctgacacacaggagaaaatcctccacctccgggtttcataatgcatggaaatgttaatccaaatgctgctggtcagcttcccacatctccaggtcatatgcacacccaggtaccaccttatccacagccacagcggtcctcagaatggttggaatgaccctccagctttgaacagagtacccaaaaagaagaagatgcctgaaaacttcatgcctcctgttcccatcacatcaccaatcatgaacccgttgggtgacccccagtcacaaatgctgcagcaacagccttcagctccagtaccactgtcaagccagtcttcattcccacagccacatcttccaggtggccagcccttccatggcgtacagcaacctcttggtcaaacaggcatgccaccatctttttcaaagcccaatattgaaggtgccccaggggctcctattggaaataccttccagcatgtgcagtctttgccaacaaaaaaaattaccaagaaacctattccagatgagcacctcattctaaagaccacatttgaggatcttattcagcgctgcctttcttcagcaacagaccctcaaaccaagaggaagctagatgatgccagcaaacgtttggagtttctgtatgataaacttagggaacagacactttcaccaacaatcaccagtggtttacacaacattgcaaggagcattgaaactcgaaactactcagaaggattgaccatgcatacccacatagttagcaccagcaacttcagtgagacctctgctttcatgccagttctcaaagttgttctcacccaggccaataagctgggtgtctaaaaggacagcttctcttccactcaatattgccatttttccaaagaaacatgttaaaaaaaaaaattataagacatggactagtcctcattagcatgtttgcatagcaaccagtcaagagcatttacactatttctgctgatatactcaccttagaactgctcagaaccctggtgctttatttttgttttaatcttttgttgccagtgatgattttcctattctgcaaatagtgtatttcctggattacacatagtatggtttcctgaagtattctgataaatgtgttttttaaaacctcaatatactttttagaaaaggagcatctggttatgcataaagcagagctaaaactaaatttctttcatgtcctccctacttcctcagtgtcaatcagattaaagtgtgtaatccta

SEQ ID NO: 520972 - DNA, 356 bp, Homo sapiens
ttgtttaatcgcctaatgaataaatcttgataaatttacatattatttcatcttaaaacaaatctttgcaatagatagtatgttttatgttgaaggaaatgaaaacgggttcagagaagcctttgattgcatatgtcattaatggtgtttcatgctaagtatggcttcagaaactttactcttagaacttcaaaacaggtgattttaaatattacattacaaatatcagtgtaaaaagaacactatagtgttacattgcagattgcttgagcccaggaggtttaggttgcagtgagccatggtggtgccactatactcagcttgggtgattgattgagaccctgtctcaagtaaaa

SEQ ID NO: 520973 - DNA, 1368 bp, Homo sapiens
  misc_feature (18)..(19): n is a, c, g, or t
  misc_feature (23)..(23): n is a, c, g, or t
  misc_feature (29)..(30): n is a, c, g, or t
  misc_feature (33)..(33): n is a, c, g, or t
  misc_feature (35)..(35): n is a, c, g, or t
ccgactctatgaggatcnnccgnctcagnngtncnctgcttcttcctatactgggcagtctcagctgtacgcagcacagcaccaggcctcttcacctacctccagccctgctacttctttccctcctcccccttcctctggagcatccttccagcatggcggaccaggagctccaccatcatcttcagcttatgcactgcctcctggaacaacaggtacactgcctgctgccagtgagctgcctgcgtcccaaagaacaggtcctcagaatggttggaatgaccctccagctttgaacagagtacccaaaaagaagaagatgcctgaaaacttcatgcctcctgttcccatcacatcaccaatcatgaacccgttgggtgacccccagtcacaaatgctgcagcaacagccttcagctccagtaccactgtcaagccagtcttcattcccacagccacatcttccaggtggccagcccttccatggcgtacagcaacctcttggtcaaacaggcatgccaccatctttttcaaagcccaatattgaaggtgccccaggggctcctattggaaataccttccagcatgtgcagtctttgccaacaaaaaaaattaccaagaaacctattccagatgagcacctcattctaaagaccacatttgaggatcttattcagcgctgcctttcttcagcaacagaccctcaaaccaagaggaagctagatgatgccagcaaacgtttggagtttctgtatgataaacttagggaacagacactttcaccaacaatcaccagtggtttacacaacattgcaaggagcattgaaactcgaaactactcagaaggattgaccatgcatacccacatagttagcaccagcaacttcagtgagacctctgctttcatgccagttctcaaagttgttctcacccaggccaataagctgggtgtctaaaaggacagcttctcttccactcaatattgccatttttccaaagaaacatgttaaaaaaaaaaattataagacatggactagtcctcattagcatgtttgcatagcaaccagtcaagagcatttacactatttctgctgatatactcaccttagaactgctcagaaccctggtgctttatttttgttttaatcttttgttgccagtgatgattttcctattctgcaaatagtgtatttcctggattacacatagtatggtttcctgaagtattctgataaatgtgttttttaaaacctcaatatactttttagaaaaggagcatctggttatgcataaagcagagctaaaactaaatttctttcatgtcctccctacttcctcagtgtcaatcagattaaagtgtgtaatccta

SEQ ID NO: 520974 - DNA, 113 bp, Homo sapiens
ttagtcaaaatatactgagatgtctgggcactcaggtgctgtaatcccagcacttggcgaggctgaagcaggaggatagcttgaacccaggagttcaagaacagcctggacag

SEQ ID NO: 520975 - DNA, 2527 bp, Homo sapiens
agaagatctaggaaagaagattgctttggccttgaacaaagtggatggagccaatgtggctcttaaagactctgaccaagtagcacagagtgatggggaggagagccctgctgctgaagagcagctcttgggagagcacattaaagaggaaaaagaagaatctgaatttctaccctcatctggaggaacatttaatatctctgtcagtggggacattgatggtttaattactcaggctttgctgacgggcaattttgagagtgctgttgacctttgtttacatgataaccgcatggccgatgccattatattggccatagcaggtggacaagaactcttggctcgaacccagaaaaaatacttcgcaaaatcccaaagcaaaattaccaggctcatcactgcagtggtgatgaagaactggaaagagattgttgagtcttgtgatcttaaaaattggagagaggctttagctgcagtattgacttatgcaaagccggatgaattttcagccctttgtgatcttttgggaaccaggcttgaaaatgaaggagatagcctcctgcagactcaagcatgtctctgctatatttgtgcagggaatgtagagaaattagttgcatgttggactaaagctcaagatggaagccaccctttgtcacttcaggatctgattgagaaagttgtcatcctgcgaaaagctgtgcaactcactcaagccatggacactagtactgtaggagttctcttggctgcgaagatgagtcagtatgccaatttgttggcagctcagggcagtattgctgcagccttggcttttcttcctgacaacaccaaccagccaaatatcatgcagcttcgtgacagactttgtagagcacaaggagagcctgtagcaggacatgaatcacctaaaattccgtacgagaaacagcagctccccaagggcaggcctggaccagttgctggccaccaccagatgccaagagttcaaactcaacaatattatccccatggagaaaatcctccacctccgggtttcataatgcatggaaatgttaatccaaatgctgctggtcagcttcccacatctccaggtcatatgcacacccaggtaccaccttatccacagccacagccttatcaaccagcccagccgtatcccttcggaacaggggggtcagcaatgtatcgacctcagcagcctgttgctcctcctacttcaaacgcttaccctaacaccccttacatatcttctgcttcttcctatactgggcagtctcagctgtacgcagcacagcaccaggcctcttcacctacctccagccctgctacttctttccctcctcccccttcctctggagcatccttccagcatggcggaccaggagctccaccatcatcttcagcttatgcactgcctcctggaacaacagaaaaccagtctatccaagaccaggcacctatgttggaaggtcctcagaatggttggaatgaccctccagctttgaacagagtacccaaaaagaagaagatgcctgaacccccagtcacaaatgctgcagcaacagccttcagctccagtaccactgtcaagccagtcttcattcccacagccacatcttccaggtggccagcccttccatggcgtacagcaacctcttggtcaaacaggcatgccaccatctttttcaaagcccaatattgaaggtgccccaggggctcctattggaaataccttccagcatgtgcagtctttgccaacaaaaaaaattaccaagaaacctattccagatgagcacctcattctaaagaccacatttgaggatcttattcagcgctgcctttcttcagcaacagaccctcaaaccaagaggaagctagatgatgccagcaaacgtttggagtttctgtatgataaacttagggaacagacactttcaccaacaatcaccagtggtttacacaacattgcaaggagcattgaaactcgaaactactcagaaggattgaccatgcatacccacatagttagcaccagcaacttcagtgagacctctgctttcatgccagttctcaaagttgttctcacccaggccaataagctgggtgtctaaaaggacagcttctcttccactcaatattgccatttttccaaagaaacatgttaaaaaaaaaaattataagacatggactagtcctcattagcatgtttgcatagcaaccagtcaagagcatttacactatttctgctgatatactcaccttagaactgctcagaaccctggtgctttatttttgttttaatcttttgttgccagtgatgattttcctattctgcaaatagtgtatttcctggattacacatagtatggtttcctgaagtattctgataaatgtgttttttaaaacctcaatatactttttagaaaaggagcatctggttatgcataaagcagagctaaaactaaatttctttcatgtcctccctacttcctcagtgtcaatcagattaaagtgtgtaatccta

SEQ ID NO: 520976 - DNA, 179 bp, Homo sapiens
tctgaggatcctgtaagacgacagaagggaaaagggggttcgcaaaatcactcggggaagggaaaggttgctttgttatcatgcctatggtgggtgattaactgcttgtaccattacgtttcacttttaaattaattgtgcgttaggctttaataaaatttgggggtgcccctctgtcg

SEQ ID NO: 520977 - DNA, 417 bp, Homo sapiens
cacgagggtttcttccctgtcgcagctctgttcgatcacgcggctgtagtaggcgcggtcgcgcgccgacgcttcgggcacgacgatgaactgcatcaggccgaggcggccggcgacgatccagtcctgcgtgttcgccggctcctgtccggcatttgcgccggcagacagcgtgagcgcaccgagcagcgcgcacagcatgcggttcatgacttctcctccggatcggcgcaaatgcgccgcttgccggtcagaccggcccggcgctgcccggttcgtcgtcggtgccggtgcgacgcgtgcgcaggctgccctcgaccatgcggtactcgaacagccggcattcgagcgcgccattgaacagcggcgtgcgccggctcgccttcagcttgatcagcttcgggaaatccggatcgg

SEQ ID NO: 520978 - DNA, 345 bp, Homo sapiens
ccaccacgtctagagctgcccccactacatgtctctactgcttcttcacaatctgattaatcccagccaggtgcagtggctcacacctgtaatcccagcactatgggaggcaggcggatcacttgaggtccaggaattaaagaccagcctggtcaacatggtgaaaccccatctctactaaaaatacaaaaattagccaggcatggtggtgggcacctataatcccagctcacttggcaggctcaggcacacagaatcacttcaactcacgaggcagaggctgcagtgagccgagcattgcaccactgcactccagcctgggtgacagactcagactccatctca

SEQ ID NO: 520979 - DNA, 518 bp, Homo sapiens
tcgggcgcatggatgggcgaggtccacggtgcttcctaacacgtaggtgccttctctcctcagtcatcacccctccaaaaacagtcctggacgaccacacgcagaccctctttcaggcgaacctcttcccggccgctctggtgcacttgggagccgaggagccggcaggtgtctacctggagcctggcctgctggagcatgccatctccccatctgcggccgatgtgctggtggccaggtacatgtccagggccgccgggtccccttccccattgccagcccctgaccctgcacctaagtctgagccagctgctgaggagggggcgctggtcccccctgagcccatcccagggacggcccagcccgtgaagaggagcctgggcaaggtgcccaagtggctgaagctgccggccagcaagaggtgagagctgccagcctgaggtgcccactccgccagccacaggaccacctcctctgccagcaggaataaagacttgtgcatccctcaaaaaaaaaaa

SEQ ID NO: 520980 - DNA, 238 bp, Homo sapiens
tcagggcttttagcagactgaagccatggtttttagttttgtctctagtgatgagcagaaaagagggatgaggaagaggctggacgtgggccaaccagaaagagaagctaagaacccatgactggattctctcccttggacaccccacagaccagtatcttaccttccaggagaagacccttccagctcttgcttctttaaacctattaacttaggtttctttagctagactaccaaa

SEQ ID NO: 520981 - DNA, 534 bp, Homo sapiens
cgagcctctccaagcactggtcagcctccatgccacccagtctgccgaccctcctctccaccatcccctcgtccgagcagtggcgatccctcccgagtcaaggctgggcacaagcacgtggggacaggccgggcgaacctcttcccggccgctctggtgcacttgggagccgaggagccggcaggtgtctacctggagcctggcctgctggagcatgccatctccccatctgcggccgatgtgctggtggccaggtacatgtccagggccgccgggtccccttccccattgccagcccctgaccctgcacctaagtctgagccagctgctgaggagggggcgctggtcccccctgagcccatcccagggacggcccagcccgtgaagaggagcctgggcaaggtgcccaagtggctgaagctgccggccagcaagaggtgagagctgccagcctgaggtgcccactccgccagccacaggaccacctcctctgccagcaggaataaagacttgtgcatccctcaaaaaaaaaaa

SEQ ID NO: 520982 - DNA, 181 bp, Homo sapiens
  misc_feature (93)..(93): n is a, c, g, or t
gtcacatgacactcgccttctgccaaagctttcctgtcttcttgaccctgaacctcctaatgcttcttgccgacacttcttcttcctcctgtntccaaagggctctttttttcccaataaatggaactttctttttctttctttttttttttttttttttttttttttttttttttatatt

SEQ ID NO: 520983 - DNA, 169 bp, Homo sapiens
ccttgatgttagcatttgggacttgtgacttccaaaactgtaaggaaataagtttgtgttgttttaagcccctaaatttggggtaattttttacagcaggactgggatattaatacgctgcacttctgtaaaaacctttttaattaaattatcttcagttaaagcccca

SEQ ID NO: 520984 - DNA, 1776 bp, Homo sapiens
  misc_feature (252)..(252): n is a, c, g, or t
ggagcgctccgtggctgtcggtgctggccccgaacggcccggcgccacacggtgaaggtgacgccgaggcaccgtgctgcttcaggttctggaggacacgtgtccggcggcgaggacattcaaaccacctgttgacatatgatactgagaggttgtcaagagagatgcagtgtctcggaccgttatctcctccaggtggagatttgcacaagccgtagcccagaacagagtagcgctagagtcgtggagatngtgccacgcttccacggagccgtgaggggcctgagaacatggttcgcatcgctttgcagctggacgatggctcgaggttgcaggactctttctgttcaggccagaccctctgggagcttctcagccattttccacagatcagggagtgcctgcagcaccccggcggggccaccccagtctgcgtgtacacgagggatgaggtgacgggtgaagctgccctgcggggcacgacgctgcagtcgctgggcctgaccgggggcagcgccaccatcaggtttgtcatgaagtgctacgaccccgtgggcaagaccccaggaagcctgggctcgtcagcgtcggctggccaggcagccgccagcgctccacttcccttggaatctggggagctcagccgcggcgacttgagccgtccggaggacgcggacacctcagggccctgctgcgagcacactcaggagaagcagagcacaagggcacccgcagctgccccctttgttcctttctcgggtgggggacagagacaggggggccctcctgggcccacgaggcctctgacatcatcttcagctaagttgccgaagtccctctccagccctggaggcccctccaagccaaagaagtccaagtcgggccaggatccccagcaggagcaggagcaggagcgggagcgggatccccagcaggagcaggagcgggagcggcccgtggaccgggagcccgtggaccgggagcccggtggtgtgccaccccgacctggaggagcggctgcaggcctggccagcggagctgcctgatgagttctttgagctgacggtggacgacgtgagaagacgcttggcccagctcaagagtgagcggaagcgcctggaagaagcccccttggtgaccaaggccttcagggaggcgcagataaaggagaagctggagcgctacccaaaggtggctctgagggtcctgttccccgaccgctacgtcctacagggcttcttccgccccagcgagacagtgggggacttgcgagacttcgtgaggagccacctggggaaccccgagctgtcattttacctgttcatcacccctccaaaaacagtcctggacgaccacacgcagaccctctttcaggcgaacctcttcccggccgctctggtgcacttgggagccgaggagccggcaggtgtctacctggagcctggcctgctggagcatgccatctccccatctgcggccgatgtgctggtggccaggtacatgtccagggccgccgggtccccttccccattgccagcccctgaccctgcacctaagtctgagccagctgctgaggagggggcgctggtcccccctgagcccatcccagggacggcccagcccgtgaagaggagcctgggcaaggtgcccaagtggctgaagctgccggccagcaagaggtgagagctgccagcctgaggtgcccactccgccagccacaggaccacctcctctgccagcaggaataaagacttgtgcatccctcaaaaaaaaaaa

SEQ ID NO: 520985 - DNA, 322 bp, Homo sapiens
gatcgacgacatgtacctcactcagcaacgcatctgctgacccagtgatggagggtctgcgatcagccgtacgctatgacaaaacctatttcgacaagatcgtggccagccttctgccattgctggaaaaactgaccacaggccggattgcagactgctatctcccgactacatggatcttgaggacccacgaccaatctttgactggatgcagatcatccgcaaacgggcagtggtctatgtcggcctggacgctttatctgatacagaggtagctgcagcggtgggcaactcgatgttcagcggtcgaccggccgcaatt

SEQ ID NO: 520986 - DNA, 1461 bp, Homo sapiens
  misc_feature (252)..(252): n is a, c, g, or t
ggagcgctccgtggctgtcggtgctggccccgaacggcccggcgccacacggtgaaggtgacgccgaggcaccgtgctgcttcaggttctggaggacacgtgtccggcggcgaggacattcaaaccacctgttgacatatgatactgagaggttgtcaagagagatgcagtgtctcggaccgttatctcctccaggtggagatttgcacaagccgtagcccagaacagagtagcgctagagtcgtggagatngtgccacgcttccacggagccgtgaggggcctgagaacatggttcgcatcgctttgcagctggacgatggctcgaggttgcaggactctttctgttcaggccagaccctctgggagcttctcagccattttccacagatcagggagtgcctgcagcaccccggcggggccaccccagtctgcgtgtacacgagggatgaggtgacgggtgaagctgccctgcggggcacgacgctgcagtcgctgggcctgaccgggggcagcgccaccatcagcagccctggaggcccctccaagccaaagaagtccaagtcgggccaggatccccagcaggagcaggagcaggagcgggagcgggatccccagcaggagcaggagcgggagcggcccgtggaccgggagcccgtggaccgggagcccggtggtgtgccaccccgacctggaggagcggctgcaggcctggccagcggagctgcctgatgagttctttgagctgacggtggacgacgtgagaagacgcttggcccagctcaagagtgagcggaagcgcctggaagaagcccccttggtgaccaaggccttcagggaggcgcagataaaggagaagctggagcgctacccaaaggtggctctgagggtcctgttccccgaccgctacgtcctacagggcttcttccgccccagcgagacagtgggggacttgcgagacttcgtgaggagccacctggggaaccccgagctgtcattttacctgttcatcacccctccaaaaacagtcctggacgaccacacgcagaccctctttcaggcgaacctcttcccggccgctctggtgcacttgggagccgaggagccggcaggtgtctacctggagcctggcctgctggagcatgccatctccccatctgcggccgatgtgctggtggccaggtacatgtccagggccgccgggtccccttccccattgccagcccctgaccctgcacctaagtctgagccagctgctgaggagggggcgctggtcccccctgagcccatcccagggacggcccagcccgtgaagaggagcctgggcaaggtgcccaagtggctgaagctgccggccagcaagaggtgagagctgccagcctgaggtgcccactccgccagccacaggaccacctcctctgccagcaggaataaagacttgtgcatccctcaaaaaaaaaaa

SEQ ID NO: 520987 - DNA, 766 bp, Homo sapiens
  misc_feature (342)..(342): n is a, c, g, or t
  misc_feature (431)..(431): n is a, c, g, or t
  misc_feature (447)..(447): n is a, c, g, or t
  misc_feature (449)..(450): n is a, c, g, or t
  misc_feature (462)..(462): n is a, c, g, or t
  misc_feature (466)..(467): n is a, c, g, or t
  misc_feature (470)..(470): n is a, c, g, or t
  misc_feature (476)..(476): n is a, c, g, or t
  misc_feature (478)..(479): n is a, c, g, or t
  misc_feature (505)..(505): n is a, c, g, or t
  misc_feature (517)..(517): n is a, c, g, or t
  misc_feature (526)..(526): n is a, c, g, or t
  misc_feature (529)..(529): n is a, c, g, or t
  misc_feature (550)..(550): n is a, c, g, or t
  misc_feature (554)..(555): n is a, c, g, or t
  misc_feature (568)..(568): n is a, c, g, or t
  misc_feature (588)..(588): n is a, c, g, or t
  misc_feature (607)..(607): n is a, c, g, or t
agcgggacccggaagccgccgatggccgccgcacaagctgcgctcgtctctcggctggggagctccgtgtcgcaccgggttcttgggctggcgtgtccttctccctcggtcgccactggcccatgagtccccatggcgacggcaggggccaggcccaggggcgggcagtccgagtggggctgcggcgctccgggggcatccgcgggggtggggtgttcgccgcgtggccgcagtgttcaccttcaccctgcccccttcggtaccggggggagactccggggaactgatcacagccgcacatgagcttggagttgcccatcctcctggctatccttgttcacnctggtggctaaactggcaattacactgtttcctttggttcaatgcctaccgcgtcaatcttctctgtggcttatttggagcagtagctngcatcattactttttntnnacggtttcaggntttnnggntcatcngnnggaggaatccttggtggggggtgttncattttctcgtntaacatggnagnggtccattgcagcagaggttnaagnntaaacaatctctngggggctgttatggtcttantgtacatttgaggaagcanactgtaaggagagatcaaaggtagctaaaattggtgcttctgtgtgcgcttagttatgtaaccagcacacaataatactctatggtgcgggcctaataccttgggattctcgtttccacacttttagaaagcaagggactctccctggggccatgggac

SEQ ID NO: 520988 - DNA, 1875 bp, Homo sapiens
  misc_feature (252)..(252): n is a, c, g, or t
ggagcgctccgtggctgtcggtgctggccccgaacggcccggcgccacacggtgaaggtgacgccgaggcaccgtgctgcttcaggttctggaggacacgtgtccggcggcgaggacattcaaaccacctgttgacatatgatactgagaggttgtcaagagagatgcagtgtctcggaccgttatctcctccaggtggagatttgcacaagccgtagcccagaacagagtagcgctagagtcgtggagatngtgccacgcttccacggagccgtgaggggcctgagaacatggttcgcatcgctttgcagctggacgatggctcgaggttgcaggactctttctgttcaggccagaccctctgggagcttctcagccattttccacagatcagggagtgcctgcagcaccccggcggggccaccccagtctgcgtgtacacgagggatgaggtgacgggtgaagctgccctgcggggcacgacgctgcagtcgctgggcctgaccgggggcagcgccaccatcaggtttgtcatgaagtgctacgaccccgtgggcaagaccccaggaagcctgggctcgtcagcgtcggctggccaggcagccgccagcgctccacttcccttggaatctggggagctcagccgcggcgacttgagccgtccggaggacgcggacacctcagggccctgctgcgagcacactcaggagaagcagagcacaagggcacccgcagctgccccctttgttcctttctcgggtgggggacagagacaggggggccctcctgggcccacgaggcctctgacatcatcttcagctaagttgccgaagtccctctccagccctggaggcccctccaagccaaagaagtccaagtcgggccaggatccccagcaggagcaggagcaggagcgggagcgggatccccagcaggagcaggagcgggagcggcccgtggaccgggagcccgtggaccgggagcccggtggtgtgccaccccgacctggaggagcggctgcaggcctggccagcggagctgcctgatgagttctttgagctgacggtggacgacgtgagaagacgcttggcccagctcaagagtgagcggaagcgcctggaagaagcccccttggtgaccaaggccttcagggaggcgcagataaaggagaagctggagcgctacccaaaggctggagtcagatggtgccatctcggctcactgcaagctcctgcctcccgggttcaagtggttctcctgcctcagcctcccaagtagctgggatttcaggtggctctgagggtcctgttccccgaccgctacgtcctacagggcttcttccgccccagcgagacagtgggggacttgcgagacttcgtgaggagccacctggggaaccccgagctgtcattttacctgttcatcacccctccaaaaacagtcctggacgaccacacgcagaccctctttcaggcgaacctcttcccggccgctctggtgcacttgggagccgaggagccggcaggtgtctacctggagcctggcctgctggagcatgccatctccccatctgcggccgatgtgctggtggccaggtacatgtccagggccgccgggtccccttccccattgccagcccctgaccctgcacctaagtctgagccagctgctgaggagggggcgctggtcccccctgagcccatcccagggacggcccagcccgtgaagaggagcctgggcaaggtgcccaagtggctgaagctgccggccagcaagaggtgagagctgccagcctgaggtgcccactccgccagccacaggaccacctcctctgccagcaggaataaagacttgtgcatccctcaaaaaaaaaaa

SEQ ID NO: 520989 - DNA, 1846 bp, Homo sapiens
  misc_feature (252)..(252): n is a, c, g, or t
ggagcgctccgtggctgtcggtgctggccccgaacggcccggcgccacacggtgaaggtgacgccgaggcaccgtgctgcttcaggttctggaggacacgtgtccggcggcgaggacattcaaaccacctgttgacatatgatactgagaggttgtcaagagagatgcagtgtctcggaccgttatctcctccaggtggagatttgcacaagccgtagcccagaacagagtagcgctagagtcgtggagatngtgccacgcttccacggagccgtgaggggcctgagaacatggttcgcatcgctttgcagctggacgatggctcgaggttgcaggactctttctgttcaggccagaccctctgggagcttctcagccattttccacagatcagggagtgcctgcagcaccccggcggggccaccccagtctgcgtgtacacgagggatgaggtgacgggtgaagctgccctgcggggcacgacgctgcagtcgctgggcctgaccgggggcagcgccaccatcaggtttgtcatgaagtgctacgaccccgtgggcaagaccccaggaagcctgggctcgtcagcgtcggctggccaggcagccgccagcgctccacttcccttggaatctggggagctcagccgcggcgacttgagccgtccggaggacgcggacacctcagggccctgctgcgagcacactcaggagaagcagagcacaagggcacccgcagctgccccctttgttcctttctcgggtgggggacagagacaggggggccctcctgggcccacgaggcctctgacatcatcttcagctaagttgccgaagtccctctccagccctggaggcccctccaagccaaagaagtccaagtcgggccaggatccccagcaggagcaggagcaggagcgggagcgggatccccagcaggagcaggagcgggagcggcccgtggaccgggagcccgtggaccgggagcccggtggtgtgccaccccgacctggaggagcggctgcaggcctggccagcggagctgcctgatgagttctttgagctgacggtggacgacgtgagaagacgcttggcccagctcaagagtgagcggaagcgcctggaagaagcccccttggtgaccaaggccttcagggaggcgcagataaaggagaagctggagcgctacccaaaggtggctctgagggtcctgttccccgaccgctacgtcctacagggcttcttccgccccagcgagacagtgggggacttgcgagacttcgtgaggagccacctggggaaccccgagctgtcattttacctgttcatcacccctccaaaaacagtcctggacgaccacacgcagaccctctttcaggcgaacctcttcccggccgctctggtgcacttgggagccgaggagccggcaggtgtctacctggagcctggcctgctggagcatgccatctccccatctgcggccgatgtgctggtggcaggtaagtgccggtgggtctgggggcacctcccgtggcggcactcaccactctgtgtcttcgcctccccacaggtacatgtccagggccgccgggtccccttccccattgccagcccctgaccctgcacctaagtctgagccagctgctgaggagggggcgctggtcccccctgagcccatcccagggacggcccagcccgtgaagaggagcctgggcaaggtgcccaagtggctgaagctgccggccagcaagaggtgagagctgccagcctgaggtgcccactccgccagccacaggaccacctcctctgccagcaggaataaagacttgtgcatccctcaaaaaaaaaaa

SEQ ID NO: 520990 - DNA, 306 bp, Homo sapiens
ctttcgactcggtacccgacagggtctctctctgtccacccaggctggtgtgcagtggcacaatcacggctcactacagcctcgacttcctgggcttaggtgatcctcccacctcagcctcccagatagctgggaccacaggtgcgagccaccacacctgctaatttcagggttttaccatgttggcatggctggtcttgaactcttggcctcaagcaatctgcttgcctccgcctcccaaagtgctgggatgataggcatgagtcaccacgtccagccaatcatttttattgtctacactaacag

SEQ ID NO: 520991 - DNA, 174 bp, Homo sapiens
aggagacgtaggtccctaggctcactatgcatgtagcactagctgagcttatgaggtgccttgtcggtggcggtgcggatatctcgcgcgctagcggtatccgcatagcacactaggtgtaagaatattcagagattacgagcgattggatactattggtcttccacgtttggg

SEQ ID NO: 520992 - DNA, 1678 bp, Homo sapiens
  misc_feature (252)..(252): n is a, c, g, or t
ggagcgctccgtggctgtcggtgctggccccgaacggcccggcgccacacggtgaaggtgacgccgaggcaccgtgctgcttcaggttctggaggacacgtgtccggcggcgaggacattcaaaccacctgttgacatatgatactgagaggttgtcaagagagatgcagtgtctcggaccgttatctcctccaggtggagatttgcacaagccgtagcccagaacagagtagcgctagagtcgtggagatngtgccacgcttccacggagccgtgaggggcctgagaacatggttcgcatcgctttgcagctggacgatggctcgaggttgcaggactctttctgttcaggccagaccctctgggagcttctcagccattttccacagatcagggagtgcctgcagcaccccggcggggccaccccagtctgcgtgtacacgagggatgaggtgacgggtgaagctgccctgcggggcacgacgctgcagtcgctgggcctgaccgggggcagcgccaccatcaggtttgtcatgaagtgctacgaccccgtgggcaagaccccaggaagcctgggctcgtcagcgtcggctggccaggcagccgccagcgctccacttcccttggaatctggggagctcagccgcggcgacttgagccgtccggaggacgcggacacctcagggccctgctgcgagcacactcaggagaagcagagcacaagggcacccgcagctgccccctttgttcctttctcgggtgggggacagagacaggggggccctcctgggcccacgaggcctctgacatcatcttcagctaagttgccgaagtccctctccagccctggaggcccctccaagccaaagaagtccaagtcgggccaggatccccagcaggagcaggagcaggagcgggagcgggatccccagcaggagcaggagcgggagcggcccgtggaccgggagcccgtggaccgggagcccggtggtgtgccaccccgacctggaggagcggctgcaggcctggccagcggagctgcctgatgagttctttgagctgacggtggacgacgtgagaagacgcttggcccagctcaagagtgagcggaagcgcctggaagaagcccccttggtgaccaaggccttcagggaggcgcagataaaggagaagctggagcgctacccaaaggtggctctgagggtcctgttccccgaccgctacgtcctacagggcttcttccgccccagcgagacagtgggggacttgcgagacttcgtgaggagccacctggggaaccccgagctgtcattttacctgttcatcacccctccaaaaacagtcctggacgaccacacgcagaccctctttcaggcgaacctcttcccggccgctctggtgcacttgggagccgaggagccggcaggtgtctacctggagcctggcctgctggagcatgccatctccccatctgcggccgatgtgctggtggccaggtacatgtccagggccgccgggtccccttccccattgccagcccctgaccctgcacctaagtctgaagctgccggccagcaagaggtgagagctgccagcctgaggtgcccactccgccagccacaggaccacctcctctgccagcaggaataaagacttgtgcatccctcaaaaaaaaaaa

SEQ ID NO: 520993 - DNA, 770 bp, Homo sapiens
  misc_feature (252)..(252): n is a, c, g, or t
  misc_feature (375)..(375): n is a, c, g, or t
  misc_feature (390)..(390): n is a, c, g, or t
  misc_feature (401)..(401): n is a, c, g, or t
ggagcgctccgtggctgtcggtgctggccccgaacggcccggcgccacacggtgaaggtgacgccgaggcaccgtgctgcttcaggttctggaggacacgtgtccggcggcgaggacattcaaaccacctgttgacatatgatactgagaggttgtcaagagagatgcagtgtctcggaccgttatctcctccaggtggagatttgcacaagccgtagcccagaacagagtagcgctagagtcgtggagatngtgccacgcttccacggagccgtgaggggcctgagaacatggttcgcatcgctttgcagctggacgatggctcgaggttgcaggactctttctgttcaggccagaccctctggaaaaggggangcctttttttctttnaccaaaaaggncccatgagcttctcagccattttccacagatcagggagtgcctgcagcaccccggcggggccaccccagtctgcgtgtacacgagggatgaggtaggcggcctgctcttgctcacccagtccccgctcactttcagcccactttccaactggaaaatctgctgtcccgcagccgtctccagggcagtggcgggagactcgggctcttgaaagcacgacgtgtttcatggaaaaagagggagtggccggccctcggagcccgggctgccccgaaacctccctcggcgccctgtttgttttttcagcttctctcaaagcccaagagtcacaaaagtggtttcatttaataaatatttgctttgcaaaaaaa

SEQ ID NO: 520994 - DNA, 332 bp, Homo sapiens
agatcagcacttaagttagggggaacggggcatacagatacacacaagtcactgtgttcagctttcaaggagttgtaggcgagttctcattctcttccttagaaccggcactacgtgggctcagcagctggttttggcagggacccagaggctgggacattcccagggcagtccctggtggtgcctatgggactgctcagcccccacctcactatgggcccacacagccagcttatagtcctagtcagcagctcagagctccttcggcattccctgcagtgcagtacctatctcagccacagccacagccctatgctgtgcatggccacttt

SEQ ID NO: 520995 - DNA, 378 bp, Homo sapiens
agcatgcagctacgtataacactacacctggaatgcatctgtaacttggctccgtagagttgaatgagcctgagaactagggtaggaaaaaattacaattgtattgtccctaacctctaactgaaatttagcatcactctcaagtacgagcgtaggcaacaaaccacagaggtattatcagccgtacctgtgaccttgtcaccaacagacgtcacagatacttacatatcacattacagttgctgcaggttgctctaaatatcttttatgctcatcacaacttcaaaaccatggttgtcattaggcccaatgctagatcttatttaatacattgaataaagcagcacatttaccacaatttttaaagtatttcgctat

SEQ ID NO: 520996 - DNA, 417 bp, Homo sapiens
tgatttgccacggcctcgtctagtaggcgaatgcggcgcatctcgtgctgatcagcgttgccaaagtgacggcttggcaccgcagcgtaagtggcacggctccgctgactgtcccctgcgcgtttgaagaccctcgtcgacgagaggcgctgggaaacgttcttgcaccagcgttgcagtcgcaatcttaagcgcctgcacagcagggaagccgcggcccctacggagacgggcgtcgccgtcaccctctcgctcgtcgatgagtggcttctctgggtcgagccgttgaacgcacagtcactgcagcctgcgtcgccgcgcgactcatagctgtccaacgtacgagcaaagcaaaagccgccaccgcgccgctgaaccggaaagaggctggtggaggtgctaggtgggagaaggatc

SEQ ID NO: 520997 - DNA, 192 bp, Homo sapiens
actcataggctcatactactgtctactccaggctcttctatgaaacagttacaaagctacggccaggccagtgcagtggctcacgacctgtaatcccagcactttggaatgctggggcaggaggatcacttgaggtcaggagctcgagaccagccagggcgacaaaagcaagactccgtctccaaaaaaaaa

SEQ ID NO: 520998 - DNA, 310 bp, Homo sapiens
tttcgacggtgttctgcagtaatgttagcggttaggcgtacggccagtgctattgtttgaatgagtaggctgattgtttcgataataactagtattgggataaggggtgtaggtgtgcttgtggtagaagttgggtaagggcattttaagtcttagagcgaagagctataatcactgtggcccgctcataaggggattggcatgggtaggtttatagatagttgggggtgggtgggtgtaaattgagtgaggcaggagtccgaggaggttagtttgttgggataaaaatgattaaggatactagtataag

SEQ ID NO: 520999 - DNA, 144 bp, Homo sapiens
tctttctttcattcactctttctttctttcttactttccttgtttctcgctctcgctctttggctatttccctcgctcgtttcctttctcaatctctttctctctctctatctctctgactatctctgactatcggtatggccc

SEQ ID NO: 521000 - DNA, 303 bp, Homo sapiens
  misc_feature (175)..(175): n is a, c, g, or t
  misc_feature (180)..(180): n is a, c, g, or t
  misc_feature (205)..(205): n is a, c, g, or t
  misc_feature (242)..(242): n is a, c, g, or t
  misc_feature (244)..(244): n is a, c, g, or t
  misc_feature (297)..(297): n is a, c, g, or t
ccgtgtggtcaacctcaatgccctgctcattatggcagtggccgtgttcctttgggggttttatgcctaaaaccaactgggttgggccccataaaccccaccctcccaggaagtgggggttaggagccttcggtgctccccaaaaaaagggaaggggcagtggggttaaaaggtnctggntccccttttcccggccttcctttgnctgggggcccctgcatttgattggcagtccctttccntnaggggctggccccccccctgcagttgccctaaggaaaaataaaactgcctttnccctta

SEQ ID NO: 521001 - DNA, 155 bp, Homo sapiens
ttcttgcttgatgtgactagagatgagccttcctgggcaggatctgtaagtgataaatctttgaacttatttctttttgtggtggtgtattaaatttgcaccccccattggaagagccagggactatcccagaccaggttttctcgagaatgctg

SEQ ID NO: 521002 - DNA, 181 bp, Homo sapiens
  misc_feature (131)..(131): n is a, c, g, or t
  misc_feature (164)..(165): n is a, c, g, or t
  misc_feature (169)..(169): n is a, c, g, or t
ttttttagctgaaataacttcgattctggtttatttccatcacatatagtacatttttccaactagaaagactgtaactattgctggaaatgttctatattgaatgtacatgctcttgttggaaaaatgtnctatatgtgatggaaataaaccagaatcgaagnnttantctagctaaaac

SEQ ID NO: 521003 - DNA, 264 bp, Homo sapiens
tgttcgcatcatgcagtgtgactcgtagagtgatccccatcgttcgatcgccgcttgcccgtcgcccctcggttcagcgccgtcttggctcgggacaaaatcctgaagcatcggacgccttctgggcagcctgctgcgacttgagcacttcgggcgacacgttcagcttgcggcctgccgggtcctcttccttcttcgcggcggaagcgggagcagaaacggcgccgccggtcagcgctagaaccagcgcgatcaactgcggtc

SEQ ID NO: 521004 - DNA, 895 bp, Homo sapiens
gcgcgatgtatgaccacaatggctggcgccaccctgcatgcgctgcgatgccccacttcagctggtctcgccgcctgtgcctggaccttcctgctgcagggtctgttgctggctgctgaaatgcccctggcattgcctctcttgtgcctgctggctggcctgtggatggccaatgaatgacttactgtgcgctgacaatgccacattgtgaatgtgggtaccatctggccatgtggaccacgggaagaccacgctgactgcagccatcacgaagattctagcttgagtgcgacggtggggctaatgttcaacgacagtactgatggacgatttgaccaattgcccctgtgacggagctgagcctcgcgggtattcaccatcaattgctggctcattgttggagtatagcacttgcctgcccgccactactgcccacacatgactgccctgggtcatgcagattactgttaagactattgatcacagtgcactgcacccctcgacgggtgcatcctggtggtagcagccaatgacgtgaccccatgccccagacccgagagcaattattactcggccagaccagatctggggtggagcattgttgtctgcgtcgtcattcgtgcaacaagtgcttgacgcctgtcccagcgcactccttgcacactgcgtgcgaaccttggtgccaactgtgacgatcctgtcgaagcttgcttcaacctgaagtcctgacctaattcaaatggctcaccccactgaacacccaaggcacaatccagtaagcgccaccatgcgacctacattgttgccccctttgcaaccgggcatccgcgaaccccctggaaggttaagcggccttgcaaagcactcttgtcgccccaatccctaacttggcaat

SEQ ID NO: 521005 - DNA, 551 bp, Homo sapiens
cccttgagagatggtgagatcactgcagtaccgatccagtctctactagaatgtaagtactgcgatcaacatataggacgtatgacactcgtccggcggagttacaacctgtatagtgataagaagtatgcattaccatatgtataatgagtatacaagcttctctttgaactcccagggggtgatgcttgactactctatctaaagcgttaggctgggatacatcctgatctaatattatgaaaattaatccatctgggggaaccacgcatacaattacccaagacctccttctgtagcagaagaagtgctacttcagagacaaaacctgaatcgtggtctcattagagccgttgactccagcaacagttgccggcatgcatacctactacaatccggaattagtggagcatacagaagcactttcttgaataacataggaggggactactgaagaatatattcctggcgcagcccagctaagtcatgatgactccatgaaagagagagagttgttgaactttaagtagtcaccagtctgtacctgtgac

SEQ ID NO: 521006 - DNA, 2434 bp, Homo sapiens
agaagatctaggaaagaagattgctttggccttgaacaaagtggatggagccaatgtggctcttaaagactctgaccaagtagcacagagtgatggggaggagagccctgctgctgaagagcagctcttgggagagcacattaaagaggaaaaagaagaatctgaatttctaccctcatctggaggaacatttaatatctctgtcagtggggacattgatggtttaattactcaggctttgctgacgggcaattttgagagtgctgttgacctttgtttacatgataaccgcatggccgatgccattatattggccatagcaggtggacaagaactcttggctcgaacccagaaaaaatacttcgcaaaatcccaaagcaaaattaccaggctcatcactgcagtggtgatgaagaactggaaagagattgttgagtcttgtgatcttaaaaattggagagaggctttagctgcagtattgacttatgcaaagccggatgaattttcagccctttgtgatcttttgggaaccaggcttgaaaatgaaggagatagcctcctgcagactcaagcatgtctctgctatatttgtgcagggaatgtagagaaattagttgcatgttggactaaagctcaagatggaagccaccctttgtcacttcaggatctgattgagaaagttgtcatcctgcgaaaagctgtgcaactcactcaagccatggacactagtactgtaggagttctcttggctgcgaagatgagtcagtatgccaatttgttggcagctcagggcagtattgctgcagccttggcttttcttcctgacaacaccaaccagccaaatatcatgcagcttcgtgacagactttgtagagcacaaggagagcctgtagcaggacatgaatcacctaaaattccgtacgagaaacagcagctccccaagggcaggcctggaccagttgctggccaccaccagatgccaagagttcaaactcaacaatattatccccatggagaaaatcctccacctccgggtttcataatgcatggaaatgttaatccaaatgctgctggtcagcttcccacatctccaggtcatatgcacacccaggtaccaccttatccacagccacagccttatcaaccagcccagccgtatcccttcggaacaggggggtcagcaatgtatcgacctcagcagcctgttgctcctcctacttcaaacgcttaccctaacaccccttacatatcttctgcttcttcctatactgggcagtctcagctgtacgcagcacagcaccaggcctcttcacctacctccagccctgctacttctttccctcctcccccttcctctggagcatccttccagcatggcggaccaggagctccaccatcatcttcagcttatgcactgcctcctggaacaacaggtacactgcctgctgccagtgagctgcctgcgtcccaaagaacaggtcctcagaatggttggaatgaccctccagctttgaacagagtacccaaaaagaagaagatgcctgaaaacttcatgcctcctgttcccatcacatcaccaatcatgaacccgttgggtgacccccagtcacaaatgctgcagcaacagccttcagctccagtaccactgtcaagccagtcttcattcccacagccacatcttccaggtggccagcccttccatggcgtacagcaacctcttggtcaaacaggcatgccaccatctttttcaaagcccaatattgaaggtgccccaggggctcctattggaaataccttccagcatgtgcagtctttgccaacaaaaaaaattaccaagaaacctattccagatgagcacctcattctaaagaccacatttgaggatcttattcagcgctgcctttcttcagcaacagaccctcaaaccaagaggaagctagatgatgccagcaaacgtttggagtttctgtatgataaacttagggaacagacactttcaccaacaatcaccagtggtttacacaacattgcaaggagcattgaaactcgaaactactcagaaggattgaccatgcatacccacatagttagcaccagcaacttcagtgagacctctgctttcatgccagttctcaaagttgttctcacccaggccaataagctgggtgtctaaaaggacagcttctcttccactcaatattgccatttttccaaagaaacatgttaaaaaaaaaaattataagacatggactagtcctcattagcatgtttgcatagcaaccagtcaagagcatttacactatttctgctgatatactcaccttagaactgctcagaaccctggtgctttatttttgttttaatcttttgttgccagtgatgattttcctatcctgcagatattgggggagtaccgagtctcgaatttcgatat

SEQ ID NO: 521007 - DNA, 1299 bp, Homo sapiens
cttgttcctattaagagatgtgagtgtgagaatccagggctacatagtgatccccacactcggctggtaaaacctttgtgacagttatttcagggttaaggcagaattttgaagtattaggtgatcgattcagttttattttttttcctttcaggattctaaaggaaaacattctctgttatctgttataggtcctcagaatggttggaatgaccctccagctttgaacagagtacccaaaaagaagaagatgcctgaaaacttcatgcctcctgttcccatcacatcaccaatcatgaacccgttgggtgacccccagtcacaaatgctgcagcaacagccttcagctccagtaccactgtcaagccagtcttcattcccacagccacatcttccaggtggccagcccttccatggcgtacagcaacctcttggtcaaacaggcatgccaccatctttttcaaagcccaatattgaaggtgccccaggggctcctattggaaataccttccagcatgtgcagtctttgccaacaaaaaaaattaccaagaaacctattccagatgagcacctcattctaaagaccacatttgaggatcttattcagcgctgcctttcttcagcaacagaccctcaaaccaagaggaagctagatgatgccagcaaacgtttggagtttctgtatgataaacttagggaacagacactttcaccaacaatcaccagtggtttacacaacattgcaaggagcattgaaactcgaaactactcagaaggattgaccatgcatacccacatagttagcaccagcaacttcagtgagacctctgctttcatgccagttctcaaagttgttctcacccaggccaataagctgggtgtctaaaaggacagcttctcttccactcaatattgccatttttccaaagaaacatgttaaaaaaaaaaattataagacatggactagtcctcattagcatgtttgcatagcaaccagtcaagagcatttacactatttctgctgatatactcaccttagaactgctcagaaccctggtgctttatttttgttttaatcttttgttgccagtgatgattttcctattctgcaaatagtgtatttcctggattacacatagtatggtttcctgaagtattctgataaatgtgttttttaaaacctcaatatactttttagaaaaggagcatctggttatgcataaagcagagctaaaactaaatttctttcatgtcctccctacttcctcagtgtcaatcagattaaagtgtgtaatccta

SEQ ID NO: 521008 - DNA, 457 bp, Homo sapiens
  misc_feature (17)..(17): n is a, c, g, or t
cagtccaacatccgggngtagttaaaaatatatatatattttgggtagagaggggatctggctatgtgcccaggcgggtcgcaaactccgggcctgagtgatcctccggcctgggcctcccaaagtgatgggattacgggtgtgagccacctggccgggcatagacattttttaaggactatggtaattcagataaaaggctcgggaaagaatactggcccagtaagggcatctccaccagtgaactgaagacaactctggcttggatcctctaggaaactcatgaactctttttttcctttttgggagatgagtctcgctcggtcaccaggcgggaaggcaggggcgtaatctctcactgcaacctcggcctccggggttcgagcgattctccggcctcagtttccggagtagctgcgactacgggcatgcgccgccacacccaggaggtgggagg

SEQ ID NO: 521009 - DNA, 1099 bp, Homo sapiens
gagtgaatcatatcgagagggacaacatcaccaaacaaggcggggctctgtagcctagaaacttcatgcctcctgttcccatcacatcaccaatcatgaacccgttgggtgacccccagtcacaaatgctgcagcaacagccttcagctccagtaccactgtcaagccagtcttcattcccacagccacatcttccaggtggccagcccttccatggcgtacagcaacctcttggtcaaacaggcatgccaccatctttttcaaagcccaatattgaaggtgccccaggggctcctattggaaataccttccagcatgtgcagtctttgccaacaaaaaaaattaccaagaaacctattccagatgagcacctcattctaaagaccacatttgaggatcttattcagcgctgcctttcttcagcaacagaccctcaaaccaagaggaagctagatgatgccagcaaacgtttggagtttctgtatgataaacttagggaacagacactttcaccaacaatcaccagtggtttacacaacattgcaaggagcattgaaactcgaaactactcagaaggattgaccatgcatacccacatagttagcaccagcaacttcagtgagacctctgctttcatgccagttctcaaagttgttctcacccaggccaataagctgggtgtctaaaaggacagcttctcttccactcaatattgccatttttccaaagaaacatgttaaaaaaaaaaattataagacatggactagtcctcattagcatgtttgcatagcaaccagtcaagagcatttacactatttctgctgatatactcaccttagaactgctcagaaccctggtgctttatttttgttttaatcttttgttgccagtgatgattttcctattctgcaaatagtgtatttcctggattacacatagtatggtttcctgaagtattctgataaatgtgttttttaaaacctcaatatactttttagaaaaggagcatctggttatgcataaagcagagctaaaactaaatttctttcatgtcctccctacttcctcagtgtcaatcagattaaagtgtgtaatccta

SEQ ID NO: 521010 - DNA, 2514 bp, Homo sapiens
agaagatctaggaaagaagattgctttggccttgaacaaagtggatggagccaatgtggctcttaaagactctgaccaagtagcacagagtgatggggaggagagccctgctgctgaagagcagctcttgggagagcacattaaagaggaaaaagaagaatctgaatttctaccctcatctggaggaacatttaatatctctgtcagtggggacattgatggtttaattactcaggctttgctgacgggcaattttgagagtgctgttgacctttgtttacatgataaccgcatggccgatgccattatattggccatagcaggtggacaagaactcttggctcgaacccagaaaaaatacttcgcaaaatcccaaagcaaaattaccaggctcatcactgcagtggtgatgaagaactggaaagagattgttgagtcttgtgatcttaaaaattggagagaggctttagctgcagtattgacttatgcaaagccggatgaattttcagccctttgtgatcttttgggaaccaggcttgaaaatgaaggagatagcctcctgcagactcaagcatgtctctgctatatttgtgcagggaatgtagagaaattagttgcatgttggactaaagctcaagatggaagccaccctttgtcacttcaggatctgattgagaaagttgtcatcctgcgaaaagctgtgcaactcactcaagccatggacactagtactgtaggagttctcttggctgcgaagatgagtcagtatgccaatttgttggcagctcagggcagtattgctgcagccttggcttttcttcctgacaacaccaaccagccaaatatcatgcagcttcgtgacagactttgtagagcacaaggagagcctgtagcaggacatgaatcacctaaaattccgtacgagaaacagcagctccccaagggcaggcctggaccagttgctggccaccaccagatgccaagagttcaaactcaacaatattatccccatggagaaaatcctccacctccgggtttcataatgcatggaaatgttaatccaaatgctgctggtcagcttcccacatctccaggtcatatgcacacccaggtaccaccttatccacagccacagccttatcaaccagcccagccgtatcccttcggaacaggggggtcagcaatgtatcgacctcagcagcctgttgctcctcctacttcaaacgcttaccctaacaccccttacatatcttctgcttcttcctatactgggcagtctcagctgtacgcagcacagcaccaggcctcttcacctacctccagccctgctacttctttccctcctcccccttcctctggagcatccttccagcatggcggaccaggagctccaccatcatcttcagcttatgcactgcctcctggaacaacaggtacactgcctgctgccagtgagctgcctgcgtcccaaagaacaggtcctcagaatggttggaatgaccctccagctttgaacagagtacccaaaaagaagaagatgcctgaaaacttcatgcctcctgttcccatcacatcaccaatcatgaacccgttgggtgacccccagtcacaaatgctgcagcaacagccttcagctccagtaccactgtcaagccagtcttcattcccacagccacatcttccaggtggccagcccttccatggcgtacagcaacctcttggtcaaacaggcatgccaccatctttttcaaagcccaatattgaaggtgccccaggggctcctattggaaataccttccagcatgtgcagtctttgccaacaaaaaaaattaccaagaaacctattccagatgagcacctcattctaaagaccacatttgaggatcttattcagcgctgcctttcttcagcaacagaccctctttcaccaacaatcaccagtggtttacacaacattgcaaggagcattgaaactcgaaactactcagaaggattgaccatgcatacccacatagttagcaccagcaacttcagtgagacctctgctttcatgccagttctcaaagttgttctcacccaggccaataagctgggtgtctaaaaggacagcttctcttccactcaatattgccatttttccaaagaaacatgttaaaaaaaaaaattataagacatggactagtcctcattagcatgtttgcatagcaaccagtcaagagcatttacactatttctgctgatatactcaccttagaactgctcagaaccctggtgctttatttttgttttaatcttttgttgccagtgatgattttcctattctgcaaatagtgtatttcctggattacacatagtatggtttcctgaagtattctgataaatgtgttttttaaaacctcaatatactttttagaaaaggagcatctggttatgcataaagcagagctaaaactaaatttctttcatgtcctccctacttcctcagtgtcaatcagattaaagtgtgtaatccta

SEQ ID NO: 521011 - DNA, 498 bp, Homo sapiens
cgttgccctcctttaagtgaattgaacccgcttgcctcagccgatcgactaagcgcagcgagtcattaggctagatagggaaagagcgcccaaaacgcaacccgcctctccccgtgggttggcctattcattaacacagttggcgcgcatggtttcccaactgtaaagcgggcagtgagcccatttcaattaatgtgagttagctcgctcatcaggccccccaggcttttctttttatccttccgcagagactcttgtgtggaattgtttagcggaaatttatttcacgcaggatggataccctgaccttgtttccccccctctcgatattgaccctctctaaaggcacgtagacctgaagctccagagggggggcgtcctctctagtgctagtgggtcccccgggctgctcagccaaggcctgtggcgtcgttgtctcccaggttgccaaggaatccctctcttgccaacctttgtggaataaaatttcaaataaac

SEQ ID NO: 521012 - DNA, 2607 bp, Homo sapiens
agaagatctaggaaagaagattgctttggccttgaacaaagtggatggagccaatgtggctcttaaagactctgaccaagtagcacagagtgatggggaggagagccctgctgctgaagagcagctcttgggagagcacattaaagaggaaaaagaagaatctgaatttctaccctcatctggaggaacatttaatatctctgtcagtggggacattgatggtttaattactcaggctttgctgacgggcaattttgagagtgctgttgacctttgtttacatgataaccgcatggccgatgccattatattggccatagcaggtggacaagaactcttggctcgaacccagaaaaaatacttcgcaaaatcccaaagcaaaattaccaggctcatcactgcagtggtgatgaagaactggaaagagattgttgagtcttgtgatcttaaaaattggagagaggctttagctgcagtattgacttatgcaaagccggatgaattttcagccctttgtgatcttttgggaaccaggcttgaaaatgaaggagatagcctcctgcagactcaagcatgtctctgctatatttgtgcagggaatgtagagaaattagttgcatgttggactaaagctcaagatggaagccaccctttgtcacttcaggatctgattgagaaagttgtcatcctgcgaaaagctgtgcaactcactcaagccatggacactagtactgtaggagttctcttggctgcgaagatgagtcagtatgccaatttgttggcagctcagggcagtattgctgcagccttggcttttcttcctgacaacaccaaccagccaaatatcatgcagcttcgtgacagactttgtagagcacaaggagagcctgtagcaggacatgaatcacctaaaattccgtacgagaaacagcagctccccaagggcaggcctggaccagttgctggccaccaccagatgccaagagttcaaactcaacaatattatccccatggagaaaatcctccacctccgggtttcataatgcatggaaatgttaatccaaatgctgctggtcagcttcccacatctccaggtcatatgcacacccaggtaccaccttatccacagccacagccttatcaaccagcccagccgtatcccttcggaacaggggggtcagcaatgtatcgacctcagcagcctgttgctcctcctacttcaaacgcttaccctaacaccccttacatatcttctgcttcttcctatactgggcagtctcagctgtacgcagcacagcaccaggcctcttcacctacctccagccctgctacttctttccctcctcccccttcctctggagcatccttccagcatggcggaccaggagctccaccatcatcttcagcttatgcactgcctcctggaacaacaggtacactgcctgctgccagtgagctgcctgcgtcccaaagaacaggtcctcagaatggttggaatgaccctccagctttgaacagagtacccaaaaagaagaagatgcctgaaaacttcatgcctcctgttcccatcacatcaccaatcatgaacccgttgggtgacccccagtcacaaatgctgcagcaacagccttcagctccagtaccactgtcaagccagtcttcattcccacagccacatcttccaggtggccagcccttccatggcgtacagcaacctcttggtcaaacaggcatgccaccatctttttcaaagcccaatattgaaggtgccccaggggctcctattggaaataccttccagcatgtgcagtctttgccaacaaaaaaaattaccaagaaacctattccagatgagcacctcattctaaagaccacatttgaggatcttattcagcgctgcctttcttcagcaacagaccctcaaaccaagaggaagctagatgatgccagcaaacgtttggagtttctgtatgataaacttagggaacagacacgttcacttttgtttcagctttcacccaccatcacccgtggtttattacacaacattgcaaggagcattgaaactcgaaactactcagaaggattgaccatgcatacccacatagttagcaccagcaacttcagtgagacctctgctttcatgccagttctcaaagttgttctcacccaggccaataagctgggtgtctaaaaggacagcttctcttccactcaatattgccatttttccaaagaaacatgttaaaaaaaaaaattataagacatggactagtcctcattagcatgtttgcatagcaaccagtcaagagcatttacactatttctgctgatatactcaccttagaactgctcagaaccctggtgctttatttttgttttaatcttttgttgccagtgatgattttcctattctgcaaatagtgtatttcctggattacacatagtatggtttcctgaagtattctgataaatgtgttttttaaaacctcaatatactttttagaaaaggagcatctggttatgcataaagcagagctaaaactaaatttctttcatgtcctccctacttcctcagtgtcaatcagattaaagtgtgtaatccta

SEQ ID NO: 521013 - DNA, 1842 bp, Homo sapiens
agaagatctaggaaagaagattgctttggccttgaacaaagtggatggagccaatgtggctcttaaagactctgaccaagtagcacagagtgatggggaggagagccctgctgctgaagagcagctcttgggagagcacattaaagaggaaaaagaagaatctgaatttctaccctcatctggaggaacatttaatatctctgtcagtggggacattgatggtttaattactcaggctttgctgacgggcaattttgagagtgctgttgacctttgtttacatgataaccgcatggccgatgccattatattggccatagcaggtggacaagaactcttggctcgaacccagaaaaaatacttcgcaaaatcccaaagcaaaattaccaggctcatcactgcagtggtgatgaagaactggaaagagattgttgagtcttgtgatcttaaaaattggagagaggctttagctgcagtattgacttatgcaaagccggatgaattttcagccctttgtgatcttttgggaaccaggcttgaaaatgaaggagatagcctcctgcagactcaagcatgtctctgctatatttgtgcagggaatgtagagaaattagttgcatgttggactaaagctcaagatggaagccaccctttgtcacttcaggatctgattgagaaagttgtcatcctgcgaaaagctgtgcaactcactcaagccatggacactagtactgtaggagttctcttggctgcgaagatgagtcagtatgccaatttgttggcagctcagggcagtattgctgcagccttggcttttcttcctgacaacaccaaccagccaaatatcatgcagcttcgtgacagactttgtagagcacaaggagagcctgtagcaggacatgaatcacctaaaattccgtacgagaaacagcagctccccaagggcaggcctggaccagttgctggccaccaccagatgccaagagttcaaactcaacaatattatccccatggagaaaatcctccacctccgggtttcataatgcatggaaatgttaatccaaatgctgctggtcagcttcccacatctccaggtcatatgcacacccaggtaccaccttatccacagccacagcggtcctcagaatggttggaatgaccctccagctttgaacagcaaaccaagaggaagctagatgatgccagcaaacgtttggagtttctgtatgataaacttagggaacagacactttcaccaacaatcaccagtggtttacacaacattgcaaggagcattgaaactcgaaactactcagaaggattgaccatgcatacccacatagttagcaccagcaacttcagtgagacctctgctttcatgccagttctcaaagttgttctcacccaggccaataagctgggtgtctaaaaggacagcttctcttccactcaatattgccatttttccaaagaaacatgttaaaaaaaaaaattataagacatggactagtcctcattagcatgtttgcatagcaaccagtcaagagcatttacactatttctgctgatatactcaccttagaactgctcagaaccctggtgctttatttttgttttaatcttttgttgccagtgatgattttcctattctgcaaatagtgtatttcctggattacacatagtatggtttcctgaagtattctgataaatgtgttttttaaaacctcaatatactttttagaaaaggagcatctggttatgcataaagcagagctaaaactaaatttctttcatgtcctccctacttcctcagtgtcaatcagattaaagtgtgtaatccta

SEQ ID NO: 521014 - DNA, 896 bp, Homo sapiens
  misc_feature (93)..(93): n is a, c, g, or t
  misc_feature (103)..(103): n is a, c, g, or t
  misc_feature (127)..(127): n is a, c, g, or t
cgtatacatctagatgagtatatattaaaacattttttaaaaatgagatcaaaataggccaccacgcccggccataatctgttcaagtttctnagttgtagtngcctccatttctttataaaatgangccattcaacattttaagtataaggtttagtgcaatgagatagggcaagttcttaggttaaaagttaatgttcaaatataacatctattttttctttcctgcagcaaaccaagaggaagctagatgatgccagcaaacgtttggagtttctgtatgataaacttagggaacagacactttcaccaacaatcaccagtggtttacacaacattgcaaggagcattgaaactcgaaactactcagaaggattgaccatgcatacccacatagttagcaccagcaacttcagtgagacctctgctttcatgccagttctcaaagttgttctcacccaggccaataagctgggtgtctaaaaggacagcttctcttccactcaatattgccatttttccaaagaaacatgttaaaaaaaaaaattataagacatggactagtcctcattagcatgtttgcatagcaaccagtcaagagcatttacactatttctgctgatatactcaccttagaactgctcagaaccctggtgctttatttttgttttaatcttttgttgccagtgatgattttcctattctgcaaatagtgtatttcctggattacacatagtatggtttcctgaagtattctgataaatgtgttttttaaaacctcaatatactttttagaaaaggagcatctggttatgcataaagcagagctaaaactaaatttctttcatgtcctccctacttcctcagtgtcaatcagattaaagtgtgtaatccta

SEQ ID NO: 521015 - DNA, 1191 bp, Homo sapiens
  misc_feature (141)..(141): n is a, c, g, or t
  misc_feature (147)..(147): n is a, c, g, or t
  misc_feature (209)..(209): n is a, c, g, or t
  misc_feature (222)..(222): n is a, c, g, or t
  misc_feature (258)..(258): n is a, c, g, or t
  misc_feature (288)..(288): n is a, c, g, or t
  misc_feature (326)..(326): n is a, c, g, or t
  misc_feature (379)..(379): n is a, c, g, or t
  misc_feature (413)..(413): n is a, c, g, or t
  misc_feature (422)..(422): n is a, c, g, or t
gggaggcggaggttgcagtgagtcgagatcgcaccactgtactccagcctgggtgacagagtgagactccatctcaaaaaaaaaaaatccaaataaagtcttctgtaaagtatggacacctatgccaagtaatgacatagnaaaaanctacaggtttatagtttaagagatgacaggattataaaaagcaggtaagaattagtaaattngggcccttccttngagatattatgattaagaatctttaatctccttttngtgcataggagaattttttaaaggtctgangctctcttaagtggagagagaaattagcatttcagttnggagaggaaatcgggctgcttttctgtaagaaaatacctggcttatacatgtntaattcataaataacttatttatgtaaatcattntgtgtggtngtacttgataactgttgcttggttcaagaaactttctagaaatgctaaatggtttatatatttttataatgtttgtttcaaattccacttaaatatctgggtttaatgtttatggaggatctcatgggaagttatcccttaatttaattctttctcttggttcacttttgtttcagctttcaccaacaatcaccagtggtttacacaacattgcaaggagcattgaaactcgaaactactcagaaggattgaccatgcatacccacatagttagcaccagcaacttcagtgagacctctgctttcatgccagttctcaaagttgttctcacccaggccaataagctgggtgtctaaaaggacagcttctcttccactcaatattgccatttttccaaagaaacatgttaaaaaaaaaaattataagacatggactagtcctcattagcatgtttgcatagcaaccagtcaagagcatttacactatttctgctgatatactcaccttagaactgctcagaaccctggtgctttatttttgttttaatcttttgttgccagtgatgattttcctattctgcaaatagtgtatttcctggattacacatagtatggtttcctgaagtattctgataaatgtgttttttaaaacctcaatatactttttagaaaaggagcatctggttatgcataaagcagagctaaaactaaatttctttcatgtcctccctacttcctcagtgtcaatcagattaaagtgtgtaatccta

SEQ ID NO: 521016 - DNA, 271 bp, Homo sapiens
ttttttttttttataaagaagtaagcctttatttcctgggtttggcaaataaaaggggctaagtgggtggcttttgggggattagtcaaagagaccaaatcccatatcctcgtcggactcctcggactcttcctgggcttcaaccttagcgggggcggcagcagcagcaggagcagcggtgggggcagcagccacaggggcagcagccacaaaggcagagggatcagccaagaagggctggaccttttcagcaagggggggaccaggaacg

SEQ ID NO: 521017 - DNA, 472 bp, Homo sapiens
agctgcataaattccattatggctgtttcatatttttttaaacaattctcgtattgatgtgatcatttaagtttctaatttttcactcttagaaatgagactttatgaacatgtttgcatatatatctttgaatacctgtccagttatttcctagaataaattcctaggagtagaaatgctggagcagccgggcgcggtggctcacgcctgtaatcccagcactttgggaggcagagacgggcggatcacgaggtcaggggatcgggaccatcctggctagcatggcgaaaccccgtctctactaaagatacaaaaaaaaagttagccgggcgtggtggcgggcacctgtggtcccagctactcggaaggctggggcaggagaatggcctgaacccgggaggcggagcttgcagtgagccgggatcgcgctactgcactctaacctgggcgacagagcgagactccgtctca

SEQ ID NO: 521018 - DNA, 2284 bp, Homo sapiens
agaagatctaggaaagaagattgctttggccttgaacaaagtggatggagccaatgtggctcttaaagactctgaccaagtagcacagagtgatggggaggagagccctgctgctgaagagcagctcttgggagagcacattaaagaggaaaaagaagaatctgaatttctaccctcatctggaggaacatttaatatctctgtcagtggggacattgatggtttaattactcaggctttgctgacgggcaattttgagagtgctgttgacctttgtttacatgataaccgcatggccgatgccattatattggccatagcaggtggacaagaactcttggctcgaacccagaaaaaatacttcgcaaaatcccaaagcaaaattaccaggctcatcactgcagtggtgatgaagaactggaaagagattgttgagtcttgtgatcttaaaaattggagagaggctttagctgcagtattgacttatgcaaagccggatgaattttcagccctttgtgatcttttgggaaccaggcttgaaaatgaaggagatagcctcctgcagactcaagcatgtctctgctatatttgtgcagggaatgtagagaaattagttgcatgttggactaaagctcaagatggaagccaccctttgtcacttcaggatctgattgagaaagttgtcatcctgcgaaaagctgtgcaactcactcaagccatggacactagtactgtaggagttctcttggctgcgaagatgagtcagtatgccaatttgttggcagctcagggcagtattgctgcagccttggcttttcttcctgacaacaccaaccagccaaatatcatgcagcttcgtgacagactttgtagagcacaaggagagcctgtagcaggacatgaatcacctaaaattccgtacgagaaacagcagctccccaagggcaggcctggaccagttgctggccaccaccagatgccaagagttcaaactcaacaatattatccccatggagaaaatcctccacctccgggtttcataatgcatggaaatgttaatccaaatgctgctggtcagcttcccacatctccaggtcatatgcacacccaggtaccaccttatccacagccacagccttatcaaccagcccagccgtatcccttcggaacaggggggtcagcaatgtatcgacctcagcagcctgttgctcctcctacttcaaacgcttaccctaacaccccttacatatcttctgcttcttcctatactgggcagtctcagctgtacgcagcacagcaccaggcctcttcacctacctccagccctgctacttctttccctcctcccccttcctctggagcatccttccagcatggcggaccaggagctccaccatcatcttcagcttatgcactgcctcctggaacaacaggtacactgcctgctgccagtgagctgcctgcgtcccaaagaacagaaaaccagtctatccaagaccaggcacctatgttggaaggtcctcagaatggttggaatgaccctccagctttgaacagagtacccaaaaagaagaagatgcctgaaaacttcatgcctcctgttcccatcacatcaccaatcatgaacccgttgggtgacccccagtcacaaatgctgcagcaacagccttcagctccagtaccactgtcaagccagtcttcattcccacagccacatcttccaggtggccagcccttccatggcgtacagcaacctcttggtcaaacaggcatgccaccatctttttcaaagcccaatattgaaggtgccccaggggctcctattggaaataccttccagcatgtgcagtctttgccaacaaaaaaaattaccaagaaacctattccagatgagcacctcattctaaagaccacatttgaggatcttattcagcgctgcctttcttcagcaacagaccctcaaaccaagaggaagctagatgatgccagcaaacgtttggagtttctgtatgataaacttagggaacagacactttcaccaacaatcaccagtggttaccactgcagggctgaatcgaactatcgaaggtgctgctaccccttgttgccgcaatcgtggacttgcttctgcgttcaagtgtgtccgccatagctggggctaaggggctctcccaatgcttcccgacttaaattacgtcgtcctgtgtgcccacttttgttactacgacgggtgtttgggacacactgacaagtcgttcacagaccgccaaatgagactcttagt

SEQ ID NO: 521019 - DNA, 322 bp, Homo sapiens
cctacgctgcactgtctcgtttgtcgtcagcggctggagcttgttataacattatgcctcatagggatagtacaaggaaggggtaggctatgtgtttagtcaggtggttgagaatgagtgtagaggcgtattataccatagccgcctagtattaagagtactgcggcaagtactattgacccagcgatgggggcttcgcaccagtgggctatcagggagctccataagtagagtccgtacaagagggtctctttcactatgcacacagctattgtagtaagcgcaggtcatcttcaagtatgttggcctccaggcagtttgc

SEQ ID NO: 521020 - DNA, 1913 bp, Homo sapiens
agaagatctaggaaagaagattgctttggccttgaacaaagtggatggagccaatgtggctcttaaagactctgaccaagtagcacagagtgatggggaggagagccctgctgctgaagagcagctcttgggagagcacattaaagaggaaaaagaagaatctgaatttctaccctcatctggaggaacatttaatatctctgtcagtggggacattgatggtttaattactcaggctttgctgacgggcaattttgagagtgctgttgacctttgtttacatgataaccgcatggccgatgccattatattggccatagcaggtggacaagaactcttggctcgaacccagaaaaaatacttcgcaaaatcccaaagcaaaattaccaggctcatcactgcagtggtgatgaagaactggaaagagattgttgagtcttgtgatcttaaaaattggagagaggctttagctgcagtattgacttatgcaaagccggatgaattttcagccctttgtgatcttttgggaaccaggcttgaaaatgaaggagatagcctcctgcagactcaagcatgtctctgctatatttgtgcagggaatgtagagaaattagttgcatgttggactaaagctcaagatggaagccaccctttgtcacttcaggatctgattgagaaagttgtcatcctgcgaaaagctgtgcaactcactcaagccatggacactagtactgtaggagttctcttggctgcgaagatgagtcagtatgccaatttgttggcagctcagggcagtattgctgcagccttggcttttcttcctgacaacaccaaccagccaaatatcatgcagcttcgtgacagactttgtagagcacaaggagagcctgtagcaggacatgaatcacctaaaattccgtacgagaaacagcagctccccaagggcaggcctggaccagttgctggccaccaccagatgccaagagttcaaactcaacaatattatccccatggagaaaatcctccacctccgggtttcataatgcatggaaatgttaatccaaatgctgctggtcagcttcccacatctccaggtcatatgcacacccaggtaccaccttatccacagccacagccttatcaaccagcccagccgtatcccttcggaacaggggggtcagcaatgtatcgacctcagcagcctgttgctcctcctacttcaaacgcttaccctaacaccccttacatatcttctgcttcttcctatactgggcagtctcagctgtacgcagcacagcaccaggcctcttcacctacctccagccctgctacttctttccctcctcccccttcctctggagcatccttccagcatggcggaccaggagctccaccatcatcttcagcttatgcactgcctcctggaacaacaggtacactgcctgctgccagtgagctgcctgcgtcccaaagaacaggtcctcagaatggttggaatgaccctccagctttgaacagagtacccaaaaagaagaagatgcctgaaaacttcatgcctcctgttcccatcacatcaccaatcatgaacccgttgggtgacccccagtcacaaatgctgcagcaacagccttcagctccagtaccactgtcaagccagtcttcattcccacagccacatcttccaggtggccagcccttccatggcgtacagcaacctcttggtcaaacaggcatgccaccatctttttcaaagcccaatattgaaggtgccccaggggctcctattggaaataccttccaggtaacagtaaatttgtagaagtggaatgggaagatggctgtgtttcagtatattttctttaatgtgctaacttttatgattgcatgattattattaaacatctagacaacct

SEQ ID NO: 521021 - DNA, 148 bp, Homo sapiens
  misc_feature (48)..(48): n is a, c, g, or t
gagaagacgacagaagaggagaaaagtacccctttaattggtcctttnagtgaatgttcagttcagaaaaacaaaaaaaagggtatttaaaaaaaactggctggggcacgggggctctcgccggtaatcccagccagcacaagggtgg

SEQ ID NO: 521022 - DNA, 1128 bp, Homo sapiens
  misc_feature (310)..(310): n is a, c, g, or t
  misc_feature (440)..(440): n is a, c, g, or t
  misc_feature (463)..(463): n is a, c, g, or t
  misc_feature (475)..(475): n is a, c, g, or t
  misc_feature (481)..(481): n is a, c, g, or t
  misc_feature (485)..(485): n is a, c, g, or t
  misc_feature (487)..(487): n is a, c, g, or t
  misc_feature (527)..(527): n is a, c, g, or t
  misc_feature (530)..(530): n is a, c, g, or t
  misc_feature (534)..(534): n is a, c, g, or t
  misc_feature (615)..(615): n is a, c, g, or t
  misc_feature (635)..(635): n is a, c, g, or t
  misc_feature (659)..(659): n is a, c, g, or t
  misc_feature (721)..(721): n is a, c, g, or t
  misc_feature (727)..(727): n is a, c, g, or t
  misc_feature (783)..(783): n is a, c, g, or t
  misc_feature (791)..(791): n is a, c, g, or t
  misc_feature (832)..(832): n is a, c, g, or t
  misc_feature (834)..(834): n is a, c, g, or t
  misc_feature (892)..(892): n is a, c, g, or t
  misc_feature (913)..(913): n is a, c, g, or t
  misc_feature (947)..(947): n is a, c, g, or t
  misc_feature (964)..(964): n is a, c, g, or t
  misc_feature (1032)..(1032): n is a, c, g, or t
gagatggtgggagcatgctacccagtgcttccctggaatcgggcccacgtggatcatgcggctggtggtcgaagtgcatctcgagtcctatggtcctgggacaggcgagcatgtggctgtcgcgatgggacaggtggccactccttgatgttcatgccagatggagcacgcacggccgaacatgaacgggcagtcacagacctgaacacgactaggcatcgctcctggcgttgtgtgcgccatcgtgacgctgtgtgccaagtacgcatatccagtcctggcgtctacatgtgctcttggacccctgaangctcgtatcctacgacagacgctcgaactgtgctcgtaccatcggaccttcactcgagagttgtgcgcttcatataagttcgttgcgtgatagctgtgacgtcagcgccggagccgaggtattgaccacntgaagtcgagttgtgcttgcctntgtgctcgtgcntgcgtntgtncncacgactgcgtttgacccgtgacagcgactgagcgctagntcnctgnattctacccttgcgatcacacgtcgccgttagcgaggaacggtggcgagacattgtattgacctctccgttggcgttgacngtcacctcgtgtagacgganacacttcacagctcgccatgaagntctccgatcgatatttggcagtcttggcgtggcgtactggagatcgacagtcagttcgattnggcgangtcccttgggaacgagaacagttcgtgctctcacgacaacgataacgcgttgcggnaacattgngtcggcccaacctgatcgcttgcgcactgggaaggcgcccnantagcatagcaccgtgttccacactcgcaagcatgcgccgtggagaccccagggtggcnattttaggcaatgcgcgcacntcaatgcccgcgacccgtgaacacacgtcatganagcccatcgtatctgcnctagtatactctcaggagctcgcgcgcctggcacctgccaaggagttctcgcaggcgtccaactcttngcgctttgacagaagcatggacgcacacgcgcagcactgatgcgcatgtggcttccgcgcacatcgtgagggcccctgtagccgaggagtgttgag

SEQ ID NO: 521023 - DNA, 337 bp, Homo sapiens
  misc_feature (26)..(26): n is a, c, g, or t
  misc_feature (47)..(47): n is a, c, g, or t
  misc_feature (72)..(72): n is a, c, g, or t
  misc_feature (199)..(199): n is a, c, g, or t
  misc_feature (229)..(229): n is a, c, g, or t
  misc_feature (241)..(241): n is a, c, g, or t
  misc_feature (253)..(253): n is a, c, g, or t
  misc_feature (271)..(271): n is a, c, g, or t
  misc_feature (316)..(316): n is a, c, g, or t
aacttaagatgttgaggtgactgttngatatttgaatccagagtttnggaaagaggtctgtaatatcccttngtatgtgttaaaatccttaggccagtacatacagttcatttatttaatcagattgttaagataatagttttctccttatcctatatgtagagccaatacaatttatttttcaccttagggagttagnaaaagaggtaacaaattcaaccccaaatangttgggaaatanggaaattcatgnaaatagggaaacaaacangggaggaaattttaaaagtggaaaagttgggccttttggaaaggntaaataaattggataaacccc

SEQ ID NO: 521024 - DNA, 338 bp, Homo sapiens
actttgtgctttctgggtatatgttaaaagcctaaaactgggctgggcatggtggcttacgtctgtaatcccagcactttgggagactgaagtgggaggattccttcagaccaggagttcaagaccagcctgggcaatgtggcaaggacagttctctacaaaaaaaaaaaaaaaaaacaaaaaactttatttagctggttatggcaatatgtgcttatagtcccagctatttgggaggctgtggtgggaggatctcctgagcccagtagttcaagtctgcagggagctatgattgtgccattgcattccagcctgggcaacagagtgagctctgtctc

SEQ ID NO: 521025 - DNA, 747 bp, Homo sapiens
taattaaaaaaaaaggacacaggtgtctggctcgtgtctcccaggctggagttgctggtggtgcaatcacagctcacgtgcagcctcgacctcctaggctcaagcaattcctcagcctcccgaacagcgtggcatcagaggcgcattgccaccacacagtgggctaattttcaaaattttatagaaaactaaggtttggccatgtttgccgaggctggtctgtgaactccgtgggcttaatggatgctccgtgcctcggcctcccagaaggtgctgggattataggcttgagccaggctcaccagttgccagccggttactttaaaccttgaactcctcgaagacatttagggtcagaagccacaaaaacttagaattattaaaattttaaataagcggccaagaaggttgatggatttcatacattggattatagatttcaagggaacactcaccttatgagtagacggggttttccatatactttaaatgatcttggcttcgtagattcttaactagtgaattgggtaatcacatttacccaaatgtagttacactctgtcttggataatatggtctgtacaaaaattaacaggaagaaattatgctgatggggaaaggagaaccattgggagacggaagctggttctcatgggtactttaaaactgatgctatattatccaaaagaaaaaatggctaaactttttaagggacgctacagggtctcaaactggattacgggtgaa

SEQ ID NO: 521026 - DNA, 182 bp, Homo sapiens
gctgtaagggagctctacgacgagctgtgtctcatctgagacttctgacccagcctgcgggaagacgtactggtatctgattgttctttaaccagaaaaccttcagggatgaaaaaccggaagaagaggcccggactcatacagagattgaaatgttccttagaaaggagcagcagaaactt

SEQ ID NO: 521027 - DNA, 279 bp, Homo sapiens
acgactcgagttagtaccctcgatcgggctatccgtcgatagtttgcagatagctccacaggcttcaggatgtctgacaggacttccataagaatcgtggagctgtggttataccgtgccagtgactcaaactccttaatgttacttgcctgtacttcctgttcactcacatccccacaagttcccaatctgaatcccattctctgaccattctctgcttccttgtctttaatctcatttgagagtgatcctcacgggttcccttggccccttatcgag

SEQ ID NO: 521028 - DNA, 153 bp, Homo sapiens
aaactgatctgaatacatagaggtagaagatgaggcactagacacctacttctccgcctcgtccctcagggccctttaagaaatccccccgcccacaacaacaaaacgtgttagacggtcgtgacggtgtcccctcgggttttctctatttct

SEQ ID NO: 521029 - DNA, 1536 bp, Homo sapiens
  misc_feature (487)..(487): n is a, c, g, or t
atctgatagggccttggaggagaaggtccagcttttaaaaaatgacagtttgtgtttaataaatgcaaggcatgagaggaagtcaagtagcacagttgaaggacaggtcagttgacgatgaacacacttcaaaaccctggcttatacgactgtactgtttggatgtagccatagtcttgagtctagcgtccacaaagacattattcaaatgatcatctctcagacagaattataactattacattgacatggagtcccttggatattcttggatcagtcacacattaatcagccataacagtcctaggactgcgtgtagtttgcaagcttcaaacagttccgcttcattctgcacacacagctctgcacaagtcttcatgcagacgttgtgcaagcatgtgcggtacaagttaacactacacttatatagcgtccgaaaaaaaaccaaagaacagtatacgtatggtactactgttccaccaggagnaaagacaacaacatgcaaagacattctcataagtagcagaattacaagttacagccctctgctcaggtacataccgtgttccacgtggagtgtccgttactatgggtattagaacttcaaaagcttcagggccaataatcactgcggcgagaaaaaaagggggaccatacccacacaacacaggaagcccacggcccgaagccgtgcacacaccatcgtagaacggggacgcatgacggcacgcacaagattcacggaccactggctcgcccttcaaacaggaatcacgagtaaccacgcacgctcaccccgacaaggaactaggttcggtgactcgacgctgagcgcgccaaaatcccaccgcggcacactgcaactcggacaccaaacatcgcagggacagcaaaaacacacccacgagcgcaggcacgcggtccagcacgaccccacggggaccaatccgaggcaagagcaccggacaaaccgaaacgacgacgcgaccaagccacaaacgcacaaagcacgccactctacacacacagcggggtcgcaacaacacaacacaggaacggccgcgacgatccggaaaggaggaggctgggcacaacgcgacgagggccgatcagcgcagacacgtacgacggcgacgcggctgtgacccgtggccgacgcaaaacgtgaccacgcgcaaacaagggacacagggagagggccgacctagtcgggaaggcggagagagtcagtccacacgactagaagagggtagcaagacaaagtgaaggggacgaggcacacacgagcagcaaggtggcaatcaacgaatagcggcggaaaaagaagaagagagaaaagctagcacaacaaaggcgaacagaaaggcaacgcagagactgcgacgagagcgacgacggagacgcgaagcaataacaaacacccaacgctgcgagagggaaaacgagtacagagagacgaagacagcgaaggaaacaaacgaggcgacggcgtgagatgaaaggcagacaaggaacaaaaacggcgacccaacgacg

SEQ ID NO: 521030 - DNA, 161 bp, Homo sapiens
  misc_feature (27)..(27): n is a, c, g, or t
  misc_feature (49)..(49): n is a, c, g, or t
gaaagtgtagaaacacacaacaaagtnaaattaagaaaagaaatgaacncaatataggataaagacaaatgccagataggagaaaacacctatggtggcacatttagaccaaatactcttcaataaagccaaaataaattgtttgataatattctgtttac

SEQ ID NO: 521031 - DNA, 471 bp, Homo sapiens
gacgtaggtcaactgggcaaccggcaccacctgcacacagcagaactagcagggtcaaccatgcgcacaggtacctaccggcacccaccttcactcaccggaacctaccatgcacccaccctcattcaccagtacctaccggtgtccacccttgctcaccagtacctactgcacccaccttcactcacctgcaactacctgcacccaacttcactcagctgtgcctacctgaagctaccttcactcacctgtacctacctgtgcccaccttcactcacctatacttacctgcacccaccttcactcacctatacctacccgcacccaccttcactcacctgtgcctacctgcacccaccttcactcacctgtacctacctgcacccaccttcactcaacagtacctacctgtgtccacccttgctcaccagtacctacctgcacccaccttcactcacctgaacctacctg

SEQ ID NO: 521032 - DNA, 245 bp, Homo sapiens
agcagacattgaaattggccatttgtaagataaaaggctgggcatggttgctcacacctgtaatcccatttctttgggaggccaccacaagaggattgcttgagcccaggaaggagttggagaccagcctgagcaacaacaacaacaaaattagccaggcatagtggggcacatttgtagtcccagatacttgagaggctgaggaaagagaattgctttgatctcaggaggttgcggctgccgtg

SEQ ID NO: 521033 - DNA, 865 bp, Homo sapiens
ggctctttccttgccctaacgcagccatggctcgtggtcccaagaagcatctgaagcgggtggagctccaaagcatcggatgctggattaaattgaccggtgtgtttgctcctcgtcgcatccacgggtccccacaacgttgagagagtgtctccccctcatcattttcctgaggaacagacttaagtatgccctgacaggagattgacagtaaagaagatttgcatgcagcggttcatgtaaagatcgatggcaaggtccgaactgatataacctaccctggtggattcatggatgtccatcagcattgacaagacgggagagaatgttccgtctgatctatgacagcaaggttcgttgtgctgtacatcgtattacactgaggaggcaagtacaagtgtgtgaaagtgagaaagatcttctgtgggcacaaaaggaatcgctcatctggtgactcatgatgccgaacatccgtaccgatcccctccatcaaggtgaaatgatagcatgcagatggatttggagactgaaaagattagtgattcatccaagttgcgaaatggtaactgtgtatgggtgaatgagaggtgtaactagggaagaatgggtgtgatcaccaagagagaggaggacctggatctttggacgtggtgcacgtgaaggattgcatgagaaaggtctggcatcgattcagattttggatgtgggagggcacaaccatggtttcttccgggaaggttcgtaacaatgtgaaaaagcaaagggggggaaaaacgggaagggccgggaaggattgggcgtaaaatgggggaaaaaaaaaatgggggcgaaataatgggggaggaaagaagcaaggggggtgacg

SEQ ID NO: 521034 - DNA, 372 bp, Homo sapiens
gtgcaatcaatcgaatgctaggcttggtttaaaaacaaatcagttggccgggcacggtggctcacacctgtaatgtcagcacgttgggaggcaaggcgggtgaatcacgaggtcaggagatcgagaccatcctggctaacacggtgaaactccatctctactaaaaatacaacaattagccaggcatggtggtgagcacctgcaagcccagccactggggaggctgaggcaggagaatcgcttgaacctgggaggcgaaggttgcagtgagccaggattgcgccattgcactctagcctgggcaacaagagcgaagatccgtctcaaaaaataaagaaaaatgaaggctcactgtcaaacattttcacttaa

SEQ ID NO: 521035 - DNA, 129 bp, Homo sapiens
tacgtctctagcaggatccccggcggttaaagttactgaaagcacgtgtgagttttcgcttgagccacttctgggtgtcagttagctttcttttccttgacaggcatcacatcacagaggtgataatca

SEQ ID NO: 521036 - DNA, 717 bp, Homo sapiens
  misc_feature (43)..(43): n is a, c, g, or t
tatgctcgtgtgttgtcctggcgttactggttgggcgtgtttnttctcttttacaaaccaagaggaagctagatgatgccagcaaacgtttggagtttctgtatgataaacttagggaacagacactttcgggacagtgaccagtggtttacacaacattgcaaggagcattgaaactcgaaactactcagaaggattgaccatgcatacccacatagttagcaccagcaacttcagtgagacctctgctttcatgccagttctcaaagttgttctcacccaggccaataagctgggtgtctaaaaggacagcttctcttccactcaatattgccatttttccaaagaaacatgttaaaaaaaaaaattataagacatggactagtcctcattagcatgtttgcatagcaaccagtcaagagcatttacactatttctgctgatatactcaccttagaactgctcagaaccctggtgctttatttttgttttaatcttttgttgccagtgatgattttcctattctgcaaatagtgtatttcctggattacacatagtatggtttcctgaagtattctgataaatgtgttttttaaaacctcaatatactttttagaaaaggagcatctggttatgcataaagcagagctaaaactaaatttctttcatgtcctccctacttcctcagtgtcaatcagattaaagtgtgtaatccta

SEQ ID NO: 521037 - DNA, 1253 bp, Homo sapiens
agaagatctaggaaagaagattgctttggccttgaacaaagtggatggagccaatgtggctcttaaagactctgaccaagtagcacagagtgatggggaggagagccctgctgctgaagagcagctcttgggagagcacattaaagaggaaaaagaagaatctgaatttctaccctcatctggaggaacatttaatatctctgtcagtggggacattgatggtttaattactcaggctttgctgacgggcaattttgagagtgctgttgacctttgtttacatgataaccgcatggccgatgccattatattggccatagcaggtggacaagaactcttggctcgaacccagaaaaaatacttcgcaaaatcccaaagcaaaattaccaggctcatcactgcagtggtgatgaagaactggaaagagattgttgagtcttgtgatcttaaaaattggagagaggctttagctgcagtattgacttatgcaaagccggatgaattttcagccctttgtgatcttttgggaaccaggcttgaaaatgaaggagatagcctcctgcagactcaagcatgtctctgctatatttgtgcagggaatgtagagaaattagttgcatgttggactaaagctcaagatggaagccaccctttgtcacttcaggatctgattgagaaagttgtcatcctgcgaaaagctgtgcaactcactcaagccatggacactagtactgtaggagttctcttggctgcgaagatgagtcagtatgccaatttgttggcagctcagggcagtattgctgcagccttggcttttcttcctgacaacaccaaccagccaaatatcatgcagcttcgtgacagactttgtagagcacaaggagagcctgtagcaggacatgaatcacctaaaattccgtacgagaaacagcagctccccaagggcaggcctggaccagttgctggccaccaccagatgccaagagttcaaactcaacaatattatccccatggagaaaatcctccacctccgggtttcataatgcatggaaatgttaatccaaatgctgctggtcagcttcccacatctccaggtcatatgcacacccaggtaccaccttatccacagccacagccttatcaaccagcccagccgtatcccttcggaacaggggggtcagcaatgtatcgacctcagccctgttgcttcctcgtacttcacacgctatatgacgttggtaccgagctcgatt

SEQ ID NO: 521038 - DNA, 211 bp, Homo sapiens
acacaatctaaaaataagggacagacccgggcgagagaccattgttatatccacatctaccctcatttccaagagccacactacattacccaggaacctctggagctgagtcccgtatacagactaatcctgtcttcatagcagcacatgtgagcaatgtccagtatactcattaaatcatattgcttctgaagcaagcggactcgtcaat

SEQ ID NO: 521039 - DNA, 501 bp, Homo sapiens
gccccccgggttttcccttttatgtttcgggttggtatgttggggggaattgtgaggggataccattttcccccgggaaccagttatgcccatgtttcccccaagttggaatttacccctccttaaagggaccaaaagttggggttccccccgggggggggccgttttaaaaataggggttcccccgggctccaggaattgggcccaaaaaaaaccagttttttcaatacaaaaagaccggggtacctccagccatgatgggggagatgtttaaaaaggctcatgttgttataggagagaatccggtttatgaaaaaaagcccaaaaaaaaagttaaaaaaaaggggtggacccgtcccaaaatgtcccttgctcaaaaaaaggttggggtagctcaaaaaaaggcaagtttcctcagagttcaggagggggttgttgaaagttaaccccaccatttttttatgtttttttcagaaatagataataaacttaggacccgca

SEQ ID NO: 521040 - DNA, 285 bp, Homo sapiens
taacctgcacatagtacacatgtaccctaaaacttaaagtataataataataaattaaaaaaagaaaaatatataacaaaaaaaaaaagaagttctacctctggctgaaggccaaccaatgcaggccatacaacaactcataacagaacaccattgctccaaagcaagaggaaacaacagctaatcccactgtttgcaacatcctggctaaccagagtttctgagtctatctatgtgacactttcactgctagcaaaactagcatttgaggtaacatattacggt

SEQ ID NO: 521041 - DNA, 372 bp, Homo sapiens
  misc_feature (91)..(93): n is a, c, g, or t
tcttggtggtgctctctctctatactaatctttatacaaatcttcttaattataacattcacagccacataacgagtcgtattttatatcnnntaacaaaccacacttatccccaccttggctatcatcacccgatgaagcaaccatccataacgcctgaacacaagcacatacttcctattctacaccctaataggctcccttcccctactcatcccactaatttacactcacaacaccctatgctcactaaacattctactactcactctcactgcccaaaaactatcaaactcctgagccaacaacttaatattactagcttacacaatatcaggttcccatcttcaatacataatcatagtcataact

SEQ ID NO: 521042 - DNA, 671 bp, Homo sapiens
tgcagcttgctgctgcggtgactctaaggatccccgcttcctgcttctgccgcttcctgcgtctgccgcttcctgcattctgctgcgttcctgcttctgccgcttcctgcttctgcctgtaatagtgatgaacaagattaaatggaagttgaagaccagggagtagtatagaagccaaataaaaccaaacatcataaatttagacaccagtctgccgacatcacatactatacctaggtgctgatatggaagaatttcatggcatgactttgcacgatgacgacagctgtcacgtgattccagttcttccacaagtgatgatgatcctgattcccggacagacattacctcttcagctttttcaacctcaagaagtcagtatggtgcggaatttaattcagaaagatagaacctttgctgttcttgcatacagcgaatgtacaggaaagggaagcacagtttggaacaacagcagagatatatgcctatcgagaagaacaggattttggaattgagatagtgaaagtgaaagccattggaagacaaaggttcaaagtccttgagctaagaacacagtcagatggaatccagcaagctaaagtgctaaattcttcccgaatgggtgttgccttcagacatggctgcagttcaattagaatccctcaataagt

SEQ ID NO: 521043 - DNA, 231 bp, Homo sapiens
cagtgttctgtagaaaacaaaacaagtcagagaaagaaaaattacctattacctatggcacatttctgttacgtcaagtctgggcttcagccctgtgggtcctgttaaggctctttttgttctgtatcaagcaggagtgtcttgagtgtcttactaatccccatacatcatgtctttgaaatgacagaagtcccatcctttgtggcccgtgcagtattctgctattggaac

SEQ ID NO: 521044 - DNA, 644 bp, Homo sapiens
  misc_feature (6)..(6): n is a, c, g, or t
  misc_feature (49)..(49): n is a, c, g, or t
  misc_feature (67)..(67): n is a, c, g, or t
  misc_feature (75)..(75): n is a, c, g, or t
  misc_feature (102)..(102): n is a, c, g, or t
  misc_feature (104)..(104): n is a, c, g, or t
  misc_feature (116)..(116): n is a, c, g, or t
  misc_feature (123)..(123): n is a, c, g, or t
  misc_feature (326)..(326): n is a, c, g, or t
  misc_feature (328)..(329): n is a, c, g, or t
  misc_feature (350)..(350): n is a, c, g, or t
  misc_feature (358)..(358): n is a, c, g, or t
  misc_feature (433)..(434): n is a, c, g, or t
  misc_feature (454)..(454): n is a, c, g, or t
  misc_feature (535)..(535): n is a, c, g, or t
  misc_feature (557)..(557): n is a, c, g, or t
  misc_feature (633)..(633): n is a, c, g, or t
tattangagcgaatcgatgagtccagccactgtaaacatgcccccaatnatggtgcacacacctgtnaggaagtnggtgaaggacctgtacttctccgtcancntcaccatcatgngcgaaanctcataaaggacgaagactccgggaaggccttggtctgcccaacagcccattggcaaccttctcatgtctggtcacagagaactgatttgtcctcagtacctctccgtccaccttcatgtacacagtgggcaccaccttcacaaagtactggaacatcatggaggcttggggcgcagtgacattggtgtggtccagggggttnannttttttttttttttttttttntatgatangtgctggatgtagtgggtcatgttgatgttgtcaaggccaaagctctgcaagtcatggacgtgcacatgggactnntggaagctcttcccaggggnaaagtggaagtttccggccaccttattgacttccaagaagccatacacctggcagccttcattcttctgctcctgcatctnctggctgaagcctctcgccggnactgctcaatagtatctgggttcttgaaggcccagcctctacggcgatatgcctcccgcacatcttcacaggtgtnacagcacttga

SEQ ID NO: 521045 - DNA, 406 bp, Homo sapiens
tccaggaggagaaccaaaaccttttgctagaaagtcagctattactttgagaaaactcatggccttgtagttgagaggcaggttttaagacagcgcttggggatcgatgccctggttgctgaagaggaggcggaagccaaggggaatgaagtgaggccagtggccgggtctgctgagtccgcagcactcagactacgtgcacctctgcagcaggtgcaggcccagttgtcacccctccagaacatctccccatggattctggcggtattgactcttcagattcagagtctgatatcctgttgggcattctggacaacttggacccagtcatgttcttcaaatgcccttccccagagcctgccagcctggaggagctcccagaggtctacccagaaggacccagttc

SEQ ID NO: 521046 - DNA, 117 bp, Homo sapiens
ggggggcggagggagagcaaatggtctctctccaaacctgcagtcagtgctcttggaccggtctcacagacagcacatattctacgtcacagctctgccagtgggggggggttacct

SEQ ID NO: 521047 - DNA, 199 bp, Homo sapiens
aactaattctcttttcttgtctgccgccatgtgagacgtgcctttcaccttctgccatgattgtgaggtctccccagccatgtggaactgtgagtccattaaacctctttttccttataaattacccagtctcaggtatgtctttatcagcagcatgaaaacagactaatacactacataataaagactaaaattcaaa

SEQ ID NO: 521048 - DNA, 213 bp, Homo sapiens
tgacgctggtaccacagagttgctcgtagcccagtgtgagtgcagtggtgcatctcggctcatcgtaacctctgcctccccaggttcaagtgattccaagccatggcttgtgcctctgcctcctgagtagctgggattataggcgcaaccacacacctggcgaattttttttttttttttttttttttttttttttttttttttttttttttt

SEQ ID NO: 521049 - DNA, 730 bp, Homo sapiens
agcgggagattcctgcaggttcgagaaagcatgagatgctcccagaatcctggattggacttcattctggagagcatatgacaatggacgaggaccccgtattctagccagttaatacgctggacagaatttttaaaagcgatgaagccagttcctatggatatatccacgggcttgcgtttgagaaggaactgagtaggcagtgagaagagtcgagtgaagcctgggccgtgagtgacgcaagaactgagaggaacgtcgactcgcgtgcaggcaaggttgtcacctcagcagcgatctgagacgtgaatatccgggttccagaaaaggcagaggttcttagccgaaagcagcggaggaagccgcaggccaaggaggtcagtcactggccaggaaggtggctcgggccaggcggcactgcaaaacccggtgctctggtgtcgacactgatgacgggggcagagccaaggaagcttccacttcttccccacagacagtgcctaacagcggatatccaaaggagccagcagccattgtgtcctgggatccccagtcgcctggagaatgacccacgcatgatctgagcatcacagacaaactcatcaactggaggtgtagcagggcgcgagggggtgacctggcgtgttccccatgcgagttggccaagactcgtctgcagaaccaggatggggaaagccatgtacaaaggaatgatcgaatgcctgaatgc

SEQ ID NO: 521050 - DNA, 187 bp, Homo sapiens
gtttgcagtgagccaagattgtgccactgcactccagtggcactccagtgcactccagtggctctgggtgacaaagcaagaccctgctctcaaaaaatatttttttcttattatgaactatattttcctgactgctttgcatgtgtagtgccccttgatttcaagagtgcagcatctgagcaatgaa

SEQ ID NO: 521051 - DNA, 448 bp, Homo sapiens
  misc_feature (10)..(10): n is a, c, g, or t
  misc_feature (45)..(45): n is a, c, g, or t
  misc_feature (89)..(89): n is a, c, g, or t
  misc_feature (95)..(95): n is a, c, g, or t
  misc_feature (106)..(106): n is a, c, g, or t
  misc_feature (143)..(143): n is a, c, g, or t
  misc_feature (254)..(254): n is a, c, g, or t
  misc_feature (398)..(398): n is a, c, g, or t
cccatctccnagaaccctgtgaaatatgttacccctacgtggaancaaacaactttgttgacataattaatgatctttaagatgaggcnatcatnccctggattancctggggaggctcaatgtaattcacaagtgtctttanaagagggggtcagggctgggcttagtgctcatgcctgtagtccccaggactttgggaggctgaggtggttggatcacttgaggccatgagtttgagaccagcctggccaanatggcgaaaccctgtctctactaaaaatacaaggaaattggttgggcatggtggcacgcacctgtaatcccaactacttgtgaggccaaggcataagaatcgcttgaacccgggaggcaaaggttacagtgagccgaggatttngccacagcactccagcctggatgacagagtaatactctgtctcaacttac

SEQ ID NO: 521052 - DNA, 187 bp, Homo sapiens
ctcggtacccatccttcctctctacggggaactgtttttttagacggagtcttgctctgtcacccaggctgggatgcaatggcatgatctgagctcactgcaacctctgcctcccgggttcaagcgattctctcgcctcggcctcctgagacagggatttttttaacaacgtgagagaggtaaggat

SEQ ID NO: 521053 - DNA, 409 bp, Homo sapiens
atgggtgctcctcccctagcaatacttgcccatcttttaaggctcaactcaaagattactgttatccctagaactttccctgacctgagttgaactgtcctctatgactctaagaagctcttctagtaccagacctaacccactggtaggcgtttattgttcctatgctttaagtgccatgaagccagcatccttgtgtgagtatggattaagacctttttggcattttatttaatgaatgctggagagctataaatacttccgaatagttctgcatgtgttctttatggctaatgcattgggtatgagtggcaagaggtgaggctctagacagggaccaacctagtttggaccttactgtagtttgccaagatgttcattttttttaaggtggggggatggagcaccc

SEQ ID NO: 521054 - DNA, 459 bp, Homo sapiens
aaaaataccaaaacacggggcaaacttggatccacacaaaaaaggattgttttaattttattattcccaaaaaatcaagcccatcatgagtagcccacatggttgctgttcaaaggtactgaaaagggaggcattggttcaccattacccatcagggaactttttacagggatgggttcaaaggccttcgtgctgcttttgggaattcagggactgcagttttgccccaaaagccatccaagatgagcaagggctgacccatccttaactcatacctagatgaaacaacttgcgcagaaacgctggtcctccccagtaaccccttagcatcatattccaatacaggaaaggcatcaggtcagttttaatgaaatacatggaaaggcgctttttgttttgtcaaaggggaaggtttctagcggctctgcttttgagtcaaactcaacaagaatcacacgg

SEQ ID NO: 521055 - DNA, 1859 bp, Homo sapiens
  misc_feature (326)..(326): n is a, c, g, or t
tggcttcaaaaagtctttattcccattgggcccaaggtcttgtaaggatatgttaaaaaagtctgcctatggggtggagggagaagaaggctttaggcaagaacgccctatatttactttgtgacaaggggggccctttacaaaagctccgctgtgggcctcacaaaggctctctttagctcggtgcttgtagaaaggtgacgccttttcagaaagaaatatactctccgccacagacccagcagctctctctgggtgagccccacacccagcagtcactgtgtgtgagagagagtgtgtggccagaggtgtgtgtcgtcaccacncacactctcttctctgtgtgagtaaaagagactctcctcaaatatctctctctctctactctgtgagagagagagtagtgagagtactgcatctctcagagagagagagttcttcacaacagagagagagtagtaagggtggctccctgcgtgacggtggacaaagaacaacccagagagggcgctatagtagtaaagatactctcacacagagaaggcgccagtaggattctcaacagactatatatatcttcttctccacagaggggcgcccagtagtgggagagaagactctctctcatagtaggcgagctctgggaggggggtgctatattataacccccgacgcatctctctatcatctatactcgaagacgtgttgggcgtatctcgtagagaagagatgtatctcctcgtgagaagaaaagagaagagagagcgcgaggggtgccccgcaccaagacgcgctgtgtgctgatattggtgtgaaatacatcttctctacgacgaggaggagaacagcagctctcttcgatgataagcccgcactactcgcgacgcgcatatcttctctctctcgggcccacaaaatatctgcggcgggaaaaacagagtgtggggcactcaaagcgccctacaatctcaacagagatgcgcccacatatactacaattgcgagcgagtgctccacagactatattagaaaaaggcgctccccaagatagacacagaagcgtatacgagggttgtcaacgcaacaagagcacacatcatgtgagagccagacaccaccaacaaattgttgtagccaaccccaaggagactggtcgattcaagcaaccgagagaagagttgacgccccacccaccacaagaacagacagggggagaggagacacaaacaaaacttactccagagggcagagaaacaccacctgtgggagggagaagaccccacccaacggggtgagcgagaggagaatatgagcggacacacccaaacacacaggaggaaagacgtatatatcaccacacacaaaaaaacaacaaaacgggagggtgcaccagtgaggcgaagtagatcgttcccactacaagaaacaagcagcacggtaaacaaaattgtggcgcgcagacaacaaatacagtatgttgggctccccctcagcagacaagatggatcgtatgcaaacacccgtcgggcagagaactaagcaaaacagtgcgagaggaggtgaagagaaccaagaaaagtgagctcgtgagcaaaaaagatattccccccgcgggaaaatactgattacccggcacgcacaacagccgctgtcgtgagcgaacagctcaagacaccaactactccctcgtggatccagaatgatttgttgggtgcctcccacaccaacaaacagtgagcgcgcacgaagacatagaccacttaacgtagacaaccaccaccaatcatattactacgcccatcgatatagttatgcgtaggtgaaggtcctacacacacaacagcagtggagtgtattaa

SEQ ID NO: 521056 - DNA, 220 bp, Homo sapiens
ccgccggctgcccccccccccaccctgtttgctgtctcgtgcagcccctgcacgggagctccagcttgttgtcagcgggaagggctatttcaccataagcaacacatcacactcacacggggcttggttcccgtcccccgttcaccattctcaagagtcccccagcttggccgcctgccccctgcagagccttaggttgttccaagcgacaggggccccg

SEQ ID NO: 521057 - DNA, 1118 bp, Homo sapiens
ttttttttttttattaaataaaagttttgcttttatttaaaataaaatgcttttatacagtctttgaaccatggattatttgaacaattacttggttaattccaccttcttcccttcgcacccttttggggctattgtgagcttaggaatttttctgactagcaccaattacagatttgtaacagcgcaacagactagaacatgtggccagttccaggcatttagagtttaaggaccattgtggtggccaaattcatgtgattcattaagtgaagttcatttctttaattttagttagattttttaaaactgtgcacgtttaatttattttcttctttaaaggccattttaatttaacgcagaagaattgcttacattttaagccattcgtgcttagttgtggtgagttgagtttttaaaaacactgtgtgtacaatttttattaaacattctggtgtgttttttcactattcatgttcaccaccaaatatggctataactctcatagaacatctttcacttccattattggtgacatggcgaaagaatgttggccatttattttaaggcgcagcacccagcggcacttaagtgcggggggtgcacactcaccttcaaagacggtggtaatctcaccaattacgtgcggtgctcacacactttttaaaaagaccccggaagaccacactttttccccttttactcgtgcgtttattttcagagcgggcccaaaaatacccattttcaaagccacgaccggaacttataataagccattttttcccctctccaaggcggtcaaaaaccccacatctggacccttttctctaaagttattcagggcctctcctgcaattgcgctgaattaaatcgcggggggaggagaagagggagaagaagaaactttacaagggggggactacccccgagaaggctttcgcgcaaatcctctctagaaccccgtgttgtatatctccactttataaccacaattatctgtagtaaacatcccacagtgtcgctctagacccgtggctatactacacacagggtcatatattagggggtgagcaccccctgattagtacagcctttataaatcaaaaagggggcgagta

SEQ ID NO: 521058 - DNA, 800 bp, Homo sapiens
ctccaaaacaaaacgaaaaagcacacacacatacagaaataaagagaaataatcaactagaaaaaaaacaaaactgggatcacccagaaagagcgtcacacgaggcgagggagaatgaagcctcttgttatcctgatcgcctatgacaacgaacattatctatcctcttctttgaagcgcaggttcttactcttaaatctggtcgatacaagctgtaggcttggaagtcctgctcgtgtctattgaaatcagctgaagttagtgttttcctgtgttacccagtgttacatagtctcatctttgaacttgtctgcgtcaggccttctctctgttgggaagtgctgcgctgtttcgtgtctaacttattctccctggtgtcggtgtggctggtgagagtctgtgctgaagcccgatctgcttggttcctccaagtgcacattcatgcaagtgtatatgggatagactagggtagatgcccggaacgtggttttcctcctccctccctatgggagccatagctcctaaatatattgtctgggtcccaaatgttggagccctcttcctctgactctcagtgggctgctcttggcatgtccctgtgcttggaacagggatctgtcaggtctgaacaggcctctgagactgctagggtcagcaaacgtacatgttattgggaaactccctttcccctttaggtgagcttctaacaactcagtctaatcgtattgacctgaagagcgtattgtcctgactgaaaagctaagatcttttaatagtgtgagctgttagatacttagggg

SEQ ID NO: 521059 - DNA, 123 bp, Homo sapiens
agaatgctgggaaataaggcctgccatcgctcccacctgctcttcatgaggagtcctttattcctgcatgtttccgtgttctattgggacctttacggagctaacctcgccacaaatgcatgg

SEQ ID NO: 521060 - DNA, 1137 bp, Homo sapiens
  misc_feature (122)..(122): n is a, c, g, or t
  misc_feature (348)..(348): n is a, c, g, or t
gaccgaggtctcagatgaatgggggtgtgaaaaactgcaagaatccagaaatgtgctactcgtgaatcgtatgttgatgatagcgtcagaatgtggagataccaggctacccgatgattggntggcctaagagtatgtggctgaatgactggaggatctgtgtactcgttcgagaattctaagacgtcctctagtatgcggcagatactcaatagttgtcgaatcaccaccggtctttggaccagaagagcgtgtcggatgaccccaaccagctcgttaaccctaataagactatctagtagagaggtgtatcgcggcaagcatggtgcatgtgagagactaacatgnatgagaagatctggtagacgtagccatacgggcataccccgtcagaagcaaagaaagagcccaaaagacttttgctgacctaataaagcattgacgttgaagaagactagtttagaggcagataaaaagctctagtatcctggccatccagatcgatcgtgtgtatcctacgaaaatcaagaataagcttcttttacccctgttcattatatctgctgcagaactttgtagaacgagtttgttagacgcttggcgcgtaggataggagctactctatgtaatcctgccggccaagctccttaaccagacgtatgaagggttgaggaaaggtggtccctgcttgcaactggaagttcgcctttcgaaaacagcaagtggacggagggtaaggtaaaagctttcgaaagataggagggacttggtgttttcccaagagcgttgtgtggggctcgctccgcccctttttcaaccgcttgagtggaagaaagaattagggcacccgtaaattcggctacgcagtggggggaaattccgagagatacctggtgtgggagggtgtacttcccgttgtccaatggcaattgacctcggttcgagcgcgcttggggaagtgtctgaaagtttgaacgctagcctgggtttgggttggtggagaattagaattattgttgagaagttgtcgtgtaaagttgactatccagaaggttaggagggtagtagttatggaattgtaatttaagaaggtatttcttgttaagtgagggacatatgggataactagggacgtgg

SEQ ID NO: 521061 - DNA, 403 bp, Homo sapiens
ttgccgttctcacgatccaacgtcgaccaggttgttacaggacaggataccttatgacattcaggtatccctgcaattagtacaagatgcgagtgctcattgagcgcgcacatgctatcactgtacagtattgctgtggattacgggaggtgacggccaagagtatttctgtatgtggccagattcctggcaaaggcctacatgttccacagcatcttcgactggccagtgctcagggctcttcacttttgcctcacagcaaggtggagtccctgagaagagtttaagcacagtgcttaatgtgactgatagaaaccttgtggtatctctctggcttcagtgtgtagaatgatgggcataattaagctggcatttgttccattgcatgattccgtgtatatta

SEQ ID NO: 521062 - DNA, 442 bp, Homo sapiens
gctgggcaatggcatcatgctgttgagagtgatggccaaagttgagttctgtcggagagtctcggtcacaccagggattgctgaatggccactcccatggcggacattgatctgttcgacttcatgagcgtcagagtctcggtcagtgcacgcgtggtcagaatcagtggctcagcggatgggctgggccctctgcaaatgtgtgtacccgtgacgaggacatcacgttccggctctagccgatccaccatggtcctaatgagctcccagaggagtgccgagagcgtggagcaggtcttgcgcatacacaggctgaggtctgtgaccacctggtcattccggctccgtccccgtgtgcagcttcccttgcgtttgcacaatgagctccttcaggcggcgcccattgggtttgtggatgtcttcatcattggagttcagtttg

SEQ ID NO: 521063 - DNA, 88 bp, Homo sapiens
gccgcctactactactaaatttgcggccgcgtcgacctgggactttaagtgtacaccactgtgcctgctttgaatcctttacgaagag

SEQ ID NO: 521064 - DNA, 112 bp, Homo sapiens
ctgtaatctcagcactttgggtggccaaacaggaaggatcaacttccggccaaggaattcgggaccagcctggtcaacatagcgagatcccatctctacaaagagttaaaaa

SEQ ID NO: 521065 - DNA, 111 bp, Homo sapiens
gttgactctagaggacccctgcggatacttgatacctagctactggaaagtctagaggcagaaggattgcttgagcccggggaagtcaaggctgcagtgaactatgatcgt

SEQ ID NO: 521066 - DNA, 1250 bp, Homo sapiens
gctaaaaatacaaaaattagccaggtgtggtggcgcgtgcctgtaatcccagcgtacccaggaggctgaagcaggagaatcactggaacccgggaggtggatgttagcagtgagtctgcagtgagccaagatctcgccactgcactccagccggtggtgacacagtgacgactctgctgggaacagggctggggctggcgaagagtgccaatacattagacaatagctagggcaaggccagggcatgctgcgtcaagggcgcgggatgtcgggagcagggcggggagtggcagagtagatggccaagtgacagtacagaataaaaaggatgttacgcaatattgaaacaaactagtgtctcgttatcactcgtgagcaataccggttggaaacatggaaatccgataacatgtaaaaaactgcaaaagtcacgtcagatagtagacaaaagaggtaagaagtccaaggaaagctgtatcgcatataaggcgattgaagagagtgagaccagtggaaagtggcgcatgggatcgaaaaagtgaagcacagaggaaaacatgaatatgagtcaataaacgcaatgtaagtgcaaaacgtgggatagtgaggcggttaacaagtcgaggaaaatcataagaatagagaggaaagtaacaatacgtagtacgttagatagtaatacgaggcatgataattaatcggaagggaaaaggaaagacaatgaggaccttggatttcgattgatggattgcatgtagccgtgaaaaaaatgggaaaggggaagactgggtagacttcgttgacgcgaggtagaacagtcgaaccttaaaccagcaaaacccaaagacaatatgagggattacagacacgaaggactacgccagagcaagacatacatcatacgatggtgtcaatacgatgaaacgccataatcattatcaagccgaaaaccatacaaaccccaagaaagtggatggctgcaacagcccagggacaccacagaggacatccccagacgagaatcgaccaatcagaacgggcagaaacagacaaagcagagacaacaaacagcccaggcaaggggacagcaagaaccaaaagcgcgtggacacgacagaggaccagctaaaaaggaggacgagaacagcgccatagcgcaagggtgacagaaacgaaagccaagagcgggaagacgaaaggagaaaagtagcgacacaggagacagcggagcaacagagggcgaagccagg

SEQ ID NO: 521067 - DNA, 817 bp, Homo sapiens
  misc_feature (173)..(173): n is a, c, g, or t
  misc_feature (183)..(184): n is a, c, g, or t
  misc_feature (188)..(189): n is a, c, g, or t
  misc_feature (192)..(192): n is a, c, g, or t
  misc_feature (201)..(201): n is a, c, g, or t
  misc_feature (206)..(207): n is a, c, g, or t
  misc_feature (223)..(223): n is a, c, g, or t
  misc_feature (230)..(230): n is a, c, g, or t
  misc_feature (232)..(232): n is a, c, g, or t
  misc_feature (235)..(235): n is a, c, g, or t
  misc_feature (242)..(242): n is a, c, g, or t
  misc_feature (335)..(336): n is a, c, g, or t
  misc_feature (342)..(342): n is a, c, g, or t
  misc_feature (350)..(350): n is a, c, g, or t
  misc_feature (353)..(353): n is a, c, g, or t
  misc_feature (362)..(363): n is a, c, g, or t
  misc_feature (367)..(367): n is a, c, g, or t
  misc_feature (375)..(375): n is a, c, g, or t
  misc_feature (378)..(378): n is a, c, g, or t
  misc_feature (380)..(380): n is a, c, g, or t
  misc_feature (382)..(382): n is a, c, g, or t
  misc_feature (384)..(385): n is a, c, g, or t
  misc_feature (389)..(390): n is a, c, g, or t
  misc_feature (413)..(413): n is a, c, g, or t
  misc_feature (420)..(421): n is a, c, g, or t
  misc_feature (434)..(434): n is a, c, g, or t
  misc_feature (448)..(448): n is a, c, g, or t
  misc_feature (451)..(451): n is a, c, g, or t
  misc_feature (459)..(459): n is a, c, g, or t
  misc_feature (471)..(471): n is a, c, g, or t
  misc_feature (478)..(478): n is a, c, g, or t
  misc_feature (483)..(483): n is a, c, g, or t
  misc_feature (485)..(485): n is a, c, g, or t
  misc_feature (498)..(498): n is a, c, g, or t
  misc_feature (500)..(500): n is a, c, g, or t
  misc_feature (502)..(502): n is a, c, g, or t
  misc_feature (510)..(510): n is a, c, g, or t
  misc_feature (513)..(513): n is a, c, g, or t
  misc_feature (518)..(518): n is a, c, g, or t
  misc_feature (549)..(549): n is a, c, g, or t
  misc_feature (552)..(552): n is a, c, g, or t
  misc_feature (575)..(575): n is a, c, g, or t
  misc_feature (578)..(579): n is a, c, g, or t
ggtggttagtttctgcgacttgtgtgggactggtgagtgtgggcagtgcggcccctgcggagtgaggcgcggcgcgccttcttgctgttgcctcttcctcctcctgtccggggcccgcccggctcggtgggggtgctgtgatgcgtgaggcagccgggggaggccggaggtcngaggacttgnntganncgntgcgcaacnccctnntcgtgggccccccacngtaggtncnggnaacctgnttgaaccccaagctgataggaagatgtctcaggaaatgctaaaattgggcacccttgcccccaatttcaaaagccacagctgttatgccagannggtcangttaaagnatntcacgctgnnttgnctaccaanggnanantnntgtnngtgtccttctttaaccctcttgnattcacnntttgtgttgcccnacggagatcattgnttncagtgatngggcagaagacnttaaganactcnanttgcaagtgatgngngnttctgggnatnctcanttctgtcatctagcattgggtcaatacaccntangaaacagggggctgggaccatgnacnnttccttggtatcagacccgaaagcgcaccatgtgtcaggattatggggtctaaaagggccggatgaaggcatctcgtcagggccttttatcatgcggataaggtatctcggagattatgaatgactcctgtggccgtctggggatgagacttgaactagtcagggctcacggtcctggcaactgggtgtccgtggtggactgggtgtcccatcaccttgtccagggagaattttccca

SEQ ID NO: 521068 - DNA, 859 bp, Homo sapiens
ggtcgtgattacgaatcaataccatatagacccaatagacccactgaccagagaggcactctctgcagtgcgctcgctaatgtacttgcgctggtgcattggcgcttagggttgagtgtggactctctcatgtcaacattaattgagtcgggtctatcatcttaatcgtccatctttgaagctagcatggtcaaaccagcatggccattgtagtggcagcgccatccgtccacactgaggaacaatgtgtgccgccaccgagctgaaacagtttccacgcatgtctggagtgcggcccttggggtactggggacttgtggtcatctgttttttagtgtccatcgattgggcatctcatgtttgcattccactctagccatcgtggctgtgtgccactcgttctactcagctggcaattgtacgggtggatggagttcttttcagcatgttccttctgtatgatacccagaacagtaatcaaggcgtgcatgaagtatcaccaatgtatggagttcaaaacatatgatcccattcaactcgatgctgagtatctacgtggatacattaaatatataatgcgaagttcgcaactatgcgtggtcaactaggtaggcacaccagcaaaagaaaatgacagtgctctcagcgttgctggcttctctgctacatcaaatatctttgtggactggggcacgatatgcctcacaagcacgtcggtacaagcagacttcgttggaggttaccaaagatacagacaattgtctcatttgaattgtcctgtatgtgagcccagatcgcgtggttctggacgacaactggagaagtctttccaaaaagacacagcttaacctcacggaaa

SEQ ID NO: 521069 - DNA, 213 bp, Homo sapiens
ccaaagaataagacgcggtccttgacaagccctcttttatacagaggaggggaaaagggagaagacaaaatttctgtattcataacatttactacaatctagccagggaaacaaaatttaattcactttaattcctcaaatattaaatatgttttgtgtaaaagggtagttttcaaatcttgatgagtagaatcaactatgatgctttctgga

SEQ ID NO: 521070 - DNA, 345 bp, Homo sapiens
  misc_feature (1)..(1): n is a, c, g, or t
  misc_feature (44)..(44): n is a, c, g, or t
  misc_feature (134)..(134): n is a, c, g, or t
  misc_feature (254)..(254): n is a, c, g, or t
nactggccatgtgccacccacacttggataaatttttgtatttnttagttagagacagggttttcgcccatgttggcccaggctgaatcgcggaactcctggcctccaagtgatccacccaccttggcctcccnaaagtgctgtgattacatgtgtgagccatcacacccagccctatttatccatttcttctgggttttccaatttattggcatatattgttcacagtagcctctaatggtcctttgaatttntgtggtattggttgtaatgtctcctttttcacttctgattttatttatttggttattctctttttttcctcactagtctggctaaaggttt

SEQ ID NO: 521071 - DNA, 168 bp, Homo sapiens
gggggggaccccccccgggcccccccccggggtggtttttttttggccccccttttttttctgggtcccccggccccctggggggggggtggggggggccccctggccccccctttgggtttttgggcgggcttttccaatttaaaaaaaccggggtttttttcccca

SEQ ID NO: 521072 - DNA, 153 bp, Homo sapiens
cccttggcaactacaattctactttctgcttctatcatttgactactttagatacctcatgctcacagaagggaggcaggcacagatggaaaacgttttctttcgtcctctctaccagtacgctcccgcctgccgcgctccgccttgtgcggc

SEQ ID NO: 521073 - DNA, 706 bp, Homo sapiens
ctttgggccagggtctccggagagcatgagcgtggtgcttcatcggcgctggccagctggcttttgccctgtgccaaggtgcttcacagcagcaggcgtcattggtagcccacaatgataagtggctagctccccagacatggacctgtgccacagtttctgctctcaggaatgcatggtgtggtgaagttgacaccccacaagaaggagactggtgcagcacagttgatgtgctcttcctggctgtgaaggcgcacacatcatccccttacatcctggatgaaataggcgccgacatttgaggacagacacattgtggtgtcctgcgctggcctggcgtcaccatcatgctccattgagaagaagctagtcagctgtttacggctcagacgccccatgggtcatccgctgcatgaccaacagctccagtcgtggtgcgggagggggccaccgtgtatgccacaggcacgcacgcaccaggtggcaggatcgggaggctcatggagcagctgatgagcagcgtggtcttctgcacggaaggtgtaagtaggactgataggatggcgtcacgggggctcagtggcagtggccgactacgcatacaaagcctagattcactggctgatgggggtgtaaatgggactccaaggcgctggaaatcagctcgggccatgcctcatggggtgcaagatgtgtggaccagaaa

SEQ ID NO: 521074 - DNA, 870 bp, Homo sapiens
tacaacccccgacggcctcgagaaaggcccctcctcggacggcagccagggccgaaagacacccgggctgcgagccacgtacaaaggggggcgagcacgacgcccgagcctctaccaggcgcgccgggtctctctcttcgacaagccgccacgggtcaccccgaagggggctccccacctattggtcgccccgggcgaccacgcccgctcagggcgcgcacacagaaaagcgcactcggccacgcccacgtccacagtggtcgatcacacacacgcggcgctcaaacgcgccacaacaaagccggtgggatagcacaacagagggcgcagcaaggcacgcgcctaggtgcgaaggataactcgcgcctcacgctgggccaaccgcaccagcgctgctctcccactctgtgggaaatctcgaccccacacggagctgtgtatggggcgccacccctccgacggagtttgcaaacacccaccgctctacccttgcgagcgaggggcccacggctggtaggtttcgaagcatcctccacctccccctgcgcgcccccgtcggtcatgcgtgggcgccgatatgtgtaggataccctctctccgagccttgtcgccgctctcttggcgacagaggatcacgcgcgggcttccccacgttctgcggtcctctcgcagcccttgggggtcatggcaaccgcaccaggctcctgcgccctctcagggttcagggatccccgttgtgattgcgctccgcccgactcgggacgccgtctgtccggtgccgacccggcgacaccgggccccctcgtcggttgttctcgctcatgtcagcccacagcggggaactttgcgcactgtcgggccaaaccacat

SEQ ID NO: 521075 - DNA, 194 bp, Homo sapiens
cccgcgctagcggtaagtgaacggaggcttgtaaaataataatggctgtgatctctaatttaaaaaacctatactgaacagatgtatatatcaagtaaaatgtcaaacaaatataaaaaacacaactactcattcctaatatcagacactggctaacactgtcctgacatgacgttcacttaatgccgctagcg

SEQ ID NO: 521076 - DNA, 311 bp, Homo sapiens
  misc_feature (38)..(38): n is a, c, g, or t
  misc_feature (44)..(44): n is a, c, g, or t
  misc_feature (159)..(159): n is a, c, g, or t
tcttattttaaatccctgtcagccagaatggatatatntctgtnacagggacaatgaaaaagacatagaataaagggaaatttaggtaaatatccatttcaattttcaaagatactctgcaccagagtttcagcttgctgaaatacacaaccttgactncattctttattgtttttagatctttattggaggaggtgtagcttttaattataaaagtgattcgtgttggttgtaaaaaatgtttttagctaactgttttaaaagcttgtcttggccgggtgttggtgtcacgcctgtgatcccagcacttt

SEQ ID NO: 521077 - DNA, 944 bp, Homo sapiens
gcagaaggcccggtgactccagtgcctgggaagtcaaccgagctcgcttccaggtcaatcgaaactggagctcaagtttgcatgaagagaaagacgccccagcaagcctctgttcggggagtcgctctcaggctcctcgatcctgccatgggccaagacaggtctggcagggggtcgtgcagctaggcatcccccacgccataggcgtctgtacccttgacctcttctgtcctcgagggctttggtaagagctgctgtcatgcaccctcgctcacctgaactggtggtgcctccatgcggtcgccgacggattggaaccgccaaagactgttcgagagaacatcgaggtcgaaggaatggagggttgtactttgagtcggtggcccgtggaccatgagcactgatgcggtgcccggggtataggaggggctaattcaagggggccttgcaactccctggtgagatctagctgtgcccctggagcagagggggacgcgatgctccgtgggtggtgcggttgggacgagtgggaacctctgccccccagtttggcacgacttgtagcacactactgctgtgccgcctgcttggagcgcggaacaagtcgtaggtcgttggaggtgtgcgtgacatcggggttcggggggaacgtcttgtttcattcagagttgggtggccgtaggccccccagtgtctacgttggggaatcgtcacggtgagtcgggcggggggtgccagagagactgctggtggttctggtaaatggaggagggactctgggctacgcaatcggggggggctggctggggccagattgcgggacgatcggtagacctctaccggggggagggctgctgggccaagcaggtgcggatcggccggggcaagagagggcccctctcgtggcttggcccttgtttggcagcgggaaccgggcggttggg

SEQ ID NO: 521078 - DNA, 151 bp, Homo sapiens
acacttgaccacctggcgcaatagatatatgtacctgcaaggggaaagatgaaaaattataaccaatgcataatatatgcaatggactaacccctataccttcatgcataatgagattaactcagaaataacatttgcaatggatgatgcc

SEQ ID NO: 521079 - DNA, 402 bp, Homo sapiens
  misc_feature (14)..(14): n is a, c, g, or t
  misc_feature (27)..(27): n is a, c, g, or t
  misc_feature (298)..(298): n is a, c, g, or t
cccacagaaaacgntttcacaatttgntaaagcctatttttcccccaaataaaatcaagtcttgataacttatgaaaactttgttattccaaggtatatagtcagggttgttgggaggaacagaagtgacagcatgcaaacatagttaaaggaggtttatgatgttagctcacattaggatctgggcacttcatcaatggctgtgtcacccttcacgaggctgactgtctcagcagtaccaagctgttgctgagagcctgggggattctttgaaaagcctactgaccttcaattcatntggccgcctgaagaagctggttctaatatggacgaaaagatgcagcaatggcaggaacaagatggatgtacttgtcagtcgagtgaaggcaagcaggtggaagg

SEQ ID NO: 521080 - DNA, 594 bp, Homo sapiens
aaaacaaaaacaaagaatctcctcgtctgtcttgtctgattgttcatgtcctcatgtgtttcttatccgttggggcgaacacttccttgaacaaagatagcattctatttcccatacacattcaagtcaactttattacagaatacatatgctaaactcatccattttaactctacacttgatgaattttgatgaatgtgtatgctgtatgatatcatttggctctatgtccccccccaaatctaatctcaaattgtaatccccatgtgtcaagggaggaccctgatgggaggtgattggctcatgggggcggtttccccgatgctgtgcttatgatagtaagtgagttctgatggtttaaaagtgtttggtgggccgggtgtgatggctcacgcctgtcatcccagcactttgggaggccaaggctgtcagatcacttgaggtcaggagttcgagaccagcctggccacatggtaaaacttcctctaaggaattaaaaaaaagagagagaaacagctcaaccagcctaagaataggctggtttttttttgtgcccggcccctttacctaaaggtttcttgtgggttttctcaa

SEQ ID NO: 521081 - DNA, 154 bp, Homo sapiens
aagtgtctagctctcatttactccagcacacacaatagtcaaagagcctactgaccagacactatgttcttcttcccctgtacccaggttcttgagtagggagtctgcagcctgcctccatttcttcaccttccagtcactattctttacagag

SEQ ID NO: 521082 - DNA, 145 bp, Homo sapiens
cacctttctcgttgcatctgaacaccttgccccttcctcccttgaaataactggcacctgatggagcatggacttttggtaacttgcaacagaatcacctaatgaggccacgttttccctatggcctacctccattggctcacag

SEQ ID NO: 521083 - DNA, 268 bp, Homo sapiens
  misc_feature (3)..(3): n is a, c, g, or t
  misc_feature (12)..(12): n is a, c, g, or t
  misc_feature (23)..(23): n is a, c, g, or t
  misc_feature (72)..(72): n is a, c, g, or t
  misc_feature (100)..(100): n is a, c, g, or t
  misc_feature (144)..(144): n is a, c, g, or t
  misc_feature (152)..(152): n is a, c, g, or t
  misc_feature (184)..(184): n is a, c, g, or t
  misc_feature (228)..(228): n is a, c, g, or t
  misc_feature (265)..(265): n is a, c, g, or t
ctnggtgccgcnttcggtgcccnccttgcaaggaataaccccttatacaatttaaatacatgggtatcttcngagggtgactctttcttgcacccaaggngtgggttaaagtgcacacatcagacactttttctaaagagaagnacagacangttcgcacagggcatgccttgtcactcagctngtgttacatgtgggtgggtctgtgggaaagaaaaagaaggactncatttggggaattgaaggttgtcccctttcccaaggnagt

SEQ ID NO: 521084 - DNA, 711 bp, Homo sapiens
tgccttggagtggctccccaggaaccgggtgctcgccgcttagtacccggagatgacccaggtagcataacttacgtccggttttcctgtcgagaagatggcctcatcgacagcaccctggtcatcctaaagctgccggacgtgcggatgccgcaggcactggctgagtgtgtgccctagcttatggtctgacttggtgagcgctggtgccccacatatggagtaatccacggggtgcaaatcactgaccagttatctctggagtcagacatttggcctgtgatagccagaggatttgccatgacgggctaggcatcttgtgggtaaaaaattcctggaaaacccagacttatctcagacagaggagaaacttcgtggagcagtgctacacgcactacgtaaaactacctaccattggcaccgaactgagctacactgagggactgagcctggtgtatatggcagcaagactggatggtggcttagcagcagtctccagagcattccatgagatccgggctcgaaatccagcatttcagccacaaactttgatggactttggctcaggtactggttctgtcacctgggctgctcacagtatttggggccagagcctacgtgaatatatgtgtgtggacagatcagtggcatgttggttttggcagaaaaactactgaaggtggttccacaaaatctgggggaagcctttat

SEQ ID NO: 521085 - DNA, 148 bp, Homo sapiens
tagaggatcccagcacagaggaggggtcacagtggacacaagggtgggcgtctctccacctcctcacattatgctaacaggtacgcagacacattcagcgtctgtgagggactgagatgcaggatttcttcacgcctcctctgtgctg

SEQ ID NO: 521086 - DNA, 648 bp, Homo sapiens
catggtggctcacgcctgtaatcccaacactttgggaggccaaggcgggccgatcacttgaggtcaggagtttgagatcagcctggccagagatcagcctggccaacatggtgaaaccgcatctctactaaaaattcaaaaattatctgggtgtggtggtgcacacctgtaatcccagctgcttgggagactgaggcaggagaatcacttgaacccaggaggcagaggctgcagtgagctgagatcatgccactgcactccagcctaggcgacagagcgagattccatctcaattaaaaaaaaaaattatggatacttacgtatttatttttattttttaagagatgggatctcactgtgttgcccaggctggtctctaattcctggcctcaagcaatcctctcaccatagcctcccaaagtgctaggactacaggcacgacccaccacacccggccaatgggcatttaaaacagctactcagccaggcgtgcaatggcctacgcctacaatcccagcactttcggaggccaaggcaggcagatcacgaggtcaggagattgagaccatcctggccaaaatgatgaaacccggtctctactaacaatacaaaaattagctcggtgtggtggcacacgcctgtagtcac

SEQ ID NO: 521087 - DNA, 304 bp, Homo sapiens
  misc_feature (92)..(92): n is a, c, g, or t
ctcgcccagtgcctgcattggaacgtccggaagaagcaagcccacttcgaggaggaggaggaggatgtcgttctgttgtttttgtcgttttncctggcccattccttgccctttatctgtttccacgtgcacttggaattttgctactccattggcatgtgaccgttcatattcatgctggaatggttaccacttacaccgttctactgatgactccaaatctgtctgaatgaaatatattgttgataagtggaagaatgacctataccacttattcatatctgtatgtggtgttacgcttttt

SEQ ID NO: 521088 - DNA, 282 bp, Homo sapiens
ggcttgactccgggtttaaaaactgggccggtgaaggtgccccccgtcggttggggcgggcctccccccaagttcccaatgtggccgggggctttgattgccccttgttgtttttttaatagtccttcccaatatgggatggggtgttccaggaagtcccctgccctccttaaagcccccccccttctctttaagggggatggccccgtcctttccccagtcccccccgggggggggatagccttgctttcgggtaaattatgtaatgccaaatttttttta

SEQ ID NO: 521089 - DNA, 385 bp, Homo sapiens
  misc_feature (12)..(12): n is a, c, g, or t
  misc_feature (95)..(95): n is a, c, g, or t
  misc_feature (101)..(101): n is a, c, g, or t
  misc_feature (200)..(200): n is a, c, g, or t
  misc_feature (312)..(312): n is a, c, g, or t
  misc_feature (338)..(338): n is a, c, g, or t
  misc_feature (361)..(361): n is a, c, g, or t
  misc_feature (375)..(375): n is a, c, g, or t
gggacggagctncactctgtcgcccgggctggagtccagcgacgcgatctcggttcggttcactgcaacctccgcctcccggattcaagccattntcccgnctcagcctcccgagtagctgggaacacaggcgcccgccattacgcccggctaatatttgtatctttagtagacacggggtttcactatgttggccaggntggtctggaactcctgacctcgtgattcgcccccttcggcctcccaaagtgctgggattacaggcgtgagcacccgtgccgggccctctctcttctatttaaaaggataggnacagcctttggaactgaatgtctttnctcagggctcataatagaaaatnaggaaagtccattntgacaactgg

SEQ ID NO: 521090 - DNA, 235 bp, Homo sapiens
  misc_feature (24)..(24): n is a, c, g, or t
tttttccggggggggggtttttgnagggggggggcctttcccccccccttttcttttaaaagggggattttgggccccggcgggatgccgccccctccctttgggggggttttttttccgggctttttggccgtccccccgggggccctgggggggggggccggaagggaacccccttgttttttgggggggtttttttttggggggccttttttttttttgccccccctttgga

SEQ ID NO: 521091 - DNA, 178 bp, Homo sapiens
gtcgggccccgagtttatgcattagcactatagaaccagagacatctaggaaaagcacatgatagattattttgcaagcagaatgcctgaaacattacattttacctcatgggacaatgagacagtcaccaaatccaatgtcgtgcattatgaacgatacaggctactagttacaggt

SEQ ID NO: 521092 - DNA, 1031 bp, Homo sapiens
ggacgcgtgggtcagaataggaattggtgttgggggggggtttgcaagaatattttattttaaatttttgggatgaaattaaaactaatatagaaaaaaaatagctaaacaagcaatcatgacagttaaggcaaaaacatgagataaaagatcgccatggaagaacctaaataataggactgcgcagaggatatgatgataatcaaaaggaaatagaaaaaaaaccctaacctaaaagactgaaataaaaggatatagggaagatccataagccaccaactcatataaccctatccttgtcgtctcgctattagagtcctactaggcttagaaagttagtatgataggatcgcgagctgtaagcgtgtaatttctacttgtggtgacggggccttgaggctggcgaggggtacctgacatatgtcatggttgtgagctatttgtgtttgtgggtttttgggaggtttgttgaggggtagttgttttatagtgtgcatgtcgtccgaagtgctttcctgtgtgtcgcggtatgtgctttgtttttttctgaacgtttttcttgggcggtttcctggatgggtggggctgttggtgtgacttttcttcctgtgtgcatgggccgtgtgcgtccttggtgatacttgagagttgttctttgatgcggtcttttggtgctgggttctcggtggtttcgtatttcctttgtttttgtatgttgtggtgtctcttctggtaatattgtgtgtaggcatagaaaagcccctgcattcctgtaacaaatcggctagaatggtagctagagaatatctggtgtagagtggttgggtttgcttgcggtggtcgttgttttcggcgtaagatttctagaaatgcctgttgggtttggtgttgtgttttgggttgtttgtgggctgttggttcgggtcgttggctttttggctctggtcttgttttgggtggtctggggtggtgtttgttttgtgttgtttgttttgtttgttttggtccgcacaaaacaaaaaacaaaaaaa

SEQ ID NO: 521093 - DNA, 137 bp, Homo sapiens
caacaagctagctaacatggactaactgtcctattaaaccgcttcccctatggctgtggacctctgatgtatgcctggagatccttccaagacactcatacgcaccaggtaggtaccatacgcccgaggtatgcaga

SEQ ID NO: 521094 - DNA, 519 bp, Homo sapiens
  misc_feature (122)..(122): n is a, c, g, or t
  misc_feature (141)..(141): n is a, c, g, or t
  misc_feature (272)..(272): n is a, c, g, or t
  misc_feature (301)..(301): n is a, c, g, or t
  misc_feature (352)..(352): n is a, c, g, or t
ggctgtaggaatatggcacgcgagactacgcacatatcactcatacctacatccactgcgtctaaactctatagcgcccaacacattatatatacatacacacatgtgcactagtagctttnctcacaacacactatatanttgagatacacacaccacacacacactcacacgagctatatatatatatgacgactatatactcccctcacatcattatttttatacacacaatacacacacacacacactcatattatgcgtgtgtctcnccacacacctctttctctctcgcacaccnccctatacacactaccccctctctatatatatatacatatcactcgagctntctatcaccctctacacatactatgtgcgacagcgcacacagcgcacatctatatcacgatgagacacacatatactacagcagctatattatatacactatcacacgagcacacgagactctatacatatatttatatactctctctcgagcacacacctctattc

SEQ ID NO: 521095 - DNA, 81 bp, Homo sapiens
ggttccgaattactatggttcggggagtcttcgtgggacttcgatctctggggccgtggcaccctggtcactgtctcctca

SEQ ID NO: 521096 - DNA, 123 bp, Homo sapiens
tctaggtccggtggtcttgcgatgagtctgagtcgtgtgtcacatgcgcctgtccgtatcacacactgatctctcgactggttttcctcattatgaggaaggcgtccgagtgagagtgctgtt

SEQ ID NO: 521097 - DNA, 871 bp, Homo sapiens
accaaatcatgcacattccaattgatagtttatatatcattgaaatataccacagccaatatgcaaaaggagcacaagaagcacatattgcattattgaaatcaatatttcaatgatatatattcataaccaaatcatgcacattccaattgatagtttatatagtttttaatactcagtatgaggcttatggaccacatattgacatactggtcaaaatgctagttttcatatagtaatagtatagtaattgcagaaatattcattgggttacagagcagagtatcaaatgtcaagtacaaatgacaatgattgtgggggttggggggcatattaaatctaacttacccggctttccatactctgatgtaccacaggcttaaactaaaaagattacttgtagttacctagtgagctaatgccaaccaaccaaaatctgtatgacagcaggtgctgaatatcaaattattaggtagtgtggaaacagtgattaaaacctgaagctggcctcattacatccataattagatttattcagtgaattttgaacagaaatcctattttggcctgactttctcatgagcatacacagcacttactctctgttttccctttctctctctctcctctctctcccttttaagatattgaagtattgcggtatttcctctacttattaatactgtggaaactcaggaagacaagctgaacttcaaacatttattttgccaattggcggtgtacgctgatgctgaggtgctcttcccaatccagagcatgactaactctctaagcatcggagccttttaaaaccctaactcgggaactaactacagtcggataagcgcaaggtcacgacagacaaacgcac

SEQ ID NO: 521098 - DNA, 134 bp, Homo sapiens
  misc_feature (49)..(49): n is a, c, g, or t
  misc_feature (123)..(123): n is a, c, g, or t
ggggcgaggtcctaggcctctggtttcctggtagagggcggcatgcaanggttctgctgggtgtggattggaaggcaggagcccttggtggaccctgggagggataccaatcccaggtgagtnaggcactttcc

SEQ ID NO: 521099 - DNA, 632 bp, Homo sapiens
ggctctttccattttccctgcgtcccctctgcagaagccttcatagggcccggctgcggggtgctcacagcgctgtcattcccagccgctttgggcggattgggtaggcggattacttgaaggcccggagttcaagaaaccaggcaagggcaacagtaggggaggaccgcgacctaccaagaccaatttcttaattggaaacaaaatacaaagaatgcttcactatgacaagtaggactggtcgatatactatgtccatacaggagacgagataaaacttagagacaatcccttgttaatccaggggcacctatagggattgtgtaggtctgcccacatggggccgacgctagacaagtctgtgagcaacctccgagagcgtgttgtccgcctgaagatcgtatgaggtgtaactcactggcggtgttctgggttgacaggtttgaacgaatcagccgtgttagcttgataagcattgtgtgccactcatatttgtttccagaaggggttaacctggtggtcaatggatggcggaattttcgggggcggacaacggttagcgccgggcctggttcacacattcacccggggatcagagggcgcctgagagactagggtgtggatctacaccg

SEQ ID NO: 521100 - DNA, 530 bp, Homo sapiens
gacattagcctggccaaagtgcagacagaaatgtggacagactttttggaagcgtgcggaacattaggagtactagaggaaaagctatgtctcccccatgacatccgtgaagaaaagggcctggtcaaagtgggcattagcgattcaagcattactagacatcaccgtaacgaaggctctgttcagatgaaactaccccttctccatggggggctcagaatctgctctcatccgaggatcctgaactcggctccaggcacctgtgcaaacctcgtctcccacccactgcgtgtcagttcagtgagtccagtgacattgaaacaattttgagtctaagggaggatttgctacctttcagagctgtactccgagtttaagacttgacaggtatttatcttgaaaccagagagggagctggaggaaaaaaaactgagcagcacatcaatgccttttccaccctccttcatcctttccacactcaccgactgccattaccaaaaggccaagcacaaccgcagttgaaagacgca

SEQ ID NO: 521101 - DNA, 549 bp, Homo sapiens
tctacaatgccgtcttctgtctcgtgtggcatcctcctgtctggcaggcttgtgctgccgtggtccctgtctccctggttgatgagtccccagggagatgctgcccagaatgactgatacagtcccaccatgatcaggatcacccactcttcatcaagatcacccccaagctggatgagttcggcttcagatctataccgccagctggcacaccagtccaacagcaccaatatcttcttctccccagtgagcatcgctacagcctttgcaatgctctccctggggaccaaggctgacactcacgatgaaatcctggagggcctgaatttcaacctcacggagattccggaggctcagatccatgaaggcttccaggaactcctccgtaccctcaaccagccagacagccagctccagctgaccaccggcaatggcctgttcctcagcgagggcctgaagctagtggataagtttttggaggatgttaaaaagttgtaccactcagaagccttcactgtcaacttcggggacaccgaagaggccaagaaa

SEQ ID NO: 521102 - DNA, 373 bp, Homo sapiens
tctttgtaagacagggatctcatcatgttgcccaggttggatactcaaactcctgggacacaagacactcctctcacctcaggctccaaattgctgggattatagatgggagccacagcacctggcctcacagttctttctaatcaagcacactctaaatcctaaatccactgtgaactctggcctttggcagtttgctcagcaatagatcagcagcaatagatgagcttaggtaagttgaattcagcagcagtgcctttctttccgaaagcatcggttgtaagcacatttatggcagctaaaggtggttttaatctcagtttctaagtgagggggtcttacccttatgagccctttctagcaactatgtaag

SEQ ID NO: 521103 - DNA, 129 bp, Homo sapiens
ggtaccccagcggcatggtgaagtagccgtgcacccgcttgtgcttcggcacgtaggcctcgaggctgtgctcgaagccgaacatctgccgggtccgcttgcggtcccagatcagcgagtcgaacggcg

SEQ ID NO: 521104 - DNA, 737 bp, Homo sapiens
  misc_feature (7)..(7): n is a, c, g, or t
  misc_feature (66)..(66): n is a, c, g, or t
  misc_feature (101)..(101): n is a, c, g, or t
  misc_feature (148)..(148): n is a, c, g, or t
  misc_feature (157)..(157): n is a, c, g, or t
  misc_feature (169)..(169): n is a, c, g, or t
  misc_feature (171)..(171): n is a, c, g, or t
  misc_feature (194)..(194): n is a, c, g, or t
  misc_feature (203)..(203): n is a, c, g, or t
  misc_feature (225)..(225): n is a, c, g, or t
  misc_feature (238)..(238): n is a, c, g, or t
  misc_feature (244)..(244): n is a, c, g, or t
  misc_feature (260)..(260): n is a, c, g, or t
  misc_feature (287)..(287): n is a, c, g, or t
  misc_feature (296)..(296): n is a, c, g, or t
  misc_feature (303)..(303): n is a, c, g, or t
  misc_feature (324)..(324): n is a, c, g, or t
  misc_feature (330)..(330): n is a, c, g, or t
  misc_feature (352)..(352): n is a, c, g, or t
  misc_feature (355)..(355): n is a, c, g, or t
  misc_feature (362)..(362): n is a, c, g, or t
  misc_feature (371)..(371): n is a, c, g, or t
  misc_feature (374)..(374): n is a, c, g, or t
  misc_feature (404)..(404): n is a, c, g, or t
  misc_feature (411)..(411): n is a, c, g, or t
  misc_feature (414)..(414): n is a, c, g, or t
  misc_feature (423)..(423): n is a, c, g, or t
  misc_feature (434)..(434): n is a, c, g, or t
  misc_feature (451)..(451): n is a, c, g, or t
  misc_feature (489)..(489): n is a, c, g, or t
  misc_feature (516)..(516): n is a, c, g, or t
  misc_feature (540)..(540): n is a, c, g, or t
  misc_feature (551)..(551): n is a, c, g, or t
  misc_feature (555)..(555): n is a, c, g, or t
  misc_feature (736)..(736): n is a, c, g, or t
gcctctnacccctttggctcattttgaatataatttttaaaaatatacacaaggctggctttccantgtttaaaatcattgtagaaaccaacaggttgaanagaaatataaaagtacagaaaatggttttcctgctttggggttggtngggggggcngaggtacgtgantnctgctgtttacacaagtccagangctgccagngcctgttgggatcagctcagtntgcgactaaaacngctggntcatcgactctcttgnctcgccaacaccaacccatttgactgngattcccangtgattntccaaaaagcggatgtagttntgggcntgtgggggcaggtcctcccacntcntggcgcntgtggtgtntgntttccacccaggcagggtttcatattcaanttcgacnttntgaagcatntcctggttagntgggaaatagggaatcnttttcccattcagcttgtatgagacaccgattttaacntcacccagtacgtccaggatgtccagnttcgtcagggccagggcagtgaanacgttgaaaanaaanacatattttagaatcatcaggtcgagccagccgcagcgcctcttcctgcctgtggtcactcccacactcgtggccgcgggtctgcagcaggcctccaatctcgttgatctgctcggtggggaaggccccgatgcccacacgtgtggtataggctttcaccacgccatacacgtcacctatnt

SEQ ID NO: 521105 - DNA, 380 bp, Homo sapiens
tttgcactagctctctgtttggctgggaatatctcatcccctggggtatcctcatggccttatccttcactttcttcacggtcttcagctcacatggcccctttcccttaggagagggctttttctgacttgctgtactataaagggaacaacaccccaccttcctttcacttacacaattctttgtcccctttaccctgttggtgttttttttccatagcactttaccctcgacaagatactttgtctttctcattctatgagagtataagctctgtgagggcagggattttttgtctctcttgttaactgctgcatcccaatgcctgaaacagtgcttggcatgaagtgggcattcaggccttccttggtggaatgaa

SEQ ID NO: 521106 - DNA, 407 bp, Homo sapiens
gtgatctagaggatcccggggattgtgctggagaggagctgagcccggtggtgggcccattaaagaacaggttcctcaggcccggcccgcttccggtccacggccccctccccatccccagcccagccgagggaatcccgggggtggcttacctacctataaggtggtttataagctgctgtccgggccactgcattcaaattccaaggtgtacttcatagtgtaacaactttatattatggtgaggtttttttttttttttttttttttttttttttttttttttttttttttttttttttttttttttttttctatacgcgaggacggggggggggggggggggccggggggggagggggggggccccccccccccgaccacgggggggggacgacagcccccgc

SEQ ID NO: 521107 - DNA, 785 bp, Homo sapiens
aaatgctagcctctatggagttgctcggtcagagtaaataaaccctgattaatacttattctgtaggcatctcatgtgggaggcacctctattggaaacaatcaatacttttatttcaaggacatgttagacgtattacgatattctgatattgcattattatacttgcaaaccattctttcatatctcggtccgtgatgttctgactgctgcgtacaaatttacttcttctaacagctgtcatggaatccctgtctagtagccttacctatgtagccggttcctctagatgatagagtgacaaggttgtcgtccggtggtggtggagtaagaaaggtaggaagataaaccaaaactcacagattgtcaccagtgtgtcattccccgtcccctaaccaatcacctctttaacgcttcctcttcctttgacatgttggatacttctataaccatgtctctttacacaacaggtactcaattcatgtctatcctaggctgagagtgtccagtggtgacacacctgcggcacattacacttgcggtcccagctggactcaccgagtgttcagagcaattatcgtcccttgtcacttgcagcgattgcttccgaccttaagcgctgggtggaattacccgagttggcacctgagcaaactaaacgcgcaggtacaaaatggtccatcgtgatatgtcgtctaacgatacgacgaaagggcaattattgcaacccatggttataaccataggaatagggtcgtcaagactccttgaacatgtcacgtgga

SEQ ID NO: 521108 - DNA, 423 bp, Homo sapiens
atttaaagagttattttaaacaggattttaattagccataagaactttggagtcatgatgggaaaaattcatttaatttgttaaatatgacatgggcaagtgaacttttcaccccagacctaggaactttttcaggtccttaaatgtttcaaaaactaaacccctaatttttgtttcatgattaggttatttcccttttgccaattaaattattttaaaaaaacttcataatttggaccatttggggttagagcaggttattccagaaagtaaatagaaaagactgctgctttttgacccagggagttttgaaaagcaaaagaaaaaaatgtagaaagtaaccccccccatttccctgtttgagtgggatttgttttaaaaattttgcatttccaaagaaaaaggtaatcaatcaatccctga

SEQ ID NO: 521109 - DNA, 192 bp, Homo sapiens
  misc_feature (3)..(3): n is a, c, g, or t
tangcgactcaggagacagaactccgtgagcagaaggcaaagtcgcttgatctgatttcagtacatacgacgtgaagcgggctcacgatctctgacttttggtttagcagagtgtcagaaagtacacaggatactgctgtgcggcagcgtcatagcgacgtcgcttttgatctcgatgtcggctcttctatc

SEQ ID NO: 521110 - DNA, 117 bp, Homo sapiens
gtgagcccgtagccggggaggcaccagctgccgcgcggggaggaggccgagcccagcttgagggaggccccggccccttctagcttggtgttagacgagacaatcctgcccccccac

SEQ ID NO: 521111 - DNA, 1241 bp, Homo sapiens
  misc_feature (152)..(152): n is a, c, g, or t
  misc_feature (160)..(160): n is a, c, g, or t
  misc_feature (166)..(166): n is a, c, g, or t
ttgctgctcgtgttgaatctagaaccgtagccagacatgggactggaggacgagcaacacgatgcttaccgaatccggagatcctgaggaggaggaagagggagaggaggaattagtggatcccctacaacagtgagagagcatgcgagcanttgggaantgtgtnaggcccgggagcggctagagctctgtgatgagcgtgtatcctctcgatcacatacagaagaggattgcacggaggagctctttgacttcttgcatgcgagggaccattgcgtggcccacaaactctttaacaacttgacatacaactgtgtggacttaattcaccccagtcttcatcatctgggcatcagaatatttccttcatggtttcggatgtaccattcgtcatcttattagtgtaacctgtaagttcaccatgaacctcatggcgttaggccttcaggctggtagcttctatgctaattcgccaatgattccactcgtaaaattaaccaggttcttatggattctgcccacaaccacaaccgatacaaaccacgcacaaacccgcaagcgcaccatacaacgcgccgcggcactgccggcaaaacacacaggcacacggatacacgcgcgccccacaggcgcccacgaccagcgtaactccccctgaacaccccagacctctccacgggctcacaccaaacgcacggcccaacaaatcacaagaacggagaccacaccgcacactgaccacgacacaccccaccgatcaccatccgcgacaataaagacccaacagggctcacaccacgggcgataaaaaaggaaagacgcgcggagcaacacgaccacccgagccactcacagccaacccacgcgcagcagacgcgcagccctctccccacacagacagcaggggcctccacaacaccccacgcatccacacaccgacacccacaatggcgacactggaggaaaaacaaagagccggacaacagcggcgcaagagcgggaagggcccacacgcacggcccgaggagcatgagcaccagggaaggcttgcagcgagagggcggcacaagagccgacgagcgcagcgccgtaacggccacccggagagagaagaatgcgaggaaagcgagggcaagaacgaacagggagagaccgccaaccagagcacaacgctcagggagaagcaggaagaagagcaaggcaacacagcatgcggtccggcgcaggaacagaaggcagga

SEQ ID NO: 521112 - DNA, 202 bp, Homo sapiens
agcggactcactcgcactcacacccgggcgcaggaggcgggcggccgggccccaccggcccccatggacgcccccagacggggcgctgagacccccggtcgtgccagccggtccgggcgccagccgaggatctctggacaggacaaatccgaatatcccctaacggacaaacatgaaccagccccccccccggcccctcccc

SEQ ID NO: 521113 - DNA, 1047 bp, Homo sapiens
ggctgtatgctgtagctgtgggcgtgttggacggcgtggagaggcctgcaggctctatcaaggggttggtgtctccaggcaagcttccagtaacgttgaacgcacgctgtacgcgctggtgtgctgaaacgcatgcgctactccgctcgtgttggatgctgtgactcgccagcgccgtgcctcctccgtgcggagaataagctgcggcgcacctggcccaaggctgctacgttgtatgaggttgttggtctgggaagagggcttgacgcagggtgagtgtgcggggccgaatgcgcatacggctgctgtgtggggctcgggactccaaggcgagcactcaacggcgtgagttggtctctggcgtcaaggtttcagtcgaggtggtgagccggaatgacgacctgttcggacgtgggatccacgcctgggtcctgcctctcagtctggtgctcgaatgtagtgacgtggtgagacccgtctggaagaaggctgctcacgcattgagtgctagtgtgactgtgatttcccgagggatgcacgggagggtctgtctccctaactcagggtccgtgtgcctggcgatactcgtgcgattgtaagttgacgatgcccctcagaggcgagaatggcatttttcctctctgtggaacccccgttggaatgggcgggatctcggctgggtgtcttgccagggcccagaacggtgtttggttggaacggccacctgtatggggtgccggacattcgtccgttcctgcatggacaaggccatctgtcgtccctaggcgattcctggtcgggagacccgacggcagagcttccggatgtccctgagtgggctgttccgcgcgagggaataaagagccccgtactggggtggttttttgactaacccggcgggtgactttggctttggcttgcaagcaacggggccgcccactggcccgcgatgtccgagaggcgcgtaatggaaaagtgcggggagacctgggagacaccgcctgcggaaaagagagaactctgagagtaacaggcgatttgtagcag

SEQ ID NO: 521114 - DNA, 300 bp, Homo sapiens
ctggtccccccaccccacttcgactgccgcgtttgggtccgcggcctgttcaaaagcggtctccgccgttccctggaagtagcaacttccctaccccaccccaggcctgggccccgtccagccgctgacgcgaagatgagcagctcagaggaggtgccctggatctcctggatactgagaggcatccgtgagcaaaagcaattgctatcgtgtgagacgcaggatcgaaagaactacatgacagcgacaaatatgaatccttacgagcactcaatgagcaggaccctcactatcgacaag

SEQ ID NO: 521115 - DNA, 1252 bp, Homo sapiens
  misc_feature (163)..(163): n is a, c, g, or t
  misc_feature (171)..(171): n is a, c, g, or t
  misc_feature (177)..(177): n is a, c, g, or t
gcaatgattccatctaaataaaagttctatgaggttcatgtgaacttacagttacacaaataagaaacaaatggtacatccgaatccggagatcctgaggaggaggaagagggagaggaggaattagtggatcccctacaacagtgagagagcatgcgagcanttgggaantgtgtnaggcccgggagcggctagagctctgtgatgagcgtgtatcctctcgatcacatacagaagaggattgcacggaggagctctttgacttcttgcatgcgagggaccattgcgtggcccacaaactctttaacaacttgacatacaactgtgtggacttaattcaccccagtcttcatcatctgggcatcagaatatttccttcatggtttcggatgtaccattcgtcatcttattagtgtaacctgtaagttcaccatgaacctcatggcgttaggccttcaggctggtagcttctatgctaattcgccaatgattccactcgtaaaattaaccaggttcttatggattctgcccacaaccacaaccgatacaaaccacgcacaaacccgcaagcgcaccatacaacgcgccgcggcactgccggcaaaacacacaggcacacggatacacgcgcgccccacaggcgcccacgaccagcgtaactccccctgaacaccccagacctctccacgggctcacaccaaacgcacggcccaacaaatcacaagaacggagaccacaccgcacactgaccacgacacaccccaccgatcaccatccgcgacaataaagacccaacagggctcacaccacgggcgataaaaaaggaaagacgcgcggagcaacacgaccacccgagccactcacagccaacccacgcgcagcagacgcgcagccctctccccacacagacagcaggggcctccacaacaccccacgcatccacacaccgacacccacaatggcgacactggaggaaaaacaaagagccggacaacagcggcgcaagagcgggaagggcccacacgcacggcccgaggagcatgagcaccagggaaggcttgcagcgagagggcggcacaagagccgacgagcgcagcgccgtaacggccacccggagagagaagaatgcgaggaaagcgagggcaagaacgaacagggagagaccgccaaccagagcacaacgctcagggagaagcaggaagaagagcaaggcaacacagcatgcggtccggcgcaggaacagaaggcagga

SEQ ID NO: 521116 - DNA, 252 bp, Homo sapiens
taattgatttctagcttaatgtcactgaagttggaaaatatactctatgatttccatcctatactctatgacccccatcaatatggtaagagtcgctttatgactcaccaaatagagaacactggcaaatgttctatgtgtgctcgacaggaacacctactctggattggttgagagcaatgttatataatcccataatgcacagataatgacttggttctaattaaatatacccttattgattttgtctat

SEQ ID NO: 521117 - DNA, 299 bp, Homo sapiens
ttactcctttccagtcggaataacctcggctgttattctcagccatcaaaggataattgcttgtacccgggaaggcgcctgctgcagtgaaccaggatcgtgccattgcactccagcctggtcaacaagagtgaaactccgtctcagaaagaacaacgattgcatatgacatgtgtaaaaatattgactcttgatatagttcattcttcagagtcctgaaggagccggatagggtgctctcagtgtattaaggcctggtgggaacagacttctatttctgccatgtagtacctcgcagt

SEQ ID NO: 521118 - DNA, 295 bp, Homo sapiens
  misc_feature (292)..(292): n is a, c, g, or t
ggcgaaactctgctgatgaggaaggataacagttgacatcattgaataaatgggcctcaaggtatcaataattgaagccatctctctgtgtttatatattcagcttttgaaacccgcaattacttttgcaccaacctaatagatttgcgtcactctttttaagggctgcatagtgttccatggatgcttagaccacaaatttaccttagccaacccctactgaggaacactgaagttgtttcctgtttttcaaaagtataaataaagtgtgagtacctgttttcaaatttgnatt

SEQ ID NO: 521119 - DNA, 996 bp, Homo sapiens
ataaattcccctgagacatagctcgatgatcgactgtagcatgctttggtggataagctcgatcccctagctatcgctcgaaatgatgggttacttgagtagaagtgagagatagacatgctgtctagaatacctgttctaggcactgtacctagatcctcgttcagcaagacaacggcttaattgccgtactagtgcttccaccggggacatcacacgggttcatgtttcgcttcgaattagcatatgcttcgttcttagaactcactttcgcatccgtgacgaaggagcctatatacctaagacttgccaaatgaatacttccatctcattagtatctctatagattgtgagtagtgaggtcattcatggctacgaatgacccctgttctattttctgagctgcccaagaggtttccgcaaggtacttactatggttatccaggtctgtggcattcttcctgactgagggaaaaagctatgcgcgctcactactcaatttgggtattaccaaagtcatctcgctcattgaccctgtaagctgtcattccctctgtcctctcagaggttttgccacttcacttggtagggacttagagaagcgcaggcaattcaaagcaagctgccgggtacgtgggaggccgtagaactcaagtctcaggttaggctgcctagggttgcttaatctgcccgtgtcccgacaaatctagatagcaccactcagggagtagtcaggatatctggctacgacgattccaagacgcgggtcgctccggagagatctcaagattggggcgggagcgcaaatggttagacgaagcaacagccgggccagaggcgccgcagggtgtgcccgggcatcaggggcaaaaaggcctaccaaggcagaggcggaggtatgagacaccgcacagagcctaaagagaaggggacaccccgcgcgctgccacttgataaaaaaggcccgtaagatacgcagtcgacgggcgatacgag

SEQ ID NO: 521120 - DNA, 253 bp, Homo sapiens
tcatgggtacccaatgaagttttcatacatggcctcacatacgacagcgtcatggaggtcctgtccagatagctaagttaacgtggtcctggaggatggtgctccctcataggtgcttggcatgttgtacttcgtttcctctgttattctattgtaatatcctttattataacccaataaaggtgttccctgagttctgtgagccgctccagcacattaatcaacccaaagaggggatcatgggaacccaaac

SEQ ID NO: 521121 - DNA, 174 bp, Homo sapiens
gctcctctagggggtgattgctgtatatcggaacagattggtctgatcatatgatgtgttgagatgatgcaactgaagcactaagagctggaaatgtgttagattaaggaagaaggagaagagatgagaagaacagctcttcaatccccaatagaaacatatgaatgataacac

SEQ ID NO: 521122 - DNA, 183 bp, Homo sapiens
ctgcaacgccgaggctcatacggtctgctcagaagtcatgtgacgaagttgtgcgcaacaacttcgtccattacgacctccaacatcgaggtcgtaaaccctattgtggtatggatgctcggcggcaacaacttcgtccattctgacatgtgtcaccaagggtctgggccctcggcgtgtgca

SEQ ID NO: 521123 - DNA, 981 bp, Homo sapiens
ggatggatacgaaatatcagtgtgtgaagactgaatgatggtcactgcatgcctgtcctgggattggcacctatgcgcctgcagaggttcctaaaagtaaagctttagaggccaccaaatggcaattgaagctggcttccgccatattgattctgctcattatatacaataatgaggagcaggtaggactggacatccgaagcaagatatgagatggcagtagttgaagagagaagacatattctacacttcaacgctatggtgcaataacccatcgaccagagttggtccgacagcacttggtaccaggtcactgcacaaatctatccattggcattatgtagacctctacctatattccatttccccaggtgtctgtccaagacaggtgaggaaggtgatcccaaccgatgacaacatggaaaaactactataagaaacaaacggaatccacaaggtgccacccaaatgagaaagcccggcgagcccacacgacaaagcatgccgggaacggaacaactacccccaagagacggaaccagcaaacaatccacgaacaggcaaagcgagccctcaaatactcaaccaagcgcatcgcaacaacatagacaccgagacaagacacacagcagcaaaatcgccatccaacaacacaacccaaaacaaatagaacaatacgacaaacactccaaagaatagtgcgaaagaaacaccgagtaaggggacaccaggagacaaaccgaggacagacctgacaacctgagatcatgggacgaccaacttgtgaaatgaagacaaaaagcgagtctacagaaacgcaatcaaacatcagagatagacggagaaggcagagaggagaacagaagagcaaaaataaaaacgacaagaccaaagcaaatagttacacacagagacaaaaaaaagacgcgaacaaccccagaggcagagagacacgacacacacgcacactcaacaaatata

SEQ ID NO: 521124 - DNA, 937 bp, Homo sapiens
  misc_feature (877)..(877): n is a, c, g, or t
  misc_feature (882)..(883): n is a, c, g, or t
  misc_feature (887)..(887): n is a, c, g, or t
  misc_feature (894)..(894): n is a, c, g, or t
  misc_feature (898)..(899): n is a, c, g, or t
  misc_feature (901)..(901): n is a, c, g, or t
  misc_feature (904)..(905): n is a, c, g, or t
  misc_feature (907)..(908): n is a, c, g, or t
gggaacaatggccacagtgtcccaccatcgaagagatcagagaccaggctcctgtggctcctgctggagccttcagtgggctgtggaagccatctctgaccggatctgcatccacaccaatgcgcacgtcagcgtggaggtgtcagcggaggacctgctcacatgctgatggcagcatgctgtggtggacggctgtaatggtggcttatcctgctgaagcttggaacttctggacaagaagaggcctggtattctggtggccatctatgaatcgccatgtacggcgtgcatgactcgtatcgtccatctcgctccctgatgagacaccactgtcaatcgtgatctccagggcccgcatgcatcggggtgatgggacgatacctcctcaacgtgtagtcaaccgatctgtggagcctgtgctgactagtgccgtacctgacgaaacagggacgaaggcagctacgcgtatacagattccttacagacgtactccaagtagcgtagaagcgacatcattggcctgagatcttacagaaaacgggcccccgtggcagggacgctttctcatgtgtcattcaggacgttccatgctcatacagagtcaggaagtgtacgcaacacgtcacccggagagatgatgggtggccaatgccatccgcatcctgggctggggagtggcagaatggcacaccctactggctggttgccaactcctggaaacacgactggggtgacaatggcttctttaaaatactcagaggacaggatcactgtggaatcgaatcagaagtggtggctggaattccacgcaccgatcagtactggggaaaagatctaatctgccgtgggcctgtcgtgccagtcctgggggcgagantcggnntagnaaagcantatnntncannannttcatcaattatagtgtagacaattgaac

SEQ ID NO: 521125 - DNA, 315 bp, Homo sapiens
tgattggaaccgcgagggatgacagaccagctacagtttattcctgttggtaagaacgccctatgctgcgtaagtgaaacctgctgccacaccaccagatttagctccactatatctgcagccccaaattctgattctgggttttgagattcgagacatatcgctccactttattctgacaaacgcgcgtccttttttcaaactcagagacattaaaatgagaacacaattatttctttctcctccctttgaactatgtatttatctcttgaaactatttgctattgccacacgtagctataaactaaactaata

SEQ ID NO: 521126 - DNA, 108 bp, Homo sapiens
cgagattgcgctggttgtccaaatcaacaaccaggtcgtccagctcctgctgaagcctgttcttggtctcttccaaatacgcggatgagaggtactactgaggtgtag

SEQ ID NO: 521127 - DNA, 291 bp, Homo sapiens
cacagtgtactccacgaactatgagtgctagcgtccacgagtcaggagtgctacctccacaaacagagtggtatctccacaaacagagtgctatctccacaaacagagtgctagctccacaaacagtatgtggctacctccacactgatagtgctacctccacacccagagtgcgtacctccacaaacagagggctacctccacaaacagagtgctacctctacaaacagagtgctacctccacaaacagagtgctaccatccacaaacagtagtgcgtagctccacaaac

SEQ ID NO: 521128 - DNA, 487 bp, Homo sapiens
  misc_feature (370)..(370): n is a, c, g, or t
ctcctctccatggctatcctcccagtctcaagactcctcctcacttgatacccttccctatatacaatcattttaatactctaactagcatcctaaatttccctggcagcagtttaccggtcttcggcctctgtccctaactgcagaatacccataggtctagacgaagtattatatggacattggacccattcccagtagaatttgtacagcatagctgggtttgaacacttagaatcttgatatatctctaacctaggggtcggcaagctactgtggtctcggtatgacttctgagctaaagactagctggcaaagcgtacggtatacacctggcccttaacagaaggaaaaaatgctgatccctgtnctatccttttctgaatcccatttatctctccccttatcagctcctgaccacaggtaatcaaccacctcggccttccagtgtgctgaaattacgggcataagccaccgtaccggccag

SEQ ID NO: 521129 - DNA, 367 bp, Homo sapiens
  misc_feature (17)..(17): n is a, c, g, or t
  misc_feature (324)..(324): n is a, c, g, or t
ctcgaaaactttttaangggatgcctgactccctcaagaagtctgtacccatttgaatgagctcctagttgaaagaaaggtttttaataatatattcaaagtggaaatctttccttactttgtttttttgtttgttttttgagacgaggtcttgctctgtcaccctggatgaaaggcagtggcacagtcttggctcactgcagccttaaactcccaggctcaagtgattcccctgcctcagcctcctaaatagctgagactataggtgtgcaccactgtgttgcccaggctggtcttgaactcctggattcaagcacccacctnccttgtcctcccaaagtgctgagactacagacgtgcccaccag

SEQ ID NO: 521130 - DNA, 379 bp, Homo sapiens
actccatgatcaccagtgatgggccctcagctcctcagcttctggcagcagagagggcctggccgggacgctggacctctctcgtccctggccgtcaaagtacacgggattcgctcttcagagaactccacggtgcacctccagagtcctcgccgcccgtccacgaacatcatgtgcctgacagtgtcggcaccctgtcagcagcgatctggtgcggggcacttttcttttctctagagcaccaccctgtgatgcttgtcccgcacaactacaggctttcgtgctcccgggctggaccgtcatctgctcacagtcttgtgtcttcccagggctccatcacgccctccacgggcgcctcgcataacgcgcctaatgcgtc

SEQ ID NO: 521131 - DNA, 560 bp, Homo sapiens
  misc_feature (546)..(546): n is a, c, g, or t
tccatcttctgaatcctgccactgctttactaattgagtttatgttatattctaaatcttttcctgtcatttcaaatgttcacagcatcttcaccaggagtagattccatctcaagaaagtatgtcagctatagctttactaaataactaaatatatttcttaaataataagactcataagttgaaatgacttcttgatccacaggctgcagaacagacgctgtgttggcaggtatgaaaacattaatctccttgtacatttccatcagagctctcaggtgtctaggttcattgtcaatggacagtgatattttaaaagaaatctttttttgtgagcaagaggtctcaacagtggcctcaaaatattcaataaatcatgccataaacagatgtgctgtcatctaagctttgttgttccacttataaagcacaggcaaagtatattttgcataattcttaaggtccctagggtttttggaatggtaaatgagcacgggcttcaacttaaagtcaccagctgccttagcccctaacaagagtgtcagnctgtcctttgaagc

SEQ ID NO: 521132 - DNA, 696 bp, Homo sapiens
ctgttttagcttggcaagaaacccaaatgaggaatgctatctatcagaatagactggccttagactacttgttagtagctgaaggaggagtttgtggaaaattaattacatgctgctacaatatgatcaagaatagtggttaaatgatcagaagtcaggacatgacaagtggcacattcctttacagattggcacgagttaatcctgagtcttatttggaaaatggttccagctataggagattaacctcatgagtgtatgctatgataggagcttgttgctgtcccccgtgtatacccttgtttcaatgacaaaggttctgtgctacttgattcatcaaaaacttcagcacaggtgtatatataatcactatcgtctatctcacagagagactcaaaagtaagatgagagcgagaactcccactaaaagtgaaaatgctcaaaggagggaaatatggtgtgagaccaccagtctcctgtgcttcccagttcctccaatccctttttcctagtttatagaagaaaaagggaaagcaaaagtgaaaaacagaagtaaataatagctgacgcctcgggcacactggcccggggtaaattcataatataacccctgacaaactatggtgttatctgtaatccagacattgtatgagaaagactgtaaaaacttctgtctgtaagctgatgttgtaaccc

SEQ ID NO: 521133 - DNA, 338 bp, Homo sapiens
gattaaacataaactagccgttgggacagactgattccaccggcctgatgctgaccctcccgatttgcgggatcaatagaacaaccgactcgcattccttgctgataagagatcacccaccatccagggagtggttctggccagtctacagaggacgtgcagagagggttttcacataccctgcttcaccttttgaagacacgcggtagaaaactctaccctaggatcatgctaaggccaccattttttaaacatgggatccacagagaggcatgaagctcaactgcacatgcacaaattgctcctttcataaatattcgcgacccctcttacagttt

SEQ ID NO: 521134 - DNA, 1161 bp, Homo sapiens
ggccggggcgctcactcatgaggagcaggaagcttacaggtggagtgcggtcctcagcacgccttcgggcccggagttactcttcagccagcttggcctctgccagggacgttaccagctccacatctgctaaaacaacatgtctggcttcctcatcacacaaagctacggacagacgaacttccaaaaagttcaagtatgacaaaggtcaccttgtgaaggcagaattacaaaaacttgaccctaagagtgacatttcttctttgccaaaagtggcccccgtggctccttgtgaaaataagtttgcggaggacagtgctgaggctgctgtctctgtaccagagagcagagagccgcctcagggctgctccacgcctgagagtgaggagccctcagtaaaggctgagaatggcctgtccacagaacccagcagtgccgctgcagcccaggagcccgatgacagctctgccggacaggcagagcctgtgcccaggacagaggaggtgcgggcatccgtgcttcagatggacagcagcatctttctagatgatgacagcaaccagcccatgcctgtgagtcgcttcttcgggaatgtcgagcttatgcaggatctgccacagcctcttcatcttatccttccatgagcagacagagaattcagaaaaatgcacttcagaggcaagatgacgaggatgacgctgaggggtaaagctgcgggcgcctgcagccggtgtccaaggatcggatggcatcttcagaaaacacgccggaaaccaggggacatcaaggtactgcgtggcaaaacgcccagggcaccatgctggcaaggcggcgtggaggggaacaacggaaaacccggaagagccctggggccggcgagaaaacggatattttccagcgcacaatagatcccacggagagaaatcatcgggagaagaacccctgatgaaggaggagcacaccaggcgcggtcgaatctgcaagtaactcgtatagacagatagaaccatgaggacagaccttactcaacacacacaagcgaggcgagtatcagaagtagagcaaagacaacaatcaatgtagagagagcgaatagaatatcaagcaacaggaacataggtacgaactacgaattctcttgattccctctcgtcataatat

SEQ ID NO: 521135 - DNA, 193 bp, Homo sapiens
cagggcagcgtttctgctgaaggcgtttgctttcccaccatcataaagtcagaaaatcacaactcagaccatggtaagtggggaccacccacaacccaagtgggccttggaaattaagaataggaggccgggcgcgggggctcacgcctgtcatcccaggaggctgggcacggtggctcacgcctgtcatccc

SEQ ID NO: 521136 - DNA, 942 bp, Homo sapiens
cctgagttgtctacctacgcgtgtttctgtcgccagtattatgacgggggttgtataacgccaaggagcctgttgacgcggaagcacagcgtgttttccccccttacgggggcttttaataactgggcacggggacatttttcacaaaatgggaatgggggcctacccgttcaattagggccaggaactgtgtaagaccagtgtggggcttttccgccaaagggcaagtcatgttcggagtttcataacacgcagggtgcacagtacagaaccgggtagaacgcgccgtgttatgcggagattattgtggcacgaataaatctcggggccaccagtaactaagttggttgcacgcccggtttgtgctccagcaaccatgtgtttcataaagggggaaattttaacccgagcgcgccatatggatgaagaaagttggccccttaggtattttttataaacgggagcatcttccccggcccccaacatgtgaggagagttctttcgacccgctgcccacacgtggagaggcgcattttctaacaagacctgtgtattaatcaagcgctggtccaaacatatgtgttgttagagcttcttctacggggtagggcaaccaccatagggtattgataaacgcccccctttaaaatggtgttgacaaacaagaatgacactcattctttcacctcgcgataattcgtgttttgaaaatttttacttggaggaacccctgttcagatgtactaccttattggcaaatagccccctaggcatcattctctctaccacgaaatattttctattactaccacccacccccttcactcttttatgttaaaaaggatagattatcattcatttttttaataatcccactgtgctgtattgaaacacccaacattaaaagtattttttattaagtaaaaatcgccccacaaaaca

SEQ ID NO: 521137 - DNA, 202 bp, Homo sapiens
ctggccaaggatccagcaaacagggtcatcttcagcatttccgggaggcgggcactcacggctattaccggtgcagtaggacacgccttggcaagtagcattaatcgccggcaggtggggccctttccttcccgccagaggggggctgagggggcgcggagccaggccgggggcctagggcagtgatgctgtgtgggtttcc

SEQ ID NO: 521138 - DNA, 182 bp, Homo sapiens
gatcttattaaaataatgtctttttactgcctctagtcttctgtttccttactaatatctctctgtattattacagaaagtggagtattgaaatatcctactataattgtattgctccctttgtgttatatatcagtttagtatagtatttagctttatatacgctgacaaccccatatatg

SEQ ID NO: 521139 - DNA, 252 bp, Homo sapiens
  misc_feature (236)..(236): n is a, c, g, or t
  misc_feature (238)..(240): n is a, c, g, or t
  misc_feature (247)..(247): n is a, c, g, or t
cgatccgaggattcgccccaattaacctcactaaagactctcaaccatacctggtgggggttcttcgctcaacctcttcttccctaggtcaaagccactatcatctgatgtgttagggatgggttctgattggcagaaattaatcagctcccaatgggagcccacggaactaagtagggtcccaagaaaaaaaacgggagctatttcacagagctgagcttctgccaaattctacnannnttatganggtta

SEQ ID NO: 521140 - DNA, 421 bp, Homo sapiens
  misc_feature (399)..(399): n is a, c, g, or t
ggtgttggaaggttcctctctccaatctgtcaaagaaacatgatgaatgagggccctggaaagtttaggggtgacttgaaaatccctgggccttttgcccttaactgcgggatatgggattaaaaggcatgagggggctgggcacagtagctagcacctgtaatcccaacgctttgggaggctgaggcaggaggggtgcttcaagctaggagctccagaccagcctaagcaacatagtgaggcccacatctctaaaaataaaataaaattagccaggtgtgatggtgcatacctatagacctagctactcaggaggctgaggtgggaggatcaattgagcccaggaattcaaggatgcaatgagctgtgatcatactactgcattccagcctgcgtganacagcaagaccctgtctcaaaa

SEQ ID NO: 521141 - DNA, 240 bp, Homo sapiens
  misc_feature (195)..(195): n is a, c, g, or t
  misc_feature (236)..(236): n is a, c, g, or t
cagcgattcgttcgtgatgctctctttcacccagtccgactggctcgtgctcaggtagcactcggggctgctcgcgaactccggcttgcactcgagcacgagccccgtgcacaccacactggaatacgacgccaggaacgcggcgagctcgtcgcgaacgttcacgagcctggcgcgcgtctgcgatggatccantttggggttcggcggcagattattccgctggtagagccggntgag

SEQ ID NO: 521142 - DNA, 432 bp, Homo sapiens
acgaggagagagagagagagagtgtctgcctgaatgtgggctgtgtcttcaactacgaggacctaactgcgatcacggacatgttgctgtcctatattgtgccaactgctggccttactggtgccgttaggacatgctacatctctgtacctgccgataacactggtttgggctcccataatacttcgatttcccacgcttgccgcctcaccacgtacgattttcgctgactccattgggatcctgagtgttgacaatgtgatgcagagtggtgactatgtgtgagccgtcgaatccacgctgttgttcatgctaatcatctcatggttctgctttgagctgtttatacatcatgtgttccacaatcgcatcgtcacttatgattatgagcttgatttcgtgactagactattcattgttccttctttggcg

SEQ ID NO: 521143 - DNA, 768 bp, Homo sapiens
  misc_feature (25)..(25): n is a, c, g, or t
  misc_feature (48)..(48): n is a, c, g, or t
  misc_feature (61)..(61): n is a, c, g, or t
  misc_feature (90)..(90): n is a, c, g, or t
  misc_feature (108)..(108): n is a, c, g, or t
  misc_feature (123)..(123): n is a, c, g, or t
  misc_feature (126)..(126): n is a, c, g, or t
  misc_feature (135)..(135): n is a, c, g, or t
  misc_feature (157)..(157): n is a, c, g, or t
  misc_feature (163)..(163): n is a, c, g, or t
  misc_feature (188)..(188): n is a, c, g, or t
  misc_feature (192)..(192): n is a, c, g, or t
  misc_feature (206)..(206): n is a, c, g, or t
  misc_feature (230)..(230): n is a, c, g, or t
  misc_feature (232)..(232): n is a, c, g, or t
  misc_feature (246)..(246): n is a, c, g, or t
  misc_feature (250)..(250): n is a, c, g, or t
  misc_feature (259)..(259): n is a, c, g, or t
  misc_feature (264)..(264): n is a, c, g, or t
  misc_feature (271)..(271): n is a, c, g, or t
  misc_feature (293)..(293): n is a, c, g, or t
  misc_feature (306)..(306): n is a, c, g, or t
  misc_feature (310)..(310): n is a, c, g, or t
  misc_feature (354)..(354): n is a, c, g, or t
  misc_feature (370)..(370): n is a, c, g, or t
  misc_feature (384)..(384): n is a, c, g, or t
  misc_feature (404)..(404): n is a, c, g, or t
  misc_feature (434)..(434): n is a, c, g, or t
  misc_feature (586)..(586): n is a, c, g, or t
  misc_feature (625)..(625): n is a, c, g, or t
  misc_feature (647)..(647): n is a, c, g, or t
  misc_feature (664)..(664): n is a, c, g, or t
  misc_feature (676)..(676): n is a, c, g, or t
  misc_feature (679)..(679): n is a, c, g, or t
  misc_feature (691)..(691): n is a, c, g, or t
  misc_feature (741)..(741): n is a, c, g, or t
tgggcaaaatacaatttcatttaanaaattgaatttgctgcgcctgcnaatcacgtctggngtcggctctgatcagagacagaaagaggnggctgcagccccgggggnccttgtggtagcggnggngggagcggnggcgttgtacacattgaggganaaaaancactgtttggcccaggggaaccccncccncagtaatggaaacncagggcaggttagcattttattananaaaaacaggaaggngggngcctacccnccccngcctgcnactggctctgaagggcactccncaacttccccaanaaanaggacgcgtctcttacactgtgatcatgacaggggttcaaacanaaagtgcctgggcccnccttctaagttttnttaccaaaaaaaggaaaaanaaaagatcttctcagttacaaattctgggnagggagactatacctggctcttgccctaagtgagaggtcttccctcccgcaccaaaaaatagaaaggctttctatttcactggcccaggtagggggaaggagagttactttgagtctgtgggcctcatttcccaggtgccttcaatgctcancaaaaccaggcatggggaaggccctggcaaactgctccncccgttgcctgaggttggccanacgctgacttttttttnagttcttaagcnggnaggatttgaaancctggagcttggcagttttgctcttcacctctaagccaatgttgaccccntcatctataaagtccacaactctccgg

SEQ ID NO: 521144 - DNA, 259 bp, Homo sapiens
gtcacaagtggctctccatccccccgtatgaccactgtagtatcaccttgtggggggtgggaaggagcttggggtctgcaccgagtagacctgaggcactaatggccctcctgggcaggaggctcacgagaatgatagggttaaagcctaaaaccgtgcagtgcttggggttacctgttttatcaactaaaatcagcttttctccaagaagctgcactgcctattctttttgtgtgtgtgtgttctgatacggttttga

SEQ ID NO: 521145 - DNA, 152 bp, Homo sapiens
ctagaggaccccattgataattgttgtgatgaaatatgatggcccctcaagatatgagtgagacaccttgctaggtgtaaggagaatgatggttagtgtctacggatggctccatggttggtgagtatgttcccttgctaaggtggagggta

SEQ ID NO: 521146 - DNA, 460 bp, Homo sapiens
  misc_feature (102)..(102): n is a, c, g, or t
aagtcattggaaactcagtgtttttaatcagacataaacatgaacctgacatgggtggtgaaattaaaggtatttttagaaactatggtaattacatattanatatattttacgaagatagtttttacaatcagctggtaattacttcatcggacatctgaagtgaggaaatttggatttagtttgaatggattgactgtgtgtgtgtttatgcatatttgggcttatgtgccactttaatttcaacactgggcagctcaagattcactctgctcaacaagtgcttactgtccacatgttttagatgtgttacaatgtgtttcgactgtctggtgtcacagccgctgactcccagaaaggctacatatctcacacttaatgtacggacattgaagttggattgtgaggtcaggtgacaaatagctttgtcgacgcggccgcgaatttagtagtagtaggc

SEQ ID NO: 521147 - DNA, 483 bp, Homo sapiens
  misc_feature (319)..(319): n is a, c, g, or t
  misc_feature (325)..(325): n is a, c, g, or t
  misc_feature (327)..(327): n is a, c, g, or t
gcctttatcagtgcacaggacactcctgctctgcctccgaagaagcctgatcctccacggcataaaccgcccagcggtaaaagtacacctgtaagccagcttggttccgcagactttcccgaggcccccgatccattccagccactcggggctgacagcggcgacccgttccaaagtaaaaaggggtttggggacccgtttagtggaaaagacccatttgtcccctcctctgcagctaagccttataaggcctctgcctcgggctttgcagtcttcacctctgtaagttgagtcctccgcctcccggtgtcctcaaacnctctcnanctttcaccctttaccaggcttatacagcttccctgggatttttgtctccttttaaaggcaaacctcccagcttctttagcctcttggtacctcacactctctgtccctcgcgttatttattctaccctgccacttctgtaagaaaaacagtttctc

SEQ ID NO: 521148 - DNA, 1072 bp, Homo sapiens
gccgagccggggctatttctggcgctggtcgccggctccaagaatggcatccgcatttgctaccagcggtggccgcgtgcggagccaggcctggtcctctagcgcccagacaccgccgctcccgggcaacccgtgtagctgcgcaccgcaggccggcggccgagctcgcgcatcccagccatcacgtcttccaccgtgtctccttagagaagggaagatgagtgagtcggagctcgaagtccagactcagcccttggcctccaagcatggaacaccaggacgtgcactgagaagctggggccggcgagcatggccgcgcaagcaggcctccggtcgagtcccgcgagacagcagctaggtcacgggagtcaagacaggacgcccagccgaagtgccaactagctagagagacctcggggaccgaccaaggggaagcaaaaacaaggtgtgctgccaagtacccgtgaagaccaggcagaagctccaggaaggaaaccaaggggcagacccatacaaggctggacgaagcgaggacagaggagcggcatcctcgccaaggactccgtcggcagcgagggagccagtgcacaccagtgacgatgccagatctggcactttcattgagtagcggaggcagttagcgtgtctggcgtactgacacagaatctggactgcacggatcagcagtggggacgccggcgaacatacaagccgaagacaactacccgcacaagacacaccgaagcacggcgagggaatcagaactaaagcaaaagctgagcccaagaaaccatgggaacgcaaacacgccagagcacgagaactaaatagccagggccatcccaagggcacaaagaaagggagtggcgaaaaagacaccaggagcaccaaaaagacccacggcagacggaccacgggaaaacagggaggccggatgcaaggaagcgccacaccagaaacgaaaaaaaagcagagccaagaataggaggagagaacgcaccaaagaacacacaaaccaataaggaccgagagccagcacagcggaaagacacaacgcggccccaccaaaagg

SEQ ID NO: 521149 - DNA, 1838 bp, Homo sapiens
  misc_feature (1)..(1): n is a, c, g, or t
  misc_feature (308)..(308): n is a, c, g, or t
nttactctctcgattgcaggttgggggtatttttttttactgaggctctttttctccgctcagtggcattggtttttccttcagcaggtcgtttttacacatacattgggtgcttccctactaacttgggccgcactgttgggtgttcgcacagtgatacctacgcacaatacactacggggttgtgccgccctagtaatatgtcgctgttctattagttcgccgcccgagggggggcacaattacacccagccacggaagtgttgtactctctcccttcttccattaaagataatatctggcgcgtngtgaataaattcgctgtgtgcacacacgacgttgtcgcgaatgtcggccgcacatgtaccatgtttgttgtgagtgccgccccccctgtttgtcaccatggagtcttcgtgaccacaacgagtggggccccgccctcgcgcctcatgaaatatttcttctggggggcagacgttgctcaacgccagaaaaaatttgggcggcccaacaatttccagaaacaccccctgttgtaatgtttgtgctgcccacacgaagtattcttttttaattggggagcaccaaaataaacctggtttcgcccactaaggcggtacctcacacgtgtgccccacacgcaccctgtgtggtacgcccaacgccccgacgctttttctctttacaaggcggagatatattttcgtttctgtttcagaaggcagttatacaccgtgttgttgtgaggatttgtgtccgctttgcctgttgtgataccttccccgctctgtgttccgcgtcctcgtctgggagagagttctcttggtgttcccccgcgaagaaagaaagggtgtcccacgtgttggcgtggtggtgtgagtttggtttgcgccgacgtgtccccccacaggtgtaagttcgccccacacgagtgttctctcggcccacgggagggcccacccccccacaccgcgtagtactacctcgtgtggcttcttatcaccatgggggcttctcctccttttataagagctggagacaattataggagagaggttttccaccgcgcgtgttccgtcccacactctctatagttgtcacccctatataaggagacgcggagtgttggtaaaactcttctctctctcacggcgccccacaggagacaagcgttagaaatgttctctgtttctctgtagaccacactctttctctgcgggaacactcctttaggttctctggaactatatagagtgcacctcgtgtatgtcacacacagagtgaaatatggctttaagagtgtacactcttctctctcgtgcgaacaccaatatctggcgcactagttgcttaaatatgcgccgctctgtaaaaggagagacacccatctttctctgtagacttgcgtggagacataccacatggctgctcttgccacattcttctccagaagaaacccacgggggatggtgcacactcaccccgcgccaggtgtaggtttcagaatagtgggtgttggtcgccatagtttaatattccccttctaggaggatttccccagaccctgttctctctgccgtacaagagtggtgataggtcccagctctcccagaagaatagtgcttataaatcggaccctcggcccttgttttaagaatccgggaggccccacttcgggattttattagtataagccccttccctcccacatccccacccagaaccttgctccatcttttcgcagtttttaacatagactcaccactcttattgagacttaatatttgtcctcttaggatttatttctcttgccccaacaaaaagagaaaaatata

SEQ ID NO: 521150 - DNA, 179 bp, Homo sapiens
tctgagacggagtttcgctcttgtcacccagggctagagtgcaatggtacgatttcggctcactgcaacctccacttgctgggttcaagcgattcccctgcctcagcctcccgtgcatctgtattcaccctgtatggacaaacacattacattattaaatgtttctcaaagagggagtt

SEQ ID NO: 521151 - DNA, 104 bp, Homo sapiens
ggatttgctggtgcagtacaactaggcttaatagggacatgcaaagaaaaataaggttacactctcaacatttagaactcctttataaatatattgtagcaaaa

SEQ ID NO: 521152 - DNA, 208 bp, Homo sapiens
tgagtgcaggagtcgaatggatgagggacatggagagcctggggccctgcgcgtgaggtatgtgaggggcgtctaggggataggtcaaggtaggttttggtggctgctgcggtggtggtggtggtttttgttgttggtttgtggtttttggttggttggtgtgaggggggaagagggtggaggatgaggaccccttagcacatgggag

SEQ ID NO: 521153 - DNA, 367 bp, Homo sapiens
gtcaccatggctgttactggctcccttgctgtccccaactgttcctcaggtcacctccccaccttgctgcctatgtcccgagggagtgcacaggttccagtggatcagaaacctggtcccagaatttggagtctccagctctcacgtcagggtgctctcctctcctgcagagttcttcgagctcttgaaggggcagataaaatggccaagaggcgagtcgtgatggcatccctttacctggggacaggacctttggagcaggaactggtggattgtctggaaagttctctggagaagtcactacagtcgaagtttccttccgacctcaaggtctctatcctcctggacttcacccggggctcaagag

SEQ ID NO: 521154 - DNA, 765 bp, Homo sapiens
agctcagagcagcttggcggttcgacgaacggctctgcttgttagattgtagactgcggatcttcctcggccttcttgatgcgtccagctggtctccgatgtgtgctaaaactgtctaattaggccgagagaatgtgtccctatccaatcagactgctagttagtccacccagggttaatacagccgcttacagctggacacgaacgcccgcaagatacgcgctacctctacctgcggggacattaagcctcatcgctacaggctcggtaccgtggcactcacagagattctggcttgtcaaaagtctaccgagctgctcatcctgaagctgcccgttcagaggtttgtgagggacatcgctctggattctaaaaccgacctgtagtgtctgagcgcatccatcctggctctggacgaggctatctaatcgtacctggtgggtctgctcatactctccaacctgtgtggcatcacgctgagagagcgaccatcatgtcctaagacttcccactgtgcttggcgatacggtgagagagagttaacttaaagcacactttatggcgttttgaataaattctgtaaatactttggtttaactgtggcttcgtctggagttggctttatatggtgcatttgtacttaagcattcatcttttactcagtatgacgcgtactgttacagactcaatgtgtggccctgtttgtcagatgacactggtaattccgaagggagggtgcttctggtttcataccctggtccgtgg

SEQ ID NO: 521155 - DNA, 345 bp, Homo sapiens
tcgaagatggcggttggctgactcatgggaggaggcttgctggaagactgggaggggcaccgcttccgtggcctcaccgccggagctcctgtctagcactgagtgtcgcttgtggttgcgctcctcacccatggggggatctactcgtaagtcttcaagacgtcggaatttgccgaggtattcttgcagtatggggtcaatgtccaaatttttggcttgggactatttcaggaaggcgcagaagttgtccagcccatacagttggtcagcttcatagtccttcacggtttgctcctgaaaatgcttgaatatggtcaaccagagcatgttcgagggtaccgagct

SEQ ID NO: 521156 - DNA, 304 bp, Homo sapiens
tcgtagcggagattcctttgtctttaaaaaaaaacaaaaaaaccccccagccgggcttatcaccttgaaaatcacgagttcaagaccagcctcgtcaacattggtgaagcctcatttctactaagaaatacaaaaactagccaggattattagagcgcactggtaatcccagctactcaggaggctgaggcaggatactcgctggaacctgggaggcggaggtaacagggagtcatagagtgcacccacgtgcacctccagccggggggtacagagataaaccacgtgatctcaaacaagtaac

SEQ ID NO: 521157 - DNA, 182 bp, Homo sapiens
accaactcagccatttcttcatgtccattcatcccaggccttttctcaactcacacaccatttgcgttgttccactccattcacacttgcaggccatttcatttttctgtgcataagcacccaggccaacagtccagcctcttgcagtcagctgggcactcacaggcgtcccaccaccacac

SEQ ID NO: 521158 - DNA, 481 bp, Homo sapiens
ctgactctgaggacccctctgctgacatttgtagagcatgtcgcttgaagtctactttatctacggtggtgccctaggaccacaaatacgtatttggagagaggtgtagaaatctgtattgcaccacctggaacactgattgactttttagagtgtggaaaaaccaatctgagcagaacaacctaccttgtccttgatgaagccgatagaatgctttatatgggctttgaaccccaaatcaggtagattgtggatcaaataagacctgataggcaaactctaatgtggagtgcgacttggacaaacagaagttagacagcttcgtaacgatttcctgacatactattttcatatgaacattggtgcacttgaactgagtgctaaccacaacattcttcagattgtggatttctctcatgacgtagaacaggctgcaaaacttattcgtctaatggaagagatcatgagtaagacggcgcat

SEQ ID NO: 521159 - DNA, 460 bp, Homo sapiens
  misc_feature (413)..(413): n is a, c, g, or t
gaggaccccgcagcttaagggctacccatcatttgtggaggcatgttttgctggtttttggtgccagggggagcagagacacggtctgggccaatctggaatggaaattggttctcgccgccgcctgctggtcggcgctcagtagcagctgtggcagtggcaggataggcattgccatactggttgtatacatcttgctgaggggaaggctgtacagcttgttgctggctggcaggctggggctgggctgggggcaactgctgctgctgaggctgcccctgcccagtgctgtatggcacgctgtacatctccccttcgtgccgcttggcaggagggccatatgtgccatccattggccgcttgtaattctgctgttgctgttgatacattgtagtctgctggctggagaaggngctgccagaaggggtgccttgggtggagaactgattgccataggaat

SEQ ID NO: 521160 - DNA, 129 bp, Homo sapiens
  misc_feature (78)..(78): n is a, c, g, or t
tgttaaatgttgcagggaaaatggttatttctcgcttgtggctagatgtctgcggctgtgatagggagaagagcagcnaaagagatgaggagaatgcaattcgtacttctctcctcgcttactacgcct

SEQ ID NO: 521161 - DNA, 317 bp, Homo sapiens
gactcctctcctagtgtacagtgcccaaatgatgggtttggtgttcactccaattcctatgggccagagtttgctcactgcagtgaaatacagaggagttcgctggccaatggttgggcttatgatgactttagttacaccaccttacttcttgagatgaaaatgacaccaaagtcatcaagcagtgctatcaagatcacaacctgtgtcagaatggttcagtatcaaccttctcactatgtgtcatgaagctctttacacacatggatgctgtcatcagaactggcacctgcatgcggggagctccatcccaacgg

SEQ ID NO: 521162 - DNA, 156 bp, Homo sapiens
  misc_feature (85)..(85): n is a, c, g, or t
gtgacctagaggttccctggttgtccaagatagcatcttagttcaactctaaatttacaaggggatttagagggtactgtgggcnaatttaaagttgaactaagatctatcttggacaaccagctatcaccaggctcggtaggcctgtggtatcga

SEQ ID NO: 521163 - DNA, 563 bp, Homo sapiens
cggaagccaatccaaggttcccaaatcgcccgcacatccacttaggctcctagcctcatagtccgcctacctcaacttcccgggatactaaagttgtgaacgtagaacgccatacctaacctggtgcaggttcttggtggacgcggtggcaatgtgtccctcccctttcctctcgatccctgtcctctttcttcgaaagcttttatcgtctcttgctctactgcctgctcttctataggtagtttcttgaatttcgctttccttctttgtgaggtgtttcgtcgttctttatgctaggagcctcgttagaaggctgaccgaggtgtttcttgctcctgaacgtctgaaggtccgactttgaagggaatagggtttatgctcgagggctgtgttagaacttgggagtgatgtgtctgcttacctgtctgattttcgtatcttctacttccttatttttattttagagcgaaatcccgctctataacccgagctaagatgcgattataccgtcgcgactcgctgcgacctcggcctaaactcggaaagttctcctgtatcgaccc

SEQ ID NO: 521164 - DNA, 454 bp, Homo sapiens
  misc_feature (444)..(444): n is a, c, g, or t
acacatctggaaacatctgggggtgcttctcatggtggggcttattcattagagcccatccagaagtgccacatcagtctccacgaattaaaatcaggagagctttggccatttctcatttgaagaccttggctaactgaaagaaatccacattttaataacattttgaatgggttgataaaacaggaacagatggttaaagtttgtcattttagggaaaataatgaaatattgtactgcttaatctgtcttcctgtcacactcttccctatcccctccctactgaaaatatattcagatgcaacaaaacttaaagcaaaatactaatatcttcttagacactttaggtctcttcacctgaaagtgctctaattgtgtcagccatctctgtgttaactttatctttttttttttccagcctaggtgacagagtgagactccatntcaaaaaaaa

SEQ ID NO: 521165 - DNA, 358 bp, Homo sapiens
tgacctcgcagcttgggcttggtacgtgctatgaagacgcttggacccgttccagcttgcgtaagcaaacctaccccggatctctgtgcttcagctcgccagggtgcagtgggagacctggtcctctttcccttctgtatgaagcacaagcctcagggaaggggaagcaggatgcggagggccaaagcccgggacctctacttgaacagttctactggggaggctggagaactaaggaaacacctgtacatagtgtccgctgcccttgactcccgcttagcacacccttaggcaggcgccccttccacctttccccgagaccgtcgtcgctggagggggcagggtccagcccgcctgg

SEQ ID NO: 521166 - DNA, 322 bp, Homo sapiens
agcaagatcaccattggacagatcaactgcagaaaaccaacaaagacacattggacttaatccgcactacagaccacatggacctaatagatatttatagaaaatgtcatccaatggctgtagattaaacattcttctcctcagcaaatgaatgattctcaaggacagaccatatgttaggccacaaaacaagtcttaaaacattccaaaaaactgaaaccatatcaaatatcttttctgaccacaatgggataaaaccagaaatcaataacaagaggaattttggaaactatgtaatacacgaaaattaaccaatacactc

SEQ ID NO: 521167 - DNA, 234 bp, Homo sapiens
catcatgatcgctcgacatcgatacgagggatttttagtattttaatataatacagatccaaagagagggtggggttcaactcagtacccagactggtaaacaagtcggcacggcaggtgacagacccgctgcggcctctcagagagtgaggatcacaggggaaagccatccgtggcataccgctttaaactaaatgtagtcgcaaccacaagtcatcatataatacaggcaat

SEQ ID NO: 521168 - DNA, 883 bp, Homo sapiens
cactctcaggtcgcttgcccggtgtcactcactgtatcaggtgtaatgaagtcattcaggcgtaacagtaattacgcggagagatgtaaagtgaaatatttctttatgggcatttcttttatggtcatcgttgggccggtactttgccctgatgatctaaaagcaaactgtgcaatgaaaaacaggagccatcaggctcctgttgcatttctgacgacggtgtttattccgcgttttcgtgaatatgtttgctgctggcgggtagtaaaccgtcggcacggaacatcgctttaatccctctgatggcctgaggaatacggtcgcggtttttcaatcagtgcaaagcgaacatgcgtatcaccatagtcgccaagagccaatccccggcgagacacaaagcttcgcttcgttaaggagcttcttggcaaattccaggcgatcccatgggccgcatatggttccgggatttatcgcccagacatacatcgagagccttcggcatttcaaccatccagcccgacttcatgcaggcctttaaccaatacatcacggcggcgttagtactgttcggcaatgtcgcgcacgcactgttgatcgccctccagcgccgaatcgccggtactgcaacggcgtataggtgccgtaatcgtgatagcttttatacgatgccaggtcgctggcatgcgtttgtgtgccaatcattaagggcgatacgccacgtcctgcatgttggtgctcttcgacagcggtgaagagctcgatgtgtccatcgcgtggccccggtgtcttgctattgcgggctttccgctcggtggagaattcggttggccggtttgacccagcgccttgtggcgtttgcaggcctattttgggaccgtcttcc

SEQ ID NO: 521169 - DNA, 232 bp, Homo sapiens
  misc_feature (125)..(125): n is a, c, g, or t
  misc_feature (154)..(154): n is a, c, g, or t
ctgggtatgggtatgcccccaaccaggctcgctattatgaacgctactatgcaggaaggccaggctattgcgtcagaaatgactctgatcctacctatggccaacctggtcacccaactacctgnaaacggtaaccagggtacactcctcttgnagcagggaacctaaaccctcctggcatgtattcagtccctggtcccaagaagacctatatacagatcctgggtcagcc

SEQ ID NO: 521170 - DNA, 151 bp, Homo sapiens
agctggagtggatgtgtggagggtgagtgctggaaatgatgtgtggggataagacgggaagtgtgagtatgtgagtatgtgtgccagacaagtggtgtttccagtgtcaatgggagtgtttctcatgagagatggtgatcttggatggaga

SEQ ID NO: 521171 - DNA, 924 bp, Homo sapiens
  misc_feature (508)..(508): n is a, c, g, or t
ctcagagactcgccattagcgcgattcgccgcccgtgcacacccgccgcatagtgtcaccatggatgatgatatcgcccgcgctcgtcgtcgacgatacgagctcgcggcatgtgcaagaggcggcttcagcgggctgatagatggccctccgggccgtctgccgctccatcgtggggcgccccaagcaacagggcgatgatggtgggcagtggggtcagaaggattccatatggtgggccgacgaggcccgcagagcaagagaggcatccgtcatgcgcatggaagttacaccgcgatcagaggcacggtgactcggtcgacgcaacgtgggaacgacatggagaaaatcgtggcaccgacaccttctacaatgagctgacgtgtggctcccgaggagcatccccgtgactgtctgaccgaggtcgcccctgaagcccaagggccaagccgcgagcaagatgattccagatcaatgttcgaggacttcaaacagccgcagtccatgntacgttgctatccaggcctgtgctatcccgtggtatcggcctctggacgtactcactgggcatcgctgatgggactccggttgacggtggtcaccaccacatgtgagccatctaccgaggggtatgcctctcccccaatgccatcctgcgctcatgggacctggcgtgggcgggaacctgactgactacctcaatgaagatccctcaccgaagcgcggtgtaacagtctttcacccacacgggcgagcgggacaatcgtgcgtgaacattagggcgaaagctgggctacgtcgcgcctgggtttcgagcacaagatggcacgcgtgcttccacctcctccctggagaaagccccagcgtggctgaggccagcatcaccctgggcaacgcggtcccgtcccgaggcctcccctccta

SEQ ID NO: 521172 - DNA, 194 bp, Homo sapiens
caggttactagacttactgagtgatacaccggcagtgatgtctgtggacctaggcagtgagtctataaggtggccattgtcaacctggagtgcccatagaaattgtcttgaataagcgaatctcggaggaaaacaccggtgatcgtgaccctaaaagaaaatgaaagattctttggagacctgagcaagccagg

SEQ ID NO: 521173 - DNA, 970 bp, Homo sapiens
gcgggggaggctggaggtcgctcgctcgctcgctcggtcgctgactcgccggagcgctctgtggcggtcggtggcaggtcggtcgcgagagcgggctctgtggaagggggcgaggctatgtcgcggtggcaagcccggatgggccggcagtgccgggagtaacgggacgtcgccgcggagcttcttcccccgggatacagtgcggccgagcgggaggcctgtgggtgcctgcctccggatcttgaagagccctgctgcttgctgctggagccctgcccctgctgcggcacctgtgcacctgactgcgggagcggaacagcccagccagacctggccgggctgctggcctgatctaacccagccaggcagggcaatatagcccctctggaggatggagctccttcccccaaagacatgaagctattggagaatcgagctttgaaggccatcaatcacaaagctgactgtggagaccggagatgccccacatcattggcaggattgagagctactcatgtaaagatggcaggagacgaaaaacacatgttcaagcagttctgcaggagggccaagccccaccgtgctggaggcactttctccaacccagacttcaggactgagcccaggcagatcagaaaagccagcggtgaggaggaggggccctcaggtgacaagtgcagcgaaagaccctcttctactgattgcaaggccaatgggtcttaggctgaatatgacttcagcaaaagcccgagcatgagtcagcggagccagcttagtgggtggtgatgagcactgagctgtccaaatgcgggaggcatcaggttgaccagtgtgagcgtggcagaaatgcgctgagtactcaacgtaacaagtgtcgactgggaaggacgctaatttaaacgcagaacttaggccagccacaccaaggaggagtatgaccacatcccagatagaaaaaccccaccgagtg

SEQ ID NO: 521174 - DNA, 644 bp, Homo sapiens
tggaattctgctcaagtgatgagcaatatgttcaaaagattataaggaggggagtaacagttgggattaatgtgtattctggagaatctcaacaaagtacaattcatatgttcgaattaacatacagacttctgcacaggccagagaggaataagatcgcatctacagctgtgtggtgattttctttcacaaatcactactaagttattaaatgtgatttcaaatggtgtgtatctgtatcacattggacataagtcagattgcaaggctcaatggaaagtcgaaaagttaactcatgcaacataaaagagacatcgatatgcaaaacaaaaccatatattcatttacttctgctgcacgttttcttgactgctgaatttcgtaagcagggattggtcagggtgggtcttggggctgaagacctggcgaggagctggtgctatcgctgtacaaatctgaaggtgatggaaatggagccttggggaggagccggtgctgccttttaagtctatgagagtcgtagagctggaggtccagggaagagctggtgctgccactgatgtcttaggtagtggagctaaagacagtgaaggacatggttggttgtctgtgcagggtcgtgagctggagatccaggtggaaac

SEQ ID NO: 521175 - DNA, 139 bp, Homo sapiens
  misc_feature (84)..(84): n is a, c, g, or t
  misc_feature (127)..(127): n is a, c, g, or t
ggaggaacagaagctgaagccgggagagtgggagccccctcctcttcctccccctctccctctccgtcggcccggccagggggncccccgtctgaggaagccatggatttccgggagggtggtcctnagtgtgagattt

SEQ ID NO: 521176 - DNA, 371 bp, Homo sapiens
cccgcccactggagatttagtcttcagggtttctaagctgcttttgaccatgcagctatggccaaaaacagaattacaacctagggaaaaatttggtgaggacctaagtgataacactggggaatacatatctgccattgatctgctctgctgccatcagaaatggatctggtcgcatgataacatcatagggctagttattttactaatctacataaagatatgttattgtaaggttgaattgttgatcactgaatcgaggcttgaatcatttttgtcgtttaagtgtgtaaggcagatgaaacatttacaaattacaccgtttttattttataagagttaataaaactacccttaagataccttcatca

SEQ ID NO: 521177 - DNA, 303 bp, Homo sapiens
gggcgggaccacagagaccacagaataacaacaccaagcagagacagagaaaggggaggggaaaaaggggagagaggagaccaggagacccacaaagtacgagagacggggaccggggaaaacccggagaactggattaggagaagaacagcacacgtaaggtccccacccaatccctgtgcccaacaacctcaaccaaagacctcgcaacactccaaggaaaaccctgcggctcctggattcttacaccaagcccagctaatattagtcttttcaccatgttggcccagctggtctcgaact

SEQ ID NO: 521178 - DNA, 314 bp, Homo sapiens
tggtatgcacaactagggtcagtttgcaggtggtagccatttaccaagatagttgtaggtaaagaagggcagatttattagagaaatgtgaaaatatgttgcagtgggcagctcagcagagaaggggctacctgcaaagaggcaagggctggaggaaagttttatagggtcctgctgaagggtgctacgtgtggaatgaggtcattgtgcccgcaggttgtttgtgattagctgtctctaacaattgttcatacaataattgttcattattgttctcaacttggggctctccccaacctggggacccttcctta

SEQ ID NO: 521179 - DNA, 111 bp, Homo sapiens
tactggtttgcagcgttactggtttgcagcgatactggtttgcaggctcttggtgaggaggtacaggagttactccttgcaggatcttggtgagggagggtcttggtgagg

SEQ ID NO: 521180 - DNA, 197 bp, Homo sapiens
  misc_feature (82)..(82): n is a, c, g, or t
tgtcctcggtgtgatattgcttgattattttaacaaacagaagtcagtaacggttttggcatgaaatagtcataggccaagngctctcttctttgatttaaggctcttgggggtcactgaagtgtcatttggaaaatgacttcccaatgcataatgatcccctaaagcctgtcgtaagtgctcttccgggagagcag

SEQ ID NO: 521181 - DNA, 432 bp, Homo sapiens
ttctcacagtggcttttggtgtttcgggaccaacagactgtaaagaccaaagaaaacttctccttctccctttgaagatttgctgaaaagaggaagattaataggagaaaaggcatacaaatgtatttgatgatagtttcacgtgacacaggagccttcagaatgaagacccaaagatacagaagaaatggtccatttttacactgaggtttaacgaaatatggacagccgtgtcgaaatatgactggacaaaaagggtgtgatctaatgctaagaacccgagaaggaaacctagcaaggcctgtctgtctagattcttcttggcctctctgagcatgtgggttttgttttgttttgttttgttttgttttgttttgttttgttccaatctgggtatggggcaggaccttctagaatggaggtcttatggcc

SEQ ID NO: 521182 - DNA, 367 bp, Homo sapiens
  misc_feature (17)..(17): n is a, c, g, or t
gcgcctggctaattttntatttttggtggaggcggggtttctccatgttggtcaggctggtctcgaactcctgacctcaggtgatcctcccctctcggcctcccaaagtgttgggattatagacgtgagccaccgtgcccggccagctatgggcgtctttatggtttatcagtaccagtctcccaaatgaggaaagatggaattatataaccttatcttgattgagtacctgggccttaattttatactttaccatacattgatggaataaagcttccagatttcactgtgtattaggagatttcttttcatgctttggtaacttgaaatggatttgtggaattgtttccaattagaattagagaaa

SEQ ID NO: 521183 - DNA, 1180 bp, Homo sapiens
ggtatatgcagcaatgagccaggcatcgggccgctgatgagggatataaagaacaggagatttagccgaggactgtgactctacctggcccgtcctgtgagagatgacgagtggcatgtgatgcttctacgtgatacaagtaagagagtcacttcagtcttcggagccttccgtgtggctgaacgtttacacaggaaagctctgagtgtaccagcgaagtgcacggatgagccctagtgagcgattgcttatatcgttactgtcggtggcgactgactggcgccgatgccagcagtagggagtttcagttgcacgttccctgggactctagctagcagtagtgaatgaatgaacgatgagggaagcaagtgttggtgaaaaatagggcttggggtgccttacagtggctgacatagccggatggaagggatctctgggcgatgtgcgcctggcgtcagaggagagaaccttctgcatggcgtagtttgagatccagatggccggcgccctccgtggggtaacggcacaacggtgtcataacacataggagggatcggaatcgtgaaccttggaggacatcttcattgtaacattggccgaatggcaagaacgtggatggcaaaggcactcagagggacccagtcgagttaagcagattggggtggccaatccggcgaagtggggccggaaccgaacttggtacatcctccttccattgagaggccccgttcgtagatgcgcctgcaggccgaagacttaggtgacaaatgttcggtgagtgagtccgtcggaacgttccaaaggggtacgggaaaaaccgggagggggtgacaaggccacaaaggggactggtggttgggcccctggagtttcgccaccaaggaatggggagacgtcaggcaggaacacaagttaggcgccggcactaattagaggccaaattccccacttttgcgcggggtaccttggagtatgccctccggggagttggggatctcggcttgaggaatgcttggcaattgggcgggcccttgtggaacgtaccgagtgggaacagtgaattgcgtgcggtccacaggcgttgtacatagcgcggaaccgctgggggtccaatcgggaggttgtcacccgtaaggaggcacttcaagacaagcgtggactggatggcccttggaggtaa

SEQ ID NO: 521184 - DNA, 202 bp, Homo sapiens
  misc_feature (174)..(174): n is a, c, g, or t
gcgtatcgtacagttgagagagtgtctcccctcatcatttcctgaggacagacttagtatgcctgacaggagatgaagtaagaagatttgcatgcagcgggttcattaaaatcgatggcaaggtccgacactgatataacctaccctgctggattcatggatgtcatcagcatntgacaacgacgggacgagaatttcgcgt

SEQ ID NO: 521185 - DNA, 141 bp, Homo sapiens
ttaatggcatctccaacaccttcagcttatgtgcctggtctgtattggcatctccatttatctgcagggtaattcccctccttgccagcatcagcttatccctctatttccctatgggataccttctctcccttcttagcg

SEQ ID NO: 521186 - DNA, 937 bp, Homo sapiens
taaggcccattggagtatttggtttacaataagggaaatagtgggtattaggattaggatggtggtgaagtttagtagggatgctactggtccaaggatggtaaaggggtagcttacgggtggtcctcgcgattcaggttaaaaggaggaggtcggcggctaggagtcaataaaggtgatgggcttagtgggcgaaatattatgcttggtggttgggatatatggaggagggggataatggctaggatgaggatgccatagtaatagggcaaggaagcctcctagatgtgtgtgagggacggctcggaaaagtgtgtaggcgaataaggaaatactcatcgggctgaggtgagggaaaggggtcgtaacaaagggggtggcgcctacgggaacacatcggtccggggtccgccaagagaaggtccgggtcgacgcaaactcggctgtcaccggtccaatcaacggcgaagacgactcgaacgaagaatgtaacgcccgagcggcgccatcgactgctcgtacgcaccgcggtgggacacggggggctataacccgaaacggggagggagaaaccccaaagggggagtagacagaacccccgttcgtgcgggcacaaactcgcaaggcgggggtgccgctgacaagcgggcgcgcaaaacgtgaagcggccaaatgcaatgggcagcggcaagaaccgtcgtgagggagcacacggtatacaggagagcccccacaggattacatgaacaagcgccccaggatgggagggggcaacaaggatcggcacaggtgggcccccaaaagtaatgggcccacgggagaaaaaccaaagagggggtgaaagtgaccggaagaaagcacgaagacggtcggcaagacaacacaaaagacaccagtgtaaaacgaacaattgggcgaacaacgatacacgaaacag

SEQ ID NO: 521187 - DNA, 1120 bp, Homo sapiens
  misc_feature (155)..(155): n is a, c, g, or t
  misc_feature (283)..(283): n is a, c, g, or t
tatagttaaacaactttattaacatagtcaagcagggattaacattcacttctattatgtcacttcattacaaatgtgttaaattacaaaatttactacagtacaatatatatttctcgtgcatgtgactccaaaattattgtgggtggccccanaaaaacctctcttttaaaatctcagcagcctttactcaaaaatttaaaaccgatattctctatttaaagagtggaagaactctgtggttagcacgagagagtttagaacttctcaagaaatatactcnaattatagttacgaggttgtggaaaagttgtgcgaggaaattagtgggtgtgaagaggaccactttcttaacattgagtgtgggtgggcgggtgttacgcggaaaaaacaactcgcgatttttaagaggctttttataaagccattatactctctattaacaaccctaaagtcgtggcctcagccgagaaagagaactcccagtgttcactctctatataacttaagagccagagttaccaatatctataaaggttatattggtggcgaccccccaaaggggtgtttaaacccatgttgaatctaccctaaaggggtgtttacaaacacccttttttcaatataatatatgtggaaagggtggatttttttcaccccatgtggtggtttaaaaggccatatctctcttatagagaaagggatattaactcaatagcggtggagtataaacacaattttaaattttaccaatgtaagtatattatcaatatataaaattttaaatttttaaacgccatttccccaaaaaaaaaaaaacaaaaaaaacaaaacaaaaacaacacacacaacaaaaaacacaaaaacaaaaaaaacaaacaacaacaaaaaaagggagaggagcccgcccacaaacaaaaaaaacacccccccgagaagagacacccaacacccaaaaaaaaacacaacaacaacgaccaaaacatagagagaaaaaaaaagagacgccccaaaaaagcgcgagaacccaatataaaacaacaccgagagaccagcgacacaaaaaaacaaacaaccgtgacacacggcagaaacaagcaacatgcaacggaaacaactc

SEQ ID NO: 521188 - DNA, 277 bp, Homo sapiens
cttggccggaactacgggaacggagcataagcttcactggatgattggcggcaactatcagcacgatcgcgtatccgatgttcagcatgtcgagaatcagggcagcaactcgggtgtcgggcccttccgatttcttaaatttgataacgatgcctcaaggcagcacatcgagacaaaagcgattttcggcagcgttgattttgagctgattgacacgctggctctgcaagcctcaacgcgctatacggaacaagatcggaatctgcatggctgcttg

SEQ ID NO: 521189 - DNA, 373 bp, Homo sapiens
  misc_feature (184)..(184): n is a, c, g, or t
  misc_feature (232)..(232): n is a, c, g, or t
  misc_feature (263)..(263): n is a, c, g, or t
  misc_feature (295)..(295): n is a, c, g, or t
  misc_feature (324)..(324): n is a, c, g, or t
gggagcaccgggttcagggcatgagagaatggactcatttctgacatgtgcctcagtgtcatccaagtggagatgtccattaggcaggagtggggctgaacttgaaaaaagaataggtaataatgggctgtaaatgaacattgaagccttgggaagtaggtaaaataacccaggagagtgtgtnaagtgaaagaaaatagaagttcagaactgaaaaagcatttaagggatntgcaaagaaagagaacctgccgaagacactnaggaagaggagctgggaaaataggacaacagnagagggttaggagggagggtttttttggngaaggcagaagtgattgacaagtgacacaattccacatagagggttttt

SEQ ID NO: 521190 - DNA, 514 bp, Homo sapiens
taaaacgacgccgggggggcagcaattcgtgaaatgacaggccgcgcccgcgaaacaggagcccaacatgacaccggcccccagggaggcgtgctgtgccacttcatccagcgcccatcagtcgccttggagcatcaggaatcctgagggctggggtcccggaggatcacagatgctggggcacctcaaccccagggagccgctcgagaagtttcttttctgaagtgtccacctccttctggtcaccggctggagctgggacaggtacatcgtctgtgtctgggtggaacttgagctgcccctcagggtgggcagccggggccttgtggccttgctgctgttgctgctgctgcttccgctgctccatgtgcagcacagcctgctgcagctctcttttctgggcctccaggcggccctgggaccgccctagagcctctgtctcctggctgaggcgcctggccttggcattcagctctgcctcccgggcaggcagctcctcttcaaagcgcctcag

SEQ ID NO: 521191 - DNA, 751 bp, Homo sapiens
  misc_feature (25)..(25): n is a, c, g, or t
  misc_feature (65)..(65): n is a, c, g, or t
  misc_feature (69)..(69): n is a, c, g, or t
  misc_feature (71)..(71): n is a, c, g, or t
  misc_feature (91)..(91): n is a, c, g, or t
  misc_feature (97)..(97): n is a, c, g, or t
  misc_feature (100)..(100): n is a, c, g, or t
  misc_feature (183)..(183): n is a, c, g, or t
  misc_feature (197)..(197): n is a, c, g, or t
  misc_feature (217)..(217): n is a, c, g, or t
  misc_feature (251)..(251): n is a, c, g, or t
  misc_feature (256)..(257): n is a, c, g, or t
  misc_feature (262)..(262): n is a, c, g, or t
  misc_feature (264)..(264): n is a, c, g, or t
  misc_feature (271)..(271): n is a, c, g, or t
  misc_feature (274)..(275): n is a, c, g, or t
  misc_feature (281)..(281): n is a, c, g, or t
  misc_feature (291)..(291): n is a, c, g, or t
  misc_feature (297)..(298): n is a, c, g, or t
  misc_feature (301)..(301): n is a, c, g, or t
  misc_feature (306)..(306): n is a, c, g, or t
  misc_feature (309)..(309): n is a, c, g, or t
  misc_feature (312)..(313): n is a, c, g, or t
  misc_feature (316)..(319): n is a, c, g, or t
  misc_feature (322)..(324): n is a, c, g, or t
  misc_feature (340)..(340): n is a, c, g, or t
  misc_feature (349)..(349): n is a, c, g, or t
  misc_feature (357)..(357): n is a, c, g, or t
  misc_feature (412)..(412): n is a, c, g, or t
  misc_feature (488)..(488): n is a, c, g, or t
  misc_feature (498)..(498): n is a, c, g, or t
  misc_feature (500)..(500): n is a, c, g, or t
  misc_feature (511)..(511): n is a, c, g, or t
  misc_feature (515)..(515): n is a, c, g, or t
  misc_feature (520)..(520): n is a, c, g, or t
  misc_feature (549)..(549): n is a, c, g, or t
  misc_feature (566)..(566): n is a, c, g, or t
  misc_feature (627)..(627): n is a, c, g, or t
  misc_feature (640)..(640): n is a, c, g, or t
  misc_feature (671)..(671): n is a, c, g, or t
  misc_feature (747)..(747): n is a, c, g, or t
ctccaattaaaaaaaaacagtaggngcttttgataacattaaggtcaagtgatttgtggagatgngggngntggggttttttgggcacttncgagtnatncattataaacaactgtgagttttaaaaacacagttccagtaaacgtgtagttacactgggtacagataagaaaatacaagggnagcatggtagctcntgtttgtactcccagaactntgggggggagggggaggtgaatgatatgggggcnggggnncaagngnagcgtgngcnncacagnaagactctgngtctgnnganaatanganaannaannnnggnnnggggggggggggattngtgcataancccggggngtgaggagggtggggggtggggatgggttgaacccaggaagcagtggttgcagtnagccaagatcgtgctactgcactctagcctgggtgacagagcaagcgaggctctgtctcaaaaaaaaaaaaaaaanaaagaaaggntnagaagcccacnggcngtgcnaaaccaaatgaatggaaagcgccaaaagngattttataccaagggnccatccatacaaataaacaaaatcctatcctcttctttctatattttttttcttacatttnttatacaaataanagaatgcttcattttattcacttcaataggncaaagtccttaaagaaagactgaaaagagctgataatcaaaatcccaaattttatgcttatttttgttttagtgcnataa

SEQ ID NO: 521192 - DNA, 495 bp, Homo sapiens
ccgatgaaccctcgaaagagcaaggtggtcttaggtaaatcactaccgtggtacagctgtgaggagacttcagcagccgtggatgcctcagatgggagatgggcgatgctggccagcccccgatagagtgcccatttggtgacttcacatgccgccatcagctggtactagatcaccatgtgacatggcttggtggcactcgtctctcaagtgcccgattgtgcttacaggagcaagaaccgacagaagatcacctggcacaggcgtatgcacactggggaaaacgcttaacagtgtcacctctgcccactatacctatgctgatccctctcgtctcaggtaccacatgcgtatccacaaggaggaagggatttccctgtgccctgagtgtggctactagtgccacgtgggtcaacccagctctaaataccaaatgacccagcattcaggactgaagccataccagtttccccgggtgtaaatacgtgtaccaat

SEQ ID NO: 521193 - DNA, 428 bp, Homo sapiens
aaaggtagctaaattcagctttgcctatcatgtgtctttagcttagttgtttcctgtgaactatgagctggacaccaggtgggggattactcaagcccaaattctctggtctggtataccaaagaatagttacaaactacagctggacagtagaacgtgctgggttgatcatctcagccagggcaaagaaacatattaagacgttaaacatctaccaggagtgagtcatttaaccctcgtaaggtttcatcttccttgattgcaaaatgagtttgtgtgaaagaccataaataaaaaatagaaacaacagaagtagcattagtaattcatgaaggaaggactggtatattcaacgcttagagttggaacaatgggctctccatatggaaaaaaaagtaaaagcgaatccctacttctcaccatggacc

SEQ ID NO: 521194 - DNA, 1275 bp, Homo sapiens
gtcgcagctcgcaggcgccggttagccgtcgacaccgccgcagacccgtgcgccctcgagcgcgtacccgacgggctcccatccccgtccgccggaccagggggcagcagctcgtgaccgaccccgtgacagatgctcccgcgtgacgcgcctccgcggacgagtggtcacccaatgatcgataaagaggcttgccgggcggcgtacaatcctggttgcgcgaccgtatggctcggcccgtcagtctgggtgacttttaatagtatgacggctccacccatcggtcccctggcgaacatggtaggcggagtaccaggcactttcattccagcaagtgcatcatgatgacgtccggttgttttgccttcgtgcgcttcaccaccggggatgccattgagcaagaggtccaagtttgcccatcatcacagtaggatcggtgagaacgtcggcgggctgcaagcggcgccgaaaaccgtggacggaccgagaccctggtgaaggaggtcgtacacgactttcgctaacggacgtttgtgatcagtgatcggaatggagctggacgggaacgatttcattccagagcgaggcttgaagcaacggcgtggggggaggccagattgacggaccgcgccaagacgggaaggtaagactccgcatgagctcgctgcacacaagagccccttagcgacagagatagagcttgccgggatccccggggggaagaggcacgcgccgggcctcaagctagctaaggcccaaccaagcccacccaggggaggaaaggacgacgccatgaaaagagagcggcgccagcaagcccatggagatacgacaggagcccacgcgacacatttccacagatttccccgttaagaaacccgtggctggtgtcccgtattcgtcaatggacggatcaatgtgaacaccatcgtttacctttggatgtctccttatatcagtattctcaccccaccattcattattgtctggattccataaaggcacacaacgatcacttgtggggacatggcacaaagggtcgcgggccatggtcccattacagaattccgaagagtgtcctccctgcaaagttggaaccgccattttaccatggacattttatactttaacacagcgaacacaggtcggagccatagatgtaaaatctgtggagtggaacctctaaagggtgtgcttatccagaaagacccgggcacactttttgaggcaatcttcagacattccatggcccagatgatcactggtgctacaccg

SEQ ID NO: 521195 - DNA, 837 bp, Homo sapiens
tgtgtagattctcatgatgtccttatctttgaagagaagggagagcaatcaccagaaatgcagcagagaactcttcttgctttcctcatttcccacctctgtggctctttaatggcttcttggtttgtacaaagggagagttaattactaacacctgcttctgcttctcctttcctgcatggccagctccctgactgatagccagctgctttcttgacaagagactttttccacctattccacacaatgtcagcatatgtaaagaaataaacatagttgaacactttagccataccatatggacctctgtggagaaacctgcatcttccttcttccttcataaagaatacacattctttgcaggaggtaaaatagccttagaggtgacatctgctatggtttactcttctttattagtaagaggtagtgcacaattatattttacatgggatgtgtggtttaggcatcatatgttcattttccgtatttttgatactctcggtttgtaccacctaacattttctctttttaggtcaccccaaaagttaggttgacattatttgaatttccttgaggaatataccttctgggactttctccctctgcgttatcctgtgtccgtatctaagaatgaagcattagaagacttccgtcatagccgattagagttgcataaaggcctccttgattcggtctcttgtggatcatgagtccaggctactggggcggccctgggccagacaaaaagcccctgttaggagggcctcgtttggtgcaccctttttttcactctttacattaggcgaacgactggaaaacggggctgggggggatccc

SEQ ID NO: 521196 - DNA, 808 bp, Homo sapiens
  misc_feature (346)..(346): n is a, c, g, or t
tattagctctcttaaaaatttatgggtcctgggaaaaaggaaggcaaactttgcctcccggtcaaattcccccaaaccctcattgttctcccgtgtgccattagaatgggagaggttcacggatactctcaagggagagatgcgccagagaaaagggcgctttagagctgtggcgccggggcgcatgaagcgcgcccacaacattattgctagaaagcaggggagaaccgcattccaggacaggccaaggggccttagggacacctcaagtgggactccaggcgaggaccaagtatctcaggacgaggttgtggatagtatcaaggcgaagaggagaactccgtgngactccttcccacaaaagatgtgaagagggtttctttgtgcccccttcacacgtggatctcgtggggaaaccgagccagaggggggtctcctcgagaaagagggagcgtttatcaagagagttgtctgcgcccccggtggcagacaagaggtaggtcggccggcctttttcttacacagaagagcacgagagttactttaagtgcgtgtacgttccacaaagtgacgtttcgcggcctctgctttgggttggacgaccccccccgcgcgtagcggggcacccagccttacttttactcaactataattaacagacggatcagattcagcatgggcaggggaggtctgtgtttttaacaagaaattactttggcaaagaggggggacgagaaacaacaccccggacgtataattgattagttggcgggacgacagacgatgatgagacagagtggctccctct

SEQ ID NO: 521197 - DNA, 131 bp, Homo sapiens
  misc_feature (34)..(34): n is a, c, g, or t
tcgcgggggcgaacgacccaaagagaaatcaggntgattttagctttcaacagcagtcagaaacccagcccaaattatccataagtttataaattaataaaacaatatatcataacaatcatatgaagtca

SEQ ID NO: 521198 - DNA, 407 bp, Homo sapiens
  misc_feature (113)..(113): n is a, c, g, or t
  misc_feature (407)..(407): n is a, c, g, or t
cgcacacctgtgtcacgctgtggaaggactaccttgatggcgtgggtgacaccctgtacctgtgggtgatcggcgcctacctgtgccgcgggaagcgggccgcgcgcgacggnggctctctggtggcctcctacgacgaggacagtgaggagctgtaggccatatgcaagcttggaactggcttcagtgaccaggagctggaggagcatcaccagagcctcaagggcctggtgctgtcctggccacgcccttacgtgcggatagatggcgctgtgatttccgagcactgtgtggaccccagagctgtgtgggaggtgaagtgcgctgacctctccctctctctcatctaccctgttgtgcgcggcctcggggatagtgacgggcatttccttcgcgttcctctggtn

SEQ ID NO: 521199 - DNA, 471 bp, Homo sapiens
  misc_feature (78)..(78): n is a, c, g, or t
  misc_feature (97)..(97): n is a, c, g, or t
  misc_feature (114)..(114): n is a, c, g, or t
  misc_feature (117)..(117): n is a, c, g, or t
  misc_feature (131)..(131): n is a, c, g, or t
  misc_feature (146)..(146): n is a, c, g, or t
  misc_feature (153)..(153): n is a, c, g, or t
  misc_feature (162)..(162): n is a, c, g, or t
  misc_feature (182)..(182): n is a, c, g, or t
  misc_feature (224)..(224): n is a, c, g, or t
  misc_feature (229)..(229): n is a, c, g, or t
  misc_feature (237)..(237): n is a, c, g, or t
  misc_feature (267)..(267): n is a, c, g, or t
  misc_feature (368)..(368): n is a, c, g, or t
  misc_feature (427)..(427): n is a, c, g, or t
atccagccgctggagctgcgagggaccctggacccctcccacgccgaggtttatgcagagcctgaggccagaaaaccnagggactttctgccccaanaagctgaggcacctccnacncccatctgaacaanagggggatctggaanaagccanacagcagcncatcaggacacaaaagaaanaagcagcacaaagcaattggctgacagccaattcccccttcnttcanaaggaaanaaggaagaagcaaaccccccccaaccaaanaagacacacaacaccgagcaggaagcaaagacccccccgcaccggcgagccagcaccccacagccccagaccccacggggccaccagccaggccgccagancacagtgcctaccacacaaacccagcaaccccggccgggccaaacagcctcccccaacncacccacccagaaacctacacctgccccagatgattggtcttca

SEQ ID NO: 521200 - DNA, 547 bp, Homo sapiens
accgggagacattatgagcttactgactctcaggggttgggagggttcctcaaatcatcttctaggacgccaggtatcttaagaaaactctggtatccataatcttccttgtgtaagtgacctctttacattctctaagaaagctaactatagttcttacccaaagatcccatagtcgataggtctagtatatagatatagcagacctaggacctgtttttgtcccgctgcgataagcccaacttacatttccatcacaggaggggagttcagaaaaagatctgaatcttacgactgtaacccattgttgacagagaattcattcccaagggtcaagtcgactacagggcattatcaatcgaagctgctttcagaaaaatggcgctccctaacttaaggagaatggattaatcgtaataaatcgccatgaacattaatgcttttataaactctattgaacgatcgaggtagtggctcaggttgccactccagagataaagcaactccttagtagctgagaggactgacagtgaatgcatactctaga

SEQ ID NO: 521201 - DNA, 137 bp, Homo sapiens
agagcatgtagattagctgcactggcttgagtttaatcttctgagaggctcttatcttcttgtccaattgcaatgcactatacaggtcgtgtctgggatgtccgtcgctttgcccccaaagagagatgtgtaaagat

SEQ ID NO: 521202 - DNA, 387 bp, Homo sapiens
cagaatacgcaaaatttccaatgagacaaatataagacaccaaagtcaatacgattgacagatcttccgaatgttgtatattccatgacatgacaaggtagaggtacacactcaatggaagaattaggggacagaagtaaagccttgtatatatacagtcaaagaaatcacccgtgcatagatatacatgtacatgcatcaagactgatttcacataaataaacaaaaaacaaaaaaagattaaacaaatacaatctctcacactctctctctctctctctctctctctctctctctctctctctctctctctctctctctctctctctctctctctctctctctctctctctctctctctctctctctctctctctctctctctct

SEQ ID NO: 521203 - DNA, 167 bp, Homo sapiens
gatcatcccagacatcaagaggccccaatgggttaatacttgtttctcgcagttctggaggggcagccatgaaaactccaagcgccccgttggcataagactggagatgccccagtactctccactgtccagaacactggtagagatctggactcatggtggagggg

SEQ ID NO: 521204 - DNA, 741 bp, Homo sapiens
  misc_feature (139)..(139): n is a, c, g, or t
gattgagaaatgcctgttactacaaggtctatgtgactgatgaacgagtatccaatgagcgatgctagtctgctatgtcgtagtcagatggcgcgtgctataagtatgcctcatagggctagtacatgataggggtagnctatgtgtttcgtcagtgggttagaactgagtgtgaggcgtatgatatcatagctgcctagctctaagagtactgcggcaagtactattgtcacagcgctggcggcttcgtcatgggctttagcgagtcataagtggagtccgtatagaggtatcttcactataacagctactgtgtaagctagtcatattcagatgctggctcaggagtttgatagttcctggtcagtgagagtgagtagtaggatgcttagtcagcctagggtgttgtgagtgtactgtagtgcgatgagtagaggtaggcagcctattagggtctagcatagccagtctgtgcctgcgttcaggcgttctggctggtagcctcatcgggtgatgatagccaaggtgcggataagtgtggtttccaagatgacatggcatatgattagttctgtgactgtcaatgttatacttatggagctctgtagggagtttagtatacataggtagagagctcttcgtgatagtggtccactggatcagtggcgttggcttgccatgactgtaagcggttggagtccggtagttagcatcaggagcctggatgttatagggttgaag

SEQ ID NO: 521205 - DNA, 152 bp, Homo sapiens
tacagcttggcaagatcctcaccaagacaggggagctgcccaggcagcaccacccaccctaaggagacagaggaggagctgacggagcagcaggaggacttactggggagggagccctgaccatgccccggaagcttccacagagagtaagt

SEQ ID NO: 521206 - DNA, 864 bp, Homo sapiens
ggtggctcgtgcgttggcagtatgggggttgtaatggcaccgactgtaatgactgatggggagcagcggatcccaacggcttgcgctgcctttgcgcagcagccggcgggcggcacgtcgtcggcctggctgtggtaggagagtgctgtccccagtgcatttggtgtgacgcggggcgttgcacattggcaagtttcttggtgtctttgcttgagaactgtacctagctcgtgtgcagggggcaactcggctcgcggtccctgaggccctgtctgattctaaaacatacttgagtagtaacacgttcatctgccggtgttatcctttgagtaaagaagcggggtttcgccaatgttgtccaggctggtctctagtcctgggctcaagcagtccatcctgcctcaggtctcccaaagtgctgtcacttacagggacactgaactctggaagcccagccaggactaatgcagccttcacagagattctgcactaatctgagtgaaggtctcaaggcctggaatctccgccctcatggagacgaagcttatgtatggctgtcatgcttaagacagcgattccatgccaattgaccttcaggctggagaggtggagaggccatgactagttctccttccttgcatatggaattgtgctgacacaatatcttccgcctggtgctgggcatatcctaagaacttacaatttcactgtattatcctgtgttgagcagcctgtcacctatattgggggaaacatgcctgacaatagggggcacttcaggtagatcagctctatttccgatatggtctaatatcaaggattggcaagatcaaatatccaataagcattcgacgacacaaagaa

SEQ ID NO: 521207 - DNA, 140 bp, Homo sapiens
ccagtcttcgtcccatcagcggattctatacttgacgcttgtgggtgatcaaaacagcagttctgatgggagcaagatgcgcccatcaggctggcaagaaagaattaagcggatttatacatagtaagagagggagaaga

SEQ ID NO: 521208 - DNA, 625 bp, Homo sapiens
acgagtttgtcaaaaatcatccggcccccccctgcaggtgagcccgggcaggcttttttccttttggtaaaccaacacagcatggtaagtgtgtccccgcccctcccggacatttacgagcaggagaaaaacgagggcggcttcctttatatggtttacgcctcccaggaaaccttcggctttttaaccaacagtaggggggctcggcctgggagttggggggccccggtcaggccctgcccaaaaagctcttggttccttaattaaactgcctctaccgtggtggggtgggcaggcatttgcccccctagtcaaagggcccccacccccctattttgcccctgggtggatcttgggccggtcgtgttagggttgtccctttgggtgctggctggtgggatgggggagggtggggaacagctcccagccccccttctgtgtggtttattttttttttagggccccggcccatttgcccctcccccccccgagggtttgccccccgcctgggcctgccccccccttaaaaaatggcccctggctcccccccccccggtttccccgtggtgtttggatttgtggtcattgtccctctccaaaataaaaattgttccggcctgcctta

SEQ ID NO: 521209 - DNA, 130 bp, Homo sapiens
gggacaaagattctccacttggccaaactttagccaagctcctcaaccttcttccaggcccaatctgggcacttccttgtaaaatctagttttgggcaaggaggtttattacgggtacgtttaggaagga

SEQ ID NO: 521210 - DNA, 489 bp, Homo sapiens
agcggattgacccggtgtcgccgcagaaccgaggtcgccgagtgatgatgtgtgaagtcgcccgcctgtcacctggtcacgcccgggcggttgctggcagtgggagcagcggcagcagcttcggctgctgcatttcaggctgccgctgcattaggggcttcctgaggaagcgcgggcggacgacgagaggatgaccgaactcacgtccagtcatgactagtccacaagtactgtataatcactatgagagtgctcgtatgctagcggatgtcatttgacgtcatcacgagaaaatctgtctaaaaagaacaatatccatgtgaccaaatccatttcattattggaatggcttgatggctttccgtttactctgattcataccaaagctgtccttctccaccaaagcaacgaaacggatcctgcatgagtcaatcccagaatgcaattttttacatcaccaagcaggtgacgacaaaccgtcatgaatag

SEQ ID NO: 521211 - DNA, 1042 bp, Homo sapiens
  misc_feature (977)..(977): n is a, c, g, or t
  misc_feature (1038)..(1038): n is a, c, g, or t
ctttccttcattataacgttatacaactgatgttgtgctcgagtcattgtatcttcagtaggaaccaaacaatcatgatctcatgaaaaactccccaaactgcaggcacaagtgcgcattggtgggaaaggaactgctccgagaaagaagaatgtggttcatataacacccacagcatattaccccccacccactctcctcttaaacacaattacggctcaaccaatcattttcggcctttgaaccgcgcaccatcgccgcacacctttgttctctgtccccctttctttttctctactctactccgtttccttcacatacacataccttccttctaactacccctctcccctccctctactaaacttcactccactcgcctccgcgttgacttctactcctagctattttctctctctgtctcccccctttccctcgaccctttcttctcccccttctcccccctctcactcctctcttctcttccacgccacacctgcatcacctcgataatctactcactattactcgatctcgccctgtcgctatgcgtctgtgttacatctctctatacgtcttctcgtctaactgacacacttattaatctactaactctcctcgcctctcattacttctatgtcctataatctttattttgtccctcacccttctctatctatatttgtactacgatcgatcttcgagtcgacgaggctcgtccaacgcatccgatagccaacacaacatacaccacatcgcgttcaacacgataactatttcaccaacacaacgccctgccctctcttccgtcacgtcaccctctctcgtaccctacgctctaccgatacctcccgcccccgactctctgctagtccctcgtcttctgcgcgtcgcctccctatcaccacaatctcgcgcgcgcactatcgtgaccctccttgtgtgttttcgcgctacgaccgctactatcgcgctantccgcatcgctactgtactctactccatccctcgacctgactatatcgtctacatgcttangcct

SEQ ID NO: 521212 - DNA, 1289 bp, Homo sapiens
tggttgttaaaaaccaaggcatgcttgtggataactctgtaacaaactattgggaatttgttaaagcttgcctcccgtgttcccactctctgtggaaagtataactcgtggaacatctctttagtgttttgcgtttgtgttttttccccctccttctattatattgggggggaaggtgtgtggtggggtaggatttaaagtctcttgtggttttttaaattctcattataacccagggtggtttacccctttaggggagaggagagacggattgtgattctccacattctcacattctccataaaatctggtttttaaaaacactatgtgtttccccattcgtggtggcccttatggagaaggggagttattggaaaaaggcgccttcattttaaataactaatactctccttttttgagaagagttgtgccttttttcttctctcaccccccttttaggttacaatctccaggttatttgtggtgtagaaccctccttggacactgtgggtgtggggacgccctatttttggcgcctctcctcttctttttctctaaagagcagcgcattaaatgtggtgagccctgtgtggtctttctacggggcgactttttgtgcgtgcgccatttgggcgagaatattttgggggagaaacgtaaactccctctaaactctatcttcacaacccgtgcgttcaattcggcagcgcacacgattgtgtttgggccgctctatttgaaaattgtggcgccccaacttgacgccgtcgcgttgctgtgtgcccttctcaaccgacattttttgtggtcccccttttttccacacacacaaacatccacacaaataccacagatcgaacaaacaggagggggggcgcgcccacaaaagaaatacaccccctgcgggggggggcccccacataaaaaggtacacccccagtctctttgcacaacggggggcccccaagagggcgctgctacaacaaacgcgaggacacgcgggcggtcgtaaaaacccgcctgagtcggggaaaccatgcgcacgtgggtcgcatctggaaagagcgccccacctgggtgggtgcggacacaagtcgggcgaccacccacgagaaataagccggcggaaacaacagaggcgatgtggtgacacacgcgcacttcttgcggaagtgagaataaacaagcgagccaagccagaacgacacgcgtgacggactaaggaagaagagcgcacacgaccgcggcgacgagcggagactacacaatcagaaagagagaggggagtg

SEQ ID NO: 521213 - DNA, 818 bp, Homo sapiens
  misc_feature (20)..(20): n is a, c, g, or t
  misc_feature (23)..(23): n is a, c, g, or t
  misc_feature (25)..(26): n is a, c, g, or t
  misc_feature (48)..(48): n is a, c, g, or t
ataattgctccgtttaaccnacncnntttttttttttgccaattcatnctggcagtttctatcattaatctttaaacccactgattctttccttggccatgtctgatttacttgtttgttcaatcgaggctcacctttattatcctggagctctgttagtgtagtggtgatagggaatgaagatcttcaccggaattggcctcttgatcttggactttccagcctccagaactgtaagccaaataaacatatcgcgtataaataatccaatctgtggaattctgttataacagcaaaaagtgaactgagacttttttattctttatgactctgcacaaagttcccacaacccaaaataatctttccagatgtggtctctcaacttcagagtcctcaccatatataactgattacagaatgagactttgaactttaaactttttacttcgttctgtaacgtgttcagacttgtgggcattgtgatacatgagtttgataagcaccgagttttaattggctaagggctgaagtgccctacttaaatatttgttccttcgatatggctggtgtttgtaatctgaaatttgcatattttgaatgcaatgtatttcatgtattcgttcttaaataacctctctacccgtccctctttttttatcacgcagtgtctgtagcgttcccggtaagtggtggcaattcaaaacatcataattattatcattaataatacactatttttcggtgatgcccaacatttatttatcggacgactcacaaagtttcagttgtatgaagatttatggaagttagtatattta

SEQ ID NO: 521214 - DNA, 476 bp, Homo sapiens
  misc_feature (19)..(19): n is a, c, g, or t
  misc_feature (43)..(43): n is a, c, g, or t
  misc_feature (190)..(190): n is a, c, g, or t
taatgtaatagaaaaaatncccttttccaccgtaaatccacanttataaaactgaatttccttggcctcccaaatatgaatgaataagttttttaaaaagagcaagaaagcaagtatgctcccctatatgtcatccatatacattttggaaacttccagagtcttaaaaatcattctgacccaggtgtgngtgtcacgccctgtaatccaatcacttctgaaggccaaagctggtagactgcttgagtcccaggagtttaagaccggcctggtcaacatggcaagaacccatctctacaaaaaaaatgtataaattagctgggcgtggtggcatgttatctgtagttccagctgcgtgggaggctgaggtgggaggaatacctgagcctggagaggtcgggacctcagtgagccgtgactgcaccactgcactccagcctgggtggcagagtgagaccctgtctcagaaaaaaaaa

SEQ ID NO: 521215 - DNA, 1061 bp, Homo sapiens
ttgcatatgctttggttcgtcggttactttccgccttttctgtctcgccttgttgtgtccctgtagttctgtgtgtaccttttgtatgtctctatttacttttctatttctctttttttatttttattggtttttctcttattatgtgattctcctttttgtgccatcttttggtgtttccatgtttaaaagaagtctctcagatacttctggtcttcgttacccctttcgttcttctatgtgcttgtcatccctttgtcgtttgactcctctgcctgcttcgtctggtctttgttctttctatttcgactctactttgtatctttgtccaggtttcacgttttctgttcaattgtttggcgggtctcttgctttcacgtgtcacaatgtagccggatgttacgtgcattgctctctctctttctactggctcacaggaacttagcattagctgcttaagcagatgcctgttctttgcatctcttcatatgttgagagttacactttcacgcttgtaatttgttggttaagaatacgttcgctacatgagaggagaatagttaatgttctacttgattttggttagtagtgtaatatggatacagttaaagctgtgttgttagaagtaataggtagatggtagatatccgttagattatagtcttgaggttgcatgttgatagccagtgtttgttaacttactcttgatgttccttgcttcaggttctagggccctggatacgcgctgtcgcggggtaggtgcactcaagttcaacgaatttatggtgtattgaaagtcatctgttgtcagccaagaatgagcgctcactcccgtgttatgcagaacacataagcctgtactgatgaggagggagagatagcagagaggccagcctgttcttactttgctcttctactgtgtacaagttcacttgttgtcttgaacactgtcctcaaatatcctgctttttgttttggatagtaccttgtctgtataagaagctggcctttcacatagagaggccctggagtctaaaattatgagcacaattaatttattt

SEQ ID NO: 521216 - DNA, 260 bp, Homo sapiens
gattgatggctcgtgtgtccctaaaatgtataaaaccaagctgtgcccctaccaccttgggcacaggtggtcaggactcgcctgagggttgtcacagacgtgcatccgcagccttggaaaaatttcactttcctaattacctgagacctttctctagatattcggggttcaaatagggatgaataagaggagcagagtggcacactgcagtcttggctaggaggctctggagctctctaagcgggtctgcctagctcagt

SEQ ID NO: 521217 - DNA, 704 bp, Homo sapiens
gtctctagaaggttctgcggtacccccagctctgggtacccggctctgcatcgcgtcgcatgatgggccatcgtccagtgctcgtgctcagccagaacacaaagcgtgaatccggaagaaaagttcaatctggaaacatcaatgctgacaagactattgcagatatcatccgaacatgtatgggacccaagtccatgatgaagatgctttggacccaatgggaggcatagtgatgaccaattgataggcaattgccattcttcgacgagattcaatgtccagcatccaagcggccaagatccatgatctgaaattacgccctgcgacccagagatgaagaggtaaggagatgggaccacatcaagtaataatctcttgcaggggaaatgctagtctgtagcggatgcactttcctgtagcagcaatgatgcagccaacagtggtgatcatggctataccgcacagggcgatgggatgatatgatcagcacgctaaagaaaataagtataccagtctgaaatcatgtgagagtgatatgatgcctgaacatcatcaaaatgctctattactaccaaaagccatctagacggtggataatctgtggcttgcaaagattggcgctggatgctgtccaatgatggtacaggttagaggagaatggtcggaaagagatcgtaataaacagatatggaagagtggaaaag

SEQ ID NO: 521218 - DNA, 178 bp, Homo sapiens
aaacttagaaaaaactattctaaaaatcatatggaaccaaagaacagcccaagtagccaaagcaatcctaagcaaaagaacaaagccagaggcgtcacactacccaaattcaactatactgtcaggctacaataaggaacagcatggcactcatacaaagcagacacgtgactaatgg

SEQ ID NO: 521219 - DNA, 198 bp, Homo sapiens
gtgatctagaggatccctgcgcacataaggtatgccagataaggcttgtttattttaatggctgatctatgtactcacagaggccagtatgtacagcacaaagtgggaggtattatttctatggtctcttcctaccttggatcaatgtcttgactgatctcctaccttcgttggcctgggatggcgctcattcacggg

SEQ ID NO: 521220 - DNA, 188 bp, Homo sapiens
ccctgggttcccttttctaaaaaccccccttccccccccccccgaggggaacccagggggcaaggggggcccttgggacccctacccccggggcttgggttttggcctttttttgggcccccctcccccccccaaggggccccggggatggggggggggggatggggaaataaccccttccgggccca

SEQ ID NO: 521221 - DNA, 524 bp, Homo sapiens
ctggaaccctctgggcagcctagctgaatgcaggatccccctcgccccagagaactccttttccaggagaccaaggtgggtcccagaatctgcaagttcagtaatagccccaggtgattctcatgcaggcaggtgagacctgcactttgagatccaggtgctactcgaagccctgcgggggctttgttcactgtacccaaagcatcgtgaaggttccttgaaggtacatccagggcatctgtcctggatgcccccgtgacccggcctggcactccaccttcacaggccagcacaggagccacagagctcccgggaggagaaaaaaagacctgccgctgggagaagaaaaaaaagacctttcccgggtctgcaggactcacaggtaaatccattgagagacttacccggccagccttgtacttgagaccgctgctgttctcctcctttcctgcccgcgtgacgctggaggccctgccagggggcgttccaaaacgctcagcctcccggatgcctgtggagctgaa

SEQ ID NO: 521222 - DNA, 373 bp, Homo sapiens
taggcagtttagaatatgtaaagcatttatgccactgaatgttttttagaattatagcatctttagtgaatgactgtacctacgctgagccattttatcatgctataaataccaaaaaacactagaaattaaagaacaagtttatttcatttttgtatataaattctattccttttatttttaacttggataaagagctttgtttgtttgtttcttaatcacttctcttttctttgtagtgagtaaagaggagatatcaatttgtgtgtagatattagcattcttatataacagactcagccctagacacataaaataccagcacctactagctggtgttgaaatgtgtggcaaagagaataatgattttgat

SEQ ID NO: 521223 - DNA, 408 bp, Homo sapiens
  misc_feature (21)..(21): n is a, c, g, or t
  misc_feature (27)..(27): n is a, c, g, or t
  misc_feature (110)..(110): n is a, c, g, or t
  misc_feature (137)..(137): n is a, c, g, or t
  misc_feature (385)..(385): n is a, c, g, or t
  misc_feature (392)..(394): n is a, c, g, or t
cctcctaaatatgactgtggnaaaagnaaaatgagttatatttaataacatcttttgacatctcctagtagtaacagtaggtcatccttattcataaacccaaaattttncccaaatttcagccccaggcgcagtgnctcatgccctgtaatccccagaactttgggaggccgaggcgggcggatcaccctgaggtcaggagttagagactagcctcgccaacatggcaaaatcccatctctagtaaaaatacaaaaattagccaggcgtgggggcccgtgcctgtaatcctagccacttgggaggctgagacaggagaatcgcttgaacccagcgggcagaggttgcagtgagccgagatcgcgccattgcactccagcctggntgacaannnaaagactttgtctc

SEQ ID NO: 521224 - DNA, 639 bp, Homo sapiens
  misc_feature (346)..(346): n is a, c, g, or t
  misc_feature (356)..(356): n is a, c, g, or t
  misc_feature (362)..(362): n is a, c, g, or t
  misc_feature (366)..(366): n is a, c, g, or t
  misc_feature (423)..(423): n is a, c, g, or t
gtagaccggatatgggctacttgtgactagacttttaaacttgctctttcaagcagaagcctggtttctgggagaacactgcacagcgatttctttcccaggatttacacaactttaaagggaagataaatgaacatcagatttctaggtatagaactatgttattgaaaggaaaaggaaaactggtgttgtttcttagactcatgaacactacccacacacttactgaaggcaactgacaacaatacaacttgacacacattaaagatcacgatgacgacactacggaataatacctattgccacattctgcacttactttacgacacacatacgcttattgtanatttgtaaancatttnctgnctgggcaatagtgactccgtttaataaaagcttccgtagtgcatggtatggattaantgcataaaatatcttagactcgatgctgtataaaatattatgggaaacaaaacgagaatatgttatttggcctctaaacttttatgggaagttttattgtggcaggaaaaaaaaatggaatctgtggtcaacatttaaacccaaagtaaaaggggaaaaaccaaagttatgtgttggcatgactaagccattctgttatctctgtaaatactgtga

SEQ ID NO: 521225 - DNA, 615 bp, Homo sapiens
  misc_feature (322)..(322): n is a, c, g, or t
  misc_feature (332)..(332): n is a, c, g, or t
  misc_feature (338)..(338): n is a, c, g, or t
  misc_feature (342)..(342): n is a, c, g, or t
  misc_feature (399)..(399): n is a, c, g, or t
gtagaccggatatgggctacttgtgactagacttttaaacttgctctttcaagcagaagcctggtttctgggagaacactgcacagcgatttctttcccaggatttacacaactttaaagggaagataaatgaacatcagatttctaggtatagaactatgttattgaaaggaaaaggaaaactggtgttgtttcttagactcatgaaataaaaaattatgaaggcaatgaaaaataaattggaaattaaagtccgatgggaattgggatatatatcatttggacattttgtgttttatagagacatatgtgttagttgtanatttgtaaancatttnctgnctgggcaatagtgactccgtttaataaaagcttccgtagtgcatggtatggattaantgcataaaatatcttagactcgatgctgtataaaatattatgggaaacaaaacgagaatatgttatttggcctctaaacttttatgggaagttttattgtggcaggaaaaaaaaatggaatctgtggtcaacatttaaacccaaagtaaaaggggaaaaaccaaagttatgtgttggcatgactaagccattctgttatctctgtaaatactgtga

SEQ ID NO: 521226 - DNA, 1455 bp, Homo sapiens
  misc_feature (373)..(373): n is a, c, g, or t
acggtgtggttgatattttggctctttggctcacgttctggtgccctggccgacgacttttgttgttctcgtggcgcgaacggttttttactgtgtatcagttgcgcccgggggtgttgtgattctgccggcgtcagcttgttgttttcttggggggtcttctactacaggcgggaagtgggttatttgtggtgatcgtctcacccttggtcgggggtcgctcccctctgtgtgctgcccccttctttcgtcttggttgtttcgtctccctagggggcatactgtcctctgtgtccccatgaatgtgtgtgttgtcctcctccccgaaggtggttgttcctcccctcatggcccttcgggtgggcccccgccnagtaagtgtactcgcggggggcctctttgttgtatcattttgtttggggccgctatgggagcctcccctcctgggggtttttcttctctggggagccccctttgttgtcgcgaggagctcagtgctgatattcgtttctccccggtggtcaccctccttggtggcgcacccacaggtgttttgcccccgcccccccctctgagggggcctttttcagctctccccccgcgggtggtggtgtaggcccacgccctgttgtcgccccacccccccgtgtgtcaaatgaactcgcgctctctcgtgggttctccacgaactacgacgctctcttggtgcactcacgggtgctcctctgggctcgttgtgaacgcgcgtgtctattgtcgcgccctctgagaacttcgtggtgtgacccgtgtgtagggtgtggttgtcgtcgagatatagaaaagtgggggtgttgttccctctctgggagggttccgcttgtctttatattatcccgcgcgttttcgtttacgacgcgcgcacacacttgcgcaccgctctctggtgtgtgcccccccgcagcacgcgctcttcgtgtggagaccgcctcgcctccccgacgtgggggaggggccctccctcattgtgtctctctcgctcacactcccggcccctcttgtaatattcacgaggccccacttagtcggcagctcaccccaacgggtgtcccctcgcgcgtctcgccgtcgtgtctgcccactcgagaggtgtttctcggtgtccctctgccctcttgtggtgtaacacctgcgagtgtgtggcccctcatgagttgttacaccgatccttctgtggtatagcatcttgttttatagacgccttcttttttcataatgggcgctgtgcactaagcgtgtcctcggcccgctgcacccctctcgcggggcctctttggtggggtcccccctctctgctttcttcggggtcccctgccgctttgtttttggtaaaagattttctgtggttttttttgaaaccccatctgtcctctgtagatattttttataaaaaatcccgggtgttccccatgaaaa

SEQ ID NO: 521227 - DNA, 1382 bp, Homo sapiens
ggtgcggtggctcaagcctgtaatcccagcactttgggaggccgaggcaggcagatcacgaggtcaggagatccagaccatcctggctaacacggtgaaaccccgtctctactaaaaatacaaaaaaattggtcgggcgtggtggcggacgcctgtgttcacagctactcgggaggttgaggcaggagaatggggtgaacccgggaggaggagcttgcagtgagccgaggtcgcgccactgcactccagcctgggtgacagagccagactccatctcaaagaaaaaaaaaaaatattaagaggttctgctgccagatgtgggttctgtgggtcgggtgtgggttctgtgggtcgggtgtgggttctgcagaccaggtgcggattctgtgtaggttctgcaggcccagtgtagaggctcacacctgtaatcccagtactttgagacgctgaggtgggaggatcacttgagcccaggagttcaaaaccagcctgggcaatatagtgagaccgtatcactacaaaaaagtttttttagttcaccgagcatggtggcacatgcctgtagtcccacctactcgagaagctgagatagggtcacctgagcctggtaggctgaggctgcagtgagccaagatcgcactactgcactccagcctgggtgacagagtaagaccctgtctcaacaaaaaaataacaggttctgttgctgctgagctttcgtcaggaagataagactttcccaacagtccgaagcctaggatatgagggctgaggaggactcaaaccgttgcagtcagagagacacctattttggtgaatattttttgaaatagttaagtggcctccagtacaaactcccagttcccagaaaagacttaaaactagtatctggagattccaagtcctttaaaaggattttagctgatctgcaggcatctggatgttagcctggggttttggctggattccacctcgctcagtgatgatagtctgtttccctggaacattcctgtggttttagtagtaatgagatgtgtgcaccactccagtgggaactgaagctcttagtagttacattgtaattaaaaaagaattataaaacaagaaatcagcaagcctgcttacctccagagacacaccgttccacttacagtatctagcttcctcgactcctttgttaaaatcgtggagtatgaaccgtgaccagagaagtaaatatggagccgttttattgagcagtttcctccagggatgacggctgtcagtgtgtttcctgccagttttccagtccttactctctgcccttcattctgtactcttggcagagtcagtaaccaaccactaataaaatcaaagttgtagtaaagactttataacacaaa

SEQ ID NO: 521228 - DNA, 473 bp, Homo sapiens
  misc_feature (376)..(376): n is a, c, g, or t
tgcggcccaggcccgatttcccgcttccattcgaaccgacaaacgccaactatcaaccggttttaacgttaagttggaggcaattccagcgtttttttgtcgatattgctgcaaaccaccgggctaatcatcgagcgggcgttaggttcaggtaatccagatccatttccagaatcggttgccctgcgcttacctgcgcaccctcttccaccagacgtttaaagcctttaccttccagcgctacggtgtcgatacccatatggacgacgatctccgagcctttttcggtttccaggcagaacggtattgaatacggcgatatgcagctggattgctgaaagcctatttctcttgcttaaaggtggccttaaacctnaccaacgaagaactggcgcagacctttaccgagtggaataaacggtgaaactgagcagttacctgattggacattaacaaaagatatttttaacaaa

SEQ ID NO: 521229 - DNA, 170 bp, Homo sapiens
aagagtttatacaagtagacccagctaccatgaaagtcgctgaacacatctgatgggtcagattgtgtcctgatagatcccaggtgatttacctgtgagccacggatgggtaatcagatgagctggtttcccttagcactgtgcatacacacatcctgagacagcattca

SEQ ID NO: 521230 - DNA, 523 bp, Homo sapiens
acttccttacaatgtatatgtatcagacaataacagtatgattggaagatgccagaagagcaagggctcctcagggtgttgcacagaactgtacaacgtgtcctcaccactataccccagcccttacaggataaactgaggccaagatggaggaagcaatgcctccctgaagtcttagatgtcacagaagggacaccgaggcttggggaaagcagtgtggcaggtggacgtggggctctgccagctaggaggagttctgcttgtgtggcccaacagccagcttccagtggagcaagcagagagaaaaactgtgctggtgggggctggcaccttgagaaccctgctccaagaggagccagatagcaaaggccaataccgcctgactcgcttgcggtgggaagcaagcaatcccagagccttgaaatatgcttggtgtatctgcctcaaatggggttttccttgctgggaagaggcttcagtatgaccatgctgatatgtgataaagaacaatgtgaatttcact

SEQ ID NO: 521231 - DNA, 146 bp, Homo sapiens
  misc_feature (45)..(45): n is a, c, g, or t
gatgagctattaaacgcttgaagccagctacacctcagaccgatnaacgcaaatctccttggggctgaaacccaagcatcgtagtttaaagctcctgaggtcgtccaatgtgcggcaaagtcgagaactactggcctagggatagc

SEQ ID NO: 521232 - DNA, 929 bp, Homo sapiens
ggccgcagacgcggggacgctggctcgctccctccctccctccctccgacgcgatcaaatgatgccatagggtgaaaatttcgctcacacagtttgtgtggccgtaaagaaactcctcagtggtcatgtgactccagatacttctggggctggttgattgcagctgtttaataaggtggattatgatcgcatcagggatgtagcgcccgtgagcagggtcggcatccagacgtaggtggctgcaacgtgtggggccatgagtgcagcatactccagtggtctcagggagaagcgtggcaatgcacaggtaattagctagatccagcgcgttcccagatcggatgggacccattcgtgtggagccacaattagcaatagcaactatcacgggcgaactacgagccgtcacagccgcatctcgtatggtaatcaattgatcgcacttgggactgtctcgcaatcactagtggcaatagcactgcgagagagtgagtgttggtgtggcgatctagacgctagagtgcatttgcctagggaagcatgagcggacgctagaaacacacgtattaaatactactatgggtctgcagtacggcctttgtgaaacggaaccaagctaccttgtcacttatacgtcctgggaacagcttagaagagttacctaatatgacaggtagagtgagtaacctggtggttcgtgtatttttccacgagttcatgaacagtgccattccaattagtgggagagaatctgtgttgcgagtttgccaaaaagggatttcgaccttaccattaattcattactgagatacaattccagagtaccagcttcactgaaggtcaatgccccatgatttcactggcagacccttgtttcagcacagatgcgcagcaggtgccgagttcacctcccttttgcggaacagcta

SEQ ID NO: 521233 - DNA, 322 bp, Homo sapiens
  misc_feature (215)..(215): n is a, c, g, or t
atgaatgaataaatcaccgagtaaatgaatgaatggagtggatgaatagaatggaatgagtgattggaatcatctgagtggaatgaacggaatgtaaagaatggaattgaagggactgaaatggaatggaagtgaatggaactgaatggaacggaatggaatggactggaataaacccgagtagaatgcaatggaagggaatggattcgaatgtnatggaatggcatagaatggaatcaacacgagtagaatggcatggaatggcatggattggagtggaatggaatccaccccagtgcaatgtactgtacaggactggaat

SEQ ID NO: 521234 - DNA, 676 bp, Homo sapiens
gacctttctgatggttgctatgactaggccattcctctgagtaactctcaacggccttatgtaggcccttcttttccctgaacgactggttggtacttacctctcatagcacattctgggataagatccccactgtttcccctgggaggcttcccactatgctcacaccaatcctgagaatgatggcgcctaatgatcggagcttctattgctgaccattctgtaaatgttcacttgtttacccaccgcatgcttgaaaggagctcattgaccaatgcttaccttggccccaaaggagtggtttgtggagctcacttaggcagggcctctggctggggccagggttatgagataggcctgtatgaaatatgtcctgttctgggggtctgtctcttttcttctcttcaaaaactttgtgtcagagagtcccttctgagtcacataaatacctcactatcctggaaaacagggcctggatggtgactggggtcattgcctttgtggacaggatggaatgtggtgtggtctgaagagcaggttgggggtgtggaaattattattttgttatatattatttgtggtttattttgaatattttttttgtttatgtatatattatattgttatattatttattgatgtttatatttatatttgattaatgtattattttttt

SEQ ID NO: 521235 - DNA, 217 bp, Homo sapiens
cctggtgactgtttagctctgtttatccagtgctctgaacatatctagccaaggaactaattttcccaagggcgcaaggagccggctctttgcgtggcgcgtggtgtggctcctggcgtggctcgttgggtggctcgtcggggttagtgcagactctcctccacgtctgggctgcagcctccagtggctgcttgggcacctcctcatcctcaaagag

SEQ ID NO: 521236 - DNA, 396 bp, Homo sapiens
atgatacaattgagccggtacctgaacattcgtgtcactcatttctactctgcccgtctgtctacatctctgataacccggtttctaactctgctctaggtaactgtccctctctgaaattagacttctcaagtctctgagtgacgctcctctctctctgcctattgcatttgtctctatcagtctgtgtgtatttgtcttcaaacacctctcttggattctgcctttccgtctctcccccagttatccacctcatttttaatacatccttgctgtttacttttccttttaatatttataaacaagcagagttggttttattaaccctattttaaagacaagaaaacagaaacaggacgactggcatacaatttgagaaatcaggatgtaaatcca

SEQ ID NO: 521237 - DNA, 91 bp, Homo sapiens
gctcgtctttcctcgggggtgtgacagatctatcagtttggaggttctttcggcgcacctgcctccggcgttgcgccgggcgcgtcctccc

SEQ ID NO: 521238 - DNA, 301 bp, Homo sapiens
agacatcatcgagcagagctgtcgagcacgatgttctgtggcctgcagatgaccggcgaaggccatttctgacaacgctggtcaagctaaccaccgtcggaacggtcgtggtaagccaacaggtggccgtcggcgtacaggccctggatcaccggcgaagaaggctttgaggtcttcgagcgtcaatcgaacgtccggggcctgcttgcccagcttgccgatgggtatgcgccaggatcgaggcgcccatgcggttctggccacggcccaggtcgatcaggatcaggtgcgtccgtagcgg

SEQ ID NO: 521239 - DNA, 312 bp, Homo sapiens
tgagtcgtgatattatagtgaatgagattctctaaacaaaattgtggcacttatctttttctttcgggctgtgccctctccaaaatctcgagactcattatatggggaatccaatttccagggcatatagttattgaataacttcaataagaatctgttctccttgtaacaggacacaattgggaaacactggttctattaccaaggtttggactggaatgtcctgtttgaggatgatgcacatagaatcagctatgaccagatggctttcaggtttgattttgtggagccattgcttacaaagagctcttg

SEQ ID NO: 521240 - DNA, 100 bp, Homo sapiens
acactattatactatgccaaatggatcctgttgggaaagaataaaattagcttgagcaacctggctaagatagaggggctctgggagactttgaatgact

SEQ ID NO: 521241 - DNA, 705 bp, Homo sapiens
tggacaatctacaaacacttttataagcaaagggagtaagtgcgctggggaaaaagaggggctcctccttcccctcaagggcatcacggccccttcccagggggcaggccagcagggaacaagaggaccccggggttgcaagcaggcgggaactcagacaaaaggtgatccggggtcggggaagcatggaccggccagacatggagctcctcaatatcatccagagccgccgtggaacggggcggggtgtgaagccacgagatacacagcgcgtgctcgtgcctcagagacaccggacacttgggcccccgtgagaccagttcagggagcgggggcaaatactcacatcggggggtctcgtgagtcctagctgtctgccccttgggtctcctagaagagagtccttggacatctccatatagccggagggcttcatgtcacatcttcgtttctccaccatatccaccattctcagacgtgccagagcaggggaagggcgcaggataggccacgcgagggcccgggcagacgtatggggggcatcctaacaagcccaagactctcgcctaatctccacgtatgctgctgtgatgtagtcagccagagatctggcccaagggcgagtactcgccgaacatggctatgtaacgcctaaagagcttcatgtccagagtccaacgggaggggctgccgctcggcgggccc

SEQ ID NO: 521242 - DNA, 134 bp, Homo sapiens
ctcgatgacggtcctctctgtggccgcctctgtgctgtcccactccgtctgtcctcctctgtgcgtgtcccactcctctgtacgtgtcccagctcctctgtgcctcctctgtgctgtcccctcctctgtgctgt

SEQ ID NO: 521243 - DNA, 200 bp, Homo sapiens
tataattcgagctcttacccggtccccatcacagtttgctggtcacagcgaaaggtgtatgccctggtgggctcctgcttgatgcccaagtcaggtacttctcgcggggaagctcctgtgacccctgcagccatgctgaaccagcacgtactttgtgctgaagccgcgtgcgaggcacgtgagggtcaccagctcgttca

SEQ ID NO: 521244 - DNA, 198 bp, Homo sapiens
  misc_feature (164)..(164): n is a, c, g, or t
tcattgctcctacaacaaagccttggctgcacacgcatgtggatcagatgaatggacattttagtatttcccctgtctcttcagatttatatacatccatactgcaacatattgctgtcaaaacccgcatattccatacgggtacgacatggtgccttctttancattttcgaattgagattttgattccctgtatct

SEQ ID NO: 521245 - DNA, 428 bp, Homo sapiens
acagagcgagcacggtcgtgcaatcgtcgattcagaggcccaccaagggcacggtcattcggcggccgaccgctgttgcgtgactggctctgtccgtggcagccatggacggaacctggacatactgcaccggacctgtgcaagccatgtctgggtgccagtggttctttgactgactgactcagtgctctagctctacgagcttgacgcgaaggccatccacgcacgtaacacgtaataacgtacgctatgcgacgcgagcaccggcatgagctgttaggacgagacttactccagataggacacatgtatcgaactggcggagcatgatctggtacatgacagaatcatcaatctccagcatgatattcacagagagtgtctacacactacatctgatggtagagtcgactgatgacacgctcctg

SEQ ID NO: 521246 - DNA, 426 bp, Homo sapiens
ctggctcctggttccctcctggctcgtacatgccagcactttttagcctccgggatgaattgaatcaaatggaaacatctcagtggaagatgcataagaagctgcttccacatttttcattgttcccccttgaaattctcagagataaacaaactgtgtgcccttttccttctgtcatcagtgtagccgccacctctgtcacacctggacaaaggtagaggagcaagcagtaaggctaggaggacagcctggcatcgctcattcgccttcacattcatgagcaaagacataatgattcgcctgatatctgtagaataaggagcctgaccacagagtgcgatggtattgtgtgttggtagttcaccagcgtgtagagacagtccaccagaaactgccaccatcagaatggtaccagttaccattctg

SEQ ID NO: 521247 - DNA, 461 bp, Homo sapiens
  misc_feature (32)..(32): n is a, c, g, or t
  misc_feature (79)..(79): n is a, c, g, or t
  misc_feature (85)..(85): n is a, c, g, or t
  misc_feature (96)..(97): n is a, c, g, or t
  misc_feature (100)..(100): n is a, c, g, or t
  misc_feature (102)..(103): n is a, c, g, or t
  misc_feature (105)..(105): n is a, c, g, or t
  misc_feature (109)..(111): n is a, c, g, or t
  misc_feature (125)..(125): n is a, c, g, or t
  misc_feature (127)..(128): n is a, c, g, or t
  misc_feature (145)..(145): n is a, c, g, or t
  misc_feature (148)..(148): n is a, c, g, or t
  misc_feature (177)..(177): n is a, c, g, or t
  misc_feature (203)..(203): n is a, c, g, or t
  misc_feature (218)..(218): n is a, c, g, or t
  misc_feature (227)..(228): n is a, c, g, or t
  misc_feature (234)..(234): n is a, c, g, or t
  misc_feature (244)..(244): n is a, c, g, or t
  misc_feature (248)..(249): n is a, c, g, or t
  misc_feature (252)..(253): n is a, c, g, or t
  misc_feature (255)..(255): n is a, c, g, or t
  misc_feature (257)..(257): n is a, c, g, or t
  misc_feature (262)..(263): n is a, c, g, or t
  misc_feature (270)..(270): n is a, c, g, or t
  misc_feature (273)..(273): n is a, c, g, or t
  misc_feature (278)..(278): n is a, c, g, or t
  misc_feature (310)..(310): n is a, c, g, or t
  misc_feature (319)..(319): n is a, c, g, or t
  misc_feature (322)..(322): n is a, c, g, or t
  misc_feature (324)..(324): n is a, c, g, or t
  misc_feature (345)..(345): n is a, c, g, or t
  misc_feature (355)..(355): n is a, c, g, or t
  misc_feature (371)..(371): n is a, c, g, or t
  misc_feature (461)..(461): n is a, c, g, or t
taatctcgcctggcggagggacaccggggcgnggtgggggagatgggccttataggtggagtccgctggtgagaaatancttttncatggaaaatnnttnanncntctnnnactttaaaatatantnnagggatgactcttagtnatnattaacttggatagactaataaattaccncaatcatatttctaggggccatcacnttcttctaaataaantactttaannaaaatnatattttttnttanncanncncntttcnnaatcganganaattnaatttcttctcgtcctactctcgctcgtcttnttgtgctcnccngngtagcgggtccagaatgtgcnccggttagcngccttttgcttgtganctttttatcctggcccgaagcctgtacttgtacctttcctgagttccttcatggtagtcagcagcatctttggttcctttttatggagtn

SEQ ID NO: 521248 - DNA, 412 bp, Homo sapiens
tgcctcagacttgtctcaacatgtggaattctcagctaataaactaaacgtagtaaaatatccaagatggagtagtgagcactaacactgtgaagacaaactagaagggtaatcaccaaccactctattaaaggacagcctaaaggaagcactttgacagaaagcagacatctttgcagataagatgtaaaaaggcctgtcactcatgtctgtcttgtgtgtacgtgtgcacacataccaaacaaactatcccaaaaggtagggatgggagtggaattgaagtagggcctgcactgcttagaagctgaagctactgagtgactcagacatgtagtttctagggtaaccacttcaagacacttggggcctcatctctccgtagaaaacggccgcgaatttagtagtagtaggc

SEQ ID NO: 521249 - DNA, 158 bp, Homo sapiens
ggagagaactagtctcgagttttttttttaaattatctaatgaaatattttatttttgacccttgaataggacaaatttaaatagtaggattttaattttggtttcttttttctttcaaatttccattccttttttttttcaaatttaaaattacaca

SEQ ID NO: 521250 - DNA, 210 bp, Homo sapiens
gagaagctcctggttgtacacgtgaggcccaggtcttagaccaaggtaagcacgcaagcgccgtgaagtagcgcctccaggccaagaaggaggagatcatcaatgactttatccaaggaggaagatgaccaagaaactaaaacctcccattttgtctgtacatactggcctctgtgattacatagtagttagccattagacataaaacaa

SEQ ID NO: 521251 - DNA, 414 bp, Homo sapiens
tgtaagacatatacagttatgtgtaaagtagaaatgtcttatacggtgtagagtttgtgcaggaggaataattatctgtagtggactctacgatggcgttgtgtgttgatttagtgagtataactgatctgtggtagcacatcttccaatctagaatgtgcgactacagcacaataataaacatggggcagaatatatgtgagtgtactatttcttgctcactttcgccttcattcttataacaagtgtgtatcagatcattcagaccagagcaaattttctatctttcacagagtatttatcataggaacaaattactccctgaaaatggtggaaacttctttctccctccgaaaaataaacttgcaattaagtgttttctctctagccaatagtaaatagttcttacatagg

SEQ ID NO: 521252 - DNA, 624 bp, Homo sapiens
  misc_feature (83)..(83): n is a, c, g, or t
  misc_feature (93)..(93): n is a, c, g, or t
  misc_feature (96)..(96): n is a, c, g, or t
  misc_feature (103)..(103): n is a, c, g, or t
  misc_feature (122)..(122): n is a, c, g, or t
  misc_feature (129)..(130): n is a, c, g, or t
  misc_feature (166)..(166): n is a, c, g, or t
cgaagcttttttttttttcccgggaaacggcgccattgtttgggtcccgggaattgggccatatgggccgggctccacttttnatccaacgtncgnaataganctccttgactcgttttaanccttccnnaggttcctctggcaaaacctttctcatctgattcangctgattctcttgaagataaaattttaatgttgtaaaatgctaattaagtgtcacttaaattttgaaaagacttcaatgctttatttatacatacatctttgctattctaattattaattaagtagattaggtagtgaaagccacaaaatagtcttgggatctcataaaattagagttgaggccaagcgtggtggctcacgcctgtactcctagcactttgagaggctgaggtgggtggatcacctgaggtcaggagcttgagaccagcctggacaacatggggaaaccccgtttctactaaaaatacaaaaaaattagcctggtgtggtggtgcatgcctgtagtcccagctactagtgaggcaggagaatggcctgaacccaggaggcagaggttgcagtgagccgagatcgtgccactgcacttcagcctaggtgacagagtgagaccctgtctc

SEQ ID NO: 521253 - DNA, 1051 bp, Homo sapiens
  misc_feature (177)..(177): n is a, c, g, or t
  misc_feature (688)..(688): n is a, c, g, or t
agttgactctagggacagacgcatccttaacgacgtacaggatgcctcaccatctatgataatgttcaccaagttgatcagccatcttctacaatttgaatgtctataagatccaagtaccatacgtcacacgaaattaatcaataggtacgagtaggaccatgtactcgcgatggntatacatcccacagaacggcatgagactacttgacctggtgaattgcgataagctgatcacggtacatagagagattagatacctaaagaagaagtaataatattgttacccacacttcgaaagtgtctctgcgaaatcatgggcattatattcgctttacaggatttatagtattggcatgtgcagtagaaacctccaaagatctcggcccctgctgtgaactagggataatcggtttcatcccgtagttcgtttggtttgcgtgaagggcgaagatgaactaccatagaaaccgcaagttgtgtgcccataaaactgctgcaaaccaactatacctcaacgtgggaaacacataaatgcgtggacatcctctaccaagactcttaagtttcacgcaaccattagtctatgcacattttggtttagcaacatcgtacgcttgcgtgcaccaggaattagttgtttgactggggcttaacttaatcgacttgacatgggtgcaccctcgcntgatttggtagggctacgtctactatacttgtcgatgagactagtgtaatacaatcttgcccctcatgctcaagatcatcgcgaaacagccatggtcttgctgactcagagcatgctattgcaacactgggaaagtcataattttgatctactaacgacaaatgaaaatttgatttgggtttagactgacacaagtcgggagctacaaagacacggtaatgagcagcattcctgtggccttgtgtccctatacgggttccatgtcaagcaggagcgccagctccccattgatatcgcaatggtcaatctccgctggacaattcagattatccggccgacttggctgcccccagggtcccattc

SEQ ID NO: 521254 - DNA, 151 bp, Homo sapiens
  misc_feature (84)..(84): n is a, c, g, or t
gggggttgcagtcagccgagatcgcaccactgcacttcagccacctggggtgacagagcgagactctgtttcaaaaataaatanataaataaaatagaattctgaattttatttttaataattattttgtaaaaagaatgtcttgtttttt

SEQ ID NO: 521255 - DNA, 266 bp, Homo sapiens
cttactgcgcggcagtcctcctacctcccgagtctgcgggcgctgctgtcccagcatctgctgttcatttcgtccttggggtcccaaccagaaccccttgggacttgagtccagagacgttctccaggtaacccctcatacgaagctgtgaatcaagaggtttcgctctttaaacctgtctggtgggcccccagaatatcctcacctcagggagctcctttttttgcaaacatcctacccctcccccgagggcagacccagcgagg

SEQ ID NO: 521256 - DNA, 1240 bp, Homo sapiens
  misc_feature (1240)..(1240): n is a, c, g, or t
agcggggggtttactgcggcagaccgacagagcagccttggcgctatgttggacgccatggggcttaccccctcagcggctacttggcggcttgggtcctggcggagagccacgcagtggcttgttgagcatgcgcgtgaccctgatagagtatgagaactggattcggaagtccatcgatgcgttttcccatgagggaatactggtgataggtgtgcaagctgcttgcctgctactgttctcttgctgatgtcgtccttctctctgtctgctggcacggagagcttgttatgactcggcttcacggacagtgcggcttttaatgatgcggaacgacgggaaacaatgccttgtcatagtaagtgcgttgcttggcacgtaggttggaaggaaaaactgctcacacagctaccttgagaggaagtttagctcattggttcagaacaagcagctatcgcaaggacgtattgacacgatagctggtcgatccggttacgagggactgccacgcttctgagacacggacggcgaggcagaaggcacgacagtttggggaggcaaccgctgatgaacaaggtatgaaccaaggttccaacttgcgtgagactatgagcccttgaacacttcttctggtgctagaacaacagcagttaagaatgcaagagcacaatctagaatcatttcgacaaacaataattgaattgactggcgggatatttcaaacaaggatacaggctctagcagatgcagtcgagaagccctcaagattcgcaaagtagctgcagccacaaggatcttggccgagatttaacatgactgggaagaaggtgaagataggcaataaaaggatggcttggaatgaaattctcacttcagggaagacagaaacagatctggcagaagatgaagtatggaagaacagggatgaactaagaagagcaaataaatctgcagagccgaggacaggacagagagggccacatagggaggaaagcccaaaaagcaactgagcgtgcacaatgacagaagagaacgaaggggccgcagggccacagccgcccaggccgccgaggaacacagaaggcacgcacaccagaggagcaaggcacaagcacagaccgagcgaggcgaagcgccacaaaacagacaacgacggagacagaacggaacgcagagcgagaagagcaacacagaggaagcacgcacgcgaagaaaagccagcgacaaagaacacagagan

SEQ ID NO: 521257 - DNA, 374 bp, Homo sapiens
ggagctgtggcaggtgagactcccagtctcttgttaaacatgtttgtttgtttgagacggagcttgctttgttgcccaggctggagtgcagtggcgtgatcactgcaacctctgcctctcaggctcaagcgattcccgtgcctcagcgccccccccccggcccccgagaagctgggattacagagctgcgccactacgcctggcaaatttttgtatttctagtagagaagtggtttcaccatggtggaaggtggtctggaactcctggcctcaagtgatacgcccccatggcctcccaaagtgcctaagattacaagcattagccaccgggcccggcgttttttattaaatataagggggttaattttaaaacg

SEQ ID NO: 521258 - DNA, 131 bp, Homo sapiens
ctggagcttacatgctacctgctactctgaggaagacagatcccgcatcctcaccagggcatccttcaggcgggcattctgctcctcaagctgcttgagctgataactggatgcagcaccagcacgatcct

SEQ ID NO: 521259 - DNA, 897 bp, Homo sapiens
cgatgaaggggggtgtaatgtcaccatgataatacaagactgcagatcttgccccttcatccagtaagagaaccaagaagaaacgtgctggagttcagagacagaaaagtgatggaatatgagaataggattcgagcctactccacgccagagaaaatcttccgatataagtgcgcaccttgaaaagtcatccgagtgacgtcgctggctggaaagcagaatggtgtgttcatggaactacccagcaagacttttagtgctgagtcccaatagagcactcctataatgaagagataaaacaactcagtaaccacattgaggatcatggtatccagaatagtactagattacacaaatcggctctggaatggatacacgataaatagacccagggacaccggagacatgaacttttgcgtgatgaacggcaggtgaatattcttagcaccctctggagaagtgtgggactcagtagtacgctttatcagagcataacatttgttccgtcagcaactgtggcttgtcgcactgcactacagagtacaagtctgtggaagatgtggcacttcaacgcatgatttgagttcgtgaagtgggagtatgggaagaagatagcaatatgcgcagaggaagttatgaaccagggttcagagcactcattcaggctacccataactcaagtgttgtggcttatagcagcaccaacagaagattcgcgccatactaacgtgggtgagacaacccatcagagttctgggcttggtgttgcagtggcctcgggaaacttaatgttagggaggctggactgaagggaagaagcttgacaatcaaagaggctttctcggaattttagcgttaaactggaaggtgagggtctaaatgatttgaggggctaac

SEQ ID NO: 521260 - DNA, 177 bp, Homo sapiens
aaagacccgtacgccaacaacggtgctgtcgggcggcacaccatgtatccgggacattgctgacaggatgcagaaggagatcacggccctggacgcccagcgcacatgaagatcaagatcatcaacacccccagagacgcaagtactcggatgtgagatcggatggctccactcctg

SEQ ID NO: 521261 - DNA, 419 bp, Homo sapiens
ccacatcaattgcttcctgctccttgttgtcaccaaggtgggccacactcacctaaaaattagggcaggcagaagggggaaccactaagcatttgcattagtttccaggttcccttgtcagttttaacccctgcaatagtaatcttttggcgaaggaacacacaaccctgccattgtgggggagtaaggatcccaagggtttggggagaagtttttctgtcttatctgagaatggagtcatgttgcctttggatctcaagacctcagggagatagggagctccaagtcctgagaaggaggaatggtacctggtaccttgaatatgaggcacacactaaaaggtaagaaggagaaatagaaagaaagaatgaaagaaagaaaggaaggaaggaaagaaggaaggaagaaagaaaaaaaaa

SEQ ID NO: 521262 - DNA, 359 bp, Homo sapiens
ggcacatgttctgtgtttcagtaaagagagacctgatcacccatcaaaaaaaaaaaaaaaaaaaaaaaaaaaaaaaaaaaaaaaaaaaaaaaaaaaaaaaaaaaaaaaaaaaaaaaaaaaaaaaaaaaacaaaaaagcagggaaagaaagaaacgagaaaaagaaaaaaagcagaagagcggggggggggggggcggggggcgagaggaggggcagcaacaagtgagagtgggaggagggacacgcggcgaagcaagactggtggggaagagagaaaggcgtggagaggggatagtaggagcaggagggaagagatggcaggggggaatagaggaagagccaggacagagagcgaaggg

SEQ ID NO: 521263 - DNA, 386 bp, Homo sapiens
agccatgccccgtccctaagtcacttggcatctaggcctcagtttcctcatctagtaaatgagagttaaataagattatctcatatatcaactaaatcccaaacaggatttttcaatatcttttgtccactgtcttcccccatcaattctttccaaaaaacatgcccttgttgagaagtttttctgtcttatctgagaatggagtcatgttgcctttggatctcaagacctcagggagatagggagctccaagtcctgagaaggaggaatggtacctggtaccttgaatatgaggcacacactaaaaggtaagaaggagaaatagaaagaaagaatgaaagaaagaaaggaaggaaggaaagaaggaaggaagaaagaaaaaaaaa

SEQ ID NO: 521264 - DNA, 244 bp, Homo sapiens
gtccactgaattctcagtgaggtgggcaccatctaaggaagagatgaggtcacaacagaaacacacttgcctgccgggttcaatggaaactcttgctaactctgtgtgtatcccatgacattcattcgccctctcttccttcggaaacagaatagcctcattccaacacagcagcccgggtctaagcccattccctgggctccctcacagctgcgctcactgagaatcagtggactagtatata

SEQ ID NO: 521265 - DNA, 1344 bp, Homo sapiens
  misc_feature (1324)..(1324): n is a, c, g, or t
  misc_feature (1341)..(1341): n is a, c, g, or t
  misc_feature (1344)..(1344): n is a, c, g, or t
ggcctattaccaacgtactagcaagaaatcggcagcgatagagcgataggcaagaagcagctggagaaggacttcagcagcatgaagaagtactgccaagtcatccgtgtacattgcccacacccagatgcgcctgctatcctctgcgccagcaagaaggcccacctagatggagcatccagcgctgacacggcaggcacatgtgcgccgagcacagctgccactggcgccctgcgcaccagcgcctatgacgcacgccacgcgctaccatgctgacacccacaagctgctccagcggcccgcgactgcagactgcactcgcacccctcacatccccggctgcaacccacacgcgcaccaaccggccctacccaaacgcgcgcgcctccaccccaccctcgcctccgcgcccacccactccacaccacaccctctagcctccgcccccaccaccctccacccgccaccccccctgcccccccccccgcctgccccccctgccacactatcgcccgccccaccagcgaccactcctcctgccctcccactccctcaccactccctctccactcctagcctgaccccacacgctcgccaatcccccccacccaacacacgcgccctcaccccaccttcccacaccgcccacccctgcccccacctacacccccacacaccaccacccaccttcaccactacaccccacactcatcgccccccaccccaccccctacccccatcctcatccccaccgccaccccgccacacaactccacctcacccccactacacccccgcctcctcctacccaccaccctcctcacccccccctcctcccctccaccaccccaccccccctccccctcctacacaccccctcccccctcccccccacctcctcccctcccccccccccctcatccctccccccctgcccacacaccccaccactcacgcacactccccccccccccccacccctacccctacccccactccatcccgcacgcccaccacccccacccacccccgccaccaaccctcaacctctcccccctcccccaccccacacccacctcaccacacgtccgcatccccacactccgcgctctcacacgccccgccacccctcacgcagctcgactcgccaccaccacccctccccacccctcactcccacacagctcctcccactcacacacgcgacacacacactcactcgcacaaccactcaccgcacacacgcacgcaccgaccaaccccgcaagacaccctctctcctcacacgactcccaccctcaccctcaccctcacatcccgctcncactaccacacctgcanatn

SEQ ID NO: 521266 - DNA, 2265 bp, Homo sapiens
gcattctgttcgcctgtgtctctcgtggtggtgcgcgcctgtgcggtcgtggccttccctgtcggttgcttgggcgcttctctatgctacttcttgttcgctggtcttctctgctccctctctcttcctctctcctttatttctgtcttcttctccctgcgtgttcttcgtcttgctgctctctgtcgtcttggttgtgttatttctttgttttcttctctctctccttcctcagtgttttctgatctctactctcttctctactgcgtatgttgggtatgtgttctatccctcaatctcttcgttgttactgtttctgttgttcttagtgtagttgtgggggctttcgtctatctctccgtcgcgagcgggtgggtaggtggtcgctcacttcgcttacatgatcgtacttacgctgactttgtaggcttattgctcgacccaagatgtatgtttgtcagggtctgtgatctctatacccgtctctaactatcatatctctgccttcctggtgtgttagggatgagttgtgaagtggtgagattcgcattcgcttgtcggttagttgttgtgttgttgtcctcgtgttgtgttttgtgggtgttttgtggttgtgggatagtttgctgggttgtgttttttgcttgtttctgttgtttgttgtgatattgttgtttcacctaccccttgcttatttcgttgtctcatacttgcttctggtgtgtggtgggtggtgggctgtgtttgtggggggtgggggtttagtactctcctcgactactctgtttttttgcctgctgttcttaactcgtcccgctactggcgggctgctgccttgctcttctcgtcttttggtgttgtggttgtgtgtgttgttctgggcggcgcgccgcaacatcacttcgcttctgcgtcctgtagctgtgccgtttgttggagtgtagggtgtttttttcttgtgtcgtctcttcccgtctgtgtttgttcttgttcctcctttcttgcgtcgtttgtttgtgtgtggtcagattgttgttgtggtgtctcttcctctgtcgtctctgtgtcgtttcgtcctcacaacaccccgccttctccctcctccaccacacccactgctctcccttcctctcttcctctctccactctggcgttctccgcgtcgttttcttgttcttcttcttcttctgtgtgaggtgactctcccatcttcgtttgtgcatttactctaccactatcctcctcccttctacgtcttctggcccttccgtcacgtcgtggtggtggtctcgtgttgctgtggcggcgctgtccctacccccccacgccgtgtgttgcgtcttcttgtcgtgtccgtcggtgtgtgcgtcccacaccacccgtcgtcgtcgtccttgttgtagtgccacgcgcggtgttgagtggatgtcatcatattatgtcgccgtccctctcctcttcgtcgtgtgtgtggtggtgtggtgtcgcgtccccacccctctcaccacccacactccacacaacaaagtagttagtgtccgtcgccacgtcgcggtagagggagaagaccatagtgtgtcacgataagtatgatagtagtgtaggtggggagaagaagaagagagcggcgctaatccacgcctctgtagtgcgaagattatataatataataaaagtagtagtagagatagaagaatattatattctacaccaccacgtcgtcttcgtcgtgtttctattttgtagtgtttgtgagtagaactaaactcctcgctctgtgtgtgtggcgtggcgcccacgcaccttgctgcgctgtctctgtgtgtcctctctcttctcctctgctctgctgttgtgaggagagagagtctcctttgttgtgagagagagagagtagagagaagaaatagtatattgtgtgttaagttacatcacacgcactcatctcacctctcagcgatattgagaaacaaaaccagaaagatgaaatatagtttgtgtgtgttctcatgtgtgtttgatgatatatcaaaaaaatatatagtgtttgtgtgtggtgagagcaagcacaaagagagagaggaatgtatagtgattgagtgtgatatatatatatataatatatatatatatataataatatataataaaaatatatatatatatatatatatattatataataaataatagaatatatatatttaccattcgtaggcaatttgtaaatcgtcagggggggccgggtagaatgagggttattag

SEQ ID NO: 521267 - DNA, 779 bp, Homo sapiens
atctagttgcaatcatatgcaggagtgctctactagatgctcggggcacaggctcttgtgctctatctctgtatgatagcagacttcgagagttatcactctgactcgcggtagcagttttaccgctgcctttggctatggaacgccctccaattgtgggggacaacttacgaagggcaagcttgcttgccaagtggtctacttgttcgacggagaacctcgcttgttggcgaaggttacacgcgtcttggacattgcggttggagtctacctttccataaccgagggccctcccaacggggttgccacctaatgcgggggtccgtgtgtacaatacagagccttagtaccgtaactggtgtgtgactcgcctggacgcagaggacatggccgttaaggagactcaatttagtaaatacggaggactcactccaagatgaacggcacagaggtgtgtttgcgcacgtagaagagttccacccaagtttgtcaaaaacgagtttggagaccaaaaccgggaggcgacatgggctacccagacacgaagggggagggattaatgcggcccgtatttcgacacgtaacccgagcacgacaaggcaccccaccaaagaacgcggaactgtttggacagtgcaggccagaacctggaagaggtacaacgccacatttgattgtggcccacgcctgggaagcccgggagaactctaaggggggccgtatgggaaagaacaattcgggactacaagcaaatgacgccctggcatgacgtcatacaa

SEQ ID NO: 521268 - DNA, 1014 bp, Homo sapiens
agcggggggggggcagggggtaccatgagcggcggaaacgcaggttcaccgttcgggggctacgggggggtgggacgacgtccttcacttctcggccggaggtgtgtggcacggagcgcagtgggccagaaccaggcatcttgagctctgaggcactgagcagcctgtcgacgagtgaacatttagctctcccgtccctagtactcccttctcctctagccgcgtagaggaaaccccaggactctatgtgagagtgagtggaggaagtatgctcgggaaaggcatggactgagtagttgagagcagaacggcatggctccatgtagccgacgcagacgcgctctacacataccaacgcagtgaagggatcataacaacttccgaatgacaccggagatggtgtcacgcaaggtcgtttgaggggacgatgagaggaacacactttgccccactcaatcctgtctgcccacagattctggggggctatggctcgcgctaagagagggcgcccccaaagctcgacggaatagatcaccgcaggcactcccccctgaagaacacaagaagcgggacatgccaagatcggcgcacaaaaataggacgaacaggaaagaaagcgtccagagagtagcaatgtccacaacaagcaccagcactctgaaaacggggaaaggccactttctacggtgcgggcagcacgtggatggccactttgttcaacagttaatcttagaggtccaagctgggcaaccgtcgttggcacttcttcgggactcgagaccttcggctgccgtttgcaatctaggtgcatcaagttaccaagaatggttgtatgttccggcgagggcaatcaccagaaggaagggcgatacttggcacgcggtcctggccctgacattgcacgtgtaaccctataattggtgtccctggaaccaatgtgcgcagttggactgggtgaaattcctcgggacaagttggttcctatgccccttacatgcgcgaagattttccaca

SEQ ID NO: 521269 - DNA, 250 bp, Homo sapiens
  misc_feature (180)..(180): n is a, c, g, or t
tcccagaggcacaggttaggtgaggagaagggaggaaggaaaacggaaggaatgagggctcatcagaaccccttcctagagatgagccgaagtcccttgactgggcctcccctgcctgtgggtggcagccccctgtgcctgtgctcccggccgcctgggtgtgttgtgggctcacagcgnctggtccccagtctttgggttgtgctgctagttttcctaccttgtgtgcctcttggggggtaccgaagct

SEQ ID NO: 521270 - DNA, 211 bp, Homo sapiens
gtggagccgtaggtggcaattcagcgaattcgaatcaccctaacaagccgcatcgtaaaatctttggaaaaggtggtgttcctgactttagtaagaggcggcaagatggaaagaatttcaaagttagagtaccagttcgaatgcctaccaaggcttttgagaatcactacaaggataactccttgtggtgaaggttctaagacgttgggat

SEQ ID NO: 521271 - DNA, 149 bp, Homo sapiens
cttgactcttgaggatcccccttgctgtctcatagattatggtgagaccccagaagcagctgctctccgtggagcttgaatgaagaaactggctatcaatggggacattgccgcaatgttctccagcggctctgtattagacccgcaag

SEQ ID NO: 521272 - DNA, 942 bp, Homo sapiens
tgagaatgacaagaacttataaaaagaagcaaagattatgaacaagcccagcttaaatttatttatatcttacgaaaacatttctactcatcacaacacatcatcattcattcaacatagtgcaccatcaacatcatcattcattcaacagtgtgcaccatcagctcattccagtgctttgcacacagtcagttccccatggcaaaccaatcattcaagcatttccccatatgaggctgggtgtggtagctcatgcccgcaatcccagcacttagggaggctgagacaggaggatcacttgagcctgggagtttgaggctgcagtgatctagtgatggcactggtgcactctaacctaagtgacagagcaagagcctgtcttaaaaaaaaaaaaaaggccaggcgcaggggataatgccggtaatacccagcaattagggaggccgaggtgggtggatccagaaggtcaggagatcgaaaccaaacgggccaccatggtgaaacccaatactcatactaaaactcacacaaaaataagcaggaagaagagagagagcatgccagaagaccacagctacacggacagagcagaggcaagggagaatcaattagaaaccaggggagagcgaaggtcgcagacagccgagacagaaccagactacatcacagcctgcatgacagagggagaatccatacaacacaacacacaaaaacacgaaaaaacaaaaaaaacaaaaaaaacaaaacaaaaaaaaaaaaaaagaaaaacacaacaaaaagagggcacaaacaaaaaaccacgaagaaaacaaacaaaagaaagaaaaaaaagagcaacaagaaaacaacaaaaagcaaaacaaaaaggagcaaaaagcagataagaaaaagaagagacagaaaaccaaaaaacacaaaaagaaagaaaaaaagggaagaagg

SEQ ID NO: 521273 - DNA, 164 bp, Homo sapiens
ggtgactcttcatttgatatggtgatatctttaggtgctttgtgcctgcacaatttcaagacagccttcagtctagaatatattcaaggactgcatgtcatcaagcacctgaacaggttcacgttcgttgcttcaaagtagtcatcagcaataacatggcatgg

SEQ ID NO: 521274 - DNA, 232 bp, Homo sapiens
agtggggggcggctgctctcagccttcacccgtggactgctgctatccgggctatgggatgtctcaacagagacctgtgttcccccttccctggttttcgaggaggtggggtgaccaacctgtctctggtccccggcacggcagcaaaatcctggctaccactccttcagctgtcttacgagctctggcgcaggcccagatgtgtcacttgtgtagaaagtgcgcctgggtg

SEQ ID NO: 521275 - DNA, 115 bp, Homo sapiens
ggatacctacggaattagcgactgctgtcgttagggatgggggtgacatactcaatccgcccgatcttcatacccgagcgatcaagggctctgaggggcgactgggccccaggtc

SEQ ID NO: 521276 - DNA, 330 bp, Homo sapiens
ccgcgtcgacatacagtggggttggttaacagttgctcaatgtctgctttgcgtgtatcctgtagggagcagttaagaggtgttctggagcattactaaataaagatggacaagtacttggtggtatcagttcctattgtaaggcctgagaaataattaattgcactcaagtgattattttcctgagaacaaataaaattcttttctgtgaagctatgagaattctcttggagaagctggcagcctgcgccttggacaggtacactctttgctggataaggaactggctggagagtcaggcccagagggtggtggtgaatgggtcgacgc

SEQ ID NO: 521277 - DNA, 130 bp, Homo sapiens
agatttccctaagaagcatagtcatcgatggagttacgctcaatgacaaagccatttaggcgcagaggaacatgcgagacggaagagctctatgggggcacatttcagctttacaagtcagcagatcgcc

SEQ ID NO: 521278 - DNA, 516 bp, Homo sapiens
  misc_feature (487)..(488): n is a, c, g, or t
  misc_feature (490)..(490): n is a, c, g, or t
  misc_feature (493)..(493): n is a, c, g, or t
  misc_feature (497)..(497): n is a, c, g, or t
  misc_feature (499)..(499): n is a, c, g, or t
cacacgccgatgggcaactccaaataaaagtaataaacccattcgcctcactcacattaaccacactgactattctaaccatcccaattataatatccaactcaaacatctaccaaactaacctttaccctaactacgtaaaaaccaccgtatcctacgccttcactctcagcctagtccccttactaatatttatacacacaggccaagaaataatcatttcaaactgacattgaataaccctacagaccgtagaactctctcttagctttaaaatagactatttctcagtaatattcattcccgtagcactattcgtcacatgatcaattatagaattctccatatgatacatacactcagaccccttcatcaaccgattctttaaatacctactactattcttaatcactataataatcctcgtaaccgccaacaacctcttccaactatttatcggatgagaaggcgtaggaatcatatcatnnanccntcgncntgaagggtaccgagctc

SEQ ID NO: 521279 - DNA, 892 bp, Homo sapiens
ctgtaaatattcgcgcaaaaccctggtgaaatattttgagaccagaaacaagtggggcaagtcaccacccccccgagaggtttctcccgcctttacgccaaacccctgtttttatacaccgacccccatgcaagtctcgtcatgataccccaacgcagaggtgctctacaccgcacaactgtcagaaaacaaacgcgctctcccacaaaattcttacgtccgaccccctccttggacacacattaagtggtgtggccccctcccgagtagtattcgcattttcctgctcagaaacagcgcagtattacgtggtaacgctctcccaccaaaagtctctcataattatgccacacgcctccccgccacaaattcaccacacatgatcaggcactatcgccaccttgaaaattttttcttgattttttatttgtgttgggtcatttagcatacaaaaacacttgtggcccgcccctcataaatttttgtcacacaccaccactagtatcgcccgctctccactactgtaacacccactgaacaacaagaagtgcttcattttgccaatatgcgctctctcgacccacttctcttaaaccctttgccgcccccttattagtttttatgcaagtaaaccactaccaccttttcggtccacgcgcaccacgacccccacccacatttcttctagacaatcacaccctcggctatataactcccccacgacacaagaaagggaacccaaaatgagatcttgttgtactacaactcagaatatttgattccacaagggctcccacttgagatagatacatacattagcccttgataactacccacgcactttgttaatattatcgaggacaccacccaatcaaaaacagacccacataac

SEQ ID NO: 521280 - DNA, 279 bp, Homo sapiens
agaacgcgtacagctttggctacctccgggaggagcccctgtataaatcctatgacattatcagccactgcgcagcccaaggcgtaccacataaaccccagcagcttatacctgttctgccgaaacgctgctggttccctctccctcttctataacaacggaacccgtccatgtggctgccacgaaataagtgctacaggccccacctgtgaacccttcgggggccagtggccctgccatgcccatgtcattggccgggactggtcccgctgggccacc

SEQ ID NO: 521281 - DNA, 1019 bp, Homo sapiens
  misc_feature (79)..(79): n is a, c, g, or t
ggcgtggagtgggctgctgatgctggtgcttggcctgagtgatgtgaggctgtgctgtgctgtgtgatgcttgcctccntgtccgtgctgtgtgcctgtggcctgtgtgcctgatgcccctggtgctgcttgctgtgctgactgctctgtagatccttgccatcctggccatgtgcctgtgctgcactgtgttgcccactgatgtgatgtgcattgcttgatgcacccatgtgtccatgtagttcccctcttctgcatgtgactgtgtgaaccttgtgtgatgccactgccactctgcattgctgtgtgtgcacttgttgtgagatgttgtgtgcctgtgtgcccctgtgatgccctgatgcctggtgtgattgtgctctgcccctgaccgccatgagcccatgccatgcctctgtgcctgtcctgcacctttcccagcacatccttgccctggggacgtgttcgacgaagcttggtgctgttggaacatagagtacctctcaggttcgtcgaccggagtctgatcccggacagcggacctcccagggttggccgcagaataggtcggcaagtcgcatctggacccaatgaccccttaacagcttccaatggttgcacctagacagccaccattaagctggttgggcacttgggcgcctggggaccaccttgggaaagggacaccaccctaacatgtgtgcgcatatcataaaccatagaaaaccccgttgacaaggaggattagcaacaaacaacaccattgcaaaaagtggacacgaaaatgagctacataacattaaacagactcacaatagtggtccacccaatgagggaaaaaggttggaagacacccactgaacaattagccggaaatcacatagagtaccaagagagacagtagaaaacccctagaatcatatggagcatggaacaatggacacaccctgcctgagaactcacataggacttagaatctgaagactggcgaaggaaaaaattgcacgcaagaaacattgaag

SEQ ID NO: 521282 - DNA, 104 bp, Homo sapiens
acatcatccgagtcccctctacagtgttcattgtgatcgttgcatccccctggtttggaaataaaatataaactgcccggcaagagataaaattgtatttttta

SEQ ID NO: 521283 - DNA, 107 bp, Homo sapiens
gggagaatgaagagccatattaacccaaatgatatctaaatttagatatctattttccctgctacataaaaactctgggtaataactagagacaaggtagagccgag

SEQ ID NO: 521284 - DNA, 155 bp, Homo sapiens
  misc_feature (80)..(80): n is a, c, g, or t
cgctgttactgcactgtagatcgctcgcgtgcggtaaggcgactcgggtaacgtggttcggccgaccacctacccactgnaactgctgccatcatggctgtgtcccactattttctttttttttttttttttttttaaggtgagcgaccaaaagg

SEQ ID NO: 521285 - DNA, 166 bp, Homo sapiens
gctcggtaccattggtcgagagaaattaggctacccgtccgcagtaactgatattctatttccccctcttttgatccccacctccaaatatctcatcatgcaaccgactaatcagccactccaatcaagtgtctatactctaaactaacctctaaaatcaaatgat

SEQ ID NO: 521286 - DNA, 109 bp, Homo sapiens
gggccgagttaagttacatgctttctgccataaccctgacactatggggggtgggaaaccaaacataacaaggtattttcactgaattgataagacagaggtgggagtt

SEQ ID NO: 521287 - DNA, 163 bp, Homo sapiens
tgtcttcactgggatagtcatgaattcccagttccggtgtactgcgattcagccagaacttggacttacaaaacaaagacactttgggaggccggggcgggcggatcacgaggtccggagatcgagaccatcccggctaaaacggcgaaaccccgtttctact

SEQ ID NO: 521288 - DNA, 147 bp, Homo sapiens
agagatctctatacacactccacaagaataggtaatacatcaatggcagttatagagcattctgaataaactgatcaaaaaacgaagaaagatgagcgcgtgcggggctgcgcttggttcacgcccgcctccggacagggtggtatc

SEQ ID NO: 521289 - DNA, 929 bp, Homo sapiens
tgtaacttagtactccggaaaaaaagaatccattaggatagcataggtatggtctgcgctatgatcatcaatgggcatatcctagggttgtgtcgtgtgagcagcacacatagtagttcatcagctaagggaatagacagtagtacagcacgaggcatagttaccaccctcacgtgacctataatcatcgtctagtccccaccggcgatcaaccgatacttctatgcgtgacatcgccacactccacggagagcaatagtgaaatgagtcatgctgcggtgttctgagacctaggattcatcgtttcttgttcaccgtagtgttggcctgacatggattgtattagcaaactcatcactagacatcgtaatagacggaccatcgcttcgtacggtgtgtcagctcaggttcgcacttagtgtccttaatcaattaaggaccgcatgtagtttggccattcatataagggcaggcggttcgatttcagcattgactttctctcccccttattttcgtcatggtcgtagcgtccctaggactcacagatgcggtaggcggccgaatagatcccagtcttcgactattcaatagtgcactcggtgcggtaatagtctacagcgttttcatctcctcaccaaaccacgtattgctcgtgagctgagtccgggaatgccacttcgaggattagatcgggagctaacgcccgaattgcataacagccagcagtgaaggacaatccgtcaatcaatcttgttagtgcctccactgtcgagtttccctctagaccaggcaaggtagctattgaaaataaatttctgcgaaaggattgttgggggaagggctccagacgtccagaaagacggagacacaggttctacaatagtaggaagaaaccctcacataaagctgggagcgaccatatttgatcc

SEQ ID NO: 521290 - DNA, 204 bp, Homo sapiens
  misc_feature (35)..(35): n is a, c, g, or t
  misc_feature (39)..(40): n is a, c, g, or t
  misc_feature (42)..(42): n is a, c, g, or t
  misc_feature (60)..(60): n is a, c, g, or t
  misc_feature (103)..(103): n is a, c, g, or t
gcagagccactgtgagaggcggtgggagccaacancctnncnccgaagggggcagtactnctcggcacatcccagcatcaggtcagatcactgaattaaaaantgtgaattagttcatatccaccttttggggaagcaggtcaaaccaccacccaaccaaggtgtgtgacttctccatatcccactgcagtttccattttttaa

SEQ ID NO: 521291 - DNA, 177 bp, Homo sapiens
gggggggggtggcgagggggggccgggggggggccggacctagtgaaccaggatgcggctgtatcagtgaccccagcgaaggccaaacggagcagaagaccaccggctgagacctgcggaaatggggtgacctccagaattgtgagaattaataaatcattattgttttaagctacc

SEQ ID NO: 521292 - DNA, 688 bp, Homo sapiens
taccgtaatgctttgtgcctttgggcacggccttccttcttaacctaacatgcaccttgctcccaaatggtgcttggagggggaagagatcccaggaggtgcagtggagggggcaagctttgctccttacagattactgctatgctcaccaagacccctgacccgatcggacttactgcctgaccttggaatcgtccctatatcagggcctgagtgacctccttctgcaaagtggcagggaccggcagagctctacaggcctgcagcccctaagtgcaaacacagcatgggtccagaagacgtggtctagaccagggcctgcatctttccactatgcccctgtgtacatttccccagtgggacattgaccttgtcgcacacacgcctcatgtgtacaatgtgtgccagagcagacaatggcctacaaagccagagatcgacagaccaagcaggtaagttggaacttatcttgtaccctatggagatggtttccctacacagggcctgctatatgcagaatgaacgccatattagagggtgacaggcagaaatacccaatgtactgtctcttgagtacaaacgtgggtctttccatctatcacctgcatcatcttgcttccattcttacagttctactactccctacttgtcagtgtagacacaggtcaccatttatgctggttgaatg

SEQ ID NO: 521293 - DNA, 116 bp, Homo sapiens
tattaacagatagggagcagagtgcttaggacttcaggaacttaactattctggaataaggaatgaatcaactgaccttgggccagcaggttttaactaacttgttacttgccttt

SEQ ID NO: 521294 - DNA, 185 bp, Homo sapiens
gcggggtcggaggggtggttcgagtgaggggcgaaggccgcgccgccttagtgacacagggagcggctgtatcagtgaccccagcgaaggccaaacggagcagaagaccaccggctgagacctgcggaaatggggtgacctccagaattgtgagaattaataaatcattattgttttaagctacc

SEQ ID NO: 521295 - DNA, 120 bp, Homo sapiens
  misc_feature (47)..(47): n is a, c, g, or t
  misc_feature (59)..(59): n is a, c, g, or t
gggcacgtattttctcctatttcccctgacctacacaaataagcttncctctcactctntcttaaatattatacaatagcccttttagtttacattatctcagtcagtcctctacaacag

SEQ ID NO: 521296 - DNA, 372 bp, Homo sapiens
gatagatcgagctcggtaccgaatccggcaggacaacacaagtatatttcattgtgtctttgatttcatgttatatgttggctgctgtgtgttatttattggtagtgaaagtgagagggaactttgtggccttttttcctttttctgtaggccgccttaagctttctaaatttggaacatctaagcaagctgaagggaaaagggggtttcgcaaaatcactcgggggaagggaaaggttgctttgttaatcatgccctatggtgggtgattaactgcttgtacaattacgtttcacttttaattaattgtgcttaaggctttaattaaatttgggggttcccttcttagagcagctcgtactgacgaaggtg

SEQ ID NO: 521297 - DNA, 180 bp, Homo sapiens
tgaatctatttttttctttaggattgtatttccggttatttttaggcgtcacccagagcggctgtatcagtgaccccagcgaaggccaaacggagcagaagaccaccggctgagacctgcggaaatggggtgacctccagaattgtgagaattaataaatcattattgttttaagctacc

SEQ ID NO: 521298 - DNA, 178 bp, Homo sapiens
  misc_feature (35)..(35): n is a, c, g, or t
caagtggagtggccgggcgagatgtggggaggganaccgccttagtgacacaggagcggctgtatcagtgaccccagcgaaggccaaacggagcagaagaccaccggctgagacctgcggaaatggggtgacctccagaattgtgagaattaataaatcattattgttttaagctacc

SEQ ID NO: 521299 - DNA, 376 bp, Homo sapiens
  misc_feature (5)..(5): n is a, c, g, or t
gactntgaggatcccctcccaacaagagacaaaggtaggaggaagacaagaaaggaagatacaaaaggagcaggaagatacttacttagggacagattagcatcatacatactaagagtggggggtgagggggaagaacaagatgagagagcatttcgatagcatttacccacacagcccctggtgatcatttggatttggaatcaaaaacaaaacacaggcatgagaatttattaaagaaggttttaaacaagggcaacaggtgtgtggtggacttggtttatttgcccaagtgtctaagaggagaaaattaaacttggggttttttagggcaccagaatattgggagcaccaccccatcttgtttgggaagctt

SEQ ID NO: 521300 - DNA, 563 bp, Homo sapiens
  misc_feature (456)..(456): n is a, c, g, or t
  misc_feature (539)..(539): n is a, c, g, or t
cacagattgaaatgaatacatggctgactcgtgtgtacactagtcagataatgcacttttacaaatattttcttatcagtacatttttgaaacaatagtatatacctccattggtccttaagtaatcactaggttattggctaaaagtcttgtactagagagcctgctgctacatttgaggtactgtcacctaaggaacgtgtttctaagtaatatttttctggaataaacaaaattatcaagcacaaggacggtaagacctcacatctttacaaaagtacgtaaatcgagccaacaatcttgaacgaatctgcatctcagtctaacgcaaatatattctttcacgaaagataactaggaaatatggtaaacaattgtgtttgcatgtgttcttaatagtatattatatattcttgttttgttatctctctactaatcacacaaacaaaaacaatnggttttattctctgtgttattctttttgtctactcaacacagtgtatttatatatgtggctatatagtctcattcatgtgccnaataaaatataaatatgtgaaata

SEQ ID NO: 521301 - DNA, 162 bp, Homo sapiens
cctcattgagtttaaacatacacactacacttgtattctacattgcttcctgcactcacatgttctctcctggtatacctatccacggggagcactcagtgggactatcagtgctttggggttagcatgattacaggaatttacccagggaccttggaaagg

SEQ ID NO: 521302 - DNA, 238 bp, Homo sapiens
tgtgacgagacgacctcatgcctgccagtaaatgaagccggccacacccgacaccagccctgctgcttcctaacttattgcctgggcagtgcccaccatgcaccccttatgttcgccgtctggcgaagccctatagccttgcttgtagagacttccggtcacccttggtaagagtatatttattgtgatggctaagatactgctgatgctgaaataaactagggttttggcctgcctt

SEQ ID NO: 521303 - DNA, 139 bp, Homo sapiens
tgccggagaggatcccgacatgatccagaactccgctcggttgggcttcccaaggatcccaccaactcattctaatcagtgatcacggaggaaatggcatggtattcctattcactatttcaaagatccggcggtctca

SEQ ID NO: 521304 - DNA, 391 bp, Homo sapiens
aaggcctgaaggaggaattcttagggattcaggttaaggaagagtctgaggaaaaggaggaccagggggttgaatttaagaggcaaaaggaggggctacggccctaattggatgagaaacgccttgaccatttccttagtaaaggggaaggacggttgccttccagagcacttaagggagcatggatgatatattttaccggggattaactgttgaccaatgggggatttaaccatgtgtccatggggcccagaaggctggccagcaaagttgccaccgggggttcctaaggttataactacctgcgaccaactgtgagtgttaggtccagggtattggtggattaattaaatctttcaccatacctgattcccggacactggttcccgag

SEQ ID NO: 521305 - DNA, 165 bp, Homo sapiens
aattgcctcaacaccatgcctcctttaccccagactgccagcctacgcgctcttggccagctttctgcgcaagcggtacggaactcattactgtcctacagcaataaagatgagcaatcgcaacaaaggtacgcgagaatgacgccgtttggacctcaataccgg

SEQ ID NO: 521306 - DNA, 162 bp, Homo sapiens
caggtggagcgtataaacatatgaatgagcttacatgaactaatacattatgagccaaactatatcagatgacctaatacagaaaagaagaagaatgagggatactccacatgctgccaaaggataccatacttgacagagctcctatacagataacataaa

SEQ ID NO: 521307 - DNA, 293 bp, Homo sapiens
tctagaggatccctataggcgctaggtagttgcacttgcgtcttgtgcagtcgtgggtcccatccgtgcagtggttacggggcttgcaacacctgatgggtacaccatgctgctgttacacagagctttcgagaatcctcagatatcatggaaacaagaatccagatccctgtcatctctgagtagacagaggctccatttggcagagtgtgggttacctctgtccctccccattctccctgcggctataagcaaacttggctttatgttcatttttcttgaattggctcaga

SEQ ID NO: 521308 - DNA, 275 bp, Homo sapiens
  misc_feature (28)..(28): n is a, c, g, or t
aagcagttaatacagactcagagacacngggttgggactgaggggagaggtgggagggaaagaaagaagatttgggatgagttgctttgggaacagagactagggagggacgatgtgtaaaagaatgcctggacgtgaggggcctcagaccatttgcccatttatgacaagaattatctagatcttgtaggatggaaaaattgaaagtgccattttctggctattgggaaccactgttgagtctgtattaactgcttggggtaccgaagctcgaa

SEQ ID NO: 521309 - DNA, 949 bp, Homo sapiens
  misc_feature (344)..(345): n is a, c, g, or t
cagtgaatattcagtacttgttgtcattcataaaaactagcgcatgaaagcgtacacaaatcggatatgacctgaaattcagctgcgtcgtgtatacatagaggtaacgacgattggaatcgacctattagtagaataatatacataatgatgtgcgcccacatgtgagtgttgaaaaaaaatgagtatgtacagtatgaagagagaaagattaggtacaaatattagtttgggtgaccagtatggtgtaaaaaagaacagaagaaatgatatatgaaatcagagattatatgatagtagaggggttgagtgcagtagagcggagacgtatatggatgtagtcnnggtagatctacggactactgattgaggtggaagtagcagtaggaaagaggaatgtgacacagcaggctccgtatatgagtgagagtaacagggacgagcaaggaattatgggaggtggttagtgtgagccagcacgtgcgttccgtagcagccaccagtgattgtatcagtgtcgagtacgaggaccgcgctgacggtgtagattgtcgctagtcctagcacctgagagcatgctagacgcaaggagagccagcgaggaggctgcgaaggagcttctgtgaagactcataagcagtagatagcattagaagtgcgcgatctggagagtgtagaaggtagacgagcgtagatagatgcatagggaggacgtagcgtgagtgaaggaagagagctggtagtatggtaggttcaagagcagaatatgcaaggaggtgggaagcagagttagacatgagtcatgggtacctccttgcagagagaggagatactctgtgctagtaagagagcttacgtgctctagcgtagaggttagtggctggcgacgagatgcaggtcatagtctagaggcatagagatgttatgctgctttagacgcaacaagata

SEQ ID NO: 521310 - DNA, 1356 bp, Homo sapiens
  misc_feature (1)..(2): n is a, c, g, or t
nncacccccccccccgcgccgcgctgctggtcgtgtagataaacaccacgctggtgggtgttcgctacctgtcatcgtagccgcgtgggggtgggagccagcctcacctagccttttgtgttggttgtctttcacttttctgatatatttatagcatcagcgtgcgtgtgtctctgcatccgtcacgcgtgcctttgtgttgttgtgctagttagtcggtcccgcgtgccgggtgcatggataggtagtgtttgttcgttcacgcgaccctggctggggtggtgctagtgtgtacgctacggatcgtctcgccagtctgatgtttggggtggcgcgcagcgcgtaactattatgaccaacttgaggtggtattcgctacttctaatactacaactacggttgtgatgagctttgccgcgcgggtgggttgtgctgcgacggagcggagtggtttgtaagttacttaaaactatccaccgctaagttgccacccccccccaacccgtggaagtgggtgattttttggttgctatctcgtcatcctcgtgggggtaggtgaataagacactctccgcgtggtcgaggtaggggccagcacagaaagcacagcagacacgatggggtggggtgggggtggagcggagagcaagaggagcgaacagatgaactcctcgcgcgcgtcgccgcgcgcgcaacgccaaacataccaccgcagcctccgcctgcttgtgttgtacggatctcagtgcgcgcgctgcggccgcccgcgccacataaagatatgatgtgccgcacgacgcaccccccgctcccgcaccgccgccgtgtagctcccacccctctctttctgcgcgcacacacacaacacacacatatatatattttttggagagcagacacacagcgccacctcactcacaacacacaacaagagaagatgaggttgtgcgctccgcccacctcctctctctttgctcacacaccacccacccgcctcctccctccccgccccgcgcgcggcctccctcccccctccacaaatatttcgggaaagactccaacaaacaaaaaaaaagaaagaaaacaaacatcccacccccccggggcgcgccgcgccccgcgcacgcagagagaacacacacacacacacacacacacagaggagcagcacccccccctctgtgtggtggggcgcgcgcaggcaccccccccccccccccccccctctctctcctctcccctcccctctctctctctctccccccctcctctctctctctctcttttagaacacacacacactctctcttgtgtgtgtggtgtggtgtgtgtatatatttcatatcatatcacaca

SEQ ID NO: 521311 - DNA, 216 bp, Homo sapiens
gaaaccccggggcctttttacagtagagagagagttatgattaggcaaatagcgcgttatcagccaccacctcgtagtcaagaaatagaactgtgtccggccaccggaagaaaccccaccacatgccctgactcaatcgtagctccctccttccccctgaacaagtaactctttgacttatagtaatcacctctgtgtatttactttataattttt

SEQ ID NO: 521312 - DNA, 668 bp, Homo sapiens
ccaccgtcttcagaaatcgcggcagaggaagaaggttgtagagcaaaataaaatacttcaggctgggcacagtggctcatgcctgtaatcccagcactttgggaggccgaggtgggcagatcacctgaggtcaggagatcaagaccatcctggctaacatggcgaaaccctgtctctactaaaaatacaaaaaattagccggacgtggtggcacatgcctataatctcagctactagggaggctgaggcaggagaatggcttgaacccgggaggcagaggttgtaatgagccaagattgcaccattgcactccagcctgggcaacaaggcaagactctgtctcagaaaaaaaaaaacaaaaaaaacccacaacattcactaacttagccatttttaagcgttctgtgacattaagtacattcgcactgttggaaaacagatctgtgagttttacatcttgcgtatctgaaactctatgcctgtgggacaacagctccccttttccccctcctaatagcccctggtaaccaccattatttctgtttctaccattttgactactttagataacatcatgtacgtggaatcataccatgtctgtattttgtgacagacttattcacttagtgtaatgtcctcaggactcatcctgttgtctgtgtaccgga

SEQ ID NO: 521313 - DNA, 444 bp, Homo sapiens
ccctcttgtcccattattttttttcaataagacgtctaccgccatgtattgacatttctaccacataagttcttgcgcgacaataagtgttctaagagcaaacatttgcgagccttgctgctccccctgcgagattttataagccccctctggtgaaggatttgtgcctttcccctctcttgagatttcttgtcggggaagcgggagggcccccgcggctgtctatatgcctgtcggagaatacgaaacttctcgaggagccctcccgcgctgacgtgggagacaaccacccagcgagctttttcaaatattcgccccccacgacgtgcgggcaagcttttgttagatcgtttgtaatccaacttattggacccatctcgactctcgggcctcgtggcagcacatatccccctagttattctccaagagaggaacaaaaacaaa

SEQ ID NO: 521314 - DNA, 741 bp, Homo sapiens
cggagtcttattgtggcggtggttgtctcagaatcagcggactttttgggtcgtaggaacctggtatgagtctctcttctctctctctctcttttcatttttaaaacgttaaagtatccacaccccaaaagccgccctaaagccgcccgaggggcttacccctatccgcggtccccagcgaatagaaaaaaacacaagaaggtctctcaccgcgccatagtgaggaaacgtacgtacccatatacccgctcattcggctctagtacgaaatagagtttagaaaagctcctaaccaagaaggagaaagataagtaacttagaaaacaacccaagagggtcccgctcgtccgggagttagtcggtaattcgggccttagactagcgagataagaaagaagtaaaagggactctctagatccgacctcccaccctccatatttcataacctctaagatctcacagaacgagggtagaaaattcgggccgcaccccccggaactcttctcatccctccgccactcgccctacacccccctacatccccctaacgatcctctcctccccccacctccttcctacccttcccgcctcccttcgacccttcccttcgaactagatccttaagtttccctcacgcagcattggcgacttacgggcgaacgcgacaaaaatgacgacggcgtcaacgacgaatacgatatcaatcgctactgttccaacggcctttaccctccgatttac

SEQ ID NO: 521315 - DNA, 734 bp, Homo sapiens
cggagtcttattgtggcggtggttgtctcagaatcagcggactttttgggtcgtaggaacctggtatgaggtcttacgcttagaccggaagtcgaggtatgaattaacgaggtaaagcgctcgcgaatataagtagagctagttagagtcaggtctttcctacatattaggggaccttgggcagggcctagccctcggtccgcccgcgtagcctcgcgacgggagctagcgcggccggccaaaccagtagagaggagaatctacgcactcgcctttacagtttatttagcccgcccgccccttagcaaaaggacctcatgacgaagtaacagggaaaaccccactcgtaccattagtaccctagctcgttcgggaacaaacgcaaagaaccgggggcccctttggagcgaaccccaggatctttcgagcgacgatacctcttactctatctctcgtcgggcccttcctcgtcctctagttttcctctatcgcttcccgattggcttctccctcctatttattacccagacaccaggacctcaaggagtaagtcctcggttcgtcgcccgtataatactctcattatacgctatcctccattacgaccacagttagcattcatttatcgggtatcccttagccctcgctatcagacttcctcttcccttaaaccggcactctcgatcttagcctcgctttaggctcaaggagacccccatacggctagatatata

SEQ ID NO: 521316 - DNA, 730 bp, Homo sapiens
cggagtcttattgtggcggtggttgtctcagaatcagcggactttttgggtcgtaggaacctggtatgagcggaaatcccggtaacacattcgtcttaacgatagcaggaaacacctaggtactctaataggcctcgagcggcgccgtctagttagcagtccccggctaaggataatagcccccattagcctacttataaaacttcggacccgcctagaacttcctaggagtttctttcaaggtacacttcgacaactactctagctaggcggacgcaaacgaaccgcccctaaaaccgtcaaaaataggaacctctaaaccgctttaaatcgacctagtcataatataagcaagcgaagcaatcgtctagttctttttcgaagaggaggaagactaaaacgaagactaagacgccttagactccatcaaccccatagccgaagaaccgaaataatgccacgatagcgccacaaactgatcgcatatcggcacctagcgccatctccgcggaacgaggcccataatactatagatagacgcccacgtagactacccggatcggtaccactggtaaaacagaatcgaaaaggacgccagttgaaaagctatctacagatgccggcatcatagcccaatagatcggacagaacccgaggagacggtcgactcggaagaatggtaaagagttagccccccgaaaaggcgtaccgagaaagcgggtctaaaatc

SEQ ID NO: 521317 - DNA, 282 bp, Homo sapiens
acgcaggttgtggggaaactgggttgttcagacactgccactgggctgtagcgtactatagccactttcataaacagtttgtcagtttcttaaaaaactaaaccttgaataccgatatgacccagaattacaccccttggcacctaccccagagaaattgaaacttcactggttgggccaaaaacctgttgtagggaattgttcccagcagctttattcataaatattgcccaagacagggaaacaacttccagctgtccttccagtaggtaacatagttaa

SEQ ID NO: 521318 - DNA, 727 bp, Homo sapiens
cggagtcttattgtggcggtggttgtctcagaatcagcggactttttgggtcgtaggaacctggtatgagtccgcattctccttctagctagaagcctcgagcattcccgtttcacctcgaaaagggtcaggggtcttcgtctttagtcgtttctccttcccggtccttaacctagcctttctcgttttgtacttcgtagataggtgtctttgtagggggtttccgcggattcgtatcggagctcgccgttcctatcgagtcgttcgcgtcggttccgtacggcgttcgcagggggacccgtcccgtcgcgttaccggggcatagtcgtcgtctccatctcagattaaaaagctgggccgagcgatcggcggtagggttatagacagagatagtggggagggcggtcgatttcggtggtttcggatcgagtgctcggaggagctgcggaggtctccctttcctccctcttctcgagagtctgcctcctaggtctccttagtccgctacgctgagcgttcggttatcgtctagggccggaggtctagctttcccgtttcgctcgccttagtctcggagtcaatctagggactttcgactagggccatacaggcccggcaaaacgagcgtcggaaaccaatccctctttagcagctccaggctacgtccagggaatccaaatcccacttagacaccggcccctcccaagttccctcaccttttccctca

SEQ ID NO: 521319 - DNA, 724 bp, Homo sapiens
cggagtcttattgtggcggtggttgtctcagaatcagcggactttttgggtcgtaggaacctggtatgagggctagaagagccgcgtatgtagaccagtaggttaaggctcgagttatagtagtacccccaccctagaccccgacaatcgcccacacgcgccgaaaattaaaacgatactcccccaaagtccacttacaaaaaaaaacagacgctccccacagcggaaaaatatacggggaaaaaaactactcaccccgacgtagtacccgacaacgacaaaatattctatattctatctcccacagcgtataaaacgaacgaggctcgggtcaggcagaaaaagggctaacgtcacccccgcccccagaactaccattccccattagtccccaattactcgacactcacagcagatatatcactacagccaatacagccaagcctagtatccgctctaccccaacgcaaagacccgtccttaccccttcataggtagctctctctccttctatagctttatcgcgtaggcgtcaccgccatctccatgaacacccctagcaacgccacccctcctcaagcgaaaccctcagttcgtatcccgacgctacgcgcctttcccgctccctaaatcttaaggccttttcgcggtttcctctttccatttcgggaaggttctcccggagattcccattttccgtcggcccggatcccggacatcccaa

SEQ ID NO: 521320 - DNA, 156 bp, Homo sapiens
aaaaaaattcccccccccccccccttaaaaggttggggctttaggggggggtttagccccaaaaacccaccccccggatgggggggggggacccaaaaaaatttttggcccgggttttttttttttacccaaaaaaaaaaaaagccccccgggcca

SEQ ID NO: 521321 - DNA, 719 bp, Homo sapiens
  misc_feature (71)..(71): n is a, c, g, or t
  misc_feature (89)..(89): n is a, c, g, or t
  misc_feature (100)..(100): n is a, c, g, or t
  misc_feature (108)..(109): n is a, c, g, or t
  misc_feature (111)..(111): n is a, c, g, or t
  misc_feature (132)..(133): n is a, c, g, or t
cggagtcttattgtggcggtggttgtctcagaatcagcggactttttgggtcgtaggaacctggtatgagnactctggtctatcgtaantcttgttcttngggcctanntnacctcttcgttctagttcttnnagcagtcgggatcataggcgttcgttattatgtttagtcaaccccccgcacccccagcagagatggggccctattgcgccggttaggacggctctgactcttcgattctgcgacttatttgttctggttctttaaagcgtcgggaccataggtgcgagttattgtgtttggttggctacctacctccgtaataagtacccaccgagtattcatcgcgcgtctatagcaaagaaatgcgactccactttagcagaggcagacacctcgaaaaagaacaacctccaaatcgtccaaaataggggcttttatttttaggttatagattagcattagcttgcggtatcggccaggaattaggttatatagtagggggcgagtggcgggcgagcgagtatagtcctactcgcacccatagtcgtcttttagagtccgtaccatcgttcgagtcccgttctttgctaggctagtagtagtaccagagctctacgggagcgtgaatttcgccgcgaatcgtatacgttaagggatcaggccgggtttcttccacgagaactcaaggttcgacgaactcaacgttctacgaatc

SEQ ID NO: 521322 - DNA, 718 bp, Homo sapiens
cggagtcttattgtggcggtggttgtctcagaatcagcggactttttgggtcgtaggaacctggtatgagggaaatctcgtaacgtatcgaagatactcgcaacacgacgccattaaagtagcccatacacgcttccacacgtacaccccccaccacacacccagcgccccacagaaccccccaaagccaatacacaacgcagacaccaaccccccttctggtcgcaaaacgtcacgggtaatataactacgtaaccacaacccgaaaacacccttcccaaagatagagcccgaaatctactccggcaaacaaaccgtaaaccatctgcatagccccataaggactctacggtagaatagtggaagatccggcttgcaatctaaggtcgccgcacgtaaatcatctcctcagcggccaacgtatccgatacgcatagcacgccctttacgttgccgcgaccccgatacgcatagcacgcccctacgttgccgcgaaccccgccgcctaatttaatccgagacggccctaggaacggtcgtaactctaaaagtctaacgcatcgtttaagaggtattccgcgtaacacctttactttcgaacccagtaccgcattaggaagacccctcccctatctaatcggaccagtaccgctcccgcggcagtaccactccagataccaaacccgaagcaatacacacttcgcagccataccagttt

SEQ ID NO: 521323 - DNA, 972 bp, Homo sapiens
  misc_feature (904)..(904): n is a, c, g, or t
  misc_feature (907)..(907): n is a, c, g, or t
  misc_feature (931)..(931): n is a, c, g, or t
  misc_feature (943)..(943): n is a, c, g, or t
cggagtcttattgtggcggtggttgtctcagaatcagcggactttttgggtcgtaggaacctggtatgagggacgataaaagggaaaaaaaaaaaagatagagaataaaagaaatctatagtcctccctccccgggccgaagcgcactcccttaaaaagacacgcctaagctccaattttcgggattcgcgaacgagattccacccggaaacaggactcccgtagacgcaactaaaacaagacgaagccgcatcagaacacggcgaatttcaacttagcgaccggtacttccacgaggagagggaaacccagagttcgagatatatggagggaaggtagcgcgaagatttaggaggacgttttgtggcgttagtagttaagacggctacgatgcgttatgaattttaggacgttgaggatagtcgatgactattagaagtcagagagaagtaaggaagggcttcttctcctagttcctagggagagtcgggctcgtcgatattcggaccccggatccagggttcttagaatcgcgagagaacaaaccctcgccgcgctaaaaaaaaaaaaaaaaaaaatctgagggggggtttggcatttaacctgtttcacagcgagctgcaccataacctatcggttgctgccccataatgctgcgatcgggaaaatttcggtgccatttaatccaactgttccgtagtatactttttccctgttagtcggtgcaacagtgaagaggtttgtattgactgtttcctttaatagccgtgtagttcgaacggtgaacggtaaaccgcaagtgccaacaccccgccaaaacctgtgccaaacccccgccaaactagtctaccccccaattaacaggttgaaactggtaaaactttccacaaactaaaagaaccgnttnagacagggccgagcgccgccttancccggaatagancttatcacccaaagattgcgggttcttaa

SEQ ID NO: 521324 - DNA, 707 bp, Homo sapiens
cggagtcttattgtggcggtggttgtctcagaatcagcggactttttgggtcgtaggaacctggtatgaggcggaggggtcgcccgtcaaactaactagacatacctctcccccgtcaccaaagctactcacccagaacgccacccctaccttactcatcaacccccccccaaacagtaacccaacctttaggcccggggacagcatcccccggccccgctccgctacatccaataccccacccccgagatcgacaacgctcctagctagacgcgaacgaacgccagtatacaattttcttaaacctacgcacccagacagtcatcgtcatagcgtatcgcacggagcgtcgacgagaatagataaaaggaataaaattattccctcgctttagagtcgtccacattcccgcaatagggaacgcgctcacgacagccagggaaattcgccccagaagagtcagacactcgctcaatacccatagtagccaaaaccccaaaaacccaccaccaccccgagaaacggggctcggtcgcgccgcccaggtcggttcagagccttcggacccaagtgacttcttcatcctaattcctcgagcagtcgagatcataggtgtacgttatcgtttcgggcccgaaataccgaaaaacccctagttaggcgtaacgatctatattcgggactttagtatccggggaggtccaggc

SEQ ID NO: 521325 - DNA, 704 bp, Homo sapiens
cggagtcttattgtggcggtggttgtctcagaatcagcggactttttgggtcgtaggaacctggtatgagggaagacacgagaaaacctacggaagaagcaaggaaaaggagagagtcagctcagacaaaaaaagagacaaagatcatagaaggaaagagactccgttccccgaaaagacgaaggaataaaggccgagagaatacccagcctgccccgaaaggtcgtgatgagtaacggaatcctgaagatgaagagagaccgtagagagagagtgctgagagtgagaatgtaccagaacaacctgcgaatgggaagaatgggaatgtccatagagagagagagagtgttcagaaaccgaaaggtaaaaatcagagagagagagaacggaatgtgaatgtccggaaagggaatgtacctgcaccgaataggaatgctgcaaggaagtcgaatggaccgtctgagaaagagaggaatctagaaggtaataatagtagtcctgccacgaataagaaaaaaggaaccttccgaaatgtttatgcgacgcagactacaggtgagacgacttccatcggagtgagaacaaaaagccgctctcagacatagacgtatgacccggttacggacttgatcatctccgttaatagaatagacccaaggatcccgactatttagagaggggtaagccctttcgagaagctaata

SEQ ID NO: 521326 - DNA, 1231 bp, Homo sapiens
gaatctgcacgagtgtgaggatgcgcttgtggtctcatgacactgaaaccatggacaacgaactaggtacgacccatgagctgactgtctgggtccggcactgacgcttgccttcgaagcgccttggttgcgacactggggtcaatctctcactcatgcatgtgctgctgacaaagtggagccatggccttacttgactgagacccaatgccaaaagtggcccaggtactggctgttgcaggcatgcactgggcgctctatacggatctggtctgaggtaccaggtccatgcagacggaacttacatgcctgaaagttgacatccctctgggaatcagacccagtgacgtggtgtgccactttctcactaggaccgccatgttgcttagggagcttgcatttcagtggacccctacttcctctctcaggggaactaaccgaggcttgtggaatttggatcaccaagggcccaagggaggcactcgttgcatagcgaacatgccttgcaagtgtacaaaccttggccaacagtgcacacggaaggaacgcctgctgatcccggttccgtgcgcccattaattgcggagggacccgatgtggcgctcacttgtggacccaatgggaatggccctggtttccccgggcagcggcatgttcgcggtggaatcagttataagtccccaagggaaagcataccacatttgtgttcccccgcggatgccaaatcgccatccaggagttccaagtacccggggccagtaaatccttgtggtagacgacacgtgaccacctgtgccgaggagggccttggcacattcggtctacatcttttacgcacgggaccgtgagacaagtgaaccaaggttcctgtaaatgcggctcgccgggatccccccttcgtggtgacaaccgaggtcgcccttccactgcgcagaggaccatttgcacagaatcccctgggtggtagcacaagagtagtagcaaacgactctggtgtctcggtcctaagagacctgggcaaggcgcctttgtgcctacctttgccctcaattaaagagacattttatcgtgctatggctaccatggggggagcattggaattcccggacctacggggccaccctcatggagcatatcgttcctacgaccaaacaatggttgcagccccttcaagaggctcgaatccctcaactgcgcttaggccattgactgaatactaatggcggtccag

SEQ ID NO: 521327 - DNA, 179 bp, Homo sapiens
ttcagcgctgccacctggttatcccctctctcgttgaatatagcatcgcgtgttcaattcctaaacacaggctgcctgcactcggtgttacctcgggctgaggcactgatcactattttattttttaaatgccgtgaggaaatgaaagtgaggctttgtctgcggcatctttcctggga

SEQ ID NO: 521328 - DNA, 481 bp, Homo sapiens
cccgagaggtactgaaggtatctcatttataatagctacaaaaagaaaaaagaaaaaagaaaaaaagaaaaaaaaacccaacaacctaggaataaatttaaccaagaagatgagagatctctacaaggaaaactacaaagcactgatgaaacaaatcgaagaggacacaaacaaatggaaagacatcccatgctcatggatgggaagaattaatattgttaaaatgactcttctatccaaggcaatgggtagattcaatgcaaccgctatcaaaacaccaacatcagtttttcaaagttagaaaaaacaatcctaaaattcatatggaaccaaaaaagagcccaaatagctgaagcaatcctgagcaaaagggacaaagctggaggcatcacactaccggacttcaaaatatactacaaggctctagtaaccaaaacagcatggtattgacctaaaaacagacacagaccaatggtatcag

SEQ ID NO: 521329 - DNA, 250 bp, Homo sapiens
tctcccgtcgactctgcaggatcccccagcttacatgcatgctaactaggacaaaaagttttacggtgctttctcacacaatgtctgggatttacagatacaccagtcgttttggtcagccgcttaatattattatcattttaaccaccagggccaggtggtggcgccaaggtcgtctagctatttatcttacttctgtttctttccagctttttgctttctcccttttctcctgtcttataaactaggg

SEQ ID NO: 521330 - DNA, 601 bp, Homo sapiens
  misc_feature (46)..(46): n is a, c, g, or t
  misc_feature (257)..(257): n is a, c, g, or t
  misc_feature (416)..(416): n is a, c, g, or t
  misc_feature (419)..(419): n is a, c, g, or t
gccttccctttctaagaagatgaggacatcattagcagatccagancgccgccttcatgttaccggccagccccctgaagccacatctcagctggagccatttacctcatcaaccacctgctgcaggtgaagatgcgcaaacgctacagcgtgggcaaattctcagccacccctggttacaggagtaccaaacgtggctggacctcccaaagctggaggggaaaatgggagaaccattcctcacgcattaaagttcncacgcgcgctgggagcagttttcaacaaagcatcccctgcctgggtttgggctgcccccggacagggatttcggtggggcctgtcccccccaggaccccgacatgcaggggctggcggagggcatcagtgtttttttaggtcctgtgcccttgtccaantgntgccctccccaacggttttttccaggattccaccaaataacttgttttagggaaaatggcttcctgccccaactggatgggacccgtggggagtggggtggggggagctttttccaaggcccctccctgttttcccagcaatttaaacggactcatttttggccccatggccttgttttcca

SEQ ID NO: 521331 - DNA, 165 bp, Homo sapiens
ttatgtgtgtcgtgcaggtgacggcttctacgaacgtgtgaacccgtaggcttggattacggcgaagcgatttctaggatacgtcagtagaactacgacatgtgaagactatcacgtgtacgagggaaggttaactggttgatattgctagggtggcggctctgg

SEQ ID NO: 521332 - DNA, 939 bp, Homo sapiens
ttggtccgagttcccagagtttccctctgtgtgtgccctaggctcggccggccggtgccccggctcctttcctcctttcggccttcgccgtccaccaggtccctctctctgtccccggccgccatggagcagccgccggcgcctaagagtaaactaaaaaagctgagctgccgacacgttcgacctaagcagcctgaacgcagttcttctgctgtattagagaagcttgcgagaagggtcttatggacgtgtctttaacacgcactacacaaggaatccggtcaagttcgctcgccattcaacaccagtacctgctctgcatcagcatcttcagcgaaatcatcaaagcacatttccataatgcagcaactgtgacagcccatatgctcgtaccgtactatggcagttatctcaacgaatacagacctctggactcgctcatggagtactgtggcgctggctctgctctcacacataactcacgattacgaacacaagaccatccactacgcacgatgcaccttgcaccattcttacatctacatcgaaaggcactcgcctctccgcacctccctgcagccaccatacaccagacgactctccaccgctgccacatctcctcctccatacagaccggaccatgcaacctcgcgccgcactcccgccactggctgggtcacctcaccctgactccctgggccaaacgtcgcctaccgctcatctgcgcacttccctccgcgcctggctcctgaggctgagtccccaccaacatccggcccactcacccgcgtctgccaccaccctccggccacgcgtggcactaacctccatctcgaccatcgctctacagcaccgcccccctatgcctgcctattccctcacattaccgcgcacccttacagacctcctacaagaccacccccccaagctagccagccc

SEQ ID NO: 521333 - DNA, 337 bp, Homo sapiens
  misc_feature (227)..(227): n is a, c, g, or t
  misc_feature (322)..(322): n is a, c, g, or t
ttcactgctaacatttttatttataaaaatatcggccagatgcggtggcttgcacctgtattcccagtactttgggaggctgaggcaggtggatcacgaggtcaggagatcgagaccatccgggctaacacagtgaaaccccatctctactaaaaatacaaaaaattagcatggtggcaggcgcctgtagtcccagctactcaggaggctgaggcaggagaatggtntgaacccgggaggcggacttggcagtgagctgagattgcaccactgcactctggcctggggtgacagagcgaaactccgtctaaaaaaaaaaaantcacaccgtgcctgc

SEQ ID NO: 521334 - DNA, 554 bp, Homo sapiens
gtaaccatggatgttggtatgacaaagtttgaaaccacaagccaaagttattacattcaatggattggggggccccttccccccaggggcccaataaagggacttcagttccaaatatgattacaggagcagcccaggcggatgtagctgtttagtgtgtaagaacttgccgccaagggcaggggagagttgtgaaggcgtgggacttttctgacgcacctgcgacggacgagaaccacgaagagcacttggacgtcctctgggttcccggtttcctcacttgcgcgaaggtgaaccgcatggcctttggcaaggtatggccaagggtgttaactcaacaaaactcggggactccaaggctttacactttcgggggcaaaaccaaaagcacacagggctttctcaaacgcgagacaatgtaacctgggccaaagacacccttgcgaggccaacccgttctccttttaacaggcccaacaggcgaaggcgccttcctctcacaccgcgcgaacgcacgcctgcgacttgcgttacggcgccttgcctcctcaatc

SEQ ID NO: 521335 - DNA, 140 bp, Homo sapiens
ctaggtactctcaggatcttacccgactagccgacagggctatggggtatgaggcaggaggatcatggggctgtgggaccagaagagaagctggggtcagaggtaggagctgacgctgtcgggctagtcgggggggtcgg

SEQ ID NO: 521336 - DNA, 146 bp, Homo sapiens
gtactctgaggattacctactcagcagtttgcaaagatcctagttccatttcctactgagaagtgagggagcctgtctaccagaaggaaatggagctaggatctttgcaaactgctgagtagagaggagaaaccgtcgaattcgag

SEQ ID NO: 521337 - DNA, 253 bp, Homo sapiens
gcgctgagtatcgtcgataaaaactggctcatgcagactgcaaatggaagacgatgccagcaacgcatgacgcttggtatctaaaggattatggtcatactatagttgtcacggtttggcaaacaatcgcgtgaagtgtttgccatgctggcaagcttatcgggtaatgaatatgaacatgtactgtggcaagatgactttgataacacaccgcctaatacgttacttgaatttatccaacatgacatcttaa

SEQ ID NO: 521338 - DNA, 387 bp, Homo sapiens
acacaggatggcagtgctcatatcccgcattatctcatgacatcttctctctcagatgaaagccttggtcgccgacgcgtcctgaatcctgctgaagaactgcaccacctatccatgcattccatgatgatgaggagacagcgcttgccatggtgcatgttctcatacacatccaggatgcagacaatatgggggccgccagaagcctgccagtgatggtctacctcctgccgggccttggggctgtcatacaggagcttcagggcacacttctgtccagtgcgccgatggaagcactccagcactttgccgttcacacccaggcccagcacctgcttggacaactggtagtcgtcgatcactgcgtacttcttgggctcccgccgc

SEQ ID NO: 521339 - DNA, 396 bp, Homo sapiens
  misc_feature (211)..(211): n is a, c, g, or t
  misc_feature (255)..(255): n is a, c, g, or t
  misc_feature (287)..(287): n is a, c, g, or t
  misc_feature (300)..(300): n is a, c, g, or t
  misc_feature (361)..(361): n is a, c, g, or t
tgccgtgcaaggcacaccagagtcaccctactgaaagccagaggtcaacgaagacgagaagaccaagaagacggtggaacgacagcttcaaatgctcaacaggaccaggcaccgcggctcccgcctggaatcccagcatccaggagacagagtggggaggatcacttgaggaaatcaagaccagcctagacaacatggtgaaacccatctntaccaaaaaattaagaaattagctaggaagctcacgtgggaggntcgttttagcccgggaagtcaaggctgcagtnagctgtgactttnccagtgcacttcaacctaggcaaaaataataataataataatttttaaaatggactgggtnagggtggatcatacctgtaattccagcacttttgg

SEQ ID NO: 521340 - DNA, 593 bp, Homo sapiens
aggagactcacctcgcacataaggactcacataaacttaagtaaaggagtggaaaaaggcatttcatgcaaatggacaccaaaaacgagctggggtagcaattcttacataagacaaaacaaactttaaagcaacaacagttaaaagagacagagatgttatataatggtaaaagtccttgttcaacaggaaaatatcacaatcctaaacatacatgcacctaacactggagctcccaagtttataaaactatgactaatagacctaagaaatgagatagacaacaacacaataatagtgtgggacttcaatactccactgacagcactaggcaggtcatcaagacagaaagtcaacaaagaaacaatggatttaaactataccttggaataaatggacttaacagatatatacagaaaagttcatccgacaaccgcagaatacacattctattcaacagtgcatggaaacttcttcaaggtaaccatatgataggcccataaatgagccttaataaattaagaaatcgaattatatcaagcactcttgtagaccacagtggaataaaactggaaatcaacttcaaaaggaac

SEQ ID NO: 521341 - DNA, 714 bp, Homo sapiens
ttaggtacgaggctgggtgttaatcggccgagggcatgaccacggtatctcgaggtcattggcttcaccatgattgtcgttggccgcgctgcagtgtgggcggacacggcgagcggctgacgcagtgtcgcgaggtggtgctcaccacatccaaggaccatcccggtgcaggtggatgtgcgatgccactgcaatgctatgcatgcctcactgcatcctgcatctgccctgctgcaaccatggccaccatggtgcagaatggccaatgctggctggatgctgccgcccccctgcacagtgctgaccatgctagcctggtgccatgatgcatgtttgctgcaatccatggtgatgtcgcgtcatgcatgcactgactatgagtgccctgcactactgacaatggagcagctcaatggaggcctctgtgcctgctgggcacttgtgtgtggtcccagtgagacatgtgacctagagctctgccgtgcccgacattgatgatgactaccatgcattggatgccctgatgtgtgcttggagccaatgtcccctgacatgccagaaactgtcccccaagtggtgcttcctggacgccatcactgccagtcgcttctacagtgatcgacctgagcccagtgagcacctcaactatgtgactgagatcgcacaggatgagatttatatcctggaccctgagctgctgggggcttctgccgg

SEQ ID NO: 521342 - DNA, 245 bp, Homo sapiens
  misc_feature (23)..(23): n is a, c, g, or t
  misc_feature (26)..(26): n is a, c, g, or t
  misc_feature (56)..(56): n is a, c, g, or t
tgtattcgtatgatgtataggtnatntacaacatcccatgcaaaaaactgggtcancagccaaagcagtagtattcagaatccaacttgggacgcttgtgcactgtctgtgagtctgctagaatggagctgtcagtgaattggtccaagtctgatggagtctgatggcctggaacatcatctgccaaagtgtccaaatagctccctacagagatgccatccagcccatcactgccatcatggagg

SEQ ID NO: 521343 - DNA, 622 bp, Homo sapiens
gagagagagagagagagagagagagagagagagagagagagagagagagagagactgatacatttagatagatcttgactggacctctccttgatctgtaataccggattaagcctgctcaagttgacatcctgacctaagcaccggaccttagttgccgcacctattccagtctagcctgtgtggagcctgtctgactttgttgaactctctggctataacacccatgagagttttgactcggactatgttgttccttcccattttctcgtgctcatgatggataccccttcctgtattggctcacagacactttgtgcgccttcgccaagacactcccggactgctttagctgccttctacagtggagcgacgccttcttcctattctttgtgctcccttgcctcttcttggataatattgctcttgagggactattctccttcttcttggggtttttttgggggtgtgtgaccttaccattctaatttttcttgtgattctggatatatgtgccctcctgggccttttgtcctttgcaagtccctggtgacagtttcccacttttccgttgggattcccgacccattccttagccccacccttcttttttccgttggtg

SEQ ID NO: 521344 - DNA, 169 bp, Homo sapiens
tggctgtggtggctgccgggatcttgggggcctcgggcgctgaccaggtggactgggcgaccctccgttctgttgctgcctgtgtgaggcgggagagctgccggggccgacacgcgccccactgtcagaccacggaatgatgtgggggggggggcggggggtggggggg

SEQ ID NO: 521345 - DNA, 223 bp, Homo sapiens
gttccagtcatgggtttcccgccatttcggcgaggcccaggccatgaacggaatggtgaacatcggcgccgtcggccgggattagttgcgccccagggtgtcatggccggcggagtcgaagacgtcctcgccgtggtccgagaggaacagcaggaaaccgttggggtcggtcttggcgtagttctagatcaggttcgagacccacgaagtcgttgtacagcac

SEQ ID NO: 521346 - DNA, 100 bp, Homo sapiens
agcactgtttggactctgagcactgtgtgtactctggccaccgttcgaactttgagcactgtgcggactctgggccctgttgcggactctgagcactgtt

SEQ ID NO: 521347 - DNA, 362 bp, Homo sapiens
attactggacttctctcacatcccctctatgtgcagcctgtttgtgctagcatcaaaatgcagctatggatctgaacactttcaaacttggatcttcacggaactagtacaatgaacataagcaaagcatacgtgcattatcataaagcaacatgatttacctccactgcgcctccaaacatggtcattggagaaatccttcccatgcccctagatgataatttggacaagcccatgaccattctgacagctcctgggtaaggcgaagttctacagccactttcaagtggaaaatacagtttcaactcggcagttgaaagtgttcaggccaggtgtggtggctcatgcctgtcatcccagca

SEQ ID NO: 521348 - DNA, 140 bp, Homo sapiens
tacatgatacgaatcgagctggtacctcttcccttggacaaagtgtattctgtagacagtagtggagaccagcagctgtgctttgtgccaagggaagaacactgcatgccctgggtctccaaatcccagagggtaatggt

SEQ ID NO: 521349 - DNA, 710 bp, Homo sapiens
cctgtacactgtatccgtgacaaatctggatggtgccttcaatgtgctctcatctgcatgctcatgtacatgctgtgtggctcagtgtcctgctgtgctctccgcaccaccccacttccatttttggccaaaccaacctgcacccctgaatttctccgcaaatttcctgccggcaaggtcccagcatttgagggtgatgatgtgattcttgtgtgttctgagagcaacgccatttgcctactatgtgagcaatgatgtgagcttgcgtggtgaagtacgtccaaggagtgcagcaggaccaagtggtgcagttgggtgagcttttgctgagttccgatatagtgcaccccagccaggtacctgggttgttaccccagctatgggcatcatgcaaccacaagcaaacagagacactgagaattgcgaaatgtgagggcaagttgataggctgatctatcattggagtgccttgcttgtgattggctttagctatggaaacagaaaccaggagggcgaccctataattacagtcgtcgattgtggcccatgaaggctgaaggtttggccaattcatgtagcagttgccagattcaacacaagaaatgtcatttctaacccacaatggtaatggttgtgcctcataaatcaacgtccagtgtgaccttacaagccctatccttaagccttggccaagtgcctatacccccaag

SEQ ID NO: 521350 - DNA, 996 bp, Homo sapiens
ggacccccgggcactgcccccgacctcttcctccctcatttcctagggggagatggcccgtgtctgaccccccagcctcgtcgctccatgcagtgtctggccaaccgcagcctgcgccgtggcgggaggcactcctcgggcagcgccgacgaagcggcgagtgaagaaggtgctgggccatgccccgtcagggcggctgtcccagccgcttccactcagtaccagcagcaccgaccgagtctggagggcggcacggagtccccagcagaacggcccgtagcggagcagcaggaggtcccagggtccgggcgccgtcttggccccgagtcctgcagccgcaggcggcacgaaagtggagccagcccgcaaacttgccccgctgcggcccgcggctcccggcaaatccccctcaggaaagaggtctgaaaatcaaagatgggaacactcggagaagatggcccttccccatggccagcttgttcaatggtatacacttgtatgagcaagcaatagataatcagagttgaagagcaacactataaggttgccagctaaccaagatcacctctgcgaaaaagaaatgaaaacaacctttgccaggattctgttgcatcctgacacgaattcagagagccaggaaaataagcctttgaaaaataccgagaacattaaaaattcgcatttgaagaaatcagcatttctaactgagtgagccaaaaggaaaatatgctggggcaaagttagtgatccaccttctcctagtgtcttccaagctcctagtcactggatggacgctgttgaattccaacaaacaggagctatggaaaccttaaacgcctcaagtcaaatatattacattagttgtggggtaaaaattccaaatcggctggaatgtaaaatgaaggctgttacacagtgaactgaaacacaacggatatatcaacaggccagatttaacatcaaacataattccacacttactaccaacatgttatc

SEQ ID NO: 521351 - DNA, 201 bp, Homo sapiens
ctcaggaaaggtatcacattgtgggtcagaaactaactgaaaatgaggctgggcacggtggctcacacctataatctcaacactctggaaggccaaggcagacaaatttgcttgagctcaggagttcaagaccaaccgaggcaacatgacaagacccctgtctctataaaaatatttttaacaaattatgctcgggtgtgg

SEQ ID NO: 521352 - DNA, 246 bp, Homo sapiens
gtcacttccccatcacgtagtacagatgggtctctagtagacactccgaaattcttgggtgaaaaatatataccgcaggtacggatgagaacaggtgtagctagtacagtatactcaagcccagaaagatgatttaatccttgaaggaaatgacattgagcttgtttcaaattcagcggctttgattcagcaagccacggtcaacccagaagccacggtcaacccaaaagccacgggtcaacccac

SEQ ID NO: 521353 - DNA, 773 bp, Homo sapiens
  misc_feature (705)..(705): n is a, c, g, or t
  misc_feature (708)..(708): n is a, c, g, or t
  misc_feature (732)..(732): n is a, c, g, or t
  misc_feature (744)..(744): n is a, c, g, or t
cggagtcttattgtggcggtggttgtctcagaatcagcggactttttgggtcgtaggaacctggtatgaggcgtcgggaccatagatgcgagttattatgtttagtttagaaaccgaccctcacccgttacctcttaaaagataaaaaaagccggccccccccccccctggctccccgcccgcccgcccgccccccaagagacagggctccgtcccgccgtttagatcggaggctagcggtcccctatagtcgtagccacagttcatcgtagttctgaatctccggttctaagtaacttctttattctagttctttaggcactcaggataataggtacgtaatataaagtatagtctcaaaaaaaaaaaaaaaaaaaaatctgagggggggtttggcatttaacctgtttcacagcgagctgcaccataacctatcggttgctgccccataatgctgcgatcgggaaaatttcggtgccatttaatccaactgttccgtagtatactttttccctgttagtcggtgcaacagtgaagaggtttgtattgactgtttcctttaatagccgtgtagttcgaacggtgaacggtaaaccgcaagtgccaacaccccgccaaaacctgtgccaaacccccgccaaactagtctaccccccaattaacaggttgaaactggtaaaactttccacaaactaaaagaaccgnttnagacagggccgagcgccgccttancccggaatagancttatcacccaaagattgcgggttcttaa

SEQ ID NO: 521354 - DNA, 697 bp, Homo sapiens
cggagtcttattgtggcggtggttgtctcagaatcagcggactttttgggtcgtaggaacctggtatgagtcctttcgggcggttgcaggatataggatgggaagcgtgcggcgccccctctcgctcctttcatagtattaagtatagaaccgggcgttcccttagttgctggcttccttccgtcgagacgccagatcggaagacgagaaacggtactaccccaaggtaccaattgccttagttaaggaatctctaccctataagcctagcgaatctccaatcccggttctcgtcgtaggggatagtagtgcgacgccctagaattcgatcccggagctaaataaagttcggacccgaagtttagcctcgttattcgtcagtcgccggtaacccatccaattctctttcgtcctagcccttctactcgtaaaggcgtcgtatcctacaggcccgccccgaggaccaagctgcacaaagtatggatgaagttccgacgtttggagccatcgtcttcgccatctcttcggcatagtataggctctttctattatagggttaggggtagggttaggtagttccgcaccggcccttccaaatggggccgacgttgggatccgggcccggtctaagtctatttcgcttgagaacgccggcaaattaagtccctttacgtttgagctattttagggtccggga

SEQ ID NO: 521355 - DNA, 1561 bp, Homo sapiens
  misc_feature (159)..(159): n is a, c, g, or t
ggtaaaacctgagcccatgcactccctaacagggcgcctctctcagctcgctcctatatgactctcgcggtcctcatgccatgtgatttcacgttccagctccataacgcatcctcagtagctagcgcgcgtagcgtaacgcaacagcacttaatccantactaccagagtgatgggcggcgactttaacacggagaagaggcgacataggcaaggccaccacagaccacctgtccaaaaatggccgttcgagtacaggggagtaagtcactattttatttagccgtcaggaaagtttggtgttactttgcgcctagggagtttcctctacgttgcaggcgcatatttgacacactacctagaccttagacgcctcttaagcccccgaatttcagtgagggcactttggggccccgcgatatactgggattgcacctccggcctgaacagttccacgctaagaaagtgcgcgcacataccatggaaaaacaagccaatacgcctgtgatgtgacctccggaagagttcgacggaaagtgaagtacacattgcagcgcgtagaagagctacagcgcaattaagtctaggatagaagaaaacatagccagtagacactcgagaactaaatgtgcggaatgcccacttgctcgaatttaccacattaatacaaggtggggggtcttgcatcatgttggtgaccccatgctcttaacaaaagacgcattctagagaggctcacatttctgcaggtcctcacctatatcgaaccgaatttgctgcctggaaacgggctatctccttaagcaggacatcgaatccaattctctgttaagcctaggcgcaacaagcggacattcgccaaccgaggaagctttccaaactctcaacttactctggggcatcaaaccatttaatcctgccaagctaaagtacgtggcgtgtcaacttcccggcgcgaaagctacagttaattggacagcctgtaagcattccccaaggatgcaattccaaccttttattggcggacttgtccgcaaaaagcccttggccggacccttggaaattaccgttggaacaattttctcgggcagcaaattgtcgggggattgacacgtacagtaaccttggcgattggttcctcaccatctctcaattggaactgaaggggggcttagaaaaaagaaaaaacagcctcagcagtcaagagaacacaaaccaacaacaaaaaaaaaccctggggccaatatcctacggggcggacaacaacaacgcagacacgagcagggccaacacggcgccagcaggagaaactaagcaaccaccgccttagacgcaaaagaggggagaaaacacggcaggcacccaataatgagagccgctctacttactcaccaaaccggaacgcagcacatcgaacagcagtccaaagagcacacaacacgacgacgcaaacaacgacaatcagaagaagcaagaaagagcaaaacaaacaacaacacaagcacgcacagcgaacacacacgcatggcacaccctcccagccaagatcaaacacacgaaa

SEQ ID NO: 521356 - DNA, 888 bp, Homo sapiens
  misc_feature (54)..(54): n is a, c, g, or t
  misc_feature (72)..(72): n is a, c, g, or t
  misc_feature (83)..(83): n is a, c, g, or t
  misc_feature (91)..(92): n is a, c, g, or t
  misc_feature (94)..(94): n is a, c, g, or t
  misc_feature (115)..(116): n is a, c, g, or t
  misc_feature (820)..(820): n is a, c, g, or t
  misc_feature (823)..(823): n is a, c, g, or t
  misc_feature (847)..(847): n is a, c, g, or t
  misc_feature (859)..(859): n is a, c, g, or t
tgagcccccccccccccccccctctcgctgtttaggtcggagcgtaccggtgtnactctggtctatcgtaantcttgttcttngggcctanntnacctcttcgttctagttcttnnagcagtcgggatcataggcgttcgttattatgtttagtcaaccccccgcacccccagcagagatggggccctattgcgccggttaggacggctctgactcttcgattctgcgacttatttgttctggttctttaaagcgtcgggaccataggtgcgagttattgtgtttggttaagagtcttcctccaattgtataggtacgcgaggtttagaagatcggtctcgttattagaaggaaggaccgcccttcctaattaattccccggccgtcattaccctccgcttccgagaaaggcgtcttcagcgtccgcagagggaaatgtcatgcttgtctgcgttgaaccttcgtagtttgggggacttatcagcctcagagtggttgttattgtggcggagtcttaacctgtttcacagcgagctgcaccataacctatcggttgctgccccataatgctgcgatcgggaaaatttcggtgccatttaatccaactgttccgtagtatactttttccctgttagtcggtgcaacagtgaagaggtttgtattgactgtttcctttaatagccgtgtagttcgaacggtgaacggtaaaccgcaagtgccaacaccccgccaaaacctgtgccaaacccccgccaaactagtctaccccccaattaacaggttgaaactggtaaaactttccacaaactaaaagaaccgnttnagacagggccgagcgccgccttancccggaatagancttatcacccaaagattgcgggttcttaa

SEQ ID NO: 521357 - DNA, 298 bp, Homo sapiens
actgaagcgcctcgtgctgaattgcatgccaatctctgagagctgtatcctttattgaacttagcaagccacaacccacagtctctctgtggtattaaaaataaaagagattacgttagattccccacttcctttcctgccttgattctttccattttaaagtgagaccccttgtctctacaaaaaattcataactaactgggcgctgcgttgtgcatgcctgttgtcctagctacttaaaagactgaggtgagaggattgcttgagtccgggagttccaggctgcaatgagctatga

SEQ ID NO: 521358 - DNA, 953 bp, Homo sapiens
  misc_feature (71)..(73): n is a, c, g, or t
  misc_feature (83)..(83): n is a, c, g, or t
  misc_feature (87)..(87): n is a, c, g, or t
  misc_feature (92)..(92): n is a, c, g, or t
  misc_feature (96)..(97): n is a, c, g, or t
  misc_feature (99)..(99): n is a, c, g, or t
  misc_feature (102)..(102): n is a, c, g, or t
  misc_feature (163)..(163): n is a, c, g, or t
  misc_feature (218)..(218): n is a, c, g, or t
  misc_feature (222)..(222): n is a, c, g, or t
  misc_feature (225)..(225): n is a, c, g, or t
  misc_feature (885)..(885): n is a, c, g, or t
  misc_feature (888)..(888): n is a, c, g, or t
  misc_feature (912)..(912): n is a, c, g, or t
  misc_feature (924)..(924): n is a, c, g, or t
cggagtcttattgtggcggtggttgtctcagaatcagcggactttttgggtcgtaggaacctggtatgagnnncataaaaacnagtngggtncggnngngtncgttcgcaactttagtcatctaggaggtcgaggtaggagaactgtccgaatttgggaggtngaagccgtagcgagtcgagactgtgttatcgtatcttagttcgggcgatagagtnaganctngctctacaaacaaacataaagtttacctccttagagctccgcgttccaaacaaaatatattctctcgtcgcgggaagatcgcgtaacggtatagttgtagagtccggcccgggaggccgaagcgtctcggggagaacctgcagactacttctagaaaagttccgtttcggcgcctcattagaaaaatgctctttaactatttaggaaagtcgcttatagcagcttttttccacttatggcgctatcccttacgggcctagccactcgtggctaattatggctcgataacaccaaacggaaaacctcctaaatagccaaaaaaaaaaaaaaaaaatctgagggggggtttggcatttaacctgtttcacagcgagctgcaccataacctatcggttgctgccccataatgctgcgatcgggaaaatttcggtgccatttaatccaactgttccgtagtatactttttccctgttagtcggtgcaacagtgaagaggtttgtattgactgtttcctttaatagccgtgtagttcgaacggtgaacggtaaaccgcaagtgccaacaccccgccaaaacctgtgccaaacccccgccaaactagtctaccccccaattaacaggttgaaactggtaaaactttccacaaactaaaagaaccgnttnagacagggccgagcgccgccttancccggaatagancttatcacccaaagattgcgggttcttaa

SEQ ID NO: 521359 - DNA, 650 bp, Homo sapiens
cttacccacagtttatctgcagatgagaccgaagcacagagaactgcctgctcatgtcactcgggcttatgcccaagatgtcgagtttgccgtatatgcctgagccttaatgctgcaagcagtacatcttatagccgcagctgctaacgtaccaatgctgccatagggaagaacagtgattatacgctcagagctgaacctagcctacgggcacaacatgctaagacactagcggacagtgcgttcgactatacgctatagacccaatcactggagctacgcttcatgatgatgtagccattaccgcgcatgcctatgctagagatgatactaccactggtactgacctgctacgctctatagccaagcatggctatgagacgatcagtattggagctaagcagtgtaaatataaggggctacatgatcctgttgatgctgtagtgctgcacttaggaagcagctactccagagaccaccctgtgcgaagtgcacaagatgctacgactacttgcacacgcgacttacgacgtagctgatatcatcttagatcagtgtatacccacgcccaacccgggtgcagcacttgaaagggatggagctcaattactggatacttgattaacacgtcagggtgcgcgcctagtccc

SEQ ID NO: 521360 - DNA, 673 bp, Homo sapiens
cggagtcttattgtggcggtggttgtctcagaatcagcggactttttgggtcgtaggaacctggtatgagcgataacgaggcactcgcctcggaggttatcggtactcctaagaagccgtttaattcgtggaaaacaaactcgagcaataacaagactaaggaggcgtgagagggagtccctgacggagtagttagtgcgtaggagtcgacgtcgatagggaattagtcggagattgcgtatgggtgtgcgccttgcggttctagcggttctaaaattccgacgtcgaggagcaatccgactggtcgcgcgagcaacgatattcccgttggttcgagcctggcgagatcgtcgctttctcacgataactggactattattactattttcggggttcctattatgtccgctctttcgcttattacaaattcttcgcttaattttcctaatcgtaatcgttattcggttcggtctggtaagcggccgaggaagaggtggactgctagcgggaatttcaggcgttagaagttacccccttctaaggagacctttacttaggacgcggttacttaggatcctattcgcgacggtaatgaggagagcaatcgttagtcgagtttgggtcgtttggagtaacgtattcgcccggaaatagcggcgtgacgtagtaataa

SEQ ID NO: 521361 - DNA, 951 bp, Homo sapiens
  misc_feature (883)..(883): n is a, c, g, or t
  misc_feature (886)..(886): n is a, c, g, or t
  misc_feature (910)..(910): n is a, c, g, or t
  misc_feature (922)..(922): n is a, c, g, or t
tggcatttctactcggccaggtgcttacactagccggatggtagtctctaccacctcgtttcctgcggtgtccgttggtcacgccgcgtttcccgtccctctgggtttcatatattgggtagtttgttatacgtcgtgtgcttgtggcgattctatttagtactctattgatatcatatagggtacgtgggaagcttctggacctggtcacggggactgctgttctgttgaaatcgattgcacccttgaagaggccggtaacgtcgtccctgtgaattgttctattcttggcacttgctgtagctctcgcgagggttcttgttcccctgtagccgcgattatcgcatccgccggcgtcgatgtcgcctgttgtggtgattctagtaccttttattcggtcactcgtgtaatagcggtaccgggagcccctattttggtttgtggcatagaagaccctgttgatgacccggaatgtcttcccgttgttgttgaatgtacgagtgccactaaacattgcgaattgttcgtagtttgggggacttatcagcctcagagtggttgttattgtggcggagtcttaacctgtttcacagcgagctgcaccataacctatcggttgctgccccataatgctgcgatcgggaaaatttcggtgccatttaatccaactgttccgtagtatactttttccctgttagtcggtgcaacagtgaagaggtttgtattgactgtttcctttaatagccgtgtagttcgaacggtgaacggtaaaccgcaagtgccaacaccccgccaaaacctgtgccaaacccccgccaaactagtctaccccccaattaacaggttgaaactggtaaaactttccacaaactaaaagaaccgnttnagacagggccgagcgccgccttancccggaatagancttatcacccaaagattgcgggttcttaa

SEQ ID NO: 521362 - DNA, 464 bp, Homo sapiens
ttggcggggaccctcggcgcgtgtccctggcagcagaccgtggcgggactgattgtggcccagcatccaacccttctcacggccagagacaccaatttcccaacttttccggagagctgttgctgaatgggaggctccgaacttctcccccggccgccgtcaatcagcccattgagaggggctccagcagcaggcaaattgctttggacaaggaggtcaagttgcccccatgtcatccaagccaaagaaagtgggtgtcctgcctccgccaaaagcctgccaatgtcctcaatgatgcccagaccaaggctcctggccgtgagtggcccctttccactaactggggtcctgtgatcgatggccacttcctccgtgagcctccagccagagcactgaagaggtcttcacgggtagaggtcgctctggtcattgggaggtctcaggacgacgggctcctcaacaga

SEQ ID NO: 521363 - DNA, 650 bp, Homo sapiens
cggagtcttattgtggcggtggttgtctcagaatcagcggactttttgggtcgtaggaacctggtatgagaacatacgcaaaacgtataaaacatcgtaacacccacccgcaaaacgacctcgagcctccgacaagcactcttaacccagcacacttataccgagggatttattacggacaagcaggtacccccagcacgccaagacacgccgcacccttctcgaggaacctcccgcccacaaacgaaccatacccaccccccctcggtttaccaaacgccaacacataagcagtcgtagcggcccctcactcggcacatacccgcacctaccaacgccattcccctcggaaatttcctcagacaacgaaacccctattagaaagcgccgtagtgcccacagtagcttccggtacctcccttaccaccgtataggcgagccctcccccccagccagagcgacgctagcgatttcggtcggttacttaaatcggggttctactcagcgacggcactccggcggaactaataaagctaggagctcgaggccgacaggcctagaaacctaacccggccgcgcagtcagcgccgactagacccccgggatcgatatacccaacacaggacacacaaattgcaaagtcaggccac

SEQ ID NO: 521364 - DNA, 255 bp, Homo sapiens
cggagtcttattgtggcggtggttgtctcagaatcagcggactttttgggtcgtaggaacctggtatgagcgtgaatttgggtttgggggggatggtgtttgttaggagtgttttttatctttaggttagtttattttgctggattgggttttgtgtgtttaggttaggtattgggtctttttcgtcttttgggggttttcttttgtgaggtggtatcatgttgtctttggttttttgcgagtcggttatgtttt

SEQ ID NO: 521365 - DNA, 81 bp, Homo sapiens
tctgaggacacggccgtgtattactgtgcgagagaggggatagcagcatataaaaacccctttgactactggggccaggga

SEQ ID NO: 521366 - DNA, 193 bp, Homo sapiens
cggagtcttattgtggcggtggttgtctcagaatcagcggactttttgggtcgtaggaacctggtatgagttccacaagaaacacgggatcgcccataaacgagcgaccttagcaccctacccagaccccttcactctataaactagccaacgcgcggtcccccgaactcaaccgggcggctacactcagcta

SEQ ID NO: 521367 - DNA, 156 bp, Homo sapiens
tccctccataatgtgtgccaagagggcactactgtaattttaccagtcctctactgatggagtatttactattcagactttattgttagaaatggtgaacttcctggttgacaagattcttatgccataagctcaagtatatttccaggtataaga

SEQ ID NO: 521368 - DNA, 179 bp, Homo sapiens
ccccaacaaaattgtaaacgttgttaggtttttgggtaaaactcttgctgtattgtgacagctgtgattggtgagttgcccgtcctggctgccagttaccctgggattggaacaacatttttactttttggacaacaaggaaaagctttgtaaataaaattttaaccttttgaaaaaaa

SEQ ID NO: 521369 - DNA, 243 bp, Homo sapiens
cttttttgggggccccccccccaaaaaaaaaattgggccccttgggggggggggttccccccccccccccccccttgggggggggaaaaacccccttttttccccccccccccggttaaaaaaaagggttgggggggccttttccctttttggccccggccttttttaaacgggcccccccccggggtttcccccccccccccccccctttttttttaaaaaggggcccccggggggttttta

SEQ ID NO: 521370 - DNA, 307 bp, Homo sapiens
  misc_feature (118)..(118): n is a, c, g, or t
ttctcaaaatagggccgggcatggtggctcacgcctttgcaacccccaacatttggggggccgaggagggcagatcaacccgaagtcaggagttcgagaccagcctgggccaacgtgngtaaacctcgtctctactaaaaatacaaaaaattagccaggcgtggtggcacgcgcccgcagtcccagccattcaggaggctgaggcaggagaatcgcctgaacccaggaggcagagattgcagtgagctgagattgtaccactgcactccagcctgggtgacagaacaaaactccatcacaaaaaaaa

SEQ ID NO: 521371 - DNA, 1649 bp, Homo sapiens
  misc_feature (651)..(651): n is a, c, g, or t
  misc_feature (657)..(657): n is a, c, g, or t
  misc_feature (661)..(661): n is a, c, g, or t
  misc_feature (664)..(664): n is a, c, g, or t
  misc_feature (672)..(672): n is a, c, g, or t
  misc_feature (679)..(679): n is a, c, g, or t
  misc_feature (687)..(687): n is a, c, g, or t
  misc_feature (695)..(695): n is a, c, g, or t
  misc_feature (699)..(699): n is a, c, g, or t
  misc_feature (703)..(703): n is a, c, g, or t
  misc_feature (714)..(714): n is a, c, g, or t
  misc_feature (718)..(718): n is a, c, g, or t
  misc_feature (732)..(733): n is a, c, g, or t
  misc_feature (737)..(737): n is a, c, g, or t
  misc_feature (743)..(743): n is a, c, g, or t
  misc_feature (755)..(755): n is a, c, g, or t
  misc_feature (763)..(763): n is a, c, g, or t
  misc_feature (767)..(769): n is a, c, g, or t
  misc_feature (779)..(779): n is a, c, g, or t
  misc_feature (783)..(783): n is a, c, g, or t
  misc_feature (788)..(788): n is a, c, g, or t
  misc_feature (792)..(793): n is a, c, g, or t
  misc_feature (795)..(795): n is a, c, g, or t
  misc_feature (798)..(798): n is a, c, g, or t
  misc_feature (859)..(859): n is a, c, g, or t
  misc_feature (914)..(914): n is a, c, g, or t
  misc_feature (918)..(918): n is a, c, g, or t
  misc_feature (921)..(921): n is a, c, g, or t
  misc_feature (1581)..(1581): n is a, c, g, or t
  misc_feature (1584)..(1584): n is a, c, g, or t
  misc_feature (1608)..(1608): n is a, c, g, or t
  misc_feature (1620)..(1620): n is a, c, g, or t
cggagtcttattgtggcggtggttgtctcagaatcagcggactttttgggtcgtaggaacctggtatgaggacggggagaaaaaaaaacagcggccccttccgcccgtaaaaatccttccttcacctctacccccctccaacccctcccaacccagcttaagccttagcctccccaggttcctctcccgacccaccccttttcgtacgcgagaagtagcctagaaaaaggctcacactcttattcttcagcgagccagagcgcccctctagagtattctcgggcggtaaagggaagtacgccttcgttaaggcccgtcgcggacctagaagtattaggagtaagagattagaaggacgactcgtcttcccgcaatgccgccgagggtttctccgcccttaacgagtagtccacaggccatctatagcttatccctctatcggatatataaagcggtctcccactcattcccgtgggagacccctatctcttcgtaaacgactgcctctatatctacaccagtctacgccggaaccctttacttcgttacgcttccctttaccctcccccggtccccccgttcttattccccagtttatactacccaatcttatcatcgcgaaagtccgtccaaagaaaactttctccggtngggcgnggcngtntatgttcncaacttnagtatccngggaggtnaagngggnagactataagnctangagactgagattanntcgnttaatncggcgaaatttngctctcancaannncataaaaacnagtngggtncggnngngtncgttcgcaactttagtcatctaggaggtcgaggtaggagaactgtccgaatttgggaggtngaagccgtagcgagtcgagactgtgttatcgtatcttagttcgggcgatagagtnaganctngctctacaaacaaacataaagtttacctccttagagctccgcgttccaaacaaaatatattctctcgtcgcgggaagatcgcgtaacggtatagttgtagagtccggcccgggaggccgaagcgtctcggggagaacctgcagactacttctagaaaagttccgtttcggcgcctcattagaaaaatgctctttaactatttaggaaagtcgcttatagcagcttttttccacttatggcgctatcccttacgggcctagccactcgtggctaattatggctcgataacaccaaacggaaaacctcctaaatagccaaaaaaaaaaaaaaaaaatctgagggggggtttggcatttaacctgtttcacagcgagctgcaccataacctatcggttgctgccccataatgctgcgatcgggaaaatttcggtgccatttaatccaactgttccgtagtatactttttccctgttagtcggtgcaacagtgaagaggtttgtattgactgtttcctttaatagccgtgtagttcgaacggtgaacggtaaaccgcaagtgccaacaccccgccaaaacctgtgccaaacccccgccaaactagtctaccccccaattaacaggttgaaactggtaaaactttccacaaactaaaagaaccgnttnagacagggccgagcgccgccttancccggaatagancttatcacccaaagattgcgggttcttaa

SEQ ID NO: 521372 - DNA, 120 bp, Homo sapiens
gtgggttcccgagccctcttccaatccgccgagggggcacctaccaacccgttctcgacccggcgaggccggggaaaggtggaagcacggagcccaccgtttttagtggcccccaaaaaa

SEQ ID NO: 521373 - DNA, 155 bp, Homo sapiens
tagctcatagaggatccctacacgtgcgaatatatattatttagaatgcacactaacagcatgacgataaactgtcatacacaaacctgtacaagaagcacgtaatactttaaaatgtgttgttattcaccaagtaatttaagttatagcattac

SEQ ID NO: 521374 - DNA, 83 bp, Homo sapiens
ccctccaaaggatttttttttgggccaattaaaaaaaaaaattttttggggtctttccccaaaaaaaacccgggaaagtttta

SEQ ID NO: 521375 - DNA, 754 bp, Homo sapiens
cttggaattccgtgatgggaaagcacgtgctaaagaatgtcaacgacatgtagaacacgctcttacatgacagatggtaagctgatattaaataagcgaatgggtcgccgtgatgcaacagctggtggtgctgagaagtcacatatgttaaaattcgagagcactccagtcaagcagtcgaggtggaggttgctgctgaagatttgactccatccttttctcagagtaatgaatttgcagatgctgtaacctctaagtgataaaaagaagagattgcttgaattgtactgtgtgtggctgcactagaatagattgttatcgtgtccacaaaggtcagagattgtaaatggtctgtactgacttgctaattaaatatcccttgtatacatgacagctaaattcatggttcagaactgtgttgaaacgcattagtggtgctgggtaataagaagtgaatgagtgtaatccgttgtgtgttttacctgattgcctagacggttttcccagtggttgggttagaatatatttggtctcgatgtttatattgggcatgtttagatgtcaggtttagtcttctgaagatgaagttcagccatttggtatcaaacagcacaagcaggtgtctgtcacttttccatgcttaaagtttagtgagatgtgatatgtaagatctgattggctagttcttccttgtagagttataaatggaacagattaacatatctgatcactagttgttcatactctggatata

SEQ ID NO: 521376 - DNA, 197 bp, Homo sapiens
actcctcgtaacagcgcctacgagcgaactttggagtctgggggtgggtaaagtctgagaggttggatccctggatccccaaaatgctggaagcaagccatgtttgttttcccagtggcctgggaagcaccatgcctgggttccctaggaggacagagccctggatattggaggggttaggaggcgctcgttacgga

SEQ ID NO: 521377 - DNA, 242 bp, Homo sapiens
tgtggagcctcctgtggccttagatgagtccctatttagaggtaggcaaatcaaggtgatcccacccctcttctccggctccctgcccctccagatggcctggtgatctatttggtttccttttggtgtttctttttctggttttggagtgtctttctctggcaggtttctggtagccgggaagatctccggttcggctccaacggaggctcacagtggctcaacggaggctcacagtggct

SEQ ID NO: 521378 - DNA, 308 bp, Homo sapiens
  misc_feature (138)..(138): n is a, c, g, or t
  misc_feature (141)..(141): n is a, c, g, or t
  misc_feature (143)..(144): n is a, c, g, or t
aggtggcgagcgccgccccccggccccggcccgccgcgccagctggtggaggagctgcagagccgctaccggcagatggaggaacgcattcacctgccccatctgcatcgacagccacatccgcctcgtgttccagtncgngnnccccacgcatgcgccccttgcggttctgccctcagcgcctggctcatctgcccccagtccattcgtgtccgacatacagatgtttgtgtgagtccgcaccgtcgtccgcgccccatctgcctttgagtggccccgtcctctgttctatataaagatagattctc

SEQ ID NO: 521379 - DNA, 595 bp, Homo sapiens
atttattgtttcatagttcttgtattagtcagggttctctagtggggcagaactaataggatagatgtatatgtgaaagggagttcattaaggagaattgactcacaagatcacaaggtgaagtcccacagtaggccatctgcaagctgaggagcaaagaagccagtccgagtcccaaaacttcaaagtagggaagatgactgtgcagtcttcagtctgtggccaaaggtccaagagcccctggcaaaccactggtgtaggtccaagagtctaaaagctgaagaacttggagtctgatgttcaagggcagaaagcattcagcatgggagaaagatgaagcctgggagactcagcaagtctgcctcttccacattcttctgcctgctttattctagccttgctggtagctgattagatggtgcccacccagatcaatggtgggtctgcctctcccattccactgactcaaatgttattctcctttggcatcaccctaacagacacacccaggaacaatactttgcatacttcagttcaatcaagttgacactcaatattaactgtcacggttctggaagctagaagtccaagatca

SEQ ID NO: 521380 - DNA, 133 bp, Homo sapiens
aaaaagggggggggggcccccccccccccctgtttttgtggggggggggaaccaaaatttttcccaaccggggggcccccttttgggtttctttttgggggtttttgaaaaaaaaaaaaaaccttttttggga

SEQ ID NO: 521381 - DNA, 324 bp, Homo sapiens
gttagtatatagtctaaattgtatgctacgtaaaagagactagggccgggcacagtggctcacgcctgtaatcccagccaaggaggccaaggtgcgcggattgcctgaggtcaggagttcgagaccagtctggccaacatgatgaatccctatctctactaaaaatacaaaatttagccgggcgtggtgattcacgcctgtattcccagctactcgggaggctgaggcatgagaatcgcttgagcccaggaggcgaaggttacagtgagctgagatcatgccattgtacttcagcctggataacagagtgagactcagtctcta

SEQ ID NO: 521382 - DNA, 863 bp, Homo sapiens
gcctctccgaacgcaaatgaaggtgtccttgcgcgcctcatcggggtccgcttcttcctgtgctgcggggaccttctgcggccgatgagaagaagaggggcccaaagtcaccgtcaggttgtattgacctacgaatgtgagatgaagatgtaggcggggtgatcttgtctctccggaaagattgtccaaaaacagtggataattttgtggccttagctacaggagagaaggatttgctacaaaaacagcaatttccatcgtgtaatcaaggacttcatgatccaggggggagattccaccagggagattgcacaggaggaagagcatctagggggagcgcttccccggatgagaatttcaaagttgaaggcaatagtggccttggttggttgagcagtgacaaaaggcagggaaaaagaccacaaaagtgtccaaggttcttcatcaaggacatgcaaggacaggcttgttagatggaagcattgtgttgttggcaaaggtctaagagggcatgaagttgttggcaagggtgaagagcacaaagaaaagacagggggaataaccccttgaggatgtgatcatccgcagattggggaaagatcgggtgggagaagccttttgcaatcgcaaggagtaggcacagggactcttctatgagtgaacggtttgtgcaggcttgtaatccgacaaagggttttgagtgatggccggtggtggattgtggagggaccacttcctaattcagaggcaggatactttgtaaatcttcccctggacaaaaaagaaaaaaaaattgggcgggaaataaaatttggggggcagaaaagtgatctcaatgggatgttcaaagggggggaagtttt

SEQ ID NO: 521383 - DNA, 374 bp, Homo sapiens
ggcccccaaataatactacgtatggccacataattacccccatactccttacactattcctcatcacccaactaaaaatattaaacacaagactaccacctacctccctcaccaaagcccataaaaataaaaaattataagcaaaccctgagaaccaaatatgaacgaagaatctgttcgacttcattcattagccccacacagatcctcaggcctaccgcgccgcagatacgtgatcattcatatttcccccttctattgtatccccacactccagaatatctcatcaaacaaccgagctaatcaccacccagacaatgactaagtcaaactaacctcaaacacaaatgataacctatacacaagcactaaag

SEQ ID NO: 521384 - DNA, 922 bp, Homo sapiens
tgttgccccccgcggtgtccgcgggttatcctcacacttttttctcacccccccgcgggggaacacgctctcttttgtgtcccccctcttttgtggccctcatctttttatagtggggaccccacactctcatatgttgggacaaaccacactgctgtgtttgactcaccacacacatataccacctcgcgtcgtggggttgatccacccctgctgctcctgcagcaatttttctcccgcgcgagatgttttttttctctggagaccacaccacgcgcgctctctcgcggcgcgtgtatataagtgcccccctctcttctttgtgtgtccacagcccctctctctcacagctgttctctctttctctcttctcgcgcggtggagcgacccatctctctcttttggtttttctggtgagtttctctgtggcccacacacacaccgcggtctcactctctttgtgccgccacacaccgcgcgtgtgtctctctctctttgtcctcgcgaatactctctctctcgcgagaggcgctcttctctctctcgaggggcccccccctctctctctgtgtgtggagatttttgtggggcgcacacacaggggcgacacacacttcgcctcttctttctcttttggcccgcggtgttctctccctctcctctgtctcttggagagaggtggtctccctctctctctcttcgcccacacagcctctttggggtgttttttttccctctttttttttttttgctttttatataataatttgaagcccccggccccccccccacacccccccaccccccccctcgcgggtataatatatatatattttttttttaaaacgggttttttttttttttctccttttttttttccctaatctcccttatatataaaaattgggggcccccctcccca

SEQ ID NO: 521385 - DNA, 906 bp, Homo sapiens
gcgctcaccacccacagcgtgaatcctgaggtgccgcatgggcggttctgctgcttcgctgcaggataaggtggagctaccgaacagctgattcatatgccaagaattggagtcttctttcaaaccagtgggggttggacaatgaatgtagttaactggttcctgctcacactccagaattaaacttctatgtgaacaaggaaaatcagcaatttcagcaaaaaataattacaaacaataagaaaatgtaatttatgatagtaataaaatagagcataacgaaagtgtgaaacttttctgaagcctggtcagtggttaacaagtatttaacatctagtgttaatgacagatgtcctgttttataacctaccaaaaaaaaaaaacagcataagggcataaaaaaaaaacataccgtggtacgggtatagtacccatcctttatgtgacaaggccaaaagccaaatccggggtgccttattcagaagttgaggagttacttaagagaaaattcttacataagccagttaaattaagagactggatttaaattacattttacatttgaaaggatgattgattaggaccgctgaattatatggggtgggacatctgacataaaggattagcaggcattatgaagggagtaattcagcaaaaatgtctaggtggcttgaaagggcagcttgaacgtttttaaaaggtattacggggttccggaaaatttatgatgagagaagtagggggaaggggcagggtaaaatagtgacggtacaacaaggagctgtttgccgtgggtaagtatcaataggccacattacaggtataactacactatcactgtttctaaatggtaaacatggtggtaagagggaatggtaaacggagaaacgatggctattttcgtta

SEQ ID NO: 521386 - DNA, 168 bp, Homo sapiens
cagtgcttgtaaaaggtttaaagaactggaagtaaaatttttaaagaaacctaatgatggtaaaataaaaggcctggaatttattcaagatcctaatggctactggattaaaattttaattcctaacaaattggcaaccttaatgtagtgctgtaagatttctccttt

SEQ ID NO: 521387 - DNA, 415 bp, Homo sapiens
ggcagtgcacggttgccttgctgcatggtctgactctatgaggatacctctgtacaccactcgaggacacgcccctttgtttggtatcattatctcagtttttgagcagggaaacgtctacttccctagaggacccacagtcagtactcgtgcagagctggaaatcaaagcccggtccatccaaagcgttcagccatatgtctcttctctggacctctctggaaatgcttctcaactttgatgatggctccagtgacaggcagcagccaccaggactgtgatctccctgggatttaaagtgggaggttaaaccaggctccacgccactgcggaattgtgcaattgtaagtcaagtctcaattgtgagccaagcttctcccagggtcagaggtggagttagaaaggccccatgtga

SEQ ID NO: 521388 - DNA, 157 bp, Homo sapiens
tatatgctgtctgtggaggcgtctgttgtttaagaagaccaccaaggagaagaggcgcaactggaagagatacgctttgccaggagtctttgcttcatttggcgctgattatgaataaaggaaagaggatagagaaaaggcagccactgataattta

SEQ ID NO: 521389 - DNA, 785 bp, Homo sapiens
agcggaatgaagagcgttttggagacgggggctgggtgaggctcacgtttggagggcttcgctgtctgcttcggagagcgtaaggatatcgatgatcatgagatccctgctcagtaatccccttcctgtgtggcctgctcgtgggtcgtttcgtgccccaggctgccagggatgagtgagcctgactaggccagactttctcgcaagccccggcagtgatggagcctagacagtacaggaagcactagttgcaacgaccataggcagcatatcagtggaggcagtctatcacaggttgtctatcgagacataaccgagacggctggagcgatgtcagcgcacgaacgaagttggcatgcctcgcacttaccttcagaatcctgcagtgagttactgcatgtgcaggactaagttgtgcctctgatggctttacgcaactcgtccacgagcacatctacgtcatgttccactcaacgcgagcgatacgggaggtgaaacagggcgccacctgaatgaggtgaacgagtgcaactgatttaagcataactagaatggtgtctgtgagacgagtgatgacaagaacaatagatggatacattgactatgctgagttgtgcctacatcacctgcagtcagcatcgttcattgggcctatctacctgagttatatacgaaatgtgacccgtgcataatgtgattcgaacacgttatagtaatgcaaaataactcatttccaagctactgctgcagcattgggtcaaaaacctgtaagcgagttcgccagc

SEQ ID NO: 521390 - DNA, 202 bp, Homo sapiens
atgtccccatttcagattatcgccgctccgagccctagcacgctgacatactgcacacacatgtacataaccagctgtgcctccctacatatgactcctctgaagaggtgcacaggatgctgcaagctggccctcagcgacgggtcgcgacgggctctggcctgctctgcccatcctcctgtccctctccaggtactcctct

SEQ ID NO: 521391 - DNA, 153 bp, Homo sapiens
tggcactgtatgtacgtgtacagtgtgtggggagtaggtgtgtgggtgtgggtgtggggagtatgtatggggtgtgtgatgtgtgtggtgctgtatgtgtgtggtgtatgtgtagtagattcatgtgtgtggtgtgggggtgtgtgcacgtgt

SEQ ID NO: 521392 - DNA, 366 bp, Homo sapiens
tagacgcgtggttacagacgtctagcggatcccgccatcatctttgcatcccccccttttgcttgccacctctccttcctgcatcatgtgaagaaggatgtgttctgcttccccttctgccaggattgtacgtttcctgaggcctccccagacatgtggaagtgtcagtcacttaaccttcttcccttgataaattacccactctcgggcagtccttaatagacagcatgagaacggactactacatatacttcatgttcatagcatatattcatagtagccaaaaggtggaacacaaccccatgtgtccggcactggctgcgtggactaaaaaggaaatgctgacacatgctgcaacacagatgc

SEQ ID NO: 521393 - DNA, 1407 bp, Homo sapiens
  misc_feature (617)..(617): n is a, c, g, or t
  misc_feature (672)..(672): n is a, c, g, or t
  misc_feature (676)..(676): n is a, c, g, or t
  misc_feature (679)..(679): n is a, c, g, or t
  misc_feature (1339)..(1339): n is a, c, g, or t
  misc_feature (1342)..(1342): n is a, c, g, or t
  misc_feature (1366)..(1366): n is a, c, g, or t
  misc_feature (1378)..(1378): n is a, c, g, or t
cggagtcttattgtggcggtggttgtctcagaatcagcggactttttgggtcgtaggaacctggtatgagaccaaaacttccctaataaagaaacattttcgatcggacggccccattagctagcctcattagatacccaatgaaaaccaacgttaacttcccgtaaatctccctaaaaatccgaagaggaggaaacatccctcaatctacctcacgaggttagtaccgttccgacgtcagggctagataaagatatcataagaaaataatcgattaacaccgtccacgaataccggccaaaaaacctccaggaaaatagcgttaaatcggccgggtatagcggtctacgtcggcaactttagtatcccgggagaccaaggtaggcggactatccgagtctaagcctaagattagtcgggtgcggcggtttacgttcgcaattttagtatcccgggaggttaaggtgggcggactacgaggctaggagactgagattatagcgaaattttgctctcatcaaaaaacataaaaaaaccagttaggtgtagcggtgggtattcgcaactttagtcatctaggaggtcgaggtaggagaactgtccgaatttgggaggtngaagccgtagcgagtcgagactgtgttatcgtatcttagttcgggcgatagagtnaganctngctctacaaacaaacataaagtttacctccttagagctccgcgttccaaacaaaatatattctctcgtcgcgggaagatcgcgtaacggtatagttgtagagtccggcccgggaggccgaagcgtctcggggagaacctgcagactacttctagaaaagttccgtttcggcgcctcattagaaaaatgctctttaactatttaggaaagtcgcttatagcagcttttttccacttatggcgctatcccttacgggcctagccactcgtggctaattatggctcgataacaccaaacggaaaacctcctaaatagccaaaaaaaaaaaaaaaaaatctgagggggggtttggcatttaacctgtttcacagcgagctgcaccataacctatcggttgctgccccataatgctgcgatcgggaaaatttcggtgccatttaatccaactgttccgtagtatactttttccctgttagtcggtgcaacagtgaagaggtttgtattgactgtttcctttaatagccgtgtagttcgaacggtgaacggtaaaccgcaagtgccaacaccccgccaaaacctgtgccaaacccccgccaaactagtctaccccccaattaacaggttgaaactggtaaaactttccacaaactaaaagaaccgnttnagacagggccgagcgccgccttancccggaatagancttatcacccaaagattgcgggttcttaa

SEQ ID NO: 521394 - DNA, 501 bp, Homo sapiens
  misc_feature (401)..(401): n is a, c, g, or t
gcattcacggtgatctagaggatcccgagctctctctgtggggtaaaagggttaggtttaatgagatggtaaggggtgcatgatcggtcaccaaggagggagtaggggtatcttatacttgtgggttaaggtggggggatacaagaggaggatgcaaaggaggctttggattgggaagaagggcggcaatgagatgcagctgtagtccaggaatagtcagggaagcagataattttgttaaaatatctctgcctaataagggaactgggcagagggggataactaaaaaagagtgcataaaagaatattgtctaagttggcaccagagctggggagttagaagaggtttagaagcctggctgtcaatacctacaacagttatggaggcaagggaaacaggnctttgaaaagaaagtaatgtggagtgggtagcctccgtattgattaagaaggggacggacttgacctccatggagagagggggaccccttcgcggtactc

SEQ ID NO: 521395 - DNA, 175 bp, Homo sapiens
  misc_feature (126)..(126): n is a, c, g, or t
atctagaacccgatatgcgtctcatctaacatcatcgggctgggagcagtcacacaggtgctcatctgggatgatctttagtcatttcaccttaagagagagaaacaggatgtcagatgttcctgngaatctgtaaagatatggttttattccacgaatcccctttgaaggatcc

SEQ ID NO: 521396 - DNA, 108 bp, Homo sapiens
ccgcaggctggggcttggcccgcatctggggtttggcataataacattacactgaatacatttgatgacaatcatagcagcttgcacttcactgagtatttactgtgt

SEQ ID NO: 521397 - DNA, 951 bp, Homo sapiens
cgcggtggctcacgcctgtaatcccagcactttgggaggccgagacgggtggatcacgaggtcgggagattgagactatcctggctaacatggtgaaaccccatctccactaaaaatacaaaaaaaaaaaattagccgggtgtggtggtgggtgcctgtagtcccagctactcgggaggctgaggccggagaatggcgtgaacctgggaggcagagcttgcaatgagtcaagatcatgccactgcactccagcctcggcgaggagcgagactccgtctcaaagtaattacattacttacttaattaactcaaattgaatttactttacaaaggattatacctcccatgaccaagtgggacttattcctggatctgcaagggataatgtgagtatataaaaagtccaatccagtgtcactacactgcatacacaacattggacgggaggaaaaccaacatgagacatctcctgttgatgccaaggaacgtttatttcggacaacaattcaacacccctctttgtgaattaagaccaaagattcaaacaaacttagggaatacacaaggcatcacaacgtcatgggacgccggttctgtaaaggaaacgtaataagggcatatattaaagcccaaagctaagattcatgctttatggggaagaacaaagggttttcctctaaaggcggaccagggggatgtccactttatcactatctttcaacgtggcagggaagttgcggccgagccttggcaagaaagcaggttccttggagagaacaccggtggattatcgcacgttgaacatcccacagagtgaacttagtaatcacgaggcatactaaaagggcggcgagcacgtcacagatgaggagggagaggaaaacacgaaacgctcaataagaagggcgcagatacgcggagagtcaacatgcaagaaacgcctgccgaaca

SEQ ID NO: 521398 - DNA, 228 bp, Homo sapiens
  misc_feature (182)..(182): n is a, c, g, or t
ccaagatggtcagatgaccatgccctcctggaggagcagagcaagcagcagtccaacgagcacctgcgccgccatgttcgccagccaggccaacgttgtggggccctggatccagaccaagatggaggagatctgggcgcatctcctattgagtctgaacagggaccctggcaggaccagcntgagccaccttgaagcagtatgcaacgcagcatctgtggtactaca

SEQ ID NO: 521399 - DNA, 286 bp, Homo sapiens
acccggttgaggtgggggaggggttttttggttttccaaaaaccccaaaaaccttggggtttttaattgggaaaaattccttatgtgttaaaaatccttaaacaaactggcacgttcccgtccccaaaaattgggtgtttgggccccccccccgggttttaaaaaatttttccaaccataaaccccttggggtttggaaaaactttttttttttcttttttttttccattttctttaaagccccaaccaactttttaaaaaaaaagggtttttttaaaccccgtta

SEQ ID NO: 521400 - DNA, 137 bp, Homo sapiens
aggaagtgtaaggggcatggctgtggtggtctagattactgttgcacacaacgccgtggcagacagccatggacttggaccaagatgtcctgagtgccctgagctgaacgtggcacagctctccaagtatggtctct

SEQ ID NO: 521401 - DNA, 306 bp, Homo sapiens
gacccccccctgtttgcaggccacccccccctccctgcagctttgaggctggcggggtttgctcctgggaatggggtgggaggcacagggacgacccggggcgggctaatgtttttttgggggcagaccaaagagctcaagtttcagagtcagaattaggcccttggagcgtttttgctggcttgcccttttttatttttttattttagagcgcttaaaaaatccggaaaaatggggtttaaaaaaactgtttctttcagtttacatttttgtttaatacgcttgagcaataaacgctgacttgca

SEQ ID NO: 521402 - DNA, 276 bp, Homo sapiens
cgaaggcacctcgaccctgttcatgcgcggtgcgctgaccaagggctcgaacaagaccgacgtgccgcgcgacaaggttgcatacgacgaagccgacaacaacccgcaggcctacaagacctacggcggctcggtgaaggcacgaaacgacttcggcgcgatcgacttcacctcgatcaccgcctacgaaaccacctccggctacagccgtggcgacaccgacggcggcgccgcggtgaacttcccggtcaacggcgtgccgaacggctacggcca

SEQ ID NO: 521403 - DNA, 1099 bp, Homo sapiens
gagcggaaggggaggggcgccagggcgactgacggaggggaacccccgtcctctccaagccggcctctgccagcggtggcggcggggctgctccgatgtaatcccacccaattcccagcttcgccgggagagagctgcagccgggagatgcgcgcagagcccgagcgaaggacctgagaaaggggaggggaaacgcagtcgcctagaaacacgccctttctgcctctctttcttcctcgtctcgctctttcatccgtcatctcaggctcctgttccttccgcgctttctccgtcctccatcctcttttctccttccatctcgctcgctcctttccgggaatctttccttcctttcccccccttcacgtaccttcccatctcattcactatgctaaccattccattcaatccgaggaccatcccgtcacgttataggcagatggcccccttttaatccatccggtaacaaaaaatggcgaggcactcacagagctcgcacgagatgggcccggactctcaccccaccatttgtgtgtggcacagaccttcccggtgtagacagctctgcttcctgccggacccacagacgacggtaccccaccgccaagcaggcctatggtcaccgtgttgaggctcccccgccaaacttcacgcccctagcacaccgagtgaaccaactttttgctcccaaagagactcacccgcaaggcgacgccacaattcgacgagtcgtaacaacagcatcgtcgatgccctcccccttgcggtcgacctttgctgtcccgcagctagttgggtcctatgggaaccacccggtggtgtgtcttttataaccccccacaccggatcgggctcaacaggacccaaacactgggcggagctacatcgcggactagtccaccatgatgacggctatcgtgcatctctgtagatcacacaccgccgctgtagttggactccgccgttcctgactatgactatcggcacaatcgtcgtggatcgacaacttttctcgaaaacgttgtgctcgtccctacagccacgaccccacatgctaccctcggtcctcgccaccacagagacggacgctattcccgca

SEQ ID NO: 521404 - DNA, 189 bp, Homo sapiens
accagcgcgagggaggtttcggtgtacaggtagaactgctgaggccatcaaggcgcactcgcagtactgtcttagacatggagtacaccaccttgaaagtggtctgcgagcaccactgagcgcgtcgatgccgcacgatgcggacatggcgtagatctggacgaaggtggttcccgaccatgcggccat

SEQ ID NO: 521405 - DNA, 84 bp, Homo sapiens
cgaattcaagcttctaacgatgtacggggacatgattgtttatgtaaagtatctttaataaagctggatccagtttggcttgca

SEQ ID NO: 521406 - DNA, 542 bp, Homo sapiens
tagatggactgagggacacggtgtgggtaggctacagaatatatgaataggtaacgaaacccgccccctcgcactgtatcctctctgaaataactatggagacacagcaggagtctagtgcagtatcagatgggagcagaagttactgaaacatattctgtgctagccagggagttgtgggagtggtgcactcacgcgagggcgtgggagaaatcagcaccatctcactcggaaagctatcgtggcggttcgtagcacgggtcatagatctgtatctattcctggtgtccggagagacgtgctgaggaacgaatccgaggggtggacaacagcttctaggcatgaagaggtagcatcataagttaagaaactagagccaccgtaaatatgcgatgggaaactgtttcatcagctcagccatgttcactttaatgagatagcatgtcatttgaagagaatagattacatgactttccagtgagatggagcaatgcacagccccaagatttgagcttaaagaggcggaatcgggtcgtgtcctc

SEQ ID NO: 521407 - DNA, 102 bp, Homo sapiens
ggcgttacctgtaggaagatgctgcttatatgacatcacgtgtactgagggaagattgggaatggaggcaggagttggctgtcactgtggcatcgataaaca

SEQ ID NO: 521408 - DNA, 385 bp, Homo sapiens
  misc_feature (9)..(10): n is a, c, g, or t
  misc_feature (12)..(12): n is a, c, g, or t
  misc_feature (24)..(24): n is a, c, g, or t
  misc_feature (335)..(336): n is a, c, g, or t
taaaaacgnngnaaattcctttantgttatcccccccaccaccaggaccatgtagggggcagtttttactccctaacccgtttcccgaaaaaggggctacctcctttccaaacagatgaaaaagggcaggacttcaggctggatccaccactgggctctccctcccccagcctggagcacgggaggggaggtgacggctggtgactgatggatgggtagtgggctgagaagaggggactaggaagggctattccaggctcagccctgctcctgcagctttgccgctgagtgtaggaaaaacaggcatgacagaccagggtgagggttgtgcccanntgggccacggccatgcgtggggtggcccaataaacaccgtggactccca

SEQ ID NO: 521409 - DNA, 297 bp, Homo sapiens
  misc_feature (204)..(204): n is a, c, g, or t
  misc_feature (212)..(212): n is a, c, g, or t
  misc_feature (232)..(232): n is a, c, g, or t
  misc_feature (245)..(245): n is a, c, g, or t
ttcttggcgttttgcacaaagaattggacaaaacgtctagcagagcaaagaaagaatgaaggaacaaagaaggaaagcagggatttattgaaaacaaaagtacactccacagtgtgggaatggactcgagccacaagcagcagctcaggggcccaaatacagaatcttcttgggttcaaataccccctagaagtttcccattgnccactttngtgctcacctcatgtaactnaagcagtagcctncaaatcagaggctaggggtgaagttacaaagttgcccaagggagactggacc

SEQ ID NO: 521410 - DNA, 463 bp, Homo sapiens
ctaagggaaagctggttacgccttcaggataccggatccggcaattcccgtgtgttcgacccacgacgtccgcttgatctatcatctacttgggtatttggtgtaaggtggtcaccaagtgggaagacattggcctatgcagggcacaactccatggtttatttcatcgatgaagtcgaatcgtctcctgcagcacaaaatttggcgctgcgtgatctgcctctccgtgatgtgggttctttttgtctctgagcgcacattgattggtgtcggatttgactgcaatcctatgatctttgctgctgatgatactgggctttggagtttcataagattcttggatgagaggaaagctgccccatcagcttcaaaagcctcacagctctctgaagcccttggaaagctatatggccaatcaaagcaagggactagtagcgacaccgttgagccgtcaaaacctcgt

SEQ ID NO: 521411 - DNA, 299 bp, Homo sapiens
tgaatatgctgtctcatacacgtacaataggatttgttataacgctatcatttgacatgtgactgattaggaaatattttatggtctccacccctcagaagcaccaaagaaggccttggtttttgagaagggggggattctcaagaaatgagaacatgtaggagtttgaattgattggtttaacaaattatcaggtattcatatttttccaggaaagttgaggagaatagtttcataaaatgagaaatgggccggggtgccagtggctaaaggcctgtaatcccagcactttgggaggc

SEQ ID NO: 521412 - DNA, 115 bp, Homo sapiens
acaattttccgtggtttgtaaacacttctactatgctttcacatgcttctgtatgtatgctgtatttcaccagtgtcccatttttattaaaataatcaagaaatcccggccacaa

SEQ ID NO: 521413 - DNA, 604 bp, Homo sapiens
aatgtaggtttataaaatgttcagaatgcttgtacccaaaacaagtgcttaaaagaaaaaaaataaaaaatgctggtgctaacaactcttacaatttcagatttattttttaatagacatctaagactgcaagagtctgtatattcatgtagctctcgggtttaaggaggacctccatctccttcgcttacaaaaggctttctgcccctttgaaggacaaagatctcggagttggtttgggaaattatcccagcctgaaagacattcttctacaaaccgctccagcacagagtatgatctgtgggacatccagattaatggtcgggaatttcattggtaaattctctcataacctctttccagttgggtctacagtaagggtagaagatttccacaggggactttaataattccaaaatcatcttaattgtactttctccagttgactctaaaaccattataatagcttcatatacaagctcatggtgaaaatgaggtacttccagtcccttagggcaaggtccagcttcagatatgtctccagagagtaaatattctttcagcagcatatcaatctctttaacagggtgattgacagattgtt

SEQ ID NO: 521414 - DNA, 216 bp, Homo sapiens
tgcaccgaaatctatagtatatgtgcttaaagaataatttatacttatacaccataaatcccttgtacattttatattaagtgattccctaggcactttgttattcattgctaccgagcacgtaatttttttcagccaagtgcggtggctcacctgtaatcccagcaatttttctaattggatatttctctcatataggaaagcgactgatctatg

SEQ ID NO: 521415 - DNA, 204 bp, Homo sapiens
ctcggagtgggtaggatgagtggcacgaacaacagagaggaagtcagcttaacctatgcctttttgggttgaggtgactgatggacggcggacgattcggcgctgggaaactcgttttaggtaatagcttttctagtcaggtaaggtctaggatacagctagggagaggggatcctcctagcagtcgaccctgccaggcactgc

SEQ ID NO: 521416 - DNA, 486 bp, Homo sapiens
taaaacaacttctggtaaatctctcccagtgtgatcaccagctctttctttttgctctctttaccaaagacattgagcattctttttcccgagggagctgaggaagaaggcgtgaaccttggccagccgtgcccgcttgatcaggtcattgagcttcctgagggcggcgtttcggggcagtgactggatgtccttgaagaggtcctgctcctcggcctcaaagagcttgcggatgtcggggatgaggagcgggtgggaccagaaggagccgatgtagaccctgaccacctcgggggtgttgatgatcttgcccagggaccacatgagggccccgtacacccgcatcagctgctgcgtctcgatctgagctgtcttgttcagcaccacgcggatcttgtcctcatggttcttcagagccttgatcacttccgagaactcatcggagatgtccagcttgtgggcgtcgaagtgcagtgatcaagaccg

SEQ ID NO: 521417 - DNA, 340 bp, Homo sapiens
ctctatggactggcgcattagtggccccctggactcctttcctgagtgcagtcactggtgcgagctgggagtggaaggtcggagagactgttgctaggggccagatgctcatggcccacttcccgacggcagctcaggggcctttccggtgcctgcctgggaaacagggggcaatggctcgctagaactcagtctctgagtgggcgctgagtgtgggggacctgttgtccttgtcgccgggtgctttccttgccctggacttgaactgctggtgtgcagggcattgaagggaccagacaaattctgacgaagcacttgatggggcatctcggggagaccg

SEQ ID NO: 521418 - DNA, 316 bp, Homo sapiens
  misc_feature (44)..(44): n is a, c, g, or t
  misc_feature (74)..(74): n is a, c, g, or t
  misc_feature (100)..(100): n is a, c, g, or t
  misc_feature (117)..(117): n is a, c, g, or t
  misc_feature (150)..(150): n is a, c, g, or t
  misc_feature (307)..(307): n is a, c, g, or t
  misc_feature (313)..(313): n is a, c, g, or t
gaggcagagcttgcagcgagcccgagatcgcgccactacacttnagcctgggcaacacagcgagactccgtctnaaaagaagtgtataaacattcctttngctacacaatctcgcanacatctgctatgttttaacttttcagtaacagntaaaaattctgactggtgtgagatggtatttcattgtggtttttctgcatttctctgattaggcatattgagcattttttttcatatgctaggtggccatctgtatggcttcttttgatgactattcatgtcttttgcacttttttgggggggttgntttttngtg

SEQ ID NO: 521419 - DNA, 878 bp, Homo sapiens
tcatgatgctccggctgctcagttccctcctccttgtggtcggtggcctcaggctatggcccaccttcctctcactcttccagccgcgtgtccatggtgaggatgcgggtcccctatagctgggccctggcaggtttaccctgtcaggtcatgagaaacagtggaaaggcgttcttacacacaagcgtgtgtgccgtgatagtcactcaatcgcgcacaccgcattgggattgtgactggccgggcacgtgcgatctcgcagggctctgacgctatcaggtggtgttagggtgaagtacaacctctggctgtgaagtgaggggcctcgcaatcaagtgaatcgcccatccaacatctggaggagctgtgtgtgcatccattctgtgaaccgttcgtgtgtggacctggggtcataggatcgtcgcgctcatcaggctctcgacgctgcgtccagactgggagatgccggatccatgcatccgatctgcagtccctccacgctggtgactatccgttcgccatacaatgacatcctggtacagtcaccggttgcggcccggcgtcgtatagccaatgggccacatgctcaggataagagcagcaggaggccgaggtggcgggtgaactatagagcacctgcgcaggtgtactggtggggtcccaccgtgcagagaaccaggtgtgtgctgaagggtacctacggtcggcagggaaggtgactctggaggggccctcacgcccgagacgtaggggcgaatggccaggggtaaccaccttgtgtgggctgggggactcacgggacgcagagggcgcgaggccgcctcccccgagggggcacacagccgaacaagctgggcggcccaccaaaaagtggacaa

SEQ ID NO: 521420 - DNA, 561 bp, Homo sapiens
gtgcggtggctcttcctcttagcaaatccatatcttttagtaaaagttgcctttgagcataaatttcttgtgtttcaatctctatggtgcttgtagaattctttcaagtggtactcgttttcccggacagaacgcagagcttcagcattttgctatgacacagctttttcaaacatcattctgggaacataggttaacatccttttcatacgtatttttttggcctcccattttaattttaggctatctcgggtatctttcaaaaaacttcaactttggcacacatttctgcccagaagtggctcttctatttctctcttatactcatttagctttatttctaaagattcgaacttgatacgctgagggtaagcatctgcaaagtgatcatcaataagctgaagcttctcagccagagaatctctgttaaatgtcgaacttgtctgagtttccatattacaagtctctttagctggatgatattctgccaattcttttaaaaaatgcataagaaaacctttgtgatttctttatcagatcgtgaaaccagtgatttgtaga

SEQ ID NO: 521421 - DNA, 911 bp, Homo sapiens
  misc_feature (218)..(218): n is a, c, g, or t
  misc_feature (703)..(703): n is a, c, g, or t
  misc_feature (743)..(744): n is a, c, g, or t
gtctctctccctccctctctcatgaggcacagccaatgccaatccgcgcatgtagagcccagtgggccacgccatagaagcatgaggagggttacattgtatcagtctcccgtctgctctggtgtcagaaaccgagtagcggacactgcttgatattgcaccgcactgacatttacgtatgcgctgtagcggagtgctgccggcacatggagatcagntgcatctcaagactggcagatgcagtggctgggtcagaagtagggaggcacacatgagtgtctcacagggaagatacacagagggcgagagacaacaacgtgtctcacgctcgaaaggaggccctggttccctggagtccgggatgagaactgcaaagacttcggcttgaccacctggcgatgttggattgataccacaagaaccgtgagcgtggaacgacagtggtcctggttgcaggccattaactaaaccagagagttctacatacagagctagggacaaaagcaaatagatatagcaagctctgggaaagaaagagcgaaaaataggaagtttgcagaagccttggaccacgtcctgtcccgtgtagcgtcagatcactcaaaggcacgaatgtctggctttgcgtctattaagattggaaatgtacactaggcaaacactcagtccactgttgagccccagtgctggaagggaggaaggnctttcttctgtgttaattgcgtagaggctacaggggttannctggactaaaggcatccttgtcttttgagctattcacctccagtaggaaagggtcttagggaaggtcactcttagtgttagttctctttgaactctcgtcacctctaccctcttgggaatgtctctctctgtgtatatctaattcccacagggtatcatgatcgtcc

SEQ ID NO: 521422 - DNA, 319 bp, Homo sapiens
  misc_feature (11)..(11): n is a, c, g, or t
  misc_feature (35)..(35): n is a, c, g, or t
  misc_feature (254)..(254): n is a, c, g, or t
aagaaacaaanctctgtgaggtttgcttgtgaggngggtggacatgactttcgggcaagaaatattcccctagcactggcaattatatggttattttctcagggccactatcagtttaatgagtctctttctgtaaaagtttcatagcccagaggttttctcccttgttcccaagtttgctgtaacaacccatgtctctcagataaccattctagatctagcagcaacttgactatttcctgccctcctaggancacacctgagacttcaatctgtctttgtcaagtgaaccaacattcagaaggcttaaagagctcat

SEQ ID NO: 521423 - DNA, 911 bp, Homo sapiens
  misc_feature (40)..(40): n is a, c, g, or t
  misc_feature (559)..(559): n is a, c, g, or t
  misc_feature (590)..(590): n is a, c, g, or t
  misc_feature (607)..(607): n is a, c, g, or t
  misc_feature (641)..(641): n is a, c, g, or t
aggtaaataaacgaagctgcggaggagcgggtcccgtggnatgtgactcggggttctgttgtggctgcgtaggtgattttggaggttgtcaggtcttggcggcgttgcgaaatgggggccccaagttacccttcttgttcagtgtctataagaagctggacgtggtgcaagtagcgcgaaacttagaataaatggaacgagcggtaccagtgcgagacggagaggagtcctaatgatcttctttagtgccgactgtactcaggttgtcaattgccaaaaaaaatgccatttccagtgagtaaaagcacagggtttttcaaattcctgcatcacagtcaacttcacagcgaccaaagttacacaaagagtgatgaacagaaaagaccaaacctcagggtggagagggcaaaggcgctcagtcaactccgatccagcactccttcctcactgatgtctcagatgttcaggacgatggagagagggctgctcagtcttttgaatgatttccactctggaaaacttcaagcatttggaaatgaatgttccattgaacagatgnaacatgttcggggaatgcaggagaaattagntcgcttgaatttggagntctatggggagttagaggaacttcctgaggatangagaaaaacagccagtgactccaatctggataggcgtctgtcaaatttagaagaacttgaattattccatacaaaaactccatattaggcagatgacacaagatggtcacaagtactgcgtgctagagtaaaatgaaatgtagtcttgctttcttgtgatttgaagagaagcagcagtctttacttttccagccaaatccagatagcagaatcatcttacacaagcagaaatcaagtaagtacaggcagcttcatgacgaatcgggccga

SEQ ID NO: 521424 - DNA, 100 bp, Homo sapiens
  misc_feature (16)..(16): n is a, c, g, or t
tactgggcgtattctngtgtgcattctgcgagcatgcagtgaggcatctgggcgaccagacaattataccctagccaaccccttaaacaccccccgaatg

SEQ ID NO: 521425 - DNA, 986 bp, Homo sapiens
gtcagagccatctatgttcggttgtaagactttgggatattcagtgacttcacgattgaatatagccaggcacccaagaagtctgatggccacctgaggtgcacggtgacgaaggacctgacagagcgccgatgcagggcttctaggattcggacacacaaggagttgataacttcctcaatgaactccttgcctgatctaaactcatatcatgggtactagacgtgtttgagtaatcatcttcaaggttaaacctcttggacagttacccttttcacaaagtgcacaggtgggaatcgagaatcgatagggttaatatcggagcagtggcttataccattcacctcgtgtgttatggtgattatttcagcagataatgagaccttaataacaaataggcgtaagaaaattttcggacattgaagatgatagacaacatttgatgtaataaaagttggtaggcttgatactctgtaacggactgtgagacctaggcaatcttatttggacgacgacaggaatcggtctccagctgcctttgatcaagattcggggtgccacgtggagcatgagcatatacctggagggactgtgttgtcaccccaaagaggattttctcttcaacacctgtattgtgcctaggtttccaaattctttggccgcaaagctgatctggtctccttgaactcggattcccggagaagagaccggcggacctaggccaggtgggcgtcaagcgatctccggttccagcaaggagggtcacatcataagggccccccttcaaccccgggggccacactggtcagggctccaaacgaaaggaattgctaaaccgttgcagttgggccaacttccatgggacatgccataacgtacttggcgggaccgacagaactcacggcacgagaccgtaacgggtaccgagagcaccaaagaactgtgggcgcgacacaccagactcaggcacaaacacacacggggca

SEQ ID NO: 521426 - DNA, 317 bp, Homo sapiens
aattaaactccatgcgggtccataacagccaagaagcctgcaggagaaagccaagggcagttccctccgcagaacaccccatgcgtgctgagaggcgagctccttgaaggaggggctgttcttcaggagggcctaattttgaacctgcctaaggaccccacctggaggacacacagacatgccttactactgggcccatccttggtctatgtgctctgtactggaggctctgtctgcctctatcagcaaggacaggggcacacatggcttaaggtgacaagccagagagagacaaccctgacagcatcacggtgcat

SEQ ID NO: 521427 - DNA, 167 bp, Homo sapiens
tactctgatagttgctcattgtacaatcctgcctattagtaatactacgccaagaatctgctagctttcccactcgtgttgaattacatgtttccatgtgtgtgatttgggtccacaacaaaaaatcgatacacaatgtcatgctttttccttttcctttttttttt

SEQ ID NO: 521428 - DNA, 317 bp, Homo sapiens
cctgaacaaagatttgcgcacgttgtgtaaagtctgaagttcttttgccactgtctcttccaaacccttcaagtcttgtcttgcttgtcctcgtctatcttgcataaccgtaagttcatgtagtttacttgctcttttccttgtctgtggctttcaacttctcatgttctcactcttcagacgtacctgctctcaacatcattatcttggtatttggtcttgcacagcatccagtcaataagtttctcctatgcgctcctggatctgcttgtcccaacagcattgcttacactctcatttgcaacgtctgaaccatt

SEQ ID NO: 521429 - DNA, 1179 bp, Homo sapiens
tgcgtggtgtgtggtggtggtgctggcctgtctgtcgttgtgtgccgttcgctgctgggtgtctccgtctcgtgtcgtggcgtgtgtcgcgcctcgatggggtctttacttcgtggcggttgtctgttgtgggggtctctcgcgcggttgtggttgggcccgcgccgtgggttgtggggggcccctgttccctgttgttttgggtacgggcggtctttttggcacgttggtgcccccctgtggggaagttggtcagggttgtccctcttgaggacagcgcgtgtcccgaggggttccagatggcccggcttatccccggtccccattttgtggggccttgtttgactccatggccggttcttgcgacgtgtacgctgctgtttccttaactagggttgctggagtttcaggccaggaccccctttggccctttggtgcccgcccaaggggttttcctatgttctgggatgcacgatggatagtttctgaaaatgccaatctgccttcacccaagggcctaatttttataaatacttgacctagctttcgttttgtgcccttggagtaaacaccgtgatacctaacgtgaaaaagattttgccccgagttccaattttgcttgataaacctattttggcttaaactctttcactttcgcctcttctaccctgaggcttctctttaaaggagaccacaacacttgtttgaaattctcttttagagagcttttgcaccacttccaatatggtattccctatggagggccctgagttcacgaagcccctcacttgtttaaagctccaatttcttaagatgaaccacgtctttaattcactctggaaatgttccaccactaatggtcactcactaattctaatttatctttagtaagatttcacccctttttgtaagtatttgccacgcctttctaggccctaacaccactgtaaaaaggtaaaccactagccacgaaggtgaaatacaccacgttcttttaaaatttaaggatgctggccacggcgaggtggctcgcgccctgtaatcccacgcacctttgggaggcctgaggtgccgcagaacttggtttgagccccacggaaggtggaggttgccttgagctgagactgcgcccctgcactcccgcctggaccaccgagtgagatcctgtttttaaaatta

SEQ ID NO: 521430 - DNA, 193 bp, Homo sapiens
atctcaggcagtgacgatggcggtggaggcatgaggcgatggaagtccacggtgggaacagcgggcactcactctgggagagggacagatcatatcgtggctgatgtaggaggctcgccggcagaggtccttgatgacttcaggcacctccacccctttgacacagagctgcgtgaagcggcgctcgctattg

SEQ ID NO: 521431 - DNA, 592 bp, Homo sapiens
agcgggcacggggcgcggcctgccggggacccagcagcgggcgcgcggataatcgtggagctttcaaaatgttgccaaagcaaccaggtaattttcttagagaaagttgatgctgatggttgacctgattgcacctatcaagatcgtgaatgactctgattaagttagcgagacttctagagtctggtgactagaaacaagaagacgattctggtgctgggagagacccaagtaccagtttttatccctcacccttggcgatgtactcatagaagaccaatgtgcgagtccagtggtcgtggagtcggactttgtgaaaatacagagggccaagtttgcaaaccgacgtgagtggaaccctggtagactgcactgggcggcaacggtcaatctgaacctggggggcagcaagccggtgtagagagccagtcttcaattttggaaccctgaggaaggcaggaggtggatttgcaggcaggtcaatcatgagactctgtcgaggagaacaataaactctgacgtaaaccctgtgtctccagactaggtgctggatgggaaggaagtgacggtcctgtgcgttttgacacagaag

SEQ ID NO: 521432 - DNA, 817 bp, Homo sapiens
ctcggcaggttgatgcgctgacgtgccttcactacacgtgtgatctgaataccctgcttgctgctgatctggtctattgaattgctaagtaatatcaatggctttgtatgatttcctgccttcccaccttccgattgctcttgtaaattgccacaacgtcgatggtctatttaaatctgtgggcgatctttcatgatctgcctggcgttccatcattcaccacattgttctcaacaatatgttgtactatcggtcagattcaggtacgtaaacccaactggacttggcggaatgatgcaacacaattactgttccgttggagatgtacaggtgttttagctcacgcatgtatgtgagactctggtcttcgggtatgctgatagctgagaatttgaaaatctgctaaaatatgtcagatggttgggaacaggatacatcggtatgtttcggcgctgtgtgggtatgatgcgtaaagtctgtgacgttcaatggtacttacattagctagttcctacttgttcttacctcttgagcgttctacgagagtgagtgtttgagtttctagaatctctgaagagacattgtagctgtactcgtcagtacatgcaattatctaggctccgtactcctgacttcggcatctagttgctttcttggccacgtatgagtgtgtgtcgttcgcacacttcttgactcacaccatgcgcacagttcccgttgaccccgggtcaggctccgggctacccgccacggcgcgtgatagtatcgaaccgtcattgaaagcacccgtggtgaccgcaggggttcataaaccctg

SEQ ID NO: 521433 - DNA, 1142 bp, Homo sapiens
  misc_feature (330)..(330): n is a, c, g, or t
  misc_feature (462)..(462): n is a, c, g, or t
gacagtactccagacagaacggcttaggaatccaacaagtctagcatccagtactccctgtaggcagaggttgagaaatggagagaatgttatctctgcctggctctgggggctcttgtggcggactggggttctggccctgtctggtcctcgtgccagccctaatcagaccgcacttgacgaggagaatctgatccaggagagcctaatgaccggagggacacagccgtggagccttcgtgacttagtgcttcttcgcctaacgtggacttctgcttatcaggccttgttacaaggcatgtataggccgtgaaggccaccttgattaangaagtgtctagttcttctcaacccagtggagtcactcgtcactaccgtctttggagtgctttaccctgtcattcatggggagccccagtaaaatatcctacaccatgtacaggaagattatctgcatagggncgcatcaaaggttcaaaccatgcagcggaggagctctcgtgagggactagataactgtacagcaggatggcatttccaagcaggcttgcctgcgagcacccactctaagtgcaagtccgagcgggagtgaaagtctgccagtctaggaggttattcggggaagatgcccgatggtcaggatgggaaagaagccaagtgcaaggtacttggactggggaccagggttgcaacggggaagtggcatgccgcagaggagggcctgtaatggggcatgcccaggtccgggcctttgtgggcgccaacgttggaaccctctgtgcaccgtggcaccttccagcgctgtgggaagacctaaaaggaaaggcgtccaagtccaaggtggcactttagggttgggaaaagacaatcggttcgacctcacgtgggggggaacacacattcctaccggggaaacttctggacttccatggggcaccccttggaactgtccgacctgtaaaaccaatggatgcggatcccctggggtggagatttccccagtcatgctctctttaaaacgggccccatgatgagggaggaagcggccccttttgggagctcctccaaagcatgtccctcgatccaggtcgcgggcgtcctaactcgcagagcatagtacagcacagcggggggacaacgga

SEQ ID NO: 521434 - DNA, 428 bp, Homo sapiens
  misc_feature (73)..(73): n is a, c, g, or t
cccgacagcaccctaaccaggacagcatcctaaccagaatacctattattaaaaagacaaaaaataaagatgntggcaagatggtggaaaaaagggaacacttttacactgtggggggaaatataaattagctcagccatggtggaaagcagttgggagatttctcaaagaacttaaaacagaaccaccatttgatccaacaattccactactggatatatactcaaagggaaacaaatcattctacaaaaaaagacatatggctgggcgcaatggctcacacctgtaatcccagcacttggggatgccaaggcaggcggatcccgaggtcaagagatgcagaccatcctggccaacctggtaaaaccccatctctaccaaacctacaaaaattagctgggagtggtggcacacgcctgtagtcccag

SEQ ID NO: 521435 - DNA, 374 bp, Homo sapiens
atcccctcaggattactcagaaattgttgccaagatgaattctcaggggtttcttgaatgttttcttgtaatagtttcatagatttaggtattagatttaggtctttaatccgttttaatttgatttttgtatatggcaagagataggggtcaagtttcattattattcatatagatgccctttatttatttctcttggctgattgcactagttaggacttccagtactatgctgaataagagtggtgaaactgggcgtccttgccatgttccagatcttagaggaaaggctttcagtttttctgcattcagtatgatactagctgtgagtctgttgtatatggctttcatcatgttgaggtaatccgtgaggg

SEQ ID NO: 521436 - DNA, 409 bp, Homo sapiens
ccataatgtagaatcagtgggcgtgttaagcttgttttcctgcaactggatggtcccacctgagcgtgatgggaggaagtgacagatcaataggtattagactctcattaaggacagcgcaacctagatccctcacatgcacggttcacaacagggtgcgttctatgagaatctaatgctgctgctgatctgagaaggtggagctcaggcgggaatgtgagcaaaggggagtggctgtaaatacagacgaagcttccctcactccctcactcgacaccactcacctcctgctgtgtggctccttgcggctccatggctcaggggttggggacccctgctcaagtgcatcagaaacgacccttcttcccacaccagtcttcacagtggtcaagtgcagcaaccacttagt

SEQ ID NO: 521437 - DNA, 769 bp, Homo sapiens
gcctttcgcctggctgctgcttctgtcgctggggacaatgcagacgctggcgcggaagatccccaagtcgccctggctccgctgcaccgcactccctcccgccaatgctgatagtcccctctcctgcatccctccaccccaagatcacccgaggaaaggccggtgggaagagggcaggggctagcggttccttcagcccctacgggaccctgctcagcgcctcaagctggcttcccaggatcactgcggtcaccttacctgtgtgccatggccagatgagaccctgaacaacctgttccagacttcgactattcccaggcaaggagggaaacccggagaactgcattattctgtgccctgctggggtggcgaatgcgctcttcaccaggaagaaggtccgcggaggaggatccgggcttctgttgactcctctgattcagcctgttaccgtcgaggagatcgttccatgagaggccatgctagggcgtggccaggatgcacacgaatggcttaccatgaacgtataccttggccccagcagcggcccagattccgcaggtgtgacgcatggtagccccctgcgaggggccacacgctcacggaatactagaacgtgggcagcttggcgagacagttggccagatggacaagggaggccggcgaatcctcactcgattcataacgtggatccctgcctctccttggttcctaggcttactgctgcaggattgtccacaaatgtcctcatagggtcctaagtgggtcatcc

SEQ ID NO: 521438 - DNA, 161 bp, Homo sapiens
  misc_feature (97)..(97): n is a, c, g, or t
aagaaactgatgtctaccaagatttgtgctgggaacatctgagtgatgaatacgtgtgtagccggcctcttgtgggcaagcagacaacgtacactgngtgctgctgtctgtatggagaggcctggggcatgcagtgtgccctctgccccctgaaggattca

SEQ ID NO: 521439 - DNA, 116 bp, Homo sapiens
  misc_feature (12)..(12): n is a, c, g, or t
  misc_feature (59)..(59): n is a, c, g, or t
gcagcacagcgntctgcgtggaattcatgagcggcccagttctgtaccaggagaagctnctgaagccggcagctttgctggacgaaagggtgccgaccaggaggaagacgaggccc

SEQ ID NO: 521440 - DNA, 256 bp, Homo sapiens
accgattcaaaaaggaagttctttcaaccccacaaaagcaactgaggggccaggtgcagcggctcacgcctgtaatcccagcactttgggaggccgagacgggtggatcacgaggtcaggagttcgagactagcttggccaacatggagaaacccgtctctactaaaaatacaaaaattagccgggtgtggtggcgcgtgcctatagtcccacctactcgggaggctgaggcacaagaatcgcttgaacccgggag

SEQ ID NO: 521441 - DNA, 432 bp, Homo sapiens
cacgagggcgggggggaagctcccccgcgccggcaacgtgctgctttcggtgcgcgcggccgacaagccccgggtgatcgagatcgcccgggccctcgcctccctgggcttcggcctcatggccaccaaagggacggcggcggcgctcgaggccgcgggcctgtcggtcacgcccgtcaacaagctgggcgaagggcggcccaacatcgtggattacatcaagaacggcgagatcaatctcatcatcaacaccaccgacgacagccgcgcggcgatccaggattcctattacctgcggcgcgaagcgctgcagcaccgcatcacctactacaccaccgtggccggggcccgggcggcttgcttggggatgcagcacatgcccgagtccaaggtctacgatctccagggactgcaccgggcgctgcgggcgac

SEQ ID NO: 521442 - DNA, 208 bp, Homo sapiens
  misc_feature (83)..(83): n is a, c, g, or t
cactggtatcccacctagctgaagaataagctagttaatgtctcaataacaggttgagagtcaagtaggaaaaacactggagnactggggccaaattcctgctcttctactggcttggtaaagcaaagggagcgatgcatctgctgtgcctacactttcccgacttaaatttgaagttgccttgctctaacctcacagggtctaatta

SEQ ID NO: 521443 - DNA, 101 bp, Homo sapiens
tctgagaattgatcatatgtctcccctgtattgtcattgaaattactggtaaccccctctgtttccaggctgccccctgtactgctgccctgtagcaccgg

SEQ ID NO: 521444 - DNA, 922 bp, Homo sapiens
  misc_feature (11)..(11): n is a, c, g, or t
  misc_feature (159)..(159): n is a, c, g, or t
  misc_feature (207)..(207): n is a, c, g, or t
  misc_feature (220)..(220): n is a, c, g, or t
  misc_feature (228)..(228): n is a, c, g, or t
  misc_feature (230)..(230): n is a, c, g, or t
  misc_feature (239)..(241): n is a, c, g, or t
  misc_feature (244)..(244): n is a, c, g, or t
  misc_feature (252)..(252): n is a, c, g, or t
  misc_feature (254)..(254): n is a, c, g, or t
  misc_feature (258)..(258): n is a, c, g, or t
  misc_feature (271)..(271): n is a, c, g, or t
  misc_feature (286)..(286): n is a, c, g, or t
  misc_feature (289)..(289): n is a, c, g, or t
  misc_feature (293)..(293): n is a, c, g, or t
  misc_feature (303)..(305): n is a, c, g, or t
  misc_feature (312)..(312): n is a, c, g, or t
  misc_feature (314)..(314): n is a, c, g, or t
  misc_feature (343)..(343): n is a, c, g, or t
  misc_feature (345)..(345): n is a, c, g, or t
  misc_feature (357)..(357): n is a, c, g, or t
  misc_feature (370)..(370): n is a, c, g, or t
  misc_feature (483)..(483): n is a, c, g, or t
  misc_feature (551)..(551): n is a, c, g, or t
  misc_feature (584)..(584): n is a, c, g, or t
  misc_feature (601)..(601): n is a, c, g, or t
  misc_feature (610)..(610): n is a, c, g, or t
  misc_feature (799)..(799): n is a, c, g, or t
  misc_feature (836)..(836): n is a, c, g, or t
  misc_feature (901)..(901): n is a, c, g, or t
accaggcaagncgttcatttgtgaggtctattccttatcagggatgtattaccatgggtccccgagtatcctgttaagtgtctatcacagggtagcctaccttcatgttaatttccacctcattacaaaggcgaggctgggactactctcatgcacgcntgcttcacttagggctgagtgtgatccgtctatttcagtgggtaattngaggataaaggcnccattcgncnaagccaagnnngcntaattttngncgtngaatttttatggnagacggatatctatnganatcnacttattttnnncggtttncngatacactacaaatggaatagatcatttngncaaccgcccgantcaaatataaaanattacaaccccacaaatatctgcatttcctgataacacagcttttttggctcacaaaattttctgcatttctgcttaatttttgatgaacatatttttgttcgcccccacggnagcagcatacgagggtctgatttcaagtcatcgtcatcattttcccaaggtatcttatagaatctgcnaggcctttaaaataggattttcaactatttttntcctcttgggttttgcngggggagangctagctttatgatgacctaacaatgccagctcagaggcagtgatagcttagggtctctatgtttcacgtttcagctatcagtggctgctagaggtggtggatctattgtgttttacccaactttagaacagcttcccacgcaaagaaaagtttctcttcaattcataagaaacctcctgcctacagtnaaataagtgtgtgttaatcatattttacttctaaganactccagcaccatgagtggtggttttctgactggacagttctgttggacaactctgtgacacttncatcaacgtgaccggctatta

SEQ ID NO: 521445 - DNA, 925 bp, Homo sapiens
ttatatgggggctcctttattttagcctccccgcggtccggtcccagaagaacttgcggaagtggccgccttttaaaggtgtgcttaagtgagtcatgtaagttttcaactgggaacttaatagtcctccccctggattctctccggttctcctcgccacgcgccccgaatgcctagctatgattggggtgagtgtccgtcccgtctttttcgcccagtgctctacggcccgtgatccccttcttggcccccgggaacctttcgttgtacccccccaggcccttttttctccgttttgacacccctgttcgcccgaatgtccgcccccgtatttatgaaaaatgggttcctctcttcccccaatggggaacccccaattcctcccacaatatatttgtgaagaaattctttcccccggttatggctcttccccccagagggcctaattctcaagaatacttcttggcccccctgggagaggaaactcttttctctaaaggaaaaatatactgtttgccaccacgtttggtttaaaaaaagtttcctccgccatctactatctccttctctgttgtccaccctgagaaatctcgtgcggggcgcctttttatttaagccagggagtgtgggcccttttctcccttcaccgtgtgtgatgaaaaagtggggccgcccgggtggtatgtcgtaccaagaagatggtggtgtcgcacaaaatccgcttgttgatatgtttttataaagagtggcacactcccccccctttgctctttgtgtttagaagaatagtagtgggaatgttattcgtagtaaggacgactatagttagtagccgcggggtccacgcaccacatggaagtatgtgggggacacccaaaaaaaaacggggaaaaaaaaccccgttttttaaaaaacccaaaaaaaa

SEQ ID NO: 521446 - DNA, 258 bp, Homo sapiens
gtcgacaaattggaattgaagagatttggttctaacatcttttgacaaataagtagtagaaatttttatctgcagctggagttttttggtggtataccccatttctctccccttctctccctctctctctttttactaatgtgctcctcatctctgagacctcatcaaaatggattttaccacccatatttctaccagttttctgatcagtatcacttaggtaatctctaagaagactgaggctttctctatagctct

SEQ ID NO: 521447 - DNA, 118 bp, Homo sapiens
tacgagaacgttgcctcatctgcactttagagtgtatacgcttcttgtgagactgatgggggagtgcctctagaagttcgatcctgctacggcatggcgatgcttgggcacctggact

SEQ ID NO: 521448 - DNA, 640 bp, Homo sapiens
  misc_feature (14)..(14): n is a, c, g, or t
cccttcccctgagngtggagctctccaagagccacatcccccatcattgggcttcgtgctggcctggctgttctggttgtccaagctgtcctgggagctgtggtcaccgctataaatgtgtaggaggaagagctcaggtggaaaaggagggagctgctctcaggctgcgtgcagcaacagtgcccagggctttgatgagtctctcatcacttgtaaagcctgagacagctgcctgtgtgggactgagaagcaggattttttcacccctttcctttgtgacttcaagagcctctggcatctctttttgcaaaggcccctgaatgggtttgggttcctgttagcataatgtgaggaggtggagagacagcccccccccgtgtcccccgtgacccctgtccccacaatgacctgggttccctccccgatcatttttcctgttccaaaaagggggggggggatgtctccatttttgtttcaaattcatggggcactgaggggccactttttacttccctaatgaagttaagaacctgaaaataaatttgggttttcaaatatttgctatgaagggttgatggattaattaaataagtcaattcctagaagttgagagggcaaataaagccctgggacccttcca

SEQ ID NO: 521449 - DNA, 156 bp, Homo sapiens
agttattaaactttatgtatatatttgagccagagcttaatttttatgaagataaaggcatgaagtttaacaatggacgacagttggtgcgataattgtgaggacaagtcttgttggacttggggacggctttgttcacaatattatatggcacat

SEQ ID NO: 521450 - DNA, 129 bp, Homo sapiens
ctgaagatgctgttggagattgtgctgaggacgaggtaggcggtgggttggtcatgctcactagtgccatctgaccaagctgaagaggaggctcggagccacaagggtgttgccacatgtcttgggtgc

SEQ ID NO: 521451 - DNA, 169 bp, Homo sapiens
tgacatactaaaaatgcattgtaagctactgttaaagtcctgtgactcatcgtttgtgtttgtcagtgctgcagttcagcttgagcccttccctgattacctgatgtaattaacaatctgtgccctgatagacatcgcgaggcactgtcagtaagtgaggatcttttct

SEQ ID NO: 521452 - DNA, 258 bp, Homo sapiens
agatcacctcggtggtatggtgtggtatggtatggtggttggtggtatggtggtggtgatggtgatgtaggatggtggtgatggtggtggtgatggtgatggtggttggtgtgatggtggtggtgatggtgatggtggttggtgatgatggtagttggtggtggtgatgattgtgatgatgctggtgatggatggtgacattagtgatgctgggagtgatggtgatgatagtaggagatggtggtggtggtagtaatg

SEQ ID NO: 521453 - DNA, 631 bp, Homo sapiens
agaggagggtctgcatgggtctagagcagcgagaagtgccctgggcttgccaccagctctgtcctggctggggaggaacacttcggtgcctcacacccagcgtaacctgccaaagaaaccgtggagagcttttcggggccatgcattgtgcaagactctaattcccacaagctcagaagctgggagtccacaccgttgagcctgaacctgacaggcccagtcggggtggtcaggggtgcgcactcctcatgccctgcctcaccagctctgtgatttagataggggtcttcattgtccagaaatacctcgctctccgcatgatctgcacgccagagcctgaatagtctcatcccgtatggagctccaccgttggaagtctaagggctgtgccatcagccacaaatgtgacccaggatacagagtgttgactgtcctcagggaggtccgatctggaacacatagttggaattggggccaactcctaatatagggtgggtaaggccttataatgtaaagagcatataatgtaaagggctttagagtgcagacaagacctggattcaaatctgccatttaattagcctgcatatcaccttagggtacagcacttaacgcaatctgcctcaatttc

SEQ ID NO: 521454 - DNA, 342 bp, Homo sapiens
tgtaggagacgcactgagtacctgcagcggggcttcaatctgccctaccaggatgcccgcaagtgcctgggcctgttcggccatggagagtcatgcccatcaccatccagctcagcaaactctctggtggtcagaaggcgcgagttgtgtgtgctgagctggcctgtcgggaacctgatgtcctcatcttggcacgagcctaaccaataacctggtacataaagtctattgatgctctaggggaggccatcaatgaagtacaagggtgctgtgatcgtcgtcagccatgatgcccgactcatcacagaaaccaattgccagctgtggctggtggaaggggag

SEQ ID NO: 521455 - DNA, 234 bp, Homo sapiens
gcacaagaatgtaaatacatacattactcagccataagaatccatactttaatatatattatgacatagatgaatctttaaaaactcatatgcttccaggcacggtgagctcacgcctaccatacccaccaccctgtggaggccgaggtgcggcagatacacaaggtgcaggagatcgatgaccatcctgagtcaacatggtgaagatacctatctcgcaacaaaaaacaacat

SEQ ID NO: 521456 - DNA, 2683 bp, Homo sapiens
ggcacgaggctgctttgtctgctgtcccctctctgctggagaacttagcccagagctagtgaacgagcctctgccgcagacatggagaaactcagcgcgctgcaggagcagaagggcgagctgcgcaagcggctgtcctacaccacacacaagctcgagaagctcgagaccgagttcgactccacgcgccactacctggagatcgagctgcggcgcgcgcaggaggaactggagaaggtcacggagaagctgcgcaggattcagagcaactacatggcactgcagaggatcaaccaggagctggaggacaagctgtaccgcatgggccagcactatgaggaggagaagcgtgcgctgagccacgagattgttgccctcaacagccatctgctagaagccaaggtgaccatcgacaagctgtcagaggacaacgagctctataggaaggactgcaatctagcggcccagctgctgcagtgcagccagacctacggcagggtccacaaggtgtctgagctgccctcggatttccaggagcgcgtgagcctgcacatggagaagcacggctgcagcctgccatccccgctctgccacccggcctacgccgacagcgtccccacctgcgtcattgccaaggtgctggagaagccggaccccgccagcctgtcctcccgcctgtccgatgcctccgcccgcgacctggccttctgcgacggggtggagaaaccaggcccgcggcccccctacaagggagacatctactgcagtgacacagccctctactgcccggaggagcggcggcgagaccggcggcctagcgtggacgcgcccgtgaccgacgtgggcttcctgcgggcccagaactccactgacagcgcggccgaggaggaggaggaggccgaggcggcggccttcccggcgggcttccagcatgaggccttccccagctacgcaggctcactgcccacgtccagctcctactccagcttcagcgccacgtcggaggagaaggagcacgcgcaggccagcacgctgaccgcgtcgcagcaggccatctacctgaacagccgcgacgagctcttcgaccgcaagccacccgccaccacctacgagggcagccctcgctttgccaaggccacggccgcggtggcggccccgctggaggccgaagtggccccaggcttcgggcggaccatgtcaccgtacccggccgagaccttccgcttcccggcctctccgggtccccagcaggccctgatgcccccaaacctgtggagcctgcgggccaagccggggaccgcccggctccccggggaggacatgaggggccagtggcgtcccctgagcgtggaggacatcggcgcctactcctaccccgtgagcgctgccggccgcgcctcaccctgcagcttctctgaacgctactacggcggggccgggggcagcccgggcaagaaggccgacggccgcgccagcccgctctacgccagctacaaggccgacagcttctccgagggggacgacctctcccagggccacctggcagagccctgcttcctgcgggcgggcggcgacctgagcctcagtcccggccgctcggctgacccactgcccggctatgcacccagcgaggggggggacggggacaggctcggggtgcagctgtgtgggaccgccagcagccctgagcccgagcagggttccagggactccttggagccgagctccatggaggcctccccggaaatgcatcctgccgcccgcctcagcccccagcaggcctttccgcggactggtggctcggggctgagccgcaaggacagcctcaccaaggcccagctctacggaaccttgctcaactgagcgcctgcgtgcaggcctggccgtggttcgctccccgccagcccacgtgccccagaagggccggcctcacctctccccagcccccgctgttcccctgccccggccaacaacgaggagtctgttcctccccgcacctcctctcctccccagccctgtaggcctgaggggagggtcccccacaccacggtgtccacccggccccgccccgtggaactccacttagagcgtttttcacgcgtccttcccccatgtgagaggagcatccccccttttataaagcgaaactatttttatagagaaaaagggtctttcttaacgcacttggcctccagctccctggacggctgccttggcgttttcaacacaaagctcctttattttttgggcgagggtgcgtggggcctgccccttggaagggaagggaaggacggtgtcctgtggagaccagactctgcaagtggggagaccacccccgcaagccagtgacaagggagccctgaagttgtgtccacgaagagggagctgaaacaaattcggggctatgaagtgttttaaaaatccattcttcgcagtgtggccaccacaccgccctgagccctcccacggcccatcgtcccgggtgggccgggatgatgccccagtgcggccggtgctcatctccgcccccgggtccgccccctgacaccgtcttactctacctcagacatgaggaggccctccattcctggtttctgtagcttgcattcttgttgtctctgatgcatgccctgccagttagtactgtattttgcattcattaataaaagacaccggtggaaag

SEQ ID NO: 521457 - DNA, 5810 bp, Homo sapiens
gctgtttccagacgctggggactccctgacccatctcggcccttgccaggacaccttttcacccagggcaggggacagaggcctctgagccacaggcctccagcagtttcccccagattcccagtggcctggtggccccaccccacacagtgccacctcttgacattgtccactgtgtggagggtgctactatgtagaatgtggaccagcaacagccctgcccccgtgtctgggtgcaccatccagttctgcagatgtggagacaggctgccgtggcagggctcgggttattgcccggtgtggggaacactggacagggaaggaggtactacccgggtgaccgcagaccctaggtacacagcctggactgggcagaggggacacgttcagaggtgtgagaagctgaacccccaggacttagtgacagggctgtgaggggtaaagaggggtcaccatgcccaccccccgggtggggaacgtggagggcagtgaaggtgtggtggatgtggctgcattggacgggttgggtgtggagatgcctgagggccataggtgggtggctggacgtggtgagggtatggagcctgacagacaccccgctggagtcagatggaaacctgggaggggtccctgtgcagctggcttggaggggatttggtctgagcatgcagggcaggggtgcaggtgcaaaccggggccccagggaacagcccgggcgaggtcgggaggggcctgtggtgtgatcgccggaccagcagaggtggggaaagacgtggcaggaaccctggggcggccaagtgcggggcatcagctatgcctggggacggggtgcgtgtccatggcccggtgcctgcagcaagcggacactgaggcagagaggggtgtgagagtcaggggctgggggcactgctagcccaaagattggttgggtgtagcaggtggttgggtgtgaaggacttggggagggggagcagtatttaagggctggtggaacagggagttgactgctgtatctggaaggccatccaaaggccaggggtaaactgaggctctgtgaagctgcctgacttgtgagatgtctgccccgagcccaccccatagccccttcgtcctcccctcccacacctgccccgtggagaatccctgcctagctcattgtctgcctcccctctggaccgcaggctcccggggcaggggcagggtttgtcttactcctggctgtgaggtctcagacaggttgcttgctctgagaggtgagggtagggacctcagggtgcccagaaggggcagggctgggtgagggggcacagtgagctaggggtgcaggtctcagaatagcaaggacctaaggctgctcagtgaggcctggggtgtggctggagaaggggtgaggactcggggctgaggtggccacgtgggtggatggatgacgccctcacctcttcccgagggctgtgggtacaccaggagcccctgcagggaacagtcgacttcaggggctgctgtgcagcccattgtgcctgccctaggagcccaggatggcataggagtccccaggaagttcaccacctccctggggaggacaggtctgtgctgggaagcagcctgggacctgtagctatagagtgctagaagtggggcagccacggaaggctgcctggaggaggtggaaggaggcctgagcactgtcccagagagcgctcccggaggcagacccacgtgggcagctgtggcactttgcctcagggcttccctctttgcttgttactctacttcctcttgtggtgactgactcttgggaagacccgcgctgcccttctctgaggttctcaaaaacgtaagcgacgctttatttttatttgtttttaaaaatatagccctgggcaggaatccaagagtgcttcctggaggcttgctgggtgtgtgcccgcagtgccacatgcggtttactcacggggcccagacagaagatgcctctgctcggggctgggggacagtggtggccccagggggactgggagcctcctgcctgccctctactcccctcgcttgggtttgggtcgggaatatcacaagaacgcgggcttttgcccagggtcccacagcacatctgggcagagtcagggttccaggccctctcccacacctcaagtttccttcatgacacccgggacttctgcctgtcccgtccccatctcacagcaacacaatccaaaagatgttggtcccagatagcccctgggctgtgcacccattgcaaggaaagaactgctggctgctgaccccactctgacccagacaaccggaagtgcagcccctgccttggggagctccgagccatccctgttggaggcccccacactaccctcctgcctttgcacagctttagttcaggtgaattgttggcaggtggctcggaagagtgggtcatagtgggtctctgtttcctgagcatgtggggctctgcatcctggggtcctaccctccaggagaccccattctgggggaagaaaatagagcctcaagaattgtctgggtttctggaaggcttcctggaggaaggggaacttgagcaggccaggaccttgccaggtttcccgtgctgcatgcagcctcattggccatggtggcagacactgcccgggcatgggacattgccaccaaacatctctctggcccagagaagtgacccagggtcccagggccacacagccattttggggaaagcaggtctggtcttgggcatggcactgctgactctgggcctcagccatcccaacctagcactgtggaggagcaggagtgagggccccagtcacctgtgccacccagggccagctctgtgatagcctgggtgctgatgggtgctctttgtacctgggtcctttaaaccgcccccaacacactggccaggttctggggtcaaagactcctccagccaccacctgggatttacctgtgtgagggacactggtggagtctgaggaaccgcccaggccagactggctcagggtcagagtccctgactctggggcgccgtggtcttcagtgacgcccgggaggctgggtgtgtgtgagtgtgtgtgtgtgtgtgtgtgtgtgtgtgcgcgcgcgcgcgcgccggtactcgcgtgttagtgcggcacgccccggctggcctgcgggccttagtttcccccgctcagcgccgcggcccggcccgccgccgccatgtcgttgcagcgcgctgcaggagcagaagggcgagctgcgcaagcggctgtcctacaccacacacaagctcgagaagctcgagaccgagttcgactccacgcgccactacctggagatcgagctgcggcgcgcgcaggaggaactggagaaggtcacggagaagctgcgcaggattcagagcaactacatggcactgcagaggatcaaccaggagctggaggacaagctgtaccgcatgggccagcactatgaggaggagaagcgtgcgctgagccacgagattgttgccctcaacagccatctgctagaagccaaggtgaccatcgacaagctgtcagaggacaacgagctctataggaaggactgcaatctagcggcccagctgctgcagtgcagccagacctacggcagggtccacaaggtgtctgagctgccctcggatttccaggagcgcgtgagcctgcacatggagaagcacggctgcagcctgccatccccgctctgccacccggcctacgccgacagcgtccccacctgcgtcattgccaaggtgctggagaagccggaccccgccagcctgtcctcccgcctgtccgatgcctccgcccgcgacctggccttctgcgacggggtggagaaaccaggcccgcggcccccctacaagggagacatctactgcagtgacacagccctctactgcccggaggagcggcggcgagaccggcggcctagcgtggacgcgcccgtgaccgacgtgggcttcctgcgggcccagaactccactgacagcgcggccgaggaggaggaggaggccgaggcggcggccttcccggcgggcttccagcatgaggccttccccagctacgcaggctcactgcccacgtccagctcctactccagcttcagcgccacgtcggaggagaaggagcacgcgcaggccagcacgctgaccgcgtcgcagcaggccatctacctgaacagccgcgacgagctcttcgaccgcaagccacccgccaccacctacgagggcagccctcgctttgccaaggccacggccgcggtggcggccccgctggaggccgaagtggccccaggcttcgggcggaccatgtcaccgtacccggccgagaccttccgcttcccggcctctccgggtccccagcaggccctgatgcccccaaacctgtggagcctgcgggccaagccggggaccgcccggctccccggggaggacatgaggggccagtggcgtcccctgagcgtggaggacatcggcgcctactcctaccccgtgagcgctgccggccgcgcctcaccctgcagcttctctgaacgctactacggcggggccgggggcagcccgggcaagaaggccgacggccgcgccagcccgctctacgccagctacaaggccgacagcttctccgagggggacgacctctcccagggccacctggcagagccctgcttcctgcgggcgggcggcgacctgagcctcagtcccggccgctcggctgacccactgcccggctatgcacccagcgaggggggggacggggacaggctcggggtgcagctgtgtgggaccgccagcagccctgagcccgagcagggttccagggactccttggagccgagctccatggaggcctccccggaaatgcatcctgccgcccgcctcagcccccagcaggcctttccgcggactggtggctcggggctgagccgcaaggacagcctcaccaaggcccagctctacggaaccttgctcaactgagcgcctgcgtgcaggcctggccgtggttcgctccccgccagcccacgtgccccagaagggccggcctcacctctccccagcccccgctgttcccctgccccggccaacaacgaggagtctgttcctccccgcacctcctctcctccccagccctgtaggcctgaggggagggtcccccacaccacggtgtccacccggccccgccccgtggaactccacttagagcgtttttcacgcgtccttcccccatgtgagaggagcatccccccttttataaagcgaaactatttttatagagaaaaagggtctttcttaacgcacttggcctccagctccctggacggctgccttggcgttttcaacacaaagctcctttattttttgggcgagggtgcgtggggcctgccccttggaagggaagggaaggacggtgtcctgtggagaccagactctgcaagtggggagaccacccccgcaagccagtgacaagggagccctgaagttgtgtccacgaagagggagctgaaacaaattcggggctatgaagtgttttaaaaatccattcttcgcagtgtggccaccacaccgccctgagccctcccacggcccatcgtcccgggtgggccgggatgatgccccagtgcggccggtgctcatctccgcccccgggtccgccccctgacaccgtcttactctacctcagacatgaggaggccctccattcctggtttctgtagcttgcattcttgttgtctctgatgcatgccctgccagttagtactgtattttgcattcattaataaaagacaccggtggaaag

SEQ ID NO: 521458 - DNA, 245 bp, Homo sapiens
gccaaacccactccaccttaccaccagacacccttagccaaaccatttacccaaataaagtataggcgttagaattgaaacctcggcgcaattagatttagtaccccaagggaaagttgaaaaattttaaccacggcttattatggcagggtttaccccttatacctcctgcatattgatttaatcgggaatatctttgcagggggagccaactctaagccccccgaacccagagagctccctca

SEQ ID NO: 521459 - DNA, 2749 bp, Homo sapiens
ggcggcgccgggcttcccacggacggggccccgcggggttgcccggccgtgcccgctgtgcccggctctgcccggcgcggccgcggagcgcacgcctcctgcctgctgaccctctcgtttggtttctcgcaggcctctgccgcagacatggagaaactcagcgcgctgcaggagcagaagggcgagctgcgcaagcggctgtcctacaccacacacaagctcgagaagctcgagaccgagttcgactccacgcgccactacctggagatcgagctgcggcgcgcgcaggaggaactggagaaggtcacggagaagctgcgcaggattcagagcaactacatggcactgcagaggatcaaccaggagctggaggacaagctgtaccgcatgggccagcactatgaggaggagaagcgtgcgctgagccacgagattgttgccctcaacagccatctgctagaagccaaggtgaccatcgacaagctgtcagaggacaacgagctctataggaaggactgcaatctagcggcccagctgctgcagtgcagccagacctacggcagggtccacaaggtgtctgagctgccctcggatttccaggagcgcgtgagcctgcacatggagaagcacggctgcagcctgccatccccgctctgccacccggcctacgccgacagcgtccccacctgcgtcattgccaaggtgctggagaagccggaccccgccagcctgtcctcccgcctgtccgatgcctccgcccgcgacctggccttctgcgacggggtggagaaaccaggcccgcggcccccctacaagggagacatctactgcagtgacacagccctctactgcccggaggagcggcggcgagaccggcggcctagcgtggacgcgcccgtgaccgacgtgggcttcctgcgggcccagaactccactgacagcgcggccgaggaggaggaggaggccgaggcggcggccttcccggcgggcttccagcatgaggccttccccagctacgcaggctcactgcccacgtccagctcctactccagcttcagcgccacgtcggaggagaaggagcacgcgcaggccagcacgctgaccgcgtcgcagcaggccatctacctgaacagccgcgacgagctcttcgaccgcaagccacccgccaccacctacgagggcagccctcgctttgccaaggccacggccgcggtggcggccccgctggaggccgaagtggccccaggcttcgggcggaccatgtcaccgtacccggccgagaccttccgcttcccggcctctccgggtccccagcaggccctgatgcccccaaacctgtggagcctgcgggccaagccggggaccgcccggctccccggggaggacatgaggggccagtggcgtcccctgagcgtggaggacatcggcgcctactcctaccccgtgagcgctgccggccgcgcctcaccctgcagcttctctgaacgctactacggcggggccgggggcagcccgggcaagaaggccgacggccgcgccagcccgctctacgccagctacaaggccgacagcttctccgagggggacgacctctcccagggccacctggcagagccctgcttcctgcgggcgggcggcgacctgagcctcagtcccggccgctcggctgacccactgcccggctatgcacccagcgaggggggggacggggacaggctcggggtgcagctgtgtgggaccgccagcagccctgagcccgagcagggttccagggactccttggagccgagctccatggaggcctccccggaaatgcatcctgccgcccgcctcagcccccagcaggcctttccgcggactggtggctcggggctgagccgcaaggacagcctcaccaaggcccagctctacggaaccttgctcaactgagcgcctgcgtgcaggcctggccgtggttcgctccccgccagcccacgtgccccagaagggccggcctcacctctccccagcccccgctgttcccctgccccggccaacaacgaggagtctgttcctccccgcacctcctctcctccccagccctgtaggcctgaggggagggtcccccacaccacggtgtccacccggccccgccccgtggaactccacttagagcgtttttcacgcgtccttcccccatgtgagaggagcatccccccttttataaagcgaaactatttttatagagaaaaagggtctttcttaacgcacttggcctccagctccctggacggctgccttggcgttttcaacacaaagctcctttattttttgggcgagggtgcgtggggcctgccccttggaagggaagggaaggacggtgtcctgtggagaccagactctgcaagtggggagaccacccccgcaagccagtgacaagggagccctgaagttgtgtccacgaagagggagctgaaacaaattcggggctatgaagtgttttaaaaatccattcttcgcagtgtggccaccacaccgccctgagccctcccacggcccatcgtcccgggtgggccgggatgatgccccagtgcggccggtgctcatctccgcccccgggtccgccccctgacaccgtcttactctacctcagacatgaggaggccctccattcctggtttctgtagcttgcattcttgttgtctctgatgcatgccctgccagttagtactgtattttgcattcattaataaaagacaccggtggaaag

SEQ ID NO: 521460 - DNA, 199 bp, Homo sapiens
  misc_feature (36)..(36): n is a, c, g, or t
  misc_feature (53)..(53): n is a, c, g, or t
  misc_feature (67)..(67): n is a, c, g, or t
  misc_feature (88)..(88): n is a, c, g, or t
  misc_feature (106)..(106): n is a, c, g, or t
  misc_feature (169)..(169): n is a, c, g, or t
tttgttactgcacctctccctgtgcattccagacanccctgacctcttgtgcncaaactgccccgcnagagtttgaggttctgactancagtaacccatgcccccncagtaccccttacggctcagtttactagataggctcccttttacttgagtactgcctgttganttgtacttgtgattttattttttgtttcaa

SEQ ID NO: 521461 - DNA, 2690 bp, Homo sapiens
atccttccctcttcagggggtcccggggtggagggggaaatacagtcctgggccctggcctaggaaaggcttctacaaaagtttgctttaatgggatgttctctgctgtgtgcagaggggcacacattccaccagggtgaagctggtggggtgagctcaggaggtccaaattcagccccaccctgctcagcaggctgtgcggccataagggtcgtgggagggacaggccttgcatggcagtgacccccttgcctcctgcaccaggattcagagcaactacatggcactgcagaggatcaaccaggagctggaggacaagctgtaccgcatgggccagcactatgaggaggagaagcgtgcgctgagccacgagattgttgccctcaacagccatctgctagaagccaaggtgaccatcgacaagctgtcagaggacaacgagctctataggaaggactgcaatctagcggcccagctgctgcagtgcagccagacctacggcagggtccacaaggtgtctgagctgccctcggatttccaggagcgcgtgagcctgcacatggagaagcacggctgcagcctgccatccccgctctgccacccggcctacgccgacagcgtccccacctgcgtcattgccaaggtgctggagaagccggaccccgccagcctgtcctcccgcctgtccgatgcctccgcccgcgacctggccttctgcgacggggtggagaaaccaggcccgcggcccccctacaagggagacatctactgcagtgacacagccctctactgcccggaggagcggcggcgagaccggcggcctagcgtggacgcgcccgtgaccgacgtgggcttcctgcgggcccagaactccactgacagcgcggccgaggaggaggaggaggccgaggcggcggccttcccggcgggcttccagcatgaggccttccccagctacgcaggctcactgcccacgtccagctcctactccagcttcagcgccacgtcggaggagaaggagcacgcgcaggccagcacgctgaccgcgtcgcagcaggccatctacctgaacagccgcgacgagctcttcgaccgcaagccacccgccaccacctacgagggcagccctcgctttgccaaggccacggccgcggtggcggccccgctggaggccgaagtggccccaggcttcgggcggaccatgtcaccgtacccggccgagaccttccgcttcccggcctctccgggtccccagcaggccctgatgcccccaaacctgtggagcctgcgggccaagccggggaccgcccggctccccggggaggacatgaggggccagtggcgtcccctgagcgtggaggacatcggcgcctactcctaccccgtgagcgctgccggccgcgcctcaccctgcagcttctctgaacgctactacggcggggccgggggcagcccgggcaagaaggccgacggccgcgccagcccgctctacgccagctacaaggccgacagcttctccgagggggacgacctctcccagggccacctggcagagccctgcttcctgcgggcgggcggcgacctgagcctcagtcccggccgctcggctgacccactgcccggctatgcacccagcgaggggggggacggggacaggctcggggtgcagctgtgtgggaccgccagcagccctgagcccgagcagggttccagggactccttggagccgagctccatggaggcctccccggaaatgcatcctgccgcccgcctcagcccccagcaggcctttccgcggactggtggctcggggctgagccgcaaggacagcctcaccaaggcccagctctacggaaccttgctcaactgagcgcctgcgtgcaggcctggccgtggttcgctccccgccagcccacgtgccccagaagggccggcctcacctctccccagcccccgctgttcccctgccccggccaacaacgaggagtctgttcctccccgcacctcctctcctccccagccctgtaggcctgaggggagggtcccccacaccacggtgtccacccggccccgccccgtggaactccacttagagcgtttttcacgcgtccttcccccatgtgagaggagcatccccccttttataaagcgaaactatttttatagagaaaaagggtctttcttaacgcacttggcctccagctccctggacggctgccttggcgttttcaacacaaagctcctttattttttgggcgagggtgcgtggggcctgccccttggaagggaagggaaggacggtgtcctgtggagaccagactctgcaagtggggagaccacccccgcaagccagtgacaagggagccctgaagttgtgtccacgaagagggagctgaaacaaattcggggctatgaagtgttttaaaaatccattcttcgcagtgtggccaccacaccgccctgagccctcccacggcccatcgtcccgggtgggccgggatgatgccccagtgcggccggtgctcatctccgcccccgggtccgccccctgacaccgtcttactctacctcagacatgaggaggccctccattcctggtttctgtagcttgcattcttgttgtctctgatgcatgccctgccagttagtactgtattttgcattcattaataaaagacaccggtggaaag

SEQ ID NO: 521462 - DNA, 540 bp, Homo sapiens
taaatatagcattatactatgtatagtgctctcacaaagcttagacctttaccttccagccaccccacagctgccttgaatacttctcagagctcagctcaattggttaatacatgctgctacgctctcccaaagacacataagctagcaacgaacgaaactatcctcctagcgagccacctacccatcgtgctcttccacacaatgacaactgcccagcacaccactacgacacctcacacacactccaaatctcccagtgtgccacccacgaacgtgaccatgctacgctctacactctcagctgctcaccgaagcacactcctacctgggcaccctggcacacctccctaagaagtgccatttcccccacacaaacacgtgcatctagccttcctctggctccgtcggcccacacgattagttccacaacaccgaacttgggcatctaacgtggccgagagcgcacacaacctctcagttctacacctcttacgcacaacaacacctgcacacggaactcattaagttacgcccaac

SEQ ID NO: 521463 - DNA, 2810 bp, Homo sapiens
ggcacgaggctgctttgtctgctgtcccctctctgctggagaacttagcccagagctagtgaacgagcctctgccgcagacatggagaaactcagcgcgctgcaggagcagaagggcgagctgcgcaagcggctgtcctacaccacacacaagctcgagaagctcgagaccgagttcgactccacgcgccactacctggagatcgagctgcggcgcgcgcaggaggaactggagaaggtcacggagaagctgcgcaggattcagagcaactacatggcactgcagaggatcaaccaggagctggaggacaagctgtaccgcatgggccagcactatgaggaggagaagcgtgcgctgagccacgagattgttgccctcaacagccatctgctagaagccaaggtgaccatcgacaagctgtcagaggacaacgagctctataggaaggactgcaatctagcggcccagctgctgcagtgcagccagacctacggcagggtccacaaggtgtctgagctgccctcggatttccaggagcgcgtgagcctgcacatggagaagcacggctgcagcctgccatccccgctctgccacccggcctacgccgacagcgtccccacctgcgtcattgccaaggtgctggagaagccggaccccgccagcctgtcctcccgcctgtccgatgcctccgcccgcgacctggccttctgcgacggggtggagaaaccaggcccgcggcccccctacaagggagacatctactgcagtgacacagccctctactgcccggaggagcggcggcgagaccggcggcctagcgtggacgcgcccgtgaccgacgtgggcttcctgcgggcccagaactccactgacagcgcggccgaggaggaggaggaggccgaggcggcggccttcccggcgggcttccagcatgaggccttccccagctacgcaggctcactgcccacgtccagctcctactccagcttcagcgccacgtcggaggagaaggagcacgcgcaggccagcacgctgaccgcgtcgcagcaggccatctacctgaacagccgcgacgagctcttcgaccgcaagccacccgccaccacctacgagggcagccctcgctttgccaaggccacggccgcggtggcggccccgctggaggccgaagtggccccaggcttcgggcggaccatgtcaccgtacccggccgagaccttccgcttcccggcctctccgggtccccagcaggccctgatgcccccaaacctgtggagcctgcgggccaagccggggaccgcccggctccccggggaggacatgaggggccagtggcgtcccctgagcgtggaggacatcggcgcctactcctaccccgtgagcgctgccggccgcgcctcaccctgcagcttctctgaacgctactacggcggggccgggggcagcccgggcaagaaggccgacggccgcgccagcccgctctacgccagctacaaggccgacagcttctccgagggggacgacctctcccagggccacctggcagagccctgcttcctgcgggcgggcggcgacctgagcctcagtcccggccgctcggctgacccactgcccggctatgcacccagcgaggggggggacggggacaggctcggggtgcagctgtgtgggaccgccagcagccctgagcccgagcagggttccagggactccttggagccgagctccatggaggcctccccggaaatgcatcctgccgcccgcctcagcccccagcaggcctttccgcggactggtggctcggggctgagccgcaaggacagcctcaccaaggcccagctctacggaaccttgctcaactgagcgcctgcgtgcaggcctggccgtggttcgctccccgccagcccacgtgccccagaagggccggcctcacctctccccagcccccgctgttcccctgccccggccaacaacgaggagtctgttcctccccgcacctcctctcctccccagccctgtaggcctgaggggagggtcccccacaccacggtgtccacccggccccgccccgtggaactccacttagagcgtttttcacgcgtccttcccccatgtgagaggagcatccccccttttataaagcgaaactatttttatagagaaaaagggtctttcttaacgcacttggcctccagctccctggacggctgccttggcgttttcaacacaaagctcctttattttttgggcgagggtgcgtggggcctgccccttggaagggaagggaaggacggtgtcctgtggagaccagactctgcaagtggggagaccacccccgcaagccagtgacaagggagccctgaagttgtgtccacgaagagggagctgaaacaaattcggggctatgaagtgttttaaaaatccattcttcgcagtgtggccaccacaccgccctgagccctcccacggcccatcgtcccgggtgggccgggatgatgccccagtgcggccggtgctcatctccgcccccgggtccgccccctgacaccgtcttactctacctcagacatgaggaggccctccattcctggtttctgtagcttgcattcttgttgtctctgatgcatgccctgccagttagtactgtattttgcattcattaataaaagacaccggtggaaagaaagacaaaacaaaaaagaagagaagagacaaaaagagaaaagcaggggggcgcagaaagaagaacacacgagaggggcacagaagcgcaggcagaccaccgagaacgagcaacaatagggacacaa

SEQ ID NO: 521464 - DNA, 397 bp, Homo sapiens
ttttttttttctttgcaatggaatctcgctcttgtggcccatgcgatcttggctcactgccactctccctcctgggcccaagcgattctccccccccagcctcccgagtagctgggattacaggcatgcaccaccagccgtggccaattcttccacctttagtagagacagggcttcaccacgctggccaggctggtcttgaactcctggcctcaagtgatctgcccacctcagactcccaaagtgctgggagtagcatgagccacccctttttaatagaaatggggtctcgccatgttgcccaggctggtcatgaactcctgggctcaggctatcctcccatctctgcttctcaaagtgctaggactacagatgccaccactcccagcctacataa

SEQ ID NO: 521465 - DNA, 701 bp, Homo sapiens
gtaccacggccatgccctcttcaagcgcaccttggtgctgatgtccctgccgcggcgcccaggggtcccgggcgcaggcaccgccccgtggggctgctgcttgcctcctgccgcctggccctagcaatggactggcctccgggagagagagcggaggctgtggagccgactgccccagtacccactcccactcccactccgcactacccactcctgctcctcgacgtctacccaccgatcgtgtagtagtaagtctgcccgcaggactcgctcagtcagcagcctgaaaacttgctacaagtatctcaattcagaaccagtcgcagatatcgcagctgttatccaaggcgctggatggggaaatgcgcaacgcagtgtgcatattagatcgtggttctccgagctctggatcacactggaagatgacatgaccatcattgtggcaaaagaaggtcccgctgttacacaactttacactctttcctttatcaaaccagactggcggttcatggagacgcaaggagcaaggatcgccaggtgctggaggacttcccaacgatctcccattgagtttaggaaatctggctgagaaataccagacaggtgattgcagagcatatgccggagaatgggcattgggatggcagagtaaatggataagcattgtgacctctgaacaggagtggaccagtactgcaata

SEQ ID NO: 521466 - DNA, 410 bp, Homo sapiens
  misc_feature (174)..(174): n is a, c, g, or t
acatcaattaatcccagcactttggaaggctaaaacttccgaattgcttgactccaggagtttgaaaaccagcctgggcaaacatggcaagaccccatctctacaaaaaattagccaggcatggtggtgcacacctgtggtcccagctactttggaggctgaggtgggaggatngctttagccagggaggtcgcgactgcagtgaaccaagattgtgccactacactccaacctgggtgacacagtgagaccctgtctcagtcaatcattaaaacagggctccatgcctgtaatcccaccactttgggaggccgagatgggtggatcaccaggtcaagagatggagaccatcctggccgacatggtgaaaccctgtctctacttaaaataggaaaattagccaggtgtgg

SEQ ID NO: 521467 - DNA, 359 bp, Homo sapiens
cacgcagaaagtaatgagctaaagctaacgtcatgcacatctattagactaaaagaaacgactttaaccccttcagttgtttgtaggacagcactccttaacagggagtcaggttcggtaaatataaaggatacataaaaaatacagtataaactgcataagcttaacagtagcaaaaacactgatgaacttttaaaaagtcaaaaatatataaaaatattagcctgaaatggcaaattttcaaacaccgatctgtgtaaaaatgtttaaatattgatgttactccaaaaatatatacttattctattttttttctattcgcaacagtttataaaggcaaacaaacacctgcaattgag

SEQ ID NO: 521468 - DNA, 150 bp, Homo sapiens
cacatggttcactaaatattattttcctgatctcagaaagcttaacctttacacattttaaaattacagggccctgccagaaaaggttggtcaaaggaggcggtgttcagggaaacccgttcctaccgcgggggcgtcatctcagacccc

SEQ ID NO: 521469 - DNA, 592 bp, Homo sapiens
gccgggctcccctgttcgctgcagtggttcggccgcggcgacccctcagcggcgcgtcccccgccgcggtcccgctccgcttctccccgaagccgcgcgcccgcgcctgtcggtcggcggaccatcagccccccgtgaggcccacggcctcccacccgccatggtccgcccgcgccgtgccccgcaccgctccggcgccgggggccccctcggaggtcgtggccggccaccgcggcccctggtcgtccgcgccgtgcgctcacgttcctggcctggcggtcctcgaggcccgcagccaccgcggatccgggctcgttcggcccctcccatggagggtgctcgagtctttggagccctggggcctatcgggccctcttcacctgggctgactcttgggggcctcgcagtgaacgagcaccggctcagcaacaaactgctggcctggagtggcgtgctggagtggcaggagaagcgtagacccttctcggactccacagccaagctgaaacgcaccctgccctgccaggcctatgtgaaccagggcgagaacctggagacggaccagtggccccagaagttgatcatgcagctc

SEQ ID NO: 521470 - DNA, 435 bp, Homo sapiens
agggactcataaagcatccccacacataaatttgcatttttccaacagatttcttttttttcttgaaaaacaattacccttttaacaactatttttcaaaagtaaatgtaataaaaatgcccaacataaaatgtttatgatcccaccaacaccctttttaaaaaatgtgaaagccaaaaaattaagttctagttttgcccccccccaaaagggcaaaagtatttgcccctggaacattcaattcccatttgagaataatggtaaaaaaaacttgcatttgccttaccatcatgatccccctgttgagttaggaaaaaagggttaaacaaacccccattcctttttttaaaaggaaaactttaaaatgttggggcaaccccatactatttggccataaatgaaaaagcccccgaaaaaaaatgctttttgtggttt

SEQ ID NO: 521471 - DNA, 169 bp, Homo sapiens
atgcgaaaatccttcataaaatattagaaaactgaattcaacagcacaaaaggattgtacatcaggacaagtgagatttatctctggcatgcaagaggtttgacatacacagatcatcagtgtgatacattatcttaacagatgaagagaaatacatattatctaattg

SEQ ID NO: 521472 - DNA, 170 bp, Homo sapiens
aactgatacaagactctccggaaatgtagaaatgtgatggtgctctaaatcaattcttcaagtgcactgcactcgctaatgatctggggaatagctgacagtctgttatatctcagaccaagacgacttaaactggacaggattcctatagtatctggaaggtctagcag

SEQ ID NO: 521473 - DNA, 130 bp, Homo sapiens
gtttgtctaattacttcctcgtgatagctctggttatagaatctggttattcttctccttatcaaactttatctactagttttgtcatctattgatgattctagactatgtacctacaatagtttagctg

SEQ ID NO: 521474 - DNA, 588 bp, Homo sapiens
ggggcgctccgggaagatgcagctcaagctggatggagatcaatcacgagatgcttgaacaaagtgctgtaccggatgagggtcgccggccagctggcgctttgtggacgtgctggggctggaacaggagtctctggcgctcggtgccagcgcctgtctgtgcgctgctgctgctgtttcccctcacggcccagtatgagaacttcaggaaaagagcagattgaagtagctgaaggggactagaagattagatcactaaagtgtacataacatggaagcagtagcattgggaaattccatgtgagcacaatcgtgcacttattcacgcagtgtgcctataatcaagacaaacgtggggatttgaggatggatcagttcgtgaaaacagtttcttatcttgaagacgagaggaaaagtgtcccctggaatgacagaggaacaagtgctttgaacagagaatgaggccactacagggcgagcccatgattgccgctggcaccaccgaaggccacattgtcggggtagatgacaacggtgaaatactccagttttattactgtttaaacaacgtggattggccaggctcta

SEQ ID NO: 521475 - DNA, 273 bp, Homo sapiens
attaaaatatggccattttttttccaactaaagtttggacccggaaaagtcctttctccgtgatttgtaatttggggcctgggttatttttctaaaaaagtttggatattttggccggaactaaaactgccccgccctcctgggggctgtcctggtttttccaaaaagccccccctggggccccctaatgttgcctgtttccgtggggtggaagttttgttttttttttgtttttaccccaagggtccttaaataaaaatctgttttctggga

SEQ ID NO: 521476 - DNA, 292 bp, Homo sapiens
attcacacgaaatggagcaggcttcaaactcaaaagtgactgaagaatacttacaatggaaatgaaagtgaccatagagcttcattctgtaagtttatccacacacacaaaaagagggtttgtaagagttaaatgtaactggctgaagcttatagctggcagtttgttacaaagtacccaagctatacctttccaacatcgtagatttgaagaattaaaggaattttatgaaatactgttggaagttatactgacagagaaaacaaaaaaggggtaaaagttggattatggt

SEQ ID NO: 521477 - DNA, 329 bp, Homo sapiens
gccccatttttttttgggggtttttaaaaaggggcccccgggggccaaaaaaattttaaggggccccggcggtttttaaaaaaaggggggaaactttttttttcccctttttgggggggggtgcccggccccccccccccccccccaaaaaaatttggggggtttttttgggggaaaaaataccccccccccccccggggggggtttttttttccccccaaggggggggtttttcaaagggaaaaaacttttcccggggtttttttttttttttcccgggggttggggccctttccctttttttttaaaaatttttttttaaaggccca

SEQ ID NO: 521478 - DNA, 1181 bp, Homo sapiens
cccttgcaggtgcccacccgagcttaactatctaagtgcttttgggtaaataaggccatcgctcgcgttgttcgagggccgttaagcctagagggttaacattggcctgcaggtgctaatttggggacagttagtaagttcccccctcttttcacagtccgccggttctttgtcagactctttggttgggcccactaaagacaaggctcccccctatgttggccctcctttcgtctgtcaggtaggtggtgtaatccccttggtagggtttaccgtaatgcatactagataggggtttagaatttgaggaagtaatggctaatggttcataagcctttatacatttggcttcccctgaagggtccgaacgggccctccgagagagaggaccacgtcgtggcgccaccaggcgcaaacctcttgggtaatggtgtccgcgggcatttgttgcgtgcttggcgatgcacgccttgctcaaaccaggtagaccattgttggccttgccacagcgctaacgtcctaggcacacacttttcgctccctccttcccatcctagatagggggaccactcggagtcaatcaaagcgatggcaatcgaaccacttggcgccggccgtctcgcttgacaccgctcgcgtcgcgtagcgtcgcgtgccccatggcgcctcgcaaaagggttcataggttactcgattctctctcctcatagctatcgacataaactaacctcctcggtacaagtcttgtggattgttttattgttcaaggttccaatttatcgacatcgagtcgagacgcttgctgcatactcgatgcggccaagattggtcatctcgtcagttgtccctcgcgtgttcatggcacgcatctgaatctcactcttctcgcgcgcaatgatacatcatctttgtaggtggaaagcaagagtgggcatggcggtgcatggcaaggtctggggtgacacgatctacctccagtccccctaggcgacaggtgggagccacttgcccttaggtatgatgcagtcagagtgagacaagggggtcccgatatcgaccatatagaggtgtaggggccacctcctccacctgttctgttggggaggggtagaccatgagtttaatgtcccagcctggggctccctctctggtattaagccgggggtacttgataaaaatct

SEQ ID NO: 521479 - DNA, 397 bp, Homo sapiens
agactctagaggaaccccttcccagtcctagttgcaggccattgaccacttgaggccaggagttcgagatcagcctggcaaacacagctaagccctgtgtctactaaaaatacaaagagtagccagatacggcggcacatgcttgtggtcccagctactagggaggctgagacggcagaaccgcttgaatccaggaggcgacgggtgcaatgagctgttatcgtgccactgcactccagcctgggcgacagaaggtgactctgtgtaaaaaataaaagaatttgcggacacctgggacacctcacaccttgccccaagcacaagatcacaaggtggtaaagctatttcatacatcctgctggctccagccagtgcccctagggaatatctctcacct

SEQ ID NO: 521480 - DNA, 210 bp, Homo sapiens
  misc_feature (44)..(44): n is a, c, g, or t
gagctcggtacctcatagttcgcaggagacccatctttaccaanaaaaaaaaaaaaaaattagccaggcaaggttgacacattgcttgtggtcccagctattcaagaagggtaaggtgggaagagcacctgagcccaggaggtcaaggctgcagtgagccatgattatgccactgctttccagcccgggtgacagagcgagaccttttca

SEQ ID NO: 521481 - DNA, 390 bp, Homo sapiens
  misc_feature (339)..(339): n is a, c, g, or t
  misc_feature (381)..(381): n is a, c, g, or t
aaccactaatcttctttctgtctctatagaattccctatcctgaacttccatatgaatgaaatcgtaaggtctgtatggggaaaagaaagagagatcagactgttactgtgtctatgtagaaaaaggaagacataagaaactccattttgatctgtactaagaaaaattcttctgctttgaaatgctattaatctgtaaccctagccccaaccctgtgctcacagagacatgcgctgtattgactcaaggttaatggatttagggctgtgcaggatgtgctttgttaacaatgtgtttgaagcagtatgcttggtaaaggtcatcgccattctccagtncttgagtacccagggacacaatgcactgtggaaagccatggngacctctgc

SEQ ID NO: 521482 - DNA, 224 bp, Homo sapiens
gcaaagtggtatctgaggtgcaggcacactgtcccaacactcccatcatcctagctgggaactaaacttgatcttagcggatgataaagacacgatcgagacactgaaggagaagaagctgactcccatcacctatccgcagggtctagccatggctaaggagattggtgctgtaaaatacctggagtgctcggagctcacacagcgaggcctcaagacagtgt

SEQ ID NO: 521483 - DNA, 157 bp, Homo sapiens
tatatacactcattaagtaaatggacattccagactcatagatgtgattatagtcataaactaattcttattaaaccaatgatgcagaaaatcagtgatgcattagttatagagtataactcatcgtttacagtatgtttaagttggcagtatcata

SEQ ID NO: 521484 - DNA, 139 bp, Homo sapiens
  misc_feature (113)..(113): n is a, c, g, or t
ggcgaaagatcgaaaaattataaccaaggataatatagcaaggactaaactataaatttgcataatcaattaactagaaataattttgcaaggagagccaaagctaagaacanacaaacagacgagtatccaagaacag

SEQ ID NO: 521485 - DNA, 83 bp, Homo sapiens
acatgtatatacatttggaaatttgaattaaatactgtatcatactttcaaaggataaaaagactacccctctgaaaaaaaaa

SEQ ID NO: 521486 - DNA, 133 bp, Homo sapiens
gactgggaaaccctggtggaggggctgtgggtgatctggtgatgaggccttcgctgtgagctctcagtgtgtgcggacggagcaccagacctgtgcaaagcccagtgaagaagagctggttattggtgagtgc

SEQ ID NO: 521487 - DNA, 361 bp, Homo sapiens
cctggcggcattttagaaaatagcttatgttacaacaaaaaccctttaaaaacattcatcccagcaaaagcctccagggctggggggtgaggggaaaagtttcaaagcacgtggattgtccaaatctgggatgccctgtcctcatccggctcccatagaaccacgtggtcccggtcgtagccccggcctgccttcacgtccaggatctgtgtctttaacatttggctgtaaatttggcccgatttacttatgctccacttttggcacggcaagctgttttcattctcccaaaccaccttttagcctgggctttgggggtcatatactcttatgtttctggtggggggcctttttgtttttt

SEQ ID NO: 521488 - DNA, 636 bp, Homo sapiens
  misc_feature (540)..(540): n is a, c, g, or t
gagagaactacctaatgtaaatgacgagttgattggtgcagcaaaccaacatggcacatgtatacctatgtaacaaacctgcacgttgtcacatgtaccctagaacctaaagtattataataatttttaaaaatctagacatctttcaataagttaagaattaattaaattattatacatctatattatagaatgctttgtagctatgagaatgaattaaagctacatgtgtttaatttccacatctgaccatgaaggacttagggagaccaatgcaaagaaatctgtagagtattgctagagtccaggtgagtaccttgtcctacctagagaatgattgcacaggtaaagagaaagatgctaaaaacttataggaggtggagcaagatggctgaatagaaccttccagtgatcattcccctcctccagctggagcacaaaattaaacaatcatccacacaagagagtactttcataagaaccaaaactcaggtgagtggtcacagtacctagctttaatatcatatcaaggaaataggncctaaaaagggatcaaggacagtcttgaactgccaacctccaactccccacagagcagcttggcataaagagagatctgtgtgcttggagggagga

SEQ ID NO: 521489 - DNA, 246 bp, Homo sapiens
agtgtgtgtgaggctgagaactttgtgaaggatgctgggagctacagcaagaaagtggtggggactcctgttaccagatcacaggcggagacactctaggacgctcttccagctgaagcagagaagaaatgttcccatgaagcctccagatgaagccaaggttggggacaccctaggagacagcagcagttctgttctggagttcatgtggatgaagtcctaccccgacgtttctgtggatatctc

SEQ ID NO: 521490 - DNA, 408 bp, Homo sapiens
  misc_feature (15)..(15): n is a, c, g, or t
  misc_feature (29)..(29): n is a, c, g, or t
  misc_feature (74)..(74): n is a, c, g, or t
  misc_feature (104)..(104): n is a, c, g, or t
  misc_feature (161)..(161): n is a, c, g, or t
  misc_feature (315)..(315): n is a, c, g, or t
  misc_feature (326)..(326): n is a, c, g, or t
  misc_feature (354)..(354): n is a, c, g, or t
acatccccgtccccnagtcaagagctccnctgtcctcgcttgaatgattcagggtcagggaggtggctcagagnccacctctcattgctgatcaatttctcatncctctacacatctctccacggagcccagaccccagcacagatatccacacaccccancctgcagtgtagctgaccctaatgtgacggcatactgcggtaatcagagagtagcatcccttcaatcacagccccttccctttctggggcctccatacctagagaccactctgggaggtttctagccctggacctgccagctctgttagtgganagatcgctggncaccataccttatggccaacaggtggcntgtggtgaaaggggcgtggagtttcaatatcaataaaccacctgatatctataa

SEQ ID NO: 521491 - DNA, 195 bp, Homo sapiens
tacaacaacgcgggttaacgtggcttgtaacaactcccgacttgttgatctgcctgctcggctcccaaagtgctgggattacgggcgtgagccactgctcccggctgactttttttatttttttaaagagactgaatctcacggttgaccgtggtttgtcaccaactcccgaccttgttgatccacctgcctcag

SEQ ID NO: 521492 - DNA, 381 bp, Homo sapiens
  misc_feature (7)..(7): n is a, c, g, or t
  misc_feature (19)..(19): n is a, c, g, or t
  misc_feature (57)..(57): n is a, c, g, or t
  misc_feature (73)..(73): n is a, c, g, or t
  misc_feature (94)..(94): n is a, c, g, or t
  misc_feature (102)..(102): n is a, c, g, or t
  misc_feature (111)..(112): n is a, c, g, or t
  misc_feature (115)..(116): n is a, c, g, or t
  misc_feature (159)..(159): n is a, c, g, or t
  misc_feature (192)..(192): n is a, c, g, or t
  misc_feature (218)..(218): n is a, c, g, or t
  misc_feature (249)..(249): n is a, c, g, or t
  misc_feature (259)..(259): n is a, c, g, or t
  misc_feature (274)..(275): n is a, c, g, or t
  misc_feature (301)..(301): n is a, c, g, or t
  misc_feature (340)..(341): n is a, c, g, or t
  misc_feature (372)..(373): n is a, c, g, or t
agagacnaaccgaaccccntcgaccttccgaaggggagtccgaactagtctcaggcntcaacatcgaatacgngcaggcccctcgccctattcntcatagcngaatacacnnacnntattataataaacaccctcaccactacaatcttcctaggaacnacatatgacgcactctcccctgaactctacacnacatattttgtcaccaagaccctacntctaacctccctgttcttatgaattcgaacngcataccccngattccgctacgacnnactcatacacctcctatgaaaaaacntcctacgactcaccctagcattacttatatgatatgtcnnccatacccattacaatctccagcattccccnntcaaacct

SEQ ID NO: 521493 - DNA, 882 bp, Homo sapiens
gctcaaggagtcattttgcactagtaggcaattcaacagtacacctttggtcgagtgtgaaataaacacagtgtgcactagggggacctgagactatcatcttaagggcagggtgggtggcaacaccatgtcgtgagtctccagctgttgtagtgcacctgtaaagctcggaaacttggaggtctatttgagcagtgtatgagtctctgcctgcctctggctcgagcatgcgcttcttctgtattgctctgatgggtctattgactaagagaggtctaacaatagttaaggcttcataaaagttaggaagttaacaagctcagaaagaccagaggtgttcgaggttcaccttcattccacatgcagtagtagcctgtacatggtgttgcagtggagacttaaagataactgccattgagtaagtgatggtggcgggcaccatgagctaactgtggtcagaagccggatggctccggttggggctggattctccgttgggagctgtgtgatcctggatgagttcatgccttgggttcagaagtcagacttccatgtagctgtatatttcaagtgaatcaatagcctctcggtcacgcttcatttcgtggaagaagttagcttggcaggggtgaggtccctggaaggcccctgggacgacgtggtgcagcaagcgggtctgccattctggggggtgccttgaccagaaaatcccaaccctgagcactgcagaaggggggcgcacaactagagccggacagacgcgggcttctacaaacaaggaggggcccacaaaagggggcgagacacatcaggaagaaacacataactaaatcgtgagatctgcgccaccacatcacattactagcaacgacaccaaaacgt

SEQ ID NO: 521494 - DNA, 330 bp, Homo sapiens
ggttccataaggttggggggagccctctttccccgctgggctgacctccccccccttaaaataaaaggtttgaacagggtagcctccagagtcctttccatctcccaatttgattaaaaacttaaggccccactatccaaaaaaggtctctctcttaaagggattaccttaaggaattaacatactcccccaaatggtgaatccctccctctctccccccgcacactgagggcaggaactctgctctatttgtttttgtgaaatccctgtcccctagtttgtacccaggaaatgcttgtatgaatgaataaattcgtgcatgtaccttta

SEQ ID NO: 521495 - DNA, 1011 bp, Homo sapiens
  misc_feature (438)..(438): n is a, c, g, or t
  misc_feature (482)..(482): n is a, c, g, or t
  misc_feature (697)..(697): n is a, c, g, or t
acgggcacctcagctttcttacatgtgtgtgcaacctggagggtgcatgtagtgggtgtgtgacgagcggatggctgttaatccctttggtctgttggcggagaattagggtcacaatttgggcacatgtggagcggaggtttttgacgatcttgaagatcctctgccatttgatttgacgcaaatgtgacgacttggccaaggattgagcggatgatctgctgccccgtcgcgccccatatctggaaacaacagtgatggcctcattgcctggaagcgatggaggaatccaatatggctggcaagtagccctactcccactgaccgggatccgctattcttcctgcagcgtgaagacacagcgcatctccccgctgtaggcttcctcccacagaacccgtttcgggcctcagagcgtctggtgagatgctgttgccngctgctgctgctgctacccatgtgctgggcctgtggaggtcaangaggccccggggcgtctccctcaccaatcatcacttctacgatgagtccaagcctttcacctgcctggacggttcggccaccatcccatttgatcaggtcaacgatgactattgcgactgcaaagatggctctgacgagccaggcacggctgcctgtcctaatggcagcttccactgcaccaacactggctataagcccctgtatatcccctccnaccgggtcaacgatggtgtattgtgactgctgcgatggaacagacgagtacaaacagctgtgcgatcatctgtgatgcacaccatgcatagagcaagggccgtaatgtgagagagcgtccctgcagcagatggccgatggtcacccgcgacgggtaccgtctgactatgatccttattgagggcttggcacgcaggcacgggcggagaagccgcaaaatgctcatatgacacaggctgggaagaagttcttggcagaccatgtggagctgctgtgcctttaaggccgagctaggacctaataaggcaaaacacc

SEQ ID NO: 521496 - DNA, 325 bp, Homo sapiens
  misc_feature (18)..(18): n is a, c, g, or t
ttgccccgccccgcctgngggcccccccccctttgttgtgttttccccgcaatttcaaggataagccttcctgcgggtccctgggccgctctcccccccctgtttttagcccaaacaaacatgagccccctgcttggaaccaccaactgttctggtttctggtcaaagggaggggaggcttttccagccggtgtgggtttccccgtgggcccaaagtggccccctgggcatattcccctgggttttcctttgtgcccccggagcgattttagtggcccccgttttcttcaaaggcttttaaagtaaaggcgttggggggtgggga

SEQ ID NO: 521497 - DNA, 412 bp, Homo sapiens
ggacggatggattacagacttgaacataagaccttaaactatacaagtcctagaagaaaactaaggaagaactctgggatgttggctaggcgaagaatttactgaggaagacaaaaatagacaaatgagactaaataaaactaaagcttcacagcaaaagaaatactcaacagattacccagcctatagaaggggagaaaaggttggcaaagtgataccttccagaaaggatgaacatcagaagtctacacggtaactctaggtaccggggacacaaaacagcttcttttaaaacacctaggcagaggaccatgagacatttctcggaagaaatacacgtgccaacaaacacttgaaaaacacatcactcaacattactaatcatcagagaatggcaatttaaaatcacaag

SEQ ID NO: 521498 - DNA, 505 bp, Homo sapiens
ataaaaaggaatgaagtactgacacgtgctacggcacaataacggtgaaaacgttatgctaagtaaaagaacctagctgcaaaaggccaatagtatccacttatattaaatgtccaaaacaggtaaatctatagaggcagaaagattagtggttgctagagactgggggatagagtggagggtatatgtagtcaggagtttattttcagggtgatgaaaattattaatatttttatttttcatagagatagggtctcactatgttgcccaggcttttctcaaactccttagttcaaatgatgctcccaccttggtctcccaaattgctggagttatgggagtgagccgccgagcctggccgaaaacaatttaaatttacattttggtaatggttgcacaattctgaatatactcaaaatcacttaattgtatgtgataaatgggtggatttcttttggtctgtgaaatatatctcaataaaaaattttttttaagatgaaaaaaa

SEQ ID NO: 521499 - DNA, 385 bp, Homo sapiens
cagagtccaaacagtgctttaactgaactacttatcttggtaaccactgcttggtgttttgtcttcaggattgcgctggtaaagccatgtttcatctcctgttacaatttttcaatgaaaggcttcaagatcctgatcccatttatttaaaatttccattgaaagctctattcttgtctgtagctgatctgggtgcaatggttttggcacctatcaggtttaaagtttgctgaacttttccagtcaaaattgtgtaaggtgaaccaactgaaatgtctatggtgttggctgttgtttctgctgttaattgtgggttttcttcaattacgcgcatgaactaacttttttctcacaaactgatgtggatgatctggcactgtttgga

SEQ ID NO: 521500 - DNA, 222 bp, Homo sapiens
gcacgaggaagtgtatcaatccatcaccagtcaagctgccgcagcctatgcactggtcttgaatggaaaatgtgttgattctgctaaagcttctctgtctttccctgtgtgtgaaaccttaacatctctacatgggaacacgggcccccttcatttggagttgatgtttccagatggctatcctcaaactttgtgttccaataaactctataattaatcgtg

SEQ ID NO: 521501 - DNA, 345 bp, Homo sapiens
tactagtcataaggacaatttataaaatatcaaagagtcccagtgaaccttcactaacagttttagtttctctgtttgtggagacagagtctccctctgttgcccaggctggagtgcagcagggcgatcttggctaactgcaacctccgcctcccgggttcaagcgattcttgtgcctcagcctcccaagtaactgggattacaggtgtgtgccaccacgcccagctaatttttgtatttttagtagagatggggtttcgccatgttgaccaggctggtctagaactcctgacctcaactgatctgcccacctcagcttccccaagtgctgggattacaggtgtg

SEQ ID NO: 521502 - DNA, 232 bp, Homo sapiens
tactaatagttactgatttgttaatataggtttgtaagttgtttttgaaagttaaaatgaagctgggtgtggtggctcacacctgtaatcccagcgctttgggaggccaaggcgggcagatcaaggagtcaggagatggagaccagcctggccaacatagggaaaccctatctctactaaaaacacaaaaattagctgggtgtgatggcgtgcacctgtaagctgagctact

SEQ ID NO: 521503 - DNA, 951 bp, Homo sapiens
ggggagcgcggagtgtggtctggttgccttacaccggttacttaagcgcggacggggcgtgtccttggactttaaagagtggggacgtccggttcggagcggggagtgttcgtagtgccagcgattactccgatgaatgaacattatgggtgatgttgtgagaaaagtgctaacgaaggcattttatctaatgaagtgtcccctaggtgcctaccaccctgtttgaaataagtgggatggcaaggcacaacatgagcgtgggggacaaaatctccatgcgtgctcttctgggacgggaaggacagggctcagggccccctggattatgtcttacacgaagctcggccacaataagaaacagaaggcgcagtcatcctgggggacgccggaattacagctgattggacgatacttgtggaggaaatctcgccaagaaggttaccactcgcctgggaaaacgaacaatattgattgcttctgtgtccggcgcttgtacgagaaagaagcggaacgaacaggggcagacttttagatacgtttatctcaagaaaacaagctacctaattggaggtaacttaagtttggggccgattgccctttattttttttttaccaagaactaggtaaatggtcttcaagggagcgttgttataatggttgtacccatggctgttattggagattcctcgataagaagcaagaaatgtcagatcatggaattgacttgaaaaggaatatttttggtgtggggcaatgccctggttttaacaacttaaagacgaggggtgtgtggttcaaagtgaactattggtccaggtttgggagctgtgaatgagttacttccacagtgcagtaaaaggggtatctctggtttgaccccttttttaaaggatttgatgtggagctcgctagaaaaggtgcactttttcaccaggaatgggggggggcaac

SEQ ID NO: 521504 - DNA, 139 bp, Homo sapiens
ggtaccgcgtgatcggcggcatggccggcaggcgtgcgaataggcgccgcgcgaaaagggatcgacgccccaactgctggcggcgaggggctccagacgtttgcgcatgttcgagcccagggccgcgaccagttcgctg

SEQ ID NO: 521505 - DNA, 222 bp, Homo sapiens
ggtcgaccgggcccagggcgttttcgctgccggtggggtaggtcatctgcacgttgacgttcatcgggtgcggcgcccaggcaagaacaccacggcttccttgcgccgacgcatccaccgccgagagcatggccgcttcactggattccaccagttggaacttgcccaggccgaactggttcttggcgatcatttccttgatctgggtgttggcgcccgagc

SEQ ID NO: 521506 - DNA, 215 bp, Homo sapiens
ggatccccatgtcatccccaacacctaacccctggcaaccactgatctttttattgttttcatagttttgccttttccagaacgtcatctagttggaaacaagggtgtgtatccttttcaggttggcttctttcacctggtaatattcatttaaggttcctccatgtcttttcatggcttgatagctcatttcttttagtgttgggcgataaata

SEQ ID NO: 521507 - DNA, 619 bp, Homo sapiens
  misc_feature (5)..(5): n is a, c, g, or t
  misc_feature (7)..(7): n is a, c, g, or t
  misc_feature (11)..(11): n is a, c, g, or t
  misc_feature (20)..(20): n is a, c, g, or t
  misc_feature (31)..(31): n is a, c, g, or t
  misc_feature (40)..(40): n is a, c, g, or t
  misc_feature (395)..(395): n is a, c, g, or t
tattntnaganatctaaaangaggatactancttattttntttggtcctatttttaatttaggggtaaacaaatttgggaccctttaaaattttgcccacgggggaaaaaggaacacaaaaggaaggtggggtccaaaaaactcttgggctttgggggggcaacccaccccccccactctttttgtgtggggggcgcgttataagacgcccccgcgggtgaaaaccaggaccccccgggaagtgtttgggggggaaaaccccccttttccacaccagtttttaaagaagagggtgttttttttaaaaaaaaaaaacacaaaaccccccctcgcgggggagaggattttttttttgaggagagaccgcccctttttttttttttttttttataaanaaaagaacaaacaagagggttgtttttttttttgggggggagggaggagaataaaaaaaaaatattttgtttgggggcggacccccacacccccccttggtggggggggagggggcaaccacccccccccgcgggggggcccaccccacccccgggggttatttttttttttttttttttgggggcgcgcccccaaccccccccccaaccccttttttggtttt

SEQ ID NO: 521508 - DNA, 309 bp, Homo sapiens
aactcaggggcgagctgctgtggtgccagctgctgcctcttcgggagcctccaatacgcctgccgagtctgagcccactggcgatccacgtgggcccagtctacatcgccaaagcccttttgctgaacagcatgttcaatttcagatcttctacttcatcatcatcacttggcaaatcaccacctatcaaactgctcgccctttagttgctcacccctctggaattcaccatcatcgacatagctgtcctctgcggagctaacccctgccgagaaaaccccggccacggtgatggttgtttccgggggg

SEQ ID NO: 521509 - DNA, 162 bp, Homo sapiens
tttcaaccccacgatcacagctgggctggacccagtgcaggagaatccagattaggacccggaggactctcacatgggcacctaggcaaacgatctatgccatgacaactgtagggacctgactcaaaggctgctggtcagcagcctcccaggatagggaag

SEQ ID NO: 521510 - DNA, 111 bp, Homo sapiens
gcttccgaggaagctaaggctgcgttggggtgaggacatcaacttcatccggcgactagcaccgcgtccggcagcgcagctcctaacactcgaccagcgcacatgagcctc

SEQ ID NO: 521511 - DNA, 356 bp, Homo sapiens
tgtggaactgtgaatccattaaacctctttcctcataaatcgcccagtctcaggtatgtctctattagcaacataggaacagactaatacagtaaatttgtaccagtagagtggggtgctgctgtaaagataaccaaaaatgtggaagcgactttggatctggaaaacaggcagaagttggaatagtttggagggctcagaagaggacaggaagatataggaaagtttggaacttcctagagatctgttgaatgactttgaccaaaatgctgttagtgatatggacaatgaagtccaggttgaagtggtctcagatagagatgaggatcttgttgggaactggaataagggtaact

SEQ ID NO: 521512 - DNA, 139 bp, Homo sapiens
ccaaaacaagaagtatttccataaggggatatggatgtcttcctcaatccattattctctcttcctcccacggcatccacagaacaggatttaccagtcccattctttttcttttcttttttttttttggcagactgtt

SEQ ID NO: 521513 - DNA, 122 bp, Homo sapiens
  misc_feature (58)..(58): n is a, c, g, or t
gccttaaggccgactgtagagaatccccccggggaatcgcacggaggtggtgaccccnctcatggtggccgacaccaggtggttgaggtccccgtgggtggttttcagcagcttgagggtgc

SEQ ID NO: 521514 - DNA, 238 bp, Homo sapiens
caccttatatatttttaaggtttatccacattgtgggatttattagtacttcattcccttttatagctgcataatatatttgtttatctatgcatccattgatggacatgtgaattgtttgcaacttttggctactgtgaatagtgctgctgtacaagtgtttgtttgaataccggttttattttggtaatatacctagtactcatataggcattaagaataaattataaaaacaggt

SEQ ID NO: 521515 - DNA, 572 bp, Homo sapiens
aagatgcgtggcacagccgtgcaactcttctagctagtttaaggctacataatcttatggctaatcaaccagcagcatacctatcactctccaaaattgataagttaatacttatggacaaaaaccactatggagaacttagcattcaaacagacaagagtcggccaggcgcaggggctcacacctgtaatcccagcatttggggaggccggggtgggcggatcatgaggtcaggagatcgagaccaccctggctaacacggtgaacccctctctctactaacaatacaaaaaaacccaaaaaacaaaaaacattagccaggtgtggtgacgggtgcctgtagtcccaactactccggaggctgagccaggagaatggcgtgaacccgggaggcggaacttgcagtgagctgagcacatgccattgtactccagcctgggcgacggagcctctgtctcaaacaaacaaaagaaaacatacacagacaagagtcaaatcaagtctatgtacatattcaaatattcacatgtggacaagattaaataagctttctaaatgatgagttactaaag

SEQ ID NO: 521516 - DNA, 108 bp, Homo sapiens
cgaactctcgaaacgttgtgcagacggtgacggggggcacgtcctgtcacccaacacggggctggactttctttcctgtgcaggctcagccgctacctgggaatgtgg

SEQ ID NO: 521517 - DNA, 967 bp, Homo sapiens
  misc_feature (11)..(11): n is a, c, g, or t
  misc_feature (17)..(17): n is a, c, g, or t
  misc_feature (117)..(117): n is a, c, g, or t
  misc_feature (439)..(439): n is a, c, g, or t
  misc_feature (454)..(454): n is a, c, g, or t
  misc_feature (780)..(781): n is a, c, g, or t
gggtaacccgngagtgnatgagatatttttaatgatggataaaacaccaatttgatgtgtagtatatatatttagtataaaatgatgtaatatttttttatttattgggtagttggntaaattaattaaatagaaagaagagtaacataagaacaaaaagaaccactcaaaaatttttgatagaggtggtttttagggagtttatatgattaaattggtttaatagaatattgatatcattaatgttgttatcattatggggtgggggtgaggtgtggtgattcgtttgtttgacggttatgaagtacagtgcaatactacacgataaagcacatggaccagaagataaagaagaatacaaaaaactatcaaataaatatagcttgcatgacaagagcgaatcccagaccagagtggcgtcaatctgacccggcaattntcagtgagcgcggtncctgttccctctcatgtcatcagccctcctcagctcctcccctagttccaatatacctaagcttcccctatactttgaatcattcaacatctttcatcaccgcttttatctcacacggtccatcattatatcgtatttccggcaaccgaactcacgccgctctatcaccccatcaacccacccgaacgaaacctactctacgcaccacactccgatctattcactccagacccacatacagctcccactggcacaagaaaacgtatcagacgagtatccaaatacatccttccctagatcaactttgacccaaaagtaataagtannaaataaagcacagagctcttaagcaacgcccctcatacccaccacgccaacttccaaaggaacccatcgctccgcgatacaagcacccgatcaatgaccctagatgctcgcacgcgaccctcatcattccatcagagttatagtcgatatctcttaattactccattccaacacacaccgccacct

SEQ ID NO: 521518 - DNA, 264 bp, Homo sapiens
  misc_feature (237)..(237): n is a, c, g, or t
aagctggtctcaaactcctgacctcaagtgatccacccacctcagcctcccgaaggtgctgggattacaggcatgagccaccgcttcctggccaagatgaacagttttgatgcctcttcaaacaggttttctgtaataggggcctgtagaaatatggtggtcattagtggaagtgcatggacgacgagtaggtgtttctaaatgatgggagacaatgacagctgtgcattgtgtgcncgatggagagtcaccccattagagaag

SEQ ID NO: 521519 - DNA, 256 bp, Homo sapiens
ccgccttagcctcacaaagtgctgggattacaggtgtgagccactgcacccagtcacatgtcgtattttaaaagggatttaaaagtatcattggattgtttgtaacacgaaggataaatgcttgaggggatggatacccattctccagcatgtcatgattacacattgcatgcctgtatcaaaacacctcatgtaccccataaatatatacacctactgtgtaccacaaaaattaaaataaatggagggtgagaag

SEQ ID NO: 521520 - DNA, 482 bp, Homo sapiens
  misc_feature (221)..(221): n is a, c, g, or t
ggccggggaggtctctgtaccatggctcgtacaaagctgactggcctcataaagaccgccgaaaaagcacccgagaagaaaggggctataaaagcaggtcgcaagatagcgctctcaacagaagggggctaaaaaccccttaggaaacatgggctatcaaagacaattcattcccgcctttgaagacgaacacaccccccacacccgatatccccatcganactcaccgccccgccgtcttcaccacaatccccccaattagaccgttcttcaccctcacgcccatttctcccaacccaactccctcctatcgccacactctaacaccacccctcccccctcaactaacaccaccccaccgaccttcatcctacgccctcgacacctcccacacaacccctcaccctccccccgcccacccactccaccccgcccgcccacacccaacaacccgcccacaccacacacattccacccacccc

SEQ ID NO: 521521 - DNA, 167 bp, Homo sapiens
gagaagggtcgcctcggtgcccagggcccaccaggagctccaggcccactctggattgcttgggatcactgtagcacggggtcttgcaggaccaccaggcatgccaggtctaggggaagcctgccctcaggtgtcagggtgaagtggaaccagagctacgtttcagt

SEQ ID NO: 521522 - DNA, 163 bp, Homo sapiens
gaggacccgtctgtgactacccatcagaaactactactcctccaatcttgatacagccaggtgcatggcaagtgtttaattcgactatacactgactaattaaaacaaatatatttgcgcttagtgattactgtattcatgagttattacattcgagtaaaaa

SEQ ID NO: 521523 - DNA, 426 bp, Homo sapiens
catacatgtgcgatgacagtatggaaaagaaacactgaggaggaacatggagccaggcacccagaaaatgcgctcaggaacccacagggtgatggtggcacagccaggaaggagcagaggggaaacagacaaggggacagattccagcgacatttaagaggcagaataaaagcgagctagtgtgcaactggacgcgagaggaacggaggggcccaggaggatgcagatctccagcttgggcaactgggagcgtggtggacaggtcactgagatgaagaacccaagataacaatcagacttgaagataaagctcatgagctgattcttaatagtcacagaattcccttaattttggcctttttttcccttccaagactccccagactttttttttttttttttttttttttttgggggggggggggg

SEQ ID NO: 521524 - DNA, 516 bp, Homo sapiens
tgggttattaagtcaaaacccaaaagccccctaaaaaaaggggttgatgtgaagttccgcctttagggtttccaagcccagccccaaccaaccacattctgggatggggtttgttacttccaggcccgggacttccttaaaacccttaaagtgggagaaaaaaccttttttttccctaaccactgcaaaaaacccggccttcccgggctcattaaaattgtgaaaaaggctttccccggcccccccccggtttagaaaaaccatccccctttttgcccctttaacaaagagggccccccctaagggggccctgaaaagttttattttttttttagcccggaggaaaaagaacccagtttacttagaatcttctgctggaaagggggaaacctttctgccaaaaaatccaactttttttccaaccaaaagggttagggggcctgcctgggatgctttcccggggttggggacccccgtgggttttttgggcctttttccataaaaaatccaaattta

SEQ ID NO: 521525 - DNA, 665 bp, Homo sapiens
gctgagggccagagggctgagtctccatggactatctttctgtttctcagctaatctcaggggcgatataatcaatgaggtggtcctaaagttgctcaaggctggatggtcccgggagagaaattactgatggaacacctggtagccccggatgctccaggacggagattgtagtgcacgtaccatagacaatggctttggcacacagtcgtcttggtgaaggacacacacctgagttgagctactgtcagtccccttcctgcctttggagtaccgtcagcgtgaggctgtgtgcacgggatgccttcctgagaccaggagctcctgatataaagaagagacactggatgaaatagtccagatgatggtgtatgtccccaaggatgaacaactcttttcttcccaagggctgccaagatctagtggtatcccaggaggattaagctagcttcctgtcatgaaggctagaggaagacttcctggaactgcctttcttccactaacaggaccctgggacctgtaggagacaccccgtttgggactgtgaggtgtttgagggtgtggactggcatccagcagcactaatcagacatcacaatggtgtgtgacaaggcaggccttacattagaagtcaagccaatcctttatgctgtcgtttggaggtc

SEQ ID NO: 521526 - DNA, 259 bp, Homo sapiens
acatggcgtggaagctcaggggctcgtacggagagatgggcatcaagctgcgcacgatgcggtacttgcgaaagaagagatgaggcctccgctggggcaggctgaagggcaggtagtggtagcgatactgctgcttccgcctgaagaacctgtcctggaagagctcgactatgatgctggacgcgcgcatgaagtgagcctgcatgacattcagcacgtgcgtctgctgccgaacgatctccatagcagttgggcaggg

SEQ ID NO: 521527 - DNA, 141 bp, Homo sapiens
tattgagtggccatgtgatgctgtgatattcagcccagctgtcgctttatcagtgctatatttatcttggaatatagaggctccttttacttgtttttaagtgtgctttgctgctaagtgatgaacgatacaagctcctca

SEQ ID NO: 521528 - DNA, 157 bp, Homo sapiens
aaatgtactgggcctggtgtcacaggtctgtggtcccagctgctcaggaggctgaggtgggagagtctcttgaccccaggcggtcagggctgcagtgatctatgattgtgctactgtacaacagtacagagcctgggcaacagagagaccctgtctc

SEQ ID NO: 521529 - DNA, 114 bp, Homo sapiens
  misc_feature (46)..(46): n is a, c, g, or t
cttgcagtgaccatcaagtgaatacgaagagagctcttcaccttgnacacttcagttcatcctcagaggagggaagaacgcttccaagaggcataagagactgcctcgccaaat

SEQ ID NO: 521530 - DNA, 906 bp, Homo sapiens
  misc_feature (13)..(13): n is a, c, g, or t
  misc_feature (29)..(29): n is a, c, g, or t
  misc_feature (47)..(47): n is a, c, g, or t
  misc_feature (51)..(51): n is a, c, g, or t
  misc_feature (58)..(58): n is a, c, g, or t
  misc_feature (70)..(70): n is a, c, g, or t
  misc_feature (80)..(80): n is a, c, g, or t
  misc_feature (96)..(96): n is a, c, g, or t
  misc_feature (98)..(98): n is a, c, g, or t
  misc_feature (101)..(101): n is a, c, g, or t
  misc_feature (108)..(108): n is a, c, g, or t
  misc_feature (116)..(116): n is a, c, g, or t
  misc_feature (119)..(119): n is a, c, g, or t
  misc_feature (125)..(125): n is a, c, g, or t
  misc_feature (129)..(129): n is a, c, g, or t
  misc_feature (135)..(135): n is a, c, g, or t
  misc_feature (141)..(142): n is a, c, g, or t
  misc_feature (145)..(146): n is a, c, g, or t
  misc_feature (152)..(152): n is a, c, g, or t
  misc_feature (173)..(173): n is a, c, g, or t
  misc_feature (203)..(203): n is a, c, g, or t
  misc_feature (209)..(209): n is a, c, g, or t
  misc_feature (211)..(211): n is a, c, g, or t
  misc_feature (214)..(214): n is a, c, g, or t
  misc_feature (217)..(218): n is a, c, g, or t
  misc_feature (221)..(221): n is a, c, g, or t
  misc_feature (227)..(227): n is a, c, g, or t
  misc_feature (229)..(229): n is a, c, g, or t
  misc_feature (233)..(233): n is a, c, g, or t
  misc_feature (237)..(237): n is a, c, g, or t
  misc_feature (239)..(239): n is a, c, g, or t
  misc_feature (244)..(244): n is a, c, g, or t
  misc_feature (250)..(250): n is a, c, g, or t
  misc_feature (253)..(253): n is a, c, g, or t
  misc_feature (261)..(262): n is a, c, g, or t
  misc_feature (266)..(266): n is a, c, g, or t
  misc_feature (275)..(275): n is a, c, g, or t
  misc_feature (278)..(280): n is a, c, g, or t
  misc_feature (285)..(286): n is a, c, g, or t
  misc_feature (298)..(298): n is a, c, g, or t
  misc_feature (302)..(302): n is a, c, g, or t
  misc_feature (317)..(317): n is a, c, g, or t
  misc_feature (319)..(320): n is a, c, g, or t
  misc_feature (326)..(326): n is a, c, g, or t
  misc_feature (328)..(329): n is a, c, g, or t
  misc_feature (334)..(334): n is a, c, g, or t
  misc_feature (360)..(360): n is a, c, g, or t
  misc_feature (378)..(378): n is a, c, g, or t
  misc_feature (385)..(385): n is a, c, g, or t
  misc_feature (389)..(389): n is a, c, g, or t
  misc_feature (415)..(415): n is a, c, g, or t
  misc_feature (451)..(451): n is a, c, g, or t
  misc_feature (540)..(540): n is a, c, g, or t
  misc_feature (758)..(758): n is a, c, g, or t
  misc_feature (764)..(764): n is a, c, g, or t
  misc_feature (900)..(900): n is a, c, g, or t
tgcttttattgtnaagtcctatagtcgtnggtggtcttgtggttgtntgtnttctgtncccatctaggtnctggctggcngcatgtatcacccctntngcntcattantgttaggngtntgggtncatnctggtnagctgnnccnntgtganctggggcagataaaatgccantttcattgttacctcttttacccctccttnttaggntntcnttnnttnccagantnttantgantnctcantccctnttntggttttnntttnttttttttntannnttttnnttttttggggantttntgttcaagatagggntnntttttntnnttatntcgaatttgaagagattgctgacgcncgagagcttcgctttttnatccttntttncttgttcagcaggctagacagtaaanatgttttgactgttagttgtccacaaatcttcagtnttttctccacttcatttttaagaaaggaagcaacagatagatgttgctctttcacctgggtgtttgggctcaagctttcccgcccagcntcacttcctttgcccttcctcctgcctttctcaactgtcccaaggagggggcctcattgtgtctcccgtgcatgctctgcagcattgaagtatggtgtgttcacgtagttctagcagtccccagctgagtgagtgggagagtacctgtgtgtttcgtaacggccttgatccccttgatagatgtttggatattttttggtgtgccctgtgtgtgtgtntttttncaaatacatgtgtatattccttttaaagaagctttatcgaacgtggtctgattttgaggtttagcaatagctagctatatatggtaggtgccgctacagtttttatttagcatggggattgcagagtgaccagcanactgga

SEQ ID NO: 521531 - DNA, 279 bp, Homo sapiens
cgactctagaggcacccggatcattcagttcattcattcacttgcacttataccaaagggttattgaacatttaaggttaaccatgaactatgctaggggccgaagcatacaaagatgactacgaaaagtcatacctcttgagtgaggaaagaaagaagtgtagataatgacagggcagaaagaattatacccgaggtagtccagggtgcatgaaaatacaggagcaacaaactgcctcattgtagatctgtttgttatttaagaggacactaatgatt

SEQ ID NO: 521532 - DNA, 357 bp, Homo sapiens
  misc_feature (108)..(108): n is a, c, g, or t
  misc_feature (161)..(162): n is a, c, g, or t
  misc_feature (215)..(215): n is a, c, g, or t
  misc_feature (225)..(225): n is a, c, g, or t
  misc_feature (237)..(238): n is a, c, g, or t
  misc_feature (281)..(281): n is a, c, g, or t
taatagcacagctggatctcatagctgcctctgcattcaagtgtgcagtgatgttgtctagttaacagcatgggggacggggtgggggtggatgtggtctcacacagnatacacatggaaggtagcgagttctatttttaaataaatttaaatgtctttannataaacttatgtttataaaactaacgttctgaaactaattttcagacttacangaagtttcanaattattcttcnnaccctgctcccctaatatgttaacatttataaacacagtacanattattggaaacacaggaaacaagtagtgtttattaacatactctacagatcttattcacatgtcaccagatttcg

SEQ ID NO: 521533 - DNA, 129 bp, Homo sapiens
gcaaaaaggcagttgtgagcaaaccagaaacagagccctccccagaccccaaatgggttttgccagccccttttttttggacttcccagcctccagaactgtgaaaaataaatattgttttttaagcca

SEQ ID NO: 521534 - DNA, 84 bp, Homo sapiens
atgccatggtcatggatgaaaaggtcaagacaagctttgtgctggacacgggtgctgccatctgcaactacaatgcccactaca

SEQ ID NO: 521535 - DNA, 265 bp, Homo sapiens
gacttgaggaccccgggagtagtagagagggaagaaactgaagcaatgtactctaaggagaggaagatgaggaagacatgaaccctgcctaacaggaaccgaagtgaaagtaaaatattgacgagggaagactcagaaaatttatgaagcccgtattaaaaggcactgaaattgatgacggagaagttttatatttggtacatttactattgattgaatggtcggtatgatgagtgggttgaaggctgacaggataatctgggct

SEQ ID NO: 521536 - DNA, 399 bp, Homo sapiens
  misc_feature (188)..(188): n is a, c, g, or t
tcgtaggtgttagaggtgtctgagctctgttggcaggggtggtggtggtggtggagtaggaataggtgttggctttggtgtaggtctatgtgaggcttagaagtaggcctgttggtaatgataggaggaacatatggtgtcttcggaggccaccaagtacttccaacatcaggaatccaattattatntcctgtgtcaccctttaaaatggtaccatttccctttggtacatgaattgtacctgaaggttcaatcataacttttgggatatacacacaagtcagtccatcaccctggtatccttctttacatttgcacttgtttggcccgatacattcaccacgtttgcatcgtggttggcacacaggctgacactgtccccaagactggcgagcccag

SEQ ID NO: 521537 - DNA, 169 bp, Homo sapiens
tccgctctccatcttatatgtattctaaccaggaggggagtgatagcacatgggtagcctaggcagtgagtaaatacctcagatgtcctcctgcagcaagtgtgtatatgtgtggttatttctatcttacatgtctcgaatgttatattcaataaacctctacctcttc

SEQ ID NO: 521538 - DNA, 999 bp, Homo sapiens
gagaactagttcgagtatttttttgttttttataagataattagtataaaaggggaaataggtaggagtaccgtggtaagggcgatgattgtggggaggaatggggtgggttggtatgtccaaactgtcatttattttacgtggttaaatatggggagtatgtgatgaggtggagtagatcaggcgtaggtagaagtagaggtaaggagggcgatgggggctatgatggtggggatgatgaggctatggttttggtgaatccttcgataatggcccatttgggcaaaaagccggaaagcgggggcaggcctccatagggacgaggaggccggatgcaatcacgggctgtcagcatgtcagctagtccaggtcgcgagataacacgtcgggccgcgagggcgggagtaaaaaagtgcgagtagacaggaacggcgcgacgaacgacaggccaatcacactcacaccagctacaacacccacaaaggccactgtcaagggacgcaccaggcacaaccgccatcacaccaatccctatgcgggcaagacacagagcaacatacacagcacaaacactaagcgaagacggcataccgcacaaacacaccccaacaccgcccgcaccacacacacaccacacccaccactgacacaaccacgcaccgcacccaaacgaaaaatcggcacacaataaccaaccgcacggtcacaccacgcatcgagacgagcaagcatcgggtaacataactagagaccctagaaccccggacgaccagaaggaaacaggagaacacaacgcaggccacaaacgccaaccacaaccaagcacccacatacaagagacaaaaaccaacctaaaccaacgacgaagaacacaactctttctatacttagaagtcgacctacccaaaaacgaagcccgaacaaagcagacacgacatcaacaccactagaaccaagtcagtacgaacaggacacgaaagacgtccacgcccccccccc

SEQ ID NO: 521539 - DNA, 562 bp, Homo sapiens
agttccttcctacccccttttatagcctcccgctccaataataacgggatatcacgcagcgtgtggcagtatcgacgttatatcgatcatgatcagagggcaattgcatatccaagctcgactacaggcgccttgaaccgaataatgctccactgttcaagggcgtagttgagccattgatccctctcctcatgctaggtcctatggtgtgatcttccacatcgttcagcttgctgcggtctaacggaatggactcttactctaccaagcatatggacgggcaatcattcagctccggtcatcgtcgcttttgaatccacggctcagccaagcctgggacgcggagagagacctctttttctatggctttgggtctaggaaagtttctgggcttttcgaggaaagtcgtcgtttggacacatgccatttgttgttttttccggagaaagggtcagacagagactgtatacagagcaggcgatttccattctcccgtatgtccgatgccacggatggtatgcatattttccgggccagcctcacccataggatttttattctc

SEQ ID NO: 521540 - DNA, 701 bp, Homo sapiens
ttctagagcaatcgctaggcgcgcgggtcctgtgatgtcagtgaacttggtcatagctgtgtcctaggatgatcttgtttcttgactatgtgctgtggattctcaccatgtacatataggcccggtcggtcaaccagtagcgtactgagactgaatattccgacgaatgcgcaggttgcatgacgtgctctcttactcggtactcttactctacggcgatggtagtccttacagtgcgagtgctctgatcatcaagaaagttaccgtaccacgacccctgcattgaaagtgtgcacatcggacgatcaggcaaggaactgatactgcctaaacaagagtcaattggtctgtgtgggctccaagactgtgcgcctgaggatcgattgagccgcagtgcaagaaaagacgattcagccggcgtcggtggatcccatggatctcatgaaagattcaaagatcttcgcccacgccggaagctgcaagactaatcgagtgttggatcaggtcgggcctccgtccctgggtccatctggtggatgcaccattccaagcacaatgtcggatcaccaaatacaggagtaccgattgaggcacggacccttccatcttgttccaccgcaatatggcatatgttagacacactcccaccctcctatgaaagagcgacgttctcaaggacagaagcaatctacttaatgggg

SEQ ID NO: 521541 - DNA, 379 bp, Homo sapiens
  misc_feature (32)..(32): n is a, c, g, or t
  misc_feature (43)..(43): n is a, c, g, or t
cagtttcctccccttttttagactatataggngtaacttctgngatgttaccctatacgttaccctacaaataccaccatggcatttgtaaaccgtcatggtgctggtgggattgtcttttagcatgctaatgcattataattaacatgtaatgaggagtgaagatgaccacaggtcacttttgtggccatcttggttttggtgggttttagccagcttctttaccgcaacctgtcttatcagctaggtctttatgacctgtatcttgtgctgaactcctatctcatcttatgacttagaatgtctaacgtcctgggaatgcagcccagtaggtctccaccttattttatccagcctgagcgacagagcgagagactca

SEQ ID NO: 521542 - DNA, 492 bp, Homo sapiens
  misc_feature (451)..(451): n is a, c, g, or t
ttgctcgttatcgtctcccataaccaatgggaagagtcctctagggtactcaacatactttctaaggctggtgagactggctggcaggaatgaggactccatggcacacgggatgtgtcacatactcgcctactattccttcaaccaagggtggcacagtcctgctatccttcaccaagatggcaagtatctagatgttcacagcaggctgagctaagcttttggcaacaggagctgggatcttctcctccaggacttttccagagaaggcagtctttaaccctgtgaactctgctgggtctctgtcacgcagcatccatcatcaagatggtcagctacttcctggccgggcgtggtggctcaggcctgtaatcccagcctgaggaggctgaggtgggccggatcacttgaggtcaggagttcgagaccggcctggccagcatggtgaaancccatctctactaaaaataccaaaattagctgggcatggtg

SEQ ID NO: 521543 - DNA, 114 bp, Homo sapiens
gagcgatgggcatctctcgggacaactggcacaagcgccgctaaaaccgttgtcaagagaaagccctaccacaagaagcggaagaatagttggggtcgccagctgtcaacacca

SEQ ID NO: 521544 - DNA, 291 bp, Homo sapiens
tcggcagaaggctcacaggttcacaggtcattccccaaacccaggaaagggaatatgtctttcccatcctcagtgacatgaagcaaagagaatagcccttggaaaaataatttttttttaaacttaaaaaagaaaaggtcactttccttaagggttaaacaaagtaggctatcaggaaaatctagaaggttcttcccctcagccatgaaaacggctcaccattttctgtttctggcaagctttatcccgagccccaccgggggtctctgataagagatactttagaaaata

SEQ ID NO: 521545 - DNA, 674 bp, Homo sapiens
  misc_feature (79)..(79): n is a, c, g, or t
  misc_feature (103)..(103): n is a, c, g, or t
  misc_feature (108)..(109): n is a, c, g, or t
  misc_feature (119)..(119): n is a, c, g, or t
  misc_feature (145)..(145): n is a, c, g, or t
  misc_feature (164)..(164): n is a, c, g, or t
  misc_feature (271)..(271): n is a, c, g, or t
  misc_feature (331)..(331): n is a, c, g, or t
  misc_feature (366)..(366): n is a, c, g, or t
  misc_feature (671)..(671): n is a, c, g, or t
ccagctctgcaccttgattgtggaagctgagcataaaccaactttaaaaaatcagttgtttgtgcttggtttttaaatngggacaggatcggtatagtggctnacgcnngtaatcccancactttgggaagtcaaaatgggtggntcacttgagcccaggagtntgagaccagcctgggcaacacggtgaaaccgcatctctacaaaaagtacaaaacagcaggcaaggtggcgcacacctgtagccccagttactcaagggtcttgaggnggaagatccctcaagcccaagaggtcaaggctgcagtgagtcatgatcacgccatgccanggcactccagcctgggcaagacagtgagaccccgnctcaaaataaagtaaaatataaaataaaaacagcaagtgggaactcagcattcaagttaacttgtagagctacccagctgctaagagcagtgtgatctttggtgctcttaggatcactttggtatctgctcattttcctttttgtctaccctataaagcacaaaatcgagtgggtaaaaagtatgaaaccagcactgtttctactttcttagaggtctggtatctagtgagcaggctgaggcctcaggactagttcagtgttaaggatttcatgttgaaactcatttcctcgtgccaagcttgangta

SEQ ID NO: 521546 - DNA, 225 bp, Homo sapiens
gtcaaagcctggaaaaaaagatcggtcaagatcacacagtttaggctgggaatagtggctcaagcttataatcccagcacttcagaaggccacaggggttcatactgtacaaggttgattgctcatttacaaatttctcaatcaacagaattcaagaaatattaaaattcttacatttaattcaacatgtgccgctattgttctaaaaaccgagaagagacatgc

SEQ ID NO: 521547 - DNA, 269 bp, Homo sapiens
caggaccggagtaagggtgtgccacagattctggtcttgatggcgaatgcaggagcgatgacataccgagtcactaactcgtccatcatgacgagtttatcccgatgtccgagttgcacgcgtcgggatcgaatctcgcttcgggggcacacctgggcgggtcgccctggctgttcggcttcgccgaccgggtgttctggccgcacctgctcgtcggcgccatggagatcggcgccgggctgatgacccgcaccgtgcccgaggacggg

SEQ ID NO: 521548 - DNA, 725 bp, Homo sapiens
gttaacattacctattgtctagccaagagcgggggtgggaggggaatccacactgaagggagtgccagaatcaaatgcgacatagtgcgaaaccacaaaagaaggcgtttttccagaaaacaagtgtattcacacgccagtctcagagactatttagaccaagttcaagttaggagcttttaggaagtgggagtaaaactttaatgggaggggagggctggctgctggaagaaggaagaagcccagactggttagacaggactcttaactcctagccccagcctagcgtgccctgcccctttggcccctgctgcagacacctgccttacacacacaccttctaggactccaccagttttgccctaaaggaccttccccagtgctccccttccccgtctggcgttttcccttatagaagagagagatacttgtagaattgggtggggggaatgagcatgaacatgtccttcccatttgggatatgttacaatagagtgagagagagataaggagccttttttatggaagaaatgggagaagagagaccgggttctttttcagccagagtctagtagtttctctgtaaggccaaataattttaaaagacttacctgcccacccactccttatattgctgtgagattgcccctattttgtgcttttttgtttgcagtgtgcaccggccttgttttaacccggaattaaggtgattgattgtattgcca

SEQ ID NO: 521549 - DNA, 188 bp, Homo sapiens
atgcatgtgttagatgagaacgatcagtaccctattctttatcagcggatgcccctatctagaagatacctacactactctgggatgtgcatctgaggtagatctgagctctgtgttctgcttccggaatactgtcttaacttgcctgtaatttgcaagaagagttgctaatgaaacgtttagctggt

SEQ ID NO: 521550 - DNA, 427 bp, Homo sapiens
  misc_feature (213)..(213): n is a, c, g, or t
aaaaaaaaagataaattggagaggcccatttcctgatagtccacacccgttgcactaaattaacagtgttaattgaatgcagacaccagggagaagcaacttcctgggcatgtgcattaagagacaaaatggcggagtatgactttccagggttactccaccagaatagggaagaaagtctcagatgggcatgggtacaacttcttaaacacntgcgcatgctcacctccaacgggtgaggggggtaccaggcatgcgggcagcccaccctaagggaagaatcatgagaaaggggccagcctataaagattactgttaaacagagcgcttgacctcagtgcctggttgggtctcttccaagcatactttcctttccttttttatcctgttctaaagccttttaaataaacttccactcctgctctga

SEQ ID NO: 521551 - DNA, 120 bp, Homo sapiens
  misc_feature (20)..(20): n is a, c, g, or t
ctccgttatggacgggttcnttctacctacttacggaccttttctgcttcgacacgcgacacggcttctcaacactcactgacaacacttacttacactacttacctggcgtgttacgac

SEQ ID NO: 521552 - DNA, 187 bp, Homo sapiens
  misc_feature (48)..(48): n is a, c, g, or t
  misc_feature (89)..(89): n is a, c, g, or t
  misc_feature (139)..(139): n is a, c, g, or t
  misc_feature (147)..(147): n is a, c, g, or t
  misc_feature (182)..(182): n is a, c, g, or t
cgtggactggagcaaaggaaagggaaacaaggcccaaccccaaacagnaaaacaaccccatgagggaggacagtggagcatcaggttanaaccatagaaaaatacgagttatttctatcaggttaaccattagggtagntacagtangactctgtacagaaaagcgttttcttgtcgccccncacca

SEQ ID NO: 521553 - DNA, 305 bp, Homo sapiens
tgcttatccccgactctggcaagctggaggaaggcacctacagctgcctggccaccaatgagctgggcagtgctgagagctcagtggacgtggcactggccacgccctgtgagggtggggaggacacactggggcgcacgttccatggcaaagcgtgtgagggaaaaggctgctatgcagttgacaactacgtgcaagcatcaaggccggaggacaatggggacatcatatacctccacccctctgggaaccctgaggctgctgtcgcagaatgggtccctgggcaagtgtccccaggcctgctc

SEQ ID NO: 521554 - DNA, 706 bp, Homo sapiens
  misc_feature (637)..(637): n is a, c, g, or t
tcccctgccctcacacatgcatagcctcccaccactatcagtatcccacaccagagtggtacatttgttacaatcaataaacctccattgacacatcattatcacccaaagtccatagtttacatgaagattcactctggtgttgtacattgtatgggcttagacaaatgtatgatgatatctacaattatagaatcatacagaatagtttcactgccctaaaacttctctatgcttcacctgttcatccctttcttccctaatcccctggcaaccactttaaaaaaaaaattaggttcagggggtacatgtgcaggtaaactcgtgacaagggggtttgttatacagattatttagtgacccaggtactaagcctagtacccaatagttacttttctggtcctgtcccttttcccaccctccaccctcaggtaggccccagtatgttattcctttgtgtccatgttatttcactcccacttgtgagaacatggaatatttggtttcctgttcctatgttagtttgttaaggataatggcctccagccccatccatgttcctgcaaaggacatgatctttctctggcaaccactttttactgtcgccatagttcttccttttctagaatgtcatatnggaatcatatagtatgtagccttttcagactggttctttcacttaataatatgcattaagttctcatgt

SEQ ID NO: 521555 - DNA, 225 bp, Homo sapiens
tacgatctcctcttctacccatttctgtcatctcttagctgagtttcctcttctaaggcagaggctggagcagttctttatcagttctcatcctctccatcccaatccggtatatcaatcaactctaactcgaatacgtctagctggcaatgtttctaaaactttcactgggatttctttagaactttgaagcaaacacatgtctaactcggtggatcctctaga

SEQ ID NO: 521556 - DNA, 350 bp, Homo sapiens
tgcttcccttcaagaggtagagtctagccaggtgcagtggctcacacctataatcccagcactttgggaggccgaggcaggaggatcattccagcccaggaattcaagaccagcctggacaacatagggagacccatctctacaaaataaaaaaattagcccagcgtggtggcacatccctgtagtgccagctacttggggggctgaggtgggaggatcactctagcccgaggttgaggctacaatgagtagtgatcgcaccagtgcactccagcctgggctacagagtgagacccagtctcaaaaaagaaaaaaaaaggggatcaggaatggcggctcacatctgtaat

SEQ ID NO: 521557 - DNA, 918 bp, Homo sapiens
  misc_feature (307)..(307): n is a, c, g, or t
ttaaggggcccctcgcacactgggcccgcacagttcagcccatatccggaccaagggtggaacgagtccaaacaatgggggaaaaatcggtcagaaccaacaggttccggggaattttttcaccatggggggcaccaatcctggtaacaacagagaggcgtcgcaggacccacgttgttgccgaggaatacgtgcgccccgccggccaggaactggtgggggaccaacaccccgccgtgctgcggacaccctcgtggaaaccagggccagtccccccacaacctccggggtgatcaattccagaganccccggtgtacgccacagaacggccgcgtgggcataaaacccggggccctccgcccctccgagaataaccccgcgtagttccccccccaggtccccggagaaccaaaaccgccgcgaccttcaggcgacagaaatatcttcccgcgctgacaaaccctgtcctcgccgccgcgagatacacacagcggctccccacgcgagaagatttccgccgagaggccacacccacgctcttgtcgcccggcacccccgcctcgcggggataaccccacgtcaagacacgccccagcgagggcaccacacaatgctgttcccaccttgctgaaagggacttcccccaagcaccagatacgttcacctcctccccaccgccaacaagatagtatcttgcggcactacacacccgcctcctggggtgcgccaacacgcgagaacaccacagcgaacaagagtcgtcacccgctttacacagtgccccgcaagtcgacgagagccctgactctcctctggggtgctcacacaacaaacaccctgcgtgactgtcgaccccccccaggagtcccccgacgcgccggggcccccccaaactctgtaaccccccccacaaaaca

SEQ ID NO: 521558 - DNA, 130 bp, Homo sapiens
cccctcttcccctaggtacactccagctctggcacaaggagagcgaaaggagcagtctaacacgctagtcacccacagactttgacagcttggaaatccagggccagtacagtgacatacacaacgcgct

SEQ ID NO: 521559 - DNA, 181 bp, Homo sapiens
gattctacttcattattgcactgatgccaagcagcagcattctcccctccggggagaatgctgctgcttggcatcagtgacattcatgttcccactccgttcccatgtcctaggtatggcactcaggcctcccatttaaggaagaaggtcgggaagcatgttgcttatcatggcctaagga

SEQ ID NO: 521560 - DNA, 131 bp, Homo sapiens
cggctccacggcacccagagctgggggccacctcagaagtgtcatctctctctgcaccacgcattcccctgcagcagctcgatgtgcactgcacgcagacttgagtgatgctgggtgcagagcaggcctgg

SEQ ID NO: 521561 - DNA, 494 bp, Homo sapiens
aagccgaggataaagcacttttggctaaatatacggcacaccacaatgcggaggaacaagttgagtctctagttgagaagaagcagctgctgcaaatgttcaaggaacaggttgaaatggagagagaaagatacttcagtacagtgcaggagacggaacgtatgacaatggagagacttcagatgggattttcctcagtttttgagtcactagtagattttgctagagcttctactaaagtttatgctgatcttgttacattctctcagaatgcaaaggtttaagaagggaagatgtgctgataagttcacttagattacattcggttgtaagtatccaagatactccaggtatagatgtcgtttgtgtgctttcttgagataattttgaagatagatggataactaggattgctgggatttatgtttaatgtaagactgtaagtatttcttccgaggaaaataagcaaagtaaataacagaacttggttaaac

SEQ ID NO: 521562 - DNA, 192 bp, Homo sapiens
cagtgggtgctaatggatgagcatatggtaaatgaggctggattatacatcgacgcgcacttgtccaagtactctgcatagaaaagattcatagaacttacataactcagggcaaagcacgtagagaatgtacatgtacacctgtcaggtacgtgtcagaatgtacattacgagaatgtaaggttagagata

SEQ ID NO: 521563 - DNA, 996 bp, Homo sapiens
gaggtggcttgagcgctccctcctgtgctggctttggcaatagaagggctgattcgatcggcttgagtgacgttggccgatcattacatccttgctcgcttccgatactgcatcagtcacatcctgtgtatcatacaaggcgacaatggagggagtagagtgaaagtagctacacgctgtaaaggcagtaaaggggagcgataacacacaatcggtgggaaacttgtggaagggccccgaccactgagtgacaaggatgacgaaccgttcgcgacgggacgataacaagctgaaacacgcgaggacgcaaggccgtattgggtaggcagacaaccagtcacgtcaagagggcaccaataatcaccgtgggctagctcaagatgagaactgtggcgaatgtattgggggtcccacgatgaatgctgcatgtgtctagacccagccaatggatccgggggcagtctgtccaggtacctaggtgggccagaagaggagaaaagggctgcgggaccgggggccagtggatcacgttctaggggagccagtttcgcccccctagtcgacaccctctgggcgaggctcgctatccaactaggtcggcatgctccaagcggaggaggagcaggatagctagttggctcctggggcatccgtggatccaggccccctccctctccagcaggcccgatgggaggctggagtggggcagaggagaacttgctgcctcgtgagtgccctttcctaccacccggtcccgcactttatttggcgaaaaaccagtgcaccccttcctgggcacacgctgctctgccgccaggcttgggcagaatttcccatatgccaggggccgtttgggttgcctgttctggcaagcgcatttgggggcaccagaaggctgtgggttcgggggggacgacgcgagggtactggggtgggcccacaaaatgggtctttcgcgccactggctggtctttacttgggggcgcctgaattggg

SEQ ID NO: 521564 - DNA, 631 bp, Homo sapiens
cccggggcagcacctctggctttcccaccgcctccgtctcaggctgccccggacatgagcaagcccccgacagctcagccagacttcccctatggtcagtatgcaggttacgggcaggacttgagtggcttcggacagggcttctcagaccccagccagcagcctccttcctacgggggtccctccgtgccaggtcggggggcccccccgccggcggcagcggctttggacgagggcagatacccgacaaacgtgcaggtccacccctaccgacgctaccgcggcgccggagttgccggccagacccaggatccaaactgtgaactcgtgacaatcacaaacttggcggcaagtggcgactcaaccttgggggggggggcggggggagggcgcgaggctttggacggctgtggtgtcgtctggactgaggttttaaatattcttctctaacccatcagcacataaaaaaagtcctggttcaacaacggtttacacaacatgtcttcagcttaattcaaacttcaggttcttttctccctttttggaaatatttcctgagcctttgttacggcatatggtaactttatgttacgcaccatatcttacaaatgtgaatttacgaacttctaga

SEQ ID NO: 521565 - DNA, 250 bp, Homo sapiens
tccctttgtctcagagaagcaggagatgtgatgaggctgtatttttttttctttttcttgtctttgagacaagagtctcgctctgtcacccgggctggagtgtgacgtggcatgatctcagctcactgcaacctctgcctcctgggttcaagcgattatcctgcctcagcctcctgagtagctgggattacaggcatgcgccactatgcccagataatttttttgtatttttagtagacaaagggaaaca

SEQ ID NO: 521566 - DNA, 350 bp, Homo sapiens
tacctcaaggtagcagtcagagtcacggctctagctggaaatcaaagtggcgagtattctgtaattttgtttttgtttttttgtgaaataaatttacgttcttgtggcccaggtatggagtgcattggccccatctcggctcattgcaacctctgcctcctggttccaagcgattctcttgcttaatcctcccaagtatgctgggatttacaggggcctaccaccacgcctcgagtctaatttgggtaattatgagtataagaccaatttgcaccatattgtgcaggctggtctcaaattcttagcctcagtttatccacccgacctgcaggcctcccataatgctggag

SEQ ID NO: 521567 - DNA, 2380 bp, Homo sapiens
ggcacgagggctttctgcattgagttggtttcaatttgccttgtccttttccgctctgggagtggaggtcaagaggcccagccccctgcagctgatggagctgtgtcaccaggctcttgcttcgtggctgagtagccccatgctgttcaggttcacatcccagaaggtattcagccggagcctcagacagagttcagccctggcctggccgccagccgccaggaggagggaggtcttgggtttagatgaggtgcaaaactggctcccgggaaggagggctgagcatcgagaaacccagaaagctgcctcacagatgcagacatgacagtggctttgtggtctcgaaaacctggagtagacagcccctgtcttgtcattgttttcttgttagtccagggccgcttccagcttggagatacacagctccgagcccaccagagacaccacaaaacagaacttttctgccctctggtgttaaaagaaggaagagattttgctgggaagaggtacctgttttccttctcctggtactaggaagttggtgggtgcagatctttctcttcaggggcccagcagtgacttcattgaggaagatctggcctaggctggatcctcagccgcctgcaacaaacattcctgccagcaggtggcagcaggcctccaggccgcaatgcccagcctatctgctgaccacaaccttgccacacctcttggcatggggtgtgtgcttttggggatggggagggtagaaatgaatcagacatgggctctgcctgtggggaaattagagcacaggcagagagacagattcccaggctataaagcagaataaaatcgactgtctgaaatgtaggaggcagcatggtgtaagagaaaaagcaagggcagcggcattcacacagacctgtcctgaccctgatgccaccccttaccagccgggtaacccttggcacgttgaataacgtaacatgaacaattataatacctaacaatcgctaacattgatgtgatgtttcctgtggccaggcacagagccaggtgctttacatgtaactcatttaatccccaacaacccttgaagtaggtacagttatatccccattttgcagatcaggaaatgaaggcacaaagaaatcaaagttcttcctaaaggtcatgcagctggtggtggggagagctggatttgaacccaggcagggcagctgctcaccttcatgatgatgcatctgcatccatgtggctggcacagtgcctggagccagaataagacctcttatcatgagcagctgtcaggactaataattcatgccaattagggatgacataagctggcccccgagtgctgtgtgttcagtgtcactaattctccatcttcctggcagatttgggcatgtgagtgtggcacacctcctgttggatcacggggctgatgtcaatgcccagaaccggctgggggccagtgtgctcactgtggcttctcggggcggccacctgggtgtggtgaagctgctcctggaagccggtgcctttgtggaccatcaccacccttcaggcgagcaactggggttgggcggcagcagggatgagcccttggacatcacagccctgatggctgccatccagcacgggcacgaggccgtggtgcgtctactgatggagtggggcgcggaccccaaccacgcagcccggaccgtgggctggagcccgctgatgctggccgcactcactgggcggcttggagtggcccagcagctggtggagaagggcgccaaccctgaccacctcagcgtgctggagaagaccgccttcgaggttgcactggactgcaagcacagggaccttgtagactacctggacccgctgaccaccgtcaggcccaaaacaggtcaggctgcatgccccccgtggcttcacagaggaccccaaattgtgtttatgtggcttaagctgaggattgctctactggaaggacacgcagaactcagagtccagccctgcagaccactgagactgaggaagtggtgtgcttaagtatcggggggattgcctgtgacatgcaggttctgggcccactctctgcagagtgatttggtagccctgggcaagagcctggaagcctctataacaaggctgctctccccaagcacatcattctgatgcaggtggttctggggtccttctacaacaaggtttggcaaactttttctgtaaaaggccaaatagactgtatggaccatacagtctctgttaaaactacagtagtcacttctgctagagtgaaagcagccttacatatgtaatgagtaaatgaatgggtgtggctatgcatataatatgtaaatgagtcaggtatggctaggttccaataaattataactac

SEQ ID NO: 521568 - DNA, 1088 bp, Homo sapiens
  misc_feature (378)..(378): n is a, c, g, or t
ggacgcggccggcggggcggacgggagcgggccgcgcgtggcggcggcgatgggcgagggcgggctgcccccggccttccagctgctgctgcgcgcgtgtgaccaggcgacacggagacggcgcggcggctgctggagccgggggcggcggagccagccgagcgcggcgcggagccggaggcgggcgcggagccggcgggggccgaggtggctgggcccggggccgcagcggcgggggcagtcggggctccggtgcccgtggattgctcggacgaggcgggcaacaccgcactgcagttcgccgcggccgggggccacgaaccgctggtgcgcttcctgctgcgccgcggtgcctcggtcaacagccgcaaccactanggctggagcgcgctcatgcaggcggccaggtgaggcggcggtggcccggggtgcccgggaccagagtggtgcccggcgctggcccgagacgcggtccccggcggccggatgccccgggaggtgaagagttaaggactccttagagttggaatgatgaggagaaaaggcgacctgatattttccatgcattgaaaatgggaaacttccagctggtcaaagagattgccgatgaagaccccagccacgtgaacttggtcaatggggacggggcgacgccactgatgctagcagctgttacggggcagctggctctggtgcagctgctggtggagaggcacgcggatgttgacaagcaggacagcgtgcatggctggacggccctcatgcaggcaacctaccatgggtcagtgccagccccacgccctcagcgacaaggccagacagatgctctggcctgagatggaggttcccaatgggctcttctggtcctgagatgctgcatacaaaccccagggactatgacgaccagttggagggcattggtagagactacaaacaaagtgtcggtgaacaggtgctcaatttatattccgcacagctttctggtgcgcaggagttcgcgtgttcccccgaaatcacaggattttccgcaaatggccctttaaaatatccattgctcaaggagagcatttatttgcgcgaggtagatt

SEQ ID NO: 521569 - DNA, 168 bp, Homo sapiens
  misc_feature (94)..(94): n is a, c, g, or t
cgcctttgggcgggatggggagcacacggagagggtgagagaagggaggtgggtcaggctgctcctgagggccggacgagtaggcaggggctantgaagcagctgagcctgggagatgccctggaatcactcaagtgcaaccttgagccacttgcattgctgtgatgt

SEQ ID NO: 521570 - DNA, 1917 bp, Homo sapiens
  misc_feature (1070)..(1070): n is a, c, g, or t
gaagacaaaaaaaaaataaggctgtaagcttccctacaaagcaacaaccccccccccaacccttcgccggttgccttccctcggcccagccagttgtgccggccgttggtaggcgcttgcccttgcgcccgggcccttccaagccaagcctttcttgccgggcccttgccggcgaatggaatggtgccccaagccgggaagcccggggcctaggcttcgggcctcttcagagctccaagcgaagcgcggtagtcgcggtgcgcgctccgccaaaaggagcgtacgcggaggcacatccctcaccccggagagctctcactcatgcgctaggagagtatatctactatagtggctctcactcgtgtgggtgtgtacctcccacgagggtgagctaggagagtcgaggcgactgtttatcacctctcacagcctcgtgatgcgctacctactacctcttcacgcacctcaaagaagccacaatttgcgccaactgagagcccatcacgcgcccacgggggcgacactaagtggtcacaagccgcgaaagaggatcaccccccacaaaaaagcaagagctgctcacaagcggtgataaagtgtgaggacccacatgcagacagacactaatatacccgtcggaacgagtaccgatagttaaacagcccacgcagcactatattagaaccgtggcgcgccccaataaattccccgcatataggattcaatcacagacatgcaggtgaggactaagatccccgaggagaacatacctacaacaccactgtggaaatgagctacggagagaaaaaaacacttactgcgacagaaatattcaatactatcattggaaatgttgcacccaagtggagttacatctttatgtgcgcccatgtttgagtaaataattacccaccactaaagaggcaaccatataatattgagaaacacacgccccacaacacatgttgtgcacaggcgatatgaagaaacaaccgattttgcggcaaacacaaggcggccacaaaacccacagatgcagcaaacgccacagataacgccgggatacatcnataattaccatacaaatagcagtaagtcaacgagtatttcgcgacatcaaatcaagaacaagcggaaatataccccaggcatctaaaagtcgacccggcaaagtaagcaacagtgagaaggtgggaccccaaaagaaagacccccgaggggactaatcggaggaacaccagattagacgacagattacccccagagggaagcccccaaacagtggcctcagtatatgtaaaataatacccaaagacacagtgatcataatgaaaaatcatatagcacacagacaagctatacaagtgggcagaacgaacacacaagtggcagccacaatcataaaagtcaacaaatatggaacaatacaacgacaaaaacgaccgacggtgaaagcagccaccatacacataccacgatgaacacagacactaataagtgctctgattagcaaatcgatggagcacacacactacgtcagtaaaccacactattcgtccaaaaaaacgccgctagttaggtacccccgcaacgtagaattgtgtcatctcagaccattatatagctgtaactaataatacatagatcaaaaatatagcgccgcagaagctaacaaaagagcatcacaccagacacacaagatagagagaccaatagacgaataacaagtatactgcaacacataaaccagcgacagaatatgagattactaaacaaaaagaataaaagacaatgcatacacgataagcaacaacatgacacacaatccgcataatcatatgaataatcagacgattcaacagaataaacacaagactaacaggactagatcaatgaaattaattatacaacaacaaa

SEQ ID NO: 521571 - DNA, 2229 bp, Homo sapiens
  misc_feature (378)..(378): n is a, c, g, or t
  misc_feature (1728)..(1728): n is a, c, g, or t
  misc_feature (1999)..(1999): n is a, c, g, or t
  misc_feature (2066)..(2066): n is a, c, g, or t
  misc_feature (2218)..(2218): n is a, c, g, or t
ggacgcggccggcggggcggacgggagcgggccgcgcgtggcggcggcgatgggcgagggcgggctgcccccggccttccagctgctgctgcgcgcgtgtgaccaggcgacacggagacggcgcggcggctgctggagccgggggcggcggagccagccgagcgcggcgcggagccggaggcgggcgcggagccggcgggggccgaggtggctgggcccggggccgcagcggcgggggcagtcggggctccggtgcccgtggattgctcggacgaggcgggcaacaccgcactgcagttcgccgcggccgggggccacgaaccgctggtgcgcttcctgctgcgccgcggtgcctcggtcaacagccgcaaccactanggctggagcgcgctcatgcaggcggccagatttgggcatgtgagtgtggcacacctcctgttggatcacggggctgatgtcaatgcccagaaccggctgggggccagtgtgctcactgtggcttctcggggcggccacctgggtgtggtgaagctgctcctggaagccggtgcctttgtggaccatcaccacccttcaggcgagcaactggggttgggcggcagcagggatgagcccttggacatcacagccctgatggctgccatccagcacgggcacgaggccgtggtgcgtctactgatggagtggggcgcggaccccaaccacgcagcccggaccgtgggctggagcccgctgatgctggccgcactcactgggcggcttggagtggcccagcagctggtggagaagggcgccaaccctgaccacctcagcgtgctggagaagaccgccttcgaggttgcactggactgcaagcacagggaccttgtagactacctggacccgctgaccaccgtcaggcccaaaacagatgaggagaaaaggcgacctgatattttccatgcattgaaaatgggaaacttccagctggtcaaagagattgccgatgaagaccccagccacgtgaacttggtcaatggggacggggcgacgccactgatgctagcagctgttacggggcagctggctctggtgcagctgctggtggagaggcacgcggatgttgacaagcaggacagcgtgcatggctggacggccctcatgcaggcaacctaccatgggaataaggaaattgtgaaatatctgctaaaccaaggggccgatgtcactcttcgtgcaaaaaatggatacacggcctttgacctggtgatgctgctgaatgatcccgacacggaacttgttcgactgctggcatctgtctgcatgcaggtgaataaagacaaaggccggccgagccaccagcctcccctgccccactcgaaggtccgacagccctggagcatcccagtgctgcccgatgacaagggtggactgaagtcctggtggaaccgaatgtccaatcggttccgaaagctcaaactgatgcagacgctgccccgtgggctgtccagcaaccagcctttgcctttctctgacgagcctgagccagctctggactccacaatgagggctgccccccaggacaagacaagccgctctgcactccctgatgcggcccctgtgaccaaagacaatggtcctgggagcacaagaggagaaaaggaagacacgttattgacaaccatgcttcgaaacggagctcccctcaccagactcccgagtgacaagctgaaagcagtcatccccccnattcctacccccttccagttttgagctgtggagctctgatcggtcccggacgcgtcacaacgggaaggcagaccccatgaagactgcgctgcccagagagccagcaggggcaccccgtgggcggcgggggcacagacactacacccgtcaggcctgttaaatttccaagcctccccagaagccagcctcttctgccaattctggaaacttcaaccactcgcctcattcatcgggcggctccagtgggataggtgtgagccggcacggtggnggagctgcttaaccgctcaggtggcagcatagacaatgtcttgtcccaaatcgctgcccagaggaanaaagcagccggattattggagcagaaacccagccatcggtcaagccctgtggggccagcaccggggtccagcccgtctgagcttccagcctcccctgcaggtggcagcgctcctgttggcaagcagaaattggagaccagcaaaagcctccntctggaacttc

SEQ ID NO: 521572 - DNA, 724 bp, Homo sapiens
cctacagccgcccgggaaaagatggccgcgcctgcagcgtccggactgtctcgacaggttcggagcttcagtacatctgtggtcaggccctttgccaagcttgtaaggccccctgttcaggtctacggcatcgaaggccgctatgcaaccgccctgtactctgctgcatctaaggagaagaagctggaccaggtggagaaggagctgctgcgcgtagggaactcctgaaggaccccaaagtgtctctggctgttctgaatccctacatcaagcgcaccgtcaaagtgaaaagcctaaatgacatcaccgaaaagggaaaagttctccccgctgacggccaacctcatgaatttacttgctgaaaatggtcgcctaggcaacacccagggtatcatctctgccttttccaccatcatgagtgtccaccgcggagaagtgccgtgcacagtgaccacagcatctcctctagatgacgctgttctctctgagttaaagacggtgctgaagagcttcctgagtccaaaccaaatactgaaactggagatcaagactgacccgtcaatcatgggcgggatgattgtccgaattggggaaaagtacgttgatatgtctgcaaagagcaagattcagaagctcagcaaggccatgcgggagatgctctgagagactgtcacctgtgtgagctcttgtccttggagcaacaataaaatgcttcctgaaaaaa

SEQ ID NO: 521573 - DNA, 275 bp, Homo sapiens
cagccatagtagccccataagcatcagccctgtagagtgaggagccatctcaagagggcccaattcctgtccatgtagcaatcactgtcctgggcttatggtgctatgcctgaatccctggactccagaaatgggcatgcagatcaactgttgccttcaagatccagataaacccggtcatgggttaaaactttattattattaaaattgttaaacgtcctgttcctgtaaatctccaaattttgtcccttgttttaaggtaatatatagccatt

SEQ ID NO: 521574 - DNA, 1489 bp, Homo sapiens
  misc_feature (378)..(378): n is a, c, g, or t
ggacgcggccggcggggcggacgggagcgggccgcgcgtggcggcggcgatgggcgagggcgggctgcccccggccttccagctgctgctgcgcgcgtgtgaccaggcgacacggagacggcgcggcggctgctggagccgggggcggcggagccagccgagcgcggcgcggagccggaggcgggcgcggagccggcgggggccgaggtggctgggcccggggccgcagcggcgggggcagtcggggctccggtgcccgtggattgctcggacgaggcgggcaacaccgcactgcagttcgccgcggccgggggccacgaaccgctggtgcgcttcctgctgcgccgcggtgcctcggtcaacagccgcaaccactanggctggagcgcgctcatgcaggcggccagatttgggcatgtgagtgtggcacacctcctgttggatcacggggctgatgtcaatgcccagaaccggctgggggccagtgtgctcactgtggcttctcggggcggccacctgggtgtggtgaagctgctcctggaagccggtgcctttgtggaccatcaccacccttcaggcgagcaactggggttgggcggcagcagggatgagcccttggacatcacagccctgatggctgccatccagcacgggcacgaggccgtggtgcgtctactgatggagtggggcgcggaccccaaccacgcagcccggaccgtgggctggagcccgctgatgctggccgcactcactgggcggcttggagtggcccagcagctggtggagaagggcgccaaccctgaccacctcagcgtgctggagaagaccgccttcgaggttgcactggactgcaagcacagggaccttgtagactacctggacccgctgaccaccgtcaggcccaaaacaggtcaggctgcatgccccccgtggcttcacagaggaccccaaattgtgtttatgtggcttaagctgaggattgctctactggaaggacacgcagaactcagagtccagccctgcagaccactgagactgaggaagtggtgtgcttaagtatcggggggattgcctgtgacatgcaggttctgggcccactctctgcagagtgatttggtagccctgggcaagagcctggaagcctctataacaaggctgctctccccaagcacatcattctgatgcaggtggttctggggtccttctacaacaaggtttggcaaactttttctgtaaaaggccaaatagactgtatggaccatacagtctctgttaaaactacagtagtcacttctgctagagtgaaagcagccttacatatgtaatgagtaaatgaatgggtgtggctatgcatataatatgtaaatgagtcaggtatggctaggttccaataaattataactacaaagacaagcagtgggatatatttgagccatgggctatagtttgccagcccttgttctacaatagtgtgcctgacctcatctgt

SEQ ID NO: 521575 - DNA, 768 bp, Homo sapiens
ttaactaagcacagtggcccttaacgtatagtatagcaattgtaccctaggaaacctatatcaaaacaataaaaagtcttactccaaacagaaaaaatggtacacacttaaacaaaagcaaaactaaattgtaagatctagtactagtaaagctacttgctatagcctatatattcagttagttcaacaatctcactcatgacagaaaaagtcagcaaataagacttgggacaaaataaatatttctatcagtctccacatggaaaagaccacagctttaatgaataatacaatccttaagattaatcctatggtcagtatagattaccgaatcaaaatctaagtcatgaactgtttacaaatagctatactacactaagatgctaaacataacaacattaaccaagtatgtcttcctaagaggggaaaaaaataagtggaaaataaacaatctatgagcctaatgagggaattatggacaaagcctaactaaaactacaacagtcgtacctactagcagaaaactaaaacaaataataaaagtacaaaaggataataaaaccaggaaaaaaccaaaactgatcctcaataaaagtactgtatccaaaaatctaattaaaacaagtaacatcatgtacaagaattccagaattagatcacggaaggaacagatgcaaatactatctatatccagctggaaactaatattacatcattctagtacctcaaaattcctgggtccaaaataaatggaatagcgtggctgcc

SEQ ID NO: 521576 - DNA, 137 bp, Homo sapiens
tgtagactctagagatcccgcctcgtctgtatagcaaacgcactccgagcagtatatgctaagacttcgccagtcaaagcgaactacgtatactcgattgatccaagtacttgaccaacgggataccgagctctaat

SEQ ID NO: 521577 - DNA, 617 bp, Homo sapiens
caggggcaacagccatattgtcttaccttccaaaacccctgggggttgggtattcaggggtctataaaacacagtcccgcaaaaaggtcccatagaaaaagtgtcccccacctattcattaagtgaagaagtaacaacaacacagtctcatctcgatagctcttgaacaaccctatattcgctatagcagtggggtactctccaccacgagatgaccaacccagcaatctagaagtcactgttcatggtacttccgttacataaaaatacatatgtcttattttcaaaagtgttattcgcatgcgtctcctcgtagaatagcacaggctagatgttccaacagatcatgtctgtattatatcacccaccgtctagcttcatacgtttccagtcaatcctgtagacggctaccaatacataagtaccgccgtatccacgacttacgtttctgtaattgaggtttccgttacctgtggtcaactgtggtcggataatgttaaatagaggcttgcaagaataaagcacagttttgaggcacggcacagtggcccccgtcagtaccacaggcattgtggaaggtaaatatgtgcagacccctcacggtcaaggttcaacac

SEQ ID NO: 521578 - DNA, 172 bp, Homo sapiens
ccccttatggaatcaagttatcttaaagcaaaagcagaaacacagcttctgtagaatacagaactttaatgtacttgaaataattttctcacatgttaataacataatttttctcctaataacaactagctacttctcactccaacatctaccacaattcctcaaattggtg

SEQ ID NO: 521579 - DNA, 185 bp, Homo sapiens
tctagcaggatcccttgcaggaagagagaactgtgcaggatctgagattttaccacatatataatgcaagctaacgacctagcctgttactgtttcatggatgctggcagaagacatgagactcctgggtcagagaaaaggggctttattaaggtcggtttccattttcatttagttctctatcc

SEQ ID NO: 521580 - DNA, 140 bp, Homo sapiens
aggttctgaggcttacagtgctcctcgatccagtactcagcctgccaagctgtgttctacacctttgtttttagacacaagcagcttttgagcggaaacctgaaagaaggtttgcagtatcttcagagtctgaattttga

SEQ ID NO: 521581 - DNA, 544 bp, Homo sapiens
tacattccacaggttgtcacagcaaactgagggacaaggtacacaggttaataaccaatggcactggcattgagttctatttggctaaaaataacaacatcctcgtgggtaaaataaaaatacattttacgatacaggtttcattaaacagaatggtcttcttttggtaagtggaaaatgtctacctgtatcaagtacctgtatgatttaagttcccttttattaccaataagactgaagtttaaaggtctacatggtttttttaataaattaaagatgtataaatcactcttccagcaaaccagacatacttaggaggcacagcaaaagacccaaggtgaggggcttccctcaccttcaccctggtcctcacgtggaggtggcgcatgtctatgagacacagtaccccactcagagatcctctgcagtccagcaaattctagcactggctgggaacacaaatcatgtggtaagaaatgtttttattcctttagctgtgtcaactgggatggtgctgggggccattcagctcatttccctgatg

SEQ ID NO: 521582 - DNA, 190 bp, Homo sapiens
tttttttttttcactctattcctgacctgcagggtttctgttgaaaaatctaatgatagccataatggagttctctcgtatgaagtttgcttcttttctcttgctgctttcaggatcctctctttgtcttaacgcttctgagagttttactaagtctaattgtagcattgtttcagctgaacataactgg

SEQ ID NO: 521583 - DNA, 125 bp, Homo sapiens
gcataactcgggaggtgcttgagatatcatccgctgagggtggaaggtgagtgagcagacactcggaaggtgtcttgcagattatcatccgctgagggtggaaagcggccccccgcaggacgctc

SEQ ID NO: 521584 - DNA, 280 bp, Homo sapiens
taattctgaagggttaatgtaaccatttttaaaaaagaaagagggggaaacaaagaaggaaaatcccaagaaggaaggctgacaaccctcttgcataccccgaagcccaaagagaaagatgtggctggcttgtgagaagacatgaggagttgggaaaaggaatgccacatttccctgaaccaagacaaatctgtatgcgactcagggctgccttatagagccagctacaggactttgccaccagcttgcagttctgctgaaacctaatccattcccaggc

SEQ ID NO: 521585 - DNA, 223 bp, Homo sapiens
atgaaataacactcatgacattaatgaataaatgagacttgcgttcagatgggggggcaggaaagctagacctgggagtcagaccccggtcatctttaattctctgcactttcccttataccgtgctgactttcacgtccaacatcttacattgcaaagcaggggcaccgttcttcacaaacaggtggggcattgcacctgcaggttgggcaaaagcacaggt

SEQ ID NO: 521586 - DNA, 147 bp, Homo sapiens
cccgactagccctgacagccaactagcccgacagccccgactagcccgacagcgacggcaccagtttcagacaatggaaattactcatgatgtcaaagctgtctgctcccaggaggcgatgacggggccctgtcgggctagtcgggg

SEQ ID NO: 521587 - DNA, 603 bp, Homo sapiens
  misc_feature (18)..(18): n is a, c, g, or t
  misc_feature (54)..(54): n is a, c, g, or t
  misc_feature (64)..(64): n is a, c, g, or t
  misc_feature (109)..(109): n is a, c, g, or t
  misc_feature (121)..(121): n is a, c, g, or t
  misc_feature (134)..(134): n is a, c, g, or t
ctataccccagggaattnaatggtgccaatcttaagctaatggaaacttgggcntccccaggtnaaagtaatcttctgccttaagcctccttaagtagctgggacccanaggtgcaaaccnacctagccgggcntaattttaaaatttttaagtagaagatgagggtttcacccatgttggccccagctggtctaaaactcctgaccttaagcgatctgcccacctcggcctccccaaagtgttgggattacaggcatgagcccactgcgccccagcccatggactcttgaagctctactagaagctcctactagaagagttcaggaaagggctggagggcaccctccacattttaacagaacacacggagggagaaatgcatgtgaagtgaaaaaaggagaccacctaggaattcgaggagtcccctacccttgggaaggcgcatggtgatgggtggaaggtgaggtgtgaccagataggcttggggccagtttgctgtgcatttgtggtacaagtgcatacatcaacagattgatattttgctttccctgaattatcttaccttactatcctgtctaaagtagcactctcccaagttcctt

SEQ ID NO: 521588 - DNA, 200 bp, Homo sapiens
tcctttaaaattgaaggtccttaccccgggtttgttttttggaaaaaaccccttttttaaaaaggttttttgggtctagaaaaatttccaaccattaaaataaaaaaaaatttttaccgggttttttttaaagaaaaaaaacccccccttggggttaacccagcccccgcccctttaaataaagttttcctgttccctta

SEQ ID NO: 521589 - DNA, 227 bp, Homo sapiens
ccgggagaacttgatcttggagtcgtggaattgcttatgagagccggccggctgaacacttgctggggcgtgatctcctccaccttcatgatcagaatggagtgggcatcagaggctgcagtgtgccagtgtaacccattgtctctgagtagcacttgagtgacatctgccttgatgtatggtcaatgtgtccctgataattccctgagtacattgttgttggtttg

SEQ ID NO: 521590 - DNA, 124 bp, Homo sapiens
catagtccatcaccatatacttggcattggaattctactggaaaaaaatacaataagcaaaacaaaaccctcagcactgatacaagaggccatataagtatcttgtgctacttcacttacccat

SEQ ID NO: 521591 - DNA, 425 bp, Homo sapiens
gcatatcatttatcctgactttcctggctgactgctcaccttcatttctttttcttctaggcatcatgatgttatacaaaaaaaaaaaaaaaaaaacatggactgaagtcaaaatacctaaccttttatttcaaatctctgccatggcctaccgacatgaccaccttgggcaggtcatataatcactctgggtctcaatatgttcacctgtaaaatgaggacagtacatcttacatgcttaagctgccttgaggattaaatggcctaatatatgtaaaacaactcgcaagtgcttaatccatagaagacacttggccaacttttctctcctataataaacatatacaactcaagcttattcctgaaaaagatattggtgatgttgcttaaagtatgagatagggcatggatctgtcacctatgta

SEQ ID NO: 521592 - DNA, 169 bp, Homo sapiens
ccacattactgtcctggtgccagaggctaccttcctatcagggctgaccatccatggtccagacacactacatagtgttatctgctcatcagttcatgggtgtaggagtccttctccctttgactgtaaggaatcctgccgctagaaccattcatgcacagatgtcttc

SEQ ID NO: 521593 - DNA, 290 bp, Homo sapiens
  misc_feature (46)..(46): n is a, c, g, or t
  misc_feature (116)..(116): n is a, c, g, or t
  misc_feature (181)..(181): n is a, c, g, or t
  misc_feature (191)..(191): n is a, c, g, or t
  misc_feature (235)..(235): n is a, c, g, or t
  misc_feature (267)..(267): n is a, c, g, or t
  misc_feature (278)..(278): n is a, c, g, or t
atcttggctcactgcaacctctgcctcctgggttcaactgattctnatgcctcagcctcctgagtatctggaattacaggtgcctgccaccatgcctggctgatttttgtattttnagtagagacagggtttcaccatgttgctcaggctggtcttgaactcctggcctcaggtgatccgnccgtctcagnctcccaaagtgctgggattatagatgtaaaccaccatgcccggnctccccgacagtagctatagaaagaaggcttnagtcttaaagntagtttccccta

SEQ ID NO: 521594 - DNA, 806 bp, Homo sapiens
taatagctccaatcgtaccttcagcgcattttgagggaacccgtcaattcggccattatggccgggattgaacaaaatcacaatatacatttgtggctgattaagatttctactatctgatgattctatctaatatatatggagtctggtttcttactgtcaagccttattcatacagaatttttgagagaagaaatacttaggactgttaactgtcgaataaaccttacaggcctagaaagaagcattaattatatgatatattagtaaaagatgcttatagttgttttacaggtagcagtatggtgacctaatacacagaaagtgctgtgccacataatgaggaatcagtagatgtgaatgaatggatgctgacattccttcaagacactgacttgtcttcatagttatcagtgagtgacaatctattgatccttaatatttgccagtggaaaattataaatattgaagaacaaaggaattaaagcatctgaagactttggttgagttctgcagtttagtagcgaacatcttaaagaaccaactattaaagcctgctttgaatctggaacacaatttgtgtttccttatggttaaacagaactttggtcatcccaccattagactttttgacattaaacaatgcacccacagtttcttacttaaagaatcttagaatgtggatttaaaacacctgtgtgtatcatgcctatgaataatacctgttcatgaatatactttccacttaaacaacaatacgttattctgggttttattaaataatctattttattgctgctgtcgcg

SEQ ID NO: 521595 - DNA, 343 bp, Homo sapiens
gttggctcactgcaacctctgcctcccaggttcaagcgattctcctgcctcagcctcccaaggaggtgggattagagaaggccgacactatgcctggctaattttttgtacttttagtagagtcggagtttcaccatgttggccaggctggtctcgaattcctgatgtcaggtgatccacccacctcggcctccaaatttatgggattacaggtgtgatccactgtgccagccatgatatgttcttaataaaggtttatttgattcaaatcaaaatctcagactatattcattttatagaaatgcagaatagagaattgttcattgatgcataggaacacagt

SEQ ID NO: 521596 - DNA, 701 bp, Homo sapiens
  misc_feature (47)..(47): n is a, c, g, or t
  misc_feature (64)..(64): n is a, c, g, or t
  misc_feature (118)..(118): n is a, c, g, or t
  misc_feature (250)..(250): n is a, c, g, or t
  misc_feature (347)..(347): n is a, c, g, or t
ccttgccccccttgggccccaaggtcagccccctgccaccagcccgnctagcagtttaagggcntgaggcttctgggtcctgtggaggggggtggcatgacccggggggtcgtccatnccagtccgcctcagtcgcagagggtccctcggcaagcgccctgttagtgggccattcggaacattggccagaagcccaaagagccaaattgtcacaattgtgggacccacattggcctgagatccaaaacgnttcgaggcaccccaaattacctgcccatttgtcaggacacccccccccccagtgttatattttgcctcgccggagtgggtgttcccgggggcccttnccgaccagccccttgggtccccaggtttgcagctttcccctgggcccctaaccatcctgggccggggtgcctgtttgacccccgggcctagttgtggctctccatcttgtttcccccccgtgtccccaatgttttcagtggggggcccccttttgggtcccctcctttgccatcccctgaagacccccccgccaaacattgaatgtcccctgggcctgccccctcggtcccccttggggcccgggtttgactcaactcagcccctttaacgctaatatttccggcaaaatcccatggttgggttttgtttttaaccttgtaacgcttgcaatcccaataaagccttaaaagtca

SEQ ID NO: 521597 - DNA, 291 bp, Homo sapiens
catgtggggcatcacggccacggagacacctcacacaatacggtccagctggacttcttcaatcaccaccaagaagaccatctcatacagtccttccagcttcacttcttcaatcacgaccaccgagagcccctcacacagtactcccagcttaacttcttggatcaccgccaccaagtccaccacacacaatcctccaagcttcacttctgcaatcaccaccacagggaacacctcacacagtactcccattttcacttcttcaatggccaccacggagagcacatcaca

SEQ ID NO: 521598 - DNA, 735 bp, Homo sapiens
ctgcgtggagctcggtgtatcacggctgaggatatgtagctgttgctcgtaatcaagccatgccgttcgcccatggacacgatgatcaagaccatgagggagagctatgtgttgtctctgcccatgatggactcagaccacatcgatgctttcgtgtcaccgtctgtcatgtgagcccatttgacgattatgtctgtacagattacgaagcctgatttcctgatagcaatgctcaagtgatctagtgcttaccggaactacgatgttcatagggtcttaaagccaaggatttaaaagttatcattgacatctattttagcagactatagcctggtcatgatatatatggacgagatactaagtaccattcgttcaacttagtaatgaatacattagtacacagttatgtgcaagactagtcatagatggtgaaaccacagctgatgaatcactattaggtcactgttatagttaacaacctctttacagtaaggatgacatagtttttcaggaccttgactgaaacattctgaagctggagtgctctgacagccttttaacttccacccgccaactttggtcaatttggtatagaacggtacatgtccacctgctccgcggcatactgaacatgaggccatcctatcataggggcttgccggctatgagcaaccttatttaccaccatgacttaagattggtcatcttcccgtcagttgctaatcctggcccgct

SEQ ID NO: 521599 - DNA, 336 bp, Homo sapiens
ttttggggaacccccctttttttttttgttttcccccccaccaggaaaaaaagaaacatcccttttttccccccccctctccccaagggacccaaaattttgtttttggaaaagtagatcggtgagcaggggaacagggttttttccccccccccaaacagttttttttggggggcctgttcccccctggaaattgccccctttgtgtgtgggggggggggggggggggggggggtatgttcatgaccccttggcggtcgggctttttgggcatgttttaaaaaaggaaaaattttaataaattaccctttttggggcccctgggccttactttta

SEQ ID NO: 521600 - DNA, 1092 bp, Homo sapiens
  misc_feature (1092)..(1092): n is a, c, g, or t
gtctctcattgcttggcgtttgtgtgctggggttaacctgcgaggcttcagtcacatgcgttttgcaaactgtctatcttctcgcttacgcgtggacctcgatctgatcgctcgagacagcagtggcaatggatgtctgcgttgccagcatagcggaacttgcagacggctgcttgcaaggatctctctaggcaaaaatactcattatatgctcgaattagatagaaaacttttaagggaacgagacgcagcagattcctcagctataagttagtggtagtgaaccagaatgacattcccggggacaaccgcatgcttgcgtaataagaagctttagcacgtgtgactaagtgtgcattgtgtgggacatttggaatagaagctgtacgacaattgatatcgctagtcagaagtacccatggcgatgaagcgtatggggcaaagtaaccaagcttactttgatttgcgacttgagacgaagatgttggaaagatagattctagataacacggacacgcagcgcatatgtctcacctactttgtgacgtggccttgagagcaagtaattgcgacaccgacacaagatgaggatacgtatgctgacttcggagaaagtggcagggaatattcaaccgaaaggttcctaagtccaaaatagggaattcacgaattctttttaatctcggggaggtcgcccgcgtacgtttggccgaggagtgccaaaagagggggtcacagcaccagccactggggacacaacacgaggaaagcaaacatggggattgagctcaggaacaaagttcttatcaaaggatgggtaatggttgcgcacccaattgtggggaagatgcaatgtggcctccccccttttaaagacagatagttccttccgtgggataagagcccaactctatccttgtcctttcaattgttgaccaattttttcgtacatagacatttcgtcccccttttgtgggaattacgcctttggcgacagacttgggccttgaacatagttttacatcttgtgacatttgcgcttcgttaaaccaactttaaaggggggttccaccttttcaaagcttggggaan

SEQ ID NO: 521601 - DNA, 641 bp, Homo sapiens
atctgacctaccgtgtttgactgtcgtaagatacccattccagagagggtcccaccccgtgcccagaaggaaggaatcctgcacagagaggccaagaagaatctagacaggccttgctggtttcccctctcagtctattactattagatcatacccttctgtgtccaatcatatttctacacagtccataatctggttgaacctaaacataaaaatggacaattcccctgtatctgtggggtcttcattctgagggctcacatacaattatgatcaaataaatttgttgctttttctcctggataaagaaagaaaataaaaaaaaaaaaaaaaaacagtgtgttggggcgcgccgtgggccccgtgggaagaagagtttttatgacaaccactccgttggggggggcggggggccccgactgggttacaggctgacaccacggggcccaagagcgttgtccccagagaaaaatcccgggccgaaggaaatacggggccggggtttccccccccaaattaaaaaagccgcccggggaaaaccgagcgtgtttctgaccaaatccagagggggtccggggggccatgagggggtccaccaaaggggctccagacgaggcgaataaatgcgccccgcgcgggga

SEQ ID NO: 521602 - DNA, 1699 bp, Homo sapiens
  misc_feature (1097)..(1097): n is a, c, g, or t
  misc_feature (1182)..(1182): n is a, c, g, or t
  misc_feature (1540)..(1540): n is a, c, g, or t
ttctgagcgtgtattctcccctctgttgtgtcgttgcttcgtaccgcctcgtgtggtggttggtgtctgcaacacaccccatgttgtcacatgtacctagctcttgcctctctgttgccacaggctttgccaacgaactggtgggtaatttggctcctgttctcccttgtgtgccaccggtggtgggagccctgtgtggttgtgcctccaaccccgccggctgattggggggagccacgcatagttgggcccacgcgtgtacaacgttgttccccctcgcgggagggttgaaaactctcttgttcggcgagtgttctcccccctactggaaacactttttgtgaggttggaagcagcttctttctccgctcgggggggaacccacatcatgggggcgttcaccgaaagatgtcccaaggaaaattggaggtccttgctccaaaaggaattttgtttctttctctgtggggcgaaaccaggtatggtgcctggtggtgggacgcacgcgccagaagattgtggaccgccccgccccacttggggaaaagccacagacctgtgggcgcgctttcccaaccgggcgttccaagaggtggtatttgttattctccgtgtggagaccgctcttctccgcgcgtcgccgcctaatttagtagtgccgccccccggcgggccgtttatgtagccgcccccccgcgttgttattgttgggggtagttgtgccccccacacacacaccggggcggctccagaccacaatgttgcacaaaatgccacaaggcttttttgcttcttggaagagccgcttgagactgggggaatataaggaagtttttggaatcctcgccgcgcggttttcttctcgcgtaagtaaaaaaagagccctgggaagacagaaagttgggcccccccctgacaaaagatttcttctgtcgagagggttcctctcgggtgggagtacccctccccccaacatatgggtttagagataaaatggggtttccccctgggcacaaagccgcccccaatgggtggtttgtcttgagagagagcgctgttctctccaggagcgctatatcgccacccccctcttgggngggtctcgcgttttggcgctggtgtctcggtgagatatatgagagcacccagcgagccacgtttcgcccggttggggtgttctanctctcaaaacgccccggtgtgacccccacagagaaggcgctgtcgtgtgagagcctgtggcacacagagctctcgcgcccacaggtctctgtccccaggagaaagcgctctacagaaaaggggcgtatatatatgagagatatattatttctccctataatatcctcgccacgccccgacacttcttataatccacgctggtgcgagagagaccggttctcacgagaactcggtttgttctcacacattgcgccactcttataggtttatgtatgtataaaagagactgggttatatgagtataccacaatggcacttcgttaaaccctctcacgaaaggaaaaggaggaaatgtttntgtggacccacctcttggttttctttttatgcgctgtggccacgcttttatacgttatttatcgttttttaaaatcacgtactttttatatggaaacccaccttgagcccaaaatttgtccccagaattttgagaccccctttaaaaagtttaatgaga

SEQ ID NO: 521603 - DNA, 246 bp, Homo sapiens
aaagatggtgtggtgggcgtgatacgtgtaaccccagatttgggagggcaggcggtggatcactgaggtaggattgagacagtagccaaatgtgaaacccattctaaaaatacaaaaattagtggtgtggtggagtgttgtaatccagtagtagggggccaagcaggagaatcggttgaagtccggaaggcagaggtggcagtgagttgagattgagcataatccagccggggggaaagagcaaga

SEQ ID NO: 521604 - DNA, 1970 bp, Homo sapiens
atgtgacatcttcatatggcgcttagcatcacacttttgttgtgtgtttggttatatggaaatgatgctggctgtggtctctggtaggtagtctttcttgttcgttgttccactctaatgggtgtggagatttgatgtatttcctctcgctatcgtggatactcgttttggtcacggtctcccttggttgaattataggctgtgttgattgctctcctgtgtcgcactaaacttcttggcgatatctccctatgcgtgatatattacgaatgtgtgtggctcaaatatatggtttgacttactgcacatgagcctttgtgttttcgaagtctcgctggtgtgcttctacgtgttttatatcactacagccattatataatgttctaacactgcgtagcctcgtgttgtctcctacaatggcgtagtgggcggaatatttcgtctctatgtggtgcggtcccattagttgattgtgtaggtgttagtattatctgtgtctacatcttttatcttactggccacttgagtgacatgtgctacttcatctcgactccgcgccgtttgtcccactttctgcaataatgtggtgggggtgttcttaataattctcaatactatggtgcaaatatactgccttctttgcttgtgtcgcgggcttttcggggatagtacgtgtccgcccatttttggagtaacttgtgtatttcgttattccgtatgtctcactagatctggttcccatatatggcgtattgtcgtcgtgcgtttataacacaactgtatcaatgtgtggtccgtcgtctgtatattgtatagtcgattgtggggaaatgtcttacgcgctaatctgtcctatcgcgtgataactggccaatttgtcgtctctggcagatcatattgcaccacctgtgtgggtcccttatttgtgccatttgtgccctgtcgtaatgcgatttaaacgtttggaacttgctagggcatcccgcactcataccggttatcccgatatctccgcctgtggtccatgctggtattcatatagggcctcctgcttcgtggatgtaatcgtaccctctgtgtcttatatatatgtgcgtggtattctgtagtggttcgttagttgtgtggccttctggatatatctcctcttttgaattgtcggctatgatcttcacgttccaattgttacgttcctaacatgtgtatcgatttggtattctcttcaattcggtcgcaacttggacggaccgtcctggtaatcttccctctcttggtggtcaaaactaagagtactgcgccttgtgagtatggcgtagtcctctccactctagagggggcacctcgtgtcgttagtccgattatgcagtaccgttatgtgacggattagtctcccatggtgttatcattagagacagccactgtgtatgatgttcgctcagagactgtgctgtgacttagtgaaaatgtcttgggggctctctgcgagttgtgacagagtttttttctggtcgattgatcctgttgtctcagttccctcccgttttccacttttcgctccatcatgttggtgagatatacagacagtgaaggcgtgaggattctcgttcgagcgatgtcacgtcaaacgtgactccgtgatacgtggatgaatgccatgtggcgcatgacgataggccgtctatcatctcttaatattttattacaataatccctcggggatagacactagagacctcgtacctgcagctgttttgtgccgctcgcttgccatctgggccctgcccatgcacacgcactggtctcgttcaccgactgccctcgagttccatcgatctctttcccctgacacctagttgctgtctcagagctggtctcccatagttggtttcttttagtatttgggagcagtgggcatgcttatggggaggggacgggggttcattccagcataacgtccgcaggctgtctag

SEQ ID NO: 521605 - DNA, 147 bp, Homo sapiens
tacttgaggcggcatctgtccgttacatgtgtacagtttctcccttcagctgatcacttacctctcagtaccggcagatacctcatctcggtgcttcagtactggcaggtggtagctttttgcccatcctgttgtcctcaatgcccg

SEQ ID NO: 521606 - DNA, 968 bp, Homo sapiens
agcgggtgtgatcctccttgtgcggtctgaagatagatcgccatcgatgaacgacaccgcgaactatccgcgagctatacagagtgtcatgaccaagggagtactggcagaggacagcaaatggctcgatgtgatgctccgttctaccccgtgggaaggcgacaggtgacctaagacagagattgcgggaacaaactagacatatatggacagagagcacagccggagtgtcactccttgatacttggacttgcatgaaactcactttagggcattgggtggcgaatgacaaaacatgagtcgtgtcgtgtgatggaatttattgcattttcgcgctgagaatttagtggcatgtatgtaatggacagtggaagacctgaataccataggaactttgtcggggtacgaatggtcggttgtcagtgacgcataggaaaagaaagaggcttcgaagcaagaggcaaaggagaagggagacgtacgagataccgggggagatgtgtagtgtgaagaaattgtacaggggagtggagaccaggtgcaaaaggtctctttggaaagaggaaaagatctcgaaatgcaaaatacaagttatacgatcgaattataagcaagttaaagtgagttccaatggatggctggaagtgtgaggaagatgatagcgaaaaccaaggaaatgataaactagtatgtgggcgtgggtgggtccaatgtgaggtgggaggactggcttcggtctatgggaaaagtcgcaagaaattgcagagcgaatataaaattctgccaggtacaggcaaggtattgcaactttgatcttcgcacacggaaccgatagcgtaatcgcagtcgcctaatatacaggtctaccggttgtttctcatcgaatggatggggtgtggttcagccggttgtcgtggttgggtccaatgggtgcgttcatttttcctgttgccttatagagaggcctg

SEQ ID NO: 521607 - DNA, 248 bp, Homo sapiens
aacgggtgatgcggtcgactctgaggagatgaccctgaacatttctggagacctgcgccagctgagcgcgatgttgatagtcatgcgcataatcattgtgctgaagagccttgagctgtatgtctgagctggcagaagacacggagaagtacaagagattctatgaggcacactctaacaaactgaggctaggaactcacgaagactccagtaaccgtcgccgactgtctgagctgctgcgctatcat

SEQ ID NO: 521608 - DNA, 452 bp, Homo sapiens
gactaatccagtagcatgactgctctggcaagggagcacatccaacgacctaggtctgagtgatctggctggaatgcagacatgtcatacactttaatccctctggctggaatacagacatgcccttagtatacatgttatttgaaagtgacatttaactgaggagcaggcaaagtgacaaatcagagaaagatctgacagaataagtcggaggtaggatatgctcagctctctccagaacagcataggaagagcagctatttaagagcggttgttctgtgagagagtcagttatttggagtcagtacagtgagggcagtgcattcatgccctgggcagtggagctgagttcattcacgagctcacacagttcagggcaggtcagcagaggccattgaagccagagaataaaaagaagcaagacgatgtcgagcgatcgcgcgcgtcgacgc

SEQ ID NO: 521609 - DNA, 130 bp, Homo sapiens
cttgatctagaggatcccgtgtggttaattccacacaacgggatttagggaggagtttccttgtgccactgtttgacctcaatggatgggtttcgacttaaaaaactctataaaataacttcatcagccc

SEQ ID NO: 521610 - DNA, 127 bp, Homo sapiens
atggtttgactggcaaattcgctttggactcgtgtattctcgtttgtcataccgcatcacactaccactgctttttgaaaaatggtcatggggcaatgcagaataaaagaaataccatgatttagtg

SEQ ID NO: 521611 - DNA, 172 bp, Homo sapiens
  misc_feature (1)..(1): n is a, c, g, or t
ngtttgtttttttgaaatggggtctcgtgttcaggctagcagtgtgtggcacaatctcagctcattgcaacctccgcctcccaggttcgagcaattctcctgctcagcttctcaagcagctgggattatagacgcgcacccacatgcctggctaatttttctatttttagta

SEQ ID NO: 521612 - DNA, 382 bp, Homo sapiens
tgattttaaaacaacaagtgttacctgggcttctaaaagggctctgtaaagaggtctgatttaataaattgaagatgtctaattagatcttgacttgttctgagaatttttataatgaggaaaaaaaatgttattaactcagaaccccattttagtaaatgatgaatgcaagaactgtcatgagaaatgaagaactgcttgcaaatatacaaataaaacacataataagtaactctcccagtgatattaaattatttaatcactcataccctacaggttatatcacagtaattacaatgaccggaagcagttgggtcctaaccaatgagaagactgatttttccacatttaggaccatttagaggactataggacattcaag

SEQ ID NO: 521613 - DNA, 226 bp, Homo sapiens
tatgatattaactgaacatctcatttgattccattttattctccttcttaatatatcaattatacttctctaaaaatattttaatggctgttctagagtttgcaatatacatttttaactattataggttcacctttaaaaagtactgtacaacttctcatgtaatgtccgtacctgattacctgataacagagtacacccaattcctcacccccaccgtcgacgc

SEQ ID NO: 521614 - DNA, 117 bp, Homo sapiens
ctgggagaagtttattctgttttcacatcttttttgttggggagagtgatagacaaagttctgggttctgggcatcgtcggcgcatgcttgtaatcctacttgggaggctgaggcag

SEQ ID NO: 521615 - DNA, 240 bp, Homo sapiens
gattggaaataggttattataaatatatcttttgctattttcttgctctctgaaggaatgtgtacaacaggatatgggccgggtgtggtggtgcatgcctgtagtttcagctactggggaggctgaggcgggagtatttcttaagtccacgaatttgaaactgcagtatgctgtgattgtgcctgtgagtaaccactgcacaccagcctgggaaacatagtaagatcctatctctaattg

SEQ ID NO: 521616 - DNA, 663 bp, Homo sapiens
tacgtacacaccgttcgttaacccacggatgcccaggtggcccggctggggttaccacagccacccctagtatgccgcaggcctgcctacccaccttcaggcagtctatgggacgcagggccccatctcgtccctcgagtcgcctgtgtggccatgtgttgggtccggtcgtccccaatcactcgttgctcgactacagacacgtttggcatggactgtcttggtgcctcaaccaggcaggacgcgcgtagcaagcgcggggcaggcggatccacctaagaaccacacagctcccttgtgcgagcacgtagggcgaaggtgagctcgctgtggttgctacccgggtaagcgtgggaccaaataacaacctaatctaaaaaaatctcactaaggtgcctacaaaggaacctaccgatcatataaagcatgggtcgggtgccagaaacggacatgaaaagtcctaccatagaaaggtgagccaacgaaacaatgaccaaacaaacaagcatcccccacaaaagtgacggcgagaaaccaaataaaagaaggtgaagatccaacataaagatgagcatgcatgcaatcaaacgaagaaaacagggcgtcaaacaacaacattcatcacgagaaacccatgaagaaaaacaaaaacaaaactacaac

SEQ ID NO: 521617 - DNA, 411 bp, Homo sapiens
tctagaggatcccatgcagattgattataatccaagtttattgtgacacaggagccttggacaagaagaccaaagacccaggaaaactgtctatttttatgctcaggttcagtgaagaatggacaggcatgtaaaaaggtatcggacaaaaagggaatgacctgatgtcatagactgagggggacacccagaaaggcctgtccagccagattcttcctggcctctccgtgctgcatttcttcctccagggtatagggcagaacccctccggaatgagggtcttatgaccccacagtcagataaggtaggtcagagactttctttatggccagcgcttacacagaaaggctggggaaagttcgagtactagttctggattttatgattggctttgggaaagagcggttctta

SEQ ID NO: 521618 - DNA, 229 bp, Homo sapiens
ttgacatgataaatcgagctctggtacctgaacattcgtgtcctagtccgctttcagttccatcctgtatacctggctctgccttttagatagcaggagcaaattagtgaaagtactaaatgtctgatatgcagaaataatggcataagctgtctctctctcttctctctctctctgcctctgctgccaggcagggaagggccccctgtccagtggacacgaatgttca

SEQ ID NO: 521619 - DNA, 1842 bp, Homo sapiens
tacagcaagtctccctaatcaggagttcactgaccgacctcgatcaagacccacaccagtagtctccgtgcagcaggagctcaggctccagctgtggctaccaaccatcagcggatacactcatcaccacagcacaacacatcaacagtagcacattcacagcagccgacacacacagacacacgaaacaccaacagagaacacaaccacacaccgacagttggcggcaacgaaacgcaggacgcgccacccaaccggagagaaagagaaaaaaaagaaacaaaaaaaataagacgaagagaggagagaagtggggcagatcacacacacgacaaacgggaaaacacagaacacaaaaagtagaacgaacgataccaacgtgaagaccacaacagaacaaacaaagacaacgaccaggcagaaagaacagaacgaaaaacaggaagggaaaaagaggcacaaaaaacacaccaacgacagaagtagaaaacaacagacagcgacagacaacgagagagaaaacaaagacaggcgagacagagagaaagagggagacacaaaccaacaaccgcgcagaaaagagactgagagaaacgaccccaaaaaaaccacaaaagagaactacaataacaccagggagaaatcaatacaacaacacgacaaacaacaagggagaaagtaaagacacgaacaaatgacgaaaaaacgccgcacacccaacgcaagagaaagcaacgaacagacaaaatgacaaagaaccaccaaccaacaaaaggaaagacgcggcagaacacacacactggacaaacacaagacgaagaacagaaaagcaagaagaagaagacaaagacaacacagcaaaaagaacaaaaaacgaagaaaacaagacaacaacaaaaaacacaaaaccaaaaaagaagaacaaaaaagacgaacacacaacaaacagaaggcaagaacgaccaaagcaaagcaaacagccagaaaaagaagaagacaaagacaacaagacaacacaacacacacaccacagaaacaacagaagaaacaagacacaccagagacaacaaggcacaaccacagagaaaaaggcgaacgcaacggtaggatacacaacagccagccaggagaagcaacagcgtaaggcggccagaaaaccaaaaagacgagaggggaacaacgaaacagcagcagcaacaaccgagaccgcacgcagaagcacagcgacacaagacaaagcaagaacgcagccaggaaaacgctgagaacacacgcagacatcaaagcagaccggcaacgccaaagacgagaagcaagagatacgaagagtaaagcacaaagagacacaagaccaaacacacagcaacgcgcgaaacatagcaaacgaacgtagacacgaacacagaaagacaacaggaactaaacataacgaagcacaacagaaacacgagaacaaagggcacgacacaatcgaagacgaacaatcacacagcagaaacaaccacagcagaccaaagcaagagagccacacagagaccgagagacatcacaagcagaaaaacagaaaacgcaggagtgcagcaaaacagcgagaagcacaaaacaggaagcgagaaagacaacctccgaaacagacacgacaaagaaccagcgggagccgagacaacaagcaacgagcgacaggagaacggagagacagccgaacaagcgagcacacaaaaaagacaacaaacgcaagggacaagagaccaccacgcagagacgcagagaagacacagagagacacacatgagcaagagctaaagacacacccgaccacaacaagacaagaaaccagcagca

SEQ ID NO: 521620 - DNA, 353 bp, Homo sapiens
gcgattatagaggatcccctcagggtctcaggtaagttacttagtcccggtctcgtatgcaagtggagctaatgatcatgcttaatgccgaaggtggtgtggctgtggagaccccctcactgtcactgacaaataggagctgtcagcagcccaggtgccacacaatgatggtgattgtgaggaggccccccacagccctttcctttgctattgtctgtggacattaaagccactctgccagaattgtagatgctctcagatttctgtagggtggaagccgaggacctacacacctcatacctggagtagggagcccccaaagtttgccatccatttcttctcccctgtctctg

SEQ ID NO: 521621 - DNA, 350 bp, Homo sapiens
agggcacaacgaagcttggacagtgatgataggccccgtcatatgtgcagtgtgccaactccttgtgatcaacttaacacccagatcagtgtggccactgtccctgattgcgctaatcaaacgccttgaacctggttgttctggccggtgcaggtctgcttctgcactggcacgtcttcaaaacctccttcttgagagaggccccaggaaaaagtcaatgatcacagactccttgatgggcagagagaagagatagatctactccagggacttaatcttcatgtccttgaccaggcagcccagcttggtgacaaccatctactccttgtccttggccttgccatatgcaa

SEQ ID NO: 521622 - DNA, 82 bp, Homo sapiens
  misc_feature (46)..(46): n is a, c, g, or t
ggatttgctggtgcagtacaactaggcttaataagaggacatgttntgtctacatagaagatcctaagaaatctattaagga

SEQ ID NO: 521623 - DNA, 178 bp, Homo sapiens
cctatagactagaaacatacttaggcaacacatacaatataaccggtagatgtatgcacaaagcagcccacacaagtatggattcattcacaactgcgacatgtagatcacttgttaccacatacaatggcatacttcttgccccccatccccaatactcatcatctttccctgtaat

SEQ ID NO: 521624 - DNA, 301 bp, Homo sapiens
tgcatgctgtagtgggcacagtatgagacagtcctcggtgggtgttatctccatgtgggagtgggcacgtgtgaggccttggtcccacctgttgactcagggtctctttcacggactgcggggaaggcagtgggagcagcaggaatggatggtgaaaggacacagtgtccggcccccgagctgtccgagggtagagctgggacagggtcacagtccacccaaagccgctccctccttgcctatccccagctgaaccagcaccactcaggcagtcgccgccactggggtgggtggagagcgg

SEQ ID NO: 521625 - DNA, 301 bp, Homo sapiens
tggatgggatgaaatcaacgttaatctaagctgctaccgaaagtctgtctttgttgttgctgttacgctgggggcgtggatctgaaagtcgtgttgtcaaaactcctgaaaccctgtcctgctactggtggcaacccctggtggctttcaagcccaacaagccaggtggagggaaaaaattaaaattaaaggaggtgagtggccaggaaccgaaaaccaaaagtcccaatgcttaagcagcttacgggtcccaactcccgcggtcagggcttttcaaggaaaagcttttggttttttgggg

SEQ ID NO: 521626 - DNA, 446 bp, Homo sapiens
tggtcatgtatattctgcatcaccacgtcgtcaaacactaccttcaccttttcaatctaacactatctcagcactctaaccgccagccaccaacacaaaatctatctatagcatcccacttaaccactgcctaaatattccatctggatgaagattcaattttcttcctcctctccaagctaacgaacgcgtaggcggcccaggggaatctcactggccacctcagcaccctgtcacatctatcaatcacgtgaagagaggtgcagatgagccagacagcacatgggagacgtgcccttgcccaccggaattatattcaggtgaaacgtgattgatttacgctagaactgcccgaattccccaataaaggccgtctacttcatttagaaacccaagctaacactacatctgtcggaagctacactacagtcggtttcactacacta

SEQ ID NO: 521627 - DNA, 186 bp, Homo sapiens
tatctccggagccttacctccggagccttaaccctccggagccatatcctccggagccttaccctccggagccttaccctccggagccttacctctggagccttaaccctttcgatcggcgaggcacggaggccatcgcccgtccttcgtacggcgctcagggtaagggctcccgggggtacccga

SEQ ID NO: 521628 - DNA, 222 bp, Homo sapiens
ccagctatgttgtcatcctatttccgaagccagcagaattgtcacaaactgctactgctgtcgctggttgtagccaattatcctcaatgtaagtgctgacttccttaacaatttcctcatatctcttctgcctgtatggtggcccacatgaaatcccgggtcatcctcatacagtctcatcctgcaagcctgcagaagcttgcaactggccgtctctctatc

SEQ ID NO: 521629 - DNA, 409 bp, Homo sapiens
gaagacaatgacatgagaagaagaacagagaagagaaagagggagtataagagatcgaggtagagggggggagacagatgtgagatgcagggagaagtcaatgggcaaaggagcaagattggctgaggagagagaaagtggataaaaggattagagaagagtggaggctgaagaaaatgtgtcgcaaaaaagagtatgaagaggaatgaatgagtaaagagaagaaaggtcagcaaggtatgcaaatagaaattaagttaataaggagagagagagagacagaaaaggcagaggaaggaggacagaagacaaggagcagagggaactatatatcagtgagtatgactctctctctctatctctctctctctctctctctctctctctctctctctctctctctctctct

SEQ ID NO: 521630 - DNA, 230 bp, Homo sapiens
  misc_feature (149)..(149): n is a, c, g, or t
tcggcaagtgtgcagatagtccggagtccatcaaggccatgggctcgatgacagtgcgtaccatatcatctcggtctttattcttgaatggcacggcttcccctttccggtccaggattcgattacactgtgcgcaagagtgatctcangaggcgcccttgctggtacattacggaagccaccgtggggtattcctagatgacggtgctcatgtgactgtgcgcactgag

SEQ ID NO: 521631 - DNA, 276 bp, Homo sapiens
cgctgggttggttaactccacctcaactgcctgctatgactggactaacgatcgagagagtgaggagaacggcttacgtttagtgacgggacgacgactttggtatatgattcgagactgggggctagtttttgtcatgtgagaagaagcaggccggatgtcagaggggtgccttgggaaaccctctgggacctcagacagtgacacacgggcggctattcctacgttttacttgctatagcccattatgacttacttacctgactgacgtattga

SEQ ID NO: 521632 - DNA, 702 bp, Homo sapiens
actgataaatcactaggcgtcataccgaagcagcatggaactggtacaaaacagacataaagaccaatgaaggtgaacatagaccctcagaaatacaccacacgtctacaaccacctgatctttgacaaaaacaagcaatgggaaaggatcccatattcaataataatgtgggaaatctggctagccatatacaggaaactgaaacttgaccccttccttacaccttatacaaaaattaactcaagatggattaaagacttaaatgtaaaaacccaaaccataaaaaccctagaagaaaacctaggcaacaacattcaggacataggcatggtgggcaaagacttcatgacaaaaatgccaaaagcaattgcaacaaaagccaaaattgacaatgggatctaatttaactaaagagcttctgcacagcaaaaaaacaacaaaaaaaaaaacaaatttttctccaggtggaccagacacctcagaaggggggaaaaattttgggcctcctccccttgtgacgtggtccattttcccaaatttacaggggtctaccttgttcccccaaagagaagaagcgcctcaagggggcccaggttttacgcgcccttcacaaagactttcggccaaacacttgcaggctccatctgtcccggaatgcgtcaccgtgatgctcgccatgtagatttagccgccgtgggtca

SEQ ID NO: 521633 - DNA, 218 bp, Homo sapiens
  misc_feature (54)..(54): n is a, c, g, or t
ggggctctggacaaaccagactcttctctggttgttcttcagaccacgaggtgnacccatctcttcaaaggagccctgccaccacaccaaagctcacaccagaaaaaaccgcatttacacaacaaagtgaacctgaaaaaggaacggaacatggtgcttccggctgtgaacaaaacatcagcacagtgaatcctgttttcctattcccggggcgtgtt

SEQ ID NO: 521634 - DNA, 115 bp, Homo sapiens
atccagagtgagctgatcagtgtagataactttggtcacgaccataggttcactgtgtctgtctcactgtgaatgatcccctgctgaggactcccagcgtactggtcatcatcgg

SEQ ID NO: 521635 - DNA, 364 bp, Homo sapiens
ttcggaagtgcaatggctggggaagcctgaggtaacttcctattatcattattttttgagacagtctcactctgttacacaggctgtagtgcagtggcacaatcttggctcactgtaacctccatctgtcaggttcaatcgattctcctacctcagcttcccgaacagctgagattacaggtgtgcgccacccgcccggctaatttttgttttttcagtagagacaggtttcgccatgttggccagactggtcttgaactcctgacctcaagtgatctgcccgcgttggtctctcaaagtgctgggattacaggtgtgagccattgcactccggccagccattgcactccggccagccattgca

SEQ ID NO: 521636 - DNA, 324 bp, Homo sapiens
ggattgagataagcacggtggtagggatacacagcgagatgacgggaaagacacaggcagagtctggaaaaatccatgtgcaggcttccttatgctttctccgtcccatgaagtgctacagtacacacacttcccccagcaacaaaaatgcagcaacatgtacacagtatttctgcccaggagagccaattagagactcagcacccaaggtatttattgggcacactctacctagcatgtaccaaaattccagactccccaaaagagagcacacattcatgtttgtacaaataggctaggcatagtaaatcaccattactattt

SEQ ID NO: 521637 - DNA, 656 bp, Homo sapiens
cacccgctttaggacttactcaagtgatcccgcccaccttgtagctccaaagtgctgggattacaagtgtgagccaccgtgcttggcctatctttctatttgtttgtttgctttttaaacaggtctctctctgtcgcctgggctggagtgcagtggtacggtctcagcttactgcaacctctgcctcctgggttcaagcgattcttgtgtctcagcctcccaagtagctgggactacaagcgtgtgctaccatgctgagctaatttttgtatttttagtagagatggggttttgctatgttggccaggttggcatcaaactcctggcctcaagtgacccacccacttggcctcccaaagtgctgggattacaggcgtgagctgccacgcccgaccaagtatgtgagtaattatggagaccagaagaaagtggagctgctgaacgacaaaccacgcatagaattctgtattctctacgaactcacattacatgaccatatctccagaaaaaggaaaactgataaaatctgtcaccatcaaattgtgctaccggacatgctgacgatagtatatactacagtgaaactcagatctttaagaatgaatgatgaaatcaaaattagtacgtattggggaaaattaaacatctctgggtta

SEQ ID NO: 521638 - DNA, 480 bp, Homo sapiens
gggaccagagcagtccccatcagccttacccccatttcctgagaggaggttctgtgtggtgtcaggaggatggggtccggggcaggtcgacagagccttgaagtttgaatctgccactgactctcctgtgcccttggtcaagtcacctgacctctctctacctctatgtacatatagataaaaatgaagatgattgtggtaagagtcatgctaagcatttcatttacatgatctcatatcaccatcataacaatcccatagggcttgcctatttaatcaccattttatttatttatttatttatttatttttatttatttatttttttgacatagagtctcactgtgtctcccagacaggagaatcacctgaacccgggaggcggaggttgcggtgagccgagattgtgccactggactccagcctgggtgacagagccagactccgtctcaaacaaacaaacaaacaaacaaacaaaac

SEQ ID NO: 521639 - DNA, 263 bp, Homo sapiens
  misc_feature (5)..(5): n is a, c, g, or t
  misc_feature (11)..(11): n is a, c, g, or t
  misc_feature (88)..(88): n is a, c, g, or t
  misc_feature (116)..(116): n is a, c, g, or t
  misc_feature (185)..(185): n is a, c, g, or t
  misc_feature (188)..(188): n is a, c, g, or t
  misc_feature (227)..(227): n is a, c, g, or t
cagtnactgantgtgactgggccaggcctgctgcctgctttagaagtcctggcctgccatccagagaccccctgctcctctgcctcanatgctgagggttccataggcagaacaanaccaagcctttttttccacacattcagtgaactcccctctaaaaaagacttaatgtgcagacttctgtnttntacagaccttcgcagcctgacagtggtttattgtctgtnacagacagcactagtgaaagatctttcttaacctgg

SEQ ID NO: 521640 - DNA, 242 bp, Homo sapiens
  misc_feature (50)..(50): n is a, c, g, or t
  misc_feature (57)..(57): n is a, c, g, or t
agggagcaagagaaataatcgccaacgcttctccttcaactttagtgganggagggnggacgaaaaccaggcccccccaaggctcaagagcgagcgccttgtgggggtgaggaaaagattcaaacaaacactccctctttcttttgcagccaagggacctacgaggggggctgaaatctaccccagggggtgagaaaagaaaccaggccaccggggaatgcttctgcaactaaacacgttag

SEQ ID NO: 521641 - DNA, 119 bp, Homo sapiens
gtgacaaagtgaatacccaaggggctaagtttcatatctaaagcttgtcactaagaattttcatttttaggggtcaaaatagtgttgtgtgaatgctgtaagtgttgtacatgtctctg

SEQ ID NO: 521642 - DNA, 964 bp, Homo sapiens
  misc_feature (157)..(157): n is a, c, g, or t
atcacggggtggatatataactaagtggtgtttgtaaacacagtggttggtagtgataccggacgccttcgttgtaccacctgttttgtgctgcgcctctctgttgtggaaaaaggtgtgtctcgcacggttgtgatctaatgtgggggtcgcaagnagggaggaggaatgtgttgcaacaacctggttgggagaagaaagggggggccaacacactcttttgtgtgggtggagacctatactaatagccgccccggctcgggcgttctttatttcgcccgacccggctcggcgcgcacgtgttagccggcggggacccactgacccagcgcccaaatggttgggtttatagggaaacgttgctgctcacaggtttcccccctgtgggggaaaataaaccacagacacattggccgcctttgtgggggatgtaacccacgtggctcctgttgctcctaatgtggcaagaatgtgtagaaattctatctcgctaatttggcgggatttttggggcgggggccacacatgagcttggggctcaacacacacaagaccggggcccgcgaaaatcctcgcgtatgtccccctcaatagagaatgtttttccatgaatagcggaggggtagaaaccacaaacattggctatctccgcctctcttagacgcctcggattcatctgcgtccctcccctcgccgcacacgcttggtgaaagaacacacacatttttttgagggcagtgtctatgcaaacaagatgcggagcattcctagatgatttactacttctcaccgtgcccgctgtaattcgcaccgagcagttgcacagactcttttgagtgtaaaccctgggcacctgttatattaatggtctaagaacaaacagcacgatgcttaaaagtcggccccacaacccttattaaccccttttgggtctacataaaattttaacaaactcttcataaca

SEQ ID NO: 521643 - DNA, 665 bp, Homo sapiens
ggtccgaccaagggatggcgatggcgtacttggcttggagactggctcggcgtatcgtgtccgatgtcactacttgcccggtagtacagctggcacttgaatacaacagcaatgagagccagtcagaaggactttgatgaattcattgaatcagaggtgacatgtctgtggattaacggatccatggtaaacgagagatgtacacgctacagagctctacgctgctatataagcacggccactgaaggaccttgtaacatgcccaaaccaggtgtatttgacttgatcaacaaggccaaatgggacgcatggaatgcccttggcagcctgcccaaggaagctgccaggcagaactatgtggatttggtgtccagtttgagtccttcattggaatcctctagtcaggtggagcctggaacagacaggaaatcaactgggtttgaaactctggtggtgacctccgaagatggcatcacaaagatcatgttcaaccgtgccaaaaagacaaatgccataaacactgagatgtatcatgaaattatgcgtgcacttaaagctgacagcaatgatgactcaatcatcactgtcttacaggaaatggtgactattaacagtagtgggaatgatctgactaacttcatgatattcccctggtggagtaacga

SEQ ID NO: 521644 - DNA, 637 bp, Homo sapiens
tgatggtgcctaccagtttcaggggtgtcctctgcttttagaaaggggagagaagagtgggaaggactgtgtcttatggtttgagtgccagctcagccacaatacaataaaataccaggtagacttctaaggtttttcagtctagttcctgactcctggatggcacttctgggcccacccggggcctggaaaatcttgctgccctgaagggaagaacacaggcctggctggctttgccacctgcagattgcagagccccagggccttgagcaaacatagacagtagtcatggagtggttatagcaggccttgggtgagacccggcactgtggcctcattatgagtttagtcataatggttgtggtcacaggggtactcgtgttactccaccccccagctttaggtggctcagaacagagagactctgtatgtttgggagtaagtaaggggaaagaacaagagtctctgcctggtaatccagataattcttctggatcttgtccaagactatcaaggcagtatctctacgagactgcaagaccacagcattactgcgcttggggtgccccttaaagcgcagtttagatcacaacacccaagtcctttcaaatatttgggccttgctaccggacagttt

SEQ ID NO: 521645 - DNA, 403 bp, Homo sapiens
  misc_feature (34)..(34): n is a, c, g, or t
  misc_feature (117)..(117): n is a, c, g, or t
accctagaccaaacctcgccaaaaatccatttcnctatcatattcatcgggggaaatttaacttttttcccccaacactttttcggcctatccggaaagccccgacgttactcgggntaccccgatgcaaaccccacatgaaacatcctatcatttggagggtcattcatttttttaacagcaggaaaattaaaaattttcatgatttgaaaagccttcgctttgaaaggaaaagtcctaaaagtaaaaaaaccccccataaacctggaggggctatatggatgcccccccccctcccccccatttgaaaaacccgtatacataaaatttagacaaaaaaggaaggaatcgaaccccccaaaactggtttcaaaccaaccccatggcccccatgactttttta

SEQ ID NO: 521646 - DNA, 260 bp, Homo sapiens
cgtcgtactgtgataactgtgtagaacaaaactgcctctaagctcattgatagtaatttgtctcttatgaccccatggaggaagagaacaaacccataaatggcctttggaaagcattcctaaaaagtagattaaggctgacatagtggttcatgactgtagtctcagtactttgggaggctaaggatggtggatagcttaagcccaggaatttgagaccaggctgggcaacatgacaatacctcaccatgtagtgacct

SEQ ID NO: 521647 - DNA, 549 bp, Homo sapiens
cggacaacgtgtgcctcttaacaggctggtataacatccatcagggatctagtgttgggcctcatgtgcatctgctgattgaaccctacatgctgtaaggatcggggcatctgttacataaactccagccttcctgtatagacactaactcgttttcaaaagtgtggacctagttgctggtggatgtgaaccacagaagacatgtggagcagttgtggggatattaagggaaactttcctctgccttgacccctttgttaaataaaatgactttgggagccattcattgtacagttgcaggaatgagagtgattttatgatgtggtacattgggaccatgttctaaaaccttgggtttctgagtctgctttttgagtaggtgattttgaggttgaaaaaccaggggccttcatctaggaaatacagcattttccagaagcttctttgaaagggaatcctggttttgttgccaaaatgaaacgcccggggttggcgctgaatcccacaactgtgtgatttgcttgttgagttttttgttgtccggggttg

SEQ ID NO: 521648 - DNA, 799 bp, Homo sapiens
  misc_feature (609)..(609): n is a, c, g, or t
  misc_feature (612)..(612): n is a, c, g, or t
  misc_feature (616)..(616): n is a, c, g, or t
ctctgctgccagggcgagtgccagtggctgcacctggacctcatcaaggagatgcggcagttctgccagtccctgttccccgtggtggcctatgcctactgcaccatccccacctaccccagcggccagatcggcttcatgctgtgcagcaagaacccgagcacgaacttccaggagccggtgcagccgctgacacagcagcaggtggcgcagatgcagctgaagtactacaactccgacgtgcaccgggccgcctttgtgctgcccgagtttgccgcgcaagggccctgaatgatgttgagctgagccccaggcgccaccactgatgccacccaggacctcggaccttggagcctgcgggggtgcctcggcccctccagccccgggccggacctccttgctggttctcgcccaaccaaccaaggtgttacaagccccagaaatgctgccgggctgccctgttgggcgggacttgtctgtgtgtcttgtctctctggcgttccaccctccaagcctataccagctggtgtacagggcccatctctctgcctttctgttgcccctcactcaccaaaacacgtgtatttatagacacaaaaacacaaacancanaacnacaacacttgttctggcgctgtcggccctgaaaaactctttaaaccaatcgctgggcgcgcggccccaggatatcgagacctggcaagtcgctcaggaggactgggatagacacgggggcttcccattaaaccgggggccgggttgaactcaggcttgcgatacgggctacggacgggccaaa

SEQ ID NO: 521649 - DNA, 350 bp, Homo sapiens
  misc_feature (144)..(144): n is a, c, g, or t
ccgacggcaaagcccaatcgattggtcgcttataaacaggctgtctattgagcaagaccctagaagaaagcgggacaaggctctactgtcagaaatgacagtcctgaccagcggtcatcgtcgttcaacgctggcctcgcagangtccgacggctatcagcagcaccgacagcagcacgaataccaacaccaccagcccggcattgataaacatccggggataacccagctcccccacatcgatgaagtcataagggtaggcaccaatcaggtatccgcgcaccagaaggtaaacgcagtagaccagcagatagatcagccacggcagcgcatcccgccataacaagcgt

SEQ ID NO: 521650 - DNA, 860 bp, Homo sapiens
  misc_feature (670)..(670): n is a, c, g, or t
  misc_feature (673)..(673): n is a, c, g, or t
  misc_feature (677)..(677): n is a, c, g, or t
cgcggtggctcacgcctgtgatcccagctctcagggaggctaagaggcgggaggatagcttgagcccaggagttcgagacctgcctgggcaatatagcgagaccccgtcctcacactaaaacaaaagaacaaaacagagcataacaatgacaagtgtgagcgggcaacccggagcacgaaaaaacagtgagaacagacaggcagggctggtggacgcggaggcgcgccaggtggcggcaaggatgccagcgggaagtacctaccgatactcccgaggaaagcaccggggccgacatagtggctgggcccgatctcagccacggaaaggaccccgccgtggatgtagagctgagctccaggacgccattcacgtgagtggccatctccgagggagcctcggaggcgttgttatgtcctgcgggggtgcctcggcccctccagccccgggccggacctccttgctggttctcgcccaaccaaccaaggtgttacaagccccagaaatgctgccgggctgccctgttgggcgggacttgtctgtgtgtcttgtctctctggcgttccaccctccaagcctataccagctggtgtacagggcccatctctctgcctttctgttgcccctcactcaccaaaacacgtgtatttatagacacaaaaacacaaacancanaacnacaacacttgttctggcgctgtcggccctgaaaaactctttaaaccaatcgctgggcgcgcggccccaggatatcgagacctggcaagtcgctcaggaggactgggatagacacgggggcttcccattaaaccgggggccgggttgaactcaggcttgcgatacgggctacggacgggccaaa

SEQ ID NO: 521651 - DNA, 1855 bp, Homo sapiens
  misc_feature (616)..(616): n is a, c, g, or t
  misc_feature (840)..(840): n is a, c, g, or t
  misc_feature (945)..(945): n is a, c, g, or t
  misc_feature (1685)..(1685): n is a, c, g, or t
  misc_feature (1730)..(1730): n is a, c, g, or t
cgtgttgcgttctcgtgctgtggtgttgttttttcgggtcctgcgctctgtctgtacatttgtgtgggggtgtcgctcgcgcacgctccgctcgtcttgtctgtcgtcagggggggcagccaacctctcgggtgggtggccgtaagtagtgaacctgtcgtgggggggacgcctggttatttgttaggggtggacgcccctcttctctcggtcgcgctcttggtttccgcccgccggttcttttggggggaagaattgttcggtagaagagtgaccccttttctcgagcggggtggcgtgtctggctcggtgttggtgtgcacggccgcgcgcgtgctttggggtctgtggttgggcaccaccccggggggggccggtttggtgttgtcgcatgctagctgctccacgtccctcgtgtggtcgctgtggttgactccgctaaatgtgtggaggccggtctgcccgaggatgtgccagctagtgggcccgacacaatagtgtgatgggtgtgccaccgcgtcgcgtggatcgtggccccatgttgggggggtacactgtgtgagggcgcagaacacgccggtgggacgcccgcaagtggggccggcaaagatagggnacgcccccacagcaagagcggctgcgcccgagccgcgtcgtttatgggcgcaccgagagcgccccctttggtgggagagcacccacaaaggcccatagacgcgtcaaaataggagggggggaaggactcaccacgagaagagggtctctcggtggggttgtctcgtcccctccacggggaggtatattatgttagagggtgttttgtggtggtcgctctccccncagagaattattggggggcacaccacgggagaggccccacccgcgtttgggccgcaccaagaccctctccttgtggagcgcacaccatggtcgtctcaccgaggngttctcgtcacaccactagtaggtcgcctctgttgtggtgtttgtcgcccttgtgtgttgtcacacaacaagaggccgctggggggtctgcgtgagaaagtccttcgggcgtcttgttcgctcaggaggacgtcttgtgtgacttgttcgcaccactacagggggccgcacacctcctcgccccttcgctacagagagggtcacaccctttgtggcggcacaagagaggagcgcccctccgactttctatcgatgatacctctctagagccggcgcctcttctttgggtgtcgtctcaaagagagatatgcgagagaggtctctcgcgctcgtgcgctcgtgtcgccgcactgttcgtcgtcgcttcgtgtccacacgaggcgcgcacacgacagcgcgtgtggccctctaagcgcctctcgcccttctctctccgcgcggagatgttaagaacaccgggggaccactctcgccacaggggtttggggcgtcgcgggggctctgattaactcctctctcggcccctcgtccctcagaccctctgcccactctgtttgttgtgtagggctctttgtgtgtgcgccctgtccacacagtggggcccactgttggctcttgtgtcggccccaacataaaagggactggtgaattgctccctcctggtccctctggacaggtgatctttcctcccgcgagccccctgtcccccacaggtggagagtgagaccccctcgggtggnccacgctgtaccacagggtgttttcccgagacaccactaagaaanagggttgtttcctcgaagagattcggggtcaattgggacattttttgtaaagaacttctgttttccaaggtgattttatgacccggaaaatgaaagaattagttttcgcccaaaaaacccaaaca

SEQ ID NO: 521652 - DNA, 448 bp, Homo sapiens
ctggaattggtcttacattggggtgcttgcatgtcctcgcagctattctgagcacggctgagcgtggaatgtgaccacttgagcccggtgaacggggaggccgcattgagctgagattgcaccactgcaccccagcctgggtgatagagtgggaccctttctcaaaataaattatgtacagcgaaatgcacagatcttaactgtatagttggatcagatttgacacatgcatacacctgtgtaactcacaccccctcaagatatagaatattctcatcaccctagaaagttctctcatgtccctttctggtgaatcccccagaggccagtagtgatctgatttctgtcaccatggattagttttgccaattctggaacatcatctaaatagagttatacagtattagctcatgtgtttgacttcttttactcaatgtaatgtctgaga

SEQ ID NO: 521653 - DNA, 331 bp, Homo sapiens
gatgcaagcgatacaagatctaaagcttatctggtatttaacttttctttctctgcttgtcaatatagagttagattttatttttacatttgctatgtgtcctgatctgctctttaccatccttctatgggggacgctgtggggcagattcctttagctaccctttgtgacaactcttatcaggaaggagcgaactgttcatttctgcctactctctttcccttctgctccatgtgtactactaaataatccttgcatgcaatggtcaggcccgcaatttgggaaaagaagctctggaagcccactttgccatctctacactgttccaggt

SEQ ID NO: 521654 - DNA, 432 bp, Homo sapiens
  misc_feature (86)..(86): n is a, c, g, or t
tcttgcaaaacagaaagtgtccccattaaacactcacttcccgctggctcccccgaccccgggccccaccgtctgctttttctgcntatgaaccggcccactctggggacctcgtgtgtggggagtcacacagtgtttgtccttttgtggcttgtgcccctcggtgtgacgtcctcgaggttcctccacgctgcggcggggtgtgggagcccttccttcctgaggtgactccctctgtgcggaatcaccgtgctgtccgttccttcctccggcggtggacacggagctgctgcttccacatggccgctgattgtgaattgcgctgctgggaatggggtgcactgacttccatctttttaaggctgaatactcctccatgtatgtaataacttggttttgcaggttgaattgagataaaaactgaagacccca

SEQ ID NO: 521655 - DNA, 271 bp, Homo sapiens
  misc_feature (258)..(258): n is a, c, g, or t
gacgaatactcggcatcactaccttaccttaagctgatcaagcctagttatcattccttccggaacactctgtgccacacttctgaaactcagcgagattgaatttcactgcattctgaagtagcatttgtgctgtggctctgcatattttatctgcactcaattcaaaataaacttcacctaaggaaaaggtatcagacagtttcacattggcttctgacaattaattacactactgtttccttgtctccgagtatngcggtcgggtacc

SEQ ID NO: 521656 - DNA, 372 bp, Homo sapiens
  misc_feature (44)..(44): n is a, c, g, or t
gaattcccccccccccccccccccctttttttggggatggagtncactctgttgcccaggctgaagtgaagtggaacaatctcagttcaccacaactgttgcctcccgggtccaagcgattctcctgcctcagcctccctagtatctgagactacaggggcacgaaaccatgcctggttaattttggtttttttagtagagacagggtttcactatgttggccaggttggtcttgaactcttgacctggtgatccacccacctcggcctcccaaagttcggggattaacaggtgtgagccactgtgcccagacaattattttccttatggtattagaggtgtttttgttttatgggacacagcctcgctctg

SEQ ID NO: 521657 - DNA, 645 bp, Homo sapiens
agcggagcgaagagaaccggtcgcggcaatcctagcgcgcagcagcagcagcagcagcagcacccgcatccgctgcgggagtccgagccggaaccacacccaagtagctgccctttcctcttctgtcatctcaccgccccagcacagtaccgcgttcccagaggaaaccggcacgaccacgcccggagacatccatcacccatgatatgagcgggcgctgacggaccacggaaggcaatgatgcggctgcagaggcctcggggatgctgcgggaccctgctcctgcagtcgccccgacggagtgagcgcgactctgacggcgggcacagcaccattggacacaccatgtgaccggcgtcaccgaggcgagggagacggcacggacgagggcccggcatgacagccgagacgatccaaccgtggtgggggcgaaggagcggctaggaaccggcgagaagacaacccaaccggctagcaggggaccatgtacacaaacatccaacccaaacggaagaatactagccaaggaaactaggggcaaagggggcagacaccgccagtccagaaagcaccggggaggtcagacccaccgagactaccccggagagagcccaggacaccaaaggaacgagacccggggaagaa

SEQ ID NO: 521658 - DNA, 222 bp, Homo sapiens
accatcagcgtatgcgctgccttcctctaggtccttgagtgaggtgatagtcatctgctgtccgaggtgtcatacaccagtgttgtatggcgaacatactcctgaggaaccgcacgggctccagccacgactcgatgagcagcagggagatgcggagcagctctagattggatttctgttacgttacctccatgtcggcgggtgttggaatagagtctgaga

SEQ ID NO: 521659 - DNA, 1199 bp, Homo sapiens
  misc_feature (771)..(772): n is a, c, g, or t
  misc_feature (777)..(777): n is a, c, g, or t
  misc_feature (786)..(786): n is a, c, g, or t
  misc_feature (840)..(840): n is a, c, g, or t
gggtgcgcgcaggccgtgagtgtgcgctttgagagtcgcggggaaggagcccggcgcgcccgccgggcatgagctacgaccgcgccatcaccgtcttctcgcccgacggccacctcttccaagtggagtacgcgcaggaggccgtcaagaagggctcgaccgcggttggtgttcgaggaagagacattgttgttcttggtgtggagaagaagtcagtggccaaactgcaggatgaaagaacagtgcggaagatctgtgctttgtgatgacaacgtctgcatggcctttgcaggcctcaccgccgatgcaaggatagtcatcaacagggcccgggtggagtgccagagccaccggctgactgtggaggacccggtcactgtggagtacatcacccgctaacatcgccagtctgaagcagcgttatacgcagagcaatgggcgcaggccgtttggcatctctgccctcatcgtggggtttcgactttgatggcactcctaggctctatcagactgacccctcgggcacataccatgcctggaaggccaatgccataggccggggtgccaagtcagtgcgtgagttcctggagaagaactatactgacgaagccattgaaacagatgatctgaccattaagctggtgatcaaggcactcctggaagtggttcagtcaggtggcaaaaacattgaacttgctgtcatgaggcgagatcaatccctcaagattttaaatcctgaagaaattgagaagtatgttgctgaaattgaannagaanaagaagaanacgaaaagaagaaacaaaagaaagcatcatgatgaataaaatgtctttgcttgnaatctctttcacacacttcagtattcaactcatgggatgagtctcgatgtgtaggccttttccattccatttattcacactgagtgtcctactataaacttccgtattgttagactgcttcagcgacccagtttcccctggggggcgggaggcccaaggaaccccccaggggggccataccttgcgggctgcccgggtttgcgtttaccgaggcgggccccctatgggagtgcgcatcttataccgcatgggtatggcgaccgcgcttttaccaggtccggtgacggtgtaacctccctggcccgggacctgtgtgaggggccgcttatccgtgcctgcacttgttggcacatgccttg

SEQ ID NO: 521660 - DNA, 118 bp, Homo sapiens
tcgagctcggtacctgccctgcaggctgaaaacacatctgctctaggcggatggtacctgcccctggcacaagcctggtgagtcctccaattgcccatcctgccgagtccgctgcatt

SEQ ID NO: 521661 - DNA, 1293 bp, Homo sapiens
gggtgcgcgcaggccgtgagtgtgcgctttgagagtcgcggggaaggagcccggcgcgcccgccgggcatgagctacgaccgcgccatcaccgtcttctcgcccgacggccacctcttccaagtggagtacgcgcaggaggccgtcaagaagggctcgaccgcggttggtgttcgaggaagagacattgttgttcttggtgtggagaagaagtcagtggccaaactgcaggatgaaagaacagtgcggaagatctgtgctttgtgatgacaacgtctgcatggcctttgcaggcctcaccgccgatgcaaggatagtcatcaacagggcccgggtggagtgccagagccaccggctgactgtggaggacccggtcactgtggagtacatcacccgctaacatcgccagtctgaagcagcgttatacgcagagcaatgggcgcaggccgtttggcatctctgccctcatcgtggggtttcgactttgatggcactcctaggctctatcagactgacccctcgggcacataccatgcctggaaggccaatgccataggccggggtgccaagtcagtgcgtgagttcctggagaagaactatactgacgaagccattgaaacagatgatctgaccattaagctggtgatcaaggcactcctggaagtggttcagtcaggtggcaaaaacattgaacttgctgtcatgaggcgagatcaatccctcaaggtaatcaccaagtttgtctgctttctttacctgtcagttttctcccatgatcagggctgagcagtaccagtttcgaaggaaacatcatagggccattctgtggttttaacattaggtgtctttctgaggcttcccatacgtcaaagagaagattcccatcttcctctgattagatggcccacgcgtgttctctgcgcatgctgagcggctgccagccagatctgctactgctgctgcttaatacttgcctaggtcaggccagcatcctctcgtttttcttggggctccttttccaagaggcctgatgagcagcagcgcccaaagcctggccggtccttccccagaagagggcagttggctccttcggcacctctgtcgcgccttaaggtaactactgaacgttttctcctcctcgacttctaccacctcgcagccacttgcgcacgcatctctcctctgtaattcccacgcgcctccatgctcactcctctccgcacgacttccgcccgacagcactcttcctctctcacactaccgcctcctccttggtaacttcctctccacctct

SEQ ID NO: 521662 - DNA, 1122 bp, Homo sapiens
  misc_feature (546)..(546): n is a, c, g, or t
  misc_feature (1122)..(1122): n is a, c, g, or t
ctcatggccgttagaatggcgattattaaaacgtcaggaaacaacagatgctggagaggatgtggagaataggaatgcttttacactgttggtgggagtgtaaattagttcaaccattgtggaagacagtgtggcgattcctcaaggatctagaaccagaaataccatttgacccagcaagcccattactgggtatatacccaaaggattataaataattctaatataaagacacatgcacacatatgcttattgcagcagtatttacaatagcaaagacttggaacccacccaaatgcgcatcaatgatagacaggataaagaaaatgtggcacatatataccatcgaatactatgcagccatgaacaaggatgagttcatgtcctttgcagggacatggatgaagctggaaaccatcactttcagcaaactaacacaggaacagaaaaccaaacaccgcatgttctcactcataagtgggaactgaacaatgagaacacatggacacagggaggggaacatcacacatcggggcctgtcggggntgggggttagaggagggatagcattaagagaaatacttaacatagatgatgggttgatgggtgcagcaaagcacatggcacgtgtatacctatgtaacaaacctgcgacgttctgcacatgtattcccaatacttaaagtataatacttttaaaacaatggtgaaagacgagcctttttttaggactgttgccataatgacctgtagactgattcgaatatagtgtatcagcttggcaaccataaggggagaaccctgtgctccattaagaaacttctagacattcaccacaaaacaaacagaatatcaagataaaaagaaaagacacaacaagcacaacccagaacagccagaaaaaaaaaaccacaaaaagcgagaaagaacacagagacaagagacgaagaacaaaagaagacagaagagacagcaaagaagagacaccaaacagcgacaccacaaaagaacgaaacaaagagagagaccacaaacacaagcgaaagaaagcacaaaacagagaccaactcagactagaaacaacgaacaacagagcaccacaaaattgactatgcaggacan

SEQ ID NO: 521663 - DNA, 666 bp, Homo sapiens
  misc_feature (7)..(7): n is a, c, g, or t
  misc_feature (335)..(335): n is a, c, g, or t
  misc_feature (356)..(356): n is a, c, g, or t
  misc_feature (412)..(412): n is a, c, g, or t
  misc_feature (432)..(432): n is a, c, g, or t
  misc_feature (436)..(436): n is a, c, g, or t
  misc_feature (447)..(447): n is a, c, g, or t
  misc_feature (465)..(465): n is a, c, g, or t
  misc_feature (493)..(493): n is a, c, g, or t
  misc_feature (514)..(514): n is a, c, g, or t
  misc_feature (536)..(536): n is a, c, g, or t
  misc_feature (554)..(554): n is a, c, g, or t
  misc_feature (588)..(588): n is a, c, g, or t
  misc_feature (634)..(634): n is a, c, g, or t
cagagtnaaactcaacattttcatcttttacccatcgacctcgtccatctgggatccatccagagcttcgaagggtgagaaaatggtccagggctcgtcttcttgtggggctcatgggttcaggggctgagaaagttgcggactcctcggcctgtgggccagccgcaggttcaggttccctactgatcttcccactttggagtttgacctctgagggtggcaaaggggaaagggagaaagaaggaccaggggcttctggtctgtacttccggcggcagcgactgtaatagtggggagctctgttcagagccactctgggtgaaaagtcgtgtctnagttagccagaggagccttanctttggtttcttccccttcctccaattgcattctgatgttttggatttctgccttnctttccctttccccggctgncttncttgcccaaanaaaagcctgccaagcggnaccagatgtttcttgccttccccggtgnggcagttagcatggccagggntgtccagttcccggtcgatggngggcagaaggcacaagcnaagcgtccatcccgaagcatcacccccttacccnctggaatgtaacttgctaggaggtccccgactctcctttttttgancccattgagttgactccaatcgtctccttccc

SEQ ID NO: 521664 - DNA, 118 bp, Homo sapiens
cacccagagtccaacagtgccttcagatatcaagagggaatcttggttgctttttttttaagctattctgatgcttttcaatatggttttgacattgataataaagttttctaagggc

SEQ ID NO: 521665 - DNA, 113 bp, Homo sapiens
aggggtccccattttcccctcccccgaggccatgacatttccagtttgggcaacaaagggagactccctttcaaaaaaaaaacccccctttttaataaacatgtgatatttga

SEQ ID NO: 521666 - DNA, 103 bp, Homo sapiens
acaggtgatgtctcggggacaaagggtggcgcactactcatatcgccgttcacaaaacggaagatgggcttgctgattttcgtggtttcccactaaaggtcca

SEQ ID NO: 521667 - DNA, 325 bp, Homo sapiens
ctggtgtctaactctactagtatctgctgctcagctccaagtgctgagactcaggcgtagcaggctctgcagagtgattcttaaaagagagatatagacacagctcaaaatctattgggctatgcagatgttggcttagctgagaaataaaatgatgagcgcatgtagcagaggatacttgacaggttttgaaacgaatgtcagcattgaggtactgaggcatctggatatgctggtctggcccctgggagccgcaggagataatggagatagagattctatgggctgagaccattggtaggtatcatggtgttgaggaatactt

SEQ ID NO: 521668 - DNA, 599 bp, Homo sapiens
ctttgaggctgccagtgacaggagcgggctcagatgatctatgccttgagcgaagaactgtcccactcggtgtcgcatgatcgacggcatcgtctcggcgcgggtgcatgtggtgttgacggacaatgacctgctcaagcgggtgatttcgccgtcgtcagcctcggtgctggtgcgctacgacccgtggcaccgatatcaatacgttgatcccgcagatcaagaccctgtgtggccaacggtatttccagggctgagctatgacggcgtgtcggtgacggcgatcaaggccgccgtgtccatcagccagaacccggcgcaaccgcgattgacgcgcttcatgggcctgtggctgttggaagacaacctcaatcaggcgcggttgctgttcggcggttagctgctggtcgccatcggcgcgtgcggtgtgttggaccgccagcaatgggcgcggcgccagacccaggcgttgtatgtgctcaaggagggtaaatgagcctggtggagcgttggcaggggctgatcgcccagccgttgaagttagtgcgcgaagcaaagcctcggggaatgtataggcgacggcctgcctgcgaggtgct

SEQ ID NO: 521669 - DNA, 235 bp, Homo sapiens
ggtacaggtatgttcatggagttggcccgctctacacagaccctcatctcccagacttggcagactcagttcctctcacattgctttcagtcacagctttccgtggcacccattactggattctcctatcttcatggtaacacccgtgtccacagtggtcctatgttccctaggttgctcaactattaaccccctatactctactgggtcttcattttctatgcttctcccacac

SEQ ID NO: 521670 - DNA, 280 bp, Homo sapiens
  misc_feature (78)..(78): n is a, c, g, or t
ccccccccccctttttttatttttaacccccagggttttgggccccaaataaaaaaggaaaaaccccgtttaatgttncggtttgggtttttttatttcccccggggggaaacgggtttccccggaacccattcctttgaagccaaattgttttattttttccctttttttttacccccccccaacccaaattttttttttccttttgggaaaaaaggaaaaagccttttttttttttcggtttttggtttgttttccaaaaaaaaattttttttcccca

SEQ ID NO: 521671 - DNA, 964 bp, Homo sapiens
agcgtggctgaggaggtgcagcagccggagatggcggcggtgcttgaacgcatgagcgactcgaggtgtccgtcgacggcctcacgctcagcccggacccggaggagcggcctgtgggcggagggcgccccgctgcttgccgccacctgctgccaccgccctctgccacctggatcctggtctgcggccctgtggcgcctcaatgtggatgcatgccctgagcccggggaggcggcggctggtgggcgcggcggaggaggcgcggcggctggagcagccgctggggtttcgcgcctggacggagttgtaccggccttggcactgcgcttcttcaaagaaaaacgatggcacaaagccatttcaattccaactttattgaccgaacacaattgacagctttgtggcacgtgccatcacgcaagttcttattgggcccatactaatcccagacacttgctcctgaggttcggacttctttgactgtgtcggggacctgacccggcaggaccagcactgggcagcccttgggaaacatgtctaaacgaggatgccatgctggacgtttgtcaagctcttaacattaggtgttgccatctcttttcaacatatgttgcgtccacaaactagcacgccggcagagcaagacacacccacaggaccggcggcaccaccgagccgcaccgcggccctgaccacgcgcacgccaccgacacccggtcttgcccccgcgccgccccccaccgtacccgccaccccccaccccccacaggcttccgcaccgggccccgccagcccgtcccacggcacaccgcgcttaggaccgcacacaaacggggcttcacgcatgtgcacgcaacgcacaacagcgcgccacaataacattggccacctattaacacagccccacaactctgccccgttcacgttccccggcagtcgttgccatccccatagccgtactccg

SEQ ID NO: 521672 - DNA, 891 bp, Homo sapiens
agatcaggaagaaagaagatggaacaaaaggactcagcagatgcttcatggtcttcagcgtgctcttgctaaaactggagctgaatctatcagttgcttgagttatgtcgaaatacgaacagaaaacaagctgccgcaaagttctacagcttctgggttcttaaaaagcagcaagctattgagctgacacaggaagaaccgtacagtgacatcatcgcaacacctggaccaaggttccatattattcttagggggctagaaccctattataagcatagtgtggattcactagtgcttacaaattgcccccatgtgtaggggacacagaacgccttgagaaaacttagattttgtctgtacaaagtctttgcctttgtccttcttcatttttgttccagtacattgaaattcgtcaattgcatctttgagggaaaggtgattagatgggtgtgtaagtgttctgatggagaaaaacagcaccggagggactcagaagatgatgtgaacagttcagaacagatgtgtgcatattggtgcatgtaaataatgttgaggtggagtcaaaagtcatgattttatcttagtgttcattactgatgacaacggaaacctgtgtgagaagaatgctgagcgtgtagttaaaactcaggtgtcagtccttgaccacgaaggaacaagcgaacaacattctgtccaagcaagcaccatggaaactgcgttacacctctggggggaatcgaacacaggggcctcggaatgtggacggatgcgacgccagggtagcatggtctactgaccagcaaagagggagcggcaggccatgaaaccagatgaagcgatagaggatggacaggacgggagaggaacacgcgcgagaagggagcgatccaa

SEQ ID NO: 521673 - DNA, 98 bp, Homo sapiens
gttatttgttagcattaaacaaaattttttttgcaaattgggttcattctcttgatgaagctgagcaactgtcccacaaggtttagtttgtacttgaa

SEQ ID NO: 521674 - DNA, 111 bp, Homo sapiens
ccttaatttcaattgtttaccctgaagtgacaggctcacttcatcatgttttgagaagacacggttgctgcctctcaactgaaacaactgaaccagtctagcattaaccac

SEQ ID NO: 521675 - DNA, 416 bp, Homo sapiens
cacgaggggtggcgccgatccgcgtcgcgcaacctgctcgcgaacatctcgaatccccaatcccgaatcccaaatctcgctcctttccttccatcgcgatgaagcgatagactgccggcaccccgcacccggccggtctcatggtccccatcagcttcgagttctatccgcccaagaccgacgagcaacgcgcgcagctcgacaagaccgcggcgaaactgaagaccaaggcgccggagtacgtcagcgtgaccttcggcgccggcggctccacgctcagccacacgccggaagcggtgcagcgcctgcgcagcgagttcgggctggaagcggcgccgcacatcacctgcatgggcggctcgcgcgaggagatccgcaacctgctcaagctctaccgcgcgctcggcgcccggcgg

SEQ ID NO: 521676 - DNA, 463 bp, Homo sapiens
ttctacttcagcgtgaaccactgcgtatagaatcttcaggtgtatagagtctctagcttgaagcctcgctagcaccgcaggtccctagttcgagcacaggtctgtcatagggaagatcctttggcaatggttcaagcggaaatcacacagtttgcactcacgataatggcgtatcatcgcaaggatcacactggtcctaactagcgcaaatcatggcggtctccagtacgtcctggacccattccagaagctccgtgatcagtcataaagtcggataaccctatcatgtctgaaccgtagcagaacactaagcctgcgcgagcagaagcagtatgatagatgacttcatcatttatcgcgtgcactttcataatcatcacacctgacaacatccttgtaaaggtccaacacgatattgttcatgtgcactaactgcagtatctcatacaggcgcacgtgttcg

SEQ ID NO: 521677 - DNA, 461 bp, Homo sapiens
  misc_feature (37)..(37): n is a, c, g, or t
  misc_feature (43)..(43): n is a, c, g, or t
  misc_feature (46)..(46): n is a, c, g, or t
  misc_feature (58)..(58): n is a, c, g, or t
  misc_feature (88)..(88): n is a, c, g, or t
  misc_feature (172)..(172): n is a, c, g, or t
  misc_feature (211)..(211): n is a, c, g, or t
  misc_feature (231)..(231): n is a, c, g, or t
  misc_feature (233)..(233): n is a, c, g, or t
  misc_feature (288)..(288): n is a, c, g, or t
  misc_feature (312)..(312): n is a, c, g, or t
  misc_feature (395)..(395): n is a, c, g, or t
  misc_feature (423)..(423): n is a, c, g, or t
  misc_feature (436)..(436): n is a, c, g, or t
gcacgaggggtcatccatcatcagtgttgcactagtntgaccncanagtttgggaagntagtgtccaggtggtgtgaggatatggatntgacatggctgtgcccagagggaggaatatgtaaaacaagttgatggtttgatattttgccagagatcagtcctggtattcccncaagatcatatggcttgcttcatacctctcttttaattnttcccgtaggtcatgagtgncnctgaatatgcagagtggctgaggaatcattttttagctgaaaccagcattgacancagggaagaattactacttgaatntgccatgaggttggagaacaaacttacattacttggtaggtgaattatgtttgtattgcctgaatggaggattttgaaaaacnctggatattttgaataagggttattttnttccattgttatntaataaacaaatatggttttgccta

SEQ ID NO: 521678 - DNA, 426 bp, Homo sapiens
gaaacgcatccgccatacgtcatgaaaaaggaattttctatgagttgaggagacttgatcgatggctacgccatggctagctttgccaccctccaggccttgctgaaggatgcatctattcagcccccagagcgactggaacatcgtctgaagcattctcgggaagcagcaaaggtgtggctccagtggcgccaccggccagccaggggacagctctgatcgagagcctgcccggccccctggagatctggcccgaaaatggcccaataagcgtataagaaaagaggtgacggtgcaccttaaaactctttaggcagaatgtatttcccacagccccgtttttcatcagcaacgccactgccccttgtaaacagagaccccagtttctaaggacacagaggcatgcagggccaaatttgagccctt

SEQ ID NO: 521679 - DNA, 364 bp, Homo sapiens
gtacaggcaagacaggagctcagttttgtacatgatgactttgaggcacctattagcatccacatagaaatgttggataaactagtctggagttcaggaaaagtctgagttgaagatataatttttttttttttttgggtataatttccccaaagtttccagacatatgtcccgggggtgtctgaggaacagaaggaaggccatgtaatctgagaatgcgggagccaattcacagtgaccggggggcccgtgaagaatggggcataggaataccatatttacagaatcctatcatggtaatgtatgtccagactataagaagggaaacaagtaaggaggcctcatccggtaatccaagggggac

SEQ ID NO: 521680 - DNA, 721 bp, Homo sapiens
  misc_feature (256)..(256): n is a, c, g, or t
cccacgcgtccgattgatacacctgtatttgaactaaaggaagcactgatgggaaagtatggggaagactccaagtcttgatctatgacctgagtggaccaggcggggagctcctgatcccttcagcattatgacctcacggtgtccttattgctcggtatttggcaagtgaataaactgaccaagattaaacgctaccacatagcaaaggtatatcggcgggataacccagccatgacccagaggtccgataccnggagaatgtctaaccagatgtgattttgacattgctgggaactgtgatccctatgatccctgatgcagagtgccgtgaagatcatgtgcgagatccttgagttcactttcgagataggcgactttcctggtccaaggtaaacgatcgactgcattgctagatgggatgtttgctgatcgtgatggtgtgtatctgacagcaagttgccgataccatctgctcctcagtagacaagctggacaaggtgtcctagggaagaggtggaagactgagattggtgggagagacgggcctgtgctacctgaggtggctagactcgcataggaggactatggtccagcaagatggtggggtatccctggtggcacagctgctccaaggatcctaaatctatcccaatagtcattagctaggcttggatgggccttgggagacctgaagttgctcgatatgagtaactgacca

SEQ ID NO: 521681 - DNA, 306 bp, Homo sapiens
attttgctcctttgttgcttatatgctttattcagacagtccatggaatatttcttgagcgtctactgtgtgccagtcagtgtttgtaggagctggagtatagtgtactgaggtgggatcgatagactgtatggtctcaaggaatttatagttttaatgggagggcgtagagggtgaagtcagacctgtaggagatgcagatatacagacatggggcgtttagatggtggaaggtgccttgaggatgatacccatgggatatgtgaagtggtgtcatacctatcaggtctgagttaggaggagcag

SEQ ID NO: 521682 - DNA, 313 bp, Homo sapiens
cggatccttacagctcacagcacacccggctaaaatttttgtttatgttgagacggattctctatgttgcccaggctgatctcaggctcctgggctcagatggtcctcctgcctcagcttccaaaggcacaggccaagttgtagctttgtcccttgccatcatgcccaacaaagaggttctatacccttttaatgaattgactttcataaacttggttatgtttggtgggccaagttctttaacgctggaataagctgctgtaggttgcttggaactaagctgctgtagttgggtacccgagctcccaattcc

SEQ ID NO: 521683 - DNA, 2429 bp, Homo sapiens
  misc_feature (1602)..(1602): n is a, c, g, or t
  misc_feature (1687)..(1687): n is a, c, g, or t
  misc_feature (1725)..(1725): n is a, c, g, or t
  misc_feature (1731)..(1731): n is a, c, g, or t
  misc_feature (1736)..(1736): n is a, c, g, or t
ggcgggcctggacggccgcgtgctgtactggccacgcggccgcgtctggggtggctcctcatccctcaatgccatggtctacgtccgtgggcacgccgaggactacgagcgctggcagcgccagggcgcccgcggctgggactacgcgcactgcctgccctacttccgcaaggcgcagggccacgagctgggcgccagccggtaccggggcgccgatggcccgctgcgggtgtcccggggcaagaccaaccacccgctgcactgcgcattcctggaggccacgcagcaggccggctacccgctcaccgaggacatgaatggcttccagcaggagggcttcggctggatggacatgaccatccatgaaggcaaacggtggagcgcggcctgtgcctacctgcacccagcactgagccgcaccaacctcaaggccgaggccgagacgcttgtgagcagggtgctatttgagggcacccgtgcagtgggcgtggagtatgttaagaatggccagagccacagggcttatgccagcaaggaggtgattctgagtggaggtgccatcaactctccacagctgctcatgctctctggcatcgggaatgctgatgacctcaagaaactgggcatccctgtggtgtgccacctacctggggttggccagaacctgcaagaccacctggagatctacattcagcaggcatgcacccgccctatcaccctccattcagcacagaagcccctgcggaaggtctgcattggtctggagtggctctggaaattcacaggggagggagccactgcccatctggaaacaggtgggttcatccgcagccagcctggggtcccccacccggacatccagttccatttcctgccatcccaagtgattgaccacgggcgggtccccacccagcaggaggcttaccaggtacatgtggggcccatgcggggcacgagtgtgggctggctcaaactgagaagtgccaatccccaagaccaccctgtgatccagcccaactacttgtcaacagaaactgatattgaggatttccgtctgtgtgtgaagctcaccagagaaatttttgcacaggaagccctggctccgttccgagggaaagagctccagccaggaagccacattcagtcagataaagagatagatgcctttgtgcgggcaaaagccgacagcgcctaccacccctcgtgcacctgtaagatgggccagccctccgatcccactgccgtggtggatccgcagacaagggtcctcggggtggaaaacctcagggtcgtcgatgcctccatcatgcctagcatggtcagcggcaacctgaacgcccccacaatcatgatcgcagagaaggcagctgacattatcaaggggcagcctgcactctgggacaaagatgtccctgtctacaagcccaggacgctggccacccagcgctaagacagttgctgctggaggatgaccagggaagccccctgataagccaagagggccagcacagcccttgctcccaggctcctgcctgaaactatctagcacactaggacccaggtggtaccctactcagtggctgagaattggataaagtcttngggaaatgagacaagtactgggcagtgaatccagctccttttccccagcctttccctgtgggccatttggggaaggccagcattncagcctgagatgttcctccctgcctcctgggggggcanaagggntaggntggttaactcctgccgcatccttccctgcctcctggagggacagaaggggaggatggttaactcctgccgcatcctttttcttgtgttcacgtggcattctctaacccagggcagtggttccttcccaggccatgcacagaggctgggtgcctgccagacccacggagggttcgcgaaggaaggggcatcctccttcttgagctgcaagctttagctgaggcagtaagtcacacagtagttagttcagcctgggctggcacataagtccccagtgtccctgttgagaggggaaagttgcctgctggttgaaaaactggcttttcctttctcgctgcctaatttcactctcagagtgaggcaggtaactggggctccactgggtcactctgagagggttgtggctctggttcttattaaaccagggccaggtgcagggctcacacctgtaatcccagcactttgggaaggtcacttgagctcaggagttcaagaccagcctgggcaacatagtgagaccttgtctctggaaaacaattagctgggcatggtggtacacacctgtagtcccagctacttgggaggctgaggcgggaggatggctttagcccaggaggttgaggctcctgtgaaccctgatggcaccactgcactccagcctgggtgacagggtgagaccctgtctcaaaaaaaaa

SEQ ID NO: 521684 - DNA, 561 bp, Homo sapiens
attcgcggccgcgtcgacaaaaagcaggcattgctattttaattccagacaaaacagactttaaaccaacaaagttcaaaaaagacaaagaagcgtattacataatggtagaggaatcaattcaacagaagacctaattatcctgaatatatatacacccaacacaggcacactcagattcataaagcaagtgctttgagacctatgaagagagtgagatagctacacaataacaggaggagggttcaacgccccacagagcacattagggagatcatcgaagcagaaaactaacgaagatattcaggacctgaactcaaccaaatggacctaatagacacctacagaactctccacccaaaaacaacagaatatacattcttttcacgtgcacacgggtatactctgaaattgactgcataattgtccataaaacaattatcaggaaaatctaaaaaagcaaaatcacactaaccacagaatcagaccacagcactataagaaattaagtcaatactaagaagaaaactcaaaaccatgttattacatggaaaataaaca

SEQ ID NO: 521685 - DNA, 1117 bp, Homo sapiens
  misc_feature (54)..(54): n is a, c, g, or t
  misc_feature (203)..(203): n is a, c, g, or t
  misc_feature (212)..(212): n is a, c, g, or t
  misc_feature (377)..(377): n is a, c, g, or t
  misc_feature (392)..(392): n is a, c, g, or t
  misc_feature (404)..(404): n is a, c, g, or t
  misc_feature (413)..(413): n is a, c, g, or t
  misc_feature (426)..(426): n is a, c, g, or t
  misc_feature (477)..(477): n is a, c, g, or t
  misc_feature (491)..(491): n is a, c, g, or t
  misc_feature (495)..(495): n is a, c, g, or t
  misc_feature (507)..(507): n is a, c, g, or t
  misc_feature (547)..(547): n is a, c, g, or t
  misc_feature (550)..(550): n is a, c, g, or t
  misc_feature (555)..(555): n is a, c, g, or t
  misc_feature (559)..(559): n is a, c, g, or t
  misc_feature (572)..(572): n is a, c, g, or t
  misc_feature (574)..(574): n is a, c, g, or t
  misc_feature (589)..(589): n is a, c, g, or t
  misc_feature (609)..(609): n is a, c, g, or t
  misc_feature (615)..(615): n is a, c, g, or t
  misc_feature (625)..(626): n is a, c, g, or t
  misc_feature (630)..(630): n is a, c, g, or t
  misc_feature (702)..(703): n is a, c, g, or t
  misc_feature (707)..(707): n is a, c, g, or t
  misc_feature (712)..(713): n is a, c, g, or t
  misc_feature (717)..(718): n is a, c, g, or t
  misc_feature (720)..(720): n is a, c, g, or t
  misc_feature (722)..(722): n is a, c, g, or t
  misc_feature (728)..(728): n is a, c, g, or t
  misc_feature (1116)..(1117): n is a, c, g, or t
gcggcagcgaaagcaaaatccgatctctctcccgggggagcaaaatggacgaanggcgaccccccaggcaggggcgctgggtgccttgggaatccgaggaatcccttctctttgccagtcggaggggactagatggagccgaaggggccggagatgggccgagcgctgccccccgggggtcctcggcgccgggcgcagcttangagcgcagngcagcaggctccattcccggccgccgccgctcagcccattacgcaaacctggcgggtccaaccaaccccgctctgccgccgctgctggaacccaggaggcgtgcttgcaggcttcgggcactacgcggggctggaaataccacgcactgccccttcgcctagacncccgctcgggccacncgggttctgccntcaaagctngtagctgccccanacttgggggtggggggaggggaaggggcgaggctggcgccccctcccgctntgggctcccgcgtncgtngcagcagctgtngccaaatgaaccccggaatgcggacgtgcaaaccctccanccnaaccncagncacacacgtcgcngncggagaactgagaanggggcgctgggtccgaggtnctgganaagcaagaanntcanctgcaaacaggcagtcctcagctctggacttctggatcacgacgtcgatatccttctgaattcggtcttgcnntgancacannccannanantaatcntgggaacagaagcagacgctatgtcacgccagaagaggcaagagaaagacagacaagcaacaagaagaaaggagagaacacagaagagaagagaaaaagggggggcggaaaacagaggagggacgacacgaggacgaacacgaggataagagaggaccgaaggagggggcaaaaaagacgggaggggcgagagaagaggccgagcggacaagcggcggcacggtggaggagcaacacggagggggacaagtgaacacacacagaaagagggcgagcacaagggaagaacgcagagacacgggaagacgggacaaaaaggagaggaaagacgaagagagcggcggaggcgagacggacgacggagaagcgagcgaccggcccagcgtcnn

SEQ ID NO: 521686 - DNA, 146 bp, Homo sapiens
gcccagcaaacatgcaatcatgtcgtgccagctccagcaatcatgcgttccaagctgctggcatctccattgccccggggccggcacattgggtcaccggcagctcgcacattcgtcacatccatggtccattcagctggtttccc

SEQ ID NO: 521687 - DNA, 131 bp, Homo sapiens
aatgaaggtaatggagggtgatggtggctatgatggtggggatgatgaggctatgttgttttttgtgtgaattcttcgataatgggcccatttgtgggcaaaaatgcctggttacgcgggggcaggcctcc

SEQ ID NO: 521688 - DNA, 108 bp, Homo sapiens
tgatatcatcaagagaaaaaaaagaccgacaaatctcttgtgcgctaacttttcaaggtggccttgtgaaggaaataatataccctctattactataatatataagac

SEQ ID NO: 521689 - DNA, 759 bp, Homo sapiens
  misc_feature (49)..(49): n is a, c, g, or t
  misc_feature (280)..(280): n is a, c, g, or t
tttcactccacgtagtccctaccctcaggactggtgggagaagaggctngctcagtgcctggcacttagtaagcacgcagcacatgccagccgctgctggtactgctctcatttccaagagcctgctacgggtgaggtgcgtgccgggtgctttggcacggggagcctggtagccctgggtctctcctctctcaaatgatacagtccaagcacctggatgatgagtatgagagcatgtgaggaggagagagagactcccgtcggtcccacccacctggangagcatcacagccctcattgacggtgcgggctcagttggcccctcggccccccgaatggcccctgaaggtccctaagaatacccatcataggctactgtacctgtgtcctggcccgccctctaactgtgacccttctgcgggacgagggcacaagtaagttggtgaatatacctgactgattaagggactacaatgaagatcctccgatcaatgcgcgcaagactatgctgaaggatgtcatcagagaatatgatgaaccatttccctgagatcacttgaacgagcaacgtacaccctggacaaacgaagttacgggactccaccctgacaggagatcgacacaggacacgaacacgctgttatcttcttgttctgcacacgggacttcctcagtctcgacctccttgcgaaaacatccaaggatcgcgtcccaggctgagtctcctcttgctgattctgggcgtcatcttcattgaat

SEQ ID NO: 521690 - DNA, 122 bp, Homo sapiens
ttatcagagttgtgcacagcagtctacttctcctatattttcccagtcctagctgctgtgattaggaacgggatcagaacgaagaaaggggcgttttgggtatatgggtatatggcaggggg

SEQ ID NO: 521691 - DNA, 131 bp, Homo sapiens
tatacctggcccgtattcatagtagggttctgaaaccctattacgcatgagtggctgtgtttccccataacctcaaagattgaggaagtcaggttttggcaaatatttgtcaacctactagataaaaatgg

SEQ ID NO: 521692 - DNA, 366 bp, Homo sapiens
tgggcttctggagctgtgcagtagaaactgcagctgtcttcatagcgttaggaattatccgagtttctatgatgaaaggaaggcaaaagaagccacttattaccccactggtgtcattaagggtgccttctctcttctttagcaagaatctaatgttgcctctaaaggaaatggcaattctcaccatgaagcctcgtttcgattactcctgtaattttgcatgaatgtgaccaaatgttttctgtcaaacctcacctcgtgctggtttctaaatcctaattcattgtgaacagaacccaccatgaactagctagctcctcactggaaaagtcaccaaacccacagtgctgaaaaggagtcattatc

SEQ ID NO: 521693 - DNA, 148 bp, Homo sapiens
aagagggggtttcattttttcccacagggtggagggcaggggggcgtttttggttccctgcaccctcaccctcccaggttcaaaaaattttcctgcctcaccctccccagtagttgtttttaaaggggcctgcccccatggttggtta

SEQ ID NO: 521694 - DNA, 553 bp, Homo sapiens
  misc_feature (92)..(92): n is a, c, g, or t
  misc_feature (193)..(193): n is a, c, g, or t
  misc_feature (196)..(196): n is a, c, g, or t
  misc_feature (256)..(256): n is a, c, g, or t
  misc_feature (260)..(260): n is a, c, g, or t
  misc_feature (265)..(266): n is a, c, g, or t
  misc_feature (304)..(304): n is a, c, g, or t
  misc_feature (306)..(306): n is a, c, g, or t
  misc_feature (312)..(312): n is a, c, g, or t
  misc_feature (331)..(331): n is a, c, g, or t
  misc_feature (358)..(358): n is a, c, g, or t
  misc_feature (390)..(390): n is a, c, g, or t
  misc_feature (495)..(495): n is a, c, g, or t
  misc_feature (497)..(497): n is a, c, g, or t
tctctcgcccctgggtcctgaaccgtaatcctatgcccccactggaagaatttctacgtagtgaaccccctggcattttaaagtaaccctangcagaaggctctggtgattggtggagaggcttgtatgtggggagaatatgtggccaacacaaacctggtccccaggctttggcccaaagcaggggctgttnccnaaaggctgtggagcaccaagttgacatctgacctgacatttgcctatgaacgtttgtccncctnccccnntgagttgttaaggcaaggtgtccaggcccccccccccnangtaggnttttgtgagcaggagtttnaacaaccctgagccccaggccccaagnagggtgctggctgtaggtgaatggtagtgganccaggcttcccctgcatcctggccaggggacggagccccttgcctttgtgccccttgcctgggggcccctgtgcttggaaaaaaaggggccggggctggcgctcncnttcaataaaaagtaatggggcctttttttataataaacatggattccctgtgttta

SEQ ID NO: 521695 - DNA, 370 bp, Homo sapiens
acctcatagcggttttgagaacaccagtctccactcggccaacaggaacaggtaccaataccaccaatttcgtagacaccctggatacgcaggcgcaatggctagtcagttggcatgagttggtggtatgatgcagtccatatcctcaagcagcgtggattccaccggcattgacatccttagcgggtgactttccatccctgtaaccaagacatgtcatctctcggctccagcatgttgtcaccattcccatcagacataggcacaaatgctactgtgtcgcggttgtatccgattttcttacagtaagtgctgacttcctttacaatttcctcatatctcttctggctgtagggtggcccagtgaaat

SEQ ID NO: 521696 - DNA, 242 bp, Homo sapiens
  misc_feature (61)..(61): n is a, c, g, or t
  misc_feature (149)..(149): n is a, c, g, or t
tgcctaggctggtctcaaactcctggccttaaacgatccttctgcctcggactcccaaaangttaggattacaggtatgagccactgcgcccggccctcctgtcccttatctgggtctcccaaaactggattaagattaggtggcactnccatttgctcttgtagtcctctggtgcttcacctactagatcttcgtcaaattctctgaattcaccactagcatgaactcctccagagcagga

SEQ ID NO: 521697 - DNA, 375 bp, Homo sapiens
  misc_feature (359)..(359): n is a, c, g, or t
cataactgcatttgctaaaggaagacgttagcacgatacggtaaatacagttacagagactacattacgaggacgaacccaaacgccctcatttgtctgctgtcaagtcagtgcgattgccctggatgcttctcccggtcatccaggcctaatgtatgaatcagtactcagccagccgacccagaatgcatctgtgtgcaatgtttacatgctctcagcttgggagagaagggttgttttcaaaacacaggaaccataattgagttaattagggcatgaaaggaaagacgaccctagagctcaggcatcgcgttagagccacactgttatattaataacagtgatgataataataatantaataataataataat

SEQ ID NO: 521698 - DNA, 704 bp, Homo sapiens
  misc_feature (45)..(45): n is a, c, g, or t
  misc_feature (102)..(102): n is a, c, g, or t
  misc_feature (117)..(117): n is a, c, g, or t
  misc_feature (123)..(123): n is a, c, g, or t
  misc_feature (148)..(148): n is a, c, g, or t
  misc_feature (157)..(157): n is a, c, g, or t
  misc_feature (168)..(168): n is a, c, g, or t
  misc_feature (170)..(170): n is a, c, g, or t
  misc_feature (200)..(200): n is a, c, g, or t
  misc_feature (205)..(205): n is a, c, g, or t
  misc_feature (258)..(258): n is a, c, g, or t
  misc_feature (263)..(263): n is a, c, g, or t
  misc_feature (269)..(269): n is a, c, g, or t
  misc_feature (304)..(304): n is a, c, g, or t
  misc_feature (335)..(336): n is a, c, g, or t
  misc_feature (351)..(351): n is a, c, g, or t
  misc_feature (353)..(353): n is a, c, g, or t
  misc_feature (393)..(394): n is a, c, g, or t
  misc_feature (514)..(515): n is a, c, g, or t
  misc_feature (537)..(537): n is a, c, g, or t
  misc_feature (556)..(556): n is a, c, g, or t
  misc_feature (572)..(572): n is a, c, g, or t
  misc_feature (594)..(594): n is a, c, g, or t
  misc_feature (683)..(683): n is a, c, g, or t
gccgccgccgctgctgccgctgctgccgctgctgctgctgcaacngggcgcgagtagcggcggcggcggggcgcgcgcggaggtgctgtaccgcagcccgcnctgcacacccgagcncctggncgcctgcaggcccccgccggtagcnccgcccgcngcggaggccgnanaggccggaggcccgcatgcaaagcgcgganacgtncgggagcagggctgcggctgcagcacggtgtgcgcacggctggagggcgaggngtgcngcgtcnacaccccgcgctgcgccaggggctgcgctgcaatncccacccgggcaccgagcagccccagcaggnncaggtcatgggcgangncactagtagagaagcgccgggacgccgagtatggcgccannggagcaggtagcagacaatggcgaagaccacacagaaggaggcctggaggagaaccacgtggacagcaccatgaacatgttgggcgggggaggcagttctggccggaagccccttaagtnngggtatgaaggagctggccgtnttccgggagaaggtcactnagcagcaccggcagangggcaagggtggcaagcatcancttggcctggaggagcccaagaagctgcgaccaccccctgccaggacttcctgccaacaggaactggaccaggtcctggagcggatttncaccatgcgccttccggatga

SEQ ID NO: 521699 - DNA, 424 bp, Homo sapiens
attgtgtctcaccaaccgggtctactatccgtcgctctggggacacacgtgatatcccccccatctcccaggctctccaccctgggccaaggagtcagagcatcgggccgggtgtggtggctcacgcctgtaatcccaacactttgggaggccgaggtgggcagatcacctgacgtcaggagttggagaccatcctggccaacatggtgaaaccccgtctctattaaaaatacaaaaattagccaggcatggtggtatgcgcctgtagtccccagctagtttaggaggcttgaggcaggagaattcggcttgaacccgggaggcggaggttgcggcaagccgagactgcaccactgcaatccggcctgggcgacagggcaagcctctgtctcaaaagaaaaaaaaatctacacatccctcacca

SEQ ID NO: 521700 - DNA, 400 bp, Homo sapiens
cgcacccccaccgcaggatcctggacaggttatgctgtttcatgctttttaaaaaaaaaaaattgttgtaaaaaacagctggtccatggtggctcacgcctgtgatctcagcactttgggaggccgaggctggaggatcacttgaggtcaggagttagagaccagcctggccaacatggtgaaacccccatgtctactaaaaatacaaaaattagccaggcatggtggtgggcgcctctagtcccagctactcaggaggctgaggcaggagaatctcttgaactggggaagcagaggttgcagtgattcgagattgcaccactacactccagcctgggcaaaaacagtgagactttgtctcaaaaaaaaataataaaaataaaattgtggtaaaaaaaac

SEQ ID NO: 521701 - DNA, 163 bp, Homo sapiens
tcagtagatcacgggcattctgctgggagtggttaccacagatgtcccagtgaaagaacttctgaagaccatccccaaatacaagtctagggatctcacggttatcgccttctgcaatcacaagatatatgggcatatgcctgacgtcatcctggacctcagc

SEQ ID NO: 521702 - DNA, 861 bp, Homo sapiens
  misc_feature (12)..(12): n is a, c, g, or t
aacatttataanctcgccttcccgtgtgggtccactcagcacttttcacttgctttaaccgcgtgtggcgcctatttttccagagcccttacgacgataaaacttctctgcgcctcataaatcaattcgtggtcaacccccggtatttttcgttatagtccatactcgcgagtttcctgtaccatatgcaggatctctgggtcacaacggttcccatttggaaagcgccctacgccccctctgataatcaaccatgccacaaaatctggcgccggcagtaccataaccacaatctttcggcccccgaaagcggcccccgtgatcttataaaagggggggaccccagacggacttccacatcgttgaagcgcccggccagcaaaatatttattgtctacaaatctcgccctttagggaatatatgctcttctacataacgagcataattggcccttctctgtgcagcccaatcaaatactgtggaactgtccatagcctcgtgcgctgaccaccttgaaaaaagcaattctagagattccttgggaagtcgaaactcgaatttatttctcttctccgggcggcacccacccgcctttgaaggtactcgcccttggggcaaaataacccggccgacagattgcagatttcctgagatatagaacgcgacctatgacatttgtagacgccccgccattctgtacaacgccgcgagtcgctcccggcccgcttctattaaaacctgtgaaccaggatatacttgttacaaaagaacccgccattacagggaaacaaaaaccatggggaacacgcatgttccctcattggacaaaaaacaaaacccatttaacaacccacaaaaca

SEQ ID NO: 521703 - DNA, 787 bp, Homo sapiens
ggagagagacagagagagagagagagagagagagagagagagagagagagagagaggtggctctccctgacagaggcgtgtgtctccgtgtgtgtcctctgtgtgcagcaaccggagctggatcgatcgggtatcccgaagctgcacctctcgccccaagtggactcgggcccctcgtgacgactcctagctagtaagccgggcgatgtcgccagagggcagggcaggccccacccaaccagcaacatacgcggggcgctcttctccagcagccggcgaggagcctatcgcagcgtggctcatacggtgcacgctctctccgtgctcagtcgtgcgagcgtgcgtacgctcctaatctttcttaggcggggccgcctcctggcagccctcgctagctagcgggcgttgccgccggcaggcggagcatagatagatagctcgcttatcgaagaactaggtcgctcgatagaggaatcatacatcaaccgagggcgcgggagagaagtcgcgcccgcccgcgagtcttctcccacctatatctacgtacgcacagcgagagcgctgacaacaatcattcgtgtgtggggcgtccttcattacctccttcgttattctgatccatagattattattttacttccccgcagagagggaggacttacctaaatcaatacgctccactacgcgtggtgcgttgcctgccctgaatgattattgtgtgcgatgtccgagatggcgcgtgggagaatatgtctgcgttgggcccacccttggatcccaccaaaca

SEQ ID NO: 521704 - DNA, 929 bp, Homo sapiens
ggctgtaggtggcttcgtcttcggttatacctcttccttcgctaatcgcctcccggcatctcgtacagctcatcccgtcggccgtcattacttaacactcgaactaccatgcacttcaatataagctcgcagatgttctgatggagcagatacttcgtaagttgactgtggacacattgccaacacaatctgtgatctgattaagaccgtgttggaagatttgggaatgggatgatgaaggagatgatgacccagttcctctaccaaatgtgaatgcagcatatattaaacaaggtcattcagtggtgcactcacaccgacaaggatgagcctcctcctcctgaccgactgatgtcgaacacaagaacatcgcgaacagatgatatccctgtgttgggaccaagaattcctgaaggttgattcaaggaacactttttgaactcgttctggctgcaaactacttagacatcaaccggtttgcttgatgtacatgcaagactgttgccaatatgcatcaaggggacacactcctgaggagattcgcaaggacttcaatatcaaacccatgattttctgaagaggaggaagtccaggtaccgcatagagagagcaggtgtgtgaagagcacgtgcactgtgcgcctgacatggtatacactgtaggtatcgtccaggttactcgtgcccggtctgcataactggtactaatggaaccaccagtcgacaatggcacacagccatgggttagccgaacatggacaccttgggtgactggcacagatccaagtacggacggcttcaaacgaggacacctttacggcgcaccagaagcggcccaaaaggcggggcccccatcggacgtcggcgttgtcgcaccatgccgacggcgggaagcaaaaaaaaggcgcgacacaaacgacgcacaaacgc

SEQ ID NO: 521705 - DNA, 350 bp, Homo sapiens
gggagtgctgcgacggaatgtctaaaatgaaaatgggagcctctggtccccgtttgcagctacaactcaagatgtctacagaatgtggtcagtgtgacatgtgcaggagtgaggggcagagggacaagacgggcagcaaggagctcctggcgacagtatcctccccgccgaccttcacttcttggccttgccctgcgcagccacagcttccatggcttagcgcaccggctatgcatcccacagaaaccgcatgggcttgacaggcatcaagatcttgaccaattcatagacaatgacaataccagacggcaggttcagctccatgatagcctcttcagagagaccctcca

SEQ ID NO: 521706 - DNA, 1043 bp, Homo sapiens
agcggcccgaagcgtcccagacggcggagaaggcgcctgcgtcgtacccagggtggctgggcgtaggcatgcctggcgggcggcgcggagagagagggcgcaggggtccttctggtccgtcttccgctccccctcccggacctttatcttctgtctagggccccagcctggtcgccagtgtcgcctgtcgatggctcgtgtttatccttccacctgggccgtgcgtcggtgggctgcgtgcgcatgggggccccttacatggataatcgccatgtcctccagggactccgccgctccaggactcgtgcggcgagtagggaactgtactgagactgacgtaccatagggcagggggtgatgttggtacctcgtaaattgcttggtgtggacaactgtgcagcgaatgatgagcccgcgccgggagccttaagacccgaggatcgatgagcaggccgccagcactggcccgggagatcggcccgctactatctcgcccctacgctgactgtcggtcgcggcgccagagaccgcggtggttatttcctgtccccttgcctgtcgggaagcaagtattgagcgaacgcaaccttagatacgctttggacttttgagggggtcgcgacctgcctttccaggcgtctctccggcggcttctgtcccgcgtgtaccaggtggagcctgggttgacggctgcctgtggcctggaggagggggagcatgttcgggggtccctggccaggcatgaatcagcgttaaccgtcccgtcaccctcggggacacccaaacttgtttcaagaactggtttgacagcgcgtggtgactcggcaggtaacggttaagcttctaggaaccaagatgaagcctgtggctttccctggcatgggaacggggagtggggggtccctcagtttaagtgaagggcaggtctcgttacacaaggggtcacgggaatgaaccttgagccccggctgggttccgtttatccggttgtattgaacccaaagcgagttgctcatagtgttgggaactcagataatgcctct

SEQ ID NO: 521707 - DNA, 270 bp, Homo sapiens
cggatacgcctgatctctatgagggctatacccttcctaactatataaagcactaaaattcactttattaattttttttattttgagatagagactcactctgtcacccaagctggaatgcagtggtgcaatcttggctcactgcgacatccacctccggggttcaagtgattctcctgtctcagcctcctgagtagctgggattacaggcatgtcgcaccacacccagctaatttggtatttttagtagagatggggtttctccatgtt

SEQ ID NO: 521708 - DNA, 795 bp, Homo sapiens
ggtgtggcttggctgggccctgcactcggagcagccggctggacccgccgcggccgagcaatgaggagtacaccctccgggccagcgactgtggagggtgtactgggtaccccagcagtgacagcccaccggcgctgcgttcgatttctcgctgggccttagctgccttccctcagggcagggctcgggacctgcagccctgccatgcctgagcctcccaacccctccgttggctcctgtgctgccgagcctcccggatgagcgccgacccctgctccagagcgcccagtcccatcgagcacccaagggctgaggagtgcgggcgcgcggcagcgggactggcaggcagctccacctgacagaccccggttgagggatccactgggtgaagccagctgggctcctgagtctggtgaggacatggagaaccttgatgtccagctcaagttgcaagtccgataggcacttgactttaaccgtgaagaattaccttcagtacattcaggttcaggtgatcctcccggctcagctccctgagtagctgggactacagacaccataccagcgaaacctgctacgtttccgcatatgctctggcgagatgtggtttcaccatgtatgaccaggcctgatcattgaaatccatggggtcaagcaaagctgacagttctcagatctagtaggacagtaccggaaatacagatggaagaggcctcagaaaagttacaatcatggtgggaagatgactgggcagaaagggcatagacatagaatggagataaaagagagacagaa

SEQ ID NO: 521709 - DNA, 1792 bp, Homo sapiens
tattatatatttaatattaatttgaatatattataattatattattattatttattatatattatatatattattatattatattttttttatattattatattaatatatatctcatctttcttattactttatattttatatttatcatatattctcacttccctcttcccctcttctctccaaccaacccacaaacacaaccacacacacaaagacaccgcacacagcccgcaccccacccaccagacaaacacaaaacaacaaacaacacacaaagacaaaaacacacacaacacaccacacaacacaaaacaaaaacaaaacacacaacaacacaaaccacaacgaacgcgagcaccgacccacccccaaccaaacacagacaccgcacgccgccgcgcgccacccccaccccacaacaaaaacacacacacccagcacaagaaagaacgcacaccacacagagactaaaggaccccgaacgccacagaacaaggagagagcagacagaagaggaacgagcaaccaaaccagaagaaacaccccacaaacaacacccgcgaccccaaccaacgcacccccacccactgaagacgacaagagacaaccgaaggcaccacccagcaagacacaccacaacagcagacacagaaagacacacacgacagccacgagcacgccacacagagtgcagaggagggctcccacagcaacgagagagaaacaaacgacaccacacccgagcacgccaccacgaaccagacacccccatacacgcccgacaccaaccacacgccccgccacgcacactcacctcccagccacaaccagcaacaaaccaccacaaaaacccacaaaaccacaacgaacacacaagacacagacaacacaagacaaaaacacaagcgaacgacaccaccgcacccacaccaacaccgaccacaaaccacaacccaaaccacacacacccaccaacaaccacaccacacgacaacaacccacccacccgaccacacaccaccacaccacccacagacacaaccccacacaaccaaacagcccacaaccccaccaccacacacaaccacaccacacacagcacgaccacgcaaacaccgaccacccgcaacccaccaccacacacctaccaccagagccaaccacgaaacaaccccagcaaccacgcacacaaccacaaagcaccacacaacccaaacacaccacgacctactgccccaagccaaaccacacacaccacgaaaacccaccacgcacacaacacgccacacaaccacgacaccaccaaacccaagacaacaacaacagcacacaaacacacaccaacacgcaccacaccacagcacacaaacacaccaaaccacgcccccccaccaccacacccgacaccgcacaacaaaccgaaacaccacaagaacgccaccacccaaccacacacagcgaaccaacacaacccgcacaccacgaccaccacgaacgacacacacgtagcccaccgccacccccaaacaccacatcaacggacatcagcaaacgacacacacgccaccacaacaccacacacacagcaccacaacacaccaacacccacaccacaccgaccaccacacccgcaaccacaccaccccaacgagagagcaaccaacgccagcgaccaaggccacacaccgcacacacaacatcaccccaacacccacaccccaccacccacaccaccacacacaacacacaccgaccaccaaccacacaccccacaccccacaccagcacc

SEQ ID NO: 521710 - DNA, 170 bp, Homo sapiens
tggggtgcatgtcctgacaaccggggtcgcattcaggattatatgaatagcgaggtgctggcccatatggggatcaaagcctgtaggggtttcaaaactcttacaggagatgtaaaacccagaaactgccttgtaaagcacgtagtcaatgcggacaccaaagggaaatg

SEQ ID NO: 521711 - DNA, 768 bp, Homo sapiens
cggtaggtagcgaggctgggtgttaatcggccgaggcgagccgctggccccggagtagcagcgtgggaggccgggagcccgcgggccggagtctggccggccgaggcgtgggggctgcggggcctggcccttccgtgggggcgagttgagcgttgtgggcgcgcgggggggcgaggcaccaggttcagccagcagcaggagcagcagcatccgagctaaccagccagcgagcgagcgtccgatgctagttacagctagcgagcgagctccatgctagcagcaaattgcaaggagcagcagttactagcatgcgtccagcgagctgctccagcgagtcccctagcagaggccccgttgcgcgcatggctgtcagccggggggctcccgcgcgcggcagcagcacacagcgaggccgcttctagagatcgtcacgagggccacctaactcgagtctcccatcctcgaacggcgtccgatgcttgcgagagacgcttttgcttttaccagcgagttagcaaggtaacctccgaggctatggcatggcatcctccagggctcgtaggccccatgcctcagtagcccccacagattggcgcactccaccagttctgcacacagttgctttccgccaggcgcactcgcctagtccttgactggtgagctcctcctgttggtggtcccatgaagccttccgagttccacctttctggactggaaccccagaaggagggcggactgctcttacagccccatcgcgggtcgtcgccg

SEQ ID NO: 521712 - DNA, 323 bp, Homo sapiens
  misc_feature (113)..(113): n is a, c, g, or t
  misc_feature (224)..(224): n is a, c, g, or t
  misc_feature (250)..(250): n is a, c, g, or t
  misc_feature (293)..(293): n is a, c, g, or t
aaaaaggccaacagagcccagctaaaaacataagtccccaggcctaagtcaggccccttaaaactgcacctaaatcagatccttcttagaaattcctaaggctcaatgttgtntggaagattctgagaaagaaaatagtttccgatctttgggattcccctgagatggtccaatctgcaaaaagttcattgccatttccatcaaggacactgagaacaagagtnttatccgggttggttcctgggaattnagaagcttcagcagggcttccgctgggaacttaggattcaggntgtggacaaccccaacctgggaccatctgg

SEQ ID NO: 521713 - DNA, 432 bp, Homo sapiens
ttgttcctgcatcgcgacacccagtaatgtgccatgtgccatggtgtcggttgagaaagacatgcggcgccatagcatcaagacagcctagtggctgcaggttaaaaagaccagaagcgtgcccataatccatgcaggcaacagcagttgtaaccattccatcatgacttaagcttccggttcagggtgaatgtgtgggcgagcgtcatgctgacaaggcgttgcactatcaccatgtgcgcagtgatcatgatgatgttgatagaacacgcggttagtacccaaaaatggcttgatactcagggtgttgttgcacactttcaggcccgccactacaacaaatgtgtatatgcaaacacaccacacgatgagttccttgcatgacccactgtatatcatgtgaaagcatgagcacagcagaaccatatgtgg

SEQ ID NO: 521714 - DNA, 1107 bp, Homo sapiens
gggagcgccgcacctacaccagaccaagaccagatccctgaggtcctgacagcgcccggccagatccccacgcctgccaggagcaatgccgagagccatgccggcctggcgcactcctgactccgagcagtctctgtccttcgaccctgagcccctgctgccctttcctgggacccctgctccctgcgggcagctgcttgtcaaccatgcctggccatggcagacccctgtcccagctgtgctgctgcctaccctgcatgctgtgggccgcatggcctagctccactccagcatgtcgcccaccgcgcttcacccgtgcatgcagtgacgaaggtgacggaccatgcaggagcctcaaatgatccgcttgcgcgggtctacagatcagacacgtgttgcagctacgcctggacaaacctggacgaactgcatgtggctttgcgaccattcagcatcaacccgagtcttgacagagcgtggtcaagcctgcggagagtgtccaggacatcaaaggcacgcactaacgaggcacgacgctcgagggatgcctgcaagaaccgcttcgaactcaggtaagaccaacggaagcagcagccccgaccatgcaaggctgcgagactgagtcaaaaacgttgcggttgcacggagttccaagggacgcttcgaaacgcggcagcaaataaccaaaggcacaggacggggttagaccctgcatagagacggactccaacggactcagggcatggcacagggaccccttgagtagggactactgcattgatacgttcgcacagggcaggtcccggcaacgtgaagacaactgcctcatcaagatgcacgaacgacgacacgccttgtgagagcgcgtagcgtgcaatcgaattccttgaatcgaggtgacacaagcgatgggaacacaaagccctattgaacgagccagcacacattagagcgtgaaatggccaacagtaaagccgaaactcttccacggcgactctgagaatggcctggacggtcagaggtttgcgaaatgcatggacaaaccagtgacgtgaccagcaacacaatacacgagcgcgtcgacaccctggacacgttatccgcaga

SEQ ID NO: 521715 - DNA, 170 bp, Homo sapiens
ctgatgccgtgaggtgacctagaggatcccttccaccacgaggaatcagtccctcagctcctggctctagtctccaccgacaaaagttcagtcgtctctgttcgttggagggcactgtctggccccctcaggttgaagttcaacactcctcaatgagcagctgtacctca

SEQ ID NO: 521716 - DNA, 121 bp, Homo sapiens
cactcctggtcctgcatgctgtgcctgggtaatgtgtcacagtgcgccctgtgtgctggactgtccacacggttcacaccttgtcacccatcaggcctttctggctcctgatagggtggcg

SEQ ID NO: 521717 - DNA, 408 bp, Homo sapiens
  misc_feature (12)..(12): n is a, c, g, or t
  misc_feature (120)..(120): n is a, c, g, or t
  misc_feature (166)..(166): n is a, c, g, or t
  misc_feature (261)..(261): n is a, c, g, or t
  misc_feature (293)..(293): n is a, c, g, or t
  misc_feature (363)..(364): n is a, c, g, or t
attcgcggccgntacgacacggctgacgagaagacgacagaaggggaaccatcacctgcagaaacaagtttcacaaaagaagcctacaagaatacatcaagattactgaaatcaatcaanggaaactgaagaacagagaccagaaagagtaaaaccttttatgacngggctgcagaacaaatcaagcacatcctgctatttcaaaaactaccgttcttattggtgacatgatccagatggctggttgctctattggactancgtgaggatggtgtgaccccatatatgttttnttaggatggttagaatggtgtacaatgggcattatttggatctatcacctgtctcatctggctctgctgnntccacacacaccggactaggccatgggctgtgtctctggccctc

SEQ ID NO: 521718 - DNA, 847 bp, Homo sapiens
agcggtgtgtgccaccaagcccggcgaggtcttcccaattctgatggcaaggttgtataaatattcaccactatcttattcttgtacttttattatttctttctaaacagttaaatctgtgatctggctgggcgtgttggctcttgcctgtaatcccaacactttgggaggccaaggtggatggatcgcctgagatcaggagttcgagaccagcctggacaacatggcgaaaccccatctctactaaaaatacaaaaaaaaaaaaaaaaaaaaaaattagctgggctgtggtgggtgataggacccgtggtggctcctcagctactggggaaggctgaggcagggggcccgggaaggcagaggtttgcaggtgagcgtgagaatagcaccagccggggcaacggagcgaagactcgtgtctcaaaaaaccaaaaaacaaaccaaaaaaaaacctcttcccaaagagaaagttgggagactatttctcgtgtttagaaaaatttcgaaattgggttggggttaacattttcctttttttacccaagaaggactaacatctcttttattaatttttataccccttttcagataacttcttgttgtttcagtgtttctctcgaaccatatctttccaagcaaagagggagaagtcttacatggtggtgggtcaccatattggctacacgtggaacactcctaattaacttttaacacacgtgacaccatcttaactccataccgacttatatactgacctttctaaaaaccttttagaccttttgtggctcgctgtaaccccttttcttttcagacacctttattggtttaaaaacatttatgttcgccc

SEQ ID NO: 521719 - DNA, 281 bp, Homo sapiens
gagtactataacggtctaaggtacgtactgatgataatcggagaggcatgactttgttgcaagggcgcggaagcagaggctgagaataaggcggcagcttgactgcataaatgaatcgagatgggctggtggaaggaacaagaaccgttaacacgcacatgtataacctggctctttgcgtgagctggtgagacccagcgccgaccatgcaccatccaggtgacccgacccatccgtccgcagatagagaccttcctagaaccattacccgtgtggagaaa

SEQ ID NO: 521720 - DNA, 1747 bp, Homo sapiens
gctgctgtactacccaactattatgcaagactcctggtggctggcagccaccattaatacacacagtgtccctggctcagcagccctctaagcactcagtgcccaaaacacgttactggcacgatgggcgccaaatcgttacgcctctgactcccctgacgccctcaataactacctctcaccaaaacgctctgacacactgtacagcaccgactgcccatgcacacactgaaccacccagcaccaggaatcagcgcaacgcgtggctccatcacatggtccccctctcgacgcgccgcctgccgcacggcacgctcctgcccctacacaagagcaacgccctgacaggtaccccgagtaccccaagggctacaagcaagagccagtccagcaagcagaccgtcaagcgctgcaacccttcacgccagacctgcaccacgctggcacatgtaggcaaggaaccccctgcatcatacaggccactgcagcggcacttgtgcgctagccccagcacggcacgcccatacacggaggcaccacgggagacacgctgacctctcccctgcgcggacccaccgagcgagccaggacagcaaaaagcggacaagcgcgacccctagcaagactccttagaatccgaaccagcgaactggacccagtagagcctatgaacgcaccaatgccggtcagcctaggccacccatgaggcacacaacccccaattgtgccctggacaacctagggaccaggggaaagacccagagcgaacgaggcccaaacgcaaaccggctgcgacactccacaaagaaccaatcggctagcacgagacagacagcagacgactcgcgcaccaagcagcagtgcccacagactgcgacccaacaggcaccagggcaccatcgcagccacccatcgacgccactcactttacaagccgagcgcaatccagcctgaccacgcggccctccacaccctggccctctgcacccaccactaggccagcacccacacactgacacgccctcacaccacgaacactcccacccacacgggaacatcctcgcaaccaggcaccggcaccaggaccacgtcaacgcaccctacaccggactagcgcactaaccagcccgtcccccgcccccccaacgacgacacatagcaagacggaccacgtctcccgcttcaccacgcacccagtagagcgcacgatacaatctacatgccacgcgcacactacaagcaacacacagaacaacaagcacgtgacgcacgaccacaaatagcaccgcaacagaacggctagaaacacgcacccaacatacaccatagcacgcgcgcgccaccgcacaccacccccaccacatccaaaccacacaccccctataaacaacaacctaaccatactacacaacaacataatatgatacacacataacatcaaccactccacccacacaccacactaaacacactcaccaacacactacaacacaacacagcacacaacacctcatactacgtcactataccacccagcaccaaaccctatccacgacactacactcatacacataccacacaaacaaacaaaccacaacaccacacccaccacaccagcaccacacaacaccacatcccaagcccacacacacactacaacacaacagtacacacatcaccaaaaccagaacgacactacatacattaccactacaccaacgatacacaacacacacaccaacccaca

SEQ ID NO: 521721 - DNA, 943 bp, Homo sapiens
tggggggtagggctgaaggtgacgtggttccaatgtacaggagggattggctctatatcctcaaatatcaccttccctgcatcttcctggacattgcagctatggaacgtcccctggggtcgaaaggagcccagggaacccttcactcttccctgaatcagctctagcagtcatagggatgctcctggctcagcttgccactagtagaaactatgggtagggcaatttcctctgatccttgctgtggccatgaatacattagcacatttacttatatcattgactgaattgacaacgagaactgttcccttgtcggatcttactaagaaatccccttgaggattcggctaagtttactcccttggcttagcctttgcttttactatcgttgacgaattgatctacaactgctgttcaacccctagtgccttgaaaccctggcatactggactggtagagatcatgcggcgtacacgttgctaaggacatttgaaccatcttgtagggatcaatgacgaatccatccccaaaccctttagaccctcattggtgtatcctggggcactgtataggtcgttagtgaacacatccgatatgcctcatgattacagtaattgtcagcaacgtgtattgcccgcaagacttgggcagaagtaaaaagttggggatacacacacctttgtctatggtcccaaggcttgggtcctcataattacactaggtgctcaagacgaattacctacccttgtttatcgaagatctcccccaaaagggtggctaggcactccactacggggtaggtgaaaagcatgtccaccaaccttgtgccctccgtgctgtggcctaatatttgattaatggaaccaagaaacaaaaccccaacaggaatttggcctcacctgggtacaggggcataggtcagcaaacacacaacggcccttga

SEQ ID NO: 521722 - DNA, 191 bp, Homo sapiens
tgccggatgaggcccggagcctgcccccgcccaatgctgaccgacccgcggctcctctacatcggcggcttgggctactgctccggccggatagataacgtgatccggcggagtgcgatcgcgacggctggtaagcactcgccagccttctatatattacggccttaggcgtatggctgctgctatgggga

SEQ ID NO: 521723 - DNA, 673 bp, Homo sapiens
  misc_feature (32)..(32): n is a, c, g, or t
acgtcctcgtcaaaggccggttggataattancgggcaccgagtaccggcgtgccctcagatgcccctgttccagggtccccacacataggccgccccacagagactgataccaaacactgccacggtgtggccactgagacatagataatccacacctcacagatattaggaaagagatttttctgcatatgctaagtcagagttgcggtcaagaaatgccaatgtactcgtgcacaacatgttgtccgcccatcgacagatacttgtagttcaccccattacaacttctacagataggacagcttcattctttcagacaacaggcgtcgccatgtttacccttagtaacaacgtgtaagagaatctgcgatcggtatgtgctagggtaaggccgggtctagctaacataatgctagcactgactacgtgcttggtttaacgacagctgtaggcagtatgccaagcgtaagatttactctgaggaatcttggggtttccctgggaaaatgcactttaagcaaaggccaactgtttcaagcattccgctcgttcactgtgtctttttacccgggcatatagcgaacgccggcggttctgtgtaaaaaagtataatgccctcgtgggcacgaaaacgtaatttccgtataacctccttgcttgaggataaagcc

SEQ ID NO: 521724 - DNA, 269 bp, Homo sapiens
aaaaaggggttttttccccccctttttggtctttccgaaagggttttttataaaaaaaatttttattttttggggcccttttcccccccgggggttttttttggtttttttgggcccgggatttggcccaaagggggggttttgggggccccccccacccccccccctttttttttttttgggggccaggcccgggtcctggtttgcccctttttcccccccccgtttttttccaggggcttccataaagggggggggtttttgggtta

SEQ ID NO: 521725 - DNA, 522 bp, Homo sapiens
gttaacaacacaaagacatggagaggctgaatggataaaaatgcaggcaaatgagctggtgcctaaaagaaacacacttcatttataaagatacaaatagactgaaaataaatgaatggaaaaagatatttcatgccaatgaaaacaaaaaaagagcaggagtagctatacttatatcagatgaaataggtttcaagagaaaaactgtaagaaaacacatataacgtcactatataatgatgaaggggtccattcagcaagaggatgtaacacccagatataaaggaaatattattaagagctaaagaaagaggctgggcgcggtggctcacgcctggtggctccgcatttgggaggccaatgcgggcagatcacgaggtcaggagatcaagacaatcctggctaatacggtgaaacccgtctctactaaaaatacaataaattagccaggcgtggtggcaggtgcctgtagtcccagctactcaggaggctgaggcaggagaatggcgtgaacccaggaga

SEQ ID NO: 521726 - DNA, 177 bp, Homo sapiens
  misc_feature (124)..(124): n is a, c, g, or t
ttttggatccgaatctcattctctaaaactgcttcttgaacatgtacttccttagtataatcaatgatactcccttactaggctgaaacgttgtatagctacttatacagatactgaagatcantggactgaaaaaaatgacaaacattagctattttatgctgcaagaaccaggac

SEQ ID NO: 521727 - DNA, 395 bp, Homo sapiens
aaagaatattaaggtttttttccttagtgtttaaataatcaagtttaatagccaaccatttaaaatatcctttgaaatactataacaaatattataattgttaaaaattatctaatacaaaaacttgttttatttaaaaacagtaggcacatatattgcagatattttttcagttttacaccataaatttttgccacttttccccttttacttaatcatttcactttctcctttttaaataatgattcatatggtcccaactacttactcctttctcttttctttttttttttttttttttttgattcatgcaaaatatccagatagtgtctgttttatccgtaaagctttgtggccatgtttagtgttttaataaagtgttttaatgatgaaaa

SEQ ID NO: 521728 - DNA, 807 bp, Homo sapiens
tgttaagaaaaaactttactcactgattggaacaacagtgattgaagggtcctaaaaagggaaaatatataaagatgatttcatgatagggtagtgaaaactattcagctagtcaagctcaaagtcgtttgtagtcttgccgccatctggccacgtaaatagagaaaccccagaaagtagtctgcttgtgcttgttcgtgtgtttcacattcatagcaactgcagctaacaggctgattttctgggcctttggagaagtgattcatgtatagggtagatggttctgcgatagatccgcgattggtgtacggaattgaatgggatggcataggtaagcaaaagtagaagcccattgagttgtacatttgattccacaattggttctcaggtaggctggtgaatagactagtactaaagcagatttgccctatgcttgattttggcatatggctgttcctcctgtaagtttgcagaggattttggaaatcacagaatcactactaaacctgatatgtagcctatcaaaatgtccagaagtcccacaccagcagttcctgactcaaatgtgaggggtgctgagacaggagggtaagattacgtaggtgagtgtagttaaaggcttaccctaagtaagagtaatgagacttattcggcaataatggaagtgctcactgttcttgggactcctcactctactgtttgaagaggcacaaagctgtggggcttcgcaaccgggtggttaaaagcctttaaccacatcccgttctaggtggaaacgttttatgaaagccccttgcgttttgggtg

SEQ ID NO: 521729 - DNA, 518 bp, Homo sapiens
  misc_feature (14)..(14): n is a, c, g, or t
  misc_feature (48)..(48): n is a, c, g, or t
  misc_feature (51)..(51): n is a, c, g, or t
  misc_feature (67)..(67): n is a, c, g, or t
  misc_feature (71)..(71): n is a, c, g, or t
  misc_feature (105)..(105): n is a, c, g, or t
  misc_feature (109)..(109): n is a, c, g, or t
  misc_feature (147)..(147): n is a, c, g, or t
  misc_feature (183)..(183): n is a, c, g, or t
  misc_feature (252)..(252): n is a, c, g, or t
  misc_feature (261)..(261): n is a, c, g, or t
  misc_feature (314)..(314): n is a, c, g, or t
  misc_feature (321)..(321): n is a, c, g, or t
  misc_feature (345)..(345): n is a, c, g, or t
  misc_feature (381)..(381): n is a, c, g, or t
  misc_feature (399)..(399): n is a, c, g, or t
  misc_feature (403)..(403): n is a, c, g, or t
  misc_feature (407)..(409): n is a, c, g, or t
  misc_feature (453)..(453): n is a, c, g, or t
  misc_feature (495)..(495): n is a, c, g, or t
tgcgtccttcggcncccagagcggagaagcgcgcaaggcaccggtggnagnggcgacggcagctgcnacanaacccctgctgggccgaaactgggcagagcgganagangtctgaagcagcgcagttaggcgcgagggtagagcccncgcccgggaagacccctcggcgcgaaccggcagacncagccccgggtcccggttcccaaggccccgcctctagggcctggggactaatcggattgagagcgcgcnggcccgggncgcgaactcgccaattgcggagggcggtggccaccgcccaatccggagcaganaggtgcnaggtccggaaggcggaggccaatnggcggcggttgcgacctgctggggcaggtctcggcnaataaggaggctcgagtnaaancttnnngcaccaatcgggagttaaggagcattcgtgcccgctcgcccttncggccagacctctatttaccaggggcgtgcaacccgcttgcnaattagagcgcggctgatcggcc

SEQ ID NO: 521730 - DNA, 379 bp, Homo sapiens
ttggttatggagggagagtagaataagagggagaggctctagatcgcttgtgtatcttatgctcaggtgacctcagagaacgacagtatgccttctacctctatcgtgaaaagtgcatacaggtgttggtctgtgaatatataaatatctctatgcacgcatatatacatatataagaaatgtgcaataacaaagacagtaagcaaggagtcctctcctagtcactatttaagcagagactgagaggaggaaaagacaagttctacccctcaaatttgccttctcacttgcagaaccacttcctggaccaattcctgctcaaagaaaacatttaagacgcacctgtcggctgggagtgctagctcacacctgtcatccc

SEQ ID NO: 521731 - DNA, 1081 bp, Homo sapiens
agcggaaaagcaacatagagcatacaagaacatttgggatagagttgtgatttgtgaagaatttgtactttgatattgtggcggaaagtctggactgagtgtgtatgctggtaaactgtagacttttttttttttttggagtctccggcgggtctccaattcacagtagctgtgatggcttctcagccctcgtcctctcactgtgatcagtgtgtctcaacagaattcagctgtgacattaattgtgaccacagtttatatgcggggtgtataagctccggcctcatatgagggattaggtgcactactttttttttttgtgtttttttttttgtggcgcctctttcttctccttctctcccctttgtcttttattgggggggtttaaattttcaacacctataagagggtggtttcttatagagagggggttaatatggggggggctttaaacctgtgtggagaggttgcggaataaaccttctgtgtgggtggtcctcacaattccattaatatcccgggggaggaaactctttgaagctccccctattatatttgtaacccggggggataacccctatattgttttttaacaaaggggcgctgttaaaaaaaaagggggggggcaaaaaacagcgagctgtgttggggggccaccccttaatataggaaacaggggggtgaggtagcttctagaacaatatttttttcccagggggatttttaacaagagctgtcccttcgggggggccaaaagaaaaaacccccgtgtggatctgtacaactggggggtgtgtttgaacccccaatatttcgtgggccgacggttaaaaaacacgggggaaattctgtagttccgagaagaagaaattgtgaaaacacccctgttgcgttgcagaggggggtatcatcaaaacaggtgaccttctctcacatttcacgacaagggttgggaagggccacactttttccacaacatctccactgttgaacagagaccacacgaacacgacgggttttctcaaaaaagggggattctcccacaaattgtaatttcccccccttaggggggcagaaatac

SEQ ID NO: 521732 - DNA, 332 bp, Homo sapiens
gggtggctcatgcctgtaatcctagcacgtgggaggtcaaggcgtgtggatcacctgaggtcaggagtttgagaccagcctgaccaacatggtgcaaccctgtgtctactaaatacaaaagattagccaggcatggtggtacatgcctgtagtcccagctacttgggagggtgaggcaagagaatccttgaacctgggaggcggaggttgcagtgagccgagactgcaccactgcactccagcctgggcaacaagtgtaaaaaccgtctcaaaaacaaaaccaaaaaactctgccaacgtgttcgctttttaaaccttaatgtaccaacccc

SEQ ID NO: 521733 - DNA, 98 bp, Homo sapiens
  misc_feature (8)..(8): n is a, c, g, or t
aaaatacnttagaacttaacagccttccatccaaagaagacatgcgagaatagattggattggaaagagcaggagtcacctaaactttttgattgggc

SEQ ID NO: 521734 - DNA, 178 bp, Homo sapiens
  misc_feature (40)..(40): n is a, c, g, or t
tctaagatcgcgggagcttacctgtagaaagcttgaaganagtcgccacagagcagcaacaagactgtgtgtggtagaggtgtcaggcctgaggcattgctctgccatagatgctttgttgacttgatacaggtgcgaagtatcctccctggctctggtcccgggggtacgagctcga

SEQ ID NO: 521735 - DNA, 215 bp, Homo sapiens
ttttttgccccccgggtccccccccgggtccccaaaaattttttatttccaacaacaagggaaacccccccccgggcccccccctggcctgttttttttatgccccactttttttttttggttccccggcccccctggtgggggtttggcgggttccccttggcccccccttaaattttttggcagggtttttccatttaaaaaaaaattggcca

SEQ ID NO: 521736 - DNA, 203 bp, Homo sapiens
agtgactccgaggattccggtcgctcggacatcccacttcctctctgcaggcggtatggagtggctacgggccaattagctttgcggaacatattctacgtgaattcagtgtggcgatattcacatgggtcccagtcacttttggaagctagttgggctactgcgtgcttggtcgtccgacgcggacgcgggtaccgatgctc

SEQ ID NO: 521737 - DNA, 291 bp, Homo sapiens
cacgagggggagagggagaacagataaacgacacgcaatccatcgttcagatccaactgccatgacctctgcccaacatcccaccgtcgaaatcaagatcctggacccgcgcctgcaccagtggggcctgcccagctatcatagcgacatggccgccgcgatcgacctgcatgcctgcctggacgcgccgctgacgatcgagccgggcacgccggcgcagctggtgccggccgggatcccggtgcatatgggcaacccgtacatggccgcgacgatcgcgccgcgatcggg

SEQ ID NO: 521738 - DNA, 535 bp, Homo sapiens
gcacgaggccgaataagaaaacagacccattcacccacgacgtatcaagttacttccttggtgcaatgtcccactataaaaaaattccttgacgctagatcgttggactaaaatctgcgtcacaatcgcctaaacaggaaatattgcctattttcgtacaaggttacttcctagatgctatatgtccctacggccttgtctaacaccatccagcatgcaataaggtgacatagatatacacacccacacccacacaccacacccacacacccacacacacccacacactctcttacatctacctctactctcgctgtcataccttacccggctttctgaccgaaattaaaaaaaaaatgaaaatgaaaccctgttctttagccctacagcacttctacatagccctaaatagccctaaatagccctcatgtacgtctcctccaagccctattgactcttacccggatgttcaaccaaaacctacttactacctttattttatgtttactttttatagactggctctttatcccac

SEQ ID NO: 521739 - DNA, 109 bp, Homo sapiens
tatgtaactttgtctcaagagggaaataatgttctcaacagtcgataattaataactattgtcttcccttgtcatgaaggaacttgtataataaatggacgtgtaagga

SEQ ID NO: 521740 - DNA, 1255 bp, Homo sapiens
ggcctttagctgccatcttgcagtccccgtgtgtgtgcgcctaatcatcaggtggtccagccgagacccgctttgagcaccgaaccctagtcccccgacgctggcccattattcagctccgacacaggtacaacaacaggctctggcacggcggcagtggtcaggcaggcacgggacagcggggcgcgggcaagttccctgcaaggagccgagcacagggcagggccaagggcagcaggcaggagcaggaaggcagatgcgaccggaccacggcgcacccgctcaaggcctgacctctcgcgagggacgaaggtcgagccaggggcccgggctggccctggcggacagaaggccgacgccttgtctacaaacgctccaacctcgcgggcgtgacacccggaggacaccggacgcctcagatgcacagcaccacccaactccagtgacccccagggaacaacactcgcccaaaacctggcacgcgccaccacagtgccgccattcggcgcgccgccacacagcgcaatgggcctcggccagcacacaccgcaccgacaaggcggagtcccatcacgataccaggcccaaccacgccccaacgggcacgaacacaacacaccttcccagaccccacccctacacccgcgcaccgccacacgggcgcgcaccaccactactctactccctcactgggcccacttgcgcacacaagggctggcccatacctcgtttcgtaccaaacacccccaacgggacaaccacgtattgacttcccacttttcacccaacccctttaaaagcgtccccaggcgcatacatcttgccgccagccgcaaaccaacttgtcacccaatttacccagcgcccaattcggcgcgagacacaccacgcgccacggcctgtcaacacaggacaacacgtgcccacccccagggcaatctcttaaaaccccccggccctgcaggcggaccgaaataaggccgcgcacacaagctctaacacgccgacagcagtcgcccccacaccccgctcggccacccaacccccccatccgcggtcgccctgccaacaacagcgaccccaccgggccccacccgggccccacgccacaccgcacgcacacaacacatcccacaacctcggcgcgcgccaccagcggccgacacgcccccacaacagcagcaggaccccaccgcccgcaccacacacggcaaacacacccccgcacgaccacgcgccgcgccacatatccgcg

SEQ ID NO: 521741 - DNA, 229 bp, Homo sapiens
tcaccacgcaacttgggatcaactgcaagctctgactccccaggttcacgccattcttcctgcctcagcctcctgagtagctgggaatacaggcatccggcaccacgcctggttaatcttgttaaaagtatatttttgtagagactgggtttcaccgtgttagccaggatggtcttgatctcctgacctcatgatccgcccgcctcagcctcacaggggttccgagctc

SEQ ID NO: 521742 - DNA, 833 bp, Homo sapiens
ctcgtccgccggcagcactcggcgccgcgtgtccatggaccggaacctcgtggccgacggtgctgaacccgggccgcgatctgacgtctccccgcctcaggctcctcctcctcgctctccgacgactccgtcggactcccgcaggccctgcacctgccggcggcaggctagcggagcttgccccgtgaatgctgggtgacgggttcgcggctgctgccgtactgcgtgtcgtactcctgccgcctctcagtgctattgtccctggtgcctggccttgatgcggtgtccactggcggaatgccgtgtgcgccgtgctccgccgtcaagatgccgtgaccaagtcccctagcagcaagatgcgtgtacagacagttgcgtgagctatcgtctcgcatacctgagtgaagcattgatagacacaggctgaaatgggctgagaaccatgccaggtgcagaggactctaccaaaatggggtacagccaggcctgtcttacaactgctgggtggatgagaaaggccaaagaggaaacaggtacagcccagcagtgagcatgttcctcacgtgcaactgcgtagaataccgtaataagtatatccaaacattgggcgtccagatgagctaacgtcgttggatcttgccagatagactgatctcacaaagcctgtccaatcgctgcagcgaggcattaattggtcgggtctaatctataggacagcttgtgactaattgcaccagtgacagtgatgccaggatgtagggtcatacatgacaggtctggatgtgatggacgaagcagtgatcctttaaatccctatcaattgggacgttcca

SEQ ID NO: 521743 - DNA, 1240 bp, Homo sapiens
ggaatgtccggatcgttcgggcagattgacaatagcccgtcttgcagatgatgacttcagagtcaaggtatgagacagagccatggctcgagtgtcgaccagtctgtggagaacgacaatccaattggtgctcctgcgaaggtcgattgcatgacgaccaaatattcatcacgactggcgagcttgtgagactagagatctgaggacatcctcaaggaatgagcgtgctcattcactgagaagaacgaacccacagaacgcacggaagctagaatggccttacgaatgctccacatgattttgccgagctccttgggttgatgcgtgagggaaggtatagtgctccccaaaagtcatctacgaacctccggccacacgactcattgcatagtacattccggaggacctcaattatgcatcggaagcctggactcggaaaagaagccgagatggaggcatagaacgaaggtacgtggctcgtacaacagatcgagcgagatgcaccacatgtcgtcacacacacaagtctgtctgaggttggaagctggctgagaacgatgctcacagaatctgaggactgctacaggtactcagtaccttgtgatgatcgaccctgagaactctcatgaagaaaatctcgaatggccacgtctgtggataatcacgagcgtgaggggaacgttggaggtccgttttttgcccttatagaatggagtcgattgtcaacggtgagtccgtgctttgtacacttgaagtcatgaagtctggtcacagatcgccgcgtgcatgagtggcacatccgccaggacccaaggagctatgagggccctggcgtgaatgattacggtcaaagcgtggacagtctcgagactcggctaactaaccggcagtactggcctggagggatggccgagacgtaaaaggcttcggatgaatgcctttgggaacgagcattaacctccatgcaaagcgatccaaaagtactacaacctgtcggaatagttgcatgcgaaacaattgctggcttggacacaccagtgacatgcaggggattcctgaggccattaagcccagagctgaaagccggggaacgcctatggggatgcgggaggcccctgaggaagttcagaccttcacaaccaacttctctgaacctgggggcattctcgggggcccgcaaagtggttctgagaggcccggtggacaccgttcatgacatctttgggacagggagtgtctg

SEQ ID NO: 521744 - DNA, 131 bp, Homo sapiens
aattcaagcttctaacgatgtacggggacatgggcctctgatggtgttccttttttcagacttatttatttgttgagtcagggtctaactccagcctgggcgacagagcgagactccatctcacaaaaaaa

SEQ ID NO: 521745 - DNA, 214 bp, Homo sapiens
agagactgacgtgagtgttgtaatattggctcactgcaacttccgcctccccgtaatcaaacgattctcctagctcagcctcgtaagtagctgggattacaggtgcctgccactatccctggtttactgtcactgcaacttctgcctcccaggttcaagtgattctcctgtctcagcctcccgagtagctgggaatacaggcgtgcaccaccat

SEQ ID NO: 521746 - DNA, 773 bp, Homo sapiens
tggcttctctttccacctggagcagcctgcagagtccaggagtatggaagacttcgcccgaggggcggtctcccacaggcccctcccggcctgggcctggttcccgtcagcatcatcggggctgaggatgaggattcggagaagcgagctggagactagaactcagaatggagcaatgaagagccagttccgagagcctggagcaggtgaagcggtgcccaggccacctcatggccctccgtgctagtctacgtggcccgtgcagtttgagccgaggacccctgcttttgctgtcgtgcatgccgacagtgctgggctcagtgtgggccccaaggaggccaagaaggccttcctggacttctacgcgagagcttcctggagagagacacgcggttctccgggtgccgggtccctcccagacgtcgcccgtttgaagcttgaccgcgactagggctgacctcactcgtccgacggatgtccagcggcggcttcgtgccggaggtggttgcaacaagccagcatggtggccgtgggccggcaggctggaggacttccgttccaagcggctcatgggcatgacgccctgggagccgtgagctgggcccagctgggaggcctgggggttgggcgggaccgagctgctacgagggccgggagcggcacgtggggggagcggtgtcatgcccctgggtgtgatgccgattaccatctgttaccgcgaggacagagtgctggcggggtcagcctttggtctgtaattgcgcccttggggg

SEQ ID NO: 521747 - DNA, 659 bp, Homo sapiens
  misc_feature (153)..(153): n is a, c, g, or t
  misc_feature (158)..(159): n is a, c, g, or t
  misc_feature (196)..(197): n is a, c, g, or t
  misc_feature (212)..(212): n is a, c, g, or t
  misc_feature (261)..(262): n is a, c, g, or t
ggacgcgtgggtcgacccacgcgatcgctgtgggccggatcgaggcggctgggggccgcgggattgggggctccccgctgagcctgagaggagcgcgacaaaggatgcgtcccgccggggtcacagtctccgcggcccaactttgcgcgcggngcccnngcccctggggagcccgcccgctgcgctgagaacccanngcgtcctgggctggngagaggggccgggagcgtcctgcaggtggcgctggcccggatctcccgnncccaggaagggatcccggagcttcctggaggctggcgggcggccgtgtcgctccagtgcaaccggcggctgcccgcggaaactccgcgcgcctccggggattgcccctcgccctagccccccaggcgcgcgggggtccggggccctgcgagggtccccccgttcccccgcggtgattcccaagctgggctaacggccgggcttctcttcctcccgtccatctgtcgcctccttttccatccgacctcgttcaccttttccttccctcttatccatccagaggccccgcgcaaatgggcgcacgctgatacgtttcgtcatcgcttccctgaatcttcccgtatcatctcccagctcgtcctccttccattgggagaaaagcgggccccggaacacag

SEQ ID NO: 521748 - DNA, 132 bp, Homo sapiens
aatggtgctgacagacagggaagtaatatttgaaaaacctgtccatcagaagggaaatgaaacccataataaatggatgcagtatttcaaggatgaatggcagttcgggatggtgtttattttatgggtaat

SEQ ID NO: 521749 - DNA, 156 bp, Homo sapiens
tgggaaaaggaagggactgagggcagagtctctgggtttcaggcagccattatgttattttccattcactattacttaagaagtttgtgtgtaaacagggctcatttctgaggtttcaggaccccttgcccccacccccttttttttattaaaaaa

SEQ ID NO: 521750 - DNA, 103 bp, Homo sapiens
agacacactgctgagttccttggggttcatgttttccttgttcctcccatgcctagctggatgcagagttaagtttatgattatgaaataaaaactaaataac

SEQ ID NO: 521751 - DNA, 748 bp, Homo sapiens
  misc_feature (740)..(740): n is a, c, g, or t
aagaaagatcaaaagagacaaagaaggccattacatgatggtaaagggatcatttcaacaagaagagctaactatcctaaatatatatgcacccaatacaggagcacccagattcataaaacaagtccttagagacctacaaagagacttagactcccacacaataataatgggagactttaacaccccactgtcaacattagacagatcaacgagacagaaagttaacaaggatatccaggaattgaattcagctctgcaccaagcggacctaatagatatctacagaactctccagcccaaatcaacagaatatacattcttctcagcacatcacacttattccaaaattgaccacacagttggaagtaaagcactcctcagcaaatgtaaaagaacagaaattataacaaactgtctctcagaccacagtgcaatcaaattagaactcaggattaagaaactcactcaaaaccactcaactacatggaaactgaacaactgctcctgaatgactactgggtacataacaaaatgaaggcagaaataaagatgttctttaaaaccaatgagaacaaagatacaacataccagaatctctgggacacattttaaaacagtgtgtagaggcgaaatttatagcactaaatgccacaagagaaagcaggaaagatctaaaattgacacctaaatcacattcaaagaatagagatgagagcaaaaattcaaagtagcagaangaagaatt

SEQ ID NO: 521752 - DNA, 260 bp, Homo sapiens
cccaccattttttaaaaaaaaaggggggaaaaaaggggagggtttttaagggcagacattgcccaccctttcaggatggggggggtttaaaggggaaataaacccagtttcataaactaggggaagatttgttgcaaaaaataggatgagggaaatttcttgggggatccaaccaaaggaagaagggggccttaaaccctgagggggcccaaaaaaaacatgcggcctttttccaagaacatggcccccaaaaaaaaatg

SEQ ID NO: 521753 - DNA, 492 bp, Homo sapiens
  misc_feature (1)..(1): n is a, c, g, or t
  misc_feature (11)..(11): n is a, c, g, or t
  misc_feature (39)..(39): n is a, c, g, or t
  misc_feature (49)..(49): n is a, c, g, or t
  misc_feature (66)..(66): n is a, c, g, or t
  misc_feature (82)..(82): n is a, c, g, or t
naacctggttntggtggcctcaaaccctgtggtccccancctacttggnaggctgaggtgggaggnatcacctgaacccccnggaggtcaaggctgccagtgagccctgatcactcccactacaccctgggcaacagagcaagaccttgtctcaaaaaagaggagggaaacaaaagaagaggaaaaaaaagagtggctgtactcctgtctggaattagcacagctgactggaaaaacccaagtccctagagcttacaacactgaccgctatgtcggaagaaaacagacttatgagaatgtgtgttcttgtttaaaaagcaggtcctgcatgtcacaagtaattctgaatcccttcccccttgatcgagttgatgccctgggctgccaaatcctgcaagctcactgcctttcagtcaaccagaaccaaagaatgaggccaaggaactctgtcctgtttgttttctgatgtgttgaaaaatgagaaaaaaaaaa

SEQ ID NO: 521754 - DNA, 363 bp, Homo sapiens
  misc_feature (103)..(105): n is a, c, g, or t
  misc_feature (107)..(107): n is a, c, g, or t
  misc_feature (112)..(112): n is a, c, g, or t
  misc_feature (114)..(114): n is a, c, g, or t
  misc_feature (120)..(120): n is a, c, g, or t
  misc_feature (123)..(123): n is a, c, g, or t
  misc_feature (156)..(156): n is a, c, g, or t
  misc_feature (185)..(185): n is a, c, g, or t
ggcctctggttgcagctgtggctctcagtgtacggggccctctcctctcattgtaggagttctcggcttacttgggttttccctctgctgtagaacattggtnnncntcccngncttggntantggactcacaccagctgtgcgatgcccgctttnacaattaaaggaaaactgtggtgttcagngtcaccttgtcagcaacactgtgtcccttcgcccggcggttcttctctgcggctttgggaccactcagccaacattggaccccaatcaaatataacggtgtctgacactgactttggttttacctcaatacaactgtctacgactttcggtatggatgcaaaaaaaaaaacaacaaac

SEQ ID NO: 521755 - DNA, 104 bp, Homo sapiens
tgaacccgaccctgggtggactccctgctctctgccagcccctgtcttacccctgggtccccacggccccttgctctcttcccctctgctagaatctcgctgag

SEQ ID NO: 521756 - DNA, 432 bp, Homo sapiens
tatgctgtctcactaggtcgccaggtagtcaactcctaacttcaagtgatcttccaccttggcttggtgtcccaagcgagttagaaaaacgccacactttgagacaaattaagagtcttttattagccggcgacctagagacggctaatgctcaaaattctctcggccccaaggaaggggcttgattaacttttataccttggtttaggaaggggagggggggtctagttaaaacaattttacggaagtaaagtagtcaaaaagttaaaaggacaaatggttacaggaaagtaaacagttccaggtgcaggggctttaagactattacaaggtgatagatccggggctttgggcgtttatcaatcggacgaattcctgggaactgcggatatagcttgccacagtatcttatcagttaattgcattcttgga

SEQ ID NO: 521757 - DNA, 623 bp, Homo sapiens
tgggggagggcccccccaccccccccttcccccggggggcggatcttttatgcaagagcgcgccggtgtttcccccctaccgggcggggggcgccccctttttgtggggtggtgcctcttttgggcccccccgctttcccatttttttcgcgcggtttggttgtgggggtgtttgtggggcggcccccttttcccccccccgcgcccggcccgtgtttttgtgtggtttttggccccccattaggggtttgcgccccccgcccccgaactcccctttgatatttttaggggctccccctaggggggtggggggggggggtccccccctcccttgggttgttttttgttttttaaaaagggggcgaggggccccccctccccggggttttttttaggtttcccccccccgcccctcccccccccccccccccgggcccctgggggttttgggggggggcttggggaccccccccccccccccccccgggggccctggggggttttggttttttttttttccacaaaccccctcccccgccttttttttctggggccctttttttttttttttaagaaaaaaaacaatcccggaaattaaaattaagggcccttttttttaaaga

SEQ ID NO: 521758 - DNA, 366 bp, Homo sapiens
  misc_feature (224)..(224): n is a, c, g, or t
ggcccaggagggggtcgatgggcactcacagaaggggactgacagtgggcaacactcacatcccactggctgctgttctgaaaccatctgatttgctttctgaggtttggctggcgtggtggactgctcatttgagccactctgcatatttggacttgcctcgcgttcctgaatgcgctctcagagccgttctgtaagatacctggttgctaacatcccatgcncgctccctcgctcacgcatgcacccacgcgacctgcagggccctgtcctcaggaatgagatgtgtgggatggtcgctattgtaatgtgcgtggttctctgttttatttctcttccccttctgatggccctataagactttca

SEQ ID NO: 521759 - DNA, 1404 bp, Homo sapiens
  misc_feature (31)..(31): n is a, c, g, or t
  misc_feature (872)..(872): n is a, c, g, or t
  misc_feature (875)..(875): n is a, c, g, or t
  misc_feature (887)..(887): n is a, c, g, or t
  misc_feature (900)..(900): n is a, c, g, or t
  misc_feature (903)..(903): n is a, c, g, or t
  misc_feature (914)..(914): n is a, c, g, or t
  misc_feature (919)..(919): n is a, c, g, or t
  misc_feature (981)..(981): n is a, c, g, or t
  misc_feature (1000)..(1000): n is a, c, g, or t
  misc_feature (1083)..(1083): n is a, c, g, or t
agatgggtccatgccatactcccctgggccnaacccgtcatctactctaccatctttgcaggcacactcatcacagcgctaagctcgcactgattttttacctgagtaggcctagaaataaacatgctagcttttattccagttctaaccaaaaaaataaaccctcgttccacagaagctgccatcaagtatttcctcacgcaagcaaccgcatccataatccttctaatagctatcctcttcaacaatatactctccggacaatgaaccataaccaatactaccaatcaatactcatcattaataatcataatggctatagcaataaaactaggaatagcccccctttcacttctgagtcccagaggttacccaaggcaacccctctgacatccggcctgcttcttctcacatgacaaaaactagcccccatctcaatcatataccaaatctctccctcactaaacgtaagccttctcctcactctctcaatcttatccatcatagcaggcagttgaggtggattaaaccaaacccagctacgcaaaatcttagcatactcctcaattacccacataggatgaataatagcagttctaccgtacaaccctaacataaccattcttaatttaactatttatattatcctaactactaccgcattcctactactcaacttaaactccagcaccacgaccttactactatctcgcacctgaaacaagctaacatgactaacacccttaattccatccaccctcctctccctaggaggcctgcccccgctaaccgggtttttgcccaaatgggccattatcgaagaattcacaaaaaacaatagcctcatcatccccaccatcatagccaccatnacnccttaactctantctactagctaantantcacctcatanactantcccatatttaacacgtaaaataaaatgacgttgacatacaaaaaccacccattctcccaantcatggccttacacgctanttctactatctcccttttatactaatatcttaccaaacaaaaaaaacaaaaaaaaaaaaaactatcggcccgctttgcccagncgatataacttggcaagctttacatgcggccgaattgggctattgggcacatgcctcaagggaggtatacaataatggcgcggttaaaaccgggcttggaaaaacgtggtaccactatagccctttgaaaacactttttcgcgggtggaaaaaaaaagcccccacggggtttttcaaaagggccctctaggggaaaaaatggcccgtatatttaaaaacccctatttttaaaccctttttaaaacggcgggggggacctcttaaaccggcgaaaactaacaatggggggtgcggggcgcccccaaatatttgtgggggagc

SEQ ID NO: 521760 - DNA, 336 bp, Homo sapiens
gggaggacggtgctccaggtctcgtccgcgatgtgacgagcggccttagggagagtctatcattgcaactcggactcaacataagggcttttagaagggtaggttttggggaatccctttccaagagtggtccacaaaagccccgagacccaaacccccctttacgggaattggcacatatattagatttttcgctcggtatattcagtgacagatactctctccactaaatatctcacattttgtctatagggatatatggcacgcactctctactacaacaccctaccactatatacacacacggggaagagtattacagcagagagaagtttt

SEQ ID NO: 521761 - DNA, 1420 bp, Homo sapiens
  misc_feature (31)..(31): n is a, c, g, or t
  misc_feature (997)..(997): n is a, c, g, or t
  misc_feature (1016)..(1016): n is a, c, g, or t
  misc_feature (1099)..(1099): n is a, c, g, or t
agatgggtccatgccatactcccctgggccnaacccgtcatctactctaccatctttgcaggcacactcatcacagcgctaagctcgcactgattttttacctgagtaggcctagaaataaacatgctagcttttattccagttctaaccaaaaaaataaaccctcgttccacagaagctgccatcaagtatttcctcacgcaagcaaccgcatccataatccttctaatagctatcctcttcaacaatatactctccggacaatgaaccataaccaatactaccaatcaatactcatcattaataatcataatggctatagcaataaaactaggaatagcccccctttcacttctgagtcccagaggttacccaaggcaacccctctgacatccggcctgcttcttctcacatgacaaaaactagcccccatctcaatcatataccaaatctctccctcactaaacgtaagccttctcctcactctctcaatcttatccatcatagcaggcagttgaggtggattaaaccaaacccagctacgcaaaatcttagcatactcctcaattacccacataggatgaataatagcagttctaccgtacaaccctaacataaccattcttaatttaactatttatattatcctaactactaccgcattcctactactcaacttaaactccagcaccacgaccttactactatctcgcacctgaaacaagctaacatgactaacacccttaattccatccaccctcctctccctaggaggcctgcccccgctaaccgggtttttgcccaaatgggccattatcgaagaattcacaaaaaacaatagcctcatcatccccaccatcatagccaccatcaccctccttaacctctacttctacctacgcctaatctactccactcaatcacactactccccatatctaacaacgtcaaaaatacaatgaccagtttgaacattaaaaccacccattctcccaantcatggccttacacgctanttctactatctcccttttatactaatatcttaccaaacaaaaaaaacaaaaaaaaaaaaaactatcggcccgctttgcccagncgatataacttggcaagctttacatgcggccgaattgggctattgggcacatgcctcaagggaggtatacaataatggcgcggttaaaaccgggcttggaaaaacgtggtaccactatagccctttgaaaacactttttcgcgggtggaaaaaaaaagcccccacggggtttttcaaaagggccctctaggggaaaaaatggcccgtatatttaaaaacccctatttttaaaccctttttaaaacggcgggggggacctcttaaaccggcgaaaactaacaatggggggtgcggggcgcccccaaatatttgtgggggagc

SEQ ID NO: 521762 - DNA, 353 bp, Homo sapiens
tattgccgtagtaataaacaccagtcattcaacttgaatgtaccagaacttaacagtatgaatatgtcaagatcacagtaagttaataacttcaccagtaatgaagtagacatgtaaacagatcactactacaatggagttggagaaacttcattcaatggattgctaaatggtagctctaaacatgaccacgaaatggaatattgtgacaccgtggaagttgattcaagtcagatgagacgccagttgtgtgtaggaagtcaggccgccatagtaagaatgatccactttgtacgagagctgcaagcaatgagtgaacagcttaggagagactgtggcaagcactgcgcacg

SEQ ID NO: 521763 - DNA, 377 bp, Homo sapiens
ggggggcccccccccccttttttttttcataaacgggcttttaaaggggggggccccatgtaagttcttccctccccgggctttagaggggggccccggggttggggcccccgggggtgtgttctttccccccccccccctgcccccttccaaacaatgcaaatttgattttgggggggtggggccctttgcctttcttaaatggtgggaagcccgtgggcccccctttaggcccttgggggttttccctagtggggcccaatcaacctcattttttgggggggcaactttttttggctttggagtttggggggggccaaccccccaagaactgttccctccttcgggtggggcaattaatttgtggggggggggga

SEQ ID NO: 521764 - DNA, 1248 bp, Homo sapiens
  misc_feature (31)..(31): n is a, c, g, or t
  misc_feature (1248)..(1248): n is a, c, g, or t
agatgggtccatgccatactcccctgggccnaacccgtcatctactctaccatctttgcaggcacactcatcacagcgctaagctcgcactgattttttacctgagtaggcctagaaataaacatgctagcttttattccagttctaaccaaaaaaataaaccctcgttccacagaagctgccatcaagtatttcctcacgcaagcaaccgcatccataatccttctaatagctatcctcttcaacaatatactctccggacaatgaaccataaccaatactaccaatcaatactcatcattaataatcataatggctatagcaataaaactaggaatagcccccctttcacttctgagtcccagaggttacccaaggcaacccctctgacatccggcctgcttcttctcacatgacaaaaactagcccccatctcaatcatataccaaatctctccctcactaaacgtaagccttctcctcactctctcaatcttatccatcatagcaggcagttgaggtggattaaaccaaacccagctacgcaaaatcttagcatactcctcaattacccacataggatgaataatagcagttctaccgtacaaccctaacataaccattcttaatttaactatttatattatcctaactactaccgcattcctactactcaacttaaactccagcaccacgaccttactactatctcgcacctgaaacaagctaacatgactaacacccttaattccatccaccctcctctccctaggaggcctgcccccgctaaccgggtttttgcccaaatgggccattatcgaagaattcacaaaaaacaatagcctcatcatccccaccatcatagccaccatcaccctccttaacctctacttctacctacgcctaatctactccactcaatcacactactccccatatctaacaacgtcaaaaatacaatgaccagtttgaacattggcaaaagccacgccattcctccccacactcatcggccttaccacgctagtcctacctatctccgcctgtatagtaataatctggcgaagaaacaacgaaacaacaagaaggcggggggcggccgggccccggaaaggggagaacacaggggggcgcggggccccgggtgggtccaccggccaggggcccgaaaccgggcaccacggggcgttgcccaaaaacccgggggcggggtccaccccgggcgggcaggcaaggcagcgacccggan

SEQ ID NO: 521765 - DNA, 408 bp, Homo sapiens
tggagacgatcgaccgcaagacagactctgcaatcagagactagttcgaagattgccgacgactcgatcctgccttcggacgctggtgttcggcggcgcgcctccaccagtttgcgcatcgtcgcatggtgatcgacccgagagttgcgcgacgacgtcgtcgatctcgccgaggacctcgctgagggtctgctcttcgcgcgttgctcccctgttgcgtggctcgaccgccctcagctcctcaaagagttgagcgacatctagcagggtcgtacggcgtgaatttccgacgaactggtaccccccgccgacgccgcgaaccgagcggacaaaggccaggcgcgcaccatgaatgtgcatcacctttgccaagtgatgactggatacgccgtacttcttgccgatctc

SEQ ID NO: 521766 - DNA, 168 bp, Homo sapiens
aaaaacccggtgggaaaaaccaaaccggggggcccccaaaatttttggaaatttttttttgggccgaaaggggggggcccaaaaaaaaaatttttttaatttttacccggggccccaaaaaaaagtcccggccttcccttgggccaataaaagggggggtttttttta

SEQ ID NO: 521767 - DNA, 1127 bp, Homo sapiens
  misc_feature (704)..(704): n is a, c, g, or t
  misc_feature (723)..(723): n is a, c, g, or t
  misc_feature (806)..(806): n is a, c, g, or t
tgcatcttacatactcaatgtgtgtcctgcactaagactaagagtaactgccttacagttctgcagtcccagcaagtaaacctatgtacccctctgacatccggcctgcttcttctcacatgacaaaaactagcccccatctcaatcatataccaaatctctccctcactaaacgtaagccttctcctcactctctcaatcttatccatcatagcaggcagttgaggtggattaaaccaaacccagctacgcaaaatcttagcatactcctcaattacccacataggatgaataatagcagttctaccgtacaaccctaacataaccattcttaatttaactatttatattatcctaactactaccgcattcctactactcaacttaaactccagcaccacgaccttactactatctcgcacctgaaacaagctaacatgactaacacccttaattccatccaccctcctctccctaggaggcctgcccccgctaaccgggtttttgcccaaatgggccattatcgaagaattcacaaaaaacaatagcctcatcatccccaccatcatagccaccatcaccctccttaacctctacttctacctacgcctaatctactccactcaatcacactactccccatatctaacaacgtcaaaaatacaatgaccagtttgaacattaaaaccacccattctcccaantcatggccttacacgctanttctactatctcccttttatactaatatcttaccaaacaaaaaaaacaaaaaaaaaaaaaactatcggcccgctttgcccagncgatataacttggcaagctttacatgcggccgaattgggctattgggcacatgcctcaagggaggtatacaataatggcgcggttaaaaccgggcttggaaaaacgtggtaccactatagccctttgaaaacactttttcgcgggtggaaaaaaaaagcccccacggggtttttcaaaagggccctctaggggaaaaaatggcccgtatatttaaaaacccctatttttaaaccctttttaaaacggcgggggggacctcttaaaccggcgaaaactaacaatggggggtgcggggcgcccccaaatatttgtgggggagc

SEQ ID NO: 521768 - DNA, 1390 bp, Homo sapiens
gtttatgggccatggctagatgacatctgcttgtggctgtgggtaggaccgaccacaggtgttcgcatcaccctaggcttcattgcatgaccctgagcaggacacgtatcacgtttgagctgcagcagctgaggtagcagtgtcaggcaggtggatggatgcgctctggggtcgggccatcgtacggagcttcagtgtcggaggaatgcactcatcattcgtagcagggaagcgagagatcgcggaaacggttgacggagcacaggctagtgctgtcaggtgggcttgctaggagcggtccggggggtgtgaggctgcaaggttgcgctacgaaggggcaccgtcccttcacacgtctccttggacttcagttgggtccagctccggtcactactccacatcagagtgagcacccgctaggacagcgaagttctgtgctttatgacctgacgggacagtgcccatggttaccaaagctaagaggtcgtgcttagcaagggcagttgaggccgcaagggtcgaccaggtgcgtgtgccacgctgtgtgcacgcgagggcctggtggcgttgggcccgtagccccaggccatagtaatccgctttgggtcgtcgccttggattctggtgttcggtttgtcggcgtaattccggggatttgccgcgggtcagggggtttttcacgtcgatgttttgcccccaggggcataccgagggttgcaagtagtgtgggcagtgagctcacgttgttgatagcttttggccgctatctgggaggctcatagggttgcctccctaccctggcgcttcagaggtatgcccaagggttacgtcggtgcgggactccaccaatggtcattggaggccctggccagaagacctcgaggccgaatccatcacccttggggagtttgttaccacagttgcgggaacgggttgctgaggggtatgtggggaggaacatttccacaaggtggcttgagcaagccacagagtatggggttttgttgtgggccaagggaggcccttcccgtttgtgacctgggacagaacgatggtggccggtcgggccatggcgacttgggggcgacgcgcctgttggtgggtgtccccgcccagtggggattcttaacccccttataagcttgtgtgcctgtgtgcagcccctgtggtgtggcccccaacaatgtgctgttgtttgccctcgctcccggtggaattattgtgaggcccttcttcccccaacaggggttttcctccctcggccttggcatggggtgggtagcatcccacacggtggcgaccgggttagtaggcccccccagtgttgtagtgtgtctgtgtgcgccccgtgtgctcgcgtttgctggtgactaggtactaacccctgacg

SEQ ID NO: 521769 - DNA, 994 bp, Homo sapiens
  misc_feature (31)..(31): n is a, c, g, or t
agatgggtccatgccatactcccctgggccnaacccgtcatctactctaccatctttgcaggcacactcatcacagcgctaagctcgcactgattttttacctgagtaggcctagaaataaacatgctagcttttattccagttctaaccaaaaaaataaaccctcgttccacagaagctgccatcaagtatttcctcacgcaagcaaccgcatccataatccttctaatagctatcctcttcaacaatatactctccggacaatgaaccataaccaatactaccaatcaatactcatcattaataatcataatggctatagcaataaaactaggaatagcccccctttcacttctgagtcccagaggttacccaaggcaacccctctgacatccggcctgcttcttctcacatgacaaaaactagcccccatctcaatcatataccaaatctctccctcactaaacgtaagccttctcctcactctctcaatcttatccatcatagcaggcagttgaggtggattaaaccaaacccaaaaaaaaaaaaaaaaaaaaaaaaaaaaacaatgtgtcgggggggcactacggaaaaagctttttatagcaccaactcgggtgtgtgggcccggggccccagagggtacaggtggaaaccgtggggccaaatggcgggttcccaaagggagaacaccggggccagaaaaaaggggggggatttctacaccacattaaaaaaacgcccggggggggaacacaggaggcggttctccggacacaaccaacccagaaggggggtcacgaggaggagccaccaaacggggggcactcaactccacagggggcgtcccaaggggagaagacgggataatcaaaacatactacagccccggcaacgtggagtcaacgacacaacacaaactaccacgcaaactaccacagaccgacgctcacaccaacagcaccagaaatcacccatacaagcacccaccagg

SEQ ID NO: 521770 - DNA, 130 bp, Homo sapiens
ggatttgctggtgcagtacaactaggcttaatagggctcgaattcgactcgaattcgaggttgcggtgagccgagatccggccgttgcactccagcctaggcaacaagagcaaaactcctgtttcaaaaa

SEQ ID NO: 521771 - DNA, 275 bp, Homo sapiens
cgaacagaacaagcagggttttgttccgaatgtctgacgtcatgccaccagagagaaacgaacgattgctacaatcctgctggagatatccaagggggtcgtcctggtcaccaatatcaagcccaagagcagcagtctcattccaagccatgggctctgttctgatgagagagctgtagagctaaactgaaagccgtttcttgaactctggtgaggtgacctaagacatacggtactaaccagcacatgcataagtcgacacaccttcattccta

SEQ ID NO: 521772 - DNA, 161 bp, Homo sapiens
ttgtccatcatttcttaaaaaaacatttcttctgtttggaatcataattaactctggttatcagcctatttgtaattattgtcttgtcgtcacttttcttgaatgttttctagtcattaaacagatatgaaggcatgccaaagagctttaatatccagtaa

SEQ ID NO: 521773 - DNA, 821 bp, Homo sapiens
  misc_feature (37)..(37): n is a, c, g, or t
  misc_feature (60)..(60): n is a, c, g, or t
  misc_feature (64)..(64): n is a, c, g, or t
  misc_feature (131)..(131): n is a, c, g, or t
  misc_feature (178)..(178): n is a, c, g, or t
  misc_feature (434)..(434): n is a, c, g, or t
agtggtacgggtccgactgaggggtactcgccaccgntggcgtccacccgagcggctgcncgancaaggcccgagggggtgggcgtggcggccgcgaatacacaaccccctctgttccctctcttcgcggngcgccgcgtagttgccatccgccagctgccatgagcgagcgcctccntcccaggaaaaggagaaggaatggcaacgaagaagacaaccatcttcccccccagaccaaaagaagtagcagaaaccctgtctttcaggattcctgggacacagatgtcttcagtgcatgtgacatgtgtgtgtgtgatgcatgcatgcatgcatgcatgcatgcatgcatcaacatgccctgtgacatgtggccatgctgtgtgcctgtgaatggcatgctttgatgccatgaaccatggcctggatccatgccnctaacactgcctcatgccctgtgccctgagcagtcctgctgctgtgccaatggcctctacttccacatcaaccagaccctgagtggatggcccacttccacagcctacagcacctgagggctggcctctgacatgatgtgtacggcagtttcttgccttctgtgaatgggacagcgctgtgcagatttgatatttcaacttacaacttgttttaaacagaaaaattgcacacgaaaaatgcctgttggcttttcagtctatatttgaaataacaggttaacaggcagtttgtctacttgtggttttgctgcactattgcaatttcaaaggggctttgaagcattttttataggattctttgagggagggtatcaaatctatgtccag

SEQ ID NO: 521774 - DNA, 468 bp, Homo sapiens
aagagctgcagaaattacagcaagacatagagatggtagaacgcaatgaggatcatcacctggtggtccttaaagaatctgagatacttcttcaggccaaaagagccgaactggaaaagctgaaaagccaggtgacaagtcagcagcaggagatggctgtcttggacaggcagttagggcataaaaaggaggagctgcatctactccaagaaagcatggtccaggcaaaagctgacctccaggaagctctgaaaactgggagagactgaagtaactgagaagtgcaatcacattagggaagtaaaatctcttctggaagaactgagttttcagaaaggagaactaaatgttcagattagtgaaagaaaaactcaacttacacttattaagcaggaaattgaaaaagaggaagaaaatcttcaggtagttttaaggcagatgtttaaacataaaaccgaactaaagatt

SEQ ID NO: 521775 - DNA, 298 bp, Homo sapiens
  misc_feature (107)..(107): n is a, c, g, or t
  misc_feature (139)..(139): n is a, c, g, or t
  misc_feature (189)..(192): n is a, c, g, or t
agaagttctactggtaggttttttttttcttcttctcttgaaacagggtcatgatcttttgcccaggatggagtgcatgatcatggcccatcacaacctcaaactcntgggcttaaatgaacctcctgccttagcctcntgaatagctaggactacaggcatgtgccatcttgtgaggctaatctcttnnnnaaaattgttttgtcgagacagggtctcactgtgttgcccaggtaccactggtgattctgatatacaaccagagttgcaaaaaatgttaggcttctgcctctatggt

SEQ ID NO: 521776 - DNA, 815 bp, Homo sapiens
  misc_feature (815)..(815): n is a, c, g, or t
gagggctaatatccaggatccacaaagaacttaaacaaatttacaagaaaaaaaggaacaagcccatcaaaaagtgggcaaaggatatgaacaggcacttctcaaaagaagacatttacacagccaacaaacatgaaaaaaagctcatcatcacttgtcattagggaaatgcaaatcaaaaccacaatgagataccttctcacgccagttagaatggcgatcattaaaaagtcgggaaacaacagatgctggagaggctgtggagaaataggaacacttttacactgtggtgggagtgtaaattagttcaaccattatggaagatagtgtggtgattcctcaaggatctagaattagaaataccatttgaccaagcaatcccattactgagtatatacccaaaggattgtaagtcattctactataaagacacatgcacacatatgttcatgtggcactattcacaatagcaaagacttggagccaaccaaatgccatcaatgatagatggttaccaaaatgttgccatatctaccatggaatactatgcagcataaaaaaggatgattcatgtgctttgcgggacctggtgagtagaaaacatcattcttagaataacagacagaaacaacatgctgtcccactcataatggagttgacctgcgaccatgggcccgggtggctccccatgggctggggagggggccacagcgggtacctagaaactagggggacatgttttggggccccccggtgtcttgtcaacggttgggtggccgaaagtaacaaaaaagacccacaccttggtcaaagcn

SEQ ID NO: 521777 - DNA, 843 bp, Homo sapiens
attactcccctgggccaagccgtcatctactctaccatctttgcgggcacactcatcacagcgcgtaagctcgcactgattttttacctgagtaggcctagaaataaacatgctagcttttattgccagttgctaacccaagaaaaatgaaaccgctcgttccacagaagctgcaatcaagtatttcctcacgcaagcaagcgatccatagatccttctaatagctatcctcttcaacaatatactctccggacaatgaaccataaccaatactaccaagtcaatagctcatcattaataatcataatggctatagcaagtaaaactaggaagtagcccccgtttcactgtctgagtcccagaggttacccaaggacacccctcgtgacatccggcctgcttcgttctcacatgacaaaaactagcccccgcatctcaatcatataccaaatctctccctcacggtaaacgtaagccttctcctcactcctcgtcaatcttatccatcatagcaggcacggttgaggtggattaaaccaaaccgagctacggcaaaatcttaggagatactcctcaaattaccccgcataggatgaagtacttagcagttctaccgtacgaaccctaaacataaccattcttaatttaactatttatattatcctaactactaccgattcctactaatcaattaaactccaggaccacgaactttattattcgcacctgaaaaagttaaatgagtaaaaccttattcatgcgaccttctctcctaggaggcggccggtaacggtttttgcccaaggctttggagatccaaaaaatgctctatccccttgccac

SEQ ID NO: 521778 - DNA, 683 bp, Homo sapiens
  misc_feature (31)..(31): n is a, c, g, or t
  misc_feature (258)..(258): n is a, c, g, or t
  misc_feature (329)..(329): n is a, c, g, or t
  misc_feature (356)..(356): n is a, c, g, or t
  misc_feature (362)..(362): n is a, c, g, or t
  misc_feature (374)..(374): n is a, c, g, or t
  misc_feature (417)..(417): n is a, c, g, or t
  misc_feature (446)..(446): n is a, c, g, or t
  misc_feature (455)..(455): n is a, c, g, or t
  misc_feature (485)..(485): n is a, c, g, or t
  misc_feature (496)..(496): n is a, c, g, or t
  misc_feature (498)..(498): n is a, c, g, or t
  misc_feature (536)..(536): n is a, c, g, or t
  misc_feature (540)..(540): n is a, c, g, or t
  misc_feature (547)..(547): n is a, c, g, or t
  misc_feature (584)..(584): n is a, c, g, or t
  misc_feature (588)..(588): n is a, c, g, or t
  misc_feature (604)..(604): n is a, c, g, or t
  misc_feature (679)..(679): n is a, c, g, or t
atgattttgctgcttagtattttttgctgangctatagagaatgctaaggctacggtttttaccccctcttatatgtttttgtatgttttagtgtgatatatattaatatatattgatacacatattaatatataatgcaatatatattaccgaagagaacacattgattaaagaaatacaaaaatttggcatcatttccaaacttaaatagtgaaaataaaaactacaaaaggagctgcataccctaaatgtatgangtgagaaacaagcatatgcaaaaatgtgaatgtacatccaatttctctggtcttgtgatatgacatcaganccatttacaatggcaaaaccctaaggnactgcngtgaagagagcntgtgtgcgcgcgcttgggtgtgctgcaaacaaatagcagagcncaaagcaaaaagcctgtgccggtgaagtntccgacgtnggtgaacaccaaatgatggactgtgctganagggggttgananatcaggttacacattgacagaaagtatttggacctcanattncagtttnaaaaccagaaactttacatttaagaaataatcccttnattnaagtgaaaaaggattnttggaacgatagggaggtctgttacctgggaacaaggagctggttcagaccaataaagctacgagtgaattaatnaagt

SEQ ID NO: 521779 - DNA, 100 bp, Homo sapiens
ggcagacttgaccttgaccagatagtcttcaagatgccaaactggagcggaggcagcaaaatgtggagcgtgtcaacagaccgtactacgatgcagaaga

SEQ ID NO: 521780 - DNA, 129 bp, Homo sapiens
actagctgtaagtcgtggtcatcggaaaaccccatgcacaaaagacaaacattcaagccgcattggaggctcatctcacaagagatgaacttcgggcaaaagctctccatatcccattccctgaagata

SEQ ID NO: 521781 - DNA, 238 bp, Homo sapiens
  misc_feature (7)..(7): n is a, c, g, or t
  misc_feature (65)..(66): n is a, c, g, or t
  misc_feature (79)..(79): n is a, c, g, or t
  misc_feature (84)..(84): n is a, c, g, or t
  misc_feature (91)..(91): n is a, c, g, or t
  misc_feature (94)..(94): n is a, c, g, or t
  misc_feature (96)..(96): n is a, c, g, or t
  misc_feature (105)..(105): n is a, c, g, or t
  misc_feature (113)..(114): n is a, c, g, or t
  misc_feature (119)..(119): n is a, c, g, or t
  misc_feature (150)..(150): n is a, c, g, or t
  misc_feature (179)..(179): n is a, c, g, or t
  misc_feature (183)..(183): n is a, c, g, or t
  misc_feature (193)..(193): n is a, c, g, or t
  misc_feature (209)..(209): n is a, c, g, or t
gggaaanggagagcaaacccacaaaagctaaactccaaacacccaaaggtgttgctacatttttnngaggcgtgggcanggcancaaatgnatnanaatggggcncctcccannaagtnagcacccctcccccacaggatgaaatgctcnggccagggatggggcccaagcccacacancatncacactggangacacgctgccctcanacaaacacacatgcacacacacccacgtt

SEQ ID NO: 521782 - DNA, 202 bp, Homo sapiens
  misc_feature (139)..(139): n is a, c, g, or t
  misc_feature (159)..(159): n is a, c, g, or t
  misc_feature (187)..(188): n is a, c, g, or t
gtcttcctgtttgcattgtgcagtggggcacatctctctcgatggcccactcactggtgtcacagagggcggcacagctaggcagtatggtcagtgtagttccatgtgctctgttgtacggaattctctggcacatgtnggcacaaagctgtgcccccngatacatgcgaccaggtggcatcctctnnagagtcgcacctgc

SEQ ID NO: 521783 - DNA, 929 bp, Homo sapiens
atatattagtgcatatagaatggccagtataaacatttaaccagtttccactctttttcagtttacagtttaatgacattaaatatgttcacatgtttagcaaccatcaccgccatcatctccggaacagttttatttttcaaaatggaaattgcaaccattcgccaagctctccactctctctctcgcccacccctgggggccacctattctagttatgcaactctaggagtctaactactctagacacttgatagataagtgtgaatcataccgtgtataatctttgtttctttccagcaggtagaatctttctcgtgtcacccaggctggagtgcagtggcgtgatctcggttcactgcaacttccacttcgggggctcaagcaattcttatgtctcagtctcccgagtacgctgggattacatggcgtgcgctatcatgcccagtctaattttccgtattcttgtaatagatgacgagctttcactcatattggccaggctggtctcgaactcctgagcttaggggatccacctgtctcagcctcccaaaaatgctggggttacgggtgtgtgccactgttgcctgggcatgtgtatcctttcgggatctctctgtttcccctgccgataatgtcttcgggttctccatgttgcggctgcttcagaagtgactgttggtgtcgtcgtttaccgcgtgggaatcgtctgggtagcgttccatggggttcactctgtggccggttggctttgcagtggccactcaggctcgtaaacctcgctccgggtcaggatctgtctcaattctgatactaattaagtgtgcccccccctttcgtttttacatgggtccttgtgcctgtttattgtcgtgtcagccacccgtgtgtagctctgcccggtttttagtgttcgctttttttccggg

SEQ ID NO: 521784 - DNA, 255 bp, Homo sapiens
cctttattatttcccctgaattccaatttcatttctgcttccgctaagtaagagcccccccttcctgtgttttctctactattgagcggtagacgaactgtttctctaattataaacccacctgtttgggatattcagggaaaccccccccatgttatgttgtcctttaatgggaaaggctggggtcatatgtatttttatgttctgtaaagtatttgccttcctagttccccataaaatttttttagggctata

SEQ ID NO: 521785 - DNA, 396 bp, Homo sapiens
caggtgtgagccaacatgcccggcccatcagctcttaagcagcaagaggccctacatctgtctgcctgtctgcacagcacagttaagcaggtggctgcatcctctgcagttgctgacagcctatcttcctgaagatgtaaaccttcctgcaaggctggctcttctttgggtgtgatgaagatgatgacagagatgaatgttgggctctaagggtcctggttcctttgaagcacatccaggggcctctaagatgatgggctctggttcctggcctgtagcatggtgtagaagcaggagcgctttgcaaggtagactctacaggcagcaccttgatggagtatggggtttcagggtgaaagacgtggatcacaggggcacctcagctcgtgaatctca

SEQ ID NO: 521786 - DNA, 337 bp, Homo sapiens
tttgggctgtcgtgccccgagtgccagactccaccagacgtacacagatgtgggtgctggtgctttgcgtcgtattggctctcctcgatattcctctccaggctgctgctggcctttctgagtgggtttgatgtctgctctccaggaaatagctttgctaagagctccgatcttgtagactacgtgtcactccacatggctacttttactctggcaaaatcacacgacatgtcggatctgggaagcctctattgctctttgatgatgggtacgaatgtgatgtgttgggcaaagacattctgttatgtgaccccatcccgctggacactgaagtgac

SEQ ID NO: 521787 - DNA, 1434 bp, Homo sapiens
  misc_feature (499)..(499): n is a, c, g, or t
  misc_feature (972)..(972): n is a, c, g, or t
  misc_feature (1202)..(1202): n is a, c, g, or t
tttaagagcgtcgcctgcgacgtgcgcggatggatgatctgtgtggagactctcgctgtgatagtgcacgaagcgcttatatagttgtgggcacaccaccgggcgtgtcatagcgatcgccctgcaaagtcgagaatcgatactggggtgaggtcggcccctccctgctgcctgtagttgttacccatgtgcgtcttctttgctaggttactacttcccgttgcacggcgcggatgtttttttcttgtagagcgcacccgggggttgtctgctcgcgtaattagtagctgctcctgttgccctcttttattggggggatattctcgcggagagaaactgtttagagaggttgtgaaaacctctgcctaaagaccccgtgtgcgggaatgttctctcagtgagagagggacgtgaaaaaaattggtgtcccccgaggtcccacacaggggtgtctcccccaacaccgagtaagaggtgtggaacaaccttaatgtcgtgngggcgttctcaaaaagatggggtgtatacttgtacctcctccccgcgcccttggtaaaaatgcttgttggggggaattttttagaggtgaaaaacaatgtcgggggggataagaacagcgcaattgtctcccctcagcagagagatcgtcccagcaaaagaaattggggccccccccgagggaacctcccgtcggttgtgtaatatccaatgcgggagggacacacccacatggcctttaaggatatttccaggatattttaagacctgggtacaccccccattatggtagcccccttgaggctctcatatgtgctcccagatagttctctggagggaataaaccacttcacatgccacagaatattgcgcacaaaatggcgctgagagaaaatatatgttacacacactggagatgaaaggaggggtcacagaatgttcaccggagacacatctcgagacactgtgagaggngacacacacgagagattcttaaaacccccacaggtatccgcaggaaaatgtgtttctgtgttgaaaatgttaaatggctaacactgaaatggcttgaatttattccaggcgcccacaataagagccacttgttaatagtatggaaaagttaaatgtggggtgggcttatggcttctttatcctcctgatttctagccactcttcaaggtgagactgttggcgtactggtnatcactattgtagagctattagggaagaagaaagaaatgttggcttaagaaagaacatcaccacttgattttaaatacacagtagcacgggtattgcctttgagttcacactgttttaagtcctcatttttctcacaactaagtggcttgctgttccccaatatgcacagaataacttttacactttttccttccaacactttttgattggctttgcagaaataaagtttta

SEQ ID NO: 521788 - DNA, 679 bp, Homo sapiens
  misc_feature (3)..(3): n is a, c, g, or t
  misc_feature (71)..(72): n is a, c, g, or t
  misc_feature (79)..(79): n is a, c, g, or t
  misc_feature (109)..(109): n is a, c, g, or t
  misc_feature (116)..(117): n is a, c, g, or t
  misc_feature (139)..(139): n is a, c, g, or t
  misc_feature (158)..(159): n is a, c, g, or t
  misc_feature (163)..(163): n is a, c, g, or t
  misc_feature (184)..(185): n is a, c, g, or t
  misc_feature (190)..(190): n is a, c, g, or t
  misc_feature (213)..(213): n is a, c, g, or t
  misc_feature (216)..(216): n is a, c, g, or t
  misc_feature (220)..(220): n is a, c, g, or t
  misc_feature (225)..(225): n is a, c, g, or t
  misc_feature (229)..(229): n is a, c, g, or t
  misc_feature (232)..(232): n is a, c, g, or t
  misc_feature (235)..(235): n is a, c, g, or t
  misc_feature (239)..(240): n is a, c, g, or t
  misc_feature (246)..(246): n is a, c, g, or t
  misc_feature (275)..(275): n is a, c, g, or t
  misc_feature (311)..(311): n is a, c, g, or t
  misc_feature (314)..(314): n is a, c, g, or t
  misc_feature (331)..(333): n is a, c, g, or t
  misc_feature (355)..(355): n is a, c, g, or t
  misc_feature (392)..(392): n is a, c, g, or t
  misc_feature (410)..(410): n is a, c, g, or t
  misc_feature (453)..(453): n is a, c, g, or t
  misc_feature (557)..(557): n is a, c, g, or t
  misc_feature (644)..(644): n is a, c, g, or t
agnaggaaggagagaccaagtgtacagagccttaaaaaagacatcctctcccggcctcccatcccaaagcnntggtccntaggttagtttagacagaaccaggaaagcnaaaaacnntaggtacctagtatgttagttnatggggagaacgcaggttnntgtnggtagcttccactttcaagcnngggcnttggttattgggatagtgcgggntcnagtngcttnaggngancanccgnnaggtgnaggttgcgagtgactagcacatgggtggnagcagcctcacggagtgtgggggggcgagtgtgagncanagggtgggtgaggaggnnntttgggggactaggtggctggnagatggggtctcggccttggctgatccattgctaggnatgtgaaatgcagctgtngatgagggagctggcactgtaggtgtggggtgggtggggcgcnagaagcagggatgcggacccaccgggctctgggctgggggcactccagaggtccgggctggcctgctcttcgtccaggtggttccagtgctgctggtgttccangcagcggacagcgacctggtccagtgtcactgtgaagttctgttggtctgcgttgcctggtggatgacacctctgtcaggttagggnagaagacggcatagtcaaactggcagggctgcagc

SEQ ID NO: 521789 - DNA, 706 bp, Homo sapiens
catggtgtctcacgcctgcaatcccagcactctgggaggcctaggcgggcggatcacaaggtcaggagatagagaccatcctggccaacacggtgaaaccccgtctctactaaagacacaaaaaattacccgggtgtggtggctcacgcctatagtcccagctactcgggaggctagggcaggagaatcgctcgaacccgggaggcggaggttgcagtgaggcaatatcgtgccactgcactccagcccgggcaacagagtgagactccgtctcaaaaaaataaaaataaaaacaaaatacaaaaaaatagcttgggcatggtggcacatgcctgtaatcccagctactcaggaggccgaggcacgagaatcacgcgaacccgggaggtggaggctgcagtgagccgaggttgcaccaatgcactccagcctgggtgacagagcaagactctgtctcaaaaaaaaaaaaaaaaagagccaagcatggtggtgcacaccttgtactcccagctacctaggaggccgaggcacgaggatcacttgagcccaggaggtgaaggctgcagagagccatgataagcgccagtgcaaaccagcctgggcaaaagagcgagatcccgctctggggcaggactacctatgtctggatccgggaggtggaaccccgggagtgtgcctgagtaaagtcatggagtactgatcctga

SEQ ID NO: 521790 - DNA, 322 bp, Homo sapiens
cctgtgggtagcacaacctagggtcagttttgcatgtggtaaagccatttaccaagatagttgtaggtaagaagggcagatttattagagaaattgtgaaaatatgttgcagtgggcagctcagcagagaaggggctacctgcaaagaggcaagggctggaggaaagttttatagggtcctgctgaagggtgctacgtgtggaatgaggtcattgtgcccgcaggttgtttgtgattagctgtttctaacaattgttcatacaataattgttcattattgttctcaacttggggctctccccaacctggggacccttcctta

SEQ ID NO: 521791 - DNA, 575 bp, Homo sapiens
tcactatgagatataagaatagtgcttaatccaatccaggactgggtgttcttataacacgcacagagcacttgctctctttctctctctctccatgtagaaccaagaaaagaacatgtgaagacacagcgagaaggcggctgactagcaaaccagagaagacagccctcaccagaaaccaaattttggggtaccttgatcttggactaccagcttccagaactgtgggaaaatacatatctgtagcttaagccacccagtcggtggtattttgttatgacagcccatgagactgcatcatatctcaatgatatcttgggtaggtgtgacaattatgcagtttcttcaaggtacaattatataaaccgaccaattgccacagatattgggacattacagcaacaaaaacaacacaactatacaatcacaccttagaatacagacctagaatgcaataaggacacgaagcaccatctcagcagtgaaatttcactaaataaagggctcacaagaaacgaaatatcatccagcaaaatatggtcatcactctttagagatgtctaacaataagttgt

SEQ ID NO: 521792 - DNA, 292 bp, Homo sapiens
ctgtggaacaagcggtagctcgggttgggaaaagggaacccgtgacatgctgttggtgggaatgtaaattgttgcagcctttatggaaaacagtacgaaggttccttaaaaaataaaaaaatagaactatagcaccatatgatccagcaatctctctgctgagtatatactcaaaagaagtaaaattagcacctcacagagctgccttcttatgttcactgtggcattatttacaatagcaagatatgcaaacaacctaagtaagcatcaaaggatgcgcttgagtcaattg

SEQ ID NO: 521793 - DNA, 428 bp, Homo sapiens
  misc_feature (118)..(118): n is a, c, g, or t
cattttaaaaacgtatatggcagcagaaacttgtttctcaatagaaaaaatacattcagaggcatttctgggatagtctatctgtgttagtatttggtgctatctatgtccagccaanttaaatacccaaagcacaaacatgattagtcaaaatttgagggtagataacttggctggacatagatagcaccaaattctgactaatcatgtttgtgctttgggtatttaaaattacatacatatatattctttttgccaaaaacaaaagtcttgcttcttgtcaaatgattgctaaagtaaatcttacattttttgttattatatatgtatttatacacatccccaacacacttactcatttctattatttcctacagaacacacctttaaggctataacatacaactaaaacgaacccatctatttaa

SEQ ID NO: 521794 - DNA, 745 bp, Homo sapiens
ttgatccgaggctttgcgcagataggctggggctgcgtgccatgagcgttgattgtgctgtcggatgggctggacgcagctgcgaggagctcactgcggatcctaaacccgaccgcagctcctcggacgcaggtttaactatcttatatatcaacaaaaatgcggattcagaacaagcacccaggaaggttgaacctcgaagatcagaaccagggacaagtggtgaagcatacaagagaagtgctttgattcctccatgatggaagaaacagtcttttatccattctccctatcctataaggagtctcataaaagctttatttattactgtagggtttacaggctgtgcaatatggatcagctgctattaggcaatatgaatcactagcaatccagggtccatcagttatatagatggtataaaagctgattggttggcatcagcataagcacacaaaaaagaaggagacttcagaaaggagataaacaagtggtggaataacctacagtgatggaccagcggactgtgacaggtattatagctgcaacttgtcctatgtatactggtatattggagaagtacattcttctgcagcggaaccaatgactcaagattattacacatcgaaatccagacctcacaggtcctatgttactccaattgtagctgtcaacattaagttaatatatacttaatacacatggagaaaataagaattgatagtggacattatccaacatataa

SEQ ID NO: 521795 - DNA, 361 bp, Homo sapiens
ttatgaggttcctaataacattttcttttctctagcctatttattgtaagaatgccatacataatacatgtaatattcaaaatctgtgttaatcatctgtttatgttatccataaagcttttggcaaacggtaggctactagtggttaagttttgggacatcaaaagtcatatgtgaatttttgactgcttggggcttggtgcctcaacccccatattgttcaagagtcaactgtatggccaggcgcagtgctcatgcctgtaatcccaacactttgggaggccgaggtgggcagatcacgaggtcaggagatggagaccgtcctgactaacatgatgaaaccccgtctctactaaaaaaa

SEQ ID NO: 521796 - DNA, 916 bp, Homo sapiens
ctgctgtttgttggttcactgtctcttatgaacaacgagccacagtcacagagcttcaagtaatttacaagtactaagtcatcttacgtttccatttttattcaatcgggatgttgcaatcgtttgtcaagctaataaacttataaagtgatgtggtccacaaagactccttgatccaataagctgtgcagttgaagtacaaaaagatacttaattcttcggagactcttacagctaatttttgccatgctcaacaacaatgagtcttgtacagtcgtaatagtattcatagtagtaacactctacatactgcttaagattcttctattatgagagaccttgactgcaaatcaaatggcgtactcctccattttattagccttacctgaatcagtcctttttggttggtaatacatttgttctatagcacccacgttctagacttctcacacaagtacaacaccttctagtttcttaagcactgtttcaacaagaaatccagaagcacatttgtctgcacaaacaagttacaaagttcaagaagtgtttcttgtgcattgagctttgagattcagtgtttaacttctgtgaaaccacatctgagagacttgtcatttctacattcggtgtgtgtgctaatctctttctgattcccattttggttaagagagcacgtaaatagatttctgggtatcttgtgcacttgattacatttggtagtaaccgttctgatagccagttgctcaggatacaagtgaccaggcagaattcttgaatcagttaaagtccttaaagcctaaggctcaatcttgcattcattgttgaattcttaattcctggtggccacgactggctatgcccttggctgcttcgttccgggtttttcaagcgactattggcagtccccctttggcgc

SEQ ID NO: 521797 - DNA, 710 bp, Homo sapiens
agcgggcgttggggttccgggcgccttccgcggcgcgcgcgtggcccgcgcccgccggtcgactcagcagtgtgcgaccgaggtcgcgggccgggttgggagctcgcggcttgctggctttctgtgctagcatggagtagcaggtgcagacgaccgacgaagcgcagaaggagagtgccgccacatgcgtacacgaggcaggggctgctttaggcaaggtgccatgtgcaagtggccgtatacatcggatcgaggcgtcgtgcgtagatgaaaggtctctatggctcggctgcatgaaggaaccatggactgactaggcgttgcattgaatggagggaaatattcacctaccaaatcaagtgtaatggactattgcggaactatataggggcctatgaggaggcatgcgcacttgagggacaggtgcggactaggggtttgaccgttcttctcacgccgaacggaggtaccttgggacaaagattggggctcatgtggttcccgttacacagttgaataggagcacggacggagtcgtcatctcggagatatcgctaaggacttcacaaggaaagcaaatagagaaagaaagtttgcccagtgaccggtggaatactatcgggacgccaaccaggtgatagtttatcaaatgtaggagacgtctccccgggaaaaacagggggttcctgaccaacaaatggttgaggtcc

SEQ ID NO: 521798 - DNA, 196 bp, Homo sapiens
tcgtatgcagaggaagacggggtttcaccatgttggtcaggctggtcttgaactcctgacctcatgatccacctgccttagcctcccaaagtgctgggattacaggcgtgagccatcatgcccagccctatagtagttcttcttttgccccttaatatcctcacccacatgtcctgtactctgcaaggaacccacg

SEQ ID NO: 521799 - DNA, 382 bp, Homo sapiens
catacgtagttcccagtggtccttcagcaccatcagaagatagcacccagacgctcatcacaagcatctgcatgcagctgagacccaacacccgtattgatctcagaagaagcgtcgagtggtgctggactccttcctgctcgtgctgctggagctgggtgagtggccctgagggttggagtcaagaggggccccgtgggaggctctgcactccttttgtacaggctctgtctcccccttgacactgagcctcgcagcatcctgaggaggcagctggctgccatcatcacagctcccattttatcaggtgaggtacacagaggccttgtgagtctgggcacacagtccaggaaatcacacatagctaaaatccctgggctgt

SEQ ID NO: 521800 - DNA, 226 bp, Homo sapiens
gagatcctgcatcagatgtgcatgagcagctgtgttgcctgtcccggaatgctgtgagatggttcacccccatagaacagtgaatgaaaggctccagcatctacctttctctggtgaatggtagaaggacgcccggctgcccatctgtgcacttggctcagggatggaggctcgagagaggcgtgctgtgtgattggcccttgacacactcgggtctacactcgtg

SEQ ID NO: 521801 - DNA, 174 bp, Homo sapiens
agtaattaccttatccaaaaccaatgcgtccacagtatgtcagcgccggggcccccgtgattaatgcggtaattgagcgctggtggtgtgacttcaaacatctgtggctggcacaccaccagcgacctcataacgtatgaccaactcttaagttagtggcagaaggcgttaggt

SEQ ID NO: 521802 - DNA, 139 bp, Homo sapiens
taggagtatctgacgctgttttcttgagcttaatatttttttagagttaactctttaaggaggttatcatggctgtagacaaggccaggtctggctgacgtgccttagaaggtttgaatgaagaaaaacgagtgcttgg

SEQ ID NO: 521803 - DNA, 110 bp, Homo sapiens
ctaggcttttcgattggctcggcgctccccgggctgcagtgcgggggggaggcagaagccacgtgatgctgcggcccgtgcgcacccgcgagctcagcacgtatgttggg

SEQ ID NO: 521804 - DNA, 546 bp, Homo sapiens
  misc_feature (464)..(464): n is a, c, g, or t
ccctttactcccacatataggcccccattctttttgaatataaattacgaggcccccttccacccgccttttaattcatattcttcaaaattctaatgttggtctcaaaaaaatattttgagaaccaccatctctttttaaaaacaagcatgtttaaccccagtcgtgcgactcttcgaacccctttaatagccccgccccccgtgcgaggaacattcgctcaattttaagtcccgctgttgatccccatatttttcatccccagccactcctaaatgtggaaaagatttattatggggagtggtctggagcggcacccaccttgtgtgcgaaagaataacacaaatttaacaagagggaaaactcgtgtaaaccaccaataatctggagatggcgcaagagaagaaaataaaggagaaaatatgcgggaaactataaaagacataacacaccacacacccctntatgcaagagaaaacaagagagacaacatttctagccccgaaacatataggagaggccccgaacaatagatacaagaaaaac

SEQ ID NO: 521805 - DNA, 198 bp, Homo sapiens
ggtactggtacaacatctgagtggactcttcaacagggatggaaagctttggaaaacaaagcagaagatggaagtttgggaatcagctgcctagaagcaagaggcagtggcatcatgggagaggaacagagagaggcagtgtgaaaaataaactttaaatagggaagtatacagtgtagcttttatttgctacttcgt

SEQ ID NO: 521806 - DNA, 360 bp, Homo sapiens
  misc_feature (343)..(343): n is a, c, g, or t
cacgaggggacaaggcacattccggcaagagccgggctttcatacgaaggagagcaccacaatggccggtccacagcgcaagtctgtgaacaagaagaaggtcgtccccatcaagaccgtgcatattggcgcggtcgactacaaggacaccgccctgctgcgcaagttcatctctgagcgaggcaagattcgcgcacgtcgcgtcaccgggctgtctgtccaggatcagcgcaaggtcgctattgcgattaagaacgcacgcgaactcgcactgctcccgtacgcctcgacggctcgctgagaagggggaagacatgaagctcattctcactgctccggtggncaagctcggtgtccccg

SEQ ID NO: 521807 - DNA, 187 bp, Homo sapiens
aattcgcgaccgcgtcgacgaagggctgatcgaactgtcccgggaacaggttgaccaaagacgctttgaagaacggcccggcaccgagcacttcaccgaacgacatcgcgtaccggcgcagcaggtacagcgtgcgctgcagctcctttttacggttgtcgaggatgcccagtacgccattgcgctt

SEQ ID NO: 521808 - DNA, 462 bp, Homo sapiens
acccaatcgtcgtcttaagctgggagtcaatacgtctgtcaagtgtcgcagtcacacagtgtacagaagctcaaaaccatttcaatttacggtctgcagagcattggacacatcgcgctcattttctggacctgtttagtgctttctttactcagaaacacaagataacacatgcctcatgctagggagggtcaatatttcttgcagccaaaattccaagataatgtcaagccagtgcaggatatttgtctcctaaagtctccacacattcccagacccgtgtggtcctttcttccaggtctcacccacgctttctgcgtacgccaagatgtgtatgtatctgtgcatgtggtccgggttgaccagagccttgcgtttaaagagtgatcgcatgcacaggtccagaaagtctggatcgcggataagctcaagcggaggagggtccacgcgtgagcacatcct

SEQ ID NO: 521809 - DNA, 136 bp, Homo sapiens
tctccctctgtccagcccctccctccctgcggatgcagcgtcgacagagctctctggggatgatggagacgggcagcacaggggtgcttgcctaaaccatgacgccgcgacaaaactgtaaagctgataaacctgt

SEQ ID NO: 521810 - DNA, 376 bp, Homo sapiens
atccttccttctttcacgactgcacccagtctgtattgtcctttgaggaatatatgttccggtccttcgcccatttttaaataaggttataggttttcttgttttgagttgttggcatttcttatctattttggatataactccttatcatatggatgggtggaaaatatattctcctgtgttataggtggacccttcactctgttaattgtttcccttgctgtgtgcaagcttttaaatctgggataatgattgatttctaaatgttaactttgcactcccgggggtgaatacatttggtcaagaggtattcttttaaagagtgattggatttaatttgctagcattttgtttagcacttttttccccatatgtt

SEQ ID NO: 521811 - DNA, 765 bp, Homo sapiens
  misc_feature (2)..(2): n is a, c, g, or t
  misc_feature (37)..(37): n is a, c, g, or t
  misc_feature (182)..(182): n is a, c, g, or t
  misc_feature (223)..(223): n is a, c, g, or t
  misc_feature (257)..(257): n is a, c, g, or t
  misc_feature (311)..(311): n is a, c, g, or t
cnatgttgggatactgagtcatcatggaccttcctanattcccgagcacaacatcacagtccctttcctgctggtaggcaaaactaccgaacctctcatctctctgaacaagtcacacctacaacttcgagctctctcctacatatggcagagaaagccacgggagactgtgcagtatcatntaacaaggtaggagcaggcggttcgagtttttcctttccanggacaactcccgcgtatatctgaaggtttcagcnaacagccgtgcttgtatgtccgcatggaaggcgtggatcccacacactgtccanggttcccaagttgatatttgtcttcacaccagaagcgaggaaggagatgtgaactttaatcttgatcctgcacatgtggaaagagaaagtccacccctgtgacattacaatgtcaaggcgcgagggctacactatgaatgtggagatcaagtgcaaggacaggacaggctccatcactctgttgactcccaaccagactaacatcatcaacttctatgaggtggagttaaatgaatgtgtccagtgtgaattcgactttatcaacactggaaagttcaccttcagcttccaggcacaggtgtgtggctccaaaaacttggtggaggtggaagtgatagagggagcctgcagtgccggaatttggagtatttcccatcagcggggatccaaatgtgtgatgagagaatggagtgtgtgcaggcggttctggtgatggatttgtgattactgtcga

SEQ ID NO: 521812 - DNA, 117 bp, Homo sapiens
gccgtgactcacgcctgtaatcccagcacttagggacggcaggtcaggaggatcacttgaggctagttcacgatcagtctaggcatcatagtgacgacctctatatgaaaaaaaaaa

SEQ ID NO: 521813 - DNA, 836 bp, Homo sapiens
ggtcatagttgccctgcctgagcaatgggagccctgcgcctgatctgccgaggtcgggagtgaggtgttagtgctctggtgcacacccaattccgcgctgctcccgctccttccgtggaccccgtggatgatggcttgcctcctaccgggatgagctagccagcctgggcaatatcagaggccgagcctcagggcgcgcgctaggtgatccgaggctggtcggccctaaccgggtattgatattcttgatgactctggcctgagttccagtgatggtttattatatcttgtggaccagacttgaacgaaagttgacctcatgatgcacttcagcctctccagctgtccatgctcactccgagaggctgtggcgactgtcctggggcagcactgctgtccagctcttcatcctaacatgtggtgacgtttggcctgctggtccccctggactgtcaccgacttctacactcttacttctatctgctccattggcatctgaaccaaatgagccaacgagttcctgcagtaaagcttgagagagggtgagtgctgccctccactatttgagggagcttccctctgccgatggcctcagtgcccattgtctagtgatgtgccagcctcccgtgcccgtggtcttggtgatcaccatcatccactgtggacaggcagcctggcttccacttacggtcctgcaggttgtgtccagttccagcggcttcttctcggaatgtgggccccagtgcgaggggcacaactcttctgtgcacgtggaggtgtatgttgagcaattgatgcaaggtgcctcccaggtttcctgtggcatggcaggcagg

SEQ ID NO: 521814 - DNA, 166 bp, Homo sapiens
cacatttgcaggacatacttcatttgtatataatatattatttgtaaattaaataaggaggctagtatattaattgaatgttgtatagatctcgcactagaaatagaagtacttctagagtatctgcatataatacaataaaatagtttacctatgacaattagtt

SEQ ID NO: 521815 - DNA, 421 bp, Homo sapiens
cgggccagtacggatgtgggaggttcagtaaaaagaaacccacatagtcacacagcctttgtggagctcacatttgaatgttgcatcaagtcgagttcacctgatgcattgttctttactccaaggtgcttccagctccatcaggaggattgggtgggtgtcctgggtccagaagaatggagactaccaacctctttgctcctattacaaccctcccttgcctgcaccacccactgcccttacttttgcatttgttattcacatcatagaatttaaagcaagtcacacggtttctcacattacctacattttactcagacgttctagttctcatacacattctcttacaaccttttccagggctaactccatggaatgatttttggtcttttagtatagtctagttttgtttttgagagag

SEQ ID NO: 521816 - DNA, 1210 bp, Homo sapiens
tggggtaaacccgaggttttttttttggggggacaaaaaaagggggggcccccaaaggccccccccttttataagggggtcacacatgaagaaaggttagtaagaagtatagaaaatacggagggtgggggggacaaataatagttatgaaagaacacccccccaacagagaaggtgactaccctacttccacttagtgtccctactttgatagggagatagtgtgaccacagggcagtttaacacacttgtgagagagcacatgtgtacgcaatatgatgcaaaaacacacggcaggtggtgagcaacacaaaaatacagcgagaggaaccaccacgcggaaaaacaaacagtttaaaaaaaaggggtagttcatgagagaaggaaaaaagacagaggacccccaaaactaaaaaaggggtggaagaacaagggtaggttcaaagatgaagaaacaacacaagaagagaaaaaacaacgcggggtgacaacaaagaggacaacacacagaaaatacccactaaagagaggaggaacacccacaaaaaaacaggtgaataaaaaaacaaaagtataaaagaaaacaaaaaacaaaaaatattgaggaagaataatacaaacaaaagaaagaagacaaaaacacacaacaccaagaaaaaacgacaaagaaagagagaaaaaacaaaaagaagaggcacaaaaaaaaaaaaaaagaacactcccagaaaaatcagacaacacagaaaaaaaaacaaatgaaccaacaaaaaaaagtagagaagaagacaccaaataaaacagcaggagaaagaaaaagaaccaaggaaaaacaacaccaccgagagaaaaaaaagagaacaaagagaaatgaccacaaaggagaaacaaacacaaaaaaacacaatatggagcgagaaaagaagaagcaaagaaaaaacaaatgaaaacaaagaaaactactacaagcaagacaaacaacaaagaaggtgtatagcaaatagacacaacacagaggaaaacaggagaagacacaaaaagatataaggatcaagaaagacggagcaatgaagataacaaataagaagaggagaggagaaaaaaatacaaatgaaggaaacaacaccaacgaaaaagaaaagagtaggagcagaaacaacaaatgggagggaaaaagaaaataaacaagcagacataatgggagcccacacaa

SEQ ID NO: 521817 - DNA, 774 bp, Homo sapiens
gaatttatttaaacttatttgagataattatagattcactggcagttgtaagaaataatatagagatcctgcatatcccctacccagttttcctaatagtaacgtctttcaaaacaatagtgcaatatcacgaccaggatattaacattggtacagtcaaaatacggggcattaccatcaccacaaggatatctcatattgcccttataaagccaccccacttccctcctacctcacccctcctgaactcctggtaaccacaaattatccatttgtataagttggtaattttgagaatcttacataaatggaataatacagtatgtaacttttgggattgactttttttcacttagcataattctctgaagattcacctaggttgttacatgtgtcaatagtttgttcctttttaaattttaacttttattttttcgagagtaagtcttgcactccaggctggagtgcaatggcacgatctcggctcactgcaacctccgcctcccaggttcaagctagttctcctgtctcagcctccagagtagctgggattgtaggtgcacaccaacacacccagctaaattttgtattttggttagagatggggtttcaccatttggccaggctggtctcgaactcctgaccttgtgatccacctgacttggactcccaaagtgcccagattacggtgtgaagccaccagttctggttgtggtcctttaaatgctgagtaatattcatggaataggtagatcacttaattaatctcgtgaa

SEQ ID NO: 521818 - DNA, 127 bp, Homo sapiens
gcccaggccagaccccaccccccaccccactgtcgtggtggccccagatctctgtaattttatgtagagtctgagctgaagccccgtatatttaatttatcttgttaaacatgaaagtgcctcccta

SEQ ID NO: 521819 - DNA, 440 bp, Homo sapiens
atcgatggctgggtgtaatgcacgatatcatcagatcaagtcaggatatgacccccaccgaagaatgagaggaagtggcgttatgatgtatctagctgtcgttcatccttccctgagacaatgaacaagtggaccacctttccaccagtataagcaagtacacttttagtaagttagatgatctgttgaagtacttatggagctgcacacacttcaaccttggcagataatatcaaaagtaacgaagacagatatgattatacttctcaacgcagaagcgcattttgagagaagttgggtactggctgtggcatcatttagctgaagtcctctttcctacaaccttgattagatcatatacgttccagaagggcatgccaccatgaattcttcttaatactgatgtagcccctttcatcagtgactttactgcttaacag

SEQ ID NO: 521820 - DNA, 350 bp, Homo sapiens
agcagttaactaaagatcaggcatattcaaaatagtgattaaaggactcaggaggcaattgcagtgcctcacgcccgtaatcccagcactgtgggaggcgaggcaggtggatcacctgaggtcaggagttcaagaccagtctggccaacatggggaaaccccatctctactaaatatacacacacaaaaaaattagctgggtgtggtggcgtgtgcctgtggtcccagctactcaggaagctgaggcagtagaatcacttgaatccaggaggtggaggttgcagggagccaagattgcaccactgcactccagcctgggtgacagagtgagactccatctaaaaaaaaaa

SEQ ID NO: 521821 - DNA, 471 bp, Homo sapiens
  misc_feature (70)..(70): n is a, c, g, or t
ggtaagctcccaaggcttcccccccccccccgagattagcatcccatactagaatcaatctcacttccanctaagctcatactcaattgatggttattaggcaattccatttctttctggttattataaacagaaaatctttcctcttctcattaccagtaaaggctcttgggatctttctgttggaaagatttctatgaacctgtcttattttaaaggtggggtttttttctggtaaaatttagacctaaatcgcatcatgccaacttgtgactttgagactattcatcaagaatgaggatatagtagccatgacatagcttgagctataacctttaattccttactttggctatgggtggagggtgagttttaaaaggttttgatttttttgtaacctgggaaaaccatgaccttgggcccgattttttcagattgctttgggtaataaaaattgggggtgggatttga

SEQ ID NO: 521822 - DNA, 444 bp, Homo sapiens
ctggaaaccacccaaatgtccatcaactggtgattgtataaaccaactgtggtacatccatacaatggaatactactcagcaatgaaaaggaacacactgatacatgcaacagcatgggtgagtctcaagagcattggactaaatgaaagaaactagaaaaaaaagagtatctactgtatgattccagaaagttctaggaaaggcaaaaccataatgaaagagaacagatcagtggtttccaggggttggggggtgggtggcaggaattgagtgcaaagatgcacaaaggacattttgggggtgatggaaatattctatacatgattgtggtggtggtgaacaggtgtacacatttgtcaaactcataaaatttaaaatgtacacttaaaacagaggcattctatttatgtaaatgacacttcaataaagctgtttagtatgtg

SEQ ID NO: 521823 - DNA, 1787 bp, Homo sapiens
gaattcaacattagaggagtaatttatcatggcagaagattttttaaacaaagttagtagaaaggcatctgaacaacttaaaaatctaaaaagtccataccaattcgaacagaaaaaactaaaaccgttcaacttcgcatgagcacatataagaagttaaacgcatcgcttttgagaatgacgaaaaattgttgatgtcttagaaaaaattattctgtgaggccttgccaacgtaaaataagattgagcttaacttatgtattactgattgtgtgatttatgataaaagattaatcttttatcataaatcacacaacttcgctgtacaaggtatatttaaaataaatttgatttaaacatacgtggtagatcgcaaatttaggggtctagaattttttggtgtggaaatatttcatccaaaagtactaggccctttttggtaaggtagattgtaaaattaatccgaacgctgttcggacaaaaaagatcagcttcccttaaaatcggtgtttaccacaaacccatcttttaggagctgatcttttgtctagtataacctattccgaacgaattaaaatcgaacctttgtgaactaggctgtccaatatccaaatgggggtgcggctgagccgatcacctggattatcgattactgcgctagctttcgttggcttgctgttagttggtgttcaatggctgccaattatcgtaaccggttgcctattcttattcggaatcggtggtggctattttcagccagctaatatttccactatcatcgaatcgggttccaccagcaatcaaggcacaatcggttcactgcaacgaatgattcaaaatattgccattgcaaatggtatggttataggatcaactttgattaatttaactgcgcctaatcttcccccggggattcaagtaacttggtatttggctttgttcgtagtagccatcattgtcattgccggaatctcaattaactatttacacccagaaaaggcctgagtaaacttactaacttaattagacttattaagtaaagaaaatagggaccctttcagttaacaagtgctaaccaaaaagggggcctattttcttttaataccgtatttcacacggtatcgaataaaggtcgtccgtttaatacctgtatttcgggacacatcaatgtcactcatgccagctcgataaagcttaaaagcatgttgcaagcggggatcatcttgggtgtattggggtttgcgtcccatgatatttaccctgctgcttagctaaggcaatcccttgctgctggcgcacaatgattcgtttacgttcactttcggcctgatacttatagagttcaataatcaagttggtcatcagttgacgtaaatttgggtacgcaatcccggtactggacggcaaatttaacacatctagggtaggacccccttattttgaattaggctgttactgatcttagttaaatcctggttatttctgcctaagcgatctaattcagtgaccattacaatatcaccctcacgaatataggccagcattttttccagttctggccgattagtgttagccccacttaatttatccgtaaataatttatcaacgtcttttaaagccgctaactgtcgctctaaatgttgctccttgggactcacacgcgcataaccgattttcagccatttccaattctccttttggacagttctaatgaacacttataattcctagtatagcacagaaataaaaaggccattagggataccctattggcgtttcgaaccatt

SEQ ID NO: 521824 - DNA, 132 bp, Homo sapiens
  misc_feature (116)..(116): n is a, c, g, or t
ctgcttacctgcagctctctctgatgagccaagcactggggtcatggccccagagataaacaggatgtaatccttggccccatgtgaattcctgagagataggaagtgagatagancgcatacacatgtaga

SEQ ID NO: 521825 - DNA, 174 bp, Homo sapiens
tcctgggattacaggcctgagccactgcgcccagccaactctttgctttacatagaagctacaaacgctgttaaacctttctgtcgcttctgacaggttgcgcatggagggcctagagactgcagaagggtccaactctgagagttcagatgatgccagtgacccaggagacaa

SEQ ID NO: 521826 - DNA, 118 bp, Homo sapiens
aaattttctaattctgttcttaaggaaccgcgcgaatatttgtgcttgttagatggggaaccctacaaaaatttaaaacaagggtccactcgttgctactaaaaggggtatttattcc

SEQ ID NO: 521827 - DNA, 124 bp, Homo sapiens
tggcgctaggatgccagcacactacacagacacactgcaaaaatctacatagattgccattcagatgtgttactacatagtgtcccaagataacatttgaatctgtccccttctcacgtcctgt

SEQ ID NO: 521828 - DNA, 296 bp, Homo sapiens
actgatacagatgaacggtccatggctggcttcatacagtgacataagtcaggaacctaaaatacaagcaaatgatcaaatcacaaaattaactctaaactataacacgtgtgagtcaagtttcgatgccaggcaatataggagatagagaataaatacgtaagagattatgataatatatttaacataaaacctttcacttgatttaaggctgtttttgttttgtatttgtttctattccttgggcagctgtatcctccggtaattgtatcttattcttgggcagctgtattctc

SEQ ID NO: 521829 - DNA, 229 bp, Homo sapiens
  misc_feature (82)..(83): n is a, c, g, or t
  misc_feature (111)..(111): n is a, c, g, or t
  misc_feature (120)..(120): n is a, c, g, or t
  misc_feature (192)..(192): n is a, c, g, or t
ccaccctaaacaaattcaccaaaaccacctttaataccatttctaaaacctacaactacctaacccccaacctctggaaaannactgtattcaccaagtctccctatcaanagttcactnaccacccagacaaaacccacaccaaagtctccgtgcaacggactcaggctccaactgtgacaacaacataangtttttaaacaaaaaaaataaaatcaattaagcgtga

SEQ ID NO: 521830 - DNA, 397 bp, Homo sapiens
ttttttttttaacttttagggtgagaggtacatgtgcaggttagttatgtaggtaaattgcatgtcacaggggtctggtgtacagtttattgcatctccccagtaataagcatagtacctgatgggtagttttttgatcctttccctcttcccacctttcaccctcaagtaggtcctagtgtctgttgttcccttctttgtgtccacgtgttctcattgtgtagctcccacttataagtgagaccatgggtaggtggttttctgttcctgcattagtttgcttaggataatggcctccagctccatctatgttgctgcaaaggacatgatctcatgaagttttttgagaagtttttcagtatggttttcacgtttgttgtcaacaaaacaagcatgc

SEQ ID NO: 521831 - DNA, 527 bp, Homo sapiens
gtgcgcagtctcgaggtgcagcgcagcgcgacttcggtccgagctagaacgcacgacgactgagaggagcatggacggcgcgcctagggcgagccctgcgacgaggtgcattgtttctgcgtaggtgagccacctcggtgactggaacgccttgccgagcgcactgcacagcgcctgcggcacctatacccgtcaagctcacgcgacgagccgcataccctggaggcctacagcctcgtggcgtgattgggcgacttctctcccccgtccccgtgaacgtaagcgctctgagaggtaacggagggggggtgtccaggcgcgcccacgagtgctagtgcacttcttttgggattgttgaccccaccgggtctttacacgagttgggaatctgtgatggcatcgggaccagtcctgggcgcccatgagaccactcgctgctctcaccatctgcagacgccccacccgctcggtcctggacacactgctacccctctcttgcctccacccctctgcgactctgcagctcc

SEQ ID NO: 521832 - DNA, 363 bp, Homo sapiens
  misc_feature (130)..(130): n is a, c, g, or t
  misc_feature (224)..(224): n is a, c, g, or t
  misc_feature (347)..(347): n is a, c, g, or t
cattggtccgagagaaattagatgcatcaccagtatattacaacagagccattaatcttgtagcttcatcaacattaactggtttgctttcatgacgctgctgaggaatcagttctttctgcagaggttnaagtgaaatgctttgtgcgaaatgtgcaagttcctatggtacattaacaaaagctatcatgtactctgtaaactttttcctcattcataatgtntatcttcttaagacttagtggtaactggttttgctttgtttttagccttaaagttttttatggctggctatgtgaaatacattcctggacttcggccctcctaatttctctcggaccaatggnggatcctgctagagat

SEQ ID NO: 521833 - DNA, 245 bp, Homo sapiens
  misc_feature (229)..(229): n is a, c, g, or t
cattggtccgagagaaattagatgcatcaccagtatattacaacagagccattaatcttgtagcttcatcaacattaactggtttgctttcatgacgctgctgaggaatcttcttaagacttagtggtaactggttttgctttgtttttagccttaaagttttttatggctggctatgtgaaatacattcctggacttcggccctcctaatttctctcggaccaatggnggatcctgctagagat

SEQ ID NO: 521834 - DNA, 235 bp, Homo sapiens
  misc_feature (219)..(219): n is a, c, g, or t
attgatcgagagaattagtcgtcaatttttatacacttatggtgagaacatttgcacttctatcatagggcctctgtgttccttgtccttctattccactttcttaagacttagtggtaactggttttgctttgtttttagccttaaagttttttatggctggctatgtgaaatacattcctggacttcggccctcctaatttctctcggaccaatggnggatcctgctagagat

SEQ ID NO: 521835 - DNA, 783 bp, Homo sapiens
gagagcgcggtgatcgtgatctcaatggcctcctctcttcactcgtccagatgggcctctcagctcccacaatctctggcctccaggatgagctatcccatcttcaggagttattacggaaatggacaccaagaatatctcctgaggatcactccaagaaaagagatccacataccattctcaatcccactgaaattgctggcattctcaaaggcagggcagagggggatctggggtagaggagggttctgtctaatcttttttttttttttgggtttctgcccttgcagcctcagttttcacatttcagcccttaatgttcactaaaaagggtcggagttcctggcggcaaataggggtggtaaactggcgcccaactctggtctggctaagttcctacaaatttttgggcgtctctggccattggaagggattaaagaaccaaaaacaattccaagaattggaccgggttttttaagggccaatcccatcccttcgggataaccagatgtcaactcattgagatccgagatgcggtccatcaagtcccaaaaagaggcgctaaaaatcggtattctcaccttcgctttgatgagctgcttaaatcccaagtctatttctcccttatgagttcctatggggaatggagggggataccgcgaaaaacaccataatttccctcggaatctgcgggagggcgagatttcaattcaaagggggcccttaagagacaatggtttttataccttaataaacaactcactataccactcacataaactc

SEQ ID NO: 521836 - DNA, 906 bp, Homo sapiens
  misc_feature (38)..(38): n is a, c, g, or t
  misc_feature (130)..(130): n is a, c, g, or t
  misc_feature (140)..(140): n is a, c, g, or t
  misc_feature (183)..(183): n is a, c, g, or t
  misc_feature (192)..(193): n is a, c, g, or t
  misc_feature (195)..(195): n is a, c, g, or t
  misc_feature (200)..(200): n is a, c, g, or t
  misc_feature (204)..(206): n is a, c, g, or t
  misc_feature (221)..(221): n is a, c, g, or t
  misc_feature (229)..(229): n is a, c, g, or t
  misc_feature (232)..(232): n is a, c, g, or t
  misc_feature (236)..(236): n is a, c, g, or t
  misc_feature (240)..(240): n is a, c, g, or t
  misc_feature (256)..(256): n is a, c, g, or t
  misc_feature (261)..(261): n is a, c, g, or t
  misc_feature (268)..(268): n is a, c, g, or t
  misc_feature (274)..(274): n is a, c, g, or t
  misc_feature (279)..(279): n is a, c, g, or t
  misc_feature (289)..(289): n is a, c, g, or t
  misc_feature (291)..(291): n is a, c, g, or t
  misc_feature (302)..(302): n is a, c, g, or t
  misc_feature (304)..(305): n is a, c, g, or t
  misc_feature (309)..(309): n is a, c, g, or t
  misc_feature (320)..(320): n is a, c, g, or t
  misc_feature (322)..(322): n is a, c, g, or t
  misc_feature (329)..(329): n is a, c, g, or t
  misc_feature (332)..(334): n is a, c, g, or t
  misc_feature (373)..(373): n is a, c, g, or t
  misc_feature (430)..(430): n is a, c, g, or t
  misc_feature (448)..(448): n is a, c, g, or t
  misc_feature (881)..(881): n is a, c, g, or t
tatgtaaacaagttactgaatatttttcacctcgtggngttgtacacaaccttttatatatacacaccctaccttctctcaaatgctgggcttacaggtttattagctagggccttttgaggtatgctgncaggcgacancctgaatgagggtgctcgccggcaaggcccgcccgtcccgtcngccgccgannanaagcnaggnnngttccctcttctggntgtgaccngcntgcnacanccccgttcctttatgnccgtncactgtncttggngggtncttgtgactngnttcctcaggtngnntttnatgggcttggngngggtganttnnncccgggccctcctaagaggggtccttgggagggtgaggngtcgcagatccccggtgtcccctgggccccaatggcacctggaagcccaggatctcngggaggcccaggctcgcngggagcaccgtcctggccgtccttgctggtgccgggcacgccttggggtccttggggcccctggtctccttcaggcccgtccagccctgctcctgccgcgcctttgtctcctctgtcaccctggtttcctctgggcccggggtctcccagctccccagtgggaccgcggtatccagggggtcctcgagcgccagggtgaccaatggagcctgggggtcctgggggccaggggggcagctggaccgggccgaacaatggacccgggtgccaaaggcttccttaggtgcgcggctaactgtgcaatttgttcgctgatcatcccccacacagctccctgatgcgctgctcgctggcctccttccccggaactcccggcttccccgtgatgccaggaacacccgggacgccctgcaggcccagaggaccggggggnccggggacacctgaacaccgctggt

SEQ ID NO: 521837 - DNA, 481 bp, Homo sapiens
caatagaggtcacagcagtgcagcctggctgtatatagcgcaaggggtgcggtacagggacatcacctgcctggtgataaccctggttccatactgcgttgtattcacattagccatacatgtgtctgattatctcattccacttcttattatgaacttcataaggtattaataacttaataaggtatcttattacctctacatttccacacctggcaggatgtctaacatagacctacgatgcttggtaaactgtttcttctgtgacatacgtgcatgagaccacgtacttggcatcaggtagacaggatacatgtcttcctctgccatttactagctgtgcgacctcagacaagttagttcatctctctgggccctgtatgtactgaacaacttaacggagcatcttcgttggccagacactgttctgagccccagtgttgcagtactgaacacagtcctcttgatctccattctcacg

SEQ ID NO: 521838 - DNA, 162 bp, Homo sapiens
ttcacattaccgttcaggagacaacctctacttgtcctgctgcgcggaatctaaactcaccggcagagtattttaaggaccattatatgtgaagtttcagcaactcaggacaaaatctgtttatcccccaaattactacaaagcatagtattacatagtgtg

SEQ ID NO: 521839 - DNA, 93 bp, Homo sapiens
aaaaatgtatgatatatagggcgctgcgtgtcaaggcgaacgaacgagcgcagcgaggtctgtgagcgaggaagcggcgcataacttcgtata

SEQ ID NO: 521840 - DNA, 824 bp, Homo sapiens
tcctattacagatctggaagacaggccaatactgaaaatcggagaagaacacttgaagacactcgatgagaacaaataatggaacaacaaacaaactccataatacatgacaatagacgaatatagaacattagagagaaacacagacaaagatgaaaagagaatcaagccaacagacaacaacacgagctcgaccagaacaaggaagcccacccagaacaaacacacaggacacaaggcataaaagagcagcgcacactagagcgcgacaacgaaacaaaaaaagaaaaacacacaaaacgaacaacaaccataaaagaagcaaaaagcaacagaacaaaaaaaagaaaaaccgaagaacaacacaaccatacaaacaacacaggcgaaaaacacacaacaaaaaaagagaaaacaacgggagcaccaaaaatcagacagcaaaccaaacagacacaaaagacgaaacagaaaaaaaatacacagagacgcagagcaaaacaacaagcaacaaccacacaacagacgcacacgaagaggaggcctaagcacagtgacaaagaagcgaacgccacacacgcaacagaaaacaatacagagagagtagcgagaggtcgagcaaacgaacgacgacagaagagagagcacaatggcgcgaacgccagcgaacgcagagcgaagaaaagagaaacgaccacaacaacaacgaaaggaaaaaacaaaaacaaaggcaaaccgaaaacgcaagttaaagagtacgaagcaaaaagagtaaaagcagaaccaacaacaacaaaaaaaaagcaaacgtacaaaaagagagc

SEQ ID NO: 521841 - DNA, 133 bp, Homo sapiens
cccgcggaggaggagacccattctataccaacactattctgatttttcgggtcaccctagacgtttatattcttcatcctaccaggcttcggactacatctcccatattgtaacttactactccggcaaaaaa

SEQ ID NO: 521842 - DNA, 168 bp, Homo sapiens
  misc_feature (24)..(24): n is a, c, g, or t
cgaagaccaatgacattgatgtantcatgaagacggactttaaggccagctgtccgctgcagaagctgctggacggagggccgcggtcagaacgcgtgctctgagatctacattcacgggtttgtgccctggccaatcaaccgcgtcactcaaaaattgggccttgag

SEQ ID NO: 521843 - DNA, 197 bp, Homo sapiens
atcagagctaaacacagatcagcaagtagccctggagctgaggactagcttatgatttttggtagaatttagtgatgccacagctatctgatcaatcttgcgcgtgctccgtcatctcatatttctctttttctgtgtcgaagatctcaccttcctggtgtctgggcttccggagcttcttcttcttgaagaacact

SEQ ID NO: 521844 - DNA, 781 bp, Homo sapiens
cgaggaagagttagagtgagaatgtggttgctcaaagggaaaccccgtgtaaaaagggggcgaactcagcacgagtggtaagtacaacgaaatataactttgaggaagtgccagagtagggcacaagggtgaagtatggaaaacattatatggcactatagaaaggaggcccggtaaacctacagcgtccctaatttagaaggcatcctggggaccgcaacatcccaaagaagttggaataacagggtgcgttgaaccactccaagcatagttttaatattttaaataaaaaaggagttctgcccatgttgccaagacgcgtctgaagctcctaaccccaggtgttaaccctgcctagcgctcccaaagttctggtatgacaggcgtgaaccactgtgcccaaccactcggaagtgttccttcatgcagtaaaatgttcctttagccgcaaaaagataaacaagcgtttcatgaaatactattgaaaagctcccaggcccgggtgtggtggctcaggcttgtaatcacagcactttgggaggccaaggcaggcagatcacttgaacccaggagctggagaccagctgaccagcctggggaacatggtgaaactccttctcaaaaaattaaccgggcatggtgtcatatacctgtaatcctagctactcgggaggctgaggctggaggattgcttaagcccgggaggtcaaggttgcatgtgagccgtgattatgccactgcactaaaacctgggtgacagtgagatcttattggccgaata

SEQ ID NO: 521845 - DNA, 335 bp, Homo sapiens
  misc_feature (114)..(114): n is a, c, g, or t
  misc_feature (119)..(119): n is a, c, g, or t
  misc_feature (122)..(122): n is a, c, g, or t
  misc_feature (127)..(127): n is a, c, g, or t
  misc_feature (133)..(133): n is a, c, g, or t
  misc_feature (135)..(135): n is a, c, g, or t
  misc_feature (195)..(195): n is a, c, g, or t
gttttagctcagtgttttctaaaaaaagaaactcccccccagcaaaaaattgtttactttgttgggcaaaccaaatcagttctcaaaaaatggccggtgcttataaaaagtatnaatancgngagcntaaacnanccccctgcccaagagggaagtgagcttgtgcttagtatttacattggaagccagttttgnaatccctgacttatgtgcaaactggggcagaaattctataaactctttgctgtttttgatacccgctttttgtttcattttgttttgttttgtaaaaatgataaaacttcagaaaataaaatgtcagtgttgaataaaaa

SEQ ID NO: 521846 - DNA, 133 bp, Homo sapiens
catatcggcacggtctctgagttccctcagtatttatggatcattatttttactctcttggtgaggggagtgtggcaggcaacagggtgatggtggggagggtgccgatgaatagcaaggtgccgatgaatag

SEQ ID NO: 521847 - DNA, 494 bp, Homo sapiens
gagtgaaggctgttagatcgccgacgttagaacctcgtggaagagagacggatagaggacaggcaagaggaagtcaggcgatggactcttcctgcaggaaaacacaactcaaaaaccatgttttcctctgctctcacaccaacaccacaatccacacagaagacttcgtgtggccgaaagtgcgaggggtttctccccaccaacaaacagcaagcaacctaactggcggtcctccagtatcagttccaacactgtctgcatgaagatagtgtcagatctcacagattgatggctcagttcccagttgcatgtccaggcctctgaaacttctgaccgaccaacttcaagttgaggttcccatgaacccttctttgggttggatttatttgctggagcaactcttagaggtcagagaaacactcagttttactggttgattataaatactattacagaagataccagtgaagagatgcatgaggtgaggtatggcg

SEQ ID NO: 521848 - DNA, 104 bp, Homo sapiens
acatgctgtgatttgggagcctggttaatttttaaatttgtgtgtgtggagacagggtctcaccatgttgcccaggatggtgtcaaactcctggcctcaagcag

SEQ ID NO: 521849 - DNA, 82 bp, Homo sapiens
acccaatttttgcccttaaaaactgggcttatactggactattccttggggaatccatccaaattaaaattttttccttcca

SEQ ID NO: 521850 - DNA, 874 bp, Homo sapiens
tcggccctggcggctccccgaccgtgcccggttgtggcgaggcggctccagcccagtctgtggcagccgcgacccccggggctgctccggagcccactgcgcggcgcgcgtgccggctgcctgtatggactgcggcactgaagcggagccgctcggtaggagccagccgaatatcctgccgcctacccgggacgaggaggaggaggaggacgaggggatggagcaggggctggcaggaggaagaatgaggtggatccccggatccagggagcaactggacgaagttatacatcagctccactggattgatatctaagcagtagcggcgagactgagagcttgagagagtgctcggtcagcataggttccttgctctggttctgggttgtacagcaaccggatgaacacctggcctgaacatgggtgaacgaagaattggcgaaagcctgctggaccgactcgcaagcctctactgcggagggcacggacgggctggcgcaggcatcggctcaggcttggaagctcatcgaacagccactgcaggtatttccagaaggtgccacagaaggtgcgtccgccgccggcctaagggagacccgattctccccctggtccgatgcagctgggcttgctgtgcatggatgaaccaagcggtccagttctgaaatccggcctggccaggacgatgcttgaagtcacggccactcagaaggggtcactgcgacggcggacgcagacccaaagacccagggagccgagcctggttgcattaagggagacgcgcagcccagggtaccaatggccgaccatgggcccggcactgcggacaggctggaccaacgaaccactcatgagagcccatccaagaagtacc

SEQ ID NO: 521851 - DNA, 195 bp, Homo sapiens
ctttttttggggggaaaaggggccctttttcccaaggggtttttttcaaaaattaaaaattgcctttctggtgggccctttggggcccctctttttttttttgggggccccggcccccccctttaaagtttggggtttttttttggggttgggggggcccccattgcctttttttttttttttgggttttaaaca

SEQ ID NO: 521852 - DNA, 108 bp, Homo sapiens
ctaattaggtttttggttttgaaagttttgtttttttgcttacaaacaaccaaaagttgctccttttggggggctaacaaaacaatgaataaaatgtcagtagaacca

SEQ ID NO: 521853 - DNA, 1525 bp, Homo sapiens
  misc_feature (886)..(886): n is a, c, g, or t
gcttaggcgcagatggggaacgcggagctaacatggcagtggactcggagctgggatttgtcgcaaaatttatgtgaaccctgcggagtaccctttcgcatcaaattctcgtctcgcagcataagagctgcacacgctgagtctggcggagtatgggctccggtacatcatagaccgtgcaggcgtctggacgtggtcaaactctagcacctggcgcagatgactccgtcaaggcacgctccgggaagctgctgtagcgcgttcgcagtgaggacacggagcccaccgggggttcatggtctgcggagagtgctagaggaccgcatgtgtgcagggccggtcctcgggtaccggcagtacgggggggtagcctgtgacctgaaggggccagaggactgaaacgctcgtgaattcaacatttccctcgtgggcacctaggaaagtaataaggacgcgcattgtgctgtaacgcagaaggaacgacgcgtaggcgacgagcgcacgaagggctactatactacacggcgtggagcgcatcttgggggccacggaggatccacaagtgcgcaaacccgaacagacgtctgacggagtgacctcgaggtatgcccgcgaccaaggaccgtagtcaacttaaaattccagaggtgcgttacgcggaaaacaccgtgcaaagggggatgatgtccgtgaaaactactttctccccagggattacacattatccgaaggagatgggatcacccaggacccggttggcgcgccagatctatcacctccgaatgtcaagcacgtggccagacgaagtattacgtggaaagcgctaactaacgtttgccatcccgtgtgactggctcgtgcactatgcgcgccttttaacacatgnggcaagagctgtttttgaggaccactggagtcccaccaggtggttggctatccagcaccgggattcggacagaagagaacgttggagaagacgcaaaattttggcccccacatgagaataaggttgggggtcgcaacataggggagtatggggggagcggacatttcgcaggagtgggagtgtggagcgtatccgacaggcggaacaacgagcactgacgacatatgcgtggaaagtgtgaactttaacaccgagtaatctaaatctcattcggtatccaccacttctacgattacgagggtctgggaacgtacgagcacaggtaacggaaactctgcaagaggggaaatcccgctctagagcgcgcaagaagcgaaaacacatcgccgcggcacactccccagctcgggccacgttactcaggacacaaccaaccacgagcaacaacagaagcgcggacagaaaccaacaagggcagcactagcgcgaacgagcacgcaaagacacatacgagccccaagacgccaagcggccgacatgagcacccgagcgtcggagagcgcaaaagaaatgggcgcgccagacaacagatagcgcgcgacgacaccagtgcgcaccagaacgacatcaccaagtggc

SEQ ID NO: 521854 - DNA, 302 bp, Homo sapiens
gcgcggctgcgcacgggactgccgggggcccggccagaccgtggctgcatgctttcgctaagtcactagtcttttggtgaaggatctgccatgggtgtcctgggccagagtgagcgtggagggccggtgggtcccgctcgtgctctgactcttacgtcgtcgcactcggcccctgacggccagaggggaaccgccgggtgacacctgcgtggagcgctgagctcgagaacatgggcctccgctttgagctgcgggtacacgacgtcctatttctatatgcgacacatttcttcctcagatct

SEQ ID NO: 521855 - DNA, 338 bp, Homo sapiens
acagcggtctgggccgcaccggtgtcatatggaagttcccaggctaggggtcgaatcagagctgtagctggccggcctacaccagagccacagcaatgccagatcggagctacgtctgcgacctacaccacagctcacggcaacgcaggatccttaacccactgagcgaggccagggatcaaattcacatcctcacagatcctaatgtggttctttaccactgtgccacaacgggaacgcctcccaagacttatttttaagctaaatcctacctatgcttaatcataattaacgcctgcatgaattaactggaatagaataaaaaatattctaactca

SEQ ID NO: 521856 - DNA, 164 bp, Homo sapiens
atcgggcatcgcagctctcataacaataaaagagacggacccatgcagaactcgacccaagcggcgaatgcctggcgcattctgttcctgctgttcctcgctaacctgttcaacttttttgacctgcaccattcccgcgatcatcattgagccagaacgaccca

SEQ ID NO: 521857 - DNA, 210 bp, Homo sapiens
  misc_feature (71)..(71): n is a, c, g, or t
ggggggagtggggattagcaccctcataaaagggaccccagagctccctcgcccctcccaccatgtgaggncacagtgagagggcgccatctggaaccaggaagcctcagcaaacaccagaccggccagttcctgatcctggacttccagcctgcagaaccgtgagcaacaaatgtctgcaagggttttgttttattttatttttttaaa

SEQ ID NO: 521858 - DNA, 901 bp, Homo sapiens
ggagcgtggttggggctacacatagtcctaataacgcgacggccgtgttacggggttcatagattgaattccgtcgcgcgtagacctctgatagagagtagagcgcgagcgatgctaatgagcaacggcttcgttcatgagctgcgtaaatagagaccgccgcgtcttgatgtgaaaagagactttgtctgggagaagagatgtatcatatgtaggcgaactcgaaggtctcgatggatgaattggatgatttagggatgcgtaatagtagatatcaatagttaatgctcagatatagatacgtaaatttaaccatagttagacaaattttacagatgctagaattaggcgaataatagattctcaaggggtgatctgctaaataatgtgcagaaaatgtgtccagaatacgtcatgctttctcatataggactgtgtgtcaccaaattcatggaatctcagcccagttagagccggtgaagtagtaaggtaatacttgcaagagtcttgagaacctttttcaaattcgcggaggtaaccagacgttgagatgactacccgagacaaatgtgtacaagcgtcctcccggatgtcaacatatctcgagggtttgtgacgcgggcacgacaagtgatggccctgatctcggattgctgaggggataacggtgaatggggccaggaataatgaggatgaggatggggaatgacgcggagtatgagtgaatgtctcaggttgtgagagacgaggatgaggagtataatagagcaagaaggtgtacgaggaacacgtgactggaaagggggagaggatgaaaaagttttatcattggcggtatatagaggacattgaacacttgggaacaagggctcgcgaaaaactcaaggggaaaatcacagga

SEQ ID NO: 521859 - DNA, 104 bp, Homo sapiens
ggcgtacccctcgtaatggcacctgtgtgggtaccccgtctccagagtccatgacaatgccagtggtgcgcccagaggcgtagagggcgtgggtaatttgcgcg

SEQ ID NO: 521860 - DNA, 614 bp, Homo sapiens
  misc_feature (614)..(614): n is a, c, g, or t
gggaaggggcagccaggaggaagcttctattactacttatgtctctccaagtaccagccactctgcacacactgactcatgaccataacatggaactatcagaacgagcccatagaattagctccgatgataaccggattctgactggaaattaatcctgagatccatagggaaccccatgcggaacatcatggtgtgctccatctaccagaccatcggcggtgtcatccttttcctgaacaccatctaccagaacgtctgccatagagacctgcacagaaacatgctcaaagacatggtgatcgaagagggaatcgagttagacctcagaggtgctcctcttgctgcaacaatcgcagaaaccaccattcaaaggcttgatggacgcttagatcgctattctcagtccaagacacatggcgttaactatggaaatggcttgctatgctggagaatgccgatcaggatcgcttacaaccgtctatccagcataactctaacggcctagcttcgatactccagcctcttgtcgccagttacttggcccctattgtttgaaccccaagtgattaccctaagggggacccatgacatggccacctgcacctttgtcn

SEQ ID NO: 521861 - DNA, 287 bp, Homo sapiens
atcagctcggtccagtttattcgactcgggtactggaggatctctaatcgaccaggctccatcttaacgagtatatggaggtcagcacggagctcacgtgtctacgaaacttgtacagggaggcatgcaccgcagtggtgaatacacgtcgaccaggatccatgtatgcaatattgggacgtgaacacggatctcatatattcaaggaacttgtataggaacgtgtgcatcggcagtggtgaatacacgtcgagctggaggcatgcctgcgtgctcgggtactggac

SEQ ID NO: 521862 - DNA, 389 bp, Homo sapiens
acgcggtgaaagagacgaagcgagagcgcaggccgcactctcgcactgtgcacggaccgccttggaccgcagatgccgcgcaggaattccagtgtcacggtggacacgccttcctcgcgcccttggcggccacactggtcacccagctcaagggctttggaattctgtggccacactgtgaggagatacgggtctgggtcggaggctacaggaagacttccacttcctggaatctggagtgaagaacgccggcattcaggcaccatttcaaggaggtgcaggagaacaggtctgtgagaccatttaacttggtgacattacttttatttgaaggaacgcatattagagcttactttgcgaaggaagaaggttggttccggtggacttgc

SEQ ID NO: 521863 - DNA, 701 bp, Homo sapiens
  misc_feature (598)..(598): n is a, c, g, or t
  misc_feature (644)..(644): n is a, c, g, or t
  misc_feature (676)..(676): n is a, c, g, or t
ttttccacccccaaaaggaaggggttctcaccaaaatatattgttgggccaggttttttctccccaacgcggttttaaaaccccccgccaatttttatacaccccccacagaagggggggggggggcgcgccccccccctgtttttttttttttttttcccccccccccaaagagggggcccacaaaaaaaagtccccccccctttaaaaagcgcaagggcgggggggtgttaaaaaaaaaagttggggggataaaaaaaaaaaatgtggggggaaaaaaaaaaaaagggaaagatgttccccaaaatggggtggaagcccgggaaaccctggggccaaaaaaattttcaccccaataccccccgggaaaatgggaaagggaacccccaagaacttttgagcggcttggtaagggggggaaaaaaaacacccccaggaaaaaattgaaataaaccgggggccttaaaataatttggggttcggggttttttttcaaataagacaaagggtagagcccaggggatattaaaacccccttaaacccagagtaaatcggaatggtgtttaagaagttggactttcttaggggaatttagcngggtaatgccttgtggggggcagtgcccctcctagttgggggtaangggctaggctgaagtggtaaaaggctcagaanaatcctgcgaagaacacaacttctg

SEQ ID NO: 521864 - DNA, 333 bp, Homo sapiens
gccgctgcggcgggggcaaaaggcggcggcaacagcggcaaaaagccgcgggcgcaaaaagcggcggcaacagcggcggcggcaaaaagccgcggcgaggaaaaagtcgctgcggcgggggggcaaaaagccgtgacagcggggggcaaaaagccgcggcgggtaaaacgccgtggcgggtaaaaagccgcggcgacaaaaagccgcggcgggcaaaaagccacggcggcggtggggcaaaaagcagcggtagcagaaagccgcggcggcaaaaagccacggcggcgagggtgcaaaaagctgtgtcggcggtggggcaaaaagcctggtcgg

SEQ ID NO: 521865 - DNA, 123 bp, Homo sapiens
gacggggtgagtaagcactatccacgtgcaggctaggagggcggataggacgggtagtcccacgagtctgagaagggtgtcgccgcatctcttgctgccacacacatatcactacgtatacca

SEQ ID NO: 521866 - DNA, 237 bp, Homo sapiens
  misc_feature (24)..(24): n is a, c, g, or t
  misc_feature (46)..(46): n is a, c, g, or t
  misc_feature (80)..(80): n is a, c, g, or t
  misc_feature (91)..(91): n is a, c, g, or t
  misc_feature (98)..(98): n is a, c, g, or t
  misc_feature (120)..(120): n is a, c, g, or t
  misc_feature (134)..(134): n is a, c, g, or t
  misc_feature (139)..(139): n is a, c, g, or t
  misc_feature (141)..(142): n is a, c, g, or t
  misc_feature (157)..(157): n is a, c, g, or t
  misc_feature (178)..(178): n is a, c, g, or t
  misc_feature (187)..(187): n is a, c, g, or t
  misc_feature (193)..(193): n is a, c, g, or t
  misc_feature (195)..(195): n is a, c, g, or t
  misc_feature (202)..(202): n is a, c, g, or t
  misc_feature (209)..(209): n is a, c, g, or t
gaacggctgacgctatcactaagntcctagtccagacggcatgggncatttcacagaggaggacaaggctactatcacangcctgtcgggnaaggtgnatgtcggagatgctggaggagnaaccctggggaggntcctngnntgtctacccatgggncccagagggttctttgtacantctttgggnaacctntncctctgngctctgngcatcatgggggaaccccaaagtcaagg

SEQ ID NO: 521867 - DNA, 146 bp, Homo sapiens
tcttggtgcggagatcattggactgaggaagctgcacctctggggtcagaatatgcccagactgcggggtgctctctatctggggtcttctgagagccagacagcctgccttgtgctgcatacctggctttgctctgtgcagaacc

SEQ ID NO: 521868 - DNA, 1033 bp, Homo sapiens
tgccaccatgacctgccaatggcacagctgaggctggtgcagatccagttctgtgcctcatcaactgcgtgcaacaagtacctgactggccgaggctgttctgtgtgttcaatggctgaactgctgtactgccatgcatgccttgaatgaatgaatgcagatcttgtgactgctgtgatgcatgccccactgcacgatggctgtgtgcatgctgctggcctgtcgtgccattgctgcatgccacccatgtgtgcctgctaccctgtgctgtgctgtgatcaatgtgactgtgcacactgttgaccttgctgatgctgctgatgtgttgcccttggtcccttgacttgcctggtattccgtcgatctgtcgtgctggcatcttgactgaccgtgtcctgccttgtgtctgccttgcatgctccttgcatgtgcctcgccgacctgtggctgccttcacctactcctgtggcgtgtgccgacccctggatgtgtacccttgtccctttgctccctcttgctttttcggcctgccatggaactcgtgctggtcccgccgactggcactgacatgagactcgttggcgatggctgttgccatccattcggtcccattgctatgccttctcagcgagctccagacgtcattccttaatcacttgttggtacaacccctctggatcactgcctggccttacctgcttgccacccccttgaacgtctgctcgcttgtgccctgtagcccttgacgccgacgacttcaggaccctcttgtcgaccctggctctgactgtttgaccgccttagtctctcccgttccccaatgtccgaataaccaaattccaatcccatcggttcctttcccaatggtcacccatgcgctctcatacagcacgtcttgccaccaagccgtccctgatccaacctgtcaatcccatgctgccccagcgtaccagggaccaccccttgtgtattcggcggagcccccctgcaagccccgggccccatcctgggcctacaccctccgtgtcgccta

SEQ ID NO: 521869 - DNA, 794 bp, Homo sapiens
  misc_feature (562)..(562): n is a, c, g, or t
cggccgcacagcttctctggaacatgctagacctcctggactagttcttctttggaaaataaaagtctttcctgtattattttccctctgccttattatattctttctgggagattttcttaatgcttttcttccaacttttccattgagttttcacttctaccatgctttgaatttccaggaggattttttttattatttttgttccgtggcttcatacaggatcctgttcttgtttcgcagctgtgatgtcacctgagacggctgagtctcttcacagctggtggtggacccttcttcttcctggacccctccctctctctcatccaagttgctctttggctgttcggctgctttggtctctacctgctctcagccggcaggaattcctcaggtatctgggactccttggttgtcccatttgaagagtggaagactaagagctgactgggacctgaagcctgtgcactgtgaccatctacaagggccctctcactaggctgtctgctggggaatctgactaaataacctcacgcatctcttcttgggcagagaagttccnactctgtctgcaagctacagacctggctacctgtggttctgagagctgagtgaggagaagctgggggtgggagaagtcctcagcattcgagaaggctgcatttaccccacactcctgtctggggaaaatgcccccaccttcaactgggcctagagtccctcatccagaaatgcttggtccgtctctcctgtgagcgagcactcagacttctgcatgataggagggggggggt

SEQ ID NO: 521870 - DNA, 131 bp, Homo sapiens
taaatccatatttattaaatatcccttcttttttcattcaggagaaccagaggccaggctgagccaagcaagttctcatctgagcagagactgccacaactaggcagagcttcgaacagcagcgaactgat

SEQ ID NO: 521871 - DNA, 370 bp, Homo sapiens
gagatacacctaatgctaaatgacgagttaatgggtgcagcacaccagcatggcacatgtatacatatgtaactaacctgcacattgtgcacatgtaccctaaaacttaaggtataatattaaagttattaatacgcgtctcggaggttgtcactgttatccttatacaggacacaggctagacacacagaataccaatgcttttctagggcctatgagagactgaaatttcatggcaacctgcaccccataatctgagacaggcacacactggggagcacagctagactcctaccgggggagaggctctgggcataactggtggacacttagtatttgcaactcctcgggttatgtggttctttagaat

SEQ ID NO: 521872 - DNA, 146 bp, Homo sapiens
ctcgtcatgtatgttgagtatcaaatgtcaccgatcgtgaatacagaaacagagcatgagaacgtagctgacttagtgaagtcagactaaagagatatgcaaaagtataaaacagcctgtaatcccagcactttgggaggcagaga

SEQ ID NO: 521873 - DNA, 321 bp, Homo sapiens
tcgatctcatacacggatccccacataaggaccaactagattgcttaatggtgtcggacgagaatcacacttcccagttactgtgcggcatgcatcttaggggagtctgagaggcagtctgtggtagtgtagacgtgataacccatctgttaagagagaactggagagaaatgaggaaatgccggataaaggtttgccctcttactttactctgttccttaataggtgctattccccattcttccttatggttctcacataaatcagtcttcctgtgtccctttcaccttagtttccactcatcacaattaccctctttag

SEQ ID NO: 521874 - DNA, 577 bp, Homo sapiens
atgtcacgaaagtccttgaatgaactgtcttttaaggattagatgatgtgagtcattagatctatacgggtatttagaagcatctgcttatagtggttttccggtcttacctctccaacgtcgtggagcttctaagaccctcgtcgcctctatttcaatctttatagttctacctactctttaaaacctacctcatatgtcatcttctcattcttttcttaagattcttctgcaggcagttagccctcataggaaatcacttactattctgtcattctctcctggcacaagaataggactcaaaccttaaaattcgatattcacaagaaccacaacttttgttgttgttgttgagacagagtctcgctctgtcgcccaggatggagtgcagtggcgcgatctcggctcactgcaagctctgtctctcccgggttcacgccattctcctgcctcagcctcccaagtagctgggattacagccacgcgccaccacattcagctaatttttgtatttttagtagagacgtggtttactattttgggcaagctggtctggaaatcctgagctccggtgatc

SEQ ID NO: 521875 - DNA, 254 bp, Homo sapiens
cgcgcagtgtcgaggccgtggatgcgggtggagatggtggacatgctggccgttctggttgggaagtggcggatcatgccatggcccttcggcatccgccactgtttgccgataaaatgtcggctcccgaatcattccaaccctttcccctggatcagcaccgcatgaatccccagagccagtaccaattcaagtccgtcaactacaccggcctccagccgggcccgcgcgtcatcatcatggggtaccgagct

SEQ ID NO: 521876 - DNA, 212 bp, Homo sapiens
cctagaggatccttcacacgccgagtacatacctgtgtcacagggaagtctgggtggacgaagttgttgcgcaacaacttcgtccactccgatctgcaacaacttcgtccactacgacttgactttaagaagtgtatggagactcggcgtgtgcagcaacaacttcgtccataatgacttgcggcgtttgggcactcggcgtgtgcagggtc

SEQ ID NO: 521877 - DNA, 374 bp, Homo sapiens
cgtgtggtggctcatgcctgtaatcctagcactttgagacgccgaggtgggcagatcacaaggtcagaagatcaagaccatcctggctaaagtggtgaaaccccatctccactaaaaatacaaaaaaattagctgggcgtggtggcgggcacctatagtcccagctactcgagaggctgaggcaggagaattgcttgaacccgggaggcagacgttgcagtgagccaagatcgcaccattgcactccagcctgggcgagacagtgagactccgtctcaaaaaaaatacatctaccaacagatgaatggagcgcactgctatatctatacgacagaatattaactacaggtgcagacagcaacatggatgtcttc

SEQ ID NO: 521878 - DNA, 506 bp, Homo sapiens
tttatttggttgtagaaagtatgcagacatatattacaaagagacagcgaacaccaactaaaggggggcactatcaaaaaaagcgtgcccgccgcccctatgatcaattctatttttctgcgccgctccgagtgcaccggaagcaacagtaactgcatgaacaaaaatgatagcacgactagcatcaacagcttgaagctcacctgaaagatgaaggccctgcctcgtgcggagaatggcaaaaaggccaagaggcgacctacactcgctgtagaggggaactaagcggaaggcctcgtcgacccaactatctggccaaacagacgtatagcaaagcctcccttatattactcgatgagccaggataagcttttggggaagaaatcgcacatctgggagaacaacagccagggtgaacaatcgggagaagaggcgcactggggatgcaacccaggccttccttccggaaaatgaccaggaagggcaccgcgcccagtccgcccacg

SEQ ID NO: 521879 - DNA, 101 bp, Homo sapiens
  misc_feature (16)..(16): n is a, c, g, or t
cgtatgagtagtatgnttatgtcaagcgtggctttggatatagccccttcctcagcatcacagatggcaacatgccaggacaggctgccagcgcgatgcag

SEQ ID NO: 521880 - DNA, 199 bp, Homo sapiens
  misc_feature (7)..(7): n is a, c, g, or t
  misc_feature (167)..(167): n is a, c, g, or t
ccctgtncaccagccaaaaactacgaggagggagagggcagccaggatagagagctcggctttgtggtcagagctgccctctccctcctcgtagtttttgtctggtcagaggggtgctcccctgtgtccaaggctgccctggcgctggggctgctgggcatctactngctaccggggcggccatcgggagtgtccggtt

SEQ ID NO: 521881 - DNA, 918 bp, Homo sapiens
gagcgggcgccccccgtcgtttcccgcccgcgcgccgaggggggcggggaccctgccgggcaggggccggggcaggggtcggggcctcggggctactgcaggccggcgtggctcccttgtcccgcccgtcgcgcgctggcccagaaaagggggcctctgtcgctgccgtccgggggccggtttccgcacccttcccccactgggttggtccttctttgacgtccttctgcctatttgctcgcccgggcccctaacccctcgcgacaagaaacttcttggttgactttgaaacttcgcgaaaaaattacccccggcagatgacgggccgagttggagtgagcctgacccctgttgaacaagcctggtccttcgtgattggcctggccgggtcggaagaactcgtggtttacgtaaacgcgaggggaagagctccttatgtggtatcgcagatcccagtttggggttttaaaattccttgtgacacccatattacgcgcaggggtttctggaagcgacgcgggtaagggcgactggccttggtgttgggggcatacagggttaccactttggaaacaaacagttgaccctttggtaaaagagtgatataagctttaaggagtataaagcggtcccaacgacgttaatgtcgtcattcaaaacgcattatttcgttaacccagatgaagggtaggtagagtaattttgaaaccaagctgtgttccaaaaattggacgtgggtgaagtttactagaagggaaaatttactaaaattctggctatggtcgtggatggtcccgggtgaatcggtgcaaagtgggcttatagctaaactttaagggtagaatgaatgcgggggaaatgacgcggtcatagaagcctatatggagttgcggagattggggattttcaggggagaaa

SEQ ID NO: 521882 - DNA, 573 bp, Homo sapiens
  misc_feature (45)..(46): n is a, c, g, or t
  misc_feature (52)..(52): n is a, c, g, or t
  misc_feature (56)..(56): n is a, c, g, or t
  misc_feature (67)..(67): n is a, c, g, or t
  misc_feature (80)..(80): n is a, c, g, or t
  misc_feature (88)..(88): n is a, c, g, or t
  misc_feature (125)..(125): n is a, c, g, or t
  misc_feature (172)..(172): n is a, c, g, or t
  misc_feature (268)..(268): n is a, c, g, or t
gttaaagtaggcggcagttaataaaataagtgagggacagaatanntatggngggnactttggtgtnttaagcaatagtntcaactgntatcaaatcagaaccaataaggtttgtcattcaaaangaagggctcagaattatttttagataaaagatacaattgtagggtanacatgaaatactggctagcccaatatgaccatattaattaggaaaaaacatactaaataataagaataaaaactcaaagaataaggagatattacnaaattaagaaatgagtgagaaaagataagagagtaataagaactaggaataaaacagaatcaaaaccagaagtttaattggtagaataccagcatactatcaacttcaaggcccctaatgagcccatggttcaggcctctcacccttttacagtctattttgagcaggacacaaagttctcttgactaaaaagtaaaacaaaatgaccaaattattatttttgaaatggagaatttatctacattgtatataacaaagaaatgagagtatgttaagtattttgatattaacatttgaaattacaa

SEQ ID NO: 521883 - DNA, 920 bp, Homo sapiens
gagggcaccccagcggtgggccatgtgtgtgaggcagcacggaacatgtaggttatagatctgtcagtggaggaggggtcaagttgggtgcattgtttttctgaatatttagtgtccttgaatcagccctcgtatcccattccccactacgctgtccgccaatgacctgcactgatgagcattgatatccccctcgacagagaaatgcagtcataacacatatgacttatagggaaatacgttcacacgagcctagttatgcgccacaacacgttactgcgtcacatgaggggacaccccatagttatcccacaagggacgtacaatacgaggtttcaatcatgtgaagacgacagaccgcgtaaggggcatgatagatagatgatgacaaagggttggggagacagctcaggggtgtgccaccatgggatcatgacaaggtaagggggtattatgggagaccacaagtaggaagcgttacagtcagcactggacgcaaattacacgtagacatgacaatttcacattaccattcatttggtccattaccacatggagtgacgctccctttacagtctgccagcgcctgtttccacaggatcaacgtagccgacgagggccacatggagagagtcgcaggcgatcgcagtagctcagtgcaagcgacagggaggggccaccacgataggggaccaaaagcaagacggaaggacaaggggacagatgcaatgacggacgcaagagcgaacaagggaaaacccgaacgatggcgagagagacaatccattatgaccttaccgcgacaaaagtgggcagtgggcaacggacaacacgggcacaacgggacacagcctggggaacagcaaaacgcgcccgactgaggcgggaccgaagccgccacacaccagtgggggcacgac

SEQ ID NO: 521884 - DNA, 451 bp, Homo sapiens
tgttgagttattgccatctgtcgctaagcgggaaatgtcgaagcaacttatgaatacatgaccaaatatctggtatcggagaagctttgagcaccagttaaatctcattccttccctttttattgcaaatggcgctcgtagctcctacgagcgcaaccttgtgaccagatgcacccttcccaggaattgtcagaccattctacagaagtaccagcctctgatgccctacagtctgtggtgccagaggagcttcagctgcattataaaacaattggtataccaagaagtgtcagggaccaagtctatgactaagtagatgcttggaaggttctgagcaattcagaacaatgtctactgcatcctctaagaatcagtacacaacacccatcccctacactcacgctctctctttctctccttccttacagagttcaaaaccacaagacaccct

SEQ ID NO: 521885 - DNA, 115 bp, Homo sapiens
tcatgatagcttgccactaaaacaatgttaccaccaggaataaagtctcttcaaatatagacaaaactttgactataaacagctgtatcctacttgtctcccatgaaacttatac

SEQ ID NO: 521886 - DNA, 460 bp, Homo sapiens
gcactatgttgatctaaaggaaggaggatgtatcgtgaggatgagaggtgggaatggtgatcaggagattcactgactagggaactgaatgatgtccatgatatcattgattgtcataagcagccgataagtgagtggattgtgaaggcctggatacgctgggcgtggtgtgtggctagtgtaggaaaagaatgtgagatgcactataccacgagacctgtgacggagtctcggaggttcgagaagactatatggaaacatgggactagcgcggactaggttagttagctggtgttagcatgcctttgttgacaaagtatctagagatgaggacgaaaaacacttatgagacttggacagaggatatgattttccggctgcgtcggcaagttctgcgaacctcagcccgactggtccgaagccttccagatgtgtgtctgcgagatacgaggtggagatc

SEQ ID NO: 521887 - DNA, 1234 bp, Homo sapiens
  misc_feature (1234)..(1234): n is a, c, g, or t
ggcggagccatggagggtcggcttcggtctctgatttcggggtgctccgtgcacgcgggaagctggaccctagggtctcataatggagcaggtgaaagtgcagatcgcctgtggccaacgcgacaggagctgctgcagaggatgacgggacaagttgtttccgtgcaagctgtatagggcaaacctgggggctccctggaccaacttccgagcagaattgcatcgccatgtgctatggactcgcctatcatggcacgcctggaacaccgtagtctcgcgccttacaaatctgcggatgcagcgggaacgagccaacatgtgaccggcgagcgcgggccaacccaccctgatacatttccataaacgatgctttgagagtgcggggtccgcatgtacgtactgcctgaccggggcttaggagggtggcaccggatgctgggacagactgggactgtgtcctcgaccagcccacacgacctgaccccttgacaagccagtgcagactaggatctcgagagggatgtggggccctgtagccttcctgaagtgctggcagaccagtggcacactcctaacaaggcctatagagggtatatcccactaagtgtagcccaaagtcaagcctcatattctgcgacggacaagcttagtctggacttcaggacgtaagagcggtaggtcagaacacaacaggaagctcgacatcttcctggcgagcctgggaccaaaacacacttggcggcacgcacggccaaaacacaaaaccacacgcaaccgaaaacacaccacacacagaaaaacaccaaacacacacaccacacacacacaccacaaacacgaaacacacacgaccaccaccaaccacaaacaccaacccgccacaaacaagcacaaccacaataacaaaataacagagaacaaaaaaatcgacttaataacaataatataagataatataatataagatagcgagatccatcacaaaaccttacacaacaatgaagacatacaccatccacgtactaaacaatcactaaaacagaaccagaagacaacacagaacacacacgacacacgctactactgacacctcgcaacctacagcaaacataagacatgacgatcctccatcagactactaacttacacacaccacattatttccccgccactgtctgctaacacagcactaccaccgtgagaaccacgcccgcacacactcactacacaacgn

SEQ ID NO: 521888 - DNA, 200 bp, Homo sapiens
  misc_feature (49)..(49): n is a, c, g, or t
  misc_feature (56)..(56): n is a, c, g, or t
  misc_feature (135)..(135): n is a, c, g, or t
  misc_feature (145)..(145): n is a, c, g, or t
ccccaagctcatgccagcctcatctcctttcttgctagcccccaaaggnatccagnaacatggggggcccagtcagagagccggcactctcagttgccctctggttgagttggggggcagctctgggggccgtgnttgtgcatgntcatgctgacccaacaaacagagctgcagagctcaacatagaggtgagccggctg

SEQ ID NO: 521889 - DNA, 608 bp, Homo sapiens
gggctggtggcgtcgcctgcgcgtctcggctgagctggtccatggctgcagctgtgcgggctgaggcggagccggagcgtctctcgccctgtctggcgatcgctgctcctctctggggctcctgtgctggccggacccgaggaagcgcatgcgactcccactgatcttctgcctgtgtgtcctaaatggtggttgggcagatgcctgggcctccattgcctacggtggtggatacatgtgtcactgacggattccttgccagctgtttgtgtatgggggctgtgacggaaaacaaggtaaataaaattaccctgaccaagaggatgctcataatgtccctgtcacagagaatgccagggtgacctggcacacagaatgcacgattctctgtccaagtgctccagaaggaagatctgaaacactcagcgatagtcaatataaaatctgacgcaacgcatcactggcttgccggatcttccagctggtacttgacgtggaagaatcctgcataatatcatggaggtgcgggaataagacagtacgtctgagagctctgtcgtgttcgcagagaaacctcctgcctggtcaagtggtgtcgcgggtgcgga

SEQ ID NO: 521890 - DNA, 530 bp, Homo sapiens
ggagagagagaactagtctcgagttttttttggtttttttaaggttggagggggaatgctggaaatggtaaggggtatggagacttttcatataagtaaggctagggtgaggggtaggaagtttttccataggaggtgtatgagtgggtcgtagcggaatcgggggtatgctgtccgaattcataagaacagggaggttagaagtagggtctgggtgacaaaatatgtgtgtgtagagttcaggggagagtgcgtcatatgtttggtcctaggaagatggtaggtggtgaggggtgtttattataattaagtgttgggtgtattcggctatgaagaatagggcgaaggggcctgcggcgatatacgagtgtttgaagccgtgagacactagtgcggactccccttcggcaaggctcgaagggggttcggagggtcatcggctagctggcgagcataacatcatatcagggccaagggctcatgagtggcaggagctcatcagaggggtcctcggggtggcgcaaaagggg

SEQ ID NO: 521891 - DNA, 107 bp, Homo sapiens
gcggccgcctactactactactgctcgaattcaagcttctaacgatgtacggggacatgggaaatgtcaacaagtatgaataaagacacctactgagtggcaaaaaa

SEQ ID NO: 521892 - DNA, 582 bp, Homo sapiens
gctggaagctgactgacattccgcaaaactcatactatctagggatgccacccgtgcagtagctcacacctcccccctccaggagctacgacacaaaggagaatggacttttgtagctctgatcatcagggaatcagtgcaggactgatctactagctccaccacaccctgccttaatactaacattgactgttatgacctgggcctaagactctatgttccagaactggctcggctacccatgtaacactcactaacttgagatcttggtcagataactgataacttttaagcctctagctacttactatgctgaacagagatcgtgaatgaacatcggctgctactaactgcgtacatgctactgcatgcttaacgccactaggcatatccattcaatgtggggaccgaaacttccatgatatcgatgtctgaggttgattgaatgcactactgggatcagctacgatgatcacaggccaccactaggggagacgatcgtgaagattacactggtaacggactctcaaatgatcaggaggtggacacttcgcaacttgctacctgcacccagctcattac

SEQ ID NO: 521893 - DNA, 154 bp, Homo sapiens
  misc_feature (36)..(36): n is a, c, g, or t
atcagggtctggacagatgcatttcgagctcttcangaaactcagtctggatcatataaaattgggtccaaggtcattaagattgcttgggctttaaacaaaggtgtatatgtaactccaagatccacatcccagaattgtttgtattctgttt

SEQ ID NO: 521894 - DNA, 143 bp, Homo sapiens
ttccggggcgggtggggaggggtgctttgctggttttcaattcccaagaattctccaaaacaattttttgcaggatgattgtccagaatcattgcttatgacatgttccctttttcccctgttttccataaataaattaaata

SEQ ID NO: 521895 - DNA, 706 bp, Homo sapiens
  misc_feature (34)..(34): n is a, c, g, or t
  misc_feature (522)..(522): n is a, c, g, or t
ccctaaagggcggccataaaaagagggcccccgngggagattacaaaagtttcccccccaagtggggtggggaaggacaacccctttggttcccctagtccaatgggaaaatgtgtccctcctccaagccataaaatgggggctgaaaactgtcccagttttctcaataagaaaagatgggaaggttgggcttttccccaaggtgcaaagtccgcccatctggttaggagtccagaaaagtcctgaggccctcctcttcccctcagcagtgtttatgactccatcagcatggagacgctgtcaaacatgtttgagctggatttgccccctgtgccctccctcctcagcaaaatgatcattaatgaggagttgatggcccccctgggccaaccaacacaaacagtggtgatgcccccccttgagccccctgcccaaaaaaacctggtttttcaattggccaaaaaattgggcaccctggtggaaaacaacaaacgggtgttttcccccaaacagggcccctcngggggttttttccaaaaccaaaaggggggctcccccaaaaaaaagggttacatgcccccggggggttccccccaaaaaaattttcaaagggcctattgagctttcccctttgtttcccgccggggccatccacccttaaagtcttaaacccccccccagtccctaaaggtttgtttaaagttta

SEQ ID NO: 521896 - DNA, 218 bp, Homo sapiens
atgagctcgtaccccatttgaaagcctgtggaaaagtaccgtgtggaaaagtatctgggaaaacgtaccctggtgaaaagtaccctggtgaaaagtacccatgggagaagtaccctggggaaaagtaccctgggcaaaagtagcctgaggaaaagtgacctgggtaaaagtaccctggtgaaaagtgccctggagaaaagtagcctgtggaaaagtag

SEQ ID NO: 521897 - DNA, 474 bp, Homo sapiens
gatatgggtcctggccaggccctgtgtgttgggagcttttccaccataccccccttggggtgcttttctgtttgttttttaacccacccgtttcggggggggttctccaaaccgtgggccaaaagggttgtggggctgggcagggcccccagtttgccccaaaagccccaaagggttaatttattttttcccctaaaccccccccccccctttttttccggggggggaggacgggttccaaaccgtttttttccattggcccctttagttttgggggtaagccgggttattatacccaagccttggtaacccctccaaagggaaggggaaagttttttgggcccccttgggttttttttttggggggggccggttttaggtttttggtttttaaacccgggcttttttttggggacccccttgccccaaatttgtccccggatttttgggccccctttaaaaggttttttggga

SEQ ID NO: 521898 - DNA, 638 bp, Homo sapiens
ccaggccaaggaatgcccacagcccaagattcctcctaagccacgtcccatctgtgcaggaccccactgaaaatcggactgttcaactcacctggcagccactcccagagcccctggaactctggcccaaggctctctgactgactccttcccagatcttctcagcttagcagctgaagactgacgctgcccgatcgcctcagaagccccctagaccagcagggacgccgagcttcaggtgactctcacagtggaagaagacaggaatctcatgcctctgagcccaagctaagccatcatatcccatgtgacctgcacgtacacatccagatgactggttcctgccttaactgatgacattccaccacaaaagaaatgaaaatggcctgttcctgccttaactgatgacattatcttctgaaattccttctcctggctcatcctgactcaaaagctcccctactgagcatcttgtgacttccactcctgcccgccagagaacaacccccctttgactgtaattttcctttacctacccaaatcttataaaaaggccccacccctatctcccttcactgactctcttttcagactcagcccgcctgcacccaggctgaaataaacaggctttactgctc

SEQ ID NO: 521899 - DNA, 248 bp, Homo sapiens
gccccacacagaaacattccaagcctgtgataaactctctcacccttataccaataaaaactcttagtccataggagcaagcacttttaaccaaaaaaaaaaaaaaaattgtccagaagcccctttaaggtttattctccaaaataaacttgtttttgactgtggagccacttttcatgtttcttttctctttctttacttcttacatttggggctgaaacctgggatgggtgttgggcgataacata

SEQ ID NO: 521900 - DNA, 358 bp, Homo sapiens
cgccatttacaactatctccattcaataagatagttgcccggactgcacaacttgcatgacttcagcgtagttgtcttacttttatttctttatactttattattcattttgttttcactaagttgacaatatttaagagtatgagtttggaagaagtaagagaatgggaacagaaggtaatagaaaaggagaaaaaaatactaaaaagccttaagatgtctagctcacaaaatacaaatctaaagcaaattcttttcactgtcattgcagtatatcattgtttattaacttatatcttcttcaatttctttcatcaatgttttatagctttcaatgtatagatgcttcacctccttg

SEQ ID NO: 521901 - DNA, 538 bp, Homo sapiens
tgggtgcgtttactcaagtatcaaccaggttcctgggtcgacttgccacaaatcctacaagattctttatgctatattaactaacatcagtgttccccatgagctataggatctgagatgcagaatgtgaccctcaacatcctctgaatagggacagagtgatctggtatctagattccttagattgaggcggactgtccccgaaaagagcttcccccacttggcctgtagcagagcagaaacaaaaattcaaatgccatggtctcccatggagctggtacagcaggcatcctccctgtgtttttcataagaaattatgcctgtgtccccctttcaatctgttggaccagttcttctacataggctgagtcagagagaaccagtttgtctagcctggggaccaggactgccctccgctggcatgtcagagacttcatagtagcttcagcattcctgagggattcccttacattcctaggagatccctttatgggagggctttgtcaccaggtgacctgatatagcttgagaaagccta

SEQ ID NO: 521902 - DNA, 674 bp, Homo sapiens
  misc_feature (98)..(98): n is a, c, g, or t
  misc_feature (528)..(528): n is a, c, g, or t
  misc_feature (586)..(586): n is a, c, g, or t
gtttgtagaataacatttttagttatgggctacaggaactggaatactcattatctgatcagtttggattggaaacagtttaagtattccagggtccnagatacctctggcctggtagtatgttttgtgattaattgattaattgaaaagtaaaccacagtaggaagaagtagactggaagagtctggaatttagaatatagatgtgctcattagtctcggaggcagaggactccaaattcactttagtgttatgggaaaagattccagtctgctggtggaatataataggtgtacaggggaggcagtttgtggaggaccatgtgagcagctggaggctgggaagtccagcaggaggaaacagggagtctcatttaactattgggatgttaaggagttaccagactgtgattttattatagagggagtctcattatccacatcatgccaggaaatcactaatggagtaatcccttatcaagagaagagtaatagaaattcagcatataatccgcgcgcgcacacacanacccctcagcataaatttcctaaagctaaaattatatctaacactgtaactgacaacngcacaataacctactgaaagagatgctcacttacacagccttcaaatattccaaaaaagacacaaaagcacagcgacacacaaaccct

SEQ ID NO: 521903 - DNA, 802 bp, Homo sapiens
agagagtgtgcccccccccatgtgggaaaaccaccacaccttgccttgtgtaccacaattacataatccaggtggttcagccccagtttttcgtgttagaaaacgcgcagggtgtctctccgcccccaaggtgacttcgtccaatgaaatgtccccccggagcagattgtctaagtaccagattggatttttttggaaattgggaaaggactagtatctccaaattggcaccagctagtcgccttccattccgcttgtgttctcatcccccccgaaaggggccaaaagccgccctcggccaatgggcctggccagctaggaagcacttgaccctcacccttcagaagtatgctaaaagttctttcatgccaacgtcacctggtgagggcgtccggctctctggtagtcacttctactgttcactgagatgctgtagaaggtcacatggtcacattaacttcgcgagcgtgcaaccgtgcgcccaaaaagctaagactgtcttcaccaagcttgtatgtaatcagcacagcttccgatcgtaggaaccttaaatgtcatttctcaaaaacaaccccttgtgcactcctacggtaagtagcccgcacgaatattcatttgttgatcaggtatcccctttaatttgatactaatgttcgtcctgaatcgtcatatacacagattatttccgaccccaatgctggtcaacgtggctgcttggagcgggtaagttgaactatctgcaagtggaagattccaataatgggccctgaggttgtctccctaggaacagtgcagtgtttgt

SEQ ID NO: 521904 - DNA, 392 bp, Homo sapiens
  misc_feature (15)..(15): n is a, c, g, or t
  misc_feature (37)..(37): n is a, c, g, or t
tcccacggtagattntggggagggtccaaggacaggngtgtgttttggattggtgctgtactaacaggggcaactcaaagattattattattttttttttggaaatggagtctcgcttttccacccaagctggagtgcagtggcgcgatctcggctcaccgcaggctccgccccgggggttccacgccattctcctgcctcagcctcccgagtagctggaaccacaggcgcccgccacctcgccgggccaattttcctgtattttaagtagagacgggtttcaccggtgtaagccaggatggtctcgattccctgacctcgtgatccgcccgcctcggcctcccaaagtgctgggaccacaggaaatctaccgggggcggttaccgagctca

SEQ ID NO: 521905 - DNA, 300 bp, Homo sapiens
gagatcggacccacttttcatctgcaccactcatctgccatcaccagatattagaggcactgcatgaccagtgacacatgtttaacggacgcggtacccataaacgtgcaagggtagcataatcacttgtaccttaagtagggacctgtatgaattggctccacgagggtacagctgtctcttacttttaaccagtgacattgacctgaccgtgaagaggcgggcataacacagcaagacgagaagaccctatggagctttaatttattaatgcaaacagtacctaacaaaaccacaggt

SEQ ID NO: 521906 - DNA, 681 bp, Homo sapiens
  misc_feature (4)..(4): n is a, c, g, or t
  misc_feature (63)..(63): n is a, c, g, or t
  misc_feature (66)..(66): n is a, c, g, or t
  misc_feature (120)..(120): n is a, c, g, or t
  misc_feature (164)..(164): n is a, c, g, or t
  misc_feature (178)..(178): n is a, c, g, or t
  misc_feature (184)..(184): n is a, c, g, or t
  misc_feature (198)..(198): n is a, c, g, or t
  misc_feature (201)..(201): n is a, c, g, or t
  misc_feature (208)..(208): n is a, c, g, or t
  misc_feature (234)..(234): n is a, c, g, or t
  misc_feature (241)..(241): n is a, c, g, or t
  misc_feature (264)..(264): n is a, c, g, or t
  misc_feature (318)..(318): n is a, c, g, or t
  misc_feature (388)..(388): n is a, c, g, or t
  misc_feature (429)..(429): n is a, c, g, or t
  misc_feature (437)..(437): n is a, c, g, or t
  misc_feature (493)..(493): n is a, c, g, or t
  misc_feature (508)..(508): n is a, c, g, or t
  misc_feature (535)..(535): n is a, c, g, or t
  misc_feature (540)..(540): n is a, c, g, or t
  misc_feature (542)..(542): n is a, c, g, or t
  misc_feature (570)..(570): n is a, c, g, or t
  misc_feature (585)..(585): n is a, c, g, or t
  misc_feature (597)..(597): n is a, c, g, or t
  misc_feature (658)..(658): n is a, c, g, or t
cccnccccccccccccccccccccccccccccccccccccccccggcccgcccccaccccatngcnccctacggctctgcctccccgcgacccccaccccgctaaaaaggcgggtaaggngtcacactgagtcttcaaagtctggtgtgtataaaacagcacanctcaatagccacangcaggnagggcgcgggggcncangcctctnatcccaacactttgggagggcgaggngggcatnggacgaggcagggctggacaagngcctgggatatggtgggcacaattcttgaatggacccacgccaatgtacgcgtngcttttgcctgggccgtgccttcttcctagaatgtcctgcttctatctctatgtctaactcatgtgaatnaactttttaaaaaattagtatccttcaaaactgtatttgcncaggcgtnctgaggtgagggcctcctgactctccaggtgcgggtgcttctctgcgctgtgtgtntgacctccaacagcntgttctgcctgcgcactatttgctgangtgtnanctccggggattctcgaatttctcacctncatccccaaggcctnctcaactcagtnttctcccgggtcgtggtgcttgaggcactggatatcccctggttaaacacccactgcagtngagcagggaggggacgcgcccct

SEQ ID NO: 521907 - DNA, 1808 bp, Homo sapiens
  misc_feature (278)..(278): n is a, c, g, or t
taaagaaggaaaccccggtattgattgtcggggttaacggatataggaggaaattggggagataggtgtgtatagaccatagagggtgagttaaccccgtggtagaatagaggggttaaactgtgttggtaaatggtgggtgggtgtagatgtagacgccccattgtgttgtcgtggcgtacacttcttgtaaacggagatgtaatagggttgtgtgtgcaccataaataatgtgtgtgagtctcgcgtgtataagatatagggaagagagtgtgtanatcattgtgtgcatctccagagagagaacacgtgtgggtgtatcactatagcccacgagagagaaagtatctctctcccgcaagagaatgaggttctacacataagtgtgaggagggggtattaagagggcgcgagagatttttgagcgagagggatctgtgtcgctttaaaagagaatctcttatacaaagagagatcttatatagtgagagtgggagacgatattgagagatagtgttgtgaaagattctccctttgtgagaaagagagaagatatataagagtatagagcgcgcaagagagttgtgacagagtcgcgccgtattacgcgcgtaagatttatgtaggagagtactttgtgggcctacagaggcgacgagcaaaatatagcgtatcaatatagagaggaggataattgtttctaaagcaccccgcgtgtgtggggcgccgataattttatagttgcacagcacaaatagtgaaaagcgttgcggcggcgccccggtgttgttgaaaaaaagactcttccacaagagggggggagttaatcatgagagggatacgttgagcagaccaacaggtgggggggtcgttggagttaacaacacataaacgacggaagaaggggagggccccctacaaataggtagatggcgggccgtcggatacgttgttgacaccacgaacacattatttcttggcaccccaagtgatgtagaacgacgccgaccaataatataaagaagaagactcatcgttgaagttgatggtgtgcatacacgcaataacaagcggcgcccacgaatcattggtagaaccgcgcccgctgtatggcgatctaataataaaactgataagttgggcgcccctcacaaaataagggggaggactacttatgatcaccgcaacctgcgacaacacggtgggggtggtacttacgcggcaataaaagcttgagtgtgatcatcacagctgtctaccacaaggagggggagtgtacatttctagcaacccacaactcgctgacaactagcttggcttacacacgggaggcggcaataaatatattaatataacacgcagaaaatatagacgccgggcagcacttaatgtattttactaaacaacaggaaagcttaaccgatggcggggggccacagacgtcacacacacaatatgtatgaagccccccgccaaagagggtaaaatggtggggggatgtcctatcagccaaaccacacttaggtgagtggacccatattatcgggagggaggaggaagatccacactaaaaagtagaagagaaagcccccgcgctaaatcaacacgacaggatcaactctctctagtagcagtttattaaaacacgcgctctatagtgggtgataagagcagcgcacatagccactccatacatcaacaactgtagtgtagtaggcacacccagcagagatgcattctgtagacaaactcatgtcgtagggcaccgatcgaaagacacagatcgtatgattactcatcactcacat

SEQ ID NO: 521908 - DNA, 303 bp, Homo sapiens
tcatatatacttgaatagtccattgaccgcaactctttatagactattgtgtaaatgtggaatcccagactgttatcattgcctggtcttcagcagagtcctggagctgctgggacctctcctatcatgatgaacttgaacttttcttcttcatttctggttttatgtaacataaaattatagaatccagataattcgctggagtcattctgatcctccatgtagatctgtacttagtatcctttggatttggacaagtgttgattacattatggctgtgtaataccattcttattaaatctg

SEQ ID NO: 521909 - DNA, 186 bp, Homo sapiens
gtacccgcttggctctgaagaagccacgcctgagatacaaaagatgcactactcttacccgctttatgttcgcttcctctccccttccgatgggaagggggactctaaggcaaggagatttacacgttgggaaggaggcagtggcagaggggtgagggacaggtgcccttacgtccagcgaggaat

SEQ ID NO: 521910 - DNA, 339 bp, Homo sapiens
ccctccacacagaatgacagggggttacttagcctatatcaagagtcccatttatcagcctttgttgaaggaagatagtcacaccccttcgagacagcatctctccctataaagaagcagctttgcgctttaccctgatttacccttcatacccttgtctgcacagtcattagaatcattaaggccatctattaaatcctgtagagataaaatgatactctctgtacaaaattgtacttctcaatatttttttactataccaagctttgttaccctacgagctaattccctcgtttacttactcatctagaataccctatgttcaaaaaatctgattgg

SEQ ID NO: 521911 - DNA, 243 bp, Homo sapiens
ttcttattttctatgtcgttgttgtagaagaaatcactcagctgcagagggtcagatgctcgtgagactgcgagtcctggatcaacaccctgcttgggatgatgctgaccacggggaatgccacacagctcgcgatttcagcctctgcatgtccgcctcttggtggtccacctggctcccactgagaggctgcctatgactactgactagccatggcgagcttgtagattgaatatcccttgc

SEQ ID NO: 521912 - DNA, 586 bp, Homo sapiens
ttacagagtgctttcggcgaacgcttcgtcgtcgttgtcgatctcggtggatccgctcatggcggactcctcaaggaaaggcggcagtttaactgcattcaggggcgtgatgctgctggcgagagagccttcgaggttctataactgccggggccaaccccctgcacggcctggaggctttgtgatgctcaaactttatggattcgcggtcagcaactactacaacatggtcaagttggcgctgctggaaaagggcctgcctttcgaggaagtgccgttttatgccgggcagaccccggaggccctggcgataagcccccgtggcaaggtcccggtgctgggcgtagagcagggttttatcaacgaaaccgcggtgatcctgccctatatcgatgacacccagccgggggtgaagctgctgccggccgatcctttccagcgggcccgggtgttggcgctggccaaggaaatcgagttgtacatcgagttgccggcacgggcgtcgttcgccgagggcttcttcgggatgccggtgccggaggcgatcaaggagaagacccggggcgaattgctgctgggtttggct

SEQ ID NO: 521913 - DNA, 1732 bp, Homo sapiens
  misc_feature (1721)..(1721): n is a, c, g, or t
tggagggcaaaacaatttcaaacttttttgcccaggaaaaggaaaaaggggaggcccgggggtgtggggggccgtgggttgtgcatcacttgtgtctcaacccaaaaaacagtttgactggaaaggggaaaacaccagtgtgttaggccaacacccctctcccgggttcgggaggcttaaagggtttgcagcaatcacggaaacaccatgcgagatctccggggtgttaggggagaaatgtgttgtcaacacccgccacggccacaagaatattgtgtgacgcactgcgtgcgatgtgtagatcttgggcgtggagaggcgtgagaacttcgcccatagaggtgtctctaggagaacctctgcgatccagcggagaagcgtcttcacgaagcatctccggaggaaatataccctgggcaaaaacgagcgaacacagagagcgagcaggagagcagacaggcgtaactacaaaagagcgacacaaacgctccccaccacagtaataagagcgcagaacaagggagaaaaagggagagaggggagagggagctcagagaccaccgtgaggacacacacacctagttatagtaccaacacaactaatgggggaataaaccccactagtagtgggcgaacataacatagaaggaatgtcatagcgagagacaaaacaaaacaaaaattgcaacaacctgcgcgagacaactagaagagaagaaagagcacatatacgatgcgtaagaaaagagaaaatagagcgtgattacacaacactggagatagagacaaatacatacctaaaatatagtagtgacacacacaaacccaagaaaggattatagccaaggacacaacaacatagtcgacaccgccacacaaaaatgtaaggatttaatcccaaacgagtagaaaataatttgacggaccctccgcgtatatacatcagccatctggagaggcaatagaagagcaatagtgttgaaacaatgagtacgagcgcctatgacaaataaatgatagtgtattaccccacggacagtaattaaaaaaacaaccaaacaaaagacaatattcaatataacacagaataccacccacatacataatatcacatacatctgtcaaatcaacaatccaccaaacaccaccccaatacccatgacaaataaagaaaggcatactttaacatatcaacaaacaccactgcaaatcataacaacaacatagacgagaagctaaatcaacacaccatgaaacataccacacacaacatactatcataaactatgcaataactcaaacataaaactacctatcaattagatgtagacacccacccactgataaaccccaccaacccgacatcacacaataaagaacacaaacacctatcaacacaacagacataaacaaaaacaaaccgaacacaacaaccaacaccctcaataaaaaacaaaagaaatcaaaacaacaaacaaagcaacccaaccacctaattttcagcacaacactaacaccacgcatacgagatctaacaaaacactaaacacactcaaaaagcgaccataaacaaccacatacaacacatcacagcaacaaactcacgaacaacaacaaacacaacactcacaaaccactaaaacgacataactaccacacagaagaccagactaatacaagcagcatcatcgcagaactaaccacaacttactaacgctcanactccactcaa

SEQ ID NO: 521914 - DNA, 919 bp, Homo sapiens
  misc_feature (32)..(32): n is a, c, g, or t
  misc_feature (43)..(43): n is a, c, g, or t
  misc_feature (46)..(46): n is a, c, g, or t
  misc_feature (51)..(51): n is a, c, g, or t
  misc_feature (59)..(59): n is a, c, g, or t
  misc_feature (61)..(61): n is a, c, g, or t
  misc_feature (69)..(69): n is a, c, g, or t
  misc_feature (75)..(75): n is a, c, g, or t
  misc_feature (78)..(78): n is a, c, g, or t
  misc_feature (83)..(83): n is a, c, g, or t
  misc_feature (88)..(88): n is a, c, g, or t
  misc_feature (90)..(90): n is a, c, g, or t
  misc_feature (94)..(94): n is a, c, g, or t
  misc_feature (103)..(103): n is a, c, g, or t
  misc_feature (125)..(126): n is a, c, g, or t
  misc_feature (128)..(128): n is a, c, g, or t
  misc_feature (131)..(131): n is a, c, g, or t
  misc_feature (140)..(140): n is a, c, g, or t
  misc_feature (143)..(143): n is a, c, g, or t
  misc_feature (152)..(153): n is a, c, g, or t
ctgggagggtcccctggccttaaaaggggccnaggcccttttnatncttgnacgcctantncattgccntggagnagnaggtntggcnantggnggggggtgntggcccccagattcccccagcnnanctntctttgtcnccncgtgggctnncttttcatccttccccaacttccctagtccccgtactaggttggacagcccccttcggctacaggaaggcaggaggggtgagtcccctactccctcttcactgtggccacagcccccttgccctccgcctgggatctgagtacatattgtggtgatggagatgcagtcacttattgtccaggtgaggcccaagagccctgtggccgccacctgaggtgggctggggctgctcccctaaccctactttgcttccgccactcagccatttccccctcctcagatggggcaccaataacaaggagctcaccctgcccgctcccaacccccctcctgctcctccctgcacccccaaggttctggttccatttttcctctgttcacaaactacctctggacagttgtgttgttttttgttcaatgttccattcttcgacatccgtcattgctgctgctaccagcgccaaatgttcatcctcattgcctcctgttctgcccacgatcccctcccccaagatactctttgtggggaagaggggctggggcatggcaggctgggtgaccgactaccccagtcccagggaaggtggggccctgcccctaggatgctgcagcagagtgagcaagggggcccgaatcgaccataaagggtgtaggggccacctcctccccctgttctgttggggaggggtagccatgatttgtcccagcctggggctccctctctggtttcctatttgcagttacttgaataaaaaaaatatccttt

SEQ ID NO: 521915 - DNA, 1181 bp, Homo sapiens
  misc_feature (32)..(32): n is a, c, g, or t
  misc_feature (43)..(43): n is a, c, g, or t
  misc_feature (46)..(46): n is a, c, g, or t
  misc_feature (51)..(51): n is a, c, g, or t
  misc_feature (59)..(59): n is a, c, g, or t
  misc_feature (61)..(61): n is a, c, g, or t
  misc_feature (69)..(69): n is a, c, g, or t
  misc_feature (75)..(75): n is a, c, g, or t
  misc_feature (78)..(78): n is a, c, g, or t
  misc_feature (83)..(83): n is a, c, g, or t
  misc_feature (88)..(88): n is a, c, g, or t
  misc_feature (90)..(90): n is a, c, g, or t
  misc_feature (94)..(94): n is a, c, g, or t
  misc_feature (103)..(103): n is a, c, g, or t
  misc_feature (125)..(126): n is a, c, g, or t
  misc_feature (128)..(128): n is a, c, g, or t
  misc_feature (131)..(131): n is a, c, g, or t
  misc_feature (140)..(140): n is a, c, g, or t
  misc_feature (143)..(143): n is a, c, g, or t
  misc_feature (152)..(153): n is a, c, g, or t
ctgggagggtcccctggccttaaaaggggccnaggcccttttnatncttgnacgcctantncattgccntggagnagnaggtntggcnantggnggggggtgntggcccccagattcccccagcnnanctntctttgtcnccncgtgggctnncttttcatccttccccaacttccctagtccccgtactaggttggacagcccccttcggctacaggaaggcaggaggggtgagtcccctactccctcttcactgtggccacagcccccttgccctccgcctgggatctgagtacatattgtggtgatggagatgcagtcacttattgtccaggtgaggcccaagagccctgtggccgccacctgaggtgggctggggctgctcccctaaccctactttgcttccgccactcagccatttccccctcctcagatggggcaccaataacaaggagctcaccctgcccgctcccaacccccctcctgctcctccctgcacccccaaggttctggttccatttttcctctgttcacaaactacctctggacagttgtgttgttttttgttcaatgttccattcttcgacatccgtcattgctgctgctaccagcgccaaatgttcatcctcattgcctcctgttctgcccacgatcccctcccccaagatactctttgtggggaagaggggctggggcatggcaggctgggtgaccgactaccccagtcccagggaaggtggggccctgcccctaggatgctgcagcagagtgagcaagggggcccgaatcgaccataaagggtgtaggggccacctcctccccctgttctgttggggaggggtagccatgatttgtcccagcctggggctccctctctggtttcctatttgcagttacttgaataaaaaaaatatccttttttgggatcctacactcactataaagactaacaaaaatacctcgcgggctcataatactcgacagactctacacaaacgggcgtagataacaagaaccatcggcccccacactgcgccaccactacgacgcaacacacatataggttcaacacgtcgccacatcatctctgccagataccaaaaatagagcaagacagtattatctttgctccaacacccaagtcaaacatggaaatagagcagcatcacaccgaatgcttc

SEQ ID NO: 521916 - DNA, 942 bp, Homo sapiens
  misc_feature (23)..(23): n is a, c, g, or t
  misc_feature (39)..(39): n is a, c, g, or t
  misc_feature (44)..(44): n is a, c, g, or t
  misc_feature (58)..(58): n is a, c, g, or t
  misc_feature (76)..(76): n is a, c, g, or t
  misc_feature (84)..(84): n is a, c, g, or t
  misc_feature (90)..(90): n is a, c, g, or t
  misc_feature (98)..(98): n is a, c, g, or t
  misc_feature (102)..(102): n is a, c, g, or t
  misc_feature (105)..(105): n is a, c, g, or t
  misc_feature (113)..(113): n is a, c, g, or t
  misc_feature (116)..(117): n is a, c, g, or t
  misc_feature (121)..(121): n is a, c, g, or t
  misc_feature (126)..(126): n is a, c, g, or t
  misc_feature (128)..(128): n is a, c, g, or t
  misc_feature (131)..(131): n is a, c, g, or t
  misc_feature (133)..(133): n is a, c, g, or t
  misc_feature (136)..(137): n is a, c, g, or t
  misc_feature (139)..(140): n is a, c, g, or t
  misc_feature (144)..(144): n is a, c, g, or t
  misc_feature (146)..(146): n is a, c, g, or t
  misc_feature (148)..(148): n is a, c, g, or t
  misc_feature (152)..(152): n is a, c, g, or t
  misc_feature (155)..(156): n is a, c, g, or t
  misc_feature (159)..(159): n is a, c, g, or t
  misc_feature (161)..(163): n is a, c, g, or t
  misc_feature (171)..(172): n is a, c, g, or t
  misc_feature (183)..(184): n is a, c, g, or t
  misc_feature (189)..(190): n is a, c, g, or t
  misc_feature (194)..(194): n is a, c, g, or t
  misc_feature (206)..(206): n is a, c, g, or t
  misc_feature (209)..(209): n is a, c, g, or t
  misc_feature (212)..(212): n is a, c, g, or t
  misc_feature (228)..(229): n is a, c, g, or t
  misc_feature (236)..(236): n is a, c, g, or t
  misc_feature (238)..(238): n is a, c, g, or t
  misc_feature (241)..(241): n is a, c, g, or t
  misc_feature (248)..(248): n is a, c, g, or t
  misc_feature (253)..(253): n is a, c, g, or t
  misc_feature (257)..(257): n is a, c, g, or t
  misc_feature (259)..(259): n is a, c, g, or t
  misc_feature (265)..(265): n is a, c, g, or t
  misc_feature (267)..(268): n is a, c, g, or t
  misc_feature (272)..(272): n is a, c, g, or t
  misc_feature (274)..(275): n is a, c, g, or t
  misc_feature (278)..(278): n is a, c, g, or t
  misc_feature (280)..(280): n is a, c, g, or t
  misc_feature (283)..(285): n is a, c, g, or t
  misc_feature (289)..(289): n is a, c, g, or t
  misc_feature (294)..(294): n is a, c, g, or t
  misc_feature (298)..(299): n is a, c, g, or t
  misc_feature (301)..(302): n is a, c, g, or t
  misc_feature (306)..(306): n is a, c, g, or t
  misc_feature (308)..(308): n is a, c, g, or t
  misc_feature (315)..(315): n is a, c, g, or t
  misc_feature (320)..(320): n is a, c, g, or t
  misc_feature (325)..(325): n is a, c, g, or t
  misc_feature (327)..(327): n is a, c, g, or t
  misc_feature (330)..(330): n is a, c, g, or t
  misc_feature (337)..(340): n is a, c, g, or t
  misc_feature (343)..(347): n is a, c, g, or t
  misc_feature (350)..(350): n is a, c, g, or t
  misc_feature (354)..(354): n is a, c, g, or t
  misc_feature (356)..(356): n is a, c, g, or t
  misc_feature (363)..(363): n is a, c, g, or t
  misc_feature (373)..(373): n is a, c, g, or t
  misc_feature (381)..(381): n is a, c, g, or t
  misc_feature (384)..(385): n is a, c, g, or t
  misc_feature (391)..(391): n is a, c, g, or t
  misc_feature (393)..(393): n is a, c, g, or t
  misc_feature (398)..(398): n is a, c, g, or t
  misc_feature (400)..(400): n is a, c, g, or t
  misc_feature (404)..(407): n is a, c, g, or t
  misc_feature (409)..(410): n is a, c, g, or t
  misc_feature (414)..(414): n is a, c, g, or t
  misc_feature (420)..(420): n is a, c, g, or t
  misc_feature (430)..(430): n is a, c, g, or t
  misc_feature (432)..(432): n is a, c, g, or t
  misc_feature (437)..(437): n is a, c, g, or t
  misc_feature (443)..(443): n is a, c, g, or t
  misc_feature (446)..(447): n is a, c, g, or t
  misc_feature (451)..(451): n is a, c, g, or t
  misc_feature (458)..(458): n is a, c, g, or t
  misc_feature (468)..(468): n is a, c, g, or t
  misc_feature (473)..(474): n is a, c, g, or t
  misc_feature (476)..(477): n is a, c, g, or t
  misc_feature (554)..(554): n is a, c, g, or t
ggaggggcctcgttcgagaatcnaagtggagtaaaagtnctgcntcaccaaggcccanaaaatgggtgagcagcangcatgggnatgaanaggcaagnaaantgnattgtgtnaannaagnaaaananagnanggnnannagcnantnaaanaanntgnannnaaaattannggatgaaaaannaaagnnatgnaagaagtaaaanagnacnggaggaaagtaaaaannaaaaaananggnaaaatgnaaaanttcnanaaaggnannaaanannaananaannnaaanaattngttnnannaagnanatggttnccttnaaaananaanaaaaaannnnaannnnncanatgnanaaaaaantgtgtttgtnaaatgaanaannattgtntnaaaananggannnnannaatngtgaanatgagtagtncncaatnaaaaanaannaaangtagganaagtggaatnaaaanngnntctactgggcaaatatggagagaaacgccattcatttaatggctgcaggagaaaatggagtaaatgcaacaccctcngatgctgcaagtgacaggtgggaaactggtgcagggaaatatcctgtgccatgtaggctgcaccagcctgggccctactgctctctaagtggccctaccaccattgtccttcatcgcccagagaggctggtctcagttccgcctgcagcaactatgttgatttgcttgtaacatgttttgtcctttttggatccattgtagattggccccaaaccagacactgggattgagtcaccaaaaaagtcctttctcttttgattcctgggtgtccagagtctgatggggggacttcttttcgtttcattttcatcattgtatattgcagcttctggtctacataaggattgctgagtttgtttgcactttaataaatagtccattaaaatgc

SEQ ID NO: 521917 - DNA, 81 bp, Homo sapiens
tcaagcttctaacgatgtacggggacatgtgtacctgtaatatttttccattcatatctcaaagtaaagtcattaacatca

SEQ ID NO: 521918 - DNA, 332 bp, Homo sapiens
tactgcacaaccatgaaaaagaataaaatcatgtctttgcagccacatggatgcagctgaagggaattatgcttagtgaattaacaccaggaaaagaaaatcgaataccacatgttctccactagataaagcaaatgtggtctttctgcatcatggaatactatgcagccatgaaaaagaataatatcatgtcctttgcagccacatggatgcagctgaaggacattatgcttagtgaattaatgccaggaacagaaaatgaaatactacatgtcctcaactggataaagcaaatgtggcccttctacaccacggaatactacacagtgatg

SEQ ID NO: 521919 - DNA, 105 bp, Homo sapiens
ccgccgatacctttaatgccgtacacgccctcagacgcgaccgtctatgccaaaccgtacgctgctggtttgcacccgcgcggttggcctatgatcgtccccctc

SEQ ID NO: 521920 - DNA, 151 bp, Homo sapiens
cccccctccccccgagcaccgcacgcagcaccgcgatcgctccgagtttcaggctcgaactaagctagcgccgttcgatcgatcgtcccattcagatcgtccatcattgattatctaccgggacctcatcagtccacgatgagaatgttct

SEQ ID NO: 521921 - DNA, 211 bp, Homo sapiens
agagggtgccttgggcacctctgggactcagaagtgaaagggggctatacctagtgatattgctatagcccttatgattattaatgatgatgtcttgattggtagatataggttatggttcatatgtccggagagtatattgttgaagaggatagctattagaagggactatggatgcggttgcttggcgcgtgacacactctccgcctta

SEQ ID NO: 521922 - DNA, 83 bp, Homo sapiens
gagattccagcagcatcatgctccaagcaggtaacggtgagagaaacagccagcatcaagaaggtcactcggaaactctgccg

SEQ ID NO: 521923 - DNA, 399 bp, Homo sapiens
caggcaactttttttttggagtttcagcttgcttcccacaggggcggggagtgtgaggtttattcccctttttaagacgatagaagttttcagcctaaaccgtattcctaggtaagcagctggattgcagttttgtcttggaaattttccttaatgactaaaagttaagattaacaactagctggttttaatttttccttacccttagaggaccccgtaatcccataaattttgccatcatctgtttatttagcttaactgtttttttttatttgttgaaggtggtggtggtatttcagtcttttttttattgggttggcccgacttggtaaaatttgtaaaaaagttccctaattatggggaagatttcctttgaattgggttaattcctgtagctga

SEQ ID NO: 521924 - DNA, 1025 bp, Homo sapiens
tgtgggtttgagcacagggtacttaattggatgggtacatgacaaggtgggggttccctaggcccctcccctcttcaaggggtcatacatgtggaaacgggtgaggaggggaaattcaggtggtgggtgggggacgtgagtgtggtggcagggactccccagcaggtgagggtctctctcttcctctggtgtgctctggcgtggggctgggtggtccaggggttcttatacctccttgggaggccatgtgtgtgggccagtgaggttccaccaccctgtgtgtggcgggtagccaaattccggtgggtcataccaggaaagtgaggttgtgaacaaaggggctcgtgtgagggcaatgtgccagccccacagggtctcaaagggtgggaggaggtggggtgctcgcgtgtggaagttcaggaggaagaaccaccggggggctccagggttagccccaggaagtgcccctggaaagggggggccctcggaagcgcccgtggttatcacacaacctttctttgaagtgctccactcaatattgggggacaggggttcttatcatagaagcgggccggtctcaggtttcccaccaaagggaacccgcttgtggccgtggggggaaccagcggaaaagggcccaggccaatggagacgcataccccggtaacaagcctcaggggagtgacccgtggcccccaacaggcttggggaaaggggcaaagaaaagaaaggcacgggacaagatggtcccggggaagaagcccccggggggcccatacaaaggccaacaaggttcccccgggagggggggcccaatcccaaagggtctctctgggggggggcaggagaatcgcgctttgggcacggggggcccatagaaaatccacttcccacaagaataccaaaaggttggggcaaggggaatagaccttgtggccccgcgggttggtcaaacgacacagttttggttcggttgaccacgagaagcctttcgcaggatgacactccgagaggatggggaccat

SEQ ID NO: 521925 - DNA, 327 bp, Homo sapiens
tactctaagatcggcacggatcgtgaatgtttgaagcagttgcactgtcacaagcgatacgacagtgtcatgagacacagaatcgaggagagaggagtgcgaaccattacatgtagcggcacgagggagatcagcgtgcaagctagtcgcagagtcaggtgcaccacagcatttacatcctcccagaccctacgtgtctcacggtggtgcagtggcccccgcactacagaagaacatgcgagcgagctcaggcgcgctggtggtggtttccgatacaactcccactcaaagaacccgtgtatccccggtcgaggggtaccgagctcg

SEQ ID NO: 521926 - DNA, 318 bp, Homo sapiens
  misc_feature (25)..(25): n is a, c, g, or t
  misc_feature (82)..(82): n is a, c, g, or t
  misc_feature (125)..(125): n is a, c, g, or t
  misc_feature (155)..(155): n is a, c, g, or t
  misc_feature (184)..(184): n is a, c, g, or t
  misc_feature (225)..(225): n is a, c, g, or t
acaaaggaaaagaagcccaaaactncaaaaggctgcttaactggattcccttccatatttatcccaaaaagccaaaacaatngggatggagaaaaaaacttccagtggatgtccaggggttaagnttgggaatgccccttgactacaaagtggtngcctggaggaatttgtctttaataattgnaaattttcccgtgtctttattgtagttacataagtatatgncatttgtccaaaacccataggcttgtacactaaaaaggatgaattttactgtgtgtaatttttttaaataaatgttatttttatggaggaaag

SEQ ID NO: 521927 - DNA, 165 bp, Homo sapiens
aaaaactcaggatcgtagttccctcaaaggacaccagaggtgaaggacaaccaggaggttgtcttcaactgtgaggtcaatactgaagggtcccaaagccaaatggttcagaaatgaggagctatatttgatagtccaaatacatcatctcccaaaggcctaggt

SEQ ID NO: 521928 - DNA, 395 bp, Homo sapiens
agtgtgtgtccaaaggtgattggaagatgtgttgtgtgagccaatgttcctagtagctgagttgagatgagtatggaaaggatggaagatcacgcggggtcttatgggccacattgagtaccttggtttttcctgcgaggtgccagccacagaagggcctgaacagagccaggacaggatgaaatgtgagcagcgttggcatacaacctgtgcagtggttccatgtgccgttagggggtgctaaagctggtgttaagatcattcccaagaactatactgataatgaattggaagagatcactaaggaggttcaccatgaagctagcacaagagggctttatcggtcctggcattcatgtgcctgctccagacatccgctcaggtcagcgggagat

SEQ ID NO: 521929 - DNA, 325 bp, Homo sapiens
atctaaaggatcccctgatcttccgtcccaatgcaaccataaatatcattttttaaaattattataatttcaaaaacagggggtcactctgacgcccaggctgaattgcagtggcataatctcagctcactgcagtgatcttcgtgcacatacctatggctctggcatttacatggctctatagattcttactcaacatcccttaaaatttttttttattctgatataagagcgggatgctcttccaacaagaagatgagaagagaacaaaagactcctccaatatattaaaaatatggtagtcggggccgggcacggaatatga

SEQ ID NO: 521930 - DNA, 356 bp, Homo sapiens
tagtggtggaggggtcaaaaacgggaagctttggccctggtttccaaacagcggctcaaccagaagagccagtttttccaaaaatgagctggatatttgtgagccccccagcatgtgcaggccgtggggtgaccttaggccaatgcccgaggttgggaggccccagtcaagggaaatggggcccatggaaaacatgttttcgccccctgaacccagcgctgggatgaggactttggagttgtgttgagacctccaaactcaggctttagggtcagaccagggttgttttacccgcccttcccatttgggcattcctgccccctcccatggagtaggaatgaaccctggtttgagca

SEQ ID NO: 521931 - DNA, 649 bp, Homo sapiens
  misc_feature (23)..(23): n is a, c, g, or t
  misc_feature (29)..(29): n is a, c, g, or t
  misc_feature (31)..(31): n is a, c, g, or t
  misc_feature (78)..(78): n is a, c, g, or t
  misc_feature (643)..(644): n is a, c, g, or t
cttcgtttgggcattcggcgcgnccgtgngngggccccaccgaaatccgcccattatgcccggggcccaacttttctnaccggaggagagagccgactaatacactcctcttgccccacgtcacaggaaaaaaccggacatcaaggcccgtcacccatggcctggaaccccttctgagagctgacccacgaccaacaaccaagaaagcctctcgcacttaaggacgcccattcctcatttaacacaagaggggaccgaaccaccgagccccaatcccaaggtcaaaagcccacacactccctgcgaactccataacccggcgcttcccccagggcaaactcctcaccaaagacaagcccactcaaaaaaacaaagatcggtgcataatgaagggatcgaccgaaaaccacaaatttgtaaaaacacaaaggagagcttctacgagaccaaggaaaccatatagcctcccattgagggacgaaacggccctaaaaaaaacgcaagggacgggaacaacccaatgggcgcaaacgaaaaaaaaaaaaacacctcaaccaaagatcttaaccgaaatcccaaaccctgccccccggagcccccattgacttagtctccccggtcaccccatcaagcccaccccctnnaaaaa

SEQ ID NO: 521932 - DNA, 425 bp, Homo sapiens
  misc_feature (192)..(192): n is a, c, g, or t
  misc_feature (223)..(223): n is a, c, g, or t
  misc_feature (372)..(372): n is a, c, g, or t
gacggactccccggtgttatcgactgccacctctgacggggtacgcattactggactactgacttctacgacaactggtgacttcagcggtggctggacgacggtgtgacacacgacgactggacgacgtgactacagaccgtgttactggtcaacgacgttacgacgacggggtggactcactgcacgggntctgtgtaaacccacttactacaacgacctnttgggtttttacctcctgacatgacgactaggacagccactcacgacacggtgctgacgcccgacgaccgtgaccaacaccttggaccgtgctatgttgacacgacgcacacggtgacacgtcagacgacacccctctttacggaccgnctactttcacgacaacttccagaccacgacggtgactacgtgactcttcaacc

SEQ ID NO: 521933 - DNA, 420 bp, Homo sapiens
  misc_feature (420)..(420): n is a, c, g, or t
catggtaccttccaagtacgcctataatcccagtacttgtaaggccgaggcgggtggatcacccgaggtcaggagttcgagagcagcctggccaacatggtgaaacctcatctctactaaaactacaaaaattagctggacgtggtggtaggcacctgtaatcccagctactcgggaggcagaggcaggagaattgcttgaacctgggaggcagaggttgcagtgagccaagattgtgccactgcactccagcctggctgacagaacgagactgtttcaaaaaaacagtcaaagagacagggtgttgctatgttgcccatgttggtcttggactattggcctcaagcaatcctcccactttggcctcccgggctgggattacaagcctgagccaccacacccccgcctgtaaccagtctn

SEQ ID NO: 521934 - DNA, 116 bp, Homo sapiens
aggtcaaagcagggcatgggttggcagggtgggcgtttggggccctatatgttggcttttccccccagaggacacaggcagcttccaaaatatatttatcttcttctcgggaaaaa

SEQ ID NO: 521935 - DNA, 91 bp, Homo sapiens
tggtcggtttcgttcgtctcgatcgtgcgttctgttagagaactccagttctacctctccctcgacccagattttctccctcgtctaatcc

SEQ ID NO: 521936 - DNA, 483 bp, Homo sapiens
ctgtgtccaggcttgattgcagtgacagaacctacgttcactgaggcgcttaagactaccaagcataagcgatagcacatggctcagcctactgagaagatgaagatacaagcgcatgccagacacacccatttaaaaatcgtgataagggctgaggcacgtgtaaaccatgctggccaggatgagcgagagctcctgaccatgagatccgtccacgtaggtcgttcaatgacttgtaatacacgtgagaaccagcactaccgaacgcaccctatacatacatgtgcacatggcatggtgaatctcatgctgggagtggcgagctctgcaatgactagcaccacaacagggccaatctttaagcggagaataactctaaatttatgcgcgacggaactccaaatccaatcaattgagaccaccagcagtgatgtattcgaattatccagccactgcggcatcactccatgtagacagagtctt

SEQ ID NO: 521937 - DNA, 313 bp, Homo sapiens
ctgggctggacgagggctgggctggggaagagggctggctggggaagagggctgggccggggaacagggcaccactgagggggtcttggaggagcctatgccatgtccatcgcacctcctgggtgaagctcctgaggacctggccacaagtggggtgccatggaccactgtgcctcctgcctggcggacgcctctgggagtgaggaagacggaggacggggggagaagaatttcctctctgtggcctgtgtgtgcggcgttcacattctctctcagatcttccaggactgtccctctcttccccatgcccagg

SEQ ID NO: 521938 - DNA, 750 bp, Homo sapiens
cgtcgcgagcccctctgctcatcgctcgttaccccctcaggcccttggcgcttggagctcaggcccagtcgttcctctgtctacaaatccaatggaaccgtgccctccctgaatcccacgtttaggaagaggaggaaggacgcccctctctgcttggagtggaagaggtgcatacccgaactctggagtctccgcgaggccccccattcactactctcacggcaagcccacgcgtacatatcgaggaccgacggtactctccagacggaagcgtccctgagaccttgcagagtacgttagcggaggggtcgggacgagcacgatcgcggagtggataccgacctggccgagcataggtagcctcggctcgggtcgtcgcaagaatcacgagttcttgtctgtgacaggtgtagagcgttctgaagcgcggcaggtaaacacttctccgtatcgtgcactcgataaaccgtgtagaaccgtattttaggatacacctttgcttggtaccaacgactgggtgtatgcgacccggttctgggcaaagggtggccgtatcggtgcgcgaagacaagaaagattaaccaaacattttatcaacctaaccccacgactaagggtatttcgcacatcagcctttgtcaagccccttgttagactctcccaggcagacacgtgggtcggttaaaccggcctgttgggaccccccaatgaccctaacaacagacctttgttaaaaccccgggtggttga

SEQ ID NO: 521939 - DNA, 152 bp, Homo sapiens
ggtgaggtcggagtcaacggatttggtcgtattggcgcctggtcaccaggcttgcttttaacctctggtaaagtggatattgtgccatcaatgacccttccattgaacctcaactaccatggttttacaagttcccatatgattcaccatgg

SEQ ID NO: 521940 - DNA, 232 bp, Homo sapiens
  misc_feature (138)..(138): n is a, c, g, or t
  misc_feature (144)..(144): n is a, c, g, or t
  misc_feature (148)..(148): n is a, c, g, or t
cagtcggacatttgccgacgtaatcgtccagcggttgggtcacgttgagctcgcggtgcacggtgccgacggctgggggttaagcgggtcgcccaccagccgaatcggctcacggggaatgcccaggccgatggcganctcagngcanagcggcacgaagtcgaaataatcggcgagggtctggctgcacagttgagattgtttgtgcccgccgttgaagcgcacgttctcg

SEQ ID NO: 521941 - DNA, 240 bp, Homo sapiens
gtgatctagaggatcccgtcatttctacactagtcacagttccagaaatcaaaactgttagcagatgatgtgattgcaaggtttggttgcttctactaataaatcagattgcttatttgtctaacgaatgttattagccaaacttgtgatacttggacacattacaagttttagctcaccgttactattatcaaatgttgaacagatgacgatcttgctatttgtgtgtagacacttgaa

SEQ ID NO: 521942 - DNA, 1588 bp, Homo sapiens
ggaacaagatccttagctacaagattggcaaatgagatgcagaatgctgtaagatgacacattgcatgaccggactcatttcagggtctttgcgttaaaacaatcattgcaaaagtattctgaactggtcaagctgcccagtcagatgggctgttgccatttagaatcactgtaattaattagttgatgcagagcacgagagcttcaggctaatcaaccatgtcatttgtcccatggagttgggtcctcaacgagcgatggcaacaatccagtctcagtttcaacatggtctttctggttcaggcctttcatttcttaacaatggcacagcagcatgattcttctaagtttaatgggttacacaagttcttgaagtgtctcaaaaatattttacctaactgtaaccctaaaattgatgtctttgggtttatgacactcaagtaacttttcgatatttccccagttctttttaatgcggtcaactcactggaccttctagtttacaggtggttgatggcatttagcaataattattgctggtaaaggacagtgtctaccttttcttcctcacctggttccatttatgtaacggtgcagattagaggacagccaatttgctataatccacggtgtttcaccttcaagaacgggtacttaagtagctacaggtggccacaatttcttaacaggcagctcaagggttgacactggaaggcaccctctttcgcaagcctaaggggtctcgcggcacgcacacgggatccagtcgcggttatatacacgccaggtttacgcgggataatcatcagcagcggcgatctgtgtgcgactgccgtcacttattgtgtcttatctataattctcgcaatcagcattattcggcaccaccgactagcgacgcaacacacaacagcagagcacgacaacagcaccgcgcagggcgcgggggggggaggacacaacgaaggagacaggacaagggaggaggggggagcgagcgcagaacagcggcgcaaaagagcgcagaagccgggactagaccgcggaacagcgcaacaacgacgggaggagagccggaaggagaagaaaaggaccgggagcaggcgagagaggagcggaggacgacaaagcgacaggcaaagagaaagagcgggaggacgtagggacggacggcgagacgagcgacaagacaagggaacgagaaaccggcaaccgggacgagagaagaggaagcgagaggcgcccgcggcgcgaggacacacgaacagggaccagaacagcaccgaccagcgacgccagcaacacaaggagcagcgggggccgcagaaggagccgagggaacgcgacagaacgcacgcggcggagggaccgcgggcaagacaggaccgcacagggcagcggcgatgaagcggagacaagcgcgcaggcagcgaacagggacggcagcgagacaagagcgcagagcaggacacgagtaaaggacaacacgcaagagagagggaggaggggacagcgagagggcaccagagaggcggcgaagcccgagacggagccgcctcgccaagagcgcgggaacgcgacgagagga

SEQ ID NO: 521943 - DNA, 222 bp, Homo sapiens
ctcctggactcaggcagtcctcccatctcggcctcccaaagtgctgggattgcacgtgtgagccaccatgcctggcctcattgatttttaaagtaggacaaggtaaagatctaacccccaagccaggtgtggtggctcacggctgtggtcccggcactttgggaggctgagatgggcggttcacctgaggtcagcctgggcgacagagggagactccatctc

SEQ ID NO: 521944 - DNA, 745 bp, Homo sapiens
  misc_feature (653)..(653): n is a, c, g, or t
  misc_feature (680)..(680): n is a, c, g, or t
  misc_feature (720)..(720): n is a, c, g, or t
agcgggacagaatctgcggtgctctgctggcgactggcaggacgcggtgcagagagcggacttccgcgacgcgggttttttttttttacttgaatgtaaataccaatcaagatacattgaaataagaaggtcctacagtgtaggggaagcaatggaagaacttctacctgatggacaaatatgggctaatatggatccagaagaacgaatgtggcagctgctacagcttttacccacatctgtgcagggcagggtgaaggagatgtcaggagagaagcccaatctatccaatatgatccctacagtaaagcttcagtagccccagggaagcgacctgctcttcctgtgcaactacagtacccacatgtagaaagtaatgtcccttcagaaacagtctctgaggcctcccaaagactccgaaagccagtgatgaagagaaaggtgctgcgcagaaagccagatggggaagtattagtaacagatgagtcgattatcagtgaatcagaatctggtacagaaaatgatcaggatctctgggacttaagacaaaggctgatgaatgtcacagttccaggaagacaaggaatcttcattggatgtttcacaaaaatttaacctaccacatgaataccagggaatttctcaagatcagntcattggctctctacaaagagaagganggggctctccagttacgaacaagacctgatggttgccagnagacccaagtcctttattctcccaa

SEQ ID NO: 521945 - DNA, 273 bp, Homo sapiens
tatggagtacctggtgtatcaccacgaggtcattgcattgtgagatcagcctagccaagatggtgaaaccccgtgtctccagaagaatgcaaacattaagcgtgcatggtagcaggtgcctgtaatcccagctactagggaggctgcgtgcaggagaattgcttgaacccaggaggcagaggttgtcagttagccatgattgcaccagctgcaactccagcctatgtgacagaggcaagactctcatctcacaataaaaaaaaacatgaaaac

SEQ ID NO: 521946 - DNA, 200 bp, Homo sapiens
  misc_feature (173)..(173): n is a, c, g, or t
gggaatggccaggatgcagttgttactattgggacaaatgacactgaggcctttggggttatcgcacgtttcgaatacgtgcaattcatgggtattgtgtgtcaatgtcaacatcttaatcatggagtccaataaccaccattattctatcttgccgcatcttgactgtcttnacttctttataaaattctttttcgcta

SEQ ID NO: 521947 - DNA, 824 bp, Homo sapiens
tctttctaaggaaaaggaactattttgcttccacttgtatttaatagatcttccctgttctctttttgtcatttatctattattgcatttgaactaggcaacaatcacaaaacctcaggagtgtaaaacaagtgttcattgctcatgcatctgagatggctgaattggtggctctgctgaggttggccaaggtgatgggatgtgggactgctccacatacctctcttactctggttggcaatgccaggcatgtgctcatgcttcccaattccttctgctgtcacctatgagatgttgtttctggactattcattttgtcagtatttcttcctaaaatgtgtactcagacctgtacaaccttcctctaggtgtggtctaaccagtaaaaactgcaggggaaccattatttcctatcctctggacacactgcttctattagttattaatttaggttagttattaatttaggctgagatggcattagcttacttagcagatgaattgcacagttggccctcttctcacattaagcttgagaaaaataaaacttctcagatttttctccatatatactgctgccaagtctcatccatcctgtgaaaaaaaaaaattgtctttcatgcctagtccttgaaccgtgtcaattgggttttgtaaagggtctttgaagtatgtcttgaattaactaagttcattcattcattccataaatatttatcatgtccctattaggtgtcgagcactgtgcagggaacaagacatgaacatagtccttggtcttgtagaatttgtgctctacttgcagaagggtaggggggtccgct

SEQ ID NO: 521948 - DNA, 112 bp, Homo sapiens
tcggccgcctactactactactgctcgaattcaagcttctaacgatgtacggggacatgatccttgctgataaatataaccatcaataaagaagcattcttttccaaaaaaa

SEQ ID NO: 521949 - DNA, 515 bp, Homo sapiens
atgtgtcctatgccaaatagagtttttcttttttaacccaatgggtcaaacagaagggggtggggggcttataccctgtacaccccccaatcaatccatcccactatcacactttaaaacacattgaccgaaaaaaaatttacaactaccttttttttaactgttttcaacactatcactggttatccccctactaccccccacccccaaaaagacatacgttaccttttacttcgattaatggacttaacaatttcaaacacaccataaatttaatcccctcataaaatataataacttgtccgtttttaacaatgtcccaacttacacaaattccaaaaatccaccttttccaatttccgatttgtggagttcatcgcccgattgctttgtttcaaacacacccattttcttattacccttttaacaaccagcccaatctctgaattataaaattagggacttttacagtaaattttttcctaaatggaagccgtaaggcgctgcatccttaa

SEQ ID NO: 521950 - DNA, 1028 bp, Homo sapiens
  misc_feature (507)..(507): n is a, c, g, or t
gaaatgcctgaaccgcaggtacatacttgctatactacaacctagtaggctctcttcccctatcttcatcgaactgatggacactcagaagaccctatgctcattatacatggtatctactcatctctcactgtccttggtaactatcaaacttccgtgagaccaacgaacttatattagtgatctagtctgatcatcgagattatgcttctaattaagttatacaggattagccctcttcctaacgggatctcctaccgttgatgaagcctccactaatagtcactcattgctcggaagggccaccacgaatcgtatgaggatcacagtaagctatcattgccagccagtctcagctcattcaaataaactcagtgccgggtcattactcgcgctaaatagagtagctgccacatacgatcaatcttcaagtttcgtacaatacgccccacctgcatcacaaacaggaacagtaagactcattagcacacacttgtactcctttgnttagctaagttcgccttcattggaagcgccattagagtatattaaatcatatgtctttctcaattcatcgccgctaagcgagcgacacatcgaagcatcgcgtacataagttcgtccttcatatgacataactcctttcaaatcaatcgcacaacttagccgcatcgctgattcatccagtcagttgctcaatctataaaacccacttggacagccttcactcagggagcatgtcaattttcgtccattaaatcagcgcccgagcggtacatttacactccgcattctatttcacctattttcctgcacgtgagtcaaaactctaaaaactcaccgaaaacctgaccgctcaacaagttccgaccatttcatatattccatcattcttccatcgggactttcaaaaacttcatgtttcccctacctcaataagcttttttttgattgaacttctaagcaaagccctcgcattaaaccattcgcctttaacccccagtaattgaaccctactggggaggaac

SEQ ID NO: 521951 - DNA, 489 bp, Homo sapiens
ggcctggtttgttcaaggaactggagggcaagaaaatcaggagccaattcatgcagggcacagttagccaaggcaggaggcaatcatgctcaccctcttccacagccggactcactcaggaggcccttcatcttcatgttccccacatagcagaggggagggcagaagatgagagggaggagagagcagagccaagagcctccttttctcccactgtgcccctcctatgtgtggctctggacaccaggaaccacccaaggacagtgggactcctcgaaaagataattgctcatgagggatccaagagcaaggcttgttacatcctataaccttcacacaaaatattgactgagaatcctccatgtgccaagtactgttcaaaaacactgggaacccagcagggatgagccacaagtttccttgtctttacgaagctttcattctgagggagtggagagagacaagcaataaacaaccaatcaaaacaaa

SEQ ID NO: 521952 - DNA, 454 bp, Homo sapiens
  misc_feature (121)..(121): n is a, c, g, or t
agtaaggactgggtcaagcacctgacaaccagagctcgtccgtggcttcacttgttttggactaaggagctgaggagcgtgcaagactgtacttggagaatctgtttcttgctgccatttngtcactgaacactattttttttctccttctttttttgtaagaaaaggagaacacataaaaccccaccagaacaaactccactcggccctgaaagtatttacaatcacggccctgaaagtactgaaagtatttacaatcacgttacagttcattcactgctgcagaacctctctccagcgatcaaggtcgaagggagccgacgtcgccctctatcggctccctgctgcactagaagttctggatgtcagaggtccaacttgagtctcactgggctgatgtcaagaagcctgcagagctgctttcttcctggaggctctaggagagattccgttt

SEQ ID NO: 521953 - DNA, 1113 bp, Homo sapiens
  misc_feature (736)..(736): n is a, c, g, or t
  misc_feature (1113)..(1113): n is a, c, g, or t
gctggtagaagacaagcctctctaatgctatcgttgcatgaccccagtagggtcctgtgtgggtgtggcagatggccaagtgagaatcacggcagcccccgggtaggcagagcgtcccatgttggagtcactccaccatggtacctccgaatccatgagcctagccctgttctccaaagtcaatccgcctggttcaggacctccgcagaggagctggtgcatgcagagctggtgagaagtgctggagccggagggcagaatcgtccctagtagttcaaccgattcagcaatccatggtccctgtgcgtgcagcatgaccgtagcgtggggcgagcacgatgctgaatttcgagacgcctttggggcatgaatgcggagccgaacgtgcgcccaagactcatagcttgagtggaaaactcgcccgtgctgagaagcaagcccagaaatgcgggagcctctcgtgacgtaggcatggcaacgtcgggccatggtgtgaaggaatgctccaaggacttgagaacttccatgtgacgagcctcacaggacgcaagtctggctgtcccgctaggacgttccccctcaggttagtccccagggacaacgccgcaataagactggtaagaagtagtgcgtggataacagttgccaccgtggaaagactacagagcaagacattgcacggttctcacttaggaaccacacttgcaggttgcgtacctgggagaccacttgggancaatattctcaaagaaggccaatactggctgttgggtcagttcagacgacaaccctgggggcggccccctttccaggaaagcgcttgcattgttgcccccggctaagttccccggatagaagtgggtagacttgggcatgccctgcgttccttccaaagggttacaaatatcccttagaacatgactttcaggggacagggcaccgtacatcggagcgccagccatggatgagccacgcccaagcgcatacgccaaagggagccaattgggaccgcgcctcctagccggggcaaggttctatatgcaaaaccccgagttggggaaattgcctgcggaagcatgtcgaaaggggtggcggtaaagaaccaaccaaggn

SEQ ID NO: 521954 - DNA, 504 bp, Homo sapiens
  misc_feature (121)..(121): n is a, c, g, or t
agtaaggactgggtcaagcacctgacaaccagagctcgtccgtggcttcacttgttttggactaaggagctgaggagcgtgcaagactgtacttggagaatctgtttcttgctgccatttngtcactgaacactattttttttctccttctttttttgtaagaaaaggagaacacataaaaccccaccagaacaaactccactcggccctgaaagtatttacaatcacggccctgaaagtactgaaagtatttacaatcacgttacagttcattcactgctgcagaacctctctccagcgatcaaggtcgaagggagccgacgtcgccctctatcggctccctgctgcactagaagatattgactgagaatcctccatgtgccaagtactgttcaaaaacactgggaacccagcagggatgagccacaagtttccttgtctttacgaagctttcattctgagggagtggagagagacaagcaataaacaaccaatcaaaacaaa

SEQ ID NO: 521955 - DNA, 975 bp, Homo sapiens
  misc_feature (122)..(122): n is a, c, g, or t
gcactgttcttcacaaatagtttgacgccgtgcttatatacaaggtccgactggcgtctctcaaaaccttgggcagtgaacgcgttttttcacggggcgccttaagctttttttgaagcctntttcgggtctattgtgccttgtgccagcgtcagttagttcccctcctggggaatgtataggagttccctctgatccttggcgtgggtgccgcccttgtgattacccttattggggggcaaccgctgtttcgcgccccctctgtgacccccgcccctcgttctcagggggttttattcacggtgggcccccttggctgctgtaaccctcttgcgtgtttggcagtttcttgcccggaactaatttatctgacgctgcttcctgcctcgtggccgcaactgtgtgttggccccccccctactgtcgctcgcccgtctcgatgcttaccaaatgggtttggtggtgtcgcgctctagggcttttttttcggccgccaaatgtggtgagataacatttgggtattattaggaagcccccctctgttctacatggggggctgagaacacaccttctcgcgttgtcggcggtcttcttatatatgggcgccagaacgccccgcccacgtgggggttctctttcctacccggcgattgtagcctgtttttttttctctgtgaaacacacttcggggacactgaattgtcaaaccccgcggtcgtttccctcgggaaagttatttataaccctcgctgggtgagacataatagaagttcaaattatgtttttttttccccacagtcttgtagcgtgttatactcttgtaataatttcacgtatataaacgcgcggagtatccctgcccctgttgagaatttcacgaacaggtcatctttcccccaacgccctgtgttacttttcatgtcattggcccttcccactttcaaaataaaaacccatttccggaccaacaaaaca

SEQ ID NO: 521956 - DNA, 817 bp, Homo sapiens
aacggctagggtacgaggctgggtttaaattcggccgaggcgcggtgccggcttatggcggagaggctggcggtgggctccctggggtgtgtgagcccggtgatggagccgggcccgacagccgcgcagcggaggtgttcgttgcctgccgtggctgccgctggggctgctgctgtggtcggggctggccctgggcgcgctccccttctggcagcagtcctgcacatgtggtcttccacgacctcctgtctggagcatgcatgtttgctggatggttggagtgacttgtccctgtccctcctgcagtggtggatgtggctggggcctctgtctgcttgccccctgtgaccttgcctggatcttggatcctgagtgcctgggagctcctgctggacttctgccaacagcatgcgcagatgcttgacagtggtgtcttggttgctgcatgcgcccggcccgtgctgcctctgtcagacctgctaccccctcttccaacatggtcgtcagcaagatggacaacatcagcctgagccgcggggaatacttcagagagtcagagtttgttgccagaaggtctcttaatgtgcagatagaattgcaaatagtatgtgattctctcagaattttttaataccacatgcaggaggcaaatttgtgccaatttgtttaacaaacaacagtgaagattatcaaacagcacagaatatttccttagtctatttaatcacaccctgaactgctttgaaaataacttcaggggaatgcccatatctttacggaccaaacattttccgagtttgcaaaatgccgtaacaac

SEQ ID NO: 521957 - DNA, 702 bp, Homo sapiens
  misc_feature (2)..(2): n is a, c, g, or t
  misc_feature (6)..(6): n is a, c, g, or t
  misc_feature (9)..(9): n is a, c, g, or t
  misc_feature (12)..(12): n is a, c, g, or t
  misc_feature (16)..(18): n is a, c, g, or t
  misc_feature (23)..(23): n is a, c, g, or t
  misc_feature (40)..(40): n is a, c, g, or t
  misc_feature (54)..(54): n is a, c, g, or t
  misc_feature (56)..(56): n is a, c, g, or t
  misc_feature (59)..(59): n is a, c, g, or t
  misc_feature (76)..(76): n is a, c, g, or t
  misc_feature (89)..(89): n is a, c, g, or t
  misc_feature (93)..(93): n is a, c, g, or t
  misc_feature (97)..(97): n is a, c, g, or t
  misc_feature (557)..(557): n is a, c, g, or t
anctcnccnttntggnnnccaangatccagtggctcaagnatgctcaggggctncntgnagggggtggggggacancagtgggactctnaganatgnccgccactcggacctcgctgccttgtacaccattgtggctgtgttccccagccccctggctgcccaaaatgcctcccttcgtctcaacaactccgtgagtcgcttcaaacttcgaatggccaaaaagaactatgacctgaggatcctggagcgagccagctcccaataaatggaggaggggaaagggactgtcacactgtcacatctcctacccagtctccagcaccctctcctgtcaccagcctcagcagtgtctgcacaggactcagtcccctgcctgtcctcacacagttcccccggcctgggggtccagcacagggtgatgggcgctactcccttttgggccagccattacagtacaatctgtccatctgccctcccttgctccatggccagtcaacttacacggtgcaccagggacagagtggactgaagcatggaaaccggggcaagagacaangcactcaaatctgcctccactgacctggggacagcagatgttgtcctggggcgggtgctggaggtgacagatctccctgagggcatcacccgtatctgagcgcggacgaactcttcacgctattgtacaacggggggccaggtta

SEQ ID NO: 521958 - DNA, 211 bp, Homo sapiens
  misc_feature (78)..(78): n is a, c, g, or t
accatagaggatttcccaggcgcttgttgggagagcggcactccttggtttagagctagtgtatgaaatccattttgntggttggtttttaacccaaactcagtgcatatttttaaaatagttaagaatccaagtcgagaacacttgaaacacacagaaagggagaccccgccttagcatagtatttgcagttaacggcctggattgccag

SEQ ID NO: 521959 - DNA, 458 bp, Homo sapiens
  misc_feature (32)..(32): n is a, c, g, or t
  misc_feature (40)..(40): n is a, c, g, or t
  misc_feature (47)..(47): n is a, c, g, or t
  misc_feature (49)..(49): n is a, c, g, or t
  misc_feature (56)..(56): n is a, c, g, or t
  misc_feature (62)..(62): n is a, c, g, or t
  misc_feature (64)..(64): n is a, c, g, or t
  misc_feature (89)..(89): n is a, c, g, or t
  misc_feature (100)..(100): n is a, c, g, or t
ccctgatcgcagcctgctgagcatatcaccgnatgctatnacaccgngnagctgcntatttngngatggaccacaatgttgatcaaacngggaaagctgncatcatcaacaaaactagtaacacaagaatccctgaacagaggttctcagaacatataaaggatgagaagaatacagaatttcaacagaggttcattctcaagagagatgatgccagtatggaccgagatgataaccagatcagagttccattgcaggatggaaggaggagcaagtcaatagaagagagagaggaggaatatcaaagggtccgagagagaatatttgcccgagagactggccagaacggatatctaaatgacatctgactctccgtagaagcattttcttctagctctcaccagagatagtctagatttatagcgggtaccgtgaatgatctgagcgtgcacctttaa

SEQ ID NO: 521960 - DNA, 1538 bp, Homo sapiens
  misc_feature (2)..(2): n is a, c, g, or t
  misc_feature (6)..(6): n is a, c, g, or t
  misc_feature (9)..(9): n is a, c, g, or t
  misc_feature (12)..(12): n is a, c, g, or t
  misc_feature (16)..(18): n is a, c, g, or t
  misc_feature (23)..(23): n is a, c, g, or t
  misc_feature (40)..(40): n is a, c, g, or t
  misc_feature (54)..(54): n is a, c, g, or t
  misc_feature (56)..(56): n is a, c, g, or t
  misc_feature (59)..(59): n is a, c, g, or t
  misc_feature (76)..(76): n is a, c, g, or t
  misc_feature (89)..(89): n is a, c, g, or t
  misc_feature (93)..(93): n is a, c, g, or t
  misc_feature (97)..(97): n is a, c, g, or t
anctcnccnttntggnnnccaangatccagtggctcaagnatgctcaggggctncntgnagggggtggggggacancagtgggactctnaganatgnccgccactcggacctcgctgccttgtacaccattgtggctgtgttccccagccccctggctgcccaaaatgcctcccttcgtctcaacaactccgtgagtcgcttcaaacttcgaatggccaaaaagaactatgacctgaggatcctggagcgagccagctcccaataaatggaggaggggaaagggactgtcacagaaggagcaagggcagggtggagggggttgaaggatcctgacagaccatggacagaggcaggaagtaaggaaactgatgttaaactggaacctaagacagtgatgaagatggaaacacagatacctacactggcattggactccttcttgctcccctgccatgggtcctctctttttccctggttgaccccccttgcatcactcttcttcccatcctcttcttttttttttttttttttttttttgagacggagtttcgctcttgtcaccccagctggagtgcagtagcacgatcttggctaactgcaacctccagctcctgggttcaggtgattctcctgcctcagcctcccaagtagctggcactacagacacgcgccaccatgcccggctaatttttgtatttttagtagagacggagtttcaccatgttggccaggctggctcaaactcctgacctcaggtgatccacctgccttggccttccagagtgctgggattacaggcgtgacgactgtgcctggcttccatcctcttctatcatttttttaaatctcttctcctatcataaaattaatttctcattttttggtcaggtagaattgggaaagtcccacactgtcctcctattaccttaacatcccaagcttcctttccttttttggtctttatgaatatatttatatggacagaattaagataaacaaaattgattgccccattctctcacttccccatcttgtcttcctagaccccacagagttaaaacttgggattcccctggcccccccagaacacttgtatattgtttgtttgaggttcgtgccgcagtaacagacacagtatttaattgcacatacagatgtttgctgggtatattcactgtaaattttatttaatctgtttttttgtttgtttgggggttatttggggggaggttggttttgtttttaaatataaaaaaaaaaatctgtcactggacaacaaataaagaaacaaacaaaaaaatttttcggccggatgggcccaagaaaaagcttccacacacactccgtggggcgcggggccacagtggacagcgccagcggccaaaccggtcccaagaacaccgggcaccagaaaggcccggggtttccccagataaaagcccgcggggaccgcgcgcgttgaacaatcccgagcgaaccgaggcgacaagggggtccaaccggggcacacgggcgaaaagcaggcgcgcaggcacga

SEQ ID NO: 521961 - DNA, 2233 bp, Homo sapiens
  misc_feature (32)..(32): n is a, c, g, or t
  misc_feature (40)..(40): n is a, c, g, or t
  misc_feature (47)..(47): n is a, c, g, or t
  misc_feature (49)..(49): n is a, c, g, or t
  misc_feature (56)..(56): n is a, c, g, or t
  misc_feature (62)..(62): n is a, c, g, or t
  misc_feature (64)..(64): n is a, c, g, or t
  misc_feature (89)..(89): n is a, c, g, or t
  misc_feature (100)..(100): n is a, c, g, or t
  misc_feature (1475)..(1475): n is a, c, g, or t
  misc_feature (1486)..(1486): n is a, c, g, or t
  misc_feature (2088)..(2088): n is a, c, g, or t
ccctgatcgcagcctgctgagcatatcaccgnatgctatnacaccgngnagctgcntatttngngatggaccacaatgttgatcaaacngggaaagctgncatcatcaacaaaactagtaacacaagaatccctgaacagaggttctcagaacatataaaggatgagaagaatacagaatttcaacagaggttcattctcaagagagatgatgccagtatggaccgagatgataaccagatcagagttccattgcaggatggaaggaggagcaagtcaatagaagagagagaggaggaatatcaaagggtccgagagagaatatttgcccgagagactggccagaacggatatctaaatgacatcagggggaaccgtgaaggactgagccgcacctcaagcagccgccagagcagcacagacagcgaactcaaatccctggagccacgcccttggagcagcacagactctgatggctctgtccggagcatgcgaccccctgtcaccaaagctagcagcttcagtggaatctctatccttacccgaggtgacagcatcggcagcagtaaaggcggcagtgcgggaaggatctccaggccaggtatggcactaggtgccccagaagtgtgcaaccaggtcacctcatcccagtctgtccgggggcttctcccttgtactgcccagcagcaacagcagcagcagcagcagcaacttcctgctctcccacccacgcctcagcaacagccacccttgaataatcacatgatctcacaggcagatgacctcagcaacccctttggacaaatgagccttagtcgccaaggttctactgaagcagctgacccatctgcagctctattccagaccccacttatctcccagcaccctcagcagactagcttcatcatggcttccacgggtcagcccctccccacttccaactattccacctctagccatgcaccacctactcagcaagttctgccaccccaggggtacatgcagccccctcaacagatccaggtttcttactatccccctggacaatatcctaactccaaccagcaatatcgacctctctctcacccggtggcctatagcccccaacgtggtcagcagctgcctcagccatcccagcagcctggtttacagcccatgatgcctaaccagcagcaggcggcttaccaaggcatgattggggtccagcagccacagaaccagggcctgctcagcagccagaggagcagcatggggggccagatgcaaggcctggtggttcagtacactccactgccttcttaccaagttccagtgggtagtgactcgcaaaatgtggtccagccgcctttccagcaacccatgctggtccctgtgagccagtctgtgcaaggaggcctcccagcagcgggggtaccagtgtactatagcatgatcccacctgctcagcagaacggtacgagcccttctgtagggttnctgcaaccccntggctctgagcagtaccagatgcctcagtctccctctccctgcagtccaccacagatgccacagcagtactcaggagtgtcaccttctggaccaggtgtagtggtcatgcagctgaatgtccctaatggaccccagccccctcagaacccatccatggtccagtggagtcattgtaaatactacagcatggaccagcgggggcagaagcctggagacctgtacagtcctgacagcagcccccaggccaacacacaaatgagcagcagccctgtcacatctcctacccagtctccagcaccctctcctgtcaccagcctcagcagtgtctgcacaggactcagtcccctgcctgtcctcacacagttcccccggcctgggggtccagcacagggtgatgggcgctactcccttttgggccagccattacagtacaatctgtccatctgccctcccttgctccatggccagtcaacttacacggtgcaccaggcagacattctgatgcaaggcagtcaatgttgtttacatgggatgagagtcgtctttcaaatgttgaagggacagagtggactgaagcatggaaaccggggcaagagacaangcactcaaatctgcctccactgacctggggacagcagatgttgtcctggggcgggtgctggaggtgacagatctccctgagggcatcacccgtatctgagcgcggacgaactcttcacgctattgtacaacggggggccaggtta

SEQ ID NO: 521962 - DNA, 693 bp, Homo sapiens
  misc_feature (80)..(80): n is a, c, g, or t
caggaacttggagaaaaattttcaatcttcctaaccttgaataataagctttccaactggtgaaagtattaaaatgtgcntgagtgtctttttcttccattaagattattgggcacagtctgaacctatttctcttgcatggttaaagataaatttcaaaactgaataaatttgattctatttgatgttccaggttggtgtggtgagaaaccagaattactcttatcatgggcttggcataagcatagtgtcatataggcttgtttcattacattattgaaggtaggtctttaaagtagtgacattatggattttcatgaaataaaagatttttcattggagatactaagaaacttaaatctctatagtggtagcccctttttaaaaatcatctggctgggcatggtggttcacacctgtaatcccagcactttgggcggccaaggtgggaggatcccttgagcccaggagttcaagaccagccttggcaatgtaaggagacccccatcactacaaaaaataaaaataaaattagccagatgtgttggctcatgctaatggtcacagctactcagaaggcttagttgtgaggatcccttgaccttgagcccagcagggcaaggctgcagtgagctgtgaccatgccactgcactccagcctgggagacagagggagacctcgtctcaaaaaaa

SEQ ID NO: 521963 - DNA, 2164 bp, Homo sapiens
  misc_feature (32)..(32): n is a, c, g, or t
  misc_feature (40)..(40): n is a, c, g, or t
  misc_feature (47)..(47): n is a, c, g, or t
  misc_feature (49)..(49): n is a, c, g, or t
  misc_feature (56)..(56): n is a, c, g, or t
  misc_feature (62)..(62): n is a, c, g, or t
  misc_feature (64)..(64): n is a, c, g, or t
  misc_feature (89)..(89): n is a, c, g, or t
  misc_feature (100)..(100): n is a, c, g, or t
  misc_feature (1475)..(1475): n is a, c, g, or t
  misc_feature (1486)..(1486): n is a, c, g, or t
  misc_feature (2019)..(2019): n is a, c, g, or t
ccctgatcgcagcctgctgagcatatcaccgnatgctatnacaccgngnagctgcntatttngngatggaccacaatgttgatcaaacngggaaagctgncatcatcaacaaaactagtaacacaagaatccctgaacagaggttctcagaacatataaaggatgagaagaatacagaatttcaacagaggttcattctcaagagagatgatgccagtatggaccgagatgataaccagatcagagttccattgcaggatggaaggaggagcaagtcaatagaagagagagaggaggaatatcaaagggtccgagagagaatatttgcccgagagactggccagaacggatatctaaatgacatcagggggaaccgtgaaggactgagccgcacctcaagcagccgccagagcagcacagacagcgaactcaaatccctggagccacgcccttggagcagcacagactctgatggctctgtccggagcatgcgaccccctgtcaccaaagctagcagcttcagtggaatctctatccttacccgaggtgacagcatcggcagcagtaaaggcggcagtgcgggaaggatctccaggccaggtatggcactaggtgccccagaagtgtgcaaccaggtcacctcatcccagtctgtccgggggcttctcccttgtactgcccagcagcaacagcagcagcagcagcagcaacttcctgctctcccacccacgcctcagcaacagccacccttgaataatcacatgatctcacaggcagatgacctcagcaacccctttggacaaatgagccttagtcgccaaggttctactgaagcagctgacccatctgcagctctattccagaccccacttatctcccagcaccctcagcagactagcttcatcatggcttccacgggtcagcccctccccacttccaactattccacctctagccatgcaccacctactcagcaagttctgccaccccaggggtacatgcagccccctcaacagatccaggtttcttactatccccctggacaatatcctaactccaaccagcaatatcgacctctctctcacccggtggcctatagcccccaacgtggtcagcagctgcctcagccatcccagcagcctggtttacagcccatgatgcctaaccagcagcaggcggcttaccaaggcatgattggggtccagcagccacagaaccagggcctgctcagcagccagaggagcagcatggggggccagatgcaaggcctggtggttcagtacactccactgccttcttaccaagttccagtgggtagtgactcgcaaaatgtggtccagccgcctttccagcaacccatgctggtccctgtgagccagtctgtgcaaggaggcctcccagcagcgggggtaccagtgtactatagcatgatcccacctgctcagcagaacggtacgagcccttctgtagggttnctgcaaccccntggctctgagcagtaccagatgcctcagtctccctctccctgcagtccaccacagatgccacagcagtactcaggagtgtcaccttctggaccaggtgtagtggtcatgcagctgaatgtccctaatggaccccagccccctcagaacccatccatggtccagtggagtcattgtaaatactacagcatggaccagcgggggcagaagcctggagacctgtacagtcctgacagcagcccccaggccaacacacaaatgagcagcagccctgtcacatctcctacccagtctccagcaccctctcctgtcaccagcctcagcagtgtctgcacaggactcagtcccctgcctgtcctcacacagttcccccggcctgggggtccagcacagggtgatgggcgctactcccttttgggccagccattacagtacaatctgtccatctgccctcccttgctccatggccagtcaacttacacggtgcaccagggacagagtggactgaagcatggaaaccggggcaagagacaangcactcaaatctgcctccactgacctggggacagcagatgttgtcctggggcgggtgctggaggtgacagatctccctgagggcatcacccgtatctgagcgcggacgaactcttcacgctattgtacaacggggggccaggtta

SEQ ID NO: 521964 - DNA, 994 bp, Homo sapiens
agcggaggggggatcacgcctaggctggagcgccgtggtacagtcttgactcactgcaattctgcctcctgggttcaggtgattctcctgcctcagcctcccaagtagctggcactacagacacgcgccaccatgcccggctaatttttgtatttttagtagagacggagtttcaccatgttggccaggctggctcaaactcctgacctcaggtgatccacctgccttggccttccagagtgctgggattacaggcgtgacgactgtgcctggcttccatcctcttctatcatttttttaaatctcttctcctatcataaaattaatttctcattttttggtcaggtagaattgggaaagtcccacactgtcctcctattaccttaacatcccaagcttcctttccttttttggtctttatgaatatatttatatggacagaattaagataaacaaaattgattgccccattctctcacttccccatcttgtcttcctagaccccacagagttaaaacttgggattcccctggcccccccagaacacttgtatattgtttgtttgaggttcgtgccgcagtaacagacacagtatttaattgcacatacagatgtttgctgggtatattcactgtaaattttatttaatctgtttttttgtttgtttgggggttatttggggggaggttggttttgtttttaaatataaaaaaaaaaatctgtcactggacaacaaataaagaaacaaacaaaaaaatttttcggccggatgggcccaagaaaaagcttccacacacactccgtggggcgcggggccacagtggacagcgccagcggccaaaccggtcccaagaacaccgggcaccagaaaggcccggggtttccccagataaaagcccgcggggaccgcgcgcgttgaacaatcccgagcgaaccgaggcgacaagggggtccaaccggggcacacgggcgaaaagcaggcgcgcaggcacga

SEQ ID NO: 521965 - DNA, 838 bp, Homo sapiens
  misc_feature (330)..(330): n is a, c, g, or t
  misc_feature (456)..(456): n is a, c, g, or t
  misc_feature (484)..(484): n is a, c, g, or t
  misc_feature (633)..(633): n is a, c, g, or t
  misc_feature (644)..(644): n is a, c, g, or t
  misc_feature (750)..(750): n is a, c, g, or t
cttgtagatatgccctctaatctttcttcgcttttctctggactttggtcccggattactatagcacccccacaaatgaccgccattggaacaggaccccaaccacaatggagaagtggaagaccactgaggagtcatcgcagtcgggagggatccatccttcctcacattgacactggagctcatggtcacacacagcatgtcctttgcacttagatgagcaattggttgatttgtaggctttctcaatatccacacattctgcattaatgcaaaccttgttatcgccacacttagttccattggccaccatgcctatttcttgacttntgtcttcaggatcaaatgttttacatgtcaggaaagtcactatccgtcctttccagggcaaattatccgacccaccttgacagaacaacttcccacacatggtatcactgaggaaaaagccaaatntattgcaggattcaaattgcagttttanataaatgctctaggactatggatatttaactgatggtatttttccctgtagccgagactcttagttgtactttacactcattttcccttatttctcagtaataggatgcctgaacgttagcacaatatattattgctcaaataaacagnattacctaganccctgtacacctaatttttgccagttgccgaagtgctggcccatgagaagaaaacagaatcttaagcacaattctagaaggtggccttaaatgaggaattatcttntatttctcaacattttctcattttttgcctgattggagtatgatagctagagaagctatcataggcctagagaaacacatggaaatga

SEQ ID NO: 521966 - DNA, 826 bp, Homo sapiens
accaaatggcggatgacgccggtgcagcgggggggcccgggggccctggtggccctgggatggggaaccgaggtgtgcttccgcgtgaggtttcggcagtggcatccgggggccggtggtctgcggccgtgtgactgggccggggccgtatggccgtggagtctcgcggagtgcaaggccgaggataggagtggatgccctgtcaccaatgttggggcgcgcttggtcaatgacatgaagatcaagtccctggcagtgagatctatctcttctccctgcccattaaggaatcagagatcattgatttcttactgggggcctctctcaaggatgaggtccctgacagattatgccagtgcatgaagcaagacccgtgctggccaacgcaaccaggttcaaggcattgtgttgctatcggggactacaatggccacgtcggtactgggtgttaaagtgctccataggagtgtggccaccgacatccgtgtgggccatcatcctggccaagactctccatcgtccccgtgcgcaaaggctactggtggaacaaagatcggaaaagcccaaactgtcccttgcaaggtgacatggccgctgctggctctgtgctggttacgccctaatcccgtgaacccaggggtcactggcatcagtctcccgtaccttgtgccttaaggaagctggtcatgatggcgtggtatcgatagactgatacacctcagaacggcgcgtgacgtgcaaccattggggaaacttacgacaaatggcagctttaatgcagttctaagaactacaagaaacttaaccccgacactgaaggagactg

SEQ ID NO: 521967 - DNA, 755 bp, Homo sapiens
  misc_feature (330)..(330): n is a, c, g, or t
cttgtagatatgccctctaatctttcttcgcttttctctggactttggtcccggattactatagcacccccacaaatgaccgccattggaacaggaccccaaccacaatggagaagtggaagaccactgaggagtcatcgcagtcgggagggatccatccttcctcacattgacactggagctcatggtcacacacagcatgtcctttgcacttagatgagcaattggttgatttgtaggctttctcaatatccacacattctgcattaatgcaaaccttgttatcgccacacttagttccattggccaccatgcctatttcttgacttntgtcttcaggatcaaatgttttacatgtcaggaaagtcactatccgtcctttccagggcaaattatccgacccaccttgacagaacaacttcccacacatggtatcatttgctttgcagggaatgagtgtgtcatccactctgcgacagtacccgtactttgacccaccttcattcctgttgtaacatgacttatctgcaacctcagttcctggtccccacagctctgtgcactgctcctgcagagtggggcatgtccccatcaagcagtggcccttcccgtgatggcaagggaagccattgacttggaatctatcatcaggacaattaccagatttaccattacacatttcaggcaggtcgcactcatcttttgctggtctgcacaccatcccagcctatgtaaattggcatatgcacaacatt

SEQ ID NO: 521968 - DNA, 558 bp, Homo sapiens
gtttcacccacccctttccctttctagttagaagtataaaagaaaatctagccccttctatcggggcaagagaactttaagagttagccatctcttggccgcagctaaataaacagacttactacatgtcaagtgtggcatatctctaactcgctcacgtacaacatattggcggcccgagcgagaaacgccaccaggggagacagcgggctcgctccggggtccccccggaaggacggccggcttgtattgggggtgccactgagacaaattttcaggtccccacacaggtgaccgtcttccagaggagaccggatcgactcacgtgtggatgcccacaaacaattccacctctgagtcctcaacttctgaacccgaggttcagggtaggtcagacttctgacgtctccgttctagtaagagggaagcggccctgaatgagggcgtccctcttattgagtctgaccggcacatctaggaagctcgaccggtagagccctggatttactgtaaggccacctctgtgtactcttactaggacgggacgtggccctgaca

SEQ ID NO: 521969 - DNA, 368 bp, Homo sapiens
  misc_feature (18)..(18): n is a, c, g, or t
  misc_feature (262)..(262): n is a, c, g, or t
  misc_feature (274)..(274): n is a, c, g, or t
  misc_feature (305)..(305): n is a, c, g, or t
  misc_feature (315)..(315): n is a, c, g, or t
  misc_feature (340)..(340): n is a, c, g, or t
  misc_feature (355)..(355): n is a, c, g, or t
ctcccttgggaactctanggcactgccgactgccagatcatccctatactaccacagctgatgctctcttgatcctccacttcctggcaggaggccaaacagcacaaaactagtgcaataaacaaaactacaactaaggaccctcacagagttcatttcactctcctgccacctccaccagagcaagtgctgctatccacagctaagagacctgaagatggttcacatcacaggactctgtgtagacacccccaagtaccancctggagccacngtagctctgctggatggctagagtccaagangagaaatagnaatcactaccacttttggctctcangaaaaccccatcccngggggaaattggg

SEQ ID NO: 521970 - DNA, 192 bp, Homo sapiens
  misc_feature (60)..(60): n is a, c, g, or t
  misc_feature (89)..(89): n is a, c, g, or t
  misc_feature (99)..(99): n is a, c, g, or t
  misc_feature (114)..(114): n is a, c, g, or t
  misc_feature (121)..(121): n is a, c, g, or t
tggggaggcaaggcaggagggttgcagagcccaggagttcaagactgcagtgagctacantcacaccactgcactccagcctgggtganagagcaagancctgtctctaaatanataaatnaaggaaaagaagaatgatcacaaatcaataacctaaatttctaccttaagacattgtaaaaagaagagcat

SEQ ID NO: 521971 - DNA, 885 bp, Homo sapiens
  misc_feature (1)..(1): n is a, c, g, or t
  misc_feature (3)..(3): n is a, c, g, or t
ntnacaaggaagtcaaaaaaaagacacagaagcagaaaaccaacaacacaagtcgcaatttggttcatctcgccatacttttctttcactctgtcagcgtttcccgctgaaattgtcaagaaacttcaccctgaggaatcatccctctttggacagtgggttctgaaatttcttcctgtcctatgtccgaattttgcgggtaatattcaagaacgggcccattttgtcaagaaattagttccactgtccgtgccagtatttccccatggcgagttgggccccgcgtgccacacgtccccgcgtgtatgagtcgcatgaaaacaaaatggggggaaaaaacgtaaccaggggaaactttatcccgtgtgtaaaaaggagggaaactcctgtcctgtgggccatcctggatttatccccggggggcccctgcgcgtttaccccaatttagccctgtgccccgtaaatccaaattctgcacggagtcccccttttcaaccgccggaagtttaagaaaactgttatatttaatacacaagctttggtaggtaaatcaactgatgggtacccccaggtggctgcggagtgcaacagatgcaatgttattgatccacagaatcccaacttccggttgccccgacagaaggcttgagagaactccctgtctttctaacacacggcgactagaataggatccagcatgttcatcaaataagccgcggcaccaggttaacaagcccccctatttaggcggagacctagcatcacggagccatgagtgttgcggggatacctcttgaacccccgagttcaaaagtgatccgtgcgctgtgccttccccccgttccagttcaccccgggccaaacacagaaccccttcttcataca

SEQ ID NO: 521972 - DNA, 497 bp, Homo sapiens
  misc_feature (31)..(31): n is a, c, g, or t
  misc_feature (225)..(225): n is a, c, g, or t
  misc_feature (232)..(232): n is a, c, g, or t
  misc_feature (486)..(486): n is a, c, g, or t
gtaaggaaaggagacataaatcaatcttaangcaaggctcttgatattaagaatgtatatccagagcaaatccaattcatcagggattgattaaggaaggcagctagtccaaaaaaaatttggtgaggaaatgttcactcattcacaagaatataaagtagaagtgtatataaatctgctatgtctattttgtaactttgtgaatttcatcatctatagaaaatncagtatnctatttgtcttatgttgtaattctaaaagtattcttatagtcctaattttccaagtgaaaaatatatgtatatatatttatcttttttctatattatattatcatatattttatttatatatgtgtatattattcaggggtcctaaatgactctggacttatccaattatgctacatatagagatcagagctagctcagggcctatgcccttcatgaacctaagcttcaacattaacatgctgagcatgtagtngattaggcttc

SEQ ID NO: 521973 - DNA, 176 bp, Homo sapiens
catggtggtgggtgcctgtaatcccagctactggggaggctgaggcaggagaatcgcttgatcccaggtgtctgagacagtagtgagctacgactgcaccactgcactacgacctcggtgatgcaatgagatgctgtctcaaaaaaaaacacacacacacacaaaacaacaaaaaa

SEQ ID NO: 521974 - DNA, 411 bp, Homo sapiens
cccataagcgccagggtctcatcccattaacaggtcaatgctaagagtgtctgcagaacccatgatgtgaatttactgaagagaaagactctccaccaggtgggctttcagccaggcaggctgtcctcagtccctcctccttcctcctcatcaacgtgcattctcgtctcctccccggcttgttcatcaaaatttctgcctcgtatggattctcttgcccattgcttacctgattctctactagttcatcgttgtgctcgcgcctgggttcgtgctattggtcatggcaaacctccactggtgttatatagctcctccccccatggcctttgtaacgtccctgtcaagtcatggaataactgcatctggcttgtgagtatgtccgaatcaacgcgttccgcgcctccgtca

SEQ ID NO: 521975 - DNA, 163 bp, Homo sapiens
ctcgtgagcgagagagtccagatcttccaacctcttgttggcggctcatccttggtcccccactgccttagccgatgtgtgagtgacatctctgaaaagacttggtgaatcaatctctagatccagaatgaacttaccaaacaactttaggccatgttgttaa

SEQ ID NO: 521976 - DNA, 133 bp, Homo sapiens
attctggtaaaactggccagtgaacagtggctcatgcatgtaatcctagcactttgggagtccgaggccggtggatcacctgaggctcaggagttcgagaacagcctgaccaacattgcaagacggtctctca

SEQ ID NO: 521977 - DNA, 993 bp, Homo sapiens
taaatctgcgtgattgctttattggtccaaaaagtttccagttaacagttaaatgtggtttttaaaaacaggacgaaaaaagctcatttgtggatagaagtgtgcttcacttaatgtgctttatttaagcattacaagaaaaaaaagttttactcgtgaccagattacgtttggaagggtttatattcaccttttaaaaacgccattaccctaggataaaaccacttgaaagccactttggtgttcaaacacaaaataaataagtgtaaataacgcctcctcctcaattagcagagaaaacagtgaatctccgttaaattcaagaagacacacattcactttcaacaaggcatgtggccccagccagcaccacacacccccaagaacagaacaaaacacaagaagacaggcagtttctcaggttacaactcttgtgcggaaaagaactcgaggaagccttgggcaaaaccgcgtgtggtaaacttgttcgtggtttcctcctttcttacctccaacttcaaccgtgaagtcgtgcacccggaccattttaagagggaggcatgttgttcccaggaggctgcactccaggggatgtgcccaagagggagccgtgcccgtgctaggcctcctctcaaagggcgcatcccaggcagaggaaacgtggcctgggttgatcgttacctccagggcccagtagagtgtggacaacccttgaggttgcccacagacaatggttgccagagagtaacgggaaagaaaacccttgaggttccctggatttcttttctctttacttcctcaaatgctactgatctctccccaaggtaccaggctcacagaaaaatccggtgtgttgaggacccccaaaattccgcaccatggccagtgccaagccccagttggtctgttttcccatctgggaaaccaggctaacaatttttttcttacaggacaggcgccctttttaccccgcgtgtgtacaggtttaccgca

SEQ ID NO: 521978 - DNA, 168 bp, Homo sapiens
  misc_feature (31)..(33): n is a, c, g, or t
  misc_feature (35)..(36): n is a, c, g, or t
  misc_feature (150)..(150): n is a, c, g, or t
tcttagcggagcatcagtaaggagcatcagnnngnntcagtaagcggagcatcagtaagcggagcatcagtaagcggagcggtcacgcctgctgggggtatgttgtgttggcaagaagaagaggaggcgaggaggtggcatagtactcgnttactgatgctccgcgat

SEQ ID NO: 521979 - DNA, 1916 bp, Homo sapiens
tatcgggtgatctacgacgaagagaactggaggatgattcagtactcaggctgtgccgagagaccacgtcggccatcgccgtggttatcgaactgcgggacacaggatcgattagatgcacgccttcgagacctgtgaacagtgcaccatgaaggtcccgtgtcacttcttggccgcttgaacaatcagctctcatcctcgattgaacgcacgtatgcagcagcgtatcattgacaccatggagaaggtaccgccgctgatgacatgaccgtgacgtgctagatgttcataggcgcgtcactggtaatgaccccggcgtacgcgagttgattcgtaatgagtgcccgcaatggagatggaacctaacccatggaacggaagagtcccgtgcttctaacgatccaccgatctgttccacttttcatcggtgtccaggtagacacctacaggtatcctagaagcgaaagcgtgcgaagcgagcaggcaatcgctcgaagtgacagaatcgcctgtagtgggcagccgatgggttcacacggtcagtatgggctataacgactggcccaagtccaaatatcagaacccgagaactccttagcccttactctaaaagccgggtgcaatggatctaccacaactgcaaaatggtagttagaacgggcggaacgcaacatccgcggattcccgtacgttagaagcccacctgtagtgagtcagtgcagagagcggaccaaaccgattgggggcacctcgatgaaagggaaagaagccttctcgaaaagttaaaaaattaaaacctctcttgtaagattccaaagtggctcacaagatacctattgggccaggtgctctcgcgatacaccggcgtccaatatgccttgtgccaagatccttgactaattgccggcccccccaagggggaccgtgccctgctgagggggaacgtggcacagcgcttggtgtgcaaaaccctaatatcggtccacacttgtgtggtgatacacccccacggtcaatctgccctgcacaaaccatgttggtcgcttgagacatacgctgtgggtagccccacacctgggcacaccggtacagtgtgcaaatccagacacgcccctccgccacgtgggtggaccaaaggttcgccattgggagcaccgctggtgcatggcacaacaaacagacacggttatcaggcttgctgaacgttccccgttgggagacgccaacagcgtggttaccgctatgagaacgccactaactaggagccacgcgtattgaataaggtacgccgaggggaacgtctcgtgacacagtaccatggtagaacgagccctactgaatacgcgccaagcacatttcataagacccagtatgaatttacaggcgctattatcaccacaccaacaccggtcagtcgagtagccaacaagagacctcgcggctattgtgagacccacattctggcgctacaaagatagacaaaacataggtggcaacaaagaggcatcttaacaaagcacccatatatgatggtggtaggtgagcacaatgtggactagtatcaatccaagcgacacgactccacgagagtgatggtgatggcgagggacgaagctccacccctgcggagatgtgcgtcatgtcgtgccaacgcatcggcgagccgagctagtgctagaggcgcgcagcaggagcaaggagtgtaggctggcgacgtgcgccccgcgcgcggctgactgtcacagcgtcaagatgattcagagacacagcagtggtgtctgacggagcacggagaggggcatggctagcagtcagtccaacgaggacatcaactgactgatcgcgcaaaccgaggcggcaccgataccagctgtgttagacgcggctgtcactcggagaacaacagaagtccatcg

SEQ ID NO: 521980 - DNA, 255 bp, Homo sapiens
  misc_feature (31)..(33): n is a, c, g, or t
  misc_feature (35)..(36): n is a, c, g, or t
tcttagcggagcatcagtaaggagcatcagnnngnntcagtaagcggagcatcagtaagcggagcatcagtaagcggagcggtcacgcctgctgggggtatgttgtgttgtggttggcaggtaaataataatcttaccacctctatcaggtctatggataacactaatattatggatcaagacctaagtttagttttggtcttgtcattatcttagtttatgattccttgggactatttttttagtgtatattct

SEQ ID NO: 521981 - DNA, 188 bp, Homo sapiens
  misc_feature (31)..(33): n is a, c, g, or t
  misc_feature (35)..(36): n is a, c, g, or t
tcttagcggagcatcagtaaggagcatcagnnngnntcagtaagcggagcatcagtaagcggagcatcagtaagcggagcggtcacgcctgctgggggtatgttgtgttgaatacataatgcttgtgtatcagacttacgttactgtcatcaccattaaaagaattgcagccttgtgccccttactga

SEQ ID NO: 521982 - DNA, 416 bp, Homo sapiens
  misc_feature (253)..(253): n is a, c, g, or t
  misc_feature (360)..(360): n is a, c, g, or t
aaggcacccgctctctgggacgggggctttttcggctggtctggggtgacctctacagcgttctcaggggctgccgtgatggttgtgttgtgcgactctgccccgctgcaaggcacccgctctctgggacgggtgccccccgggttttctggaatcctgggggtgacttcccagccgtctacttgcagttggacttcccaggccgacagtggtcaggcttctgaggggtcaggccaaaatgtggagaacgtgngaggcctgtggagggttccgtgggaagggcaggacagggccacagacagtcactttccctgtgacgcccggagacagaaggtctctgcgtggctgggtttttgtggngtgaagatggacgttctgccattgggattactaccactacgacggtgtggacgtct

SEQ ID NO: 521983 - DNA, 251 bp, Homo sapiens
ccactcttacagagcatgtctcaccaccccacctctttgtgtttcgctgtgatagatcaataaaatattttattttttgtcctggatatttggggatgatgtttgattgttggtgtgctctttgggtttatttttgtggctaattggggagagagagagagaaaaaaaaatttctaatctggggagctatatcctcaggagaaaattcattttaatcgctttggtataactctggatgaaacacacattta

SEQ ID NO: 521984 - DNA, 668 bp, Homo sapiens
ccccctttttattgaggccataaaaaaaaagcaaccaaggttttcttctgctttgagcagtgtgatgagctcacctgcgccccctcgtggagtttgacaaaaacaagctgatctctgtgcagacggcattagtcgtggatcatacaagaaggagaagtttgaggacaggtccccaaccgccgagtgcctatcagagaaggagacgcaggagctcatggcctgtattaaaaatgtgctggggtcgcgtgtcaccaacgttaaggtgaccctccgactggacacccaccctgccatggtcaccgtgctgaaaatgggggttgcccgccacttcctgcgcatgcagcagctggccaagacccagaaggagcgcgcccagctcctgcagcccacgctggagatcaaccccaggcacgcgctcatcaagaagttgaatcagctgcgcgcaagcgagcctggcctggctcagctgctggtggatcagatatacgagaaccccatgattgctgctggacttgttgacgcccctagggccatggtgggccgcttaaatgagctgcttgtcaaggccctggagcgacattgacaaccagggggccaaaaggtctgacaccacagatgacagccccccctccttgagctttatttacctaaattttaaggtttttctt

SEQ ID NO: 521985 - DNA, 154 bp, Homo sapiens
cgacctgataagaactgctcagcccagcaaatatagcaggtcttaaaaaagacgggtccagatgttggggggaaggaataaaagcacattaagtgcatgtcgcgacaccatctgctgattcccaaaactaataggaaggtctttgcaagcgatt

SEQ ID NO: 521986 - DNA, 338 bp, Homo sapiens
gcggatttataaccagatacaggcgttatacggtacgaaaggcgccatccgttcggttgttcttgctaggtcgtgacttgacaactcctcgcggagtgcatgtggcttccccagcacccagctcctgaagcaccaggcggtcagcagctgcccttggcaccctccagccctcagaagttgcgtaggagacacagcgcctccactgaggcacctctctgggaataacgttccccagcaccccaaatggatttccagtcaattcagaagcattttaccagtgaagccctcattattccagttcactgttaaagccagtaattctctatattaaactttcc

SEQ ID NO: 521987 - DNA, 248 bp, Homo sapiens
  misc_feature (98)..(98): n is a, c, g, or t
cctccgacttctggtccaagcgattggcctgcctcagcctcccaagtagctgggactacaggcacacgccaccacgcctggctaatttttgtattttnagtagagatggggtttcaccatgttggccatgatggtcttgatctcccgacctcgtgatctgcctgcccggcctcccaaagtgctgagattacaggcatgagccactgcgcccagcctatacatttttttaaaaataatgggttttgtaa

SEQ ID NO: 521988 - DNA, 214 bp, Homo sapiens
  misc_feature (24)..(24): n is a, c, g, or t
  misc_feature (60)..(60): n is a, c, g, or t
  misc_feature (70)..(70): n is a, c, g, or t
  misc_feature (76)..(76): n is a, c, g, or t
  misc_feature (82)..(82): n is a, c, g, or t
  misc_feature (84)..(84): n is a, c, g, or t
  misc_feature (90)..(90): n is a, c, g, or t
  misc_feature (105)..(106): n is a, c, g, or t
  misc_feature (115)..(115): n is a, c, g, or t
  misc_feature (139)..(139): n is a, c, g, or t
  misc_feature (149)..(149): n is a, c, g, or t
atgtgcacgtcttgctcacgagcngttctattatacatttactaacaagtaaacacattnttacatcatnaacttngtgatntnataagnaatactacagaattnnaaaacatantgtggatcaaatcatccttgcttnaatacatcangaacttcccaactacttaaattcaaaacttccttataaaggctaaagaccttctttcccatttct

SEQ ID NO: 521989 - DNA, 348 bp, Homo sapiens
atcggcaggagtacgtcatgcatgagtggagaggcactgatccgcaggatggtcgaggacctcaagctcacgcctgatgaccggctactggaaatcggcttcggtatgggtatctcggccagcatcctgcaggagttcggcccggcgtcccataccattgtcgagccccacccacaggtgctgctccaggccgagcgctggaagggcgtacgtaagaacattcagttgcaccccggctactggcagcagcttgacaccagcagccagcgttattccgcgattttcttcgatccgttcgccgatgaaatggcggcggttgacaacgaaaacctcaggttccttaagttt

SEQ ID NO: 521990 - DNA, 153 bp, Homo sapiens
ggcagggtcaagcttgtgcccctccttccccacccccccgcagaaaccggtctacaagggaccttccggcagatcgagctgggccctgtgactcccaggaagacgtttggaacaagcttggaagggccttcgttccctccgagctggcgtctt

SEQ ID NO: 521991 - DNA, 248 bp, Homo sapiens
tagtcagaggatcccagtcagttacacaaaacaaaacattttttgtcttggtatgatgaagagcaagaatcgagaaaagaaaagaattatttcggggtctcaaagttaataaacataataaggtgttaggtggtacctattatgctcactattccaacccttttttttttttttttaatttcacaaaaggatttagggcccttttaaaccttggggacccaaaacggggttgtgcccaccccgacatt

SEQ ID NO: 521992 - DNA, 229 bp, Homo sapiens
atgctctagaaaggggagtagggtaacaaaactacttggaaagaattggggaggaaaccaacaactgccttatgcaggggtggggacaggcaaggaggtaggtgccaggcacaggagcatttcacatacactaacctaacttgtgaagctgtaagggagccatcttccaactgggcttaagacgagaaccgactggctgatggggagaattctacacggagggacgacg

SEQ ID NO: 521993 - DNA, 343 bp, Homo sapiens
agcggtcaaaaatgtgggatacaggcgtagcacgcgccgggcccgataaatttttaatacgagaaaagagaaacggtgaaccccacggaccaaagctcttcccattcgggaacccgcaccccgagtcaagattctcccctaaagaccctctcgtggttccggcacaatctgggagatacccggagctgtgggtgcagagctgcccagagagggctccaggccggggcacactcgctgccaagggaagagtcaggacgcccgggaccggcttatagagcacccgccatcttttttttttttttttttttttttttggggggggggggggggggggggggggacc

SEQ ID NO: 521994 - DNA, 199 bp, Homo sapiens
gtgtattcacgcaatgcggtgcatgccatccctggacaagtcccgtcgacacgtgagcaccgtgctgacctccaaatatcgctctacgcctggagccctggtcgcacgctgtattcaccactgcgcgcgcatgcctccctgtacaagcttccgtcaacacgtgagcacccgcgctgacctccaaatatcgttcagctgg

SEQ ID NO: 521995 - DNA, 406 bp, Homo sapiens
  misc_feature (274)..(274): n is a, c, g, or t
cacgtccttagatgggacgactcagcatctaacgatcagggatgagtctttatgcagctctacaaccctatcgggtttacctccaataagaacaactctgtcagtggaatgaggacagcgtacctggagaagcttgatggtgcgtatgagtgtcctctcgaatttctttgattttagcagcctttgatccccgataattcctcctgctagactctgatgattcaacagcctcgagctctggcatgtccaagtcacttcctttatagtgttcgtnattgtagcattccacagtcatctgattcgagcggtagctggctggttgcagtgggtgatggcgtctgccggccctcttcctaggtagggatgattttcttcagaatttctccaattgtttcagtatccgtac

SEQ ID NO: 521996 - DNA, 121 bp, Homo sapiens
agaggatcccctcgctattcatcggcactccctattcatctgcaccattcgctctagaggtccatgcattcttcatattatacttggtgccgatgaatagcgaggtgccgattaataggga

SEQ ID NO: 521997 - DNA, 3201 bp, Homo sapiens
  misc_feature (56)..(56): n is a, c, g, or t
  misc_feature (64)..(64): n is a, c, g, or t
  misc_feature (224)..(224): n is a, c, g, or t
  misc_feature (2850)..(2850): n is a, c, g, or t
  misc_feature (2960)..(2960): n is a, c, g, or t
  misc_feature (2966)..(2966): n is a, c, g, or t
  misc_feature (2970)..(2971): n is a, c, g, or t
  misc_feature (2992)..(2992): n is a, c, g, or t
  misc_feature (3002)..(3002): n is a, c, g, or t
  misc_feature (3008)..(3008): n is a, c, g, or t
  misc_feature (3013)..(3013): n is a, c, g, or t
aagatcactcacattaggccagaacaccatggctcatgcctgtaatcccagcactngggaggcngaggcaggggaatcacttgaacctgggaggcggaggttgcagtgagccaagatcacgtcattgcactccagcctgggtgacacagcgagactccatctcagaaaaacaaaaacaaaaacaaaaacaaaaaaactgtacagtctgatccaaactgttgctntattgattcctcctcttgcttactgcctgctgacttctgagatgatagtttccttccccattctcagtatatccctaattcatccttcattgagcatcttttatcataaagctgtattctctttgtattaatatccttaccgtgtttcacagggcagaaacagctgggcttataaacaggcatagtccttttgaaggatgtggttgatcctacaacaacacactttcctaaggatgacaacaactcaccccacccctagaatggctggtatgaaccgagtttccacacagtctagctggcaatggggtcaggagacgttttgctacttcacatcttttggtcactggtaaatattaaggtactttgttttctgttttgtgaactctctctcgctctctctcacgatatgtcttctgaccgtttgtttctatttctgcatttactgggtctaaacactgtacaaaggttaaaaacaacactccaatgggcgtttcccaagagggtggggtacagtttctgaactcacttgtaggtgtgtatttctttcatatccaatttcccattttcctctgcctctgatacctgcctctccttttctgcatgctcacattctttcacgcttagtttcctcagattagaagggagagaaatgcacacacatgatccaccagcccgtgtgggattccctctgcccttctggcatctgaaggctgtgattcaaagatcccccctgcaaccttcccacaaatgaaccaactgattctcacaaccgaagggagaattgacacctcccattgagggacaaaaaaaagtcacactctggcctgctggcaagtcacctgtcatttccagctcatcttcatagttccatagttagtcctattctttagtaaatataaagactattaaaagcttctatgaggtgcactatgtgtgtctctggggtcagtcttgtgcttgacacagcgaaagctcattttagttcagtgtgaaaaaccagacctcaccaattcatcacaactaactccatcggaagcagaggattgctcctcatctgactcctcctgtgtgagacctgattctcagtcagaggctgatgccggaactgagaccatcagccatagagagatccttccagaataaccccgcagttcactactgcactttgccatgattcaggactggaactcttgtcatcgactttaaagatcctggttgagagaaaaggcaatctgaatgctgggcgcatctattgaattagaaatgatcggaatggctcctaagtcaggatgttatgtcctgaaaataggtgacaacggcaaaccatccaccctggtgttgactgactttaacaaggttcagttcacagagattgagggcagaaaaaggaaacggcctcaaaagggtaagtttgctgtgttgccctcacaccacttgattcatggtcctgatcctaaggatctcacctgatacttggttttataggaaggatgtgtaaaattcccagaacgctaggaaacaggggcgaaaacacttcaaagagaaagttaatgaacttgtttctgaccacaaggcatccttcagcacatgctgtctggagtggcctcaaacaaggagtgtgtggtgtggtgctgagaatgcaatgggagcagggtcctgtccccacgctaaagaagctcacagcttaatgcaaatgagaagccagtgaggacatcactactcctgctgtgcacttgggaactagaaacacaaaacctgactctggagggaagctaaggaagcattctactcttgagttgacataagtgcatctgaagcttctgatctccgatgagaacaatgggggacaccaaacagaatataaaacccatgattgaatacatcaaattgctaacatggcagtaaacagacatgaggtgaagatggagaagaaggaaacccaggacgaaagtcagcctcgcatttggaacccatttccctgagtttcattgctgaattccagaaggaactactgagatgcaaagaagcacagcagcttttgcacacatgcgtgggattagatggaaaacaagtggattgagggtctgccaatgaaagcgacccatactgaagtccactggctctggttgagacccagaagagtcatgcatcagaataaaggtggacaggaaataccctggcctttgtagggactgagcctgcaccgacgacttcaattgcagcctgtatggaggacccctgaccatcccccagaagtagactcccatctcttctgcagcaagataacatgctactaggcctcaattcattgctaaatattttttaacaagtatctcacatttaacaaaaaaagatcagtcatatggcagcaaaatacaatgtcatatgaccaaaacatgaaagactgtgaaaatgaatctggaggtgacccaagcattgaattcaacaatccaggctgggtgcggtggctcacactgggaggctgaggtaggcagatcacctgaggtcaggagttcaagactagcctggccaacatggtgaacccctgtctctactaaaaatacaaaaattgggccgggcacggtggctcacgcctgtaatcccagcacattgggaggccgaggtntgcggatcatgatgtcaggagttctagaccagcttggccaatatggtgaaaccccgcctctactaaaaatacaaaaattatccgggcatggtggcatatgcctgtagtcncagctnctcnngaggctgaggcaggagaatcncttgaacccnggaggnggagnttgcagtgagccaagatcacgccactacactccagcctgggtgacagagtgagattccatcccccagctccaaaaaaaaaaaaagaaagaaggaattggtcaagcgggctttttacaaattacaattacggttctcccaaaagtttatccccagtctattaagaaaaacttcagacaatttccagtaa

SEQ ID NO: 521998 - DNA, 2892 bp, Homo sapiens
  misc_feature (56)..(56): n is a, c, g, or t
  misc_feature (64)..(64): n is a, c, g, or t
  misc_feature (224)..(224): n is a, c, g, or t
aagatcactcacattaggccagaacaccatggctcatgcctgtaatcccagcactngggaggcngaggcaggggaatcacttgaacctgggaggcggaggttgcagtgagccaagatcacgtcattgcactccagcctgggtgacacagcgagactccatctcagaaaaacaaaaacaaaaacaaaaacaaaaaaactgtacagtctgatccaaactgttgctntattgattcctcctcttgcttactgcctgctgacttctgagatgatagtttccttccccattctcagtatatccctaattcatccttcattgagcatcttttatcataaagctgtattctctttgtattaatatccttaccgtgtttcacagggcagaaacagctgggcttataaacaggcatagtccttttgaaggatgtggttgatcctacaacaacacactttcctaaggatgacaacaactcaccccacccctagaatggctggtatgaaccgagtttccacacagtctagctggcaatggggtcaggagacgttttgctacttcacatcttttggtcactggtaaatattaaggtactttgttttctgttttgtgaactctctctcgctctctctcacgatatgtcttctgaccgtttgtttctatttctgcatttactgggtctaaacactgtacaaaggttaaaaacaacactccaatgggcgtttcccaagagggtggggtacagtttctgaactcacttgtaggtgtgtatttctttcatatccaatttcccattttcctctgcctctgatacctgcctctccttttctgcatgctcacattctttcacgcttagtttcctcagattagaagggagagaaatgcacacacatgatccaccagcccgtgtgggattccctctgcccttctggcatctgaaggctgtgattcaaagatcccccctgcaaccttcccacaaatgaaccaactgattctcacaaccgaagggagaattgacacctcccattgagggacaaaaaaaagtcacactctggcctgctggcaagtcacctgtcatttccagctcatcttcatagttccatagttagtcctattctttagtaaatataaagactattaaaagcttctatgaggtgcactatgtgtgtctctggggtcagtcttgtgcttgacacagcgaaagctcattttagttcagtgtgaaaaaccagacctcaccaattcatcacaactaactccatcggaagcagaggattgctcctcatctgactcctcctgtgtgagacctgattctcagtcagaggctgatgccggaactgagaccatcagccatagagagatccttccagaataaccccgcagttcactactgcactttgccatgattcaggactggaactcttgtcatcgactttaaagatcctggttgagagaaaaggcaatctgaatgctgggcgcatctattgaattagaaatgatcggaatggctcctaagtcaggatgttatgtcctgaaaataggtgacaacggcaaaccatccaccctggtgttgactgactttaacaaggttcagttcacagagattgagggcagaaaaaggaaacggcctcaaaagggtaagtttgctgtgttgccctcacaccacttgattcatggtcctgatcctaaggatctcacctgatacttggttttataggaaggatgtgtaaaattcccagaacgctaggaaacaggggcgaaaacacttcaaagagaaagttaatgaacttgtttctgaccacaaggcatccttcagcacatgctgtctggagtggcctcaaacaaggagtgtgtggtgtggtgctgagaatgcaatgggagcagggtcctgtccccacgctaaagaagctcacagcttaatgcaaatgagaagccagtgaggacatcactactcctgctgtgcacttgggaactagaaacacaaaacctgactctggagggaagctaaggaagcattctactcttgagttgacataagtgcatctgaagcttctgatctccgatgagaacaatgggggacaccaaacagaatataaaacccatgattgaatacatcaaattgctaacatggcagtaaacagacatgaggtgaagatggagaagaaggaaacccaggacgaaagtcagcctcgcatttggaacccatttccctgagtttcattgctgaattccagaaggaactactgagatgcaaagaagcacagcagcttttgcacacatgcgtgggattagatggaaaacaagtggattgagggtctgccaatgaaagcgacccatactgaagtccactggctctggttgagacccagaagagtcatgcatcagaataaaggtggacaggaaataccctggcctttgtagggactgagcctgcaccgacgacttcaattgcagcctgtatggaggacccctgaccatcccccagaagtagactcccatctcttctgcagcaagataacatgctactaggcctcaattcattgctaaatattttttaacaagtatctcacatttaacaaaaaaagatcagtcatatggcagcaaaatacaatgtcatatgaccaaaacatgaaagactgtgaaaatgaatctggaggtgacccaagcattgaattcaacaatccaggctgggtgcggtggctcacactgggaggctgaggtaggcagatcacctgaggtcaggagttcaagactagcctggccaacatggtgaacccctgtctctactaaaaatacaaaaattgggccgggcacggtggctcggccactgggaggtttctaagggactaactcgcctcttcacttgctatagatgtactgaatttcgttctggagatcag

SEQ ID NO: 521999 - DNA, 2950 bp, Homo sapiens
  misc_feature (56)..(56): n is a, c, g, or t
  misc_feature (64)..(64): n is a, c, g, or t
  misc_feature (224)..(224): n is a, c, g, or t
  misc_feature (2741)..(2741): n is a, c, g, or t
  misc_feature (2751)..(2751): n is a, c, g, or t
  misc_feature (2757)..(2757): n is a, c, g, or t
  misc_feature (2762)..(2762): n is a, c, g, or t
aagatcactcacattaggccagaacaccatggctcatgcctgtaatcccagcactngggaggcngaggcaggggaatcacttgaacctgggaggcggaggttgcagtgagccaagatcacgtcattgcactccagcctgggtgacacagcgagactccatctcagaaaaacaaaaacaaaaacaaaaacaaaaaaactgtacagtctgatccaaactgttgctntattgattcctcctcttgcttactgcctgctgacttctgagatgatagtttccttccccattctcagtatatccctaattcatccttcattgagcatcttttatcataaagctgtattctctttgtattaatatccttaccgtgtttcacagggcagaaacagctgggcttataaacaggcatagtccttttgaaggatgtggttgatcctacaacaacacactttcctaaggatgacaacaactcaccccacccctagaatggctggtatgaaccgagtttccacacagtctagctggcaatggggtcaggagacgttttgctacttcacatcttttggtcactggtaaatattaaggtactttgttttctgttttgtgaactctctctcgctctctctcacgatatgtcttctgaccgtttgtttctatttctgcatttactgggtctaaacactgtacaaaggttaaaaacaacactccaatgggcgtttcccaagagggtggggtacagtttctgaactcacttgtaggtgtgtatttctttcatatccaatttcccattttcctctgcctctgatacctgcctctccttttctgcatgctcacattctttcacgcttagtttcctcagattagaagggagagaaatgcacacacatgatccaccagcccgtgtgggattccctctgcccttctggcatctgaaggctgtgattcaaagatcccccctgcaaccttcccacaaatgaaccaactgattctcacaaccgaagggagaattgacacctcccattgagggacaaaaaaaagtcacactctggcctgctggcaagtcacctgtcatttccagctcatcttcatagttccatagttagtcctattctttagtaaatataaagactattaaaagcttctatgaggtgcactatgtgtgtctctggggtcagtcttgtgcttgacacagcgaaagctcattttagttcagtgtgaaaaaccagacctcaccaattcatcacaactaactccatcggaagcagaggattgctcctcatctgactcctcctgtgtgagacctgattctcagtcagaggctgatgccggaactgagaccatcagccatagagagatccttccagaataaccccgcagttcactactgcactttgccatgattcaggactggaactcttgtcatcgactttaaagatcctggttgagagaaaaggcaatctgaatgctgggcgcatctattgaattagaaatgatcggaatggctcctaagtcaggatgttatgtcctgaaaataggtgacaacggcaaaccatccaccctggtgttgactgactttaacaaggttcagttcacagagattgagggcagaaaaaggaaacggcctcaaaagggtaagtttgctgtgttgccctcacaccacttgattcatggtcctgatcctaaggatctcacctgatacttggttttataggaaggatgtgtaaaattcccagaacgctaggaaacaggggcgaaaacacttcaaagagaaagttaatgaacttgtttctgaccacaaggcatccttcagcacatgctgtctggagtggcctcaaacaaggagtgtgtggtgtggtgctgagaatgcaatgggagcagggtcctgtccccacgctaaagaagctcacagcttaatgcaaatgagaagccagtgaggacatcactactcctgctgtgcacttgggaactagaaacacaaaacctgactctggagggaagctaaggaagcattctactcttgagttgacataagtgcatctgaagcttctgatctccgatgagaacaatgggggacaccaaacagaatataaaacccatgattgaatacatcaaattgctaacatggcagtaaacagacatgaggtgaagatggagaagaaggaaacccaggacgaaagtcagcctcgcatttggaacccatttccctgagtttcattgctgaattccagaaggaactactgagatgcaaagaagcacagcagcttttgcacacatgcgtgggattagatggaaaacaagtggattgagggtctgccaatgaaagcgacccatactgaagtccactggctctggttgagacccagaagagtcatgcatcagaataaaggtggacaggaaataccctggcctttgtagggactgagcctgcaccgacgacttcaattgcagcctgtatggaggacccctgaccatcccccagaagtagactcccatctcttctgcagcaagataacatgctactaggcctcaattcattgctaaatattttttaacaagtatctcacatttaacaaaaaaagatcagtcatatggcagcaaaatacaatgtcatatgaccaaaacatgaaagactgtgaaaatgaatctggaggtgacccaagcattgaattcaacaatccaggctgggtgcggtggctcacactgggaggctgaggtaggcagatcagctgaggcaggagaatcncttgaacccnggaggnggagnttgcagtgagccaagatcacgccactacactccagcctgggtgacagagtgagattccatcccccagctccaaaaaaaaaaaaagaaagaaggaattggtcaagcgggctttttacaaattacaattacggttctcccaaaagtttatccccagtctattaagaaaaacttcagacaatttccagtaa

SEQ ID NO: 522000 - DNA, 327 bp, Homo sapiens
caatgaaagcccaaattttttgggggaaagtcccctccacaaaagtggaatgttggtgtgggagcaggcaaccaagcggttcaaaaaccccgattacaatgttttttagggttttattaggtgggggcaaaagtaattgcggtttttgccatgaataacctaaaattttataataccccaaaagttttttaaaggcctccaatcctttgaaggactggtgcacaaccaatcagaggctgaagtggagacttttgtcttgttcccacaggattgaggacgtggcctgtgtgctgcctaattttgcctaaaactagctgcaccggctgt

SEQ ID NO: 522001 - DNA, 3783 bp, Homo sapiens
  misc_feature (3432)..(3432): n is a, c, g, or t
  misc_feature (3542)..(3542): n is a, c, g, or t
  misc_feature (3548)..(3548): n is a, c, g, or t
  misc_feature (3552)..(3553): n is a, c, g, or t
  misc_feature (3574)..(3574): n is a, c, g, or t
  misc_feature (3584)..(3584): n is a, c, g, or t
  misc_feature (3590)..(3590): n is a, c, g, or t
  misc_feature (3595)..(3595): n is a, c, g, or t
tgtccgcttttttgtccgtcctctctgctttgtcttgttttctcttttctctccttctttgttttttctcgcctgtctcgcgctcgtgtcttctttctcttctctttgtcttgtcttcgttttctctcttgctctccttctcttctctctcttcctggctctctctttttctctgttttccttctcctgctttgtgttgttcgtttctgtcctttctgttcgtgtgttttctcccctggcttggtttctcttcagtctgtagtgctcgtcctttcttttttcctgccttgtcctcttgggtttgttgctcctttcgcggctctgttgtcctttgcgattttcttcttcttcttctgtcttgcttgcactcgtgtgtcttgtgccttgttctcttcgtggtggtggctttccctgtgctgttttatgttcgttgccgtttcgtatctggtctttgacctggggcgctctggtgcccgtctcctccttcgcgtgaagttttcctttgtagatgtaatcattgccacttgatggcctggacaagtgcgaacctgtaccatcatctctccggggtaagttgttcgtggagaattagtcatcccgcttgaagggttggaaacggggagttgacccagaacaacttcggaaggtgtctttgaggctccagggagttatcacgttatagaatgttgcttgaatttgggacggaaggctggccttgttggccccatcgctggttttggtaaagtttccagcttgtcgagctagggcccagttagggcaatccctgaaagaaatgaacgatgcttccggctgcccgcccagttctggaccccagttggccaaaagagcctttccttgcagaaaggggggaattttgcatttgttggtagttcctctgcttcgccgcccgcaaccttcttgccgccaccgttgaaaccatgtttcccgtgtttcacagggcagaaacagctgggcttataaacaggcatagtccttttgaaggatgtggttgatcctacaacaacacactttcctaaggatgacaacaactcaccccacccctagaatggctggtatgaaccgagtttccacacagtctagctggcaatggggtcaggagacgttttgctacttcacatcttttggtcactggtaaatattaaggtactttgttttctgttttgtgaactctctctcgctctctctcacgatatgtcttctgaccgtttgtttctatttctgcatttactgggtctaaacactgtacaaaggttaaaaacaacactccaatgggcgtttcccaagagggtggggtacagtttctgaactcacttgtaggtgtgtatttctttcatatccaatttcccattttcctctgcctctgatacctgcctctccttttctgcatgctcacattctttcacgcttagtttcctcagattagaagggagagaaatgcacacacatgatccaccagcccgtgtgggattccctctgcccttctggcatctgaaggctgtgattcaaagatcccccctgcaaccttcccacaaatgaaccaactgattctcacaaccgaagggagaattgacacctcccattgagggacaaaaaaaagtcacactctggcctgctggcaagtcacctgtcatttccagctcatcttcatagttccatagttagtcctattctttagtaaatataaagactattaaaagcttctatgaggtgcactatgtgtgtctctggggtcagtcttgtgcttgacacagcgaaagctcattttagttcagtgtgaaaaaccagacctcaccaattcatcacaactaactccatcggaagcagaggattgctcctcatctgactcctcctgtgtgagacctgattctcagtcagaggctgatgccggaactgagaccatcagccatagagagatccttccagaataaccccgcagttcactactgcactttgccatgattcaggactggaactcttgtcatcgactttaaagatcctggttgagagaaaaggcaatctgaatgctgggcgcatctattgaattagaaatgatcggaatggctcctaagtcaggatgttatgtcctgaaaataggtgacaacggcaaaccatccaccctggtgttgactgactttaacaaggttcagttcacagagattgagggcagaaaaaggaaacggcctcaaaagggtaagtttgctgtgttgccctcacaccacttgattcatggtcctgatcctaaggatctcacctgatacttggttttataggaaggatgtgtaaaattcccagaacgctaggaaacaggggcgaaaacacttcaaagagaaagttaatgaacttgtttctgaccacaaggcatccttcagcacatgctgtctggagtggcctcaaacaaggagtgtgtggtgtggtgctgagaatgcaatgggagcagggtcctgtccccacgctaaagaagctcacagcttaatgcaaatgagaagccagtgaggacatcactactcctgctgtgcacttgggaactagaaacacaaaacctgactctggagggaagctaaggaagcattctactcttgagttgacataagtgcatctgaagcttctgatctccgatgagaacaatgggggacaccaaacagaatataaaacccatgattgaatacatcaaattgctaacatggcagtaaacagacatgaggtgaagatggagaagaaggaaacccaggacgaaagtcagcctcgcatttggaacccatttccctgagtttcattgctgaattccagaaggaactactgagatgcaaagaagcacagcagcttttgcacacatgcgtgggattagatggaaaacaagtggattgagggtctgccaatgaaagcgacccatactgaagtccactggctctggttgagacccagaagagtcatgcatcagaataaaggtggacaggaaataccctggcctttgtagggactgagcctgcaccgacgacttcaattgcagcctgtatggaggacccctgaccatcccccagaagtagactcccatctcttctgcagcaagataacatgctactaggcctcaattcattgctaaatattttttaacaagtatctcacatttaacaaaaaaagatcagtcatatggcagcaaaatacaatgtcatatgaccaaaacatgaaagactgtgaaaatgaatctggaggtgacccaagcattgaattcaacaatccaggctgggtgcggtggctcacactgggaggctgaggtaggcagatcacctgaggtcaggagttcaagactagcctggccaacatggtgaacccctgtctctactaaaaatacaaaaattgggccgggcacggtggctcacgcctgtaatcccagcacattgggaggccgaggtntgcggatcatgatgtcaggagttctagaccagcttggccaatatggtgaaaccccgcctctactaaaaatacaaaaattatccgggcatggtggcatatgcctgtagtcncagctnctcnngaggctgaggcaggagaatcncttgaacccnggaggnggagnttgcagtgagccaagatcacgccactacactccagcctgggtgacagagtgagattccatcccccagctccaaaaaaaaaaaaagaaagaaggaattggtcaagcgggctttttacaaattacaattacggttctcccaaaagtttatccccagtctattaagaaaaacttcagacaatttccagtaa

SEQ ID NO: 522002 - DNA, 2426 bp, Homo sapiens
  misc_feature (2075)..(2075): n is a, c, g, or t
  misc_feature (2185)..(2185): n is a, c, g, or t
  misc_feature (2191)..(2191): n is a, c, g, or t
  misc_feature (2195)..(2196): n is a, c, g, or t
  misc_feature (2217)..(2217): n is a, c, g, or t
  misc_feature (2227)..(2227): n is a, c, g, or t
  misc_feature (2233)..(2233): n is a, c, g, or t
  misc_feature (2238)..(2238): n is a, c, g, or t
atcgagtcggtacctgcagctctctctgatgctgcctctccttttctgcatgctcacattctttcacgcttagtttcctcagattagaagggagagaaatgcacacacatgatccaccagcccgtgtgggattccctctgcccttctggcatctgaaggctgtgattcaaagatcccccctgcaaccttcccacaaatgaaccaactgattctcacaaccgaagggagaattgacacctcccattgagggacaaaaaaaagtcacactctggcctgctggcaagtcacctgtcatttccagctcatcttcatagttccatagttagtcctattctttagtaaatataaagactattaaaagcttctatgaggtgcactatgtgtgtctctggggtcagtcttgtgcttgacacagcgaaagctcattttagttcagtgtgaaaaaccagacctcaccaattcatcacaactaactccatcggaagcagaggattgctcctcatctgactcctcctgtgtgagacctgattctcagtcagaggctgatgccggaactgagaccatcagccatagagagatccttccagaataaccccgcagttcactactgcactttgccatgattcaggactggaactcttgtcatcgactttaaagatcctggttgagagaaaaggcaatctgaatgctgggcgcatctattgaattagaaatgatcggaatggctcctaagtcaggatgttatgtcctgaaaataggtgacaacggcaaaccatccaccctggtgttgactgactttaacaaggttcagttcacagagattgagggcagaaaaaggaaacggcctcaaaagggtaagtttgctgtgttgccctcacaccacttgattcatggtcctgatcctaaggatctcacctgatacttggttttataggaaggatgtgtaaaattcccagaacgctaggaaacaggggcgaaaacacttcaaagagaaagttaatgaacttgtttctgaccacaaggcatccttcagcacatgctgtctggagtggcctcaaacaaggagtgtgtggtgtggtgctgagaatgcaatgggagcagggtcctgtccccacgctaaagaagctcacagcttaatgcaaatgagaagccagtgaggacatcactactcctgctgtgcacttgggaactagaaacacaaaacctgactctggagggaagctaaggaagcattctactcttgagttgacataagtgcatctgaagcttctgatctccgatgagaacaatgggggacaccaaacagaatataaaacccatgattgaatacatcaaattgctaacatggcagtaaacagacatgaggtgaagatggagaagaaggaaacccaggacgaaagtcagcctcgcatttggaacccatttccctgagtttcattgctgaattccagaaggaactactgagatgcaaagaagcacagcagcttttgcacacatgcgtgggattagatggaaaacaagtggattgagggtctgccaatgaaagcgacccatactgaagtccactggctctggttgagacccagaagagtcatgcatcagaataaaggtggacaggaaataccctggcctttgtagggactgagcctgcaccgacgacttcaattgcagcctgtatggaggacccctgaccatcccccagaagtagactcccatctcttctgcagcaagataacatgctactaggcctcaattcattgctaaatattttttaacaagtatctcacatttaacaaaaaaagatcagtcatatggcagcaaaatacaatgtcatatgaccaaaacatgaaagactgtgaaaatgaatctggaggtgacccaagcattgaattcaacaatccaggctgggtgcggtggctcacactgggaggctgaggtaggcagatcacctgaggtcaggagttcaagactagcctggccaacatggtgaacccctgtctctactaaaaatacaaaaattgggccgggcacggtggctcacgcctgtaatcccagcacattgggaggccgaggtntgcggatcatgatgtcaggagttctagaccagcttggccaatatggtgaaaccccgcctctactaaaaatacaaaaattatccgggcatggtggcatatgcctgtagtcncagctnctcnngaggctgaggcaggagaatcncttgaacccnggaggnggagnttgcagtgagccaagatcacgccactacactccagcctgggtgacagagtgagattccatcccccagctccaaaaaaaaaaaaagaaagaaggaattggtcaagcgggctttttacaaattacaattacggttctcccaaaagtttatccccagtctattaagaaaaacttcagacaatttccagtaa

SEQ ID NO: 522003 - DNA, 170 bp, Homo sapiens
ttttgttggaaaacagttgaaaaatgaacgccccttttttgattacaacatccaaaaagagtccattttgcattggttcttgggtttaagggggggtttttaagtttcccttttaaaggtttcaaaaaatttcattgcattttcttttaaaaaaagttgtggctttccca

SEQ ID NO: 522004 - DNA, 209 bp, Homo sapiens
gggaaagcacaggctctgctagagatgttaagtattctctctccctgaaagctggttcctctgaaatcaaaatattcaggggtgctggataagaggttcagggcatctgaattccaaaggactagtgtttttttccactttttttataactgcactccctccaccttacacctaacacaaggttgaagagccctgtcaaggccatctaa

SEQ ID NO: 522005 - DNA, 2423 bp, Homo sapiens
  misc_feature (21)..(21): n is a, c, g, or t
  misc_feature (2072)..(2072): n is a, c, g, or t
  misc_feature (2182)..(2182): n is a, c, g, or t
  misc_feature (2188)..(2188): n is a, c, g, or t
  misc_feature (2192)..(2193): n is a, c, g, or t
  misc_feature (2214)..(2214): n is a, c, g, or t
  misc_feature (2224)..(2224): n is a, c, g, or t
  misc_feature (2230)..(2230): n is a, c, g, or t
  misc_feature (2235)..(2235): n is a, c, g, or t
tgttctagagtatcccctgcngctccgactgcctctccttttctgcatgctcacattctttcacgcttagtttcctcagattagaagggagagaaatgcacacacatgatccaccagcccgtgtgggattccctctgcccttctggcatctgaaggctgtgattcaaagatcccccctgcaaccttcccacaaatgaaccaactgattctcacaaccgaagggagaattgacacctcccattgagggacaaaaaaaagtcacactctggcctgctggcaagtcacctgtcatttccagctcatcttcatagttccatagttagtcctattctttagtaaatataaagactattaaaagcttctatgaggtgcactatgtgtgtctctggggtcagtcttgtgcttgacacagcgaaagctcattttagttcagtgtgaaaaaccagacctcaccaattcatcacaactaactccatcggaagcagaggattgctcctcatctgactcctcctgtgtgagacctgattctcagtcagaggctgatgccggaactgagaccatcagccatagagagatccttccagaataaccccgcagttcactactgcactttgccatgattcaggactggaactcttgtcatcgactttaaagatcctggttgagagaaaaggcaatctgaatgctgggcgcatctattgaattagaaatgatcggaatggctcctaagtcaggatgttatgtcctgaaaataggtgacaacggcaaaccatccaccctggtgttgactgactttaacaaggttcagttcacagagattgagggcagaaaaaggaaacggcctcaaaagggtaagtttgctgtgttgccctcacaccacttgattcatggtcctgatcctaaggatctcacctgatacttggttttataggaaggatgtgtaaaattcccagaacgctaggaaacaggggcgaaaacacttcaaagagaaagttaatgaacttgtttctgaccacaaggcatccttcagcacatgctgtctggagtggcctcaaacaaggagtgtgtggtgtggtgctgagaatgcaatgggagcagggtcctgtccccacgctaaagaagctcacagcttaatgcaaatgagaagccagtgaggacatcactactcctgctgtgcacttgggaactagaaacacaaaacctgactctggagggaagctaaggaagcattctactcttgagttgacataagtgcatctgaagcttctgatctccgatgagaacaatgggggacaccaaacagaatataaaacccatgattgaatacatcaaattgctaacatggcagtaaacagacatgaggtgaagatggagaagaaggaaacccaggacgaaagtcagcctcgcatttggaacccatttccctgagtttcattgctgaattccagaaggaactactgagatgcaaagaagcacagcagcttttgcacacatgcgtgggattagatggaaaacaagtggattgagggtctgccaatgaaagcgacccatactgaagtccactggctctggttgagacccagaagagtcatgcatcagaataaaggtggacaggaaataccctggcctttgtagggactgagcctgcaccgacgacttcaattgcagcctgtatggaggacccctgaccatcccccagaagtagactcccatctcttctgcagcaagataacatgctactaggcctcaattcattgctaaatattttttaacaagtatctcacatttaacaaaaaaagatcagtcatatggcagcaaaatacaatgtcatatgaccaaaacatgaaagactgtgaaaatgaatctggaggtgacccaagcattgaattcaacaatccaggctgggtgcggtggctcacactgggaggctgaggtaggcagatcacctgaggtcaggagttcaagactagcctggccaacatggtgaacccctgtctctactaaaaatacaaaaattgggccgggcacggtggctcacgcctgtaatcccagcacattgggaggccgaggtntgcggatcatgatgtcaggagttctagaccagcttggccaatatggtgaaaccccgcctctactaaaaatacaaaaattatccgggcatggtggcatatgcctgtagtcncagctnctcnngaggctgaggcaggagaatcncttgaacccnggaggnggagnttgcagtgagccaagatcacgccactacactccagcctgggtgacagagtgagattccatcccccagctccaaaaaaaaaaaaagaaagaaggaattggtcaagcgggctttttacaaattacaattacggttctcccaaaagtttatccccagtctattaagaaaaacttcagacaatttccagtaa

SEQ ID NO: 522006 - DNA, 2035 bp, Homo sapiens
  misc_feature (56)..(56): n is a, c, g, or t
  misc_feature (64)..(64): n is a, c, g, or t
  misc_feature (224)..(224): n is a, c, g, or t
aagatcactcacattaggccagaacaccatggctcatgcctgtaatcccagcactngggaggcngaggcaggggaatcacttgaacctgggaggcggaggttgcagtgagccaagatcacgtcattgcactccagcctgggtgacacagcgagactccatctcagaaaaacaaaaacaaaaacaaaaacaaaaaaactgtacagtctgatccaaactgttgctntattgattcctcctcttgcttactgcctgctgacttctgagatgatagtttccttccccattctcagtatatccctaattcatccttcattgagcatcttttatcataaagctgtattctctttgtattaatatccttaccgtgtttcacagggcagaaacagctgggcttataaacaggcatagtccttttgaaggatgtggttgatcctacaacaacacactttcctaaggatgacaacaactcaccccacccctagaatggctggtatgaaccgagtttccacacagtctagctggcaatggggtcaggagacgttttgctacttcacatcttttggtcactggtaaatattaaggtactttgttttctgttttgtgaactctctctcgctctctctcacgatatgtcttctgaccgtttgtttctatttctgcatttactgggtctaaacactgtacaaaggttaaaaacaacactccaatgggcgtttcccaagagggtggggtacagtttctgaactcacttgtaggtgtgtatttctttcatatccaatttcccattttcctctgcctctgatacctgcctctccttttctgcatgctcacattctttcacgcttagtttcctcagattagaagggagagaaatgcacacacatgatccaccagcccgtgtgggattccctctgcccttctggcatctgaaggctgtgattcaaagatcccccctgcaaccttcccacaaatgaaccaactgattctcacaaccgaagggagaattgacacctcccattgagggacaaaaaaaagtcacactctggcctgctggcaagtcacctgtcatttccagctcatcttcatagttccatagttagtcctattctttagtaaatataaagactattaaaagcttctatgaggtgcactatgtgtgtctctggggtcagtcttgtgcttgacacagcgaaagctcattttagttcagtgtgaaaaaccagacctcaccaattcatcacaactaactccatcggaagcagaggattgctcctcatctgactcctcctgtgtgagacctgattctcagtcagaggctgatgccggaactgagaccatcagccatagagagatccttccagaataaccccgcagttcactactgcactttgccatgattcaggactggaactcttgtcatcgactttaaagatcctggttgagagaaaaggcaatctgaatgctgggcgcatctattgaattagaaatgatcggaatggctcctaagtcaggatgttatgtcctgaaaataggtgacaacggcaaaccatccaccctggtgttgactgactttaacaaggttcagttcacagagattgagggcagaaaaaggaaacggcctcaaaagggtaagtttgctgtgttgccctcacaccacttgattcatggtcctgatcctaaggatctcacctgatacttggttttataggaaggatgtgtaaaattcccagaacgctaggaaacaggggcgaaaacacttcaaagagaaagttaatgaacttgtttctgaccacaaggcatccttcagcacatgctgtctggagtggcctcaaacaaggagtgtgtggtgtggtgctgagaatgcaatgggagcagggtcctgtccccacgctaaagaagctcacagcttaatgcaaatgagaagccagtgaggacatcactactcctgctgtgcacttgggaactagaaacacaaatgccaagtgtgtctgtttttttgttttgttttgtttgttttttagatgacatctacgg

SEQ ID NO: 522007 - DNA, 936 bp, Homo sapiens
ggcaattcggatttgggttcaggagcgcctgacacaggatgcatgttgctaaggcaaaattcaaacaaaagagggcttacctgtgtgctttagacaaacatatcctgggttttggaccacaggagatgcagttcttacatgaacgctgctcaaattctgcgaatgtgctggcacatagaggagctcagagagctacagacaaaaatcaacgaagccatagtagctgtacaggcaataatggctgatccaaagacagaccacagactgggacaaagtttggacgaatgaaacacttgaggacttcacgcttctcacctacttagtaacagtcggggaacccatacaacttctgggcatgtcgggaattcaaaatgtgtcaacattctcggagggagagaagcccaagaaacatggggctatggtcctagcagacatttacccaaccatggcattatgggccttagcttctctcttcactaacaggctctacggacagtaagaaatttcacactgatcttagccaaacaaagaaaccatcacataatcatgatttcacacaacagtacctatcacacactaaggaagacacaatatactatctaagaacaaacacactgtatgttgtacacagttgtcccatctctgacgatatatgtgcaacagtagagacaactacatgttactctcaaaagaagtagtcatcgcgggaaatagcaaaatcacacgctatgagacattataaagcacccgattaatcaaacactagtctcctctgatacacacggcacgatcgattataataacaaatcgatcaaatatgagtgacttcagcgacggcacaccacgacgggagacataatacacgcgaggcgaccaaaagagaatgctccaaatctataatatcccgctacgaaatatgtgtacacacaactccca

SEQ ID NO: 522008 - DNA, 1277 bp, Homo sapiens
  misc_feature (56)..(56): n is a, c, g, or t
  misc_feature (64)..(64): n is a, c, g, or t
  misc_feature (224)..(224): n is a, c, g, or t
aagatcactcacattaggccagaacaccatggctcatgcctgtaatcccagcactngggaggcngaggcaggggaatcacttgaacctgggaggcggaggttgcagtgagccaagatcacgtcattgcactccagcctgggtgacacagcgagactccatctcagaaaaacaaaaacaaaaacaaaaacaaaaaaactgtacagtctgatccaaactgttgctntattgattcctcctcttgcttactgcctgctgacttctgagatgatagtttccttccccattctcagtatatccctaattcatccttcattgagcatcttttatcataaagctgtattctctttgtattaatatccttaccgtgtttcacagggcagaaacagctgggcttataaacaggcatagtccttttgaaggatgtggttgatcctacaacaacacactttcctaaggatgacaacaactcaccccacccctagaatggctggtatgaaccgagtttccacacagtctagctggcaatggggtcaggagacgttttgctacttcacatcttttggtcactggtaaatattaaggtactttgttttctgttttgtgaactctctctcgctctctctcacgatatgtcttctgaccgtttgtttctatttctgcatttactgggtctaaacactgtacaaaggttaaaaacaacactccaatgggcgtttcccaagagggtggggtacagtttctgaactcacttgtaggtgtgtatttctttcatatccaatttcccattttcctctgcctctgatacctgcctctccttttctgcatgctcacattctttcacgcttagtttcctcagattagaagggagagaaatgcacacacatgatccaccagcccgtgtgggattccctctgcccttctggcatctgaaggctgtgattcaaagatcccccctgcaaccttcccacaaatgaaccaactgattctcacaaccgaagggagaattgacacctcccattgagggacaaaaaaaagtcacactctggcctgctggcaagtcacctgtcatttccagctcatcttcatagttccatagttagtcctattctttagtaaatataaagactattaaaagcttctatgaggtgcactatgtgtgtctctggggtcagtcttgtgcttgacacagcgaaagctcattttagttcagtgtgaaaaaccagacctcaccaattcatcacaactaactccatcagagagagctgcaggtaccgca

SEQ ID NO: 522009 - DNA, 157 bp, Homo sapiens
acaggctatacaaaatagataaataccttatcatcaaatagacaaataaatatgtacataatgactttcagaataaaatccaaattccataagaggggatcaaagaacttgaggccctggtcttgactgatttaaattcagtacaacctgccggtgg

SEQ ID NO: 522010 - DNA, 2144 bp, Homo sapiens
  misc_feature (1793)..(1793): n is a, c, g, or t
  misc_feature (1903)..(1903): n is a, c, g, or t
  misc_feature (1909)..(1909): n is a, c, g, or t
  misc_feature (1913)..(1914): n is a, c, g, or t
  misc_feature (1935)..(1935): n is a, c, g, or t
  misc_feature (1945)..(1945): n is a, c, g, or t
  misc_feature (1951)..(1951): n is a, c, g, or t
  misc_feature (1956)..(1956): n is a, c, g, or t
gagagtctttgactgggcatcgtgatacaaccaggataaagagcttttactgggagaagtattacagacgaggaaacagcttctatgaggtgcactatgtgtgtctctggggtcagtcttgtgcttgacacagcgaaagctcattttagttcagtgtgaaaaaccagacctcaccaattcatcacaactaactccatcggaagcagaggattgctcctcatctgactcctcctgtgtgagacctgattctcagtcagaggctgatgccggaactgagaccatcagccatagagagatccttccagaataaccccgcagttcactactgcactttgccatgattcaggactggaactcttgtcatcgactttaaagatcctggttgagagaaaaggcaatctgaatgctgggcgcatctattgaattagaaatgatcggaatggctcctaagtcaggatgttatgtcctgaaaataggtgacaacggcaaaccatccaccctggtgttgactgactttaacaaggttcagttcacagagattgagggcagaaaaaggaaacggcctcaaaagggtaagtttgctgtgttgccctcacaccacttgattcatggtcctgatcctaaggatctcacctgatacttggttttataggaaggatgtgtaaaattcccagaacgctaggaaacaggggcgaaaacacttcaaagagaaagttaatgaacttgtttctgaccacaaggcatccttcagcacatgctgtctggagtggcctcaaacaaggagtgtgtggtgtggtgctgagaatgcaatgggagcagggtcctgtccccacgctaaagaagctcacagcttaatgcaaatgagaagccagtgaggacatcactactcctgctgtgcacttgggaactagaaacacaaaacctgactctggagggaagctaaggaagcattctactcttgagttgacataagtgcatctgaagcttctgatctccgatgagaacaatgggggacaccaaacagaatataaaacccatgattgaatacatcaaattgctaacatggcagtaaacagacatgaggtgaagatggagaagaaggaaacccaggacgaaagtcagcctcgcatttggaacccatttccctgagtttcattgctgaattccagaaggaactactgagatgcaaagaagcacagcagcttttgcacacatgcgtgggattagatggaaaacaagtggattgagggtctgccaatgaaagcgacccatactgaagtccactggctctggttgagacccagaagagtcatgcatcagaataaaggtggacaggaaataccctggcctttgtagggactgagcctgcaccgacgacttcaattgcagcctgtatggaggacccctgaccatcccccagaagtagactcccatctcttctgcagcaagataacatgctactaggcctcaattcattgctaaatattttttaacaagtatctcacatttaacaaaaaaagatcagtcatatggcagcaaaatacaatgtcatatgaccaaaacatgaaagactgtgaaaatgaatctggaggtgacccaagcattgaattcaacaatccaggctgggtgcggtggctcacactgggaggctgaggtaggcagatcacctgaggtcaggagttcaagactagcctggccaacatggtgaacccctgtctctactaaaaatacaaaaattgggccgggcacggtggctcacgcctgtaatcccagcacattgggaggccgaggtntgcggatcatgatgtcaggagttctagaccagcttggccaatatggtgaaaccccgcctctactaaaaatacaaaaattatccgggcatggtggcatatgcctgtagtcncagctnctcnngaggctgaggcaggagaatcncttgaacccnggaggnggagnttgcagtgagccaagatcacgccactacactccagcctgggtgacagagtgagattccatcccccagctccaaaaaaaaaaaaagaaagaaggaattggtcaagcgggctttttacaaattacaattacggttctcccaaaagtttatccccagtctattaagaaaaacttcagacaatttccagtaa

SEQ ID NO: 522011 - DNA, 876 bp, Homo sapiens
gttcacggatgtggaatgtccgttgtgcctgaagcaatagactgagcaataacaatagtgggtgatgtaagacaaaaagtgcgagcatatgattggaatttataggacgatgtgccctcgttagtccatgatccgatcgaaatatcgcgcgaaggtgatggccactaacacgtgtgccgaacatcatctcattaggctgtcctatttgcgagcaggatggacaggttcagagagcacgcttgtgtcattacatcgtgactacaagatcgacccaaattaaaaggcaaatggtgggacaaatacgctcgtaggggcgtagaagagaagttcgctgggatcggctgtaattgtcggtcacctgccgtatatgaaacttacgattccacgcttgagaaaatcatctataattggcaattctccatgttgctgtgaaatattatatggaaataacgcgatgggactcggggcacgagctgagtcatggcggtactcgtacaggggaggataagctaaccttaagtgggaggataccatttgatggggcccccattagtcggtggactctcccatcaacattgggacacgaaagactggccacttatgtggatccttttttaatagtgttgggaccaccccgttgtcaaatagaattctccactattcaaggcaggaagccacacgaagttgactgtataatgaacctggactaggaaataacttcatcgaatcgggaggcagggtccttgtattttcaacaaaattttaaggaaccttgggcgtggctggcttgctaactggaactacgtggttgcaagcctttctttgcaagctcctccacctcaggtacgaggtccacacttccagtcaacaatgggg

SEQ ID NO: 522012 - DNA, 1758 bp, Homo sapiens
  misc_feature (880)..(880): n is a, c, g, or t
  misc_feature (1680)..(1680): n is a, c, g, or t
  misc_feature (1758)..(1758): n is a, c, g, or t
gctgggatcatggataaatgtgaagccctccttatttagtcctcttcgcgcaggaccctggtcccattaaccacatgacgcatggggcagggctcccatcatccgttgaaaggtatttaccacgagcatatccgtgtcccgggccctgcgcctgcggagtgagcccgcagcattcatctcttgtcgtgggctacagtaggacagacacccacgtttcggtggctgcttcgatcggacggacggcacagcagagatccggaaggtagtggttgccggctgggcagccagttgtgatatggtcagctagtgcaggggctcatgagtctattgggtactcagggatgacacgtgacccgcccagggactaacggctactagggatatgcctgaggtgaactctgtcggacggctgtcgatgggattagctacaagtcatgcatgcctgagggccagaagttctcaaaatccccttgcgaaggtggactgacatggacttgccgcaagctgtggcgcccctgaaagagcgcggcgtttgcctcacgacggggctaatgatacctacgtgtcagcccttacggacagtgcaatgggacttcattcttcacaccgttggatattagaagtgacacttcgtgtggctctcctagagatcccgcagggtggcgaccacgagggtcgagccttcaaggatcctacccgaggtcaaaaaacgtccaacactagtattgcccttcatagatgcgcctggggacgacagaccaaagatacgcaagtccccataacccttgaggaaagacaccgagcacttggcggttcgacaccgattggggcttcgcaaccgaaatataaaccattggtgaaggagaaagtgggcacatgnggaagaaacggcttaggatttcaaaccattgggaaaggcactcgcacaacaatgttaaagcaccgttgaacattcgatcgcacctcccaatcttccatgaacccaattgcagaggggccaacccctcaatgtaagatgctcactttagtagcccccttagggtgcagtatcattaagcacccatatgtagagcagacatcacgatatcttggactcctttagcgcaagaacaccggaaatctgcacgcacagggggcccatataaccccaacacggaacaacgcgagaacacatcagttggaaagacccaaagggccatggccacgaggtcaatggtaccccttcccacaaaagttgagccacgacatgacattgaagacgaccaacagtgacagaaagagacaacaggcagacaaccgcggtacccacaggtcgtcaacacagacaagcgggcgcatacacccgagaacctgagataaccctcgatgaaagggtgacgacaccgattccacaagaaacaacaacacccccacaaggcagggccatccacggcaggagcgcagagcaccaccagtagacactagccgaacatcagagaaagaggagatgaacatgtaacataagagaagacagaaaaatcagacgataaccaagctgataccactagccatcaagtcccaccaaccacgctagcaacaccaagaacatacacgacaagaagacaaatacagactagcagaacgactcccagctaggagctgtgcaacttaacacaatgacctcctcgctagtacgacctntccaccaaacgaccaacgcaacgacaagcaacagagaacagctaagagaaagacaggacacagcaaagacgatagaan

SEQ ID NO: 522013 - DNA, 1287 bp, Homo sapiens
gatgcttccagacagaggtactactacacgaccacatccagaccccgacgcccctcgaccgcggcacctcggagcgtactgcgaccgcagactgccgcccccgacctctttggagtctctcgcggcctcaaagcgcggcctgcgtcgcttccggcagttcccgaaccgcgggcgatggctgccgcctgggggcgcccggactgctgcgcgccgcttctgctgtcctcggcggcccggccggccggtggctgcaccacgctgggtcccgcgctggatccagacggcctgctgcggcaccgggggccgggcgggcagcgcggcaggccaccggtcgctgcagcgtgtcggcgctgggcccggcaccactccacaagcataaccatccaccagtccactttatcaaaccgtgcatggtgcaacattcaacaaccaaaggcaacacagttggtgcattctctgctcagcatgtaagatggttgcaacacatcaatctcagcatattgcatggctataggtgccatgtgcagggcaccctggcttgtccacacctagtcacctccatcttttgcacagcatcaccatcatctggcagcacagttcagcatgcacatccaactgatgcagcgcagcaatgcaccatgctcgcatctaggccatcatggcactcaaccaggacagcatccacgggaagggagctgaccacaatactgctttgacaaacaactctaatgagaccacataatgacctgataaagacgttgccttgcaaaccagttggactggactgccagacacaattccattgcatgtggggacactgacacttactagacaatagcaccacaaatcgggcatattttccacgcgcattttacccccaacatttacaattaccgcaattacatttactatcaaagctgcaatataccttagcaaacaccttgaaatacataagcatctccacaaataatacacacaaacgcatcaaagacactacaagcactacacaactgtgattcagcaaataaccaacataaatactacccatgttgcatacctgctagcacccaaataataaaactagagatcaataccacaaaaaacactaacacacacatctctaacacacaactgaccttttacatacatccatcatctcaacaatactaactcgaccgaaccgaccgaaccaaaactatacatacactcctacaccactccattccccaacctactaaccaaaatatatatacaaatatgatacagaaactctaaactaatcaaaaa

SEQ ID NO: 522014 - DNA, 399 bp, Homo sapiens
acatattgatgaaaaacatgatttaaactttaggaaaataaaacttttaatacttgtgagattcacattgatgcacacgttgcttgttggtctgactttccaggactaagaccctctgtgaatcattggggctcggtgacatggtgtaacctgctactggggtgtggtcttagacacaaaatcacgctggaagttggtctacagcggcaggtttctctcattgtcatagcattttccggagaagcctttgcctttgtcacacatttggctttacaaatcttcattgacaaatagttcggcaaagagtaaaggagcacggacacgaagagcagcaggataagcaggaacagcaagccgatgatgacccacttaaagcggcaccacacgatgaacttcatg

SEQ ID NO: 522015 - DNA, 1728 bp, Homo sapiens
  misc_feature (1578)..(1578): n is a, c, g, or t
acgcctctttacgtttggtggtggccgcatttgtgttgttgtcacgaaggggtttcgcgtctgctcctatagtgtatcatgttagcgtgttttgtttttctgcttcgttagtatttcgggactcgtgcgtgttttggtgtgtcttcctccttattgtatctcgttgctccattgctagttggtcgttcctccacttgctttctcctcggtaacacgtgtgtccttctctgcttttggttagattattgtttctctcgccaccatgattgtctgcgccgaggaggtggtgtcgtttcctctgttcttcgcactcgaagggcgcgtgggtgtctcttttttaatagagttttctccacggtgtcccgtggcacgcacggtttcagaggtcgccccgttgtgggtgacggggggcagcagatgtggtgtaccgcaccccaccacgtggcgcatgacggttgttctgctgtgtatttaatgtccctgatgtggccacccccggtggttgtttgtttgttggcgcccgtctcacccgtgttgtagaccacccccacttgggggtgtatataattctttctgtgtttcacaggataccggtggtcttctcgtttgtctaaaagtggtttcctcccccgtcggacccccctttgttggggggttggtttgtaaaaacaccgggcgtgtttctgtctggccttctctcgcggagatcgcccacacggtgtataaccctcggccctttttaccctctgtgaagatataatccccctcccgcgtcgtgtatacaattttttgtggggggtggggagatatatcccccgcgctttcacccctctggagttatctctgttttcatcacgcggagagaggtggtgccccaccgctcttttgtgtcccacacatatgaccagcgcttctcacatctccatttctccgctgccccaacgctttcccccacttgtctctatatagagagactctctggcccgcgcatttattgtgaggctcgtattagagagggcccacctctctgtatagcgcgtctctgaggaggctcttttttgggggggtgttttttgtgtgaccacaccacgcacacacgctgtctcactctgtggagataagagaatacacacgcgtgccctctgtgagataattatacacacagcagttctcacagcagatatgtgtgtcacacacactcggggtgaattatactcttgtgtgtgtgagacacacacagggagaggcactcgagagaggtgagacgacacacagaagctgctgcgtggtggtttgttcacacacagagaggtgtgttgtgtctagacaccacacacactcagagaatgtgtgtgtcaacactcgctgtggacacacacacccgagcggcccacagcgcgtgtgtgcacactcggagacccacaaagggctggaagcggttgtgccactcttatgcactttccacaacccacaaattgtttccccaataaaccactctccctttattgtttttatattttatatcctcgggtgttgcctcccacccctgcgagagaatataggagagaagttcttctngggaactaagctgctcgtataccacctgcccctcacatcccgcggcacacttataatggagagttttggagccccttttttttttgggaaataccccgcccccccccctcccaatatagaagagatgaaaccttttaaaagggaaaaaaa

SEQ ID NO: 522016 - DNA, 841 bp, Homo sapiens
ggaagatggatctactgtggatcctgcgctccctgtgggttctcctgcttggggggccgtgccttgtctgaagacgccatggaatgaccaccaggtgccctaggacccagagggaactggagagccagcataagtcttgttcctgccttgccccagctggtcggccgtgagtctccaggaagggtccgtggcgagacgaagggagccccatggtccatcataggggcatccgggaacaccaggcaagagtggggcccaggggtgagccaggagatccaagtgaactcgtgttccgtgtgcactggatggccccaagaagcttgtcgtgtgagcttgttagagcctagggctgccaacattggagcggcgtggataccatctgttgcctaccttgcaggggcagggccacatctccagatctgtaggtgaggatggtacaccgagggggcgagcgggttggcggggtgtgttcatatgcgccaggactggattcatgcggagtaccttgtccgcagtctagggtcctccttacggaaggcagcgtcagtggagtaacctagagagtctgaagttcttggcttggagatctgaggaattcgcgacggagtttactcttccaggggtaacatggggagctgctggcgtagagcttggcacgacctttgatggtaacacgtaactttcgcccaactattgcgatctttccgacatcactcgggtgaggtcagatcatgtaccagcgtgagcactggggcaagattcgcacgagggtcactgaaggggattccctgaggctcgcaacgtgggcaggccctgaccacctatgacgtggacacgatta

SEQ ID NO: 522017 - DNA, 1643 bp, Homo sapiens
gtcctgacgatgggttgcgacgggggaacaatccccaagaggcatgaatctggtgaagtgggccgaagaaggttgagactgtcgacaaagatgctgaattattggcctaatggaactattgtactctaagtcaggaaatattaagacgaccaatagttgcctgtgaacttggcagactttataacaaagatgccgtcattgaatttctcttggacaaatctgcagaaaaggctcttgggaaggcagcatctcacattaaaagcattaagaatgtgacagagctgaagctttctgataatcctgcctgggaaggggataaaggaaacactaaaggtgacaagcacgatgacctccagcgggcgcgtttcatctgccccgttgtgggcctggagatgaacggccgacacaggttctgcttccttcggtgctgcggctgtgtgttttctgagcgagccttgaaagagataaaagcggaagtttgccacacgtgtggggctgccttccaggaggatgatgtcatcgtgctcaatggcaccaaggaggatgtggacgtgctgaagacaaggatggaggagagaaggctgagagcgaagctggaaaagaaaacaaagaaacccaaggcagcagagtctgtttcaaaaccagatgtcagtgctgagagcgaagctggaaaagaaaacaaagaaacccaaggcagcagagtctgtttcaaaaccagatgtcagtgaagaagccccagggccatcaaaagttaagacagggaagcctgaagaagccagccttgattctagagagaagaaaaccaacttggctcccaaaagcacagcaatgaatgagagctcttctggaaaagctgggaagcctccgtgtggagccacaaagaggtccatcgctgacagtgaagaatcggaggcctacaagtccctctttaccactcacagctccgccaagcgctccaaggaggagtctgcccactgggtcacccacacgtcctaccgcttctgaagcccgcactgccaccgctcctgccccagaaggttgtttagtttccacgtaggcaggtcgctttgtgcctctgagtgcgcttgctgtgtgttctctctatagttctgtgtcataaagctgtcctggccagccttcaagctggtgtggccactcttgatgtgaggcgtgtcggttccaggggggacatgggaggggctgcacagtggcccgaggtcatgcttgcttccacctgcaggtgcatttggtcctttccatggccaggaagccctgtgggctgcactttttatgcttgcagtaacaagagactccagagtcctcaccggtgcagagttggcccatattaattaactaaaattttaatgatcttgctaccagcaataaatcaagtaggccaagtgaaactgggctttaaaaaggatggatttcaaatacactgtgccccctagaagcttcgaagggcctcgtccctttgctacagccctgggaggagccaggatccttgttggtctagctaaatactgttaggggagtgtgccccctctcatcatttcgaagatagcagagtcatagttgggcacccggtgattgggttcaaaaataaagctggtctgcctcttctcaccaaaaagaaaaaaaaa

SEQ ID NO: 522018 - DNA, 1412 bp, Homo sapiens
  misc_feature (208)..(208): n is a, c, g, or t
cttagtggtggggtgttttcacacatcacgcccgcacaatacaaataccgagggttgtgccgctcgttgtagtacacgtgttgggctggcatagttttcttctttcgaacgataaagtgtgccccccccggtcgcgtccatcactcctgttggtcgcctaccagctcatccgacccgggtgcagtgtgtcacccccgcttggtgtctnctccccccccacgacgtgagaggatgggcgtgctctttcatggtcctgttttcctatagaacgagcattgctttgtgttcacacactcacacccacccgcctttaaagttggtgggagccccaaaactgcgtgttgttgcttctgccaccccgtttcgtttattgtgtgggtggggcccccccttctttcctctggggaagcagctgttgttcctgcgcccgcatggtgacctttctggctgtatgggttgtgttttgttcccgttcgccgttgcgtgcttaaagattaaaggagcgtcatacgtcaatcgtgtggggggttgacccaaccgtttataggaagaggcacccgtggtgtgttgccccctacttggggggagccccccaaccatgccccgctctggtgttcaacaagaggcctctcttcgtgtgttttgttttgtcgcccccacccacatgctcgtgtagaataattagtttagaacaggcggccctgttgtctcctcgggggtattccagcaacaagaggaggggcgagaagacaacattggggagaaatgaggggcgcttcttgacgacgacacacgattgggtgccctcagagaggttcaacatggtcacttttggcccttttctacacacacgctgacacagtggtcgccacatgtttggcgctcctccctttgtcacaccattgggctcacagtgaaacagacccccgtgtgtgtgggcctagtcaacacgtctgtgtataaatggccttttgtcacagtataaccacacagagagacgactttccacagaggtttccctccacaccgctgtggcacagagagttttgtgcaacacacatacttctataatgtatacctagaaacattttctaaatgagttcttgggtacaccaccgcacaataagaatcacaagtataggccacaagtgaacaactcgggcgtttataacacaagagagatggagatttcacaaataacacctgggcccacactatgaaagcttcgaagggcctcgtccctttgctacagccctgggaggagccaggatccttgttggtctagctaaatactgttaggggagtgtgccccctctcatcatttcgaagatagcagagtcatagttgggcacccggtgattgggttcaaaaataaagctggtctgcctcttctcaccaaaaagaaaaaaaaa

SEQ ID NO: 522019 - DNA, 1569 bp, Homo sapiens
gtcctgacgatgggttgcgacgggggaacaatccccaagaggcatgaatctggtgaagtgggccgaagaaggttgagactgtcgacaaagatgctgaattattggcctaatggaactattgtactctaagtcaggaaatattaagacgaccaatagttgcctgtgaacttggcagactttataacaaagatgccgtcattgaatttctcttggacaaatctgcagaaaaggctcttgggaaggcagcatctcacattaaaagcattaagaatgtgacagagctgaagctttctgataatcctgcctgggaaggggataaaggaaacactaaaggtgacaagcacgatgacctccagcgggcgcgtttcatctgccccgttgtgggcctggagatgaacggccgacacaggttctgcttccttcggtgctgcggctgtgtgttttctgagcgagccttgaaagagataaaagcggaagtttgccacacgtgtggggctgccttccaggaggatgatgtcatcgtgctcaatggcaccaaggaggatgtggacgtgctgaagacaaggatggaggagagaaggctgagagcgaagctggaaagaaaacaaagaaacccaaggcagcagagtctgtttcaaaaccagatgtcagtgaagaagccccagggccatcaaaagttaagacagggaagcctgaagaagccagccttgattctagagagaagaaaaccaacttggctcccaaaagcacagcaatgaatgagagctcttctggaaaagctgggaagcctccgtgtggagccacaaagaggtccatcgctgacagtgaagaatcggaggcctacaagtccctctttaccactcacagctccgccaagcgctccaaggaggagtctgcccactgggtcacccacacgtcctaccgcttctgaagcccgcactgccaccgctcctgccccagaaggttgtttagtttccacgtaggcaggtcgctttgtgcctctgagtgcgcttgctgtgtgttctctctatagttctgtgtcataaagctgtcctggccagccttcaagctggtgtggccactcttgatgtgaggcgtgtcggttccaggggggacatgggaggggctgcacagtggcccgaggtcatgcttgcttccacctgcaggtgcatttggtcctttccatggccaggaagccctgtgggctgcactttttatgcttgcagtaacaagagactccagagtcctcaccggtgcagagttggcccatattaattaactaaaattttaatgatcttgctaccagcaataaatcaagtaggccaagtgaaactgggctttaaaaaggatggatttcaaatacactgtgccccctagaagcttcgaagggcctcgtccctttgctacagccctgggaggagccaggatccttgttggtctagctaaatactgttaggggagtgtgccccctctcatcatttcgaagatagcagagtcatagttgggcacccggtgattgggttcaaaaataaagctggtctgcctcttctcaccaaaaagaaaaaaaaa

SEQ ID NO: 522020 - DNA, 161 bp, Homo sapiens
tccatcatagaaattctgcaggtgcaagcattgccctggggatgacccatgttgggtgttcagcaacggtgccttcctcggtagatgttggtaggtcactcagagccttgtagacggcagccatggatcttctcggtcactatatggcagcgcatatcaag

SEQ ID NO: 522021 - DNA, 148 bp, Homo sapiens
ctcctccgcaactcctcggctgcacacccagctctaagagcgagagtgaacgagagagggagggagagagttagagcgagctagatctttggagagatttttttttttgcctcctacttttgttttgaagccagaaaatcgacttcag

SEQ ID NO: 522022 - DNA, 280 bp, Homo sapiens
gtgggggaatggtttcaggataatcaagtgcttacatttattctttggctatatacaggagttgtgcaaatagacacctcacatgcgcagttcacaatagggtcacgtgcctttgagaatctaatgccaccactgatctgacaggaggcagaactcaggtggtgatgcttacttgcccactgcagctcaccttctgctttggaggccaatttccaaacaggccatagactcttgggtagggggtgactgaggacccctgctataaagcattaagcccctt

SEQ ID NO: 522023 - DNA, 385 bp, Homo sapiens
gctcgacgggcacgatcagcaccggaaccttgacgcgcgtcgagggaactagacccacgacgacgacagacatcgttgagaggcttgaacgggatgggttagtagcgcgacaacgtgatccccatgatgcgcgcagtcgtctcgttgagattacggatgccgggcgtgagtactgccgcaactgcgaacctgtcggtgggggagttcgtcgtgccggcgctaaacatgttgaacgatcaggatcgaaatcttctgatgaaaattttgcccggctttcgccgggctgtccgagttccttccgagaatgattagagggccgaccaaggattgtaccattggttaagaggccttgttgacacgggccggaatttatgtaggaaataag

SEQ ID NO: 522024 - DNA, 179 bp, Homo sapiens
gaaggaattgtgcagtatgtatctagcctggctaacttatgaatttctgtctacctcattttcgtattagagtttgcagcttctgtaggtaggaagagaacatgtttgataccagtatattataacctcactgcttctctccctcagaaaaaatctcgattgtttatatcactaccata

SEQ ID NO: 522025 - DNA, 162 bp, Homo sapiens
agctgaaatacggcttggtcagtgtcataggagccagttgctagaagtagagggagcgatcgtccagtggagagcaggatgtacggtgatcaggcctaggcacttacgggcacagacagccagccctaatcacttacttaggggggcacctaggatacacct

SEQ ID NO: 522026 - DNA, 112 bp, Homo sapiens
taaaccttccttaaaaattctttggatgcttggctctatcactggtaaaccgggtcttttcccccccagttttttctttttaactttcggggttgcgggacacaattgttca

SEQ ID NO: 522027 - DNA, 184 bp, Homo sapiens
atgctaagtgcagttagtgtaccatccagttttacaaatgaggaaacagagactcagaggcattaagtaacttgctcatagcctcagttggaaggtgacagaaccagaattcaaactcaggctgtcagtgtctagggcccagttggacccagggcagagcagaatgatatgaggagtggcgctg

SEQ ID NO: 522028 - DNA, 982 bp, Homo sapiens
  misc_feature (52)..(52): n is a, c, g, or t
tcatgggacgaccggtgaggcgggagatggcgtgaacctgggagcggaggtngcagtgacccgagtttgcgccgctgcactctagcctgggggacagagcaagactccatcttaaaacaaacaaacaaacaaacaaacaaacaaacaaaaaacagtatcttttgttattcctgagataattccaagagaagaggaatgttgactatatcctatggcatcattattgtttgtctgattggacccaggctagaaatcttaaagatatttgtgaaaaataaagctcatattcaagatgaaacattaaaccccacagtgaaggtcattctcattctctctggcttgcccctctttctttctcacttgactttctcataatttttttcaacaacgtctttggaccccggttcattaaactctccctccccacatctgatttttccccaagaaagtgcattctggagagggcagggggagtgactattcatttgtctacacttcccaggctcaaaggagctgtggtcactatagcttccaaaacattcctttgccataatcctgcaaaactgtatgatcccatacctcccagtgaaattcccatagaccatattctaccctttttcctggctgtcttattgtatccctgttacttcctctggtcccatgaaggctcagtcccttggctcatgtcctctttgctatctgaactgccaccatcagggtggtcttcagcatctgcgtgtgcaggaaatatccagtgacttagcttcagagttgcaagacttcatccccaccatactttgccagctcagtcacattgcccacactctggccttgtcttctgtaatgtctctgcttccagaacattaaactccagtgtaaccatatctggttataccctcatagcctctctgcttgctcccctactctccctttttccaagttcattaaccatgttttccctcacgccaggtattcccagtca

SEQ ID NO: 522029 - DNA, 231 bp, Homo sapiens
gctctctttgtgagcttaccaggagggactataaagcagatacctgtattctcctgtacttcatggattttgtataactatgagtctcctgagagccagttgtggtatacacctgccatggcgtcccagcatcagcatcctttctctcttccttgtctcacagcaccctgattcatctttgggagaccaatgctcttgtactctcagatctttggatggggctaacctgct

SEQ ID NO: 522030 - DNA, 422 bp, Homo sapiens
  misc_feature (165)..(165): n is a, c, g, or t
  misc_feature (389)..(389): n is a, c, g, or t
accggtctatctaaggatcactctaattcttttgcttgcgggtgatgcctgttgggggccagtgccctcctaattggggggtaggggctaggctggagtggtaaaaggctcagaaaaatcctgcgaagaaaaaaacttctgaggtaactaaataggattatcccngtatcgaagagcctttttggacagtgtggtgtgttggtggccttgagtatgtgctttctcgatgttacattcgcgccatcattggtatatggttagctgtgttaggttagtagagcctagatatgaaggagcgttatggacgtggacagtgaaatcacatttgctagtgccggagtgtcacttaggaggggctggagagggcccctggttaggggtcatgggcntgggttttactatattggatcctctagagtcga

SEQ ID NO: 522031 - DNA, 383 bp, Homo sapiens
aggaggggcctggtgtggaggaggtgaggagccgtgcaatccaaccaggatgtttagcaccccatcccccttggcccttcctcatgcttttgaagtggacatattcagccttggggaaaagctccgttgcacgggtttccccttgagccccttttacaaatgaggaaactgagtccggaaaggaaaagggacatgggtcccgtgccctagcttgttacagctgcctctgtccccccatgggggggccccttttccagtaggattcggaaaaaattggacatatgggaggagggggcaaattcctggccctccctccccagacttgaaggggggggggaggttggttgttcagagttttcccaataaaaatgggtttttgagca

SEQ ID NO: 522032 - DNA, 1372 bp, Homo sapiens
  misc_feature (990)..(990): n is a, c, g, or t
gatggtgctcgggcttggctggttgttgggttgtgtgtggcttgctgtatcgcgtcgtgcgtggctcgggtggtgggtgcgtcgatagctaggtaagcgcagatcaggtgtgatgtgagacgtgagtattggtgtggcatcccggcggtgtcgttcgtgtgtcctgctgtgcttgagcttgatccgccagcggacccccgatgttttacacacaattgtggtctcccacccaggaccgctagttttttggggggcgctcccccattcttggtgcgcacaccattgtggggcgctctgccgtgtccaccgaataattctcggtgtttccccatatctcccccgggggtccctctcgtcccagattggggcccgcgcggggtttcctcctgcgtactctgggcacaaagtggcgctcttctccgcgacccgtctgcgggtggccagttgtagcgccccccgcggtactctcgcggtgtttcgccgctttggaggcgccctgcggttccccccgccgcgggggagcctttctcccgcaccggagggggcccgcctctgtgtggaatgggcatgcgcgtgttctgtttctttcgggcgagagcggtgtttctcattctaggtggctgccagaacaggttgaacctcctctgtcctcctagctagttctccccccgcctctcggggtgtttgtatgccgttggaaagaggaatttttcgcgccgcgttctctctcctcgccagcgcatttatagaccgagcgatgtctctgttgcccaccccccccggggcggaacaactcttctcacgaggcgtgtaacctatgattgcgccccccgcgtgaaattaggtcgctcacgagcgaggtgattgtctcacagagcactcttccatcctccacacggcgctgtgcacgatcggtagtctctgccgccacacattttgtctttcttcaccagaggatgcacaatatatctttgtgtcgcgcacgggganatatagtctccatagagagggtgtacattatatatagacaggcactcatattgtggagatatcccctgagtgagacaatattctatgattgcagtccacctctctcccacaacgcgtgcaacatcctcttgcggggagaaccccctccacctccgtcgatgggggagtgagaagatacacacacacggtcggtctatgactcgccagagatatccttcttggctcactgtccatctgggacaccagagggggggccgcatactattctcgttatatatagctccctcgctttgtgtgtccagggtagatctgagcaggcggccacaaccacaccgataaagccgatgggcacccggagggataacaaaagacaaagaaaata

SEQ ID NO: 522033 - DNA, 429 bp, Homo sapiens
  misc_feature (76)..(76): n is a, c, g, or t
  misc_feature (86)..(86): n is a, c, g, or t
  misc_feature (183)..(183): n is a, c, g, or t
agaccaagatccccaagtcctgcccttaccaaggatgtcaaggccgctgctaatcaaatgggcaacttcctggttngaaccccccncccccttcgcttggaacctgggaaaaaaaatttgatcatgggtttggatggggccccctatgaccccaagggacccccccaggacctgttggactcnaaaaattggattgaggaaatgcccttttaacgcctgtgccggagcaccccccaacgggcaacctggggccaagtcaaaaactttccccccggagtatggcccccaggggggccaggtgtaaggggtgccccccccccccccctgggaggaaccttaacctgggaaccattaaactggaaaccctgctggggcccctttcattaacccaacctggggccagggcaaattaaaggcttttggccccca

SEQ ID NO: 522034 - DNA, 489 bp, Homo sapiens
agtaagaggaccgtaggactcttcctggagaacaccgacatggaccgggacatatcccgacgggtccgacgacgacgcaatgctacgaccgacccatgctggatgtacgacgctgttgagagactgctacgatgtacagacccgacaggcgagggagtacgcgagacgagccgtggaacccaagagggacctaggtgcacggacggacctccacggactggcacgaccgaataaccaaacccggcgaggcacgacggacgacggcagtgagacccgacatatcgggcacaacacgatcatcccgaaccatgcagagcagactactagggaacaaaccaaagtcaatcacaacggacatgagaagagacagggaagaagaagggaacgagaacacataacagaacgaaagcgaacaatcatacggcatacgaaggaggaaaagagagccccacacaaaacagcccgagcaaggagaaggatgcactaaag

SEQ ID NO: 522035 - DNA, 598 bp, Homo sapiens
gtccagtatatggagactctcgctctctctccttggagatgcatggtaagtgctgatgcacttgaggtggtagcattcgcacctctctaagtggtgtgcaatacagagagagaaacgagtacaagtcttatatgtaatagtgacatgtccgagtagtgatacatgaaaagtggacggaaaaaggtggaattaacgtgaaagtagatatatccagtaaaccaggattgcagcgattatgtgctggtctcagggcgcagaaccagaccgatgtgcagggctcagaagcggcgtgcagttgtggccgtcatattggatggcttagttctcagatgattctgggcctttgcagccatgacgtcaggtcgttttctactgttactgagtcagggaggaagtttttttcttctgtttattctctgaaaggtaaggccttccttggctgcacagctgcagctgagaagcggattctgaaggggcagggtctctaatctctagggaagctcccccagcctccacagtggggaagccctctagacaggattttgggctgagcctggatagttgggggggtgggggagtcaatatcccgagggccccg

SEQ ID NO: 522036 - DNA, 606 bp, Homo sapiens
tattgacaagatgtgttgtgcgctatttatgaaattaaggagttatggccactgtgcatgggaactttggggttatagttgatcgatggtagtatgagtatgagcgcaaaatcgttatggaaaataggaagtatatgtgaagatgctgattatcgttagattatctcgatagtagtatggtcggattgcagggcaaggaaatggcttgaatgtggtctagaatatatggctagatgcttttagtaaaaatatgaatcgtaattgataatgaattaaagtgttgatattcgatgggaagcaaatgttcttatacattgttgagatagaaggcacgaagacggttaagttttcccttagatgctattggcaaaagcatgggatttgagactttcgcgcgcatatgtagcccgtacactgcccgaactataactagaggctgttgcactaagtaacacgtcttatgtactggcaaactcgggcacacagttgacctttccaccttgaagataaaaaagtagggcgaaggagtaaccttcgtggactaatgctccttcggccgtttggacttttttcttcccgaacgggaattacacattaacttccaag

SEQ ID NO: 522037 - DNA, 439 bp, Homo sapiens
tctgtctgttttttgagacagagtctcactgttacccaggctggagggcagagcacgatctccactcactgcaacctccaactccctggtccaagatattctactgcctcagcctcccaagtagctgggattacaggcacgcaccaccacatctgactaatttttgtatttttagtagagacagggttttaccatgttggccaggatggtcttgatctcctgacctcatgatctgaccgccttggcctcccaaagtgctgggattatgggtgtaagccaccccacctcaccaaagttctgttagtttttattttacgtgttttcaagtttatttctgggtacatgttatgggttgaatttggtttccaaaaagatatgttaaagtcctaacctccaggtacctatgaatgtgaccttattcataaatagggtttttgaa

SEQ ID NO: 522038 - DNA, 232 bp, Homo sapiens
tacctgtaacattcgtgtcctttcgtacaggcaggaattggagtagatagaaaccgacctggattactccggtctgaactcagatcacgtaggacttgaatcgtctgaacaaacggacctttaatgagcggactgcaccgatcggtgatgtccgtgatccaactatcgaggtcggtaaacccttattgttgtatatgtgactctagtaatagggattgcgcttgttatcccc

SEQ ID NO: 522039 - DNA, 247 bp, Homo sapiens
  misc_feature (247)..(247): n is a, c, g, or t
tctccatgcctgggtgtgcgctcttgtctttgatctgtttacatgggctcttttgcgttattggtattctgtcgtctgtcatcctgagcccatgtattctatcccttcagtactgatttctgtctcacatcatgaaattgctttagaggtatcatcttaatgcatccttgaatttgggttgtgcgagcatcaaggacgctacgaggatctatgttatcattcccctttcctgagggtaatggaagtn

SEQ ID NO: 522040 - DNA, 257 bp, Homo sapiens
catggttcaagcaaattctcttgcctcagcctcctgagtagcaggattacaggcacctgccacatgccccactaatttttgtattattagtagagatggggtttcaccatgttggccaggctggtcttgaactcctggtctcaagcgatccgcatccccctcaccatgaaccaccgcgtggggactcagtggataaatttctgttgcactttgcaaccttgggtgacctatttgaactctgttttctcatgagtaaa

SEQ ID NO: 522041 - DNA, 350 bp, Homo sapiens
ggtgccgccaaagccagtgctctcatgatgtctggcacgctcttggtcatctggactctggcgccagttagatgtgccgtccttctcagatcccgtttcaccattgctcaaattcatgtatcacatatggacatacgctccatactgtgaaaggccttaatccatgaagtcaagtagatcctgtgtagccttttcaccttcgcattatcaaaacgtgagatcaggctactgatataaagcctcctacaaaaaagcggctgcttagctttctacctatagcaaacaatatcttttaagtcccatttgtctctcagcatagactgagaatgaataagtacggcgaattaaag

SEQ ID NO: 522042 - DNA, 272 bp, Homo sapiens
gtagaggacactctctgctcccagattcatattccccactaatgaatgaagaggaggctgggaacgggctcatgcattaacctcagcacttttggagactgaggtgggcagatcgcttgagaccaggagttcgagaccagcctgggcaacatggcagaaccccgtctctaccacaaatacaaaaattagccaggcatggtggcacatgcccgtagtcccagctactatgggaggctgagacacgagactcacttgaatctgggaggcagaga

SEQ ID NO: 522043 - DNA, 137 bp, Homo sapiens
cctcttcagcagtataagccacctagtaatataaagaaaatgcagcaaaatctgatttttaccttggctaccactttcataaatataaagtaacttaaaatatttgttgttgttgttgtacttgtattgccagttcc

SEQ ID NO: 522044 - DNA, 363 bp, Homo sapiens
atactcgatggtcaacgtcaagaattcacaggtcgcctggttctagaaataatggggcaagtatgtaggagttgaagattagtccgccgtagtcggtgtactcgtaggttcagtccatgtggtggccaattgatttgatggtaaggaagggatcgttcacctcgtctgttatgtaaagcatgcgtagggatggtaggtcgatgaggactaggatgatgacggccagaatagtggtgtgagtgttaggtaaagggcatacaggctctaggaagcagataaggataatgattatgagggcgtgatcatgaaaggtgatgagctcttgtatcatagcgagaggagcgtcgtgtaggcgtacatgcg

SEQ ID NO: 522045 - DNA, 373 bp, Homo sapiens
  misc_feature (63)..(64): n is a, c, g, or t
  misc_feature (68)..(68): n is a, c, g, or t
  misc_feature (72)..(72): n is a, c, g, or t
  misc_feature (75)..(76): n is a, c, g, or t
  misc_feature (273)..(274): n is a, c, g, or t
  misc_feature (276)..(277): n is a, c, g, or t
  misc_feature (281)..(281): n is a, c, g, or t
  misc_feature (283)..(283): n is a, c, g, or t
  misc_feature (285)..(285): n is a, c, g, or t
  misc_feature (288)..(288): n is a, c, g, or t
ataagtgccgatctacttcttccgaatgtcatcaacgcaacagtacccaacgtggacacccanncagnttgnaanntttcaaatggaccctaccactgagaaatcaagatggcagtctactatggggaattgaggaaaaatggattaatacaagagtcctgtgataatatacaaccaagacagggttcttttaacatggattccatgcagtgaatgaagacataggtttcttacccaacacaaatggacagtggattgactttctaaagactnntnngggncntnganttgagaaaagaggacctacccatatttagtttttatgcctgattatcgcatttgatttggggcgctgacctcttgaaatgttaat

SEQ ID NO: 522046 - DNA, 390 bp, Homo sapiens
  misc_feature (81)..(81): n is a, c, g, or t
  misc_feature (290)..(291): n is a, c, g, or t
  misc_feature (293)..(294): n is a, c, g, or t
  misc_feature (298)..(298): n is a, c, g, or t
  misc_feature (300)..(300): n is a, c, g, or t
  misc_feature (302)..(302): n is a, c, g, or t
  misc_feature (305)..(305): n is a, c, g, or t
cttaaaaatatgaacctcaaactgtatcctctaaaggccccatacaatgaagtagacattggtggaaacatttacacccantgggctgggggagtgaaaataaaccctaccactgagaaatcaagatggcagtctactatggggaattgaggaaaaatggattaatacaagagtcctgtgataatatacaaccaagacagggttcttttaacatggattccatgcagtgaatgaagacataggtttcttacccaacacaaatggacagtggattgactttctaaagactnntnngggncntnganttgagaaaagaggacctacccatatttagtttttatgcctgattatcgcatttgatttggggcgctgacctcttgaaatgttaat

SEQ ID NO: 522047 - DNA, 350 bp, Homo sapiens
  misc_feature (1)..(1): n is a, c, g, or t
  misc_feature (342)..(342): n is a, c, g, or t
ncgaagtgttgtgattaaaggtgtgagccaccatgccagccaagactccatcttttaaaacaaaataactaactaaattgctgggactctcacttctagccaagaccaagtaacaaaaaccagatttacccactcacctaaaataaaaagaaacaaactaggcagcaaatatgaaataatggtttttgaagacactggataccagggcatcaaaggacaatgattcctaaaagagaaggcacaaatgcagggagctgggagattgtcccagtttattggccttggggatgtggtccaagttggcagcacagaaacgggaacaggagtaagcctgggtggganttctttgg

SEQ ID NO: 522048 - DNA, 328 bp, Homo sapiens
acccttcccccccttttcccccccaggtaaaagggcaattttagccccccttggggccccccataagtttccccagggggggggtttggtgaaaatgtccaccgggtgaccagtttggtttccccccccccgctagttgggacccaaaaaagaccaaaaacttttttttgggtttttaaacaaaaagctttttttgggggccaaggctttaaaaaaaattgttttttgtttttttcccccaaccccccagttttcccctaaaagaaattggaaaaaataaaggaatttttaaaaagtttttcccaaaggaaaattaaaggggccccca

SEQ ID NO: 522049 - DNA, 499 bp, Homo sapiens
  misc_feature (60)..(60): n is a, c, g, or t
  misc_feature (88)..(88): n is a, c, g, or t
  misc_feature (129)..(129): n is a, c, g, or t
  misc_feature (147)..(147): n is a, c, g, or t
  misc_feature (169)..(169): n is a, c, g, or t
  misc_feature (247)..(247): n is a, c, g, or t
  misc_feature (250)..(250): n is a, c, g, or t
tagttagagggaaataacaaacgggggaaatcaaccccaaaaccccatttgaaatcaccntcttcaagacccaaaggtagttaaattnacaaagatggggaaaaaacagagcagaaaagctgaaaattntaaaaatcagagcgcttnttcctttccaaaggaacgcagntccttaccagcaacagaacaaagctggacagagaatgactttgacgagttgagagaagtaggcttcagacaatcaaanttntccgagctaaaggaggaagtctgaacccatcgcaaagaagctaaaaaccttgaaaaaagattagatgaatggctaactaaaataaccagtgtagagaagtccttaaatgacctcatggagctgaaaacccagggcatgagaactacgtgatgaatgcacaagcttcagtagccaattcaatcaactggaagaaaggatatcagtgattgaagatcaaaagaatgaaatgaagcgagaagagaagtttag

SEQ ID NO: 522050 - DNA, 195 bp, Homo sapiens
  misc_feature (136)..(136): n is a, c, g, or t
ctggctacttacgctcttttttactgtacgaacacacttgacgttaactggggtggacctggcgttgggaacgaccataccatttcctaactgtactttactacgacacaactaacaaactactttttactgttgnccttcttacaacaacaacacaacaacacacacacacaaacaacacacacacacacacac

SEQ ID NO: 522051 - DNA, 124 bp, Homo sapiens
atgccaattaggttaaggattattgttgtcagttatacgactctacagaaaggacattgaactcattaagcatagcagactccaaagttatgtggttcaaataaagctaatattaccagggagt

SEQ ID NO: 522052 - DNA, 83 bp, Homo sapiens
tgtcattctctggctatggagtgtttgtggccttcacagatttcacaggaaccaataaatccctcaaagaagtaaaaaaaaaa

SEQ ID NO: 522053 - DNA, 176 bp, Homo sapiens
  misc_feature (118)..(118): n is a, c, g, or t
  misc_feature (138)..(138): n is a, c, g, or t
  misc_feature (152)..(152): n is a, c, g, or t
tggtctagaggatccctttgggtgcctttccacacagactcgtactgtctctggcattatccctctcctaggtcactagctggtgagctgagagacaaattcctggtaggattttaantggctgaataaaagttaganccaagatctttggncatcacttgtatttatactggagg

SEQ ID NO: 522054 - DNA, 328 bp, Homo sapiens
ctacaccgcgcagaacctattaatagggctctgtatagttgaagtacacatttgaatctagaccatatttcacttgataatctacaaatatttcattatcagggccccatccattacagggtaaccaggaggcaaaatgaatctacataaatatacacatgaaaatagtaacttacaaaaagaaaaaaaataaggcagcttcataacacaattatacatttacacttataacaatataactactcccgtacagaataaatatacacccaatgtatggagcaggattcaaagaggatagtgggggtcagggtgagggtacgcgggatag

SEQ ID NO: 522055 - DNA, 263 bp, Homo sapiens
  misc_feature (152)..(152): n is a, c, g, or t
  misc_feature (173)..(173): n is a, c, g, or t
  misc_feature (214)..(214): n is a, c, g, or t
  misc_feature (234)..(234): n is a, c, g, or t
caggcatgcaccaccatatctggctaattttgtgtttttagtagtggcagggtttctctatgttggtcaggctggtctcaaactcccgacctcaggtgatccacctgcctcagcctcgcaggtgctgggattacaggtgtgagccacctcgnccggcccaagatctggttttnagatggaattgaccaggcttgcttatggattaatgtggggngtaagggatggaggaatcanggatgagtctttatttcttgggttgtgga

SEQ ID NO: 522056 - DNA, 294 bp, Homo sapiens
  misc_feature (17)..(17): n is a, c, g, or t
  misc_feature (172)..(172): n is a, c, g, or t
  misc_feature (253)..(253): n is a, c, g, or t
ggagagacccgagtgcncgtgtggagaagcggcggcacaagcgcggcggcgggagacactcccgcccccaccaaactaaagcgtcaaattcgagttttgtggccttcgttgctcgcacagctccctgtctttgctaggaggccggcttgcggggttgagtggcccgagctangggtgcggcgacctaagggcggcgactacgacggcgttgctatcggtggtatcgacggcctccgcaggcggcgacgatgantggtcgccggatcgtgctgggtgatgtgccccctcacccct

SEQ ID NO: 522057 - DNA, 1338 bp, Homo sapiens
  misc_feature (9)..(9): n is a, c, g, or t
  misc_feature (79)..(79): n is a, c, g, or t
  misc_feature (81)..(81): n is a, c, g, or t
tatgaattnaagtagagagacagcgcgaatactctaggagcttctcgcagttggcttcctcggtaggcttccagcacgngnagcatgcccgagagcctggaccagcccaacctctggcagaccaggggttaccagcctcacaactgcagctgccttcaagcctgtaggatccactggcgtgctcagttcccaggctggggggacggggggaaaaccccagggaggggggggggtgccactcggcggagggaaggagtgccgaaccgaggggacaacattataccacggataccacccgaggggagccagggccaactccacaccttgtgggggggggagaaggagaacaccacctgtaaccacggagcgaaccacactataaatggcgcataagcacaacattgaagagaacagattttcacaccccaagggggggaagaaggagaaaattacccacatgattgtaatgggccccattgggagagaccacaccgcgccatccctcgacacagaaggccacgaatcctctaaaatagggcggcccacggggggggcaagaacgcaatggggggggtgccccccccaacgaaacatgctacaacccaggaggagggcgcaccctggggggggcaagagtgatccacaacatagggggcgggacccacaatggggggccgaagatggtgagacaatgagggagcaaacacgagaagacgcccccgcgggaccaatgtttggtaagcccagatggggggtatatgtacggggaccaatccttatatggaaaacccccccgaacacgctgggggtggcggccatgggcccaccacacggaacagaaaaacaccttcggggggagaaagagtcattcccacaaatggccgtcttggatagcgacacaaccacatgggcgacacggttatacccacgtcttaacgatcggtggggtctggcctgtctctgtcaactgtacgccacacttcgcaaccccagccacttgttggccactgccacggaggggcgggggggggggccgacacccgcttccctgccgcaggccgtgggatatattactgcccccccgggggggacagtttttcccagggagcttgtggaatttccccttttgaaagtcgggtgaccatgttcttggggaagcctctggggtaaactctgggcatggacacctgcactggatgccccggggtttggaaaacacatttcagacaggggacacacactttccccccagaaaagagaaaaccccgcgtgttaacacacaaccacccggagaggaatgcagtaacaccacgacgtacatagggaatttacacactg

SEQ ID NO: 522058 - DNA, 175 bp, Homo sapiens
gggtgcctagaggatcccggaatcgtgctggtgcttacttttatgactctgggatctccccaagtctcattgcctattcctggagtgatggagaatacatatgaagtcgctggagcaccaacacaattcccttagcaccagcacgaattcccttagcaccagcacgaattccctt

SEQ ID NO: 522059 - DNA, 168 bp, Homo sapiens
  misc_feature (46)..(46): n is a, c, g, or t
  misc_feature (52)..(52): n is a, c, g, or t
  misc_feature (93)..(93): n is a, c, g, or t
  misc_feature (158)..(158): n is a, c, g, or t
atcaagttaaagagcagtgagctgcaggccatcaagacggagctgncacagntcaagtccaatatcgatgccctgctggccgctttgagcagntcgctgcggagtaaaggccaatccagatggcaagaagaagggtgatggaggtggcgccacggcgncggcggcggt

SEQ ID NO: 522060 - DNA, 101 bp, Homo sapiens
tagtggtcccacggcaggtgtctctcaatcgacaacattgatggaacccccgtacgggtatgaacggagtgggacacccacccagtacaacctgccggtgg

SEQ ID NO: 522061 - DNA, 201 bp, Homo sapiens
gagataccgtcccactgagcaagggcagggaccgaacccacaacttcatggttcctagtcgggttggccaaccactgcaccacgacgggaactccccctttcttaacttttcaatgcggagccttttaaccctatatatggtactctccggaactcctgccattgtgaggaaacagtctactcaaattccagctccaccac

SEQ ID NO: 522062 - DNA, 362 bp, Homo sapiens
cgattctgaggatcccccagcactatttattaagtagggaatcctttccgcatttcttgtatatgtcaggtttgtcaaagatcagatggttgtagatgtgtggtattatttctgagggctctgttctgttccattggtctatatgtctgttttggtaccagtaccagcctgtttaggttactgtagccttgtagtatagtttgaagtcaggtagcatgatgcctccagctttgttcattgggcttaggattgtcttggcaatgcgggctcttttttggttccatatgaacattaaagtagtcttttgcaactcttatcagcccagtttaatattacctatttattataatgtaatgctgctc

SEQ ID NO: 522063 - DNA, 117 bp, Homo sapiens
catatccagagtcgcactgaaatgtaggtttactggtatattgttgttgtatgttgttgtttatgagacagagtcttgctctgtcgcccaggcgggagtgcagtgccgcgatctcgg

SEQ ID NO: 522064 - DNA, 166 bp, Homo sapiens
gctggactactgggtcgtacacggagctggaggggagggagaggcaccccagagtcaggattgactggcactgcctgacagatggggtgggtgtgagcaaaatggatggccccaatcatgagccctggcaagtggggcctgagcagcagggatgggcagtggaggc

SEQ ID NO: 522065 - DNA, 410 bp, Homo sapiens
  misc_feature (159)..(159): n is a, c, g, or t
ttgttgttgagatggagtcttgctctgtcacccaggctgggattggaagcaggccccctctgtattcgtttgctggggctgccataacaaagtctcacacactgagtgccttaaacaacatcaatttcatatcttacagttctggaggccagaaggcanagatcaaggtgcgggtggggttggtttcttctgagggtcataagggagggatctgtctcaagcctctctccctgggtttatagacggccatcttctccccatgtctttacatggtcttcatttctgtgtgtgtctatgtcctaatctcttctttttttgttgttgaggatgggagtcttgctctgtcacaataaataaataaataaataaataaataaataaaataaataaattaaataatgtaggggatg

SEQ ID NO: 522066 - DNA, 1022 bp, Homo sapiens
gcggcagaagcagctggtgggaaatacagaagcacagtcagctaaaagcaaagacccctcggggctgctcatcatctgtgcatcaggcactcatgtctcactcagtgcacgcatgtcgcaagcaccagggcacaaatgcaaacagggtcagccttgcaagcaagcctcacgcagcaaatgtagaccgtgcacctggcatgcaattgcattgtacagccactcacacagcaattgacgcacagcccattcgcaccataccagagcgaatcacagcagcgcatccactaactcccgaacataaacataacagccaggtacaaagagaacctgctttcatgcacagatgctgctgcacatgcaaaacgggcatgcagcttcgagaacactgtggattgcacaggcaattgcagccatcaagccatgtcactgacacttgtatggatgcaacattgagacatcatcaagcaagatagcctcaaacagctgcgaacaagtgcaatggcccagacaagcacatatctcagatgccacatgaacatgtaggatgtcagcagttgagtcttatggagggccccctgcatccaggatggcaggactgagtgaccttcgactagagcttcacagcacgaagatgaacttcaacttggttctcatagatgaaataaaacggcactgtacatcaaatcagactagacgaagtagtggcaggcgtcacaaaggaaaaaggggaaaatcaagatcctcgtggaaagatgcttgatgtacatatgatagacgttaacaaactccctactacatcgaagacattcctgacataacgaatcacaatgataacgacgtgaagccccaatgaccaggacaaataactctgcggaacataagaacgactagaaagggatcaaagaaatcagaacaccgagaagagaacacaacaaagcatgagacacgaaaaaaacaaaaaagaaggaacaaaaggcgccctcgtaaacaagatagaaaacaaacagacaagggcaaaagag

SEQ ID NO: 522067 - DNA, 178 bp, Homo sapiens
cagtaaggaactatgttcacaagaaacaacggcgagacagtggcttattactagcctctacagttaataggaaaaacggaagaagttaccttaagctagatagatgcgtccacaaagtgagcatactcccacactattggtagcgcggcgaccacaataaaattcagcctaaaatagt

SEQ ID NO: 522068 - DNA, 481 bp, Homo sapiens
gttagctgggattagagtcacccactatatcacagcgtaactatcgatagtattgatgatatcagatggtgtcactcacatgtagcttacgctggtcttgaattcctgggagcatcaagtcgacgccatgcgcgcgcatcagcctgaagacctttcgcagtagtcctaggattataggcgtgaaccactgctcctgggccttctttctcttaaatgtaactgtaggtagagattttggaagaattattggttctcattacttattaatgctaggcaaaaattaagtagtaacagaactagtattgtaaagcattggggtcttcaacgtcttatggaaactatgaagcaagagtttaagttaccaactgttccagacttagcatggtactgtatattcaggcaaaatgatagagaaaattatgtttgaggatacttaattcaacgtgttgtatagacattttttatggtacaagggcgggta

SEQ ID NO: 522069 - DNA, 231 bp, Homo sapiens
  misc_feature (26)..(26): n is a, c, g, or t
tctgtcgatgtgtggggataataatntgagatgaggtttgggtggggacacaagagccaaacccatatattctgctcctggcacctcccaaatctcatgtcttttatatatatttcaaaaccaatcatgctttcccaacagtcccccaaagtcttaactgattccagcataactcaaaactccaagtccaaagtcttatttgagacaagtcccttctgcctatcagcctat

SEQ ID NO: 522070 - DNA, 943 bp, Homo sapiens
ggaagagacgagcaactacttctcgactttcatccgcctccttgctggcctgcaaccgtctccgatgtgcgccgtactgcgcgacagaacgcaggaacatcctggcagggtgatagtctgccgagacgacccttgaatacatacatccggcttaacatgtagaatacctcccacctgtcattggatcagcctgttggtgccccaggcatgtcagacgcaggcgtagagagacatctccgaaatcatcagcaatggattttacaggaggaaccacaggaaggttggtgtgaacgaggcaagaataattgcgcacgcagaccgcaacattgcggaacgctcactgctttttgacgagaatagtgccgaacagctaggcagcgctaactcatgtaggatagattaacacactgaggcaataacggtgtaagagttgtctacaaagtaaaagttcacaagacaagtggggtgctcactttgtgcgtagcgaaaatgggccccatgatgtgagtgacagataccccgatgatagttgcacgtgtgtaaaacacaattgatgttttcacagaacgtgttaagagtccacaaacttccaatatgtcatttacaagaccgcgaaatccatccgcaaggtactttcacccaaggcagtgagtataccatgtggaaaactcccgtaagagggaaaggaatactgggggcccacacaaataggaagagggtctagtgagagctgttacaaaacaaggtattcctcaggagattggtccgccatattcgcgtagcaaggggaaaaatgtggtgaaaggaacaggtattggggagacaacgggtcatccttcaagaggccccaattaaatcgagggctccaaagagtagttaacaagaactagtggaacaggggttaaccgcgagtaagaaaaaggcaggctaagaagtcccccag

SEQ ID NO: 522071 - DNA, 137 bp, Homo sapiens
aggaatggaaagcaataatccttcacatttagagtaaattgtgattgtggggtagaaccagaggaaaacaattgttttccttccattttctgactttctttaagtattggggacgatactgttattacgagaaaaca

SEQ ID NO: 522072 - DNA, 496 bp, Homo sapiens
tgactgcttggtttgagccttgtggagcgagcatttaattgtttcaacgattttcaagtgctgaccggcgaagacaatctattagtcttaaaaaaggcttatggcctaatgggagctacacctcgggtaagcgaggacttgtgacggtgtaggtactcaggggctgcgcacggtgatgaacagcaagccttaaacttcagataccaaaacaccggctctaaatcttaataaccaggtcagagcatgccacattcccagaacattgatataaataatttgaacaactacgacactaagcggactaaatttcgtctatcggctggaccataggctataggtggcggcaactgcgaccaagagcgtatggatttccaaataaaaagtgtccaccccgtattcccggaaaactactcagctatatgggacgaactctgacacctacagggcaggactgtctgagccgcactgcttacttgctacatgcttcagaacgggt

SEQ ID NO: 522073 - DNA, 315 bp, Homo sapiens
gagacacagatctaggtccccacggtgacatatgatagtgacatggatccggaagcgggtgagtgatagcaccatgtgctcctatgtcttatgccaagctaatcaggcttaaggttacagtggaaattgagagctcacagaggagcggacatgcagcaaggctgacgcaggtcaagcagcgaggggtggatgacccagggagtggctcagttcgcgaaaagctgagctgcgtgaactccacgtagtcaaacgcggtggggagctcgcggcccttgccgtccacgtagggcttcatgtgggagacgcagtagtcgg

SEQ ID NO: 522074 - DNA, 2056 bp, Homo sapiens
acttggttcccgatatggatgatgaagaaggagaaggacgaacgacacgactgactgactgactgactgaacgacggacggacacggacttacgacacgactacttgaccgacacgaccggggactgacggactgacacggtgacacgaacgactgacacgactgactgactgacacggggacggaccggacgacggacggactgaccggacgaacgactgacataaactacgaacacgtgaatggacttccaacccattccatttatttataaaatattatcctccaagatcaccatgggacagcaagattggcaagatcattatattatttatatattattctattatattataatctcacacatatgtgtgagtggcactcgagagtcagacacacagtgtgatcactaatgtgaagagagtctcctcttatatatatctactctatcctactctccaagacggatgtctactcatccaacaattattatatatgtcagtgagaggaggaagaacaaccatatcaacggctctgtgagacgctcacaacaaaataataacaagaagtgagacgtaacaaatagggcaagtaatgatatctaattcacagcaacacatattataatcagtggtgatcacgagaagaaagtcgtcaccactactaatgcagacattgcctcccgctatgcaccagctggtgcgatccacgtaggaagacacaccaaactacagcgaacagatgaatataagtggcgaacactcaacaacagcaagcacccacacagcaccaggacagccaccgagcagatgatgagcagaacaacaacacaaaccacacagagaaacaaaagcgcacgtggacccccccccattcctgatgacccacccgacgacgagtcggcctaccaagcaccgatgaacgcaagaggacgagacgcacatacacgacgcccactacccgaggaggcgatacaaagaaacaagaagatcgaccatatccacagcacgctcttataccacaagccacgagtatagctacacacactccacaccacccctatctaatcacccatgtggacacatctaacaagtcgggaggagaacctacacatgagcaagacacatcacacacaccaaagagaggacgaagcaccacacacacacaagtcgtaagccaccgaacatcatctgccgcacgcacacactcaggccacaccgacccgaaaggcacacaccaataacgacatgcgaaatcatccacggggccagacaacacatacacccacaatgaggtcacaaccacacagccaacaagcacacaaacacacacaacacatcgtcccaccaaccaccaactacgggaagcgttgattacacaacaagaacaaacgggcctacaacaccaacaccaacacaccgcacggacacaccgcaacacaccagaccacgaacgagcaagagtacgatggtacatctacaacgcatgcaggccaccgcacactcggataacagaagcaagaggtgggcatagatcccacgcaatcgagtgcaaagagtctatactgaacaacgtggagcacaactcaatgcggacaccagcgtacacggcgacgcgtgcgtcgaacgatcgtagagcatactgccactcagcacgtctcaacacaaatagacagatacagtgactgacatccactgcgctgcagtcgtaagccggagagccgccggctgcacatgcgactggcgcgagagacatgacacgaagacacacgcggagtcacaagcctaactacggacaggcgtagcatcagcacagctagagcaatcgagggccacgagcaaccatgtcacagacgcgtaaacgacgctaatgcatcgcaagcagcacgcacaaagcaccccagccacataccacagcacagagcacaagagcgcagcgagcaaccacaagagccactaccatcacagcccaccagcacgagcagcatacaacagcagctgaacacagacaaccaagcacaccgtcgcgcccaggccgcccactcaacacacaccac

SEQ ID NO: 522075 - DNA, 117 bp, Homo sapiens
gactctacgagtgatccccactggcggtgaacgacgctactctgatgaccgtggcttagtcctccaggaaggctcaggagccctacctccctgccattatagctgctccccggccat

SEQ ID NO: 522076 - DNA, 555 bp, Homo sapiens
  misc_feature (131)..(132): n is a, c, g, or t
  misc_feature (170)..(171): n is a, c, g, or t
  misc_feature (189)..(189): n is a, c, g, or t
  misc_feature (204)..(204): n is a, c, g, or t
  misc_feature (206)..(206): n is a, c, g, or t
  misc_feature (286)..(286): n is a, c, g, or t
  misc_feature (292)..(292): n is a, c, g, or t
gggtctaatctagatgatccccacgctgcagctgggagtaccaaccggttcgttcgcttgggtattgtgagttctgtgcatccccattctgttacatgcacatgcaacaaaagaacattgtgcttggcacnnccttttttcccccttttaataatggtatagagagcttnnagtcttggggcagatttngaagctgtgtgtggnanacagtcacagatgggacagtacagttccctcacttaatgcttctgtgccagcataaaattatcagagggacttcagttgnggtttnactcaggatgaattgcctggctggatactaatcctaagaatttcccgtataagttcaaacattaaacagtttcatgccagtgggacgaaatttgcctctgctttggaattccttcattgtgggtggttggaagcctgtttagaggcggggtcctggaggtacaggtctgctattctagttgtacagcttgtgtgtggactggtgcccttattgctgaagagggggtggtacctggaaatggagtgcaagctcacttcagctgc

SEQ ID NO: 522077 - DNA, 230 bp, Homo sapiens
acagattggtgagacatacatgttcatagatgggaagactcaacacagtaaagatgtcaattcttccaaagatttgatgcaattcctatcaaaatcacagcaagattgttttctacgatacagaagtagtgtatgctaaatatttatctagaaacagacataaggaactatgaataaccatgaaacaattttgaaaagagaaaataaagggggcaatcatacagtgtacc

SEQ ID NO: 522078 - DNA, 793 bp, Homo sapiens
gtggcatgctgctaaagtcagagccggatgtatccggattgagggcctcaggccgaagctggaccctggaggaaatgaaacggaagatgcgcaggagtgaatgatgatctacctcgcatcacaggtaactttgctcatctgacgtggcgctctcctgtcagaggtctacatccattctatctctaatagcataatatgtgcacaatgactactatgaaatggacggaggtgacatcaccatcatagagatttgcgaactgcatgagtgcaatgcagccctgggttgacaggctctgtctgatctcctgcgtctggcaaggtgacatacggacccaagagatacggttagtatagaggcatcgtctttgagaatgggagcataaaactctctgctgtgttacatgaactaagttcggctctggctcacatgtgaccttcagagctaagatataaggctatttggagcaagtgatgacatacgcatcgctgctcgtggatcttggatgtacccttatccctgatgacgtttggcctctgacaatactggtagaattgtaaataatgtcaaactccgttttctagcaagtacttaagggagctgtgtctgaaatggcactgtcttgtcagtcagtttctgtttacctttttcttctgcccagagtgtatcgtgaagagtctcttatattatgtggtggaaatcagcagcacaagcacaatgacatttaacgcacaggatcatcactagtctatgtatgtaataaacagttcattaagaaaaatatttcccacggca

SEQ ID NO: 522079 - DNA, 301 bp, Homo sapiens
gcattaacccactcttggtgaggtggcccagagtaactttcaaaactgcgtactcagctttgctcggatgggatgatggggttaagatacacatcgttataccccctcctttgctaaccatgatgaggctttcttccctaaggatttaacagaaaccagccctttcaaagcctccaccactgatatcaacctctcctttcttgcctgataagagaccacccacgatggagaggttctggccagcgtacagaggatgcacagagcgagttttcatgtcctctgcttcgtctaaatgcaatca

SEQ ID NO: 522080 - DNA, 501 bp, Homo sapiens
cgggcccaaccgacggactgcgcagccccgcggtcaaccggtatgcttgcccggtttcccgccgtaggtcttcctcatgcgcatcatcagtttcaacgccaatggcatccgttccgccgcgaccaagggcttcctcgactggttccgtgcccaggatgccgacgtcctgtgcatccaagaaaccaaggcccaggaagaccagctgaccgacccgatgttccgcccggacggccaccactgtttctaccgcgacgccatcacaaagaagggctacagcggcgtggcgatctacagcaagcgcgagccggaccaggtcatcacctcgctgggctgggccccgttcgacgacgaaggccgctacatcgaggcacgctacggcaacctcagcgtggtctccttctatatcccgtccggcagctcgggcgacctgcgccagggcttcaagttcgaagtgatggaatggctcggccgatcctggaggagtgggcacgcagcggccgc

SEQ ID NO: 522081 - DNA, 954 bp, Homo sapiens
cctcgtcatctcgactcaccgatagtacacctctaggtttctgaatgctctgagtgtgaaccataagacgacggtctggcgactagcgttcactaggacgtgctaatgactcacgctgcacacactactcacgcgtgagatgtctactagcgtcaggaggggggcaaaggtgtgtaagatgctgcactgccctaccgctgaaggcgcgtctgtccgggtctctcaacgtggtaggacacgcatttgtgtccacgtgggcgtcttgacaaaaagttgatttgtgtagtcgcgacaattgttaacaggaggacgatgctgccatcttctaatcactcgtgtttaggacacgaaatgggattggttggaacagtgtctaaaggcgctcacttgcggtgtcacagaagcaataaacgacgagtgacccgtggccatccgtagtggtctattactgtgcttgaggaagtgaagtggctcattcgttggtgcactgcaatatgactattgaaattcgcactcctgaggaaatcccgctaatctacttaattggtatgatccttagtgatactcctagtgcaaaccataaaacatagattataaaccccgtgtggacaagtttggactttacatggaatccagataagcataatgcaggcacagacaggaactgcatctggaataagtaatagtgcccaagaaaatgcatgtccgtcgtgctaaccacccgttgtagagctataaaagaggtctatgttgaatattaatcataccatatgactgcttctacatctatagaagaactaaactcctttacaaggaagcagactatcagccaagacaaacaagtcgccaatgacgggtactttcattaggttaaaccctgacataatgggcaaaaattatttaaaaatcctaacgtaaggctgcaagcaaaaaaccgctgttcaattagacaaa

SEQ ID NO: 522082 - DNA, 1365 bp, Homo sapiens
  misc_feature (1057)..(1057): n is a, c, g, or t
ggggggctcagcccatagggtctcccagggacgatgcctcaccccccactgaacagatcttcctacactgcgtgctcttcggcccgatgaagtggccaatgagatctgcagcacactggagcatgaggacctgtgaatcgagcccgggtgactcggactacgaatactggactctggtccttcccggatgccacctgttgcggtgtcatgtagacacaatcaggtgcacatgcttctcctgaggcaggtgaggaacttgccaggacctcaatcaggcgtgctcttgcaggagcatatgagcacgaaagttgtagaactatgctggaactagtaactttggactcattttccttgcccgttccaagaggacaatgacttctacacgaggagcaacttgtttaacatggctcgtggcccacgtcttggggcaacgtggaacccattcatagttacgtgctccgtgttagacaggggcgccttcacttgtatcgttgttctagctattcgcaacgcttggctttgtcgtactctataggttgttctacattgattggtacggttcttggtttaggattgcgcacttggccgcatagctaccctggccccagggcgcgttcccgtaattgtcctcagctcccctgcttacttcttaggagagccacggagtctgggggcgtccgaaggctgggcccccaagatgtcgtgggcacacgtagggccaaacgtgtggttgccttcctctatgtgccccaacggtgataggactgtgcttacactggcgcgcgatatgtggcacccagcactattaattccatccgttgggatacacgccaagcgcggcgcggggggcaaacttattgcaacggcgctatgaggcccccttagcaacaacaaataatagcgagtagccgggcgattccttctcccgctaatgcttaccccggtgacctaaggtcacccaccaagttgggccaaggggttcttgcgttggtagggtcccaccaagaccaaggaggaattgaacgcccaccattacataaagttccccgtgggggtntggcttaagcttgccctttcaggccatctgtagtgcaatccaacaaacagggcttcttgggatcacagggaagggccgcaaccagaaggccttggcacggggcttcccacaccacgacttgcacttttgacagaaccgcactttttcacaccgtcttcagggagacctgacagttttcgcgcttgtgacacaaccggagcattcacagcgggtgccgcacacaacactattaccccccaccctcgtcgcctgtacttctcccacgcgtgccacatcggtggtgtcacacatatacaccccccaataga

SEQ ID NO: 522083 - DNA, 1038 bp, Homo sapiens
ggagtgagcgcggacgtgctggtgctgctgctgggcggccgcggtgcagcggatgggcgccggcactccggtccccgccgctccccgtccccgtctgctcctagcccctgccgctgtcccggcggagctgtggcaatgcgccacacacgcggagcctgtgccgtggaccgtgtgggccgtgaggatgaggacggctgggagacgcgacggggaccgcaaaggcccgtaagccccttggtggagaaagaagtcgggcgcgcgcggattcaacggaggagccttgcaaggagcttgcgggcttgcttgcctggtcggcgcgccgacgggttgcagggccaagcttggcaggaacggcccgcagagtgcttggaagctttgaccggtgtcgggcgggggtcccaaggggttgttgcctgggcggggggccctgggcgagcgccgaggtgaagttgcgccgcgcctgtgtactctgagtccagaggatgaatccgagcacagagaaccagatgaagaagaatgaccccttgtatataagacccacgttagtcaccaaaaaccagggaaacagggaaacttattgcacgattaccaccaggagcaaggacgacaccatttattataaccatattattatcacgagcaaagtagagtagaataacgggcattatcagcaacaacgggacaatagcaatcagtagtgtatcgtagggaccaacccccacagagatgatatacttacacctttgctagggttttacatacccaaccgacgggataaaagcacaccgaacaagtgggaagccaaaagagagtaagacagtcgcattagagagacaccacacagcacaaagataaacaagaccacagagaattagaagcaacgacagcacacgagcgagaaacactcgggacgaccaatattaataaatacacgcaatataacaacaaaagagaccactatcagcaacatagacccaaacagaaaaggagagcagtacgaaaatagccatatgaaaggggacgcgaaaacaacgaaaa

SEQ ID NO: 522084 - DNA, 300 bp, Homo sapiens
  misc_feature (1)..(1): n is a, c, g, or t
nacacacgccccaccaagagggcggaagacctctctaagtataagtgtgaaacgtgtgctccccaatgcagattccacgccagtacaagatcccagattggttcttacacacacaaaagattgtaaaggttggaaaatccagccgggtccaagccaatggtttggacaacaagctccgtagggcccttggtgtccaaggccagcaccccaagaccattggcccccgtgcccgccccgtgggtgtgtccaaaaagaaataagtctgtagcccttgtctgttaataaatagtttatatacct

SEQ ID NO: 522085 - DNA, 666 bp, Homo sapiens
aaataaattactgtttggcagggctgtggggggaatggagagacgtagctaatgaacatttacatataagtggtatcatacagtatatgatctttatgtgattacttcttcatatagcatatgttttcaaacattacacattacagtgtgaatcagtacttatattcctttttattgccaaataatatttactttattactgagacggcgttttactcttatttgcccaggctggagtgcaatggcgtgatctcggactcaccacaaaccccacctcccaggttcgggcgattctcctgcctcagctcctgagtagctgggattacaggcatgcgccaccaagcctggctaatatttgtattatttaagtcgcggacaaggatttctccatagtaggccgggacaggtctcgaatctcaggtgatctgccgcctcagacctcccaaggtgctagggatatacagagtgctgagccagcagcgcccggctgcacacataatatttcatatacgtggataatactacatataatccattatataggatcgatcaacatttgggtctgtaacccatattcacggtatataaatgtttgaaccatttatatgtaaagtccattgtaccgtatgcacacacaccccacatatatctcatatatatatctaa

SEQ ID NO: 522086 - DNA, 127 bp, Homo sapiens
ggtcggcccatattcaccgctatacaccaccaacaagtcattattacctcactgtcaacccaacacaggcatgctcataaggaaaggttaataatgacttgtaggtggtggtatagcggtggtatag

SEQ ID NO: 522087 - DNA, 129 bp, Homo sapiens
  misc_feature (34)..(34): n is a, c, g, or t
gtacctatatccataatgggcctgattgcaccanctacactgctaatctgatactcagtgcgcctgcttgatgctttgcatgactgcagcagtttttctgtattcgggcagtcactcaatgttcttgga

SEQ ID NO: 522088 - DNA, 150 bp, Homo sapiens
ggaactggaggctgcagcgagccatgattgcaccactgcactccagcatgggcaaggcagcaataccctgtctcaaaaacaaaaaaaagcatttattgagtgcttactcaatggtagttaggcactggcctggacactttgcatccagag

SEQ ID NO: 522089 - DNA, 144 bp, Homo sapiens
cgaacagtgtgcttgttggttgaagctctcagagagggcgggaatagatccgcggactctcttccacgcccccgaccgcactccgaacacctcacacgattgcaccctccgcgacaccttctcggccatctcctgcttcttggg

SEQ ID NO: 522090 - DNA, 144 bp, Homo sapiens
ctgtaccccaatcttcagcagacgacgccacttggtgaagtcggctccgtgcttcttgtacgtgtacacggcgctcagatagcccatccaactccttggatggtagtctcgcgatttgtccctgtcattgccccagcgatgctt

SEQ ID NO: 522091 - DNA, 282 bp, Homo sapiens
gcaattgcccagactgcgtcttcacgcagttcatctttgagaaattgggcttgttgcggtgaccagaaatccgcgtcaatcagctttacgtcatcgggcagggtgtgttcgccgataaaggcgtcaatcgcctcgggggacgattccagtccaagttgttcaaacaggccttcgagggtgtaagtcggcgcttccatatcgttctccatgcgggctgatcatcgtatgcatgggagggttgtcgacgcggccgcgaatttagtagtagtagtaggcggccgc

SEQ ID NO: 522092 - DNA, 518 bp, Homo sapiens
  misc_feature (324)..(325): n is a, c, g, or t
  misc_feature (423)..(423): n is a, c, g, or t
  misc_feature (457)..(457): n is a, c, g, or t
  misc_feature (494)..(494): n is a, c, g, or t
cccaatcggatcctgagtgatatatcgcccctgcagcgggtcataatagcggtggcggttgtaatacaggccggactcctcatcatactgctgccccggcagcggataagctgctgcagctgatgcgggttctcttcattcagcaggttaccccattcatcgtattctgcgtaccacgctgttgtcccttccgtgctgataagggccagcggcaggccgcgatggtcgcagtggtacaggtgaatttttcgcgccggcgtgtataccgggtccatctggctttgcatctgcgccaccgtcagccgcacgatgccagccagcggnnggctttcctcactcacccggtcagccaggattcatttccagccggtcgagcattgcaacagcacggcgggaacaacacactgccaacgtcttcgccanggactgtgaaggtatccgccaagctgcggcgtgnttttcgccagtcaacggtggcggttcaacctgatgantgggtggtccccggctgttcgtct

SEQ ID NO: 522093 - DNA, 666 bp, Homo sapiens
gaagcagtggtatcaacgcagagtgtccattacggccgggcgcggtggctcacgcctgtaatcccagctctcagggaggctaagaggcgggaggatagcttgagcccaggagttcgagacctgcctggggcaatatagcgagaccccgttctcccgaaaaaaaaaaaaaaaaaaaaaaaaagaaaaagtggtgtgggggggcgtggggccccgcgaaaaagctttctagagaaccatcgcgcgtgggggcgcgcgggggcgcccgagggagggaaggggaaacgcggggcgcaaaagcggggttcccaagagagaaaccgggggccaggaacaaggggcggggatttcccaccaaaaaaaagaccgcccgggggggacaaccggaagggttccggggaacaaatcccaagagagagggagtctcgggagggcgaccataagcggggggactcttatatcacacagaggggggagcccccaaggcgaagacctcagaattctctcaaaaattatagcccccccgggccccgggggggggggggaccccgacgagggaagcagaagaggacacgtacacaagagacaacggcccggcgactaccgaacaagaggaaacacaagaatgtaaacacaaagaagcagggcagctaggagaaaaaaaagggt

SEQ ID NO: 522094 - DNA, 105 bp, Homo sapiens
gtggctgagtgaaagatcacttgaccctggtaaatgtcaaggccacagtgagccgtaattgcaccactgcactctagcctgggtgacagggcaagaccctatctc

SEQ ID NO: 522095 - DNA, 119 bp, Homo sapiens
ccttgtcccttcacagtgccacactggggcccagtatcaatggacatcacctgagatcttcttggcaatgcagcttctcaggtcaccctgccgacctactgaatcccagcctacctttt

SEQ ID NO: 522096 - DNA, 192 bp, Homo sapiens
atgttgtaaatcagagccttaatcaaattggaaaggcagttactcaaaggactgggctacatattctgtaattatgcatttatgataggaaaatgaaatttttgcaaacagacattttctttttttctgggctggagtgcagtggggtctccggctgatcgtgaaggctaccgagctcgaaatacgtaaatc

SEQ ID NO: 522097 - DNA, 656 bp, Homo sapiens
ctccgtcaggaatgttttaatactgttgtccatattttcctcctgggtactttatatagtagaaaatgtttatgtaaaaatattataattatttccccacggtgacccctgagtaacccccatggtcccccgaggactcacagggccacagcttgttgctgtggggtgagagtcatctctattccacgagaggccaccacctttgccccacacccaattctttcgcccggttctttggaacactgttgagacccatttaagggtgccccaggtcttgggtgtaaagggatacattttattgccagacccattagcaccaaacttccctgaaatgccccaagtgcccctgcttagtagccttttggaaaaggtggccctctatttgaccacttcctacgaaggggtggctgggtcttccaggagtctcctcgtttttttcacggctcttagaagtgacactccgccctttttagacttggttctgttttcgtgaccttccccctggcctcccagtgatgcccatgatacccctgcctgccctctgtctgtcttctcctaattctggccgcgtggaggttgctagtttagatttcctttttgagataactattttcatttttgtgagcctcttcgtaataaaatggtacaattctata

SEQ ID NO: 522098 - DNA, 300 bp, Homo sapiens
gtatagtgatgattcgttatctaacttgctacagcttattgttatgattgctattatttatttatagtttgttttctctcttctaggagctttgccatgatatagaacagtccaggccaggcttgagcctccgcgccctgtccatatgtaccatcttttatataagatgatatagtcacagtgatgagagtcttccccacccctatagaaacttgtaggtgactagattagcgaaacaataatttatttgatagagacagggtctctgtttactaagctgaagaaaagaggggtaccgag

SEQ ID NO: 522099 - DNA, 860 bp, Homo sapiens
  misc_feature (567)..(567): n is a, c, g, or t
atgagccgccaagtcacatgccgatcatatagatgaaactcagcccgatgagctctaacagagggcctgctcagcgcctcttaactgagactcgggtctagacttctgctgagtttcagtgtcacagatccatgagacgcgtcctgctagtagcgtagggccgtgacgtaagcctgaagcacgtatgccatgttaccacatgaatggcgcggtgtgtccacgtagaaggcgcgattccataggtaatgcagaccagcgtgtccaaaagaagggtttcgcattcgggactaagtcgctattggtctagctgcagaaacgtgggtattcattcggcggggagatttgttgctcgggcctttgagcgactccatgactaggcctgctagcgcgccgcagatgttagtgagggacgacatgggcgcagcgatgcaggcactacacgccggactgaaaggtccccgtaggaagttcaccatttcgctaggaggagcctccgttatccaactcacagtcgggggggtatcaaactcatcttgcagctctacaccatagtctgagtgcgcagcnaaggttgcggatcaacggaattaattcgaccggcggtggctgtgatgcacaaatgaacattcgggggctcctcatattgtaggcctctcgtgacatgcgctcagatgtactctccgagtgctaccctgtcaccatccgtgcggagcgggtctacaggcgcaaacggtctgggtgtaggccgcagggtccccactggccttggaaccgcccattatgggggcttcaaccttgcgcccagggatatagctggcatccgggcaagctaatgggacagcgtccagagtgcagaatgc

SEQ ID NO: 522100 - DNA, 555 bp, Homo sapiens
ccagtacggatgtggaaagccccctctttctctccatcctcaaactcaactctgaaaatctcttgcttagttccttcacttctctagtttgacatgctcacctgcttccatatcttcccaagctggctgctgcttataaacatacccgagagagaagtggctggaagtaggaagagcaggcaagaaacaagtagtgggaaggacccagagtgtatagaaagtcgaggatcacaggtccttgagaacagggcatttttttttgcagtggtcaaaaggagagacagaaggcagagatcctgggcacaatcccaaaatagtttccagacatcctcagccagtcaagggttcccatggggcagagtgtgggagccgtgtgggagccttgaaagcagggcggcccggtgttctcggcactgggcactcactcccctccaggctgccaacgaggaggtggtagcaacagtgtctgctatagcgtgttccttgagatatcacgggtagacatgtaatgcaccaaacaataaaatgtcaacttgcgtttatcaagctcaactc

SEQ ID NO: 522101 - DNA, 187 bp, Homo sapiens
tgtaatcagctcgtaccattcacacatcaagtgcggttgactttctcggaccaacacatgcaatcatggtggtttttctctctcctccgctgccatgcgtcgatcactgattgtgatcgctccgctttctccaaaacctcttaccattcaagggtgcaccgatcaaactgccggtttctaggccgtg

SEQ ID NO: 522102 - DNA, 146 bp, Homo sapiens
  misc_feature (4)..(4): n is a, c, g, or t
  misc_feature (35)..(35): n is a, c, g, or t
  misc_feature (51)..(51): n is a, c, g, or t
gtgnttttgccaaacccagggcctcagcgaccatnacttctgcttaaaagnaatcatgagtgcgtggctggggacagacctctttgaagtgtctcctgttgtgaggggcttcactttggagccactgaagagccgactgtgccacc

SEQ ID NO: 522103 - DNA, 1156 bp, Homo sapiens
  misc_feature (333)..(333): n is a, c, g, or t
  misc_feature (725)..(725): n is a, c, g, or t
acgtaatttatggctgaatcatgcgctaccttcacgccaatggcgcctcaagattcgttatctgcctcttcctacacatcgtacgaggcctatattacggatcatttctctactcagaaacctgaaacatcggcattatcctcctgcttgcaactatagcaacagccttcataggctatgtcctcccgtgaggccaaatatcattctgaggggccacagtaattacaaacttactatgcgacatcccatacattgcgacagacctaggtcaatgaatctgaagaggctactcagtagacagtcccaccctcacacgattctatacctttcacnttatcttacccttcagtattgcagccctagcagcacttcaccttctattcttgctccgaacgggatgcaacgaccccctaaggatcaacgtccgattccgataaatcacctttcaaccttactacacattcaaagacgccctaggcttactctattgcctgggctcctaatggactataaccactatctaacctggacctcctaagcgaaccaagccattattaccctagccaaccccctaaacaacccttcccacatcaagcccggatgatatttcctatcggctacacaattctgcggaccggccgtaacaaacttaggaggcgtcttgccctagtactatccatcctaatgctagcaataacccccattcctcatattcccaacaacanagcctaatattcgcccactagccatcactttattgcttctaagcggagcctcccattttacctgaatggaggacaaccggaggtaccctttaccatatggacaagtgcatccgattatctaaaacaatctaacctataccaattttccctaatgaaaccaaacttaaggggcacaaaaaacaattggctccttgcaatcccctttggggggatcaataaggggcgttttaagcgggcggaaaacctgggtccaatatagcgtgggaaaacccttgcggggtggaaaaaaagagcccccgtcctttcaaaggccccttgtggcaggaaaggggttttttaccggaattgtgaagctttttaccgggggggggactctctataaccccggtggggggtccctgacaacactttgaggcccccagggggacctc

SEQ ID NO: 522104 - DNA, 207 bp, Homo sapiens
tacggggttgacgactgacgtgtgacggcgtataatacccactacgccgcctagtttaaagacgtaccggcggcaacgtacctactggaccccaggactgtgggacctgggcccaggactgttggacctgaccccaggactgtgtggactgaccccaggactggggtacccgacgctcgacattcgtacatcatgggtcatacgctg

SEQ ID NO: 522105 - DNA, 332 bp, Homo sapiens
acatggggcatggatgtgtttttaaatgtgaggacatgagatttgagagagggggctgtgacagaatgatatggtttggctctgtgtcccctcacaaatctcaccttgaattctaataatccccaggtgttaagggcggaaccaggtggaggaaattgaatgatggaggcggtttcccccatgtggttcttgtgatagtgaggttcatgagacctgatggattcataagcgactggcatttttcctgcttgcatgcattctctactgtggacctgtgaagaggtgccttctgccacgactgcaatgttcttggcgcctccccagccatgtgg

SEQ ID NO: 522106 - DNA, 255 bp, Homo sapiens
tgaccgggtcaatgtcccgctgcttcctggctatggctgagagcgtggcctgcggtgcgcacatccgacaatggctcgtggtctggcgtccatggtgctctcccggttgctcaggctgccgaaagaggagtcgccgctggacgtcccatcgtgcctgaagtggggatcaagagatagcaggggctgtggggcagccgtgtacctatactgggggatggcttgtatctcacgtatgttgcccaacccggtggtgga

SEQ ID NO: 522107 - DNA, 1531 bp, Homo sapiens
ggaacaagcgccttactataggcggctataaagggagcgcaagtagacgaaatgctaggctctgatccattttctaagaacagattagggatgagtgtgacaagcgccttgcctcatgttcaatactaataaatattgggaacagaccgcttgcgtacactaggactccaaagtgggaccacaagaatttggatcctgatcggtctccacggtgatcgtgatgctattgcaagctggaggtcatagcagtgaagtctatgccagagagatgagtgaaagctatgcgaatattgagaaacaatgtcaacgactgcagttgacatgccaagtactggtaccagtggctagaaaatactgacactaaatcctatactatccaatgtgacataatggaaatcatataactcgcgctgcacctacatagtgtctgattccccattggattcaaatataaatctgtggagggaactaaactgatttagaaaccctttcgaacgatttgcattgggtccacacgcaacataacccggtgtgagatttaacttgttggatattcgctccttagatatacctagatagtgtggggttattttaccctaatatacacaaagcggtcgaaaacaaaagtccaagggaattagctgagcacaaggaacccatccttttaattgccctaccagtgcaactcagaactaggggttcccggccacgaaagattcacgggaggaaacgaacactgaattggatggggaccaacgtcccaatgtgaattccccgcgaagaatgcgttcgctagggactataacactcggaacctttcgggagaagttgcaagaaattggagttcgatctaacccacttttggaattatacacaagcgaatgcatgccactttagggaaaatccactaacattaagaaattgagggagtttatgagcgcaaaggtcctacatttttaatcccctccatcaccaagttggactaggtactctcccggtccttagagaaaggaacagggtcctacataagttggcacttgtacctggaaaaggctctcacaaaagttcaagaaacatgtgtgggacaacaggggcctccattgtgaaggctttcactgtatgggcttgcactgggtcggcgacaagaggttacttggggagaagtacgaccaattctgtgtgggcggacactgcattgacacatgtctttggcgtgaacacatcgtcttggagaacttgaacgcctggatcgagggtcattggaaaatcccacccgaaggaaccgaacggaaaaccatagggcggagaacacggtcgacagacactaccaaccattcgtttgggccccacgctgaccaaaacagcgcgccaatgtcgtgcgaaaagacagcagtaccaccacgacacacatgagcggagatcacataacaagagaggacggcgaacaacaacgggacacagacaacgcggacaagagagacaaaggagaaacaaatgaaacaaacaccaaatggagacagcaagagagaac

SEQ ID NO: 522108 - DNA, 335 bp, Homo sapiens
ggagctcctctttgcagcaatatatcttcaattgctgggccttaaagttcccacagaggccgggtgtggtggctcacccctgtaatcccagcacactgggaggccggggcagatggatcatgaggtcaagagaaagagaccatcctggccaatacgatgaaatcccgtctctactaaaaatacaaaaaattagctgggcacggtggcggatgcctgtagtcccagctgctcgggaggctgaggcaggagaatcgcttgaacccgggaggtggagtttgcagtgagccgagaccacgccactgcactccagcctgggcgttagaagcaatccgtct

SEQ ID NO: 522109 - DNA, 431 bp, Homo sapiens
  misc_feature (6)..(6): n is a, c, g, or t
  misc_feature (13)..(13): n is a, c, g, or t
  misc_feature (91)..(91): n is a, c, g, or t
  misc_feature (178)..(178): n is a, c, g, or t
tgaaancccctangggcctgccatcccccagatagttaaggccattccctaagtccacaggatgagataggaggtccagccacaagatacnggtccgtaaagacccctgcctgatgaaacaggttgccaggaaagaagcccagcccaaaaccccactgaaacccaaaatagtcacaancaggtgacctctggtcatccctccctgcctacattccccacccagtgctgtgacagtttacccaatgcccgtgacatcaggaagttaccctatatggtctaaaagggggaagcatgaataatccatcctttgtttagcatataaacaggatataaccgtaaaaataggcaacaagcagcctcacggctactctatctatagagaagccattcttttattcctttattttccaaataaacttgctttcacttta

SEQ ID NO: 522110 - DNA, 253 bp, Homo sapiens
  misc_feature (1)..(1): n is a, c, g, or t
  misc_feature (116)..(116): n is a, c, g, or t
ntgaggatccttctatgtctcgatcgttacaaaacttcactgacagggcttgggcaaggttcaccatgaaagcagaaatgtcacaaaacaatggaggtggggcctttggggctaanctcaaatgggtcctttcctttggtagttattcttacaaccaaaatttacacgttagaattttggttgtattgtgtttggtgcttcccttgtccccttaagtggccgggaagggggggaacttttaaactttttcccc

SEQ ID NO: 522111 - DNA, 1418 bp, Homo sapiens
tgtggtgggaaccagctccctgcgaagagcagcccagctgcagagcaaagttcccgtcatctggagttcaggagtattcggggcaaacctcaacatcccgagcttacggtaaagctaggagcgagccagccaggcagtatcacgtgtccgatacatatccgtgtgtcgaagctaagccctagggcgcgtgtctagtcctgcctattgcgcgactctgagtccgtacttaactctgagcgcctgcgcgcgcccagtcagtccgctgacccacgcccgtgccagcgccacagttgtcccacttgacttacttggccctaggctgcgcgggccctatggggccgcgcccctcgctctgctgctgcgtctccgtcttgcggcaccatgtcttgcccctgtacgttccctgtatgtgtgtggctattcccgtgggcgctatctctcgttctttttggcgccacgttcctcggcgccctgcggggccttcgcttggccgcttggtgcgtccccgcgaaacttccccctgggttcacgtcgaatctcttttcggctaggaccccgtttgttccctgtgccttctttgtgtccctacgtgtttcccgcgctcgtttcgcgcatcgagccagcggcgggtcggcgctgcccgtatgtcgcgctcgctttggcgcaaggtcggttccctagtgcgcccgctttggtcgggctggccttacgcctggcgttcatgggtgggatccgtttttggagcctcatgcgagggcgctggcggtcgtgggcgcctccaccccacgcgctgctttcacagcggcgcgccgcctggggtgcgtgagggcccgcaccacggtttagcacgccggatcgtggtccgtgcttttcatgtttgtgggccatctcacgcgtcgtgtggtccaacttttttggtgccgggtcgtgcccctgcagcagtgcgccggctataggggctgtcttaatgcgccgcgctcccgtatttggtgcatactccgccagttgggtctgcccctacgtcgtgtccgggcgactatgcgcgttttcgtcgctatctgggccgcgctccatccggtgatcactttacctcgatttggacagcgggccgtaatcacccgcggagagggagacaccaatttatcacgagcaagtgcgccaacagctgtttaaaccgatgcgcctcgacaggcttataaccggcccacaactacacgggcgccacaggggacatatgccgtccctgcaacctttgttgtgccgctcatatctgagtgaccaccgccattaaacaccccgacggtaagagtattgctcgcctcataagctatctgaggtcgttaacgccacagccaccgtattgtggactgcacaccacgactacgacagagaggctctacactgtatcagccgaccat

SEQ ID NO: 522112 - DNA, 326 bp, Homo sapiens
gggcaggttcagaaagggaaaggagtgggctagaggttttatgttttattcacacagcatggaatattgaactgtccatgataaatggaggcataatgtaaccagttagtatttcaaacatttacaagcttctccatgttcccttgtactttaataagagattgagtgacaaataattttctagaactaaaagagcacaatcttcagtgatctccccttctcaatataattttcttttcttttttttttttttttttttttttttttttttttttttttttttttttttttttttttttttttcaacaagggaaaaaaaacctttt

SEQ ID NO: 522113 - DNA, 228 bp, Homo sapiens
gaccaagtaccacagtaggatgaatatagcagttcgtaccgtagcaagcctaatataatcattctgtaagtttaactatttagtattatcctgactactaccgtattcctactgactcaacattaaatctaccagcatccacgagcctactattatctcgcacctgaaagaagctaacttgactaacaccctttattccatccaccgctcccctccctaggaggcctg

SEQ ID NO: 522114 - DNA, 412 bp, Homo sapiens
  misc_feature (3)..(3): n is a, c, g, or t
  misc_feature (62)..(62): n is a, c, g, or t
ccnattaccattaagagacgcagggccttcaggcagactcggagggtgtcaacgcctgtaancgtgattttttattaaatcctgttttaaaacgggatggacttttattgatggaaaaaatcacgttagttagaagctctcaaagtacctggtatttacaactcctgtcagggagggcgaactcgatctcagagttttattttcatcagggattacgttgaggtacccagaatgagaagatttgcccaaatggcatattttaaaattggcccagaccagaacccagtttcctctgggattatttgttagtaatcgttttacaggctgagcatgtaactccaaagcttgaaggactttttctcattttcacttgttttctctaataaaaataatgctgtaatttcaacttcac

SEQ ID NO: 522115 - DNA, 932 bp, Homo sapiens
cttggtagacagtaatcatcacgagaaaaaaaaacaggagcgcgtacgagttcgttgtgcgtttgtatcccacgctttttggcccgcgtttctcctgttgggggtcctcgcttgcatatatggtgccgaaactcctggtcctttgagaactttcacgctggggacaacaaccggtcttttcaaaagcagtgttctagcaccgtgggcccccaactaaggactcgccaattcctttatggtgtcattaagacgccacgcgtcgagattgatgctaatggctcgaaaactggttccgcttccagcgccttggaccccgcatttcgtccggggacccaaaacccagtcgaaaaaatggcgccggaagttcgtcagacgttcccgcaagtattttcaggcagcaagagagcgccctttcattgcagatctctctccacggggccccccgtagtctcaataattccccccggcggcagaaatcaaggtatggttgtccccactctgccgcccctgaatgtggaagaaagacttaaccattgttcgaaagtcccttcaaattggctcttggaaaaaatttgcggggcgcaggagcacccaccgcgggtgtgaatttgtgaaaaaaggtgggagacccctactgtgaagtggttttgacagagaggaaaaccaccctgcggtgtcggggtagccctcatcaatagtcagtttttgataagcgcccaagagttttcccacccccaggaatgaagccagagaaatatttttggccacgagatccgtttggggaccaccattaagcggagagggagcttgatatattccatacgctcatgacgcctatcgcgccaacctcccacacacccaggggacaaaataacaggggtttacataaagcccccccccgcaaggaacacccgaaaccccgcaacataaca

SEQ ID NO: 522116 - DNA, 727 bp, Homo sapiens
tccccctcctcttttttttttgccccaaaaaaccaaataaacccccccccccttttaaacggggggggagggagagaaaaacgacaagaacccgaccaaaccccgcggggaagaccacccacggttccggcgcccccgcgcatatatatacgcgcgcctcgcgtgtgggagattacgggtgatacacacatgttgtgcgccacggaggcggcgggggaggagagaggagaggggggggagcgcgctctcctcggggggggcgagatcgtggcgcacactgagagagcaccccctctgtgggagagagatataccacagagagggtggagagtgtggagagagagagcgcgcaccatcgtggcgcgcgcgcgagcgggtgttctctcgtgggggagacagcgggtgggtgcttgcgctcccccacagaaaactactatcgagaggggtgcgtgtgagagagagggtggtgtgtgagggagcgaggggggttgcccactccctcaagaggtgtgtctaagggagagagggtgtgtagactcatcgagaagagtccacatcgaggagagggggggggcctctcccgtgcgggatgtggcgccctaggagagggtgtagtgcgcagcccgagaggagtgggaaagaggggggctgaacagaaagagggttgttttaacacgcaagagaggggctcccacatagacgaggggcgggggagaaaaagatgaat

SEQ ID NO: 522117 - DNA, 110 bp, Homo sapiens
gcgcctgtgacactgggtcgaaggagttctggccgacaggaggagttcatgaattgtctgctgttggacactgttgtagattggtacgacatgatgacagctggcctttt

SEQ ID NO: 522118 - DNA, 309 bp, Homo sapiens
  misc_feature (132)..(132): n is a, c, g, or t
acagggtcttgctatattgcccacactgcactcaaacacctgggctcaagctatactcttgcctcaacctcctgagtagcagggactacaggcatatgccattgtgcctgtaggtctcacatttaatgtganatttactctcttaacagatttttgagtatacaatacaatacaatatcacccccagtgttgtacagcagatctctagaattcatttatcttatataactgaaggtttatacctattgagtagcacctcacaatttcccctttctcccagcccccagaaacccttctgtcgtcttctcc

SEQ ID NO: 522119 - DNA, 513 bp, Homo sapiens
tcggatacataggtatggctgagctatgatatcaagtggattcctagggtttatagtgtgagcacaccatatatttacagtaggaatagacgtagacacacgagcatatttcacctccgactaccatagatcatcgtctatcccacaccggacgtcaaacgtatttatgctgactcgccacacatccacgtgaagcaatatgaccatgatactgctgcacgtgctctcgagccctcaggattcatctattcttgttcacctgtagagtggcctgcactggacattgtatatagcaacactcatcactagaacatcgttactacactgacacgtactacagttgtacgctcacttaccactatgtcctactcaatagtgagctgtatttgccatcataggaggcttcattcactgatttcccctattctcaggctacaccctagaccaaacctacgccaaaatccatttcactatcatattcatcggcgtaaatctaactttcttcccacaaca

SEQ ID NO: 522120 - DNA, 138 bp, Homo sapiens
caggaagcaagcgtccaaactcacagagaaagagacctcagcctctaactgatcactcaaatccgacgtcaatccctctattgaaaaaaagttcacacatagtctcccctcagcttccccagtcgtctgggcgacagg

SEQ ID NO: 522121 - DNA, 113 bp, Homo sapiens
actaaatttcatgtttccagtccttctccgtctagttcattctccacacagcatccaaagcggttcttttaaaaaattacaaatgaaatgtgctcgcggtcctagccatagga

SEQ ID NO: 522122 - DNA, 363 bp, Homo sapiens
  misc_feature (87)..(87): n is a, c, g, or t
  misc_feature (110)..(110): n is a, c, g, or t
  misc_feature (246)..(246): n is a, c, g, or t
  misc_feature (327)..(327): n is a, c, g, or t
tcgcttccggtgcgaggagaaaatgtggagataagtaagacgccctacccggtgttgacccgcatcgggttggaaaggtccttgcgntaccccatccagctcttcccaantgccagcttggtgtgccggaaacccaagggtacaaaagtgcaggtggatgacatcaagcgggttttctccctttttttgggggagtccccctccccccagtacatgaaggaggaccagggccccttcctttttaangaactcaaaggggagaccatggacccctcctgagttggatgttttccccccccccccccctgttttcccccaaagttttgnccctgtggcttgtataaaatggttgggaagctgcca

SEQ ID NO: 522123 - DNA, 133 bp, Homo sapiens
acgacgtcaaccgcaatgcgtctcacatactgcacagcaagctgtattcactttcacgccggatctttatatgttgggactgcctgtccattaacacacaccctttctgcatcagccgtgcacgtcacccaag

SEQ ID NO: 522124 - DNA, 899 bp, Homo sapiens
gcccagctcggagccagtgcaactccacctccgtgggttcaggcagttctcgtgccgagcctcccaagtagctgggactacaggcatgcgccaccacgccaggctaattttgtattttgagtagagatggggtttcaccatgtctcaaactcctgacctcaggcgatccacccacctcagcgtcccaaagtgctggcattgataggcgtgagccaccgacctgggctatgagtggtcttgaattaggaacaaatctaatggaaaggagagttgactgaagtaggcccacaggatgtgtgagctgggcagtgccttcatgaaggctagccaccttgggacgccccagtttactggggtgtcttgcggtagtgctagaagggctttctggctagctgcctgggtttggcctagaccctgcctcccctcccgccggccaacccctagtccccttacctgtggtccactgtgcattcaggggtggctgcgtgtgtctgagaacattaccaccctgggaagagcagatggagtcacactgggattcctggtgggcattattctgaagctttgcgtatccagttgagtcccccttattccagctgtggcattgccgttctacgcagttacctgatgcctgtgctgaagagctgctcacaggaggcggcggcggccctggcactgccccttgcattaggtctggggtacgctgtgtctggccaccttccctttgtccgaccagaatttaccgttgggtccaggacttctttagggccccactggctggtgattccgagacctccgtgcttgtattaccccgttgggtccttggcccagggcttgcccctaaggcccccgtgtgaccccgcttccacgttcaagcgccctgggaggggcccctccca

SEQ ID NO: 522125 - DNA, 236 bp, Homo sapiens
tcccgcgttgtctacagagaaacatctagcctaggtgagtgttgtaaggagagctggcatagctatagcacggactagtgccacgatctaccatgagtctacgccgaaggagcaattctaaccacacttataattaggggaggcatgtgatgtcgcactgcctctcctcctcttatgggtagtcatcagtgccctaatgggaccactccttgtagtacgtcaccagtgaccatgtc

SEQ ID NO: 522126 - DNA, 183 bp, Homo sapiens
gagggcttcaacggaacctttaaggggttacaggattgttctaactcctggggtcaagcaatcctcctgcctcagcctcccaagtagctgggactacagtgcacattgctatcgcactaggctaattaaaacaaaaaaaaaattatcagagcatggggtctcacatagtgtatgccccaggct

SEQ ID NO: 522127 - DNA, 547 bp, Homo sapiens
cgtatttggaaatcaagtttatggaaatacagctgtgtctgcttgtttatgtgctgtctgtggctgcttttgctctagaacagtagagttgaatacttgtggcagagactgtgtggcccacaaaacctaaaatacttactatcagggcctttacagaaaaaattttctgaccccttatctgaacaattcaaggaaatttctagacatcagtttctgggttgaaagggcccccttggtgcctatcatattggatgacagatgacctacaccaaggcatattattgtgaaggttcagactaatggggcagaagttctaaaaggctctgaagagaaaaatcaagaatcattgtgccactggaccccttagcaacaatactggaagctaaaagacattgatgctatttcattaaaaattctagtggaggctgagcatggtggctcacacctgttatctcagcagtttgggaggcagaggtgggaggactgcttgagcctatgagtttgagaccagcctgggcaatgtgacaagagcctgactagatttaaa

SEQ ID NO: 522128 - DNA, 364 bp, Homo sapiens
tcatgcttttgaaataatctacatgctactccatcttcgatgaacaaattttgtatttaagccagtcttctataatgaacatttagcttgttcctgtgttttgctactataaatgatgcctcaataaaacttggccattcttcatttcagtttggcataagataaaaatctggatgttaaattgttgggtctaataggtctgtgcatttataaatctgatggattctataaaattatcctccataaagactgtcctaatttacattcccacacaaaattcaagtacctatctccccattcaggctaacaatttgctaaatttttattttcatcaatgtaataggtttttaaaaaatggcatctg

SEQ ID NO: 522129 - DNA, 107 bp, Homo sapiens
gaaaacggacatagaggcggggtttcatcatgtaagccaggcgggtcccaaactccggacctcaaaccatccttcggttccagcctcttaaggggcgggggtgacag

SEQ ID NO: 522130 - DNA, 1100 bp, Homo sapiens
agcggcgtcgccaggagcagagtgtgaagacagtccccggagccagcgatcttttttacttgggcaaggagagccgggaaactccagtgttcccaccacaagcccctgtccaagacgggcaatggactggcggggcacgaagggtggacaattgcactcccgggccgggctgctggcccagaatggatccttggggtgaaggaatccatgagcctggggtgtccccgccggggaaacagcacgaaacggcgtgtgagacttgaagaaccccttctaaccgctgaaccaggagtcctatgtgaggcctacgcgggtcatgtgtctggtccgtgggtgatcttcgggaccggcatcattgggaacactgggcggtgatgtgcatcgtgtggcacaaagtactacatgcggagacatctccacaatccctcttgggcaaactgggcttctgggaactttactcaattcatcttctttctggcttccgctgggtcatcttccaacgaagctgaccaagaaagtggctgctggagggacttctccctggcaagaatcggtgccctatatagagggtcggttctctgggaaatcaacaacctttcaaccttaatgtgctctgtgcatagaaccggatttccgttgctagacacccagaagtaccagatggttcctacgcagatgatcgcagaactggtccctcataaaagtgggcaaacttgctgggatatagggtgggagcactattgttaaggaccttcacagacaggttgggtcatcccggcaggctggatgccacgggaggaaaatggggggggtaaaagtgggacgaaacacccggggaggaaaaggtggggagtacatgtaacagaaacacgtgcgtaaaatttaaccagaaacccacaatctaattattctagagcccactacaccgatagaaaagagggaggcaaactgagagggggaaactaaggggaggagcacctataaggataggcagcaacagcgtatttgccagctcaaacccgtgggcacgtatgcagagcgagggagaggcaaaaccagccgaaggaagtagaagaccgggagcccaggggggaacaacg

SEQ ID NO: 522131 - DNA, 365 bp, Homo sapiens
  misc_feature (31)..(31): n is a, c, g, or t
  misc_feature (64)..(64): n is a, c, g, or t
  misc_feature (75)..(75): n is a, c, g, or t
  misc_feature (81)..(81): n is a, c, g, or t
  misc_feature (103)..(103): n is a, c, g, or t
  misc_feature (195)..(195): n is a, c, g, or t
  misc_feature (215)..(215): n is a, c, g, or t
  misc_feature (224)..(224): n is a, c, g, or t
  misc_feature (260)..(261): n is a, c, g, or t
  misc_feature (264)..(264): n is a, c, g, or t
  misc_feature (303)..(303): n is a, c, g, or t
  misc_feature (305)..(305): n is a, c, g, or t
  misc_feature (363)..(363): n is a, c, g, or t
gcctcaacttcaccgcagaataaagaatgtnggccaaagaatgcataatcggtcactcgtatanaacagtattgnaactanaatttgaagctttctgaatggncgggttcaggcctgatgcaactgtaaaaagattacttaatgaatagactatatggaaattgtataaaatgttattaccttttatcgttagtngcttaaacagcactatatcnctaattgcnattcaaaatcaaaaacctgtttttgaatccccaagnnggnggcatgtgtatacaaccatacccccttgtacttgggggngngtctaatcttaattcaacagaaactttggctttaggaaagactcacaaatatttaaanga

SEQ ID NO: 522132 - DNA, 131 bp, Homo sapiens
tcccaaaaatttatttacaaaggcttttttttttttaaaagttatgggaaaggaaaaaaaagggtttgctcttcatttactaaaagatgggaaacttgggtttttcatcaaaaaaaaattcccttgtttta

SEQ ID NO: 522133 - DNA, 319 bp, Homo sapiens
tgaacgctagaggatcccaccaacattggctcgatgctcgttgatctctctttgacagctgagttaggcttgtggtcgccaaggtgtacaacgctgttcgtgtaggcgcctggggctagatgaattaggttcgattggtagcaaaagagatggcgttcaagcccatggctaattggattctggagaacgctgcatagagctcgtctataccactacccttgccgtggaggctactgaatgctcgatcctgctgaatgttgaaatggccgatgccctgatggaaggaggtactgatgctgtgaatgccggaaaagattgc

SEQ ID NO: 522134 - DNA, 116 bp, Homo sapiens
ctggcagccacagattcccttctttcctacacaaatcccatggattctgctttctgggtcttaggattttaaaagtgccgggatatttttcttctattagtggggtaccgagctcg

SEQ ID NO: 522135 - DNA, 240 bp, Homo sapiens
attttccttgtcccttgttaggtagttaacctgcagtacagcgaagttcaagatcgggtcatgctcactggccgccacatggttcgagatgtgagctgcaaaaactgcaatagcaaacttgggttggtctattagtttgccacttaaggcaggcaacgcatatatagggagggccgtgtatatcctggacgcgtctctctaggtcgcgagagagtaagggtctgagagggcgcatatccc

SEQ ID NO: 522136 - DNA, 139 bp, Homo sapiens
gctccatcgagtatcccctagtcttcgcattcgtcggccgtcagggcatgtctagagagttgggtcctagagagaatccgacacagcaccccgaccttgtccctggtccgagcactaggtcggcctggtgaacctcctc

SEQ ID NO: 522137 - DNA, 351 bp, Homo sapiens
tcccaagctttccacatgcccctccttacagggtacagaaattatcccctcaaccccagcctctgagggtccatgtaaggtccattttcagttccctccgccaggatgcattgtttttagcccgaggtggggacggccctccctccagggtatggagcacgctatcccgccttctcagggccctggggatttgcccctttaccttccccaaaggatggtcacacaccagcactttaacatttggtcacagaaagtgttgcagtaggggacccaagtcccaggccctgagttgttttcggcaggggccttgtttccgcatttggtcagcggggcagaaaaggccggtacaaa

SEQ ID NO: 522138 - DNA, 447 bp, Homo sapiens
  misc_feature (122)..(123): n is a, c, g, or t
  misc_feature (247)..(247): n is a, c, g, or t
  misc_feature (281)..(281): n is a, c, g, or t
ccctaatgctgaatctcttccctgtgctgaagaaaactcccagacctcccagccactggaactaaaattggcatccagaggtccggccttcagatgaaacgatcttcaagcaagcagacaannttgcgctccctcaggactgaccagaggctgtgctttggggaactcggaccactgcgaaaaatctgagaagtgatgatcgttccaggactgatctgaccacccggggcgtccagcatgattggtnggggtcctgcccgcaccctctcacccctccacgnagaggcacggtgggagagcccctgcccaccccggatgagcctgagactccagcctgaaatgaagttgctgaaatgagccctttccccagccgttcagcagcctagctgttttaccactgaaataaagtgtccaatttatcctgccattttgaggaagctgttttca

SEQ ID NO: 522139 - DNA, 244 bp, Homo sapiens
ccccattattgttcgatcaggttggcacgaccttgcgcttagtcgtcctcagtactaggggcaggcacgtgaacgatggtctctccccgctcctgcgtgtgatgagccctgagtagcctccccaggtcgtcatcttatgtgtgttttccaccatgcctggctaattttgtatatttagtagaaacagggtttcaccatgctggccatgctggtctcgaactcctgacctcaggtgttccaccta

SEQ ID NO: 522140 - DNA, 773 bp, Homo sapiens
ggtgagtgagaatatgcagtgtttggttttttgttcttgcgatagtttactgagaatgatgatttccaatttcatccatgtccctacaaaggacgtgaactcatcattttttatggctgcatagtattccatggtgtatatgtgccacattttcttaatccagtctatcattgttggacatttgggttggttccaagtctttgctattgtgaataatgccgcaataaacatatgtgtgcatgtgtctttatggcagcaggatttatagtcctttgggtatatacccagtaatgggatggctgggtcaaatggtatttctagttctagatccctgaggaatcgccacactgacttccacaatggttgaactagtttacagtcccgccaacagtgtaaaagtgttcctatttctccacatcctctccagcacctgtggtttcctgactttttaatgattgccattctaactggtgtgagatggtatctcattgtggttttgatttgcatttctctgatggccagtgatgatgagcattttttcatgtgtttttggctgcataagctaaggtacctttttccaaaccagcccaagagattgtcatcttcttgctcaaccattcccttctctaccttaatttctaccaggaaaggagccttgtaaaagcgaaagctgttcctagtaaaaggaaatcgagatgatgttacatcgtcccacttgggattcatcagccaacatattcgcttcgagggaatgtatgctccctaggttctac

SEQ ID NO: 522141 - DNA, 282 bp, Homo sapiens
  misc_feature (20)..(20): n is a, c, g, or t
  misc_feature (277)..(277): n is a, c, g, or t
gcaggctagttcattcacgncctgaaacccattttaataggtggatgctttcagtgtggttctttttgttgagttggtttttgtgtccccatcctgcttcccagcctcttgcatcagtctccaccctttagccatatgctgtaccgtagtcattgttttcttcctaccgtgtacaacatctcaccacgaaacagcagcatggggccagcacttggggcccaaaagcctgaagtctgaagaggaaggaagcggcagtgcaagcgtcactgcagaggangccgc

SEQ ID NO: 522142 - DNA, 108 bp, Homo sapiens
gcccggtctctggttgaggcgtcgggtgtctggatacgggaagcggagttcgggaggaggcaggagcaggattaggagtgtgtgggggatgatcaggaaaaattgaca

SEQ ID NO: 522143 - DNA, 199 bp, Homo sapiens
taaaacgaggcagggaggtaggatatgaaaaagacggaggagaagaagaaaacacagaaacggaaggcgggacgccaatggcgccacgacttgtaatccagcactttgagagggccgaaggtagggcggatcaccctagaggtcaggagttccaagaaccagccctggccaacattggtgacaccgcccatctagtccc

SEQ ID NO: 522144 - DNA, 234 bp, Homo sapiens
  misc_feature (13)..(13): n is a, c, g, or t
  misc_feature (56)..(56): n is a, c, g, or t
  misc_feature (89)..(89): n is a, c, g, or t
  misc_feature (98)..(98): n is a, c, g, or t
  misc_feature (161)..(161): n is a, c, g, or t
  misc_feature (219)..(219): n is a, c, g, or t
ggtgaatcttgtntttattttttaaaaacaaagtaactttcgatgtgatcataccngaaagttttgcgtggtcaccatgccaagaaatnactttggtngcccagcagatccacagcgactctttctcaagggctactgtggttctagttgaggaaggggcnttaggctcagtgctggtatcctccacagtcctttcttccagctctggcctcctttggncccaggaaatccctc

SEQ ID NO: 522145 - DNA, 251 bp, Homo sapiens
taaatgggaggttgttgaccaaaggtcataaagttttacttatgcaagacaaataaggtgagactctgtctctacaaaatattgtaaaaattagccacatgtggtggcatgcacctgtggtccaaactactcaggagactgaagtgggaggattgcttgagccctggagattgagcctgcagtgagttgtgttcactccactgcactccagcctgggcaacagagcaagaccctgtctcaaaaaaaaaaaa

SEQ ID NO: 522146 - DNA, 196 bp, Homo sapiens
gtacgtcggaccgacggtgacaggcgccggtggttgtgcggttgcggtctgttagtagtctcgtgctgcccgcagctcggcctgggagagctaggcccagtaggcctgctgtaattcggacggatccgccgacgtcggggcgtttggtattgggtttggtccgcgcggggtaccagagacacgaaattcgtaatcc

SEQ ID NO: 522147 - DNA, 248 bp, Homo sapiens
ccgccagcgtctgtgtgtgctgggggtacagcgggaacgccctccccagcctgccctgtgcatgtgatgaagaggggtgccaggctgtggtgtgtggatggggaggaggcggcggcgccgaggagcctctcctgcgtccagggtcgccccctcctcagcctgcccaatgcgggctcgcggggacctgccacattccatcgcccccgctggaaaagccccccggctgagggggtagggggtgggggtcc

SEQ ID NO: 522148 - DNA, 841 bp, Homo sapiens
cagcagcaagagcctggctaggccaccgtacggaccccggagcagcacacatggcatccacgatcatggccgccgctcccgcgccgttgtggccaagaccccgttcctcagcggccaggccgcgccgccagcgccaccccccctccgcgacatcgccgccgcggcaacggcagaatcaccatgggcaacgacttgtggtacggcccggaccgcgtcaatgtacctgggccccttctccgcgcagacgccgtcgtacctgaacggcgagttccccggcgactacggctgggacaccgccgggctttctgccgacccggaggcgttcgcgaggaacagggcgctggaggtgatccacgggcggtgggcgatgcttggcgctcttgggtgcgtcttccccgaggtgctccagaagtgggtgggcgtcgagttcaagggatgcccgtctggttcaaggccgggctcgcagatcttctccgagggtggcctcgattaccttgggaaccccaacctcgtccacgcgcagagcatccttgtccgtgctcggcttccaggtccttctcatgggtctcgttgaagggttccgcatcaacggtctcgatggcgtcggcgagggcaacgacctctaccccggcggcagtacttcgacccgcttcgccttgccgaggaccctgtcaccttcgcttgagcttaaggtgaaggcacatccagaatggccgtctcgccatgtctctaatgtaggggtcttcgtccaagctatcgtcaccggtacgggtccatttggagaacctgttcgaccacctcgagaacctgtcgccaaccactgcatgggttttcgtaacca

SEQ ID NO: 522149 - DNA, 124 bp, Homo sapiens
gttgcccccaacagtaaccccctcatttatgtacttcctgcggggggtttcccttccctttttttcccactccccccccttggggtttttgggatggctcccaaataaaccttttgccccccga

SEQ ID NO: 522150 - DNA, 492 bp, Homo sapiens
gggaatggctttgagtaaaacgggaggagagtgttgctgaccactacagacggtagaggacagagacctgtaagctctacatgacaactcagtgtagaagcccagtgtcctcagcttcatgtccagtgaatggcagaagttcatggggtagtggactctacaaaggctgagcgcatcccaagacagccagcaggttgtctctggaaacgaccagagttaagctctcggctatactctgctgagggtgcaccctttcctctagatggtagtaagtcacgttatctttgacaactcttggactgctcctgaggaggccctcttttccagtaggaagttagctgggggttctcagaagtggctgattggcaggggacaagcttcgtttcaggggtctgccgttccatcctggttcagcgacggccgcgcgtggcttcctctcgccttgtcactgtctccctgcctgtccatcaccacctttcctccagaggcgga

SEQ ID NO: 522151 - DNA, 475 bp, Homo sapiens
ctccaccccgcaacccacgcagacgcagctcgaccgaccacaactgtgcgcagcagcggcggccggcggagaccgtatcgtaccatggcgatggagggctacgaccgcgagttctggcagttcggcgaccagctccgcctccagacggccaccttctccggcctctccctcggcgactccatctggtccccacgccgaggccgcgcgcaagcgcgcgcaagcgcggaaggccagagtcgagacgcggccgtcccagggggccaaaagaagagcggagacggatcgacgacgcaaggatgaacgagcaggccatcatacggggcgcggccttcattcgggctcacggacgaagctgcgtccgttacggcgcacaacagacaccaggcagaggccgaaacggtgacggacaaacgattcaggctccccgacggacggccggagaacaacgcaccgaagacaaagacaacggactgta

SEQ ID NO: 522152 - DNA, 118 bp, Homo sapiens
gcagtcgtatgcgtctgccggtaccctgaggaggcaagcgcccgaccgaccccacgtcgcagacatacataatctggatggagtgagaaccggcctcgatctggaagtcgtaggcgga

SEQ ID NO: 522153 - DNA, 120 bp, Homo sapiens
acgagaaaagacctcaatttcaagggattttcacgtgctgcacaaaaattattctcatcacgataccgtaaaatgcgcaataaagcaaacacttacgctgactttcacaacgatcatcat

SEQ ID NO: 522154 - DNA, 166 bp, Homo sapiens
cgatccagcctgcctgggaaccggtgagtctcttgtgtccccttcccccgcagcatggattacctggagacctggactccaaaggctgaccagctgtagatctgcaccgtgcattccacacccaggagccacactgaatggaaggcagccctttcttctcctcagg

SEQ ID NO: 522155 - DNA, 105 bp, Homo sapiens
tagccacgagggagacatggtgaagagaagtaatcaaaatacagtctcatccctgtcaggtaccgtgggccttgcatttcaaactccagacgtaacttcagtacg

SEQ ID NO: 522156 - DNA, 235 bp, Homo sapiens
ccccggaagacttctttttgggcccctgggttttcccctgagtttcccccccccccgggggttttttgccccccctttttggcccccctttggggccgggttgggggccccccggttttccccccccccccccccggttggttgggggtttttcccccccccccccgggggggccttcttttgggggggttttagggggcccccgggggccccatttttttttttttcccgggga

SEQ ID NO: 522157 - DNA, 105 bp, Homo sapiens
ttttcctttcttgagaagggagagaataacttccaaaatgagggggttttgaaataaccaaaaaaaggaaagggaggcttcttaaagaccaacacttgaccccag

SEQ ID NO: 522158 - DNA, 195 bp, Homo sapiens
cgtcggtatcgtgccgtctctaaatcaatctgaatgtatcattcatccttgatgaggggctcggggtagcggatggtgcgggcatcctgagtcacccgatgagggattcctttagtgcccgcaaagatcttgctcactttgcactacttgtacttagactcctcaggtgtaatacgatatacagcacagcgaccc

SEQ ID NO: 522159 - DNA, 1186 bp, Homo sapiens
tgggtgtcctgtgttagtttgaaatatacaacgaagtggtttttcacattattcattgtggctcggtgcgtgttgatagctccggtgataaggatttgtggagttgccgtgcaggtgtttaatgtggtggaaagtaagggtgagtctcatattcttctattaaattggcccacaagaaattaaaaaaaaaaacaaaaaaaaaaaaaaaaaaaaaaaaacaaaaaaaacaaaaaaaaaaaaaaaaaacaaaaaaaaaacacaaaaaaaaacaacaacacacacacaacacaaagaagagagagagacataacagcagaacacgacaccgcagacggcgagacggacggcggggaggagacgaagaaaaagcaaaaggaagacagacagcagagaggacggggggaggaggctgggacgggggggggtgggtgagagaggcgtaccggcgcggagggtgggcgacgggggaagaggagcgagcgggaggccaggacgcgagcggtgccgcgaggagaaggagggagggggagaggaggagaggaggagagagagcgagaacgagaaagaacagtgagggagagagagagagcagaggcgaaccactgggaggaacacaggagccacgcggagacagaggagaaacactaatagagcacgacaggggaggaggtaaagaagcgaagaggacacgacgagacgacgaaggccgaaccaaagagaacgagcccatatactcgcagaagagacataaagaacaaccagcacaaacaggcggacgacaaagaggagaaatgaaggacagaacgagacccaaaagcacaacacgacacaagaagacgctacagtgcgaggagcgaccacacgcgcggcgagggcagcaggaacgaaggcagggcgagcaagcacgcagcacgacgaccaaaacgaagcacaacgagaccggcgagagagcaagcagcgagcggccacggagccggagggacgcggacggcgcccggggggcagaaataggcaaagcgtgacgccggcacccggcgactagcgaagccgagcacggcctcatatcgacctgggctctcagtagcagcaagggtgcgccggctggacgagccgattatactggaccgtgccagcgcagccaggacgccggagctagcgccatacctaactgagtccaggggaggga

SEQ ID NO: 522160 - DNA, 1060 bp, Homo sapiens
gttgtctgacacgtgtatggcctcttctggggaattcacacaactgttgtgtaatagtattccacagcgttgttgtttctttttgacacgccacctgtgcttttccctccttaatcagctggtcagctccaatgattgtccggaggttcttctggaccgctgtatcctgcagagccattaagccttgctacgcaagggatctgaactgggacacctttcttgcctgtgctccgcatcccatcgcaaatattaaacctacttcatagtgcatcacacgcaagctggaaaatttgtcggccatatagccacggtttctctggagccgctattgacagaaattgagttgctttctcagtgatattcacatcgacatcatggacgtatatccagctcgcaactttgcactgatgcagatattccgtcagatctcgggccgaattttgccatgggattaccaagtgaacatgttttacacccacatggttgatttaaatgtactacttacagctacatattaaagtcaaccaatatgcacatggcctgtactccagctagaggccctttgctggttactgtggctttatggcagccaacctttatgctcgttccatatttggtgaagatgcacttgcaaaagtcagcacttgagaagcccaattcacctgggaccagatgctcgctgttaccggccatataagaattcgtgcaaagagcccagggtatggccttaagtcttggagataaaatctacttgtcacagaagaaaactagtatatcgaataatagacgataagtccataggaagctttacagataatttaggtatgggcttactggactccaacatcttttgtacgtctttcatgcatatagagaatctgagttcatgctgaatactctgttcagccgaataaacttatagcctttcgcctctaaatcaagattccgagtattagtaatgtatagtttgtcttttgtgactaacagatctgaatagcatgtcctcaatagtaatataatgtgtcatgtccccagacccttttatctcctacgatcacga

SEQ ID NO: 522161 - DNA, 860 bp, Homo sapiens
ggcccccacatcgtggggcaagaacgggaaattatgtccccgcgcccggtccctggtgacgacccccccggagacccgcctccccccaaggttgtggcccccccaacgaagcccacccggtggtaacaaccaggcggtcgcgcaacacaaagaagggcgtccaaagaagacaccgggggcgccgggactcgcacacacacccgctttgtcgcccacgtagatgtcgcgcgcgctcgcccaccaagacaaggtggtcctaccctcgcctatggcgcgcgtgttacacacgcagtgcctcacacacacaccgcgcacagaccaagcaggggcccccccagttggtaaccccccccccggggcccaccggtggcacacaggaggtctcacaccctgcgaccgcccaggaattactacgagatagcgccacgtcgcgcccgcccccacaagccctcgctcggacacacaaagggggaaccacacgagtttgggcagcagcgacccctccgccgcccagccgcttcaccaaggtgtccacaaacaatgtcgcgacagcgcccgccgcaagaagagatccccacccgacctacacaaagaaaggggcggcgcacacccacacagctgcaataccgctgagaggacactgtgaaagaacaacacgcatggtcgaaaatacccgctatacatcccccacgacagggacaggggcgacaagaaacgccgaccacccgtcgggtacgccgccttggggcacaaacgaggaggcgcccaccaacccaaggacaggggctgcccacacagcagtggcgacccccccggataatcccgcccaacaaacgttttcccccccccccaacatgaca

SEQ ID NO: 522162 - DNA, 318 bp, Homo sapiens
taatatgctgtctcatcacccttttttgtaacatttgtgtttcctgctgcaggacctacataagctgaaggtgcagtagtatttgatggtgcaggaacgtgatttgaagccagaattatttgtaggtgctgttgttgcagtaacagttcttgagcttccacttcttgatgagcttgatgaacctcctctgctgcttgatgctgtagagtttgaacgagtagccatagaaggtgttgcattagatactgttgatcttactacaactgtagaagtacccggtataataatctctgaaggtgccttctctccctctattcc

SEQ ID NO: 522163 - DNA, 1310 bp, Homo sapiens
tgtgggtggtaatctggaatcgctatcactttaatcagcttctggtttgaaggcagcagacagcgtttcccctccagaagccagcccctatttcttcagcgcggcgagggaacacagaggacccacgaggccccgtctttccgtccgagccacagctatgcccagagagggaaccaggcgggggctcctcagccagaaactctttagaattatagaagagggtgcctccgagtctcgaggacacccctcacgagggcgtgggtgtgcacaaagaggcgtgctcagtggccgggagagagagagctgcgggcccgcgacaccacgccaggcaagtgggaagagaagagaactctgggaccacccacgcgagaacagctggtctccttagaacaaacagagagtgtatagatttacacctgtggtctttctctaaaaatctgagacacagggtgctggctctggggtccctcctgcacaaggcccagacgtgttgtggaacgcaggtggggcaagactgggtgtcctccccgctgggtcccttggagcaatgttgggcgcctctactctcgtgtttccacaacaaaagcggcggacgctatacctctttctatatacgcgggtccatacatgtgggggcacaaggtgttaggaatcaacaaaagaagttttctcttcctccccaaatcttagatctgctccctattctgtgtgacacatgggtgacattttccaaaaaatgctgggctatccacccctgggaatacccctctgggggcccaattccggctaacctaaccaaattttttccaccaaaatttcgggttgggggcaaaattttattctctttggcacccactgggagaattgggccttttttctcccacccaaaggtggttcctccacaacaggtgaagcaaaactctttgctgtgtgacacaaaagaaccctgcttttatgctttgggagcacaccccctagggagcattgaaaaaatccaggggaacacccggtggtgaaggggaccactgcctacccaatacgcacaggagagaccttcccccaaaacaaagacacgggggactgaagccactacggggtgtgcccgccccggccccgtgggagaatgggcgcccctatataaagaaacatccccggggtagtagcaaaacaggggggccctcacaccacccggagatataataatgcatataccacgcacctattggggaacagggtacaaagagcccccggacaaaaggggatacgcatatgtaacgacgcagcaacaacaaggaggcatctgaccatgg

SEQ ID NO: 522164 - DNA, 254 bp, Homo sapiens
tgaagtgggtgagatgacccatttgaagcacagtggacccttgaacatgcaaaggttgcggcagtcaattcacataaaagtttcgatctgacgttgggcagatcacctgagattaggagtttgagaccagcgtgacccacatggagaaaccctgtctctactaaaattactaaaactagtcgggcatggtggcagtgtgcctgtaatcccagctattcgggaggctgaggaaggagaatcagttcaacccggga

SEQ ID NO: 522165 - DNA, 105 bp, Homo sapiens
catagttgtgcctgtctcaaacctcagccttcctagtggctgggattacaggtgcgcaccagcacccccaggtaatatttgcatttttaataaggatcccctagg

SEQ ID NO: 522166 - DNA, 576 bp, Homo sapiens
ggacacataggcgcgagaccatgggaccttttgtacgacccaggggctggaatgcgaggttccttcagtggatgctaggggaggtgctgggcgtttcgctgccagcgaatccattcacaccgggcgtgcatacctaggcaagccctttggtctcggccaaacacttggaccgcatgtgcctgcaactaatttttcccagaacgtgttgtctagacgacatggaggccttactctgtgcctgggggtggacctagagattgctcaagatgattggtcaagttagaagtatactcagttcacagggaagcaactgaggcttggggagtcaggcactagcttactgataagctacaaaccatctgggagcgaggattgtaaaagtagcttttagacacatgtagggctcacatttttttgtcttaaacgagcctctttcgagagtcttttggttaaaccaaacaaaggaactgtttgtatgtaccctctcgcttatggaaaaaatatatgtccgtcataaaaagctgttttactagacttaccctagggtgttaattctttgccaggatcccccttttt

SEQ ID NO: 522167 - DNA, 373 bp, Homo sapiens
  misc_feature (64)..(64): n is a, c, g, or t
  misc_feature (81)..(81): n is a, c, g, or t
  misc_feature (204)..(204): n is a, c, g, or t
  misc_feature (236)..(236): n is a, c, g, or t
  misc_feature (242)..(242): n is a, c, g, or t
  misc_feature (249)..(249): n is a, c, g, or t
  misc_feature (259)..(259): n is a, c, g, or t
  misc_feature (287)..(287): n is a, c, g, or t
gcagctcttcccctgccacctcctctgctcgattgttgcactgaaagtagagcagcttccccanctcgaaggtaacaaacnaccaacttcccaatccccgcacgttggacaagtttattggaggaaccaggatccacgttacattttgagcatgcagctaaccgcgatcccagttttcgagaaatgttattctttgtctcatanctaaatttatgcacacatgcactacatgtctnacgggntgttggntactttgctngatgctgggtattgcactgagtctgacncagtgtcgaccagtggggctggtagaaggttttaaaatgatggtcacaattcgtagtaatggtagtgacagtggaaaattatgaag

SEQ ID NO: 522168 - DNA, 308 bp, Homo sapiens
agttccttgcattgtccgggaccatggattttaaacaaaaaaaggccctcaacacagatatggaagaattagggttagaaacagacacagctggctgtagcaggtgtggagtgtttctctcacagatgtggcccacaatgacatactccagtgttagaaatcactcttcccacagcaagcctacttcaggcaggctggagacatcacaccataggttcagcacaaaaaggcaaccacagattctgtacattcctatgactgagagaaagggaagtactgtccggacatgcaagcccggtacatgcaag

SEQ ID NO: 522169 - DNA, 1307 bp, Homo sapiens
  misc_feature (302)..(302): n is a, c, g, or t
ccacggatgatcgcagactggggtagagttgcatcgtccatgggctactgccttgaccgccactataacgcaggcggaaacggggctgtccagactgagagcacatgtcaggaactgcatactccgattgacgtgcgtgatgtcaatgacaccatggaaggtagagctctcatgtagaggacgctcattcacgcatcttccgacctgtgcgaacacgctggtacagtaaaccattgatgcgttagtgtagcatgatggttgagacgtgtagctatacgcggagcgacacgagacgtggtgantagagatgtcatactcaataggaaacgtaccaagtagtccgttcgttggcactagtctagatattctcattgattgctggagtaaatgtaattgctgatctgatagagtggacacaaagaaggaacattggatcatacatgtgtggcggttgtgcaggaaatgctaaatgttagggtggcagatatacgggtaattcattcacatagctaagaagactgagtggatacacatgggcaagcacagagattttgcgcgaaaggataagcgattttgctgtgggaaactcaatagagagttagacttgttgtggcatatgtacatgggaccttcgaaaggccaagcaagtatccacgatctcaattgataattactttggtactccattattgccccccaaatttttgaaaggaaacatggggcgaaaggaaagacaattataagtatagaaggctgtgaacagttacatacttgtggcaaaaaacttcaggctgcgtgaatatttgggacttggaagggtcttctttggtgcttgaatcagggggtggaatgctgagcatgcatggttctccataaaggttctttgaacccgctgtgcccttgatgagacactgggagaaaaggtgtagggttaagccattgatacaggtgtaagacaggacaggggaaatgttcgtgcgtacttctgggctgagctccatgaattgtgtaggctcaataaccctattcataggagttcctgggttttaatggaacgttgtggcacccggtgtattccacgttccatgatcataaagggtcgaggttttggcgctgctgattctataacaaggttttgcattgtggtggaaagtaaggaacgtagttaacgaacgggtatatacaggttcaaaagaggtctggtaaggctacagaaatggaccacaactgtttgggggcaatgtgaggaaggtgtggacaccacatttgagagaattggcaaccagcagagcaaatgaaacacaagg

SEQ ID NO: 522170 - DNA, 209 bp, Homo sapiens
cacgaggggaaatcatgctcccccacgcctgaaagttggctgagctgggtcactcccatgtcagcaaccccatcccccacattccaacagcagggacactgtgcacctgcggatgccttcaggggacctgttcacgggtttggcagacaccatcctgtaaactgattgcaggtcggctgcgcctatcaccaccaccggcacccacttca

SEQ ID NO: 522171 - DNA, 160 bp, Homo sapiens
gaaagcactggctgttgttggccctgggagcatgggcctcatttggccccttctgtcaccccccaccccagctgagttctcaacatacctcaacttctgccgttcactgcggttcgatgacaagcctgactactcctacctgcgccagctcttccgcaac

SEQ ID NO: 522172 - DNA, 612 bp, Homo sapiens
ggaaggccccctctcaggaaaagtatctctcgtaagccagcgttctggatctcctcgtctgcctggatccagttgccgtccatgtgtataactcgatagtccacctgccaatctggactcagcggaaaggcgagctcctggcctcggaagacccaggactccagaaatggagctgactattgtgggttccataaaggattacactggggatggcgttcttcctcagcttgtccatgtcgctggaatcattcctgtgttaagttattatccccgctaaaggtctgagtgagttcttcagggaagcgatactctgagtaccacagggaccagccgtccttatcaaagtgctcccagaaatatggcagtgccacagagagtgtgtcctcattggagtacttgcgcttaaattcatccaacacaaaggtactcttgggcaggtgagcgaaggggtccttggccttgggctcagcagccagcgcctgctcacattcatccatctcctcctcaggagcagtggcagccgctttttctcctccttccgctcagctagggttctgttctcttccgtgacccttctcttccgggtgggcctttaaagttgggctctggaac

SEQ ID NO: 522173 - DNA, 544 bp, Homo sapiens
  misc_feature (113)..(113): n is a, c, g, or t
  misc_feature (136)..(137): n is a, c, g, or t
gagggttgtaaaaaaagttgttggtcggagagcttcccccccccaaaactccccaggggagaaaagtttgtgtcccggtgtggaccaatgttttatggcaagtgaccccctanaaagaatgccggggcccccattnngcccaaaaaattcccgggttggcgggcaaaggttggcaagtttaacaaaattccctttacaaaaagcccggggggccccttggtgggcatcccaccctttccctgaaaggtccattaggacatccctcaggggatttttaaaaaccctctttccaggaagggaaaggagggattcctcccccccccccccccccaaaaaaaacggttttggcgccctaggggaaaatcggggagcgggttttaaagaaagaaagttaactttttttttccccctggggccccggtccggatttttttggggtttcaaaagtttttttgtttgggttttttttttaaaaaaaggggagaaaatttgataatttgaatccccccccttccaccaaaaatttgggcaaaaaagtttccca

SEQ ID NO: 522174 - DNA, 956 bp, Homo sapiens
  misc_feature (10)..(10): n is a, c, g, or t
  misc_feature (30)..(30): n is a, c, g, or t
  misc_feature (59)..(59): n is a, c, g, or t
  misc_feature (85)..(85): n is a, c, g, or t
  misc_feature (574)..(574): n is a, c, g, or t
  misc_feature (768)..(768): n is a, c, g, or t
  misc_feature (799)..(799): n is a, c, g, or t
  misc_feature (829)..(829): n is a, c, g, or t
ttggttgttntttttcaaaattgtttgggntattcaggattccctggagagtcccatgngagtttcaggggggttttctatttcngcagaaatttctattgggattttgagaagaattgcattggatctgtagattgctttgggtagtaataatcatgttaacaacatcaagtcttccagtctatgaatgcaggatgtctttaaaaatttctttcagcaatgttttgtagttttcaggtataagtcttttgtctccttaaatgtattcctaagtactttattctttttgatgctactataaatggaattatgttaatttcgtttttggaaatacctaacaatgaatacattgttagtgtatagaaatgcagctaatttttgtgtgttgattttgtatcctgtcttttcattcccttgacagtatcttttacagagcaaaaatttttaattttaatgaagtccaacttataaatccttctttcatggattgtgcctttggtgttgcatctaaaaagccattgccaaatgcaaggtcatctggattttttcctatgttatcttctaaaagttttanaccttcagtccactttatttgtttttgtggagggtataaaagtctgtgtctagaatttttttttttttttttggcatgtgaatgtctttcaattttgttcttcttcaatgttgtatttgctattcttggtcttttgccattccataataaactttagagtaattttgtcaccatccacaaaataatttactggnttgagattgcactgaatctatagatgaagtngacatcaatatagaataaaactgacatcantagtgagtcttcctatccatgaatacaggatgtctttatgtcttttaaaatttctttcagcaacattttatagctttcaggtagttaactttttaactgtagggttttacatgagataatgtgatag

SEQ ID NO: 522175 - DNA, 255 bp, Homo sapiens
aggcaagaagggttgccggtagggtatgtgggctttttttgccttcctatttcctttcaaagaaattttttgtaaattacaaaactgtgaattgggtggccaaaaactgttgcccttggttagatgtttcaaacagggtaaatcctatatggcccccggtcccccttggttccctcctccctcccctgagagtggggccctcatccgcccatgtaattcccattggcttgttattaaagagcctttcaaatttta

SEQ ID NO: 522176 - DNA, 129 bp, Homo sapiens
aatactcagctcggtaccctctctccacactggtgagaagcatatgagtgtgaattccgcctaaaggctttgccacacatattgcactggtatggcttctccccagtatgaattttgtgatgttcaggt

SEQ ID NO: 522177 - DNA, 428 bp, Homo sapiens
  misc_feature (17)..(17): n is a, c, g, or t
  misc_feature (61)..(61): n is a, c, g, or t
  misc_feature (64)..(64): n is a, c, g, or t
  misc_feature (108)..(108): n is a, c, g, or t
  misc_feature (111)..(111): n is a, c, g, or t
  misc_feature (118)..(118): n is a, c, g, or t
  misc_feature (129)..(129): n is a, c, g, or t
  misc_feature (131)..(131): n is a, c, g, or t
  misc_feature (133)..(137): n is a, c, g, or t
  misc_feature (144)..(144): n is a, c, g, or t
  misc_feature (148)..(148): n is a, c, g, or t
  misc_feature (154)..(154): n is a, c, g, or t
  misc_feature (158)..(158): n is a, c, g, or t
  misc_feature (160)..(162): n is a, c, g, or t
  misc_feature (168)..(171): n is a, c, g, or t
  misc_feature (209)..(209): n is a, c, g, or t
  misc_feature (218)..(218): n is a, c, g, or t
  misc_feature (224)..(224): n is a, c, g, or t
  misc_feature (265)..(265): n is a, c, g, or t
  misc_feature (267)..(267): n is a, c, g, or t
  misc_feature (269)..(269): n is a, c, g, or t
  misc_feature (276)..(282): n is a, c, g, or t
  misc_feature (292)..(293): n is a, c, g, or t
  misc_feature (337)..(337): n is a, c, g, or t
  misc_feature (395)..(395): n is a, c, g, or t
ggggaaaccccaaaganagagggtttttcagtggagaacatggggggcggattaggcttcnatnagattacattcatttcacatctgtgtgcaattctcccataaatnggnctttganatatatatatntntnnnnnggtatgngggngggatntttnannntatttnnnncccccctctgggggggggggggggggggggggggggtngcccgggcngggccngggggcgtggggggggggggggggggggggggggggggggngngnggggggnnnnnnncgggcgggcnngggggggggggggggggggggggggggggggggggggggggggngggggggggggggggggggggggggggggggggggggggggggggggggggggggggnggcgggggggggaaatgacacattgaagtgagt

SEQ ID NO: 522178 - DNA, 81 bp, Homo sapiens
ggaagtatcactatggttcggggacttacattcactgcttttgatttgtggggccaagggacaatgattaccgtctcttca

SEQ ID NO: 522179 - DNA, 241 bp, Homo sapiens
  misc_feature (65)..(65): n is a, c, g, or t
tgggagcttgagaacagccctgaccaacaatggagaaaccctgtctctaaaaataccaaaattangttgggcatggtggcgcgcacctgtggtcccagctactcaggaggctgaggcagaagaatcgctcgaaccccggaggcggaggttgcagtgggttgagatcgagcaattgcaatccagcctgggcaacagagcgagactccatttcaaaaaaagaatcaataaaaatgttaaaagc

SEQ ID NO: 522180 - DNA, 715 bp, Homo sapiens
ttgttgctggtgtaaacctagcacttttgcaggtcattaacagccaatatgctgcggattctagcaagaccatcctggttaacacggtgaaaccccgtctctactaaaaatacagaaaaattagccgggcaaggcggcgaccgcctgcattcccagctactcagagaggctgacgcttgagaataaggttaacctgggtcgcgcacgttgcaatgagaccataatgtgccactgcactccagcactacagcctgggcgacagcgagactctgtctcaaaataaaaacaagaagtataaaaaactaccatgttggccgtattggcccagttcactttaaatccgaccaagtataaccatgcggccgcaatatgacctcacctgtgcaatggggcctataactgatccgcttgtaacaacttggcccaagatagaaccctttaccaatgggaataaaccggcttacgcaattaaaattgtcggccgcataggcccattctactagatactccagcaagctatgcacgcggccgaatttccagttacattggcgaatttgccctaagggtgaagggattagaatgcgtggacattcttttaaattcgggaaatatttaagcatagcggttcccttttaaccaccggccggaaactgcaaaatcccttataagtcaaatgattttcccgcgtgagctgactggttctcctgggcctccc

SEQ ID NO: 522181 - DNA, 419 bp, Homo sapiens
  misc_feature (319)..(319): n is a, c, g, or t
  misc_feature (350)..(350): n is a, c, g, or t
  misc_feature (374)..(374): n is a, c, g, or t
  misc_feature (408)..(408): n is a, c, g, or t
ctgcggggcaagtcctccagaggcagcagcccaggtggtgcagtgggtgagctttgctgcttccgctctagtgcccccagccagcgcctgggtgttccccaccttgggcgtcatgcgccacatcaaacaggccactgcgcatgcaaaggaggaagtgaggcgaatcctggggctgctggctgctcacttgcagacgaggacttttgtggtgggcgaacgagtggcattggctggcatcacagctgcgtgcgccctgctgtggctgtctgagcaggccctagagccttgtttccgggaggccctgcccaatgccaaccgntgggtgctgacctgccttaaccagccccagncccgggctgcgtcgggcgaagcgnaactgtcggagaagatggcccaccgtgctgcccnaaagccggcag

SEQ ID NO: 522182 - DNA, 346 bp, Homo sapiens
tgaccatgcagttctattcaattaagtctgagttatatgaaattcccgtcatcggaagtgaccctgcccatcatggtgggttctacctcctaatgaacatcatcactcaggtacgtgtgcatccggggtgttgtttatcctaaccacaagattgcgcttccttcaaccgtcaacggttcgtcgtgcaccttccggaaaattttgtgagcctcatctttttcccatctcgtaccttccagaacccctttcaccctgtcgcactggctgggcaccttgttttgtcttcattgggacctcaatgtacacagaggtgtgggacaacctagggaccacacagagtgagcct

SEQ ID NO: 522183 - DNA, 215 bp, Homo sapiens
  misc_feature (57)..(57): n is a, c, g, or t
  misc_feature (60)..(60): n is a, c, g, or t
  misc_feature (62)..(62): n is a, c, g, or t
  misc_feature (68)..(69): n is a, c, g, or t
  misc_feature (73)..(73): n is a, c, g, or t
  misc_feature (86)..(86): n is a, c, g, or t
  misc_feature (88)..(88): n is a, c, g, or t
  misc_feature (101)..(101): n is a, c, g, or t
  misc_feature (108)..(108): n is a, c, g, or t
  misc_feature (114)..(114): n is a, c, g, or t
  misc_feature (123)..(123): n is a, c, g, or t
  misc_feature (129)..(129): n is a, c, g, or t
  misc_feature (173)..(173): n is a, c, g, or t
  misc_feature (210)..(211): n is a, c, g, or t
  misc_feature (215)..(215): n is a, c, g, or t
gagcagacgggggcggcagtgtagtgggctgcgggctggggactgagacggctcacnagngnatcccnnggtnggtgctgagagcngnctccgggtctctncaccacngtagtnctctcattnccaaancatcagcggcttttaaaataagatctcttggtagccatccggtnaaattggtaaacaatctaattaaatggcatcagcacnnaccn

SEQ ID NO: 522184 - DNA, 285 bp, Homo sapiens
ggctatcacattatcatctgtggcagaaaaatttttggggaccagttttgaggattaatgtcagaaatggagacgagatccagcaattgagtcaactagtgaattcaacaacttgaagctccatttctggaaatctcccttctcctttaatcggcctgtggattgtctggtcccatctgtcaatctgcaggcatttaaattcttcctgagaatcctgggcttagaagtacggcgggacaattgaggacctgcaggcccttttagacaatgaagataatgtgatag

SEQ ID NO: 522185 - DNA, 480 bp, Homo sapiens
  misc_feature (182)..(182): n is a, c, g, or t
  misc_feature (312)..(312): n is a, c, g, or t
tgcggtttaaaagatccctttgaattaaagcggcttggagcgagagacccaccccttaaggttctggcccggggttttgaaaaaaactattacatgtactctttcctgggccttggcagttttggcccactgggccagcacccccatttgggggtaccttttccaccccaaggtgggtcccntgggtgctccccttatccccatggagcattgccccccccgcttttttaagacctttggcctgggcaattacaagtacatccccctggattagtgggccggctgctttggcatccaaccgaaggatattgncaagggttttgtgatttaaatcccctccttccccaggaccggatttttttttttaccctcccctttgtgtttcccccaatgtttaaaaagtttggatggtttgtttttttgcctggaaacaaggtgctaacaaattttagttaatccctttacggggcttaaaattta

SEQ ID NO: 522186 - DNA, 173 bp, Homo sapiens
  misc_feature (45)..(45): n is a, c, g, or t
  misc_feature (61)..(61): n is a, c, g, or t
  misc_feature (70)..(70): n is a, c, g, or t
  misc_feature (96)..(96): n is a, c, g, or t
  misc_feature (107)..(107): n is a, c, g, or t
  misc_feature (116)..(118): n is a, c, g, or t
  misc_feature (126)..(126): n is a, c, g, or t
  misc_feature (136)..(136): n is a, c, g, or t
  misc_feature (141)..(141): n is a, c, g, or t
  misc_feature (143)..(143): n is a, c, g, or t
  misc_feature (146)..(147): n is a, c, g, or t
  misc_feature (150)..(150): n is a, c, g, or t
  misc_feature (159)..(159): n is a, c, g, or t
ccccgtggctctctccagcgcgcaatatctccatatactcgagcncaggctgtgccacgancatctacantctccactatgtgccagcctgtcaangcaatttctcngggagcccnnnaccggttncggcctgttnggagntnttnnttnttcctaaantgccggttagtttc

SEQ ID NO: 522187 - DNA, 242 bp, Homo sapiens
tctagggccaggtttattccctcacatgggtggttcacatacacaggacaaaggcacgggcaccatgggagagggcaatactcctgccttctgaggggatcttggcctcacggggtaagaagggacaggatggtttcttttctgcccttactagggcctagggaacccatgagcaaatcccaccacgccttccatctttcatccaaggagaatccaccttggtgacgtttagttccaaccat

SEQ ID NO: 522188 - DNA, 403 bp, Homo sapiens
agcagagtagtggagcaagcatgtaagttatctcacgtgtgtgaaaatgtgccatatccactttcatcatctgggctacaaccagatcacttgtttcacttttcctcacaaatattaccagtgcaggacttgggtcccagtgaatcttcgacatgaagttgacgcttcctgaagtgacgcatactctagctccacagcttcaaccttctcctctaccccttccttttcttctgctctgtctttctgtcatgtcttggtagggctgtcttaaagaagcatgagcgttgaggcctcctttgtatgccttgtgacaacatgtaggtgctgtcactggctcctgcagacagttcagcaacagcccctttggatttctggatattctggaaacaaaatgaaccacgtg

SEQ ID NO: 522189 - DNA, 1669 bp, Homo sapiens
ggacagcggggatggccggggtggccacagctgccgcggggcgcgtggacacagccgacagcatccggccggatggagacatccaccacagacgacacgcgccaaggtccgggacagagacgccgcgatcatgcggaacagaggggtcacgaaatgcaggacgcacatattcacccatcagcgtgaccttatcccgacccccacttggacggcgcgaacatcgaccccatgggctcccatgagtcaccaagactgccagagacacaccacacaaaacgggctgagtatagggaaaggaatcatcaaccgctcgagtgcgcacggatcactggatcgtacccgcgttggaaacacgcctagagaggacacatgatacggacgtagccaatctcgaacaatattcccagtaccactcaacacctattacatatgcaaccccaaggacttatacacccctgggactgacgatgccgagcaccccaatggccacgcgcggcaatatcaggaggaaccacacacacagaaaataatcaccctgaccatacaagacccaatgaggccactagggcgccacaaaacgctgacgcagacagaagggatgacaacaaaatttatttgacagactacatcccatctggcttcaggtgagcccacggctgccagatacacaaaatgaccattataacccccgtaagcagcagccaggggcaaaccttacccaccaaccaacacatccggacctaacccttatttccccatgagccacacccgacgcaccattaccacctagattacccacacattcattgggactcaccatcccaacacactagatccatggcttactaccttaaccaacacaacaaacaaatctcacaaacacccatagcccgaccataccaccttaaaccacacaacacaacaaacaacaccgcaacaaaacagatcaccacagacaccgccccacatccaccaagacagaataccagccgagatcgcccgagcgacgccacacaaccgaacgggcacacccacctacgaccacacatacggaggacaacaacaatatgtggcaaccaaacagcgcccagcaggcccagccccgccacgaccaccccgccacccaacaaccataccacacagtgggaaacacaccaccaacagacggtggcacaaacaacactcttagctaccacagaaacaacacacaccaaaaaacacacacagcacaaagattcagacaacctaacaaacatactctcacacgcgaatataacaacacccaaagtagaaaatataaacaccacccatcacacacataactacaaagtacacccacacccgcgcgcgacaaccatagactacagcaccagccgagcagcagcacgcgacagacacagaccaccgtcaacaagcaacggacagcacacccgccaccacacagaacgcacggatcgcccgcgctccaccagcacacgcacaccacgccacggaccggcactcaaggaacaagacaagaagcaaacgccaacacgacagaaccacgaagacccgaaagccgaagcaccgtcctgcccgcaactccgcacacgacagtccatcatcacagcgcacgactggaccagcacccacgacctacgagaacgcggctcgacatcagccaggcgca

SEQ ID NO: 522190 - DNA, 511 bp, Homo sapiens
  misc_feature (55)..(55): n is a, c, g, or t
  misc_feature (236)..(236): n is a, c, g, or t
  misc_feature (307)..(307): n is a, c, g, or t
  misc_feature (334)..(334): n is a, c, g, or t
  misc_feature (344)..(344): n is a, c, g, or t
  misc_feature (370)..(370): n is a, c, g, or t
  misc_feature (411)..(411): n is a, c, g, or t
  misc_feature (424)..(424): n is a, c, g, or t
  misc_feature (474)..(474): n is a, c, g, or t
  misc_feature (483)..(483): n is a, c, g, or t
gaaaagtaaaaactatcctgaaccttttaagcagaaaataattacaaatatctcnccctgtccccagtataacaaataagtacaaacacatacttaactgcacaactgaagtttgtactgttagcatttgggttaaggggaacctacattccccagaatccttttctatacatgattctaggctacagctagaggaattcaagaggtattcacttgagattgggaaggaggagctncagcagcagcactctctctcaagtcattatcctcttcgtggttagaggtgacagacacaaatgctgcaggnccagcgtgcctaacacacctctctctnttgtccaggntccctcacaaatattagcctattggnaacaagctccggcccaccaccagatcgtggaggagacaagnagtgcattcaagnaatagtccttattaccaaggtatgtttagaagctataataatgcagtacnatgagtagnacctcctcacacggtagcttcagtgtgt

SEQ ID NO: 522191 - DNA, 415 bp, Homo sapiens
  misc_feature (197)..(197): n is a, c, g, or t
  misc_feature (199)..(199): n is a, c, g, or t
agcttccccttccccttgtttgggtctgtcattggccctgatccgtatacctccagattccggcttctacatgggacagacgtggatgtactgtccaccttttatctggtagggatctttattattccctattgctctagggctttctgtttcccttttttccgttaggctgcgtagtaggcatgctctgggtattntntgcgttgtccctgcgtcggccttagggtctctccctgtcccatcccggctgttgggcttggcctctttgcctctcgtcgtcttgtgttttgttctccagctttgtagcagctgccttgtcaaaccctggcgcactgtaccataggtcaatgtaacttttgtttttcggtcaatttaagttcttttgtcaccaattattaataaacagttttgactt

SEQ ID NO: 522192 - DNA, 519 bp, Homo sapiens
  misc_feature (31)..(31): n is a, c, g, or t
  misc_feature (94)..(94): n is a, c, g, or t
  misc_feature (97)..(97): n is a, c, g, or t
  misc_feature (109)..(109): n is a, c, g, or t
  misc_feature (119)..(119): n is a, c, g, or t
  misc_feature (126)..(126): n is a, c, g, or t
  misc_feature (128)..(128): n is a, c, g, or t
  misc_feature (130)..(130): n is a, c, g, or t
  misc_feature (134)..(134): n is a, c, g, or t
  misc_feature (139)..(139): n is a, c, g, or t
  misc_feature (151)..(151): n is a, c, g, or t
  misc_feature (154)..(154): n is a, c, g, or t
  misc_feature (158)..(158): n is a, c, g, or t
  misc_feature (192)..(192): n is a, c, g, or t
  misc_feature (196)..(197): n is a, c, g, or t
  misc_feature (241)..(241): n is a, c, g, or t
  misc_feature (252)..(252): n is a, c, g, or t
  misc_feature (334)..(334): n is a, c, g, or t
  misc_feature (447)..(447): n is a, c, g, or t
  misc_feature (464)..(464): n is a, c, g, or t
gaggctctgacagttgtatataccgattggnagagcggggcaagggtgtggccagagccatgacatttcattaaacaaattgtatgtcactganggntcctttctgggnctcgctcctngcctttncnanaggnaaacnaccacacccaanacncccnacccgaataacagaatgcgagtccagtgttccanatcnncttgttacacatcaatatgaaccccgcacgtgtcctggccaacnacatgctttcnttttctgtctcatcctagagctcgaatcctgattcatttcagcagggactccacaggccacaggaaagattgtggcattaanatattcatttatacttttgtggtagttcaaaacagtggtcttttttctgggcctgcttaccgaccatacaaggtccgaagcataacttaaatgggggctaagactcccatgangaccataagaagaaganagaaaaacaaaaagaaattcaaaaccaaaaacacaaactaaaaaacccctctggg

SEQ ID NO: 522193 - DNA, 173 bp, Homo sapiens
ggggctggccaatggggacaatcaaggactggaaaggcagggcagggtggcctgtaatcccagccctttggaaaggcaaggggcgaggatgctttaggcccggagttttacccaacctgggcaacacaaggagaccccccttttttctcaataattaaaccaatagcctggga

SEQ ID NO: 522194 - DNA, 121 bp, Homo sapiens
ggaaaatgaaggcatacaacaaacattccgattaatcaacaagtataacatagtctttcagtacttccaaacttacatttcctttgaatgtacaatgaaactttttgtctaaaatgttttc

SEQ ID NO: 522195 - DNA, 986 bp, Homo sapiens
ggcgttttcccgagctcagtgttcttgtgctctccgcgtcagcctttgtcgcccgcgcctgtgtcctacctgcgtgactcccggctgtacgctctgcttggcctcgccatgcctggtgcgacctcgagcaagtggtccggtccctcttgtagacttgcatacgaagtgcgatcgatgtcgagcgcgcgagcaacccgtcgtgcactgtcacctacgtcctgggtgctggcagcgttggaacgagctggggcaaaagtgcgttgacgctcacacgccaggcgttaacgcaatagactccaaccagcactttacgctgggattggtcttgacttcatgtgcaatgcttctttacaacgtatgcgtccgttgaacaggaacacccggtgaagttgcatcccaacggatgtgaaatggaatcccgagggagttcaccaggacgaactgtgcagttcacttttccctttggttgtatcaaagacattcgaagagtgcggcaaccttgatcaatcaagcatagttggctacaagatcctacttcgcgcactttcattggttgagagctccagcgagggagctccccccaaattggcaccaaagtggccctttcaccagcctggcggtaattggtccattgaggcattgaggtttatagcctgaaatggcaagtggaaccatgcggactctggcgttacagcaaggcttggtttgaacccagaaagcccccaaattcctcggtcacaattgggcagagagccacaggaattcctttgtgcacagtaacaccgaagctcctgattgtgacacaaaaaaatttaatcccacaaggtgctttgtgacaagttccctttattcccggtcacacaaacaatggttacttcgacaggtcgtccaaagcggggtcaccccctcgaggatgcggcccattaggtcgaaccgggctgggtataaaccccattaggcctcgtgacggtttgtggggaattgac

SEQ ID NO: 522196 - DNA, 451 bp, Homo sapiens
ctcgaggcagtaagtctatccaagatcttagaaccgacatctctacactaccacaggcggagagacggaatttaccaacgatgacctccctccgacggcgtactacataacaagcgtgctctccgaagataattctatccagaccatgatcacttttgaacaaggaggaaggtggaccgcacctgaggaagcctgaaaacagtgaatgtgatgctacagcaaaaaacaagaatgagtgcagccttcatattcatgcttcctagagcatctcccagaaactgaatgttccaatggccccactctcagagccgaatgccgtcagcattgtcattgctcatggtagcgtgagggatgccatctcagtgatggttccagatgtgtccatctcagatgatgggggttactcctggacacagatgctggcaggaccccactattacaccatcctgga

SEQ ID NO: 522197 - DNA, 330 bp, Homo sapiens
  misc_feature (43)..(43): n is a, c, g, or t
  misc_feature (158)..(158): n is a, c, g, or t
  misc_feature (170)..(170): n is a, c, g, or t
  misc_feature (212)..(212): n is a, c, g, or t
  misc_feature (274)..(274): n is a, c, g, or t
  misc_feature (327)..(327): n is a, c, g, or t
aattcgcggccgcgtcgacagaagacgacagaagggtgggcangggggacagagtctcgctctgtcacccaggctggagagcagtagcgcgatctcggctgactgcaacctccgactccccggttcaagcaattcttctgccccaccctcctgagtanctgggactacangcgcccgctgccacgcccggctatttttttgtacttttttancagagacgggtttcaccgtgttgcccaagctgggcaacccgcccaccttggcctcccagtanggttacaggcagagccaccgcgcctggccttttgtattttagtagagaggggnttc

SEQ ID NO: 522198 - DNA, 239 bp, Homo sapiens
  misc_feature (40)..(40): n is a, c, g, or t
  misc_feature (98)..(98): n is a, c, g, or t
  misc_feature (182)..(182): n is a, c, g, or t
  misc_feature (214)..(214): n is a, c, g, or t
  misc_feature (222)..(222): n is a, c, g, or t
agaagacgacagaaggggttccacaggaggcctacacgcngccgcttgtgctgcagccatgtctctattgatccctgtaaaagttccagcatatttgncgagtactcaacaccaacatcgatgggcggcggtagcctttgccatcactgccattaagggtgtgggccgaagatatgctcatntggtgttgagggcagacattgacctcaccaanagggcggnagctcactgaggatggg

SEQ ID NO: 522199 - DNA, 214 bp, Homo sapiens
caccgtgtgaccctgtgctccctgtcatcagtagtttgggacgatatgttatcgatgtcgtgagttctcagagattgccgagattatggcatttacgctgccccctctccggtgagaggtgacgcggccgccatcggtgaaagctttgagaccattccggaccgcaagattgtgcgtggcagtgatggcatcacctcaacgatctatcaacgtg

SEQ ID NO: 522200 - DNA, 154 bp, Homo sapiens
  misc_feature (58)..(58): n is a, c, g, or t
  misc_feature (79)..(79): n is a, c, g, or t
  misc_feature (94)..(94): n is a, c, g, or t
ttctccgtgccgctcctggctcccacttacgcgttacgtggcctcgtgacgacgcgtnacgtggcctcgtggtcacccnttccctgtactaccncgcgctgctcattccccaactgctcttgcctgcgctactaccgggcctgggtgtcgctgg

SEQ ID NO: 522201 - DNA, 524 bp, Homo sapiens
aagcacactgaagcctggggaaggatgctcaggaaagagttccgaggggatttgggtggaatacgccagtgtctgccacagaggagggggcccatctccttcaggtgggtcagaaaactaagaagggaatataccccactccccttataggtgagaaatgtagaataaatgcaaagagacacagacctggaaggtgaagattagtgtttgattcttggctctcttattcatgatgcaaatatcttgggcaaagcaattaatctgagcctcagttcctcatctgtaaaatggagtcgatcacacatttacttcccagggtggctgtgagtgttaaatcagactaagtgctgtgtaacccattgtttaaacattaggtatcaatgttttgttttttattgatatataataattgcatatattttggaggtgcatctgatattttgataactgtatacaatgtataatggtcaaatgagggaaactgggatatctatcaccttaaacatttatcttttctttgtaaa

SEQ ID NO: 522202 - DNA, 789 bp, Homo sapiens
gctcgccccgtgtggcagagaggcgactatgtgaacgtcaggtgctgctgagctgagcccgaggaggcggctggtctgtatcggggcttagcctgcagcccgcgctgagctgcctgctgcctggtgcccggagtgtcaccactgcaagtactgtgcgtgccacatacctggcactgtgcacacgttggagtgtgacccagcagggcacctgtgaactgcatggcagaacattcgattcttgcctgacaataccttggtgttccatgcactggggcactccagatgtgttggtttgcagtgaactgcgaggagcaaaaaggtgtggatgaccctgggggtgaaacatgacttgacgccagcgagtctaccttcaggacaccagtgaacaaggctgtgctgcgcaacggctggaggcacggtgacctggggaacgagacacgcaagattacctgaggagggtctggagacgacagacccgggacagctcaccgagcttcaacccgatgtcaggcggctggaaggaacacaatgggccatgatatcatgcacgatgacatgctattggctgccatgtcctgggtcaggtacatcggaggacacaagtatgttgaatggttgggcgagaaacaagaacagcgccccaaggaccggagatcctatcttttcaagaaccaaaggcttggaacgtcagaagcccgggactgactgagactaggccaggctggaagaagacacgaaccaagccaatcaagggggaatcagaagggtacaatgaagaatggggaaaga

SEQ ID NO: 522203 - DNA, 200 bp, Homo sapiens
gtaaaggcaaacaataagcagagaagggcgggggggcatctaatgtaggtaccttttgggccaacggcagccaaagaagtctccatagagatgacatacaagaaaagccctgaagatgagggggaaagcaatgtagatactgggaacaactgaagcaacagatgggacccccaagatccaggaaaaaacaaaattctttc

SEQ ID NO: 522204 - DNA, 249 bp, Homo sapiens
agcgattctccagcctcagcctcctgagtagctaggactgcaggtgctcccccacgcccggctaatttttgtatttttagtaaagatggggtttccccatgttggccaggctggtttcgaactcctggcctcaggtgtgatccgcccgcctccgcctccccaagcgttgagattacaggtgtgagcccccgtgcccaggccctcagtaggttttaaggagtccccagccctcctcccttttgggcccga

SEQ ID NO: 522205 - DNA, 294 bp, Homo sapiens
agactatgtccaatgggtcgtggttgtaaaggtcgtgacaggataaaccttggctgtacaatattgagaatctaatctttatgtttaataggaatggagacatttcgctccactgggctacagatgaatggacatgcaaacagccattttgagctccaagccatcatcgtcggtaaaagactactcatttactgtgctattttctctcatcaagtcttgttcttttggcagtagtgatatttgatctttatatgcatctgagtcattgctcgattgcatactctgaggagaggt

SEQ ID NO: 522206 - DNA, 260 bp, Homo sapiens
gagcctagagctacgaggaactattcctacagctacaaggctctgcggagagcgcttgttaagattgaaagataagaagatacatgagagcaagcgaatggaaaagagttgagagtgaagacactgtcaagccacctggatacagccatgcgtgaggctcatgtacctcaatttttaactacatgagccaacatatgtccatttttgcttaagctatttcgtgattagttttccatcatttacagtcaagggccctgact

SEQ ID NO: 522207 - DNA, 724 bp, Homo sapiens
gtggttccccaagggaagagggctgccccctgccccctgaaggagagaagcatcggtgtgcacagccagcagagcttgggatgcaccgccactgcttgcttctgctccaacacaccatctccccagcaataaggctggcaagaagagcttgggccttcgcagaggcgttggaatcctgctcactgagctcaccctcctgcctgcactgaggtctctttgaacagaatcatggcagaggaacatccttagagcctaacagtaatctcagtagttcacttgataaatttgccaccacaggttcagaaactttggggggaaactgggaccagtctggactgtggcttaagctattcagttgctgtagctgaatacccaggcgccttcaaacaggaaaacatttcccaagggtatttaggctggtgggccattctgttcacttttgaagctgggggtgagggtgggggtggggcttctactttggccggaacatggaaaacggggctcttaacaccaccttccccttttgtctagggtttcttccttaggccttcctggcctttggcccttgaaaagaataattacatgatagggcagccctctccagccatactgatgcatgttgccatgtgtacacaagcatctccccctttccagcaactccgatttgagggtactcccaatctttctgggacttccaccatacgaaaaatacaccgccagtttg

SEQ ID NO: 522208 - DNA, 907 bp, Homo sapiens
caaatgatctgtgtcccctggaccaaacaatttttgggggacaagtcccttctcgggggccccccgggtcttaggaggaggccccccgagtgtgtgtaacccctggcgggatacactctccccgcggaatgttgttaaaatttggcgggggcacacactctttggtcaagacaccattagttgttttcttataaagcaaccaaggagtgccaagtccgcgcggccgcagttttggtaatgtaccgacgccgccccccagcacgtacattcgcgccgggtttagtacgctccccatctcgctcgaatcctccggtaattgatgctcaacaacctaggagcgttggtacaaaattctttcaacaggccccatatagtagagcgcgcccaacacccgcccctttcttgggggtctctgcctgtgagatgcattcacacgcccaacgtttggtataaacactcacgcgctgacaacacctatgaaaagttgctgcgcgctctaacacaagctgtggggagcataaaaacaacaaggttgcgatggtcaaacacttcgtgtggttcgcccccgcccgaggatgctatcgtaacaacatcgctcgaaggaaatcttgttgggggtgaaaaaatatgcgcggtgtaaaatattattaggggccccaaaatcatttgtccacaaaatacctgtgagccctgacgatgccactctaaagaaaggatctttttatgaagaaatagattgtcgcaatagatctcactccgtgggaacaaatttgtaaaggaagtcactttctgctccttgacggccagcgggagacggtttttcttcttgagaaagtcatgaccgcacgcttattgtgctaagaaatgccccacacaaaatgaaaaaagccaaacggccaacaaaaca

SEQ ID NO: 522209 - DNA, 593 bp, Homo sapiens
caatgtacaccagcgagtacggaagaatgactcctccgagtgaaaagatgttggagattgggatgtgctcaagggaacagtatagacagaggtactaacatctccaattcagacttccaaatacactaacaataagttaaaaatgtggcctctgatcctcatgtttcctcaccagtagaggcaaaaaaggagatttccataactacatgtaaaaaagaacatgttcacgtaaatccacacactacgtgtgagtgttgcatgctgttcttccacaatataaaagtataaaaataagattaccgacctttgtatctagacagatctgtgagaaaacacggttgctactagataactagctctgtgtaatcctgagcaggcgcgcttatcccagtgcctcaccttcctgtgctgtctcaagagggcagaggcatggagatggcaatgccttttcattccaggaaaccacactcagatggcagaaccagccctagccatgtcgcatagcctctccatgggttacactccttggacctccaatggatgggagaaaggtctctcagcccagataacgtgaggcggtgtggtcatgtgtg

SEQ ID NO: 522210 - DNA, 111 bp, Homo sapiens
cccatacagtgtgcagtaacacacagcacagacacatgtgacatgattgggcacactgaatgggacctctgtgtgtaacatgcatttgcatctcagtgtgtgctataggta

SEQ ID NO: 522211 - DNA, 674 bp, Homo sapiens
aaaggctcccctgcgtatgggcaatgaggcccctttgaccggctcctcccctgctgggcgccacgcagcttgacactgatggagccctgtggcttgggggcctgccggagctgcccgtgggtcccatgtcactgcccaacggcctacggctacaggctttgtgggctgcttgcgggatgtggtggtgggccggctacccgcttgcaccttgctggaggacgcctgtcaccaatgccagagtctgcggctcctgccccaccccatgagctggcacctagagtccccgctcccgctgtaattattttctattttttgtttaacttgttgctttttgatatgattttcttgcctgagtgttggccggatggcactgctggccctggcctcccttccgtcctaggcagccgtgctgcagacagacctagtgctgagggatggacaggcgaggtggctagcgtggagggctcggcgtggatggcagcctcaggacacacacccctgctctcaaggtgctgagcccccgcctttgcactgcgtcctgacccactggtgttcccggcgggcatagcagccccggtctcctgtaatcaccctcgctccgtcaggcgggactcgtgtccacgagaggacggggctgctgagcgtctgatggggccttcctccgggtgacccca

SEQ ID NO: 522212 - DNA, 109 bp, Homo sapiens
ttacatcgagctcgcaccgatatccccatacagagtacaggtaggattggtgcgtgggtgaaagagtatgatggggtggtggttgtggtaaactttaatagtgtaggaa

SEQ ID NO: 522213 - DNA, 191 bp, Homo sapiens
  misc_feature (125)..(125): n is a, c, g, or t
ttccaatccattccattccattccattcacctccattccactacaattcgttccattcccttgtattccgtaccattccattccattccataccactccattggttgttaattccactcgattcnatgcgatgattccattacattccattgggaggggattccattcgcgaccattcgatgattgccttc

SEQ ID NO: 522214 - DNA, 126 bp, Homo sapiens
cacgagggcgacgatcattggtcgccggtggtcacccacatgcggatccggtctggattgaccgggcatgaggcaagaaacatcctgcttttcctgcaggggagcacctgaaatgaccggccttgg

SEQ ID NO: 522215 - DNA, 187 bp, Homo sapiens
tgagtattcggtgtgcaggtcatcgcagcattagcgagaaggtctccatctgaagatgccttcgatactagagtttagtcaatgtctcggtttgcccttgtaattctggctggacatcaggttagcctggcggtggtggtcatcatgactgtcgtacataggtccaattcaccacgatagcgagatc

SEQ ID NO: 522216 - DNA, 127 bp, Homo sapiens
tggcgactaaagccgctcgcagtagtgcgccctctatctgtgaggggtgacagaaacctcatcgttacatggcctgggtacttgtggtcgctccgtgaaaacttagacggattatcagcaagtccac

SEQ ID NO: 522217 - DNA, 721 bp, Homo sapiens
tgtgattggtggaattctggggaaatccttttggaattttgttggaacaccctctttttggtgaacacacaccttggaaccccaagtgagggttaccaactggcaaacatctcttcacattccaccacagtctaaactcagtcctgaagcttctgatcttattattaaactttgccgaggacccgaagatcgcttaggcaagaatggtgctgatgaaataaaagctcatccatttttttaaaacaattgacttctccagtgacctgagacagcagtctgcttcatacattcctaaaatcacacacccaacagatacatcaaattttgatcctgttgatcctgataaattatggagtgatgataacgaggaagaaaatgtaaatgacactctcaatggatggtataaaaatggaaagcatcctgaacatgcattctatgaatttaccttccgaaggttttttgatgacaatggctacccatataattatccgaagcctattgaatatgaatacattaattcacaaggctcagagcagcagtcggatgaagatgatcaaaacacaggctcagagattaaaaatcgcgatctagtatatgtttaacacactagtaaataaatgtaatgaggatttgtaaaagggcctgatatgcgaggtgttttgaggttctgagagtaaaagtatgcaaatatgacagacaccgtcgaagaggatcctctaga

SEQ ID NO: 522218 - DNA, 380 bp, Homo sapiens
cccccccccgggggggggccgggggttttttttttggggtgtttttgggttttccccccccccctcccccccccccctcttcctggtttaagggggggggggggggcccccctttttttgtggggccctccggggaccgggggtttttttgccccccccgaggggttgtggggcgtgtttttctcccccttggggccccccccgggggggggcccgggttccccccccctttctttgggggggttttccccccccttttttttccccgggggggggggccgcctaaaaactacactcgataaaaagtaaatacgtcaatgatagatgagtaaatagtaaaaacgatggtaggtgcctatacatgcaccataaaatatccc

SEQ ID NO: 522219 - DNA, 221 bp, Homo sapiens
gtcagtcggtactccagagtgatagacagaagacattgatcagaaagattcaggccgggagtggtggctcacgcctgtaatcccagcactttggaaggccaaggtgggtggatcacctgaggtcaggagttcgagaccaccctggccaacaaggcaaaaccccgtctctattaaaatacacaaaattagccaggcatggtggtgcacgcctgtaatcccag

SEQ ID NO: 522220 - DNA, 224 bp, Homo sapiens
gcggccgctactactactaaataggcggccgtcagacggactacgccaaggccatcgccgacgagctgggcgtcaagctgcaactgcaaccgaccaacccggccaaccgcgtgccgctgctggtcgccaacaaggtcgacctggtcctggccaacttcaccatcaccccggagcgcgccgagcaggtcaacttcagcattccctacttcagttccgggtcgacg

SEQ ID NO: 522221 - DNA, 390 bp, Homo sapiens
  misc_feature (205)..(205): n is a, c, g, or t
  misc_feature (273)..(273): n is a, c, g, or t
  misc_feature (288)..(288): n is a, c, g, or t
  misc_feature (324)..(324): n is a, c, g, or t
tcttctagtgcttttcagtgatactcacgtttgcttaaaccctgtagtgctttgtgatagttcagtcccagggaaagagaaaactcgccctaggccctaggtgggaagatggtttgaaatttttgtaatcgagtaaggcacacccgaatgtaaaaatccttttgaatgatgcctttgatcaatctttctctacacctagtctgantttttttaaaatggtagcctatattttttaatcaactaagtggtcacgcacttgaaagttttctaaantcaataaggtaatgnccagttgttatttacagctctgtaacctcccgttgngtcaagtctaaaccaagattatgtgacttgcaataaagttattcagaacagaaaaaaaaaaacccc

SEQ ID NO: 522222 - DNA, 1774 bp, Homo sapiens
  misc_feature (951)..(951): n is a, c, g, or t
gttctttttcacccatgggggcatcattttgtggctacgccactgtgtgggtagttctctttcttataatatcacctccccttttgttggttgggggcgcctcttattcttgctgatggttgcgcctcatctcttgtgtgattgatttgtgtccttcccttccctgcttggggtgggcacaccacctcttgtgcgccgccgtcgcatattgaatgagctccccccctcttttggtgggtcctcgttgatgtggactcaccctctcttctctgtgtgtgactgctgcgggtggtcgccaccccacccaacattattggggggggcccccacacctggctcgcatattttttgcggcatatagttgtggggcgcccaccatgacatttttgttcgttgcggccgcgtgtatattttctttttgtcagcaggcaccacccctcgtgggggcgccttctctttttattttacagagctcttgttctcctccttcggtgggggttaatttttgttctccgccccaagtcaccgactccgggggggtgggtgatgttttctctcctttttgggtctgcctacaatcacagagtcgtacgtcgtcgtccatacacgaactcatttctgcgggggggtgtttttctctctcctctagccgactcttctcttgttttctttacgaacagtagttgttgtgtccctgcgccgccaggcacttttctcctctccctgctgtagtatatggttctctcttgtgaagaagttagttgctctacccccgcctcctcttctctctgctcataaataggagataaatataatttgtggggtgtccgccccccctcctcataggagaaatatataagatacaataaataaattatcaaactatgacatatataaataataatactcccgccaggtaaacttcaaggtgtttctgtctgctctgtctgncttctctcgcgcgacatagccccgcactagatagagggcataagagcttctctcgcccccccttctctcctcattatagaccctcgtgtatagctcctcactactagcgtcgcacaagggaccctctttttaaaaaagagccctcccaacgagatagagcgcacgactcgtgttttgtgacaataaggggttggtgcctcaccaccagccgccctctctcagaaagagagagagaaaaagattttcccgcccaccgcgtgtcaatcactccacacccttttcacgcgccgcgcgccgcaaagagagcacactctctgcggagatctctctcgcgagtagtacacacgctctcctctcatcacttatttctctctctcgcgagatagagagccggctgctcttccccacgcggaggagaaacactcacaggcgttgagcccacacatatagtgtcgtatattctatctcacacaggtgttctccgtcttgagcccacacttgagaggtcgtcgccaacatgagaagagaagaaatagagatagagcacaccacaccaccacacctgtgtgtgttttcactatttgtgtggagagtggttataacgcccaccacatcgcacccacgatttaacccggcctgtgaagaagtctgtatgaccacttgagatgtggccccacggtcaaccacccctgatttcggcctgagtggagagaagaaagaaaggcacataatgttcgacctgggctcctgagttatcgactgctttggatgttgccccaccaaattgggatcatctaaactgagtccccctgcctaattctga

SEQ ID NO: 522223 - DNA, 206 bp, Homo sapiens
  misc_feature (28)..(28): n is a, c, g, or t
  misc_feature (38)..(38): n is a, c, g, or t
  misc_feature (42)..(42): n is a, c, g, or t
  misc_feature (60)..(60): n is a, c, g, or t
  misc_feature (67)..(67): n is a, c, g, or t
  misc_feature (89)..(89): n is a, c, g, or t
  misc_feature (104)..(104): n is a, c, g, or t
  misc_feature (140)..(140): n is a, c, g, or t
atgtttttgaataatgcctttataaatntttttttcantgtntatttaagtggaattaanatatgtnaggaactccccctcccctaaantcaataaggtaatgnccagttgttatttacagctctgtaacctcccgttgngtcaagtctaaaccaagattatgtgacttgcaataaagttattcagaacagaaaaaaaaaaacccc

SEQ ID NO: 522224 - DNA, 479 bp, Homo sapiens
gtcagaagatcctggcaactggtgccaatgttattcgtaaccactggtggaacttcgactgacctactgtggtctgaacggtacttttgtgggacgggctggtgctactggcacgttagaacgacgttttaaacaaggggacccttaaacggcatttggccaaaaaagggccttatcctgtgtggaaaggacaaaacccataacttttcccttgttattaccaaaaccccccgtgtgggggccccaaaattttttgtgggggcaacaccggggttgcgaacaaggaaaaaagacctctatattgacagaggcctgggcacacatggatatggggggaaccacgggcaagaaaggaaacgtgggggtaacaacggggacggaaagggaaaaaattttatgggttgggaacttgggaacttgggaaacggggccccttgggaaactttccctttttaaaaattttccaaaataacaaaaag

SEQ ID NO: 522225 - DNA, 92 bp, Homo sapiens
ggatttgctggtgcagtacaactaggcttaatagggagctcgaattcgctcgaattcgagctcgaattcgagctagaattcgagattcaagc

SEQ ID NO: 522226 - DNA, 229 bp, Homo sapiens
  misc_feature (5)..(5): n is a, c, g, or t
aagtntagaagatatctaatagcatcattgtggcagatggtaaatcagcagccagctttctaaagtcagtctcttcctcagcattctccacttagtatctgtatcttctacatcttcctatccccctcaggtacttgacctggtgagtaagtcaataaaagtttctggaacagaaggtccagagctggactcataccaagaattgtcaaggatgaggaaattacacttc

SEQ ID NO: 522227 - DNA, 134 bp, Homo sapiens
  misc_feature (111)..(111): n is a, c, g, or t
tgcggtgtctacgatctatctgcaccacagctcatcctctatattaaggtcagttaggactgtaacaatgcgggcagaaagaagaggttaagcacttcaatccttctctgngttcactatcattttgacttgag

SEQ ID NO: 522228 - DNA, 146 bp, Homo sapiens
tcttgaagaaaatcagctgcactaacgctaaatagacttgcctaacatctcctcctagtaatggacacagactactggtttcccagtaccggtgcggaaatgttctgctgttaacataacataaacgtgtgcgtgtctctcctata

SEQ ID NO: 522229 - DNA, 446 bp, Homo sapiens
ccagaactgcctttcagactttacatttgcatgcggatggatcccaatacgtattcattgatgacttgcgtgcgctcatgtgcggatccatagttcctgaactacaatggatgtccaaagacctagaaatggtgattatgtagccatagcgccttcaactccttgtatgtatggtcttgcagatcagagctgcatgctttgctgctgtgggagatgatcagtgtatcggcagacttgactcagcacgatatgaagtgacactgttatggtcactggaagcatatggaattgctgatctgcaccaactgggtatttgttgatgggacgatttctgatcatgttaggcataccgatcacatggatgacgtcccaatgtggaacgtactctttgaagctaactgatgtcgagattacagtttgcctacacatggactgtgtattacctc

SEQ ID NO: 522230 - DNA, 294 bp, Homo sapiens
aactttttccccaaccccccttttactttttttttttgggggaagggaaccccaacggtttaatcccccttctaccaacccctgaaataagcttttggaaatcaaaggaaattgcccgttaccccctccggattttaaacttggctatcccgtttgttaattccccaagattttgttttcctttcatccctaattgttttgatccttggcagaaaaaaaggatttgaaattcaaaccagtttggccccctattttaatttctttgaattaaaaaaaaaactttttcaaaaggga

SEQ ID NO: 522231 - DNA, 176 bp, Homo sapiens
ggggccttggaatgccaggaaaaaactttttcaactgagatcaaggcttcctggagggaacccctgcaaaaaggccctcaggcagttttccagttatgtgacaaagggcaaaaacggccatagggtgcttttagttttgggatggtcccatgaccccatccagcccttggacctta

SEQ ID NO: 522232 - DNA, 529 bp, Homo sapiens
aaaaatacaaaaatcagccgagtgtggtggtgcacacctgtcatcccaggtacttgggaggctggagcacgagaatcacttgaacctgggaggcagaggctgcagtgagccaagatcacaccagagtgagactctgtctcaaaaataaataaaattttaaaaacgctcgacttggctgggcacggtggctcatgcctgtaatcccagcacttgggaggccgaggcaggcagatcacctgaggttgggagttcgagaccagcctgatcaacatggagaaaccccatctctactaaaaatacaaaattagccaggtgtggtggcacatgcccagttccccatcattaaactcaggcctgtacctggctgtccgttaaaacaaaaaaaacaaacgaaaaaaaaaaagaaagagaagagagagagagaaaagaagagaaaaacaaaaagagagaaaaacgagaagaaaaaagagaaacggacgggagaagaggggggaaagaaggggaagggtggacggaaaaagggaaagag

SEQ ID NO: 522233 - DNA, 175 bp, Homo sapiens
ttttcccacagattcacccccccacccccctccatttccctcattccttttaggagcccccccccctaccccccatttgaagaacccggatacataaaatttagacaaaaaaggaaggaatcgaaccccccaaaggtggtttcaagccaaccccatggcccccatgactttttca

SEQ ID NO: 522234 - DNA, 101 bp, Homo sapiens
ccaagtccttctgtactgacctcgaggtggcacccacatgtgctgtggttcctcctcaccgctccgagcgatgggctgagtttcacgcacagtaatgagaa

SEQ ID NO: 522235 - DNA, 152 bp, Homo sapiens
ctatggcttcttgctgttgttgtattagggcatacaacacagatcagagactttcatttctctttttatggttttctccttgagaaattggcactttgatctgtatctttgtgtaacagcttacacatacagatcctaccagcactattacc

SEQ ID NO: 522236 - DNA, 150 bp, Homo sapiens
  misc_feature (56)..(56): n is a, c, g, or t
  misc_feature (78)..(78): n is a, c, g, or t
acccactccaccttaggtaccagacaaccttaggccaaaccactttacccaaatanagtataggcgatagagattganacctggcgcaatagatatagtaccgcaaggagagatgaaaaattatagccaagcataatatagcatggagta

SEQ ID NO: 522237 - DNA, 405 bp, Homo sapiens
taaacaggcatcaagttcagtgtgttcttattatgttcgacagagttctgcatctgtcatcgactagtctataaccatgtgtttattcattttattttttgagacagagtctcgctcagttgcccaggctgaagtgcagtgtcaggatctcggttcactgcaacctccgtctctggggttcaggcaattctcacgcctcagcctccggaggagccgggtctacaggcacgcaccaccacacctggctaatttttgtatttttattagagattgggatagccatgtctctattaaaaggccttttagatagatcgtggagctaatccgacctgaacatcccagtcctggagtattttagcatgaggatagctctctattggtctggaaggttcgcctgatggttgg

SEQ ID NO: 522238 - DNA, 118 bp, Homo sapiens
gaaaaacacaggatcaggtctccttggcatggctaacattgaccttggaaaagggcgaggacttgtgattacaattattcttccaagaggcctctgagtacacaggttgaagaattca

SEQ ID NO: 522239 - DNA, 245 bp, Homo sapiens
cgcgggtctctgcctgtttctcaacatcttcctatatacttaggaaagacggcactagccctaggggcagcgctacagcgtgtatctaggataataaaccagagcaacagcctcagacacattgatttgagaagagtctatagacttaaacctaggaataggaatattacatcttggattatatacaactggctgccattggttaagacatcaacaggacattaacccaggtctagagtttatct

SEQ ID NO: 522240 - DNA, 195 bp, Homo sapiens
gttgagacatgagataaaggtacgaaagtgggtttaacactatgtgaacacacaatagcgtagacccaaagtgggattagatagcccaatatgcttagacctaaagctcaccagttctagtccacaaaagtgttcgccagaaggatacgagccagagcttaatactcagaggagccccgcggggggtctgcattg

SEQ ID NO: 522241 - DNA, 445 bp, Homo sapiens
tctcttaactggactctgttttcttttggtttatctttggtctctgtgggatctttactgctaagatgtagagccttaatgctggcaataccttcaggcccctgtaggcttctggctgcattctgtttgctattgtctctatgacagtttcatgcccagaatgggtcaccagtagacagtgattttcatttgtccaggacccatatcagagtccttcccgttatgaagttgcataggggaacacaatggtcataatatgattaggtatagttaatgtgactacttgctcaatgcaaattaattacaaagttaaactgaaaactatgcaaaagatatagaattctataaaattaattaaaaatgaaagtggagaacttctcccatcacatggtaaactattgtaaaaggattagacaggaccatatcaattaaaactaaagacact

SEQ ID NO: 522242 - DNA, 277 bp, Homo sapiens
aacccgcagttgggcttggcctcaaggatgcaggaacaagctggctagctggaggaggccctgcagaaggacaagcaggacattgcccggctgctgcgtgagtaccaggagctcatgaacaccaagctggccctggacgtggagatctgccactataccgcaagctgctgtgagggcgagagaatgcagactcacgtggaagctactactccatgcagcagtagggggtgtctggcctagcgtggttgggctccagtgttggggggctctaggcttc

SEQ ID NO: 522243 - DNA, 1381 bp, Homo sapiens
  misc_feature (316)..(316): n is a, c, g, or t
  misc_feature (530)..(530): n is a, c, g, or t
tctggctaccgggatctaaaatggaagcgttttgggggtcggggtccggatttgggggggggggttccggccccgaggaacagttttataccgcatttccgctccacctcccgaatttccttctcagtgaatctccgggcgtctctgtgcactttatacaggaggtctccaatctcagcggcggaacccagaaaccccgagggtgtgacccggagaccctctcagtctcctctgcgggcgttaagttctcagaaggggcgagagtgtggagtagattgtgccgacaaaacatgtgcgcgtgggatctccatagcgngctctcctgtgtggccctgcgtttctcccgacacaacattcttctgtgcgcgcatattatagtgcgcgagagtctcacacacacacacagagtgctcaccccacagtgcgcgctggtgtgtgccctctctgtggcgcagacactattcaccgcgccgtgaaattttctcacagcagtattatgtgtgaacagccccagtagttttctctgctgnggccccagagaagtgggtgtgacagtgtgaagatgacagagaagactctctctgtggggaaagacatgtgtgcacacacagagcctatatattagtctctctatagagagcctatattctccattctcgatgtgcggcttgtgcacccgaggggccccctgagtgtttacagagccgcggagcgctctcgaaagagaagtgaaacaccctctgtgttgtgtgtgtgacaccacccaacccagagtgcgtctcccactccgggaagagaggctatagtggccgtgaaagtgcgagagaaaagaaaggactttctccctgctgcggggtatctgtgtgtgggccaccctgttgtccgtgtggggtgtgttttaacgcacctataatttaaagatgccccccccccttctccgcgcggtggggacccacgtggtggggttctcaggtgggggtggccaatatacctctgtggggctctcaaaggccccttcgtggggcgtggtcaaaaaaaaaggttttctgtggggaaaaaaaactccaccccccaaggtgtggctcattagaaggccccaggaaacgccggtattgggtcccccggggcgaaaactttttacgtttagaacacaaggggcttgagctttgtgccgaaatggtggccgtggatgtaactttacaacccgcgaagaataattggccccccggttctcttttaaaccacaccccgcgggttgtcttccaaaaaccggcgcccccatgtgtgtgtccaccgctgaaaacacaggggtgctgttgcgacaaacattcacagggggggggaccccctttgggtgccccccaggagagacccccacctg

SEQ ID NO: 522244 - DNA, 229 bp, Homo sapiens
cgcttagtctagatgggagggacgctttactctgcagggatgagtggtcttctcgaaaaccaatgtggcggcagccctgggctctgagaccacaaatgccttgaacttgggggccggagcttgccgcagagtacctcagagccacaacagcaaggtcactacctcaggcatccctcattccccactccctggatggggctgtcgggctagtcggggctgtttggctagt

SEQ ID NO: 522245 - DNA, 227 bp, Homo sapiens
tagtcgtctagacggatcccacagaggctgatggttatcttaagtaatgagtcacctggtagtctggctggtggcaacaagggtgtcaatcaattgttcagcattccttcccgaggtgggacactccgcaagcttcatttgatatttggatctcctaaggccagtctctggaattctttttttttttttttttttttagaaaacatttcgttactttaatttttttg

SEQ ID NO: 522246 - DNA, 140 bp, Homo sapiens
agaggatcccgtgttgaaggcgagcatagcacttgcggcagatcatctggtcgcagttgtatttctggggcaagctggcggagagaaggctcaataatgccacctcgcagggcgcaacaccaggtgcagggtggactctt

SEQ ID NO: 522247 - DNA, 305 bp, Homo sapiens
  misc_feature (18)..(18): n is a, c, g, or t
  misc_feature (293)..(294): n is a, c, g, or t
aaataagccagagtggcngaaaatgaaatccaaaattgtaaaaatattccaattaagtccagcactttataggcccaaagcaattatttttaatatgttttatttttaattattatggtatataatatttgtatatatttattggatacatgtgatgttttgatactgtcatataatgtgtaatgatcaaatcagggtaactgaactatgcaacccctccagcatttatcatttctttgtgttcagaatattccaattctacactttaattatttaaaaataaacaataaaannctgtttactat

SEQ ID NO: 522248 - DNA, 812 bp, Homo sapiens
  misc_feature (553)..(553): n is a, c, g, or t
  misc_feature (590)..(590): n is a, c, g, or t
  misc_feature (711)..(711): n is a, c, g, or t
  misc_feature (736)..(737): n is a, c, g, or t
  misc_feature (747)..(747): n is a, c, g, or t
  misc_feature (757)..(757): n is a, c, g, or t
  misc_feature (776)..(776): n is a, c, g, or t
  misc_feature (788)..(788): n is a, c, g, or t
tcaccgggccggttctcttcgggaatttacgcaagggccaccccccatatccgcctttatgtcctatatacttccaggtcatcccttcctgggagaggtcatccctggaactggaagtccttatcgtaccttggtagagagtatccgcaaggtttcctcctcaggaagattcaaggacctgatagcaagatccggctttcaacacaggtgacttacgaaagtctaacatcaggccttgtgccacatcaatctggcttccaacgttaattcccttcctatcactggagcactgaacccgtcatatcctgttgaaaagcctggaactgaagggataatctggccaatgagacaacgccgcacgagcatctcctcttaaggagtacgtgcctctggactcatgtttgaatcgacaccgtctcacaagtggaagaaccaattcttgtcacttttttacagctttctttggagctgcttcagtccactctcccacgaggcactttggtctgtatctttgctcacactgctaaatttcttcttggctgtaggggtgtgntggttaaaggtaccaccaccccctaaagactccgttnttgaaatgagtggtatttatagacttctctgcgtggtgctgcctttctagagggatgatagatcatttgaaccccatagaccaattttaacccgaaaatttaattgtacctgaatcaaccnttcagcctaggacgaagtctaggcnngtcagagtanttatgatcangagaattgtgtctgaaccngtaacgagttanccttttacacgaggaaaaaactcg

SEQ ID NO: 522249 - DNA, 124 bp, Homo sapiens
  misc_feature (33)..(33): n is a, c, g, or t
  misc_feature (78)..(78): n is a, c, g, or t
  misc_feature (117)..(117): n is a, c, g, or t
tcccctccttgccatcacctgaagacccccacnccaaacactgaatgtcacctgtgcctgccgcctcggtccaccgtncggcccgtgtttgactcaactcagctccttaacgctaantttccgg

SEQ ID NO: 522250 - DNA, 706 bp, Homo sapiens
  misc_feature (377)..(377): n is a, c, g, or t
ggaactggctgtcggtgggggtgcagcactgagccgccgacagggcgggtgggctttgctgccgagcaagcggcgctgtcttgtgggcctagcggcgaggcgacccgcacagtactgtaagattgatgttaaaggcatggtgttcaccccacttcatcagcgtacataagttatctcttcttttggacccttattttatgccataatgtatgtcattgaaagtgcccgactagagacctcctaaaaggaaatacctatcaagtggaagaaaatctgtatttcaaaaactttatgacttgtactactggaacgaatgtgatcaaaacgaagcctgaacgttaaggcagacaattaacgaacgacaatgtgacacttgnttacgcagacagcttgttactgcaaggagcactttgctccagctcgtttagctggtcacatctataacccagagaaatgacgggatattctctgactgctcaggcggaaaaaaccggatcgagcttccgatgaccgattcgtactgccctatgaacgaacggagagtatgcttgaactatctggatgcagacagaattacctcactatagtgggttgatctccatagcaaaaatctcaggttaaatatttgtccactctgcggactgtgtcatagcagaaatacgtgactacaggcagtccagtaacatgcaaatctccatggttacca

SEQ ID NO: 522251 - DNA, 171 bp, Homo sapiens
gactcatagatcccctcatcgaaaccctaacctgttgcagggacactagatcagagggaaaggctgctgtatttcgatgacggccatcgaaaccctcttgaactctctcttcaaagttcttttcaactttcccttacggtacttgttgactatcggtcagggtttcgatga

SEQ ID NO: 522252 - DNA, 341 bp, Homo sapiens
atcagctatcaacatctttctctctttaatcattattgtaatcaaattactgttaattgtgccttttatcatgggaattttattactttaataaatttagatttttttccaagtttaagaaagaatccagttcacacttttttattctcttctccttctgtttctttgaatttagctgttgacagtgtcttgaagaggatgacaataattggtgtaattttatccttccgatcattggcacaagaagcacttagagatgtaagaaaccattacaagtatatactcggtatccaaacaatcccttttaatttctcagaaatttaaagttaagtttcagattc

SEQ ID NO: 522253 - DNA, 2182 bp, Homo sapiens
tttttcccctcttttttttttcgcccccctgtaacgacgccagtccagctgcatcctccagttcactctagagatcccctcgcgaacgtgttatcccaacaatgacttctcatctggaaatacgctttaccaagtcaattgttgggatgactatgtataatcaagccacacaggaaattgcaaaaccttcagaacttctaacaagtgtaagagcatacatgaccgtactccagtcaatagaaaactatgtgcagattgatattacaagagtatttaataatgtgcttcttcaacaaacacaacatttagacagtcatggagagccaaccattacaagtctatacacaaattggtatttggaaactttgttacgacaagtcagcaatggccatatagcatattttcctgcaatgaaagcgtttgtgaacttacctacagaaaatgaattaacattcaatgcagaggaatattctgacatatcagaaatgaggtcattatcagaactactaggcccatatggtatgaagtttctaagtgaaagccttatgtggcatatttcatcacaagttgctgaacttaagaaacttgtggtggagaatgttgatgtgttaacacaaatgaggaccagctttgacaaaccagaccagatggctgcactgtttaaaagattatcatctgttgacagtgtcttgaagaggatgacaataattggtgtaattttatccttccgatcattggcacaagaagcacttagagatgtgttatcctaccacattccttttcttgtaagttcaattgaagattttaaggatcacattccaagggaaactgatatgaaggttgcaatgaatgtgtatgagttatcatcagctgccggattaccttgtgagattgatcctgcattggtcgtagctctttcttcacaaaaatcggaaaacattagtccagaagaagagtataaaattgcctgccttctcatggtgtttgtggcagtttctttgccaacactggccagtaatgtgatgtctcagtacagccctgctatagaagggcattgcaacaacatacattgcttggccaaagccatcaaccagattgctgcagctttgtttacaattcacaaaggaagcattgaagaccgtcttaaagaatttctggcgcttgcatcctccagtctactgaaaattggccaggagacagataaaactacaacaagaaatagagaatctgtttatttactgctagatatgattgtacaagaatctccattccttacaatggatcttttggaatcttgttttccttatgtcttgctgagaaatgcataccatgctgtctacaaacaaagtgttacatcttctgcataaaattacctacttaatcaagataagcacgcatttttgttgccttggttttacctgtagactgtggaactattttaccttaagacctgaaaaagttttgtggattataaatttctttcatacggttgtattttctgatcattggtttcttaatatggttgtactacagtatacttggttgatttaggttgcacattcactgaattcactgagattattcctataattttaaagtatcatttatttgaaaaacatacattatcaacatgtttttgatatttgataatgaaaaaaatctttgcttgtttatttctgaaaaagaactgtatttagtgattattttagatagtgatattatagcattcatctgtgtgtaaattatttcatatagggaagagttctgatctgtacctatggttcttattgaaaacaacattggatgtgcatttctgtgatgttatgaatacatttctactttattttgaaacatttgccaaactaaatactgtaacactgtataacatttaaaaatgttaaagaactgcttagtattagaagcagatcatttcccaaaattctaagagcagcagcatatgttgttgcttgtataaagcctagcgataatttttagactaacttccatggtgccctgttggcattagcactaccattgtaccctgctgtataataaacaatcttagacatttatcaactgttgatacaaatgttagtccctaaccactttttatatatgttttaaatttttgaaattcaagtgtaccttccataacataaaataaacactagactgtatcaca

SEQ ID NO: 522254 - DNA, 259 bp, Homo sapiens
acctcgagagcgtcatcagcttcaattaactggtcgtcgattcgatttgtgtccgatctgtgtcgttccattcgtgccaccgtctcggggcaacaactgcagacgcctcgtcgcccacggctgtgatccactctcagtcagtaccatggcccatcctctgaagcgcatgcccccatatcagtgcacccagctagcaatacattcagcaatcatagtcaccccctcagctctatcttcacaggcacggttgcaagccgat

SEQ ID NO: 522255 - DNA, 322 bp, Homo sapiens
  misc_feature (250)..(250): n is a, c, g, or t
gcgggctggggggcaggagctcgggaccacatcgaaaagtgctaagttgcactcagtcaggtaactcttgcttctctctctctttttgttgtcttgaaatgtctgtccaagtcgagatctatgtggagtcttggtattgcaatgaaggagagggcacaacttagttaatataaaagtcccaagtttgtctttaaaaacataattcgaggtttctctttaatgcatattgggtgtttgctgactagagcanttttgattagttcgtgcatggagatttgttggagatgagaaaccttaagtttgcacacctgttctgtagaag

SEQ ID NO: 522256 - DNA, 2138 bp, Homo sapiens
agcataaactattcaaacatggtggtatgggaacatacctttaccccacgagaatatttgacttctcatctggaaatacgctttaccaagtcaattgttgggatgactatgtataatcaagccacacaggaaattgcaaaaccttcagaacttctaacaagtgtaagagcatacatgaccgtactccagtcaatagaaaactatgtgcagattgatattacaagagtatttaataatgtgcttcttcaacaaacacaacatttagacagtcatggagagccaaccattacaagtctatacacaaattggtatttggaaactttgttacgacaagtcagcaatggccatatagcatattttcctgcaatgaaagcgtttgtgaacttacctacagaaaatgaattaacattcaatgcagaggaatattctgacatatcagaaatgaggtcattatcagaactactaggcccatatggtatgaagtttctaagtgaaagccttatgtggcatatttcatcacaagttgctgaacttaagaaacttgtggtggagaatgttgatgtgttaacacaaatgaggaccagctttgacaaaccagaccagatggctgcactgtttaaaagattatcatctgttgacagtgtcttgaagaggatgacaataattggtgtaattttatccttccgatcattggcacaagaagcacttagagatgtgttatcctaccacattccttttcttgtaagttcaattgaagattttaaggatcacattccaagggaaactgatatgaaggttgcaatgaatgtgtatgagttatcatcagctgccggattaccttgtgagattgatcctgcattggtcgtagctctttcttcacaaaaatcggaaaacattagtccagaagaagagtataaaattgcctgccttctcatggtgtttgtggcagtttctttgccaacactggccagtaatgtgatgtctcagtacagccctgctatagaagggcattgcaacaacatacattgcttggccaaagccatcaaccagattgctgcagctttgtttacaattcacaaaggaagcattgaagaccgtcttaaagaatttctggcgcttgcatcctccagtctactgaaaattggccaggagacagataaaactacaacaagaaatagagaatctgtttatttactgctagatatgattgtacaagaatctccattccttacaatggatcttttggaatcttgttttccttatgtcttgctgagaaatgcataccatgctgtctacaaacaaagtgttacatcttctgcataaaattacctacttaatcaagataagcacgcatttttgttgccttggttttacctgtagactgtggaactattttaccttaagacctgaaaaagttttgtggattataaatttctttcatacggttgtattttctgatcattggtttcttaatatggttgtactacagtatacttggttgatttaggttgcacattcactgaattcactgagattattcctataattttaaagtatcatttatttgaaaaacatacattatcaacatgtttttgatatttgataatgaaaaaaatctttgcttgtttatttctgaaaaagaactgtatttagtgattattttagatagtgatattatagcattcatctgtgtgtaaattatttcatatagggaagagttctgatctgtacctatggttcttattgaaaacaacattggatgtgcatttctgtgatgttatgaatacatttctactttattttgaaacatttgccaaactaaatactgtaacactgtataacatttaaaaatgttaaagaactgcttagtattagaagcagatcatttcccaaaattctaagagcagcagcatatgttgttgcttgtataaagcctagcgataatttttagactaacttccatggtgccctgttggcattagcactaccattgtaccctgctgtataataaacaatcttagacatttatcaactgttgatacaaatgttagtccctaaccactttttatatatgttttaaatttttgaaattcaagtgtaccttccataacataaaataaacactagactgtatcaca

SEQ ID NO: 522257 - DNA, 1658 bp, Homo sapiens
  misc_feature (8)..(8): n is a, c, g, or t
  misc_feature (54)..(54): n is a, c, g, or t
aaaataanaaataatattaatatatataataatattaattaagacaagaactcnaggagacttgtggtggagaatgttgatgtgttaacacaaatgaggaccagctttgacaaaccagaccagatggctgcactgtttaaaagattatcatctgttgacagtgtcttgaagaggatgacaataattggtgtaattttatccttccgatcattggcacaagaagcacttagagatgtgttatcctaccacattccttttcttgtaagttcaattgaagattttaaggatcacattccaagggaaactgatatgaaggttgcaatgaatgtgtatgagttatcatcagctgccggattaccttgtgagattgatcctgcattggtcgtagctctttcttcacaaaaatcggaaaacattagtccagaagaagagtataaaattgcctgccttctcatggtgtttgtggcagtttctttgccaacactggccagtaatgtgatgtctcagtacagccctgctatagaagggcattgcaacaacatacattgcttggccaaagccatcaaccagattgctgcagctttgtttacaattcacaaaggaagcattgaagaccgtcttaaagaatttctggcgcttgcatcctccagtctactgaaaattggccaggagacagataaaactacaacaagaaatagagaatctgtttatttactgctagatatgattgtacaagaatctccattccttacaatggatcttttggaatcttgttttccttatgtcttgctgagaaatgcataccatgctgtctacaaacaaagtgttacatcttctgcataaaattacctacttaatcaagataagcacgcatttttgttgccttggttttacctgtagactgtggaactattttaccttaagacctgaaaaagttttgtggattataaatttctttcatacggttgtattttctgatcattggtttcttaatatggttgtactacagtatacttggttgatttaggttgcacattcactgaattcactgagattattcctataattttaaagtatcatttatttgaaaaacatacattatcaacatgtttttgatatttgataatgaaaaaaatctttgcttgtttatttctgaaaaagaactgtatttagtgattattttagatagtgatattatagcattcatctgtgtgtaaattatttcatatagggaagagttctgatctgtacctatggttcttattgaaaacaacattggatgtgcatttctgtgatgttatgaatacatttctactttattttgaaacatttgccaaactaaatactgtaacactgtataacatttaaaaatgttaaagaactgcttagtattagaagcagatcatttcccaaaattctaagagcagcagcatatgttgttgcttgtataaagcctagcgataatttttagactaacttccatggtgccctgttggcattagcactaccattgtaccctgctgtataataaacaatcttagacatttatcaactgttgatacaaatgttagtccctaaccactttttatatatgttttaaatttttgaaattcaagtgtaccttccataacataaaataaacactagactgtatcaca

SEQ ID NO: 522258 - DNA, 439 bp, Homo sapiens
tgctgagaacaagaagacaagtacctaggcattgaattctgacctctcaaggcctcaatgatgaccactattaataaagtatagtatggatgtgtctacataaaactctgactatattaagccctcagctttctatatggctggtttcattaccttcaagagattatggaagcatcagacgtgttatctgccataataatgctgtgtgtttctcatgagagcttcagatcctctacacactttacattcacctctcctcactgtcaccggtgacgtaggcaagggatcaacagacggtgcgtcatcaaaaacagtggaagaccggaccgtcggatgtacttagagcagcacatccacttaaataatgattgtacccatttcaccaatgaggaaatggggttataattgagacaaggctgcggtcaacttgtctggagta

SEQ ID NO: 522259 - DNA, 1589 bp, Homo sapiens
cctgatacaatcagtctcgtgtgcccaggaaacagctatgacaaaccagaccagatggctgcactgtttaaaagattatcatctgttgacagtgtcttgaagaggatgacaataattggtgtaattttatccttccgatcattggcacaagaagcacttagagatgtgttatcctaccacattccttttcttgtaagttcaattgaagattttaaggatcacattccaagggaaactgatatgaaggttgcaatgaatgtgtatgagttatcatcagctgccggattaccttgtgagattgatcctgcattggtcgtagctctttcttcacaaaaatcggaaaacattagtccagaagaagagtataaaattgcctgccttctcatggtgtttgtggcagtttctttgccaacactggccagtaatgtgatgtctcagtacagccctgctatagaagggcattgcaacaacatacattgcttggccaaagccatcaaccagattgctgcagctttgtttacaattcacaaaggaagcattgaagaccgtcttaaagaatttctggcgcttgcatcctccagtctactgaaaattggccaggagacagataaaactacaacaagaaatagagaatctgtttatttactgctagatatgattgtacaagaatctccattccttacaatggatcttttggaatcttgttttccttatgtcttgctgagaaatgcataccatgctgtctacaaacaaagtgttacatcttctgcataaaattacctacttaatcaagataagcacgcatttttgttgccttggttttacctgtagactgtggaactattttaccttaagacctgaaaaagttttgtggattataaatttctttcatacggttgtattttctgatcattggtttcttaatatggttgtactacagtatacttggttgatttaggttgcacattcactgaattcactgagattattcctataattttaaagtatcatttatttgaaaaacatacattatcaacatgtttttgatatttgataatgaaaaaaatctttgcttgtttatttctgaaaaagaactgtatttagtgattattttagatagtgatattatagcattcatctgtgtgtaaattatttcatatagggaagagttctgatctgtacctatggttcttattgaaaacaacattggatgtgcatttctgtgatgttatgaatacatttctactttattttgaaacatttgccaaactaaatactgtaacactgtataacatttaaaaatgttaaagaactgcttagtattagaagcagatcatttcccaaaattctaagagcagcagcatatgttgttgcttgtataaagcctagcgataatttttagactaacttccatggtgccctgttggcattagcactaccattgtaccctgctgtataataaacaatcttagacatttatcaactgttgatacaaatgttagtccctaaccactttttatatatgttttaaatttttgaaattcaagtgtaccttccataacataaaataaacactagactgtatcaca

SEQ ID NO: 522260 - DNA, 106 bp, Homo sapiens
ggatctgagtgaggcggaaaatagattcgagcgatgttttatctttggtgcagtttgggcacttaaaatgagatcttgtttcctggtttgcagcggtactggtttg

SEQ ID NO: 522261 - DNA, 2210 bp, Homo sapiens
tttttcccctcttttttttttcgcccccctgtaacgacgccagtccagctgcatcctccagttcactctagagatcccctcgcgaacgtgttatcccaacaatgacttctcatctggaaatacgctttaccaagtcaattgttgggatgactatgtataatcaagccacacaggaaattgcaaaaccttcagaacttctaacaagtgtaagagcatacatgaccgtactccagtcaatagaaaactatgtgcagattgatattacaagagtatttaataatgtgcttcttcaacaaacacaacatttagacagtcatggagagccaaccattacaagtctatacacaaattggtatttggaaactttgttacgacaagtcagcaatggccatatagcatattttcctgcaatgaaagcgtttgtgaacttacctacagaaaatgaattaacattcaatgcagaggaatattctgacatatcagaaatgaggtcattatcagaactactaggcccatatggtatgaagtttctaagtgaaagccttatgtggcatatttcatcacaagttgctgaacttaagaaacttgtggtggagaatgttgatgtgttaacacaaatgaggaccagctttgacaaaccagaccagatggctgcactgtttaaaagattatcatctgttgacagtgtcttgaagaggatgacaataattggtgtaattttatccttccgatcattggcacaagaagcacttagagatgtaagaaaccattacaagtatatactcggtgttatcctaccacattccttttcttgtaagttcaattgaagattttaaggatcacattccaagggaaactgatatgaaggttgcaatgaatgtgtatgagttatcatcagctgccggattaccttgtgagattgatcctgcattggtcgtagctctttcttcacaaaaatcggaaaacattagtccagaagaagagtataaaattgcctgccttctcatggtgtttgtggcagtttctttgccaacactggccagtaatgtgatgtctcagtacagccctgctatagaagggcattgcaacaacatacattgcttggccaaagccatcaaccagattgctgcagctttgtttacaattcacaaaggaagcattgaagaccgtcttaaagaatttctggcgcttgcatcctccagtctactgaaaattggccaggagacagataaaactacaacaagaaatagagaatctgtttatttactgctagatatgattgtacaagaatctccattccttacaatggatcttttggaatcttgttttccttatgtcttgctgagaaatgcataccatgctgtctacaaacaaagtgttacatcttctgcataaaattacctacttaatcaagataagcacgcatttttgttgccttggttttacctgtagactgtggaactattttaccttaagacctgaaaaagttttgtggattataaatttctttcatacggttgtattttctgatcattggtttcttaatatggttgtactacagtatacttggttgatttaggttgcacattcactgaattcactgagattattcctataattttaaagtatcatttatttgaaaaacatacattatcaacatgtttttgatatttgataatgaaaaaaatctttgcttgtttatttctgaaaaagaactgtatttagtgattattttagatagtgatattatagcattcatctgtgtgtaaattatttcatatagggaagagttctgatctgtacctatggttcttattgaaaacaacattggatgtgcatttctgtgatgttatgaatacatttctactttattttgaaacatttgccaaactaaatactgtaacactgtataacatttaaaaatgttaaagaactgcttagtattagaagcagatcatttcccaaaattctaagagcagcagcatatgttgttgcttgtataaagcctagcgataatttttagactaacttccatggtgccctgttggcattagcactaccattgtaccctgctgtataataaacaatcttagacatttatcaactgttgatacaaatgttagtccctaaccactttttatatatgttttaaatttttgaaattcaagtgtaccttccataacataaaataaacactagactgtatcaca

SEQ ID NO: 522262 - DNA, 1533 bp, Homo sapiens
agcggaagcgatcagaggatcccctctggtatgcaagtgtctggaagaggtgacaataattggtgtaattttatccttccgatcattggcacaagaagcacttagagatgtgttatcctaccacattccttttcttgtaagttcaattgaagattttaaggatcacattccaagggaaactgatatgaaggttgcaatgaatgtgtatgagttatcatcagctgccggattaccttgtgagattgatcctgcattggtcgtagctctttcttcacaaaaatcggaaaacattagtccagaagaagagtataaaattgcctgccttctcatggtgtttgtggcagtttctttgccaacactggccagtaatgtgatgtctcagtacagccctgctatagaagggcattgcaacaacatacattgcttggccaaagccatcaaccagattgctgcagctttgtttacaattcacaaaggaagcattgaagaccgtcttaaagaatttctggcgcttgcatcctccagtctactgaaaattggccaggagacagataaaactacaacaagaaatagagaatctgtttatttactgctagatatgattgtacaagaatctccattccttacaatggatcttttggaatcttgttttccttatgtcttgctgagaaatgcataccatgctgtctacaaacaaagtgttacatcttctgcataaaattacctacttaatcaagataagcacgcatttttgttgccttggttttacctgtagactgtggaactattttaccttaagacctgaaaaagttttgtggattataaatttctttcatacggttgtattttctgatcattggtttcttaatatggttgtactacagtatacttggttgatttaggttgcacattcactgaattcactgagattattcctataattttaaagtatcatttatttgaaaaacatacattatcaacatgtttttgatatttgataatgaaaaaaatctttgcttgtttatttctgaaaaagaactgtatttagtgattattttagatagtgatattatagcattcatctgtgtgtaaattatttcatatagggaagagttctgatctgtacctatggttcttattgaaaacaacattggatgtgcatttctgtgatgttatgaatacatttctactttattttgaaacatttgccaaactaaatactgtaacactgtataacatttaaaaatgttaaagaactgcttagtattagaagcagatcatttcccaaaattctaagagcagcagcatatgttgttgcttgtataaagcctagcgataatttttagactaacttccatggtgccctgttggcattagcactaccattgtaccctgctgtataataaacaatcttagacatttatcaactgttgatacaaatgttagtccctaaccactttttatatatgttttaaatttttgaaattcaagtgtaccttccataacataaaataaacactagactgtatcaca

SEQ ID NO: 522263 - DNA, 208 bp, Homo sapiens
aacgatctgcatgtgtgaagcaacagatgagaaatgagcatgagcctgattctgtgcttaaatattgtgaagtcaaatatatataaatattgttatctatttgttatgttttagaggtgaagtctcactctattgcccaggctggagtgcagtagcacgatctctgctcactacagcctccacctcccaggttcatgcgattctcctg

SEQ ID NO: 522264 - DNA, 1523 bp, Homo sapiens
tttttccagtgcctgcatgagatagtcaaccgttcaaacttaacgtgtggacggttgactatctcatgcaggcagtggaaaaagaccccacgcaccacatcaagaagtaccgtgctgtattcgcacaaggcaaaggtgtggcctggcctaaggcggccacgttcaacgagcaacaatcgattcctgtcaccactgctgagcagtgggctcggaaaaccttgcagtccattgaaaaccggatgacattcactctgtacgtacagagtgaaatcggaaaacattagtccagaagaagagtataaaattgcctgccttctcatggtgtttgtggcagtttctttgccaacactggccagtaatgtgatgtctcagtacagccctgctatagaagggcattgcaacaacatacattgcttggccaaagccatcaaccagattgctgcagctttgtttacaattcacaaaggaagcattgaagaccgtcttaaagaatttctggcgcttgcatcctccagtctactgaaaattggccaggagacagataaaactacaacaagaaatagagaatctgtttatttactgctagatatgattgtacaagaatctccattccttacaatggatcttttggaatcttgttttccttatgtcttgctgagaaatgcataccatgctgtctacaaacaaagtgttacatcttctgcataaaattacctacttaatcaagataagcacgcatttttgttgccttggttttacctgtagactgtggaactattttaccttaagacctgaaaaagttttgtggattataaatttctttcatacggttgtattttctgatcattggtttcttaatatggttgtactacagtatacttggttgatttaggttgcacattcactgaattcactgagattattcctataattttaaagtatcatttatttgaaaaacatacattatcaacatgtttttgatatttgataatgaaaaaaatctttgcttgtttatttctgaaaaagaactgtatttagtgattattttagatagtgatattatagcattcatctgtgtgtaaattatttcatatagggaagagttctgatctgtacctatggttcttattgaaaacaacattggatgtgcatttctgtgatgttatgaatacatttctactttattttgaaacatttgccaaactaaatactgtaacactgtataacatttaaaaatgttaaagaactgcttagtattagaagcagatcatttcccaaaattctaagagcagcagcatatgttgttgcttgtataaagcctagcgataatttttagactaacttccatggtgccctgttggcattagcactaccattgtaccctgctgtataataaacaatcttagacatttatcaactgttgatacaaatgttagtccctaaccactttttatatatgttttaaatttttgaaattcaagtgtaccttccataacataaaataaacactagactgtatcaca

SEQ ID NO: 522265 - DNA, 1634 bp, Homo sapiens
caaggaaattaagagaggacacaaacaaatggaaaaaatattccatgctcatggaaaggaagaatcaatatcatgaaaatggccatactgtccaaagtaattcatagattcaatgctatgcccatcaagctaccactgcctttcttcacagaattagaaaaaaagtactttaaatttcatatggatccaaaaaagaccccacgcaccacatcaagaagtaccgtgctgtattcgcacaaggcaaaggtgtggcctggcctaaggcggccacgttcaacgagcaacaatcgattcctgtcaccactgctgagcagtgggctcggaaaaccttgcagtccattgaaaaccggatgacattcactctgtacgtacagagtgaaatcggaaaacattagtccagaagaagagtataaaattgcctgccttctcatggtgtttgtggcagtttctttgccaacactggccagtaatgtgatgtctcagtacagccctgctatagaagggcattgcaacaacatacattgcttggccaaagccatcaaccagattgctgcagctttgtttacaattcacaaaggaagcattgaagaccgtcttaaagaatttctggcgcttgcatcctccagtctactgaaaattggccaggagacagataaaactacaacaagaaatagagaatctgtttatttactgctagatatgattgtacaagaatctccattccttacaatggatcttttggaatcttgttttccttatgtcttgctgagaaatgcataccatgctgtctacaaacaaagtgttacatcttctgcataaaattacctacttaatcaagataagcacgcatttttgttgccttggttttacctgtagactgtggaactattttaccttaagacctgaaaaagttttgtggattataaatttctttcatacggttgtattttctgatcattggtttcttaatatggttgtactacagtatacttggttgatttaggttgcacattcactgaattcactgagattattcctataattttaaagtatcatttatttgaaaaacatacattatcaacatgtttttgatatttgataatgaaaaaaatctttgcttgtttatttctgaaaaagaactgtatttagtgattattttagatagtgatattatagcattcatctgtgtgtaaattatttcatatagggaagagttctgatctgtacctatggttcttattgaaaacaacattggatgtgcatttctgtgatgttatgaatacatttctactttattttgaaacatttgccaaactaaatactgtaacactgtataacatttaaaaatgttaaagaactgcttagtattagaagcagatcatttcccaaaattctaagagcagcagcatatgttgttgcttgtataaagcctagcgataatttttagactaacttccatggtgccctgttggcattagcactaccattgtaccctgctgtataataaacaatcttagacatttatcaactgttgatacaaatgttagtccctaaccactttttatatatgttttaaatttttgaaattcaagtgtaccttccataacataaaataaacactagactgtatcaca

SEQ ID NO: 522266 - DNA, 2501 bp, Homo sapiens
tttttcccctcttttttttttcgcccccctgtaacgacgccagtccagctgcatcctccagttcactctagagatcccctcgcgaacgtgttatcccaacaatgacttctcatctggaaatacgctttaccaagtcaattgttgggatgactatgtataatcaagccacacaggaaattgcaaaaccttcagaacttctaacaagtgtaagagcatacatgaccgtactccagtcaatagaaaactatgtgcagattgatattacaagagtatttaataatgtgcttcttcaacaaacacaacatttagacagtcatggagagccaaccattacaagtctatacacaaattggtatttggaaactttgttacgacaagtcagcaatggccatatagcatattttcctgcaatgaaagcgtttgtgaacttacctacagaaaatgaattaacattcaatgcagaggaatattctgacatatcagaaatgaggtcattatcagaactactaggcccatatggtatgaagtttctaagtgaaagccttatgtggcatatttcatcacaagttgctgaacttaagaaacttgtggtggagaatgttgatgtgttaacacaaatgaggaccagctttgacaaaccagaccagatggctgcactgtttaaaagattatcatctgttgacagtgtcttgaagaggatgacaataattggtgtaattttatccttccgatcattggcacaagaagcacttagagatgtgttatcctaccacattccttttcttgtaagttcaattgaagattttaaggatcacattccaagggaaactgatatgaaggttgcaatgaatgtgtatgagttatcatcagctgccggattaccttgtgagattgatcctgcattggtcgtagctctttcttcacaaaaatcggaaaacattagtccagaagaagagtataaaattgcctgccttctcatggtgtttgtggcagtttctttgccaacactggccagtaatgtgatgtctcagtacagccctgctatagaagggcattgcaacaacatacattgcttggccaaagccatcaaccagattgctgcagctttgtttacaattcacaaaggaagcattgaagaccgtcttaaagaatttctggcgcttgcatcctccagtctactgaaaattggccaggagacagataaaactacaacaagaaatagagaatctgtttatttactgctagatatgattgtacaagaatctccattccttacaatggatcttttggaatcttgttttccttatgtcttgctgagaaatgcataccatgctgtctacaaacaaagtgttacatcttctgcataaaattacctacttaatcaagataagcacgcatttttgttgccttggttttacctgtagactgtggaactattttaccttaagacctgaaaaagttttgtggattataaatttctttcatacggttgtattttctgatcattggtttcttaatatggttgtactacagtatacttggttgatttaggttgcacattcactgaattcactgagattattcctataattttaaagtatcatttatttgaaaaacatacattatcaacatgtttttgatatttgataatgaaaaaaatctttgcttgtttatttctgaaaaagaactgtatttagtgattattttagatagtgatattatagcattcatctgtgtgtaaattatttcatatagggaagagttctgatctgtacctatggttcttattgaaaacaacattggatgtgcatttctgtgatgttatgaatacatttctactttattttgaaacatttgccaaactaaatactgtaacactgtataacatttaaaaatgttaaagaactgcttagtattagaagcagatcatttcccaaaattctaagagcagcagcatatgttgttgcttgtataaagcctagcgataatttttagactaacttccatggtgccctgttggcattagcactaccattgtaccctgctgtataataaacaatcttagacatttatcaactgttgatacaaatgttagtccctaaccactttttatatatgttttaaatttttgaaattcaagtgtaccttccataacataaaataaacactagactgtatcacaaaaaaacacacacccccacacaccacacacacaaccacacaccaccacacacacacaccaaccaccacccacagctagaagccacaaccaacagaggcagccactgtgacaccacgagagaaataaaaagaaaacaaaacagcagccaagggatatcactcactcgacacctatccacccaccatccactctacacactccccaatatccttccacatcttatcaccaccacaaatcactctcaccactctacatcacagcacacacctcccaaccacataatataaataatatatattcactatactttctctcccct

SEQ ID NO: 522267 - DNA, 335 bp, Homo sapiens
tggagatacagacgcgtgagatagaacgagacaaagatgggaggcaatttcagacgtgctcacagaagagaatatgctgaaaggacaacatgagaaagaagcagcagatcgaaaacgcaagcacgaggaacaactggaaactgagcacattaatccagttactgaacagagactacacgtggagcaaacaagagatgaagatcttgatacagactcattgaactgaatttcccccttccccccaattgatggaagaatgttccagattctaaattgaggacttcattattaatggcattactgtgttatgattaacaaatttcctgtaaggtaca

SEQ ID NO: 522268 - DNA, 268 bp, Homo sapiens
cccccacccccgggagtgttggtagactttcaaattccatttttgagattttatggtctattcctagaattttagattgttttctcagaattccaaattccccttttgaggctttaagcccagcctaggatttgacactgagtttcaggcccttgactttggcccccttgttcccaggccccctgtggctgactaggggctggggtgtttcctccccagggcctggtcagcacccaaatggttcaagtaaagcaagttgtgtccccca

SEQ ID NO: 522269 - DNA, 914 bp, Homo sapiens
  misc_feature (705)..(705): n is a, c, g, or t
  misc_feature (720)..(720): n is a, c, g, or t
gtcacgcaccgagaggcgggggtgtctcccatgccccgcttttctcagcccaggccagcagtggtccagtgctttggatcagggttccccgcccaggcttggccactcctgccctgatcccttaatgcttttggcccagagcaccccgctaagtccaaccccagaggggcctcatccgcaaagcctcgggaagaggacagtgacggaggcggctgccctgtgagctgcacggggcagaatgtcctttttggcgtcatgttggatgttcacacattccattatgggggttcagttctatttgggattccctttcgggaaagagggtagagggggtagggagggggttaagcccacgaagaacggagggcattgccagaagggggtgggccttgaatgggttctggcacttgcttgttccattgcaccaccgggggagccgtttgccaaatttgttgcttctcccaaggcccattagtggccccccccacaaggagagatgccctgggacgtccccctgtgttgggccgtctggtggttctctgcaagggagcccagttggatgatggcccccgtgaaactcctcatccccccttggccttggctgggggtctcctggcaggtttatgggagccgtaccatctttggggagccgcctgggacccacgacatcatcgaccctggaacagacatggcacgcacctccangctggcccttgaacnttcacccgcccacatggcctaccgcaaggggcatcatcttggtttataaagccgcaacccggcagttctcgtacctgattgagaacatggcccgtgactggggcaagtacgcccacactcgctacttcaggggcggcatgctgagcaacgcgcgcctcctctttgggcccacggtcccgctggcggacctcatc

SEQ ID NO: 522270 - DNA, 925 bp, Homo sapiens
gctcagtggacaaggtgaccctggcagcaaccccaacaaacgccagaggcagccccctctcctgggagatcaccccgcagaatatggagggccccacggtgggtaccacagccattaccatgatgagggctacgggccccccccacctcactacgaagggagaaggatgggtccaccagtggggggtcaccgtcggggcccaagtcgctacggcgcgcagtatgggcagcacgaggacggctcgcaagagcggagtatggtgtcaagccgaaggcctgtggtcgatggtgctatggcttggatcaatctaagatgaaatgtgagcgagtgtcaatgtctttgattatatgggaatgtggaagaaggtgaaaatgatgaaaagtaagcacgggggcggccatggtggagatggctgatggatacgactgtagaccgggaacattagcgcacgtcatcaacaaaattccatgtttggggcagaagtgaatgtctgtgttctccaagtcaggccagaacataatgacagtggtcagaaagtacagggttggaagaagggtcttgcaaggtacaaaagaattcagtgaactccggcaacaactcggaatataccacaccacagagaagggacagccacacagaacccgaatccaagacaacccaaggcaagtgatgactatcttcaagccgccagtggacggtgaacgacggagacaatcccggagatctgggcatgcacatggcagctgaaggcggcatcttcatgtgaaagtatactcacgcaacaacgacacggaatacgtctgaaggcgaggagaaaccagaggagacaggacaactgggtcacgaacaatacagagagaacgagagggcagcagccaagcgacaaagagacacaagacaagagccacaatacagagcagagaca

SEQ ID NO: 522271 - DNA, 660 bp, Homo sapiens
tctgccttctttatcatcttcataacaccccaggcagagggtgcgctctcactcaaattcctgtttgcatctccacgagccatacataagctacaatcatctcaggaaaaggggttccccttgcatcatatctgtccaggctaaggatttggtccttctaggttctactggtccaccaagtatagagagatccctggggcctgcagttttccctccctcttcagaagggatctcttggcaacagaggtagcatgaggcatgctctgcttacttttatccttaaaggcctttcagatgcccagagtctgtctgttggtcctgagcaagccatcttccagatgggtccacgtggccttctgactgccatggcctggccctcacagtgtctctttcgggtggtgtttagagtggaatttgcctcgtcttcttaaccagttcctgttagatccctgtgttttctcccttcacctcagagacaattctttgggctgggatctcgccgtgtccctgggtttccctgggtcttggtttcatctttctcttcacagagatgatttcagtttatttgtggcctttctggaatgttccttggagagccaatatgttccaggtactttgtcagaattaaaagactctgaaagataaaaaaacaaaaaaagg

SEQ ID NO: 522272 - DNA, 236 bp, Homo sapiens
cgtcgggcccggggacgccgaatggtcacccgatcagcagatcttcggggccatgtgatcagctcacaaccgactaggcaaccggtcgatctgtcactgccggctaccctacgagcagctgcccctcaccaaagagcgcggcgtgcatcaggagagggacgagatgggttgtccgtagtcgtcaaacgctctgactggagacgcaaggtgcgcgagagtcggacgtcgactctcgt

SEQ ID NO: 522273 - DNA, 125 bp, Homo sapiens
atttttccttttagccccgagggtaatcctgacaaacagttcagccaggaggaggcagagaggactgggctgggcaaaggtccaccaggacctggctcctcctctctctctctctctctctctct

SEQ ID NO: 522274 - DNA, 233 bp, Homo sapiens
cagctaaatatactttagctttcgtgctcaatatcctttcccatataatgtaagggttttacctcagtacctacaactaactcatttagttgaaggcacatgttagagttaaggaagggctgtgaatcctgttatgctatggtcatgacatcatatcaaaggtaaactaaacagagactctgtatcctcatattctatagtggatctcctagctctgaaaagaaatcttgttc

SEQ ID NO: 522275 - DNA, 427 bp, Homo sapiens
ctaatactttgggaggttgaggcgggtggatcacctgaggtcaggagttcgaggccagcctggccaacatggtgaaaccccatctctactaaaaatacaaaatattagctgggcgtggtggcaggttcctgtaatcccagctacttgggaggctgaggcaggagaatcacttgaacctggaaagcggaggttgcagtgagctgagatcctgccattgcactccagcctgggcaacaagagcgaaactctgtctcaaaaaaaaaaaaatgttttagccaggtctggtggtgcatgcctgctggggtctcagctattcaggaggcgggggtgagaagatggctggcacccagggggttgaggtggtagtgagctggtgatggtgccacggcactctagccggggcaacagcataaccaagacactggtc

SEQ ID NO: 522276 - DNA, 269 bp, Homo sapiens
acccagtacatatgacttccaaatgctgaaaatcagtgattaaaagaaaaatcttaaaagcagccacagaaaacaagtaaattacatactagaacaaagaatagaatttcctcagactggccaggcgcggtggctcacgcctgtaatcccagcactttgggaggccgaagcgggtggatcacgaggtcaagagatcgagaccatcctggccaacatggtgaaaccccgtctctactaaaaatacaaaaaattagctgggtgtgcggctg

SEQ ID NO: 522277 - DNA, 109 bp, Homo sapiens
gggggtacagctcagcgtaaattgtctccacactcctcctcccggaagagcttcaagagctaagaactgcatgcagtcactgacttccaagtgcagcaacccagcccat

SEQ ID NO: 522278 - DNA, 1408 bp, Homo sapiens
  misc_feature (77)..(77): n is a, c, g, or t
gtgaggcaattggccggcaagcagttgtaagtcgaggcatcggtgatagcacactatggtctctgtgagcatcatanggtgtctctgaacactatggatttgtacataggtaagcttccagcattgcacaattcgacatgtacgtactctgggcattatcgtgacggtatcatgaactaaataccatagattcgtaagctctcgcggatagaattgagcaagacatatggtgggtgagacggacgaagcgactaggctatttcctatccgctgaacaatgggaacatcagatcgtgatttaatagtagagctcattatcagcatctagctctgtccttataactaggcacagagagctggcactgcagtggtattcttattccactctattgctggggatagaaagactgggtttggaagattgacagactagtgtcttggctatgaacgcagggggaacaacttgcttggtgaggtctaggtggtttgggagaactcaggtagagacctatgagagtatacaaaggacatcttcctgtaccaggaagctagaatcggtttctgtactccagaacacgcaacccaagagtcacgctggaaacactttgccatgggcaatcattagagattatttcagagggagttgtccttcctgggggagaacacaatttgcgaattagagtaacctggtaagaccagatcatctattcctcgcaattcactttccccgcgaggggacagagagattcaatctgggccatagattttattggaacacttggaatttgtcgagacgcattcgagcaagagcaagcccactttgcagtcttgtgccctcaatttgaatagtccctaggggttggaaattcgcggctttaaaatgtgctttcactggcacagcaattaacttaaatggggtgaatcggccgcccctttcccgttgggggtagaaacacgaaaaacgttgtataccgaggttgaattacgtaacccttggagttgtctaggtttagctttctttccttccagttggaagtcccccaacaagcttttaaggagcagttccccagaaggcttgcccaacccaaatatatttcattcgtttgtaccccactctaattgggcttgaggagaaactctcggtgcacaacgagggtctgggcccatggcggagtgaaacacaatttaatgggagccgagaaatttaacggggttgggctcctctgtaacccacaagcggtgcttggactagagactctgtgatgggcaaaagaaaaagaggggagcgtttacataaacgctctggaggggagagaagattggagacagaagcttttcttttggaggacaaaaagttattattgttttaacttgaacagaaagagaggtatatatcggagcaacatga

SEQ ID NO: 522279 - DNA, 936 bp, Homo sapiens
ggaggttgcttgagcccaggagatgaagctgcagtgagctgcgatgtgccagtacattccacgcctggatgacagagaccttgtctctttttaatgaaacaagtgggcaaacagaagttcaagaaaggaaacttagaaaccaagtctcaatggagatataacaaaaaaaaaaaaaggaagaaaacagttaaaattcttcggcaaattttgggggcgggttccgaaaaactattttgatactgaggcctggctttgaccgggtgttgtaacccaatatgtgcctggccccatggagttaacacattttttctccacttctcggactctggggttcgcccccaaggagtgaagaaagtttccacaccaccggacaacaaacagtgctcacgtgcagggccagctaactctgggccgcctctcaggccgaagtcggcgttcaaggggggggcacttcaaatggggacggtttcacacacgcagtcgtccataatatgggcctccgggagatccacagtaatctgctcgcgcgcgtttggacggaggtcgaacgaccccggaggaaagacatcaaagacaccaacacagacaatgatgaggtgggcgaaaggggcaactatcaagcacagctatccacatgcgacacgcgcgtaagggtcccggcgcccgaccaacaaggagatggggagcacgagaagcagacaggggaccctcgcccgcgaggcacagtctggcaaaataccaaatgtcaaaacggggcacctacaaccgtctggaataacaggtgctcccggaaaacgatgggtacccaaatcaaaatgccaatgtcttccataaaccgcggtctcggggggcaggcagccgcccagacaccaagataaacggtacggcagataaaagcaccccgccggcacccacagggggagcaacagcggggac

SEQ ID NO: 522280 - DNA, 331 bp, Homo sapiens
  misc_feature (56)..(56): n is a, c, g, or t
taacactaggaatgctaaattcatgacagtaaactgaaagattttgcacacttcangcaagcaagtggcaggtcatcttcaatacagacaacggcaagataaaatgtttggggaaaatttatttaaatataaaacaatggtgacaggctgggtgcagtggctcgcacctgtaatcccagcactttgggaggccgagacaggtggatcacctgaagtcaggagtttgaaaccagcctggccaacatggtgaaaccctgtctctactaaagatacaaaagttagccaggcgtggtggcatgtgcccgtgatctcagctgcctgggaggttgag

SEQ ID NO: 522281 - DNA, 242 bp, Homo sapiens
agtgacatcaggcgatgacagaataggacttgtcagtgcccatcctctcacagaaacttcaatttgaacaaccattcacacgcacaaataccttcactagagctaaggaatccagacgagagattacagcacctgaatgtagcacagaaataagagaagatgtattgaagagggtaggaaggacagtttcacactgtgctttgttcgtcatgtatttccgaattagttctgattttgtaaaa

SEQ ID NO: 522282 - DNA, 408 bp, Homo sapiens
caaatgacctcttacttatcaggctcacctgtaactcgtttattctatcagtacagacttgtggtttgctgccttattcttaaagtcccgaccatcactttgtatgtggctgacagaggccccttgctgctggcgctgtgtccctgaacatccctgtcattctttggacacccttgacgaattctcagcacaaggcgctctggctcttttgaacagtggttcggctgctgctgcctggacatacgctgccactctagaccagctgcccagcaccccgtgggtcccgtcgcttgcgactgatgcccaagcaggtgcgctgaaggcctgtgtctgggcccatgtctcgctggctctcagcagagaactatagtgtctcttccgtttggctcatttgtgtacctgttgatc

SEQ ID NO: 522283 - DNA, 118 bp, Homo sapiens
tcggtccacatgattgtccacgtccttaagcttcaattctgggccctttaaggcttagcagcctctgagctttcagagaccctttagcttcagaagcctgctaattccttggacatgt

SEQ ID NO: 522284 - DNA, 463 bp, Homo sapiens
cactaatctttctgtcactctagattggcctgttccagacatttcccatgaacggaaccatgcaatatatgtggtcttggtgtctggcttctcacttagcatcatgtttccaaggttcatcagcacttcgttgttttttattaccaaattgtattccactgtattgatatacaattggttctccttatttttgggagttctgttctgtaaagtcaccgcaaacattgaattagcaaacattgaaccactacccctacaggaaatagagttaggttcctgcaagcctctggtcacatttttgcctactgatcgatatgtaatcttgttttatgtgtatttctgtttaaagacaactaatttgatatataatgtgtctatatatttatatacatatgtgcatatgtatatatgtataatatgtgcatatatatatagttggttcattaacattgaagttatggcc

SEQ ID NO: 522285 - DNA, 346 bp, Homo sapiens
catcaccccatgcccccccgggccccccccgggcccccccccgggccagcccacaaaagtccagcttcctcggaggggtttattaatgccccccccccatgctccgcccccttacccaccccaaaaaggggtaaacaagcccgggggtcccccaggaggggggcaggggcccccccttcaacccccgcccccccccaggggacagttttttaaaagaggggccgggggcatttcccccccgctgggggggcaaaacccccccaaggcccccccctttaaaagggcacctggccaggggtaggttttttcaataaagtttttgtattaaaggaggggctctgggtta

SEQ ID NO: 522286 - DNA, 660 bp, Homo sapiens
  misc_feature (28)..(29): n is a, c, g, or t
  misc_feature (257)..(257): n is a, c, g, or t
  misc_feature (261)..(261): n is a, c, g, or t
  misc_feature (493)..(493): n is a, c, g, or t
tttaaaaaaccccccccctcgcgggggnnattttttttttgtgggggggccgccccccaccccaaggaaaagaaaaaaaatttttttgtttttttaaaaaaagacacccccccccccccccccccccaagggggtggtctcctctcccccgccgcgggggggggggggggtttttcttcttcctccccaaaaaaaaaaaattttccgccgggggggggagggacccccccccccttttttttggtgtagggggaganaagnataaaaaaaaagagtgtgggggggggaaaaagaaacacacaccccctctcttttcccaaaatttttggcgcccgccccccccaaaaaggggggggggggtagaaaaaaaaaaattgttttttttttaaaaaaaaaaaaaaaaaaaggggggcccccccccctccccctcctttaaaaggggccatttttttttgggaaaaaaaataccccccccaaaagggaaagaggggcncaaaaaaccccccccttttttctttaaaacacaaaaaggttttcccccccaaaaaaattattttttcacaaacccccccggtttttgtgaaaagaagttttcccccctgtttttgggtggaaaatttccgaaaaaccacaggcgtgccaatctttgggaatttttcc

SEQ ID NO: 522287 - DNA, 630 bp, Homo sapiens
  misc_feature (146)..(146): n is a, c, g, or t
  misc_feature (261)..(261): n is a, c, g, or t
  misc_feature (319)..(319): n is a, c, g, or t
  misc_feature (358)..(358): n is a, c, g, or t
  misc_feature (398)..(398): n is a, c, g, or t
cacctatgtactgggctcaacaatatgtcacactaccctttatggggagggcccatgcaagagagtcacatcatctaaattatgggcccaaaaatatgtcaaaatgctatgagtatggctcaggaaaatgaaagaatcacatgacntagggtttaggcccaactatatgtaacaaacaccccagttcgcagagcacatgcatgagcaaagagtcacatcacctaggtgctgggcccagtgatatgtaataatacttttttngcagttcccaggcagaagaggagtgtcacatcacctaggtgattaatagaaagatatntcataatacttctgtgggcggggcccttgcaggagagtngcattacctaggtgttagacccagtgatatgtctcaacanacaatgtgtgcaggtcccagactggagaggagagtcacctcatctaggttcttgacccagtgatatgccacaatcccttttggggcagagaccaaagagtagagtcacatcacctagatttggggcccagcaatatgtcacaatatcccaagaagagggtccaaacaaaagagacacatcggccgggcatggtggctcacgcctgtaatcccagcactttgggaggcatgca

SEQ ID NO: 522288 - DNA, 832 bp, Homo sapiens
ggatcagccgcttcctgcctggtggaggagcttcgtgccgtgtactgtcgcccatcctgcgcgccagcctgccaagcagcgtgccccggttgcaggcgtcatgcagcgtggcgcgaccacgctctgggccgtgcgctgactctgctggtgctgctccgcggggggcgtggccgggctggcgcgagctcggggggcttgtgtcccgtggtgcgctgcgagccgtgcgagcgcgtgcactggtccagtgcgcgcctccgccgcagtgtgcgcggactggtgcgcgagccgggctgcggtgcttcctgacgttcgcactgagcgagggccagccgtgcgggcatctacaccgagcgctgtggctccgtgccttcgtctgccagccgtcgcccgaactaggggcgacgctgcgggggctgcgtggacggccgcggggctctgcgtcacgctagtggcgtcagcggctgcgcgcctaccctgttgccggcgccgccagtccagggacatgctagtgagtcggaggaagaccggcaggccggcaggtgtggacagcccgtacgtctgcagcaacggcacgggtggttgatccaagttcacccctccattcagaggataatcatcaatccaagaaagggctgcttaagaaaagcagggtacaaagtgataagagtctcaaagcacagattccagaattttctccgagtccaggcggagacagatattgggcctgcgtagagaattggagacacctgaataactgaagttcctcaatgtggtgagctccaggtggacaattcccaatggacagaaggattaataggaaacgcggcgtctt

SEQ ID NO: 522289 - DNA, 697 bp, Homo sapiens
cccatttctttcgtgtgatcatgagtattactatgaaaaaggtgaataagcctacctgtatcaccactaatccatagacagtaaattctcatccgattaacagcatcttcactaaacatcatggtgcaatagccacagtcgggtgaccaggacgtatcatccaagcaaggcattactaataactatccgaagctaacccaacttcaatcatacggacagtcaactggttgcaggtaactcatttatcaattcatctgatcattctcagtttagcatagatccgaaacgtagccagctgatgatacatacatgtgatttcactacaagcaggctatttcccatttttccccttctcgcccctctccagcatcctaaaagtaacttgtgatgagcttacaagaaactcttgcatgaatgcacagaaagtagaggttggggtgatggaaaggatcacatatgttcagtgactggttaccatggcaaccctccacacaaatatgatatagatatatataatatatattgtagatatatattatacatatatgtacacatgtataccacgcacccactcacacatacacacacgcactttggatcaacatcatttccaggttcaggaaatagaggatcataatttctgtgacatctcatttatgcaggtactcactggaggtctgagatccttaaaatgctg

SEQ ID NO: 522290 - DNA, 377 bp, Homo sapiens
actcccttcccatcccagacccgagacgcagaaggctttagacagagcagcttcatcaggaatctggactgggctgaggtacctgctcccagctcctcaaagtgccatccggtaaatctgcatctattagagctgacagccaggctgctcaggcttaaacaattaatatgcatgaggagtccgcaaactcagagcaggggcatgttactgtgctgggatgtaggacggcttctcggataaggtcattcatttttatgattctgcttaatttggatttgccagtcttcctttcattatcccatgggccagtcttaataatcaagactatgttatgtgctttgtggcataattaaagccactgcctaattagacaagca

SEQ ID NO: 522291 - DNA, 193 bp, Homo sapiens
  misc_feature (180)..(180): n is a, c, g, or t
agggtgggaaaaatactgtagggtttggggttttaaaaagtcaagcagtgtccctatcccaagaaagtttggaatgggaattgtccactcccattgcagagagcaactcatgtcatctgtgtgacgtgagagagggcccccattttgggactctctgacaagttgttgggaagggcgtangtattttttgggg

SEQ ID NO: 522292 - DNA, 575 bp, Homo sapiens
  misc_feature (9)..(9): n is a, c, g, or t
  misc_feature (79)..(79): n is a, c, g, or t
  misc_feature (90)..(90): n is a, c, g, or t
  misc_feature (92)..(92): n is a, c, g, or t
  misc_feature (94)..(94): n is a, c, g, or t
  misc_feature (145)..(145): n is a, c, g, or t
  misc_feature (151)..(151): n is a, c, g, or t
  misc_feature (186)..(186): n is a, c, g, or t
  misc_feature (212)..(212): n is a, c, g, or t
  misc_feature (288)..(288): n is a, c, g, or t
  misc_feature (558)..(558): n is a, c, g, or t
ggcggaacngtgtctccttcactttcgccctccagctgctggagctgcagccgaccgcgagcgtgccaagcggcttcancagctagcggngntnggcggcggccccctcaggacaccaccagattcccctcttcccgcggcctcncatggnacccacggacagacttgcgcgcgtcaatgtgtatnctcatcatatgctgaccttggcaaanctgccagagatattttcaacaaaggatttggttttgggttggtgaaactggatgtgaaaacaaagtcttgcagtgncgtggaattttcaaccgtccggttcatctaatacaagacacttggtaaagttacttgggaccttggaagaccaaatacaagtggtgtgaagtatggtctgactttcacagaaaagtggaacactgataacactctgggaacagaaatcgcaattgaagaccagatttgtcaaggtttgaactgacatttgatactaccttctaccaacacaggaaagaaagtggtaaatcagtcttctacagagggagtgtataacctggttgtatgttnacttgatttgctgaccg

SEQ ID NO: 522293 - DNA, 1253 bp, Homo sapiens
  misc_feature (1221)..(1221): n is a, c, g, or t
ggacgcgtgggcattctagatgatggtgggcgcggaacaccatgcgcctaccgtctggcttcctggatccaacctccaccgatatgcagctctcagggagacagtcgacaccacctgaccgtgatgggattccatgcctcaccaatgtcttcgcgcgtcgttactgcgcgtgggtgggcccttccggtgtccggcatcgtactgttggagtcgtcgtcgtccagagaccacaggctggccaaggtacatggtaggaacaatcaacaccgtgggaagggcgcccgtggagcagcacgcaggggctggtgatagcaccaaggacactaattgcctgtgaaggggggggctcgctgcgcgtgtgactagtcgagcaagaaccccccttcgtagcggctcgtcccgtgaggcctctcaagagcacctaggtcccaatatcggggtggaacgacagggaatacgggttcaccgcatcctgcttgaagcagcaacgcatcacctagtcccacaaaaagggctgctattaccttcctagaccccatgggggacgcaggcctttggaagcgacacgtgagacagctaggcgcacggacggggaccgagcaccgtagtgtgatggtggtcaagtacaccgtgaaggtggggcatggataggtgggcgttcccatgaaggtcctcgcaaggccacaaggcacgttgcagagaggtccactccctgtggactatggtgctcacgaatggccaggatcatatgcggcgcggggggtacagcgacgtagaagggcgccatcaaaggcaaggggggcacggcgacggctccgtacccaggagcaagggcgtcttacacacccgatgggcaaaccccagggcgagggctagcgtcgctgggcgcgggaggaaaaacccccttgcggaaccaaaggcccgaccgcggggctttaggaaacgtggctctaggaaaagacaaacacttggggctcagatggctttggttgcaccattcgtatatacggttgcgtatgaatggggggcattggcgtggatggagaaatattggttccttctggccgcaggatattgcgtcaggtggggatttaattccattggcaggcgaaagaggacaaccccgttacccaaatctgccgggtgtgttccatggggcgattatggttttgtggggcccgagacgagaaggacgccctatttaggggcgccccaccacgntaccccctctatgcaggcgggggaacctagcg

SEQ ID NO: 522294 - DNA, 778 bp, Homo sapiens
cgacccacgcgtcgcgactgacgggcacgctgactggaggctggcggacaggcgacagcgacctgcggtaggaccagaggagcgagagcagcaagaaccacaccacccagtcggatgcaatgtcagtcggaagtggaaacctcagagggggtagacgagtcggaaaacataagaactctggggccctaggaaaaggagaaccaaaatgagaatggctgaccgtctcggagctcctgaaggaagggacccagaggaagtcatcacgagccggtgcagagaaacagcccagtttgatcaaggacttcttgaaaggcaagcattaacgaaggatgctgtttaaggctgggccagcacggcatcgttgtacttcacatactcaggcctcgaggaggaaatggagccgcaacaaggaccatccagcctttgcccctttgtacttccccatggagctggaccggaaggaggcgctgaccaagggacatggagtatttctgtggtgaaaactgggaggagcaggtgcagtggcccaaggctggccagatagtacgtggagcggatccactacatagggcacgaacgagcctggagtctgactggtggcccatgtcatacacccgcctacgtgggggatctctcgtgggggccaggtgctgaagaagtggccaggagcactgaaactccccagcacagggaagggacccagttctacctgtttgagaatgtggacaatgccagagttgaagcaagtctacgggcaggatgaacgcctggactgaaa

SEQ ID NO: 522295 - DNA, 108 bp, Homo sapiens
ctgctccgccccttctgccaggcctaggcaccaggaaaaagaaacaggcactgtgaagctcagtatgcctggcagagagggacggagcagcagagaggggcggagcag

SEQ ID NO: 522296 - DNA, 811 bp, Homo sapiens
  misc_feature (27)..(27): n is a, c, g, or t
  misc_feature (41)..(41): n is a, c, g, or t
  misc_feature (280)..(280): n is a, c, g, or t
  misc_feature (569)..(569): n is a, c, g, or t
  misc_feature (577)..(577): n is a, c, g, or t
  misc_feature (630)..(630): n is a, c, g, or t
  misc_feature (725)..(725): n is a, c, g, or t
ttcgtttgggactcagcgcgccgtggngggggtctacgggnattcggccattatgggccggggggttcacatttacattaaagatgtaaggggcgggaaaaaaaaaaaaaaaataaaaaaaaaaaaaaaaaaaataaactcctttaccggaagggagacgcaaataaaactatattcgtatcttccgctgggcgctgatacccaaatagcagatgggaagcgtctcttacagcctcacgcagggtttacgtggtttcagaggggggaggggggagccacngcgatataaaggagagctgggaggggcgacacaccgcctccccctggtccggaagccaaatctatccccccggacttgggttaggagaccgctcacagctgaaaaaggtagtatatctggcgctcaggacggtggtcttaacactccgcgtctctcagcgctgcaacggaggcgaggacggtggtgaactgggatatattatgcgcgagacactgatgatgtatttgtcagtttcttactactatctcatcgggcgatctccttagtgcaagaaacaaagcggggcccngacgcttntcaagcccgtagtccttatccaggataaattcccagagggggtgccgcataangtatgggaaggagggaatgagcggacaaatccgcctcgcgtgtgccagcggcgcacgatagagactcactatataatacataaggcgggctagcncgtctctccaatccgcggtacgtccgcgcagcgacactaggctttgtaggtaaccaccaacaacctcgagcccccctcgcgagccg

SEQ ID NO: 522297 - DNA, 668 bp, Homo sapiens
  misc_feature (2)..(2): n is a, c, g, or t
  misc_feature (81)..(81): n is a, c, g, or t
  misc_feature (87)..(87): n is a, c, g, or t
  misc_feature (101)..(101): n is a, c, g, or t
  misc_feature (117)..(117): n is a, c, g, or t
  misc_feature (122)..(122): n is a, c, g, or t
  misc_feature (162)..(162): n is a, c, g, or t
  misc_feature (166)..(166): n is a, c, g, or t
  misc_feature (168)..(168): n is a, c, g, or t
  misc_feature (187)..(187): n is a, c, g, or t
  misc_feature (230)..(230): n is a, c, g, or t
  misc_feature (232)..(232): n is a, c, g, or t
  misc_feature (241)..(241): n is a, c, g, or t
  misc_feature (243)..(243): n is a, c, g, or t
  misc_feature (319)..(319): n is a, c, g, or t
  misc_feature (324)..(324): n is a, c, g, or t
  misc_feature (330)..(330): n is a, c, g, or t
  misc_feature (339)..(339): n is a, c, g, or t
  misc_feature (352)..(352): n is a, c, g, or t
  misc_feature (361)..(361): n is a, c, g, or t
  misc_feature (370)..(370): n is a, c, g, or t
  misc_feature (374)..(374): n is a, c, g, or t
  misc_feature (396)..(396): n is a, c, g, or t
  misc_feature (421)..(421): n is a, c, g, or t
  misc_feature (453)..(453): n is a, c, g, or t
  misc_feature (474)..(475): n is a, c, g, or t
  misc_feature (477)..(477): n is a, c, g, or t
  misc_feature (483)..(483): n is a, c, g, or t
  misc_feature (485)..(485): n is a, c, g, or t
  misc_feature (517)..(517): n is a, c, g, or t
  misc_feature (521)..(521): n is a, c, g, or t
  misc_feature (533)..(533): n is a, c, g, or t
  misc_feature (540)..(540): n is a, c, g, or t
  misc_feature (567)..(568): n is a, c, g, or t
  misc_feature (580)..(580): n is a, c, g, or t
  misc_feature (584)..(584): n is a, c, g, or t
  misc_feature (590)..(590): n is a, c, g, or t
  misc_feature (597)..(597): n is a, c, g, or t
  misc_feature (664)..(664): n is a, c, g, or t
gnccataaacacgtttagggaaaaatcaatttaaagacagaggcattaacatgtcagaacttactagcaatttcacgcacngctcantctacagcagattntgaagaaaataaagtnaaatngctcatacgatagttaccgtctggggctacggttctcctngtgncngcccagacgaccgcggcgngtgtgcggcggcggggcggggaccccggagcgggttttacctncnaggacaggntnctgatatccgtgttgagggtggtcagcggggtcctggccgcctggttctgcccgggtctctggtgatgcaggctgncaatngtgggntgcgagtanggggcgttctgcnggtccaagntgttgtcgntgangtgctgcgggttttccatcttnctccccttctctcgttctggggggngctgggcacgcagctccttggagcttggcgtngcgagttgttcatgttgtatnncnggctcntngggtcgtccacaggggttttgctccgggggangccngggctgtggtcngacaggntgtttttcctgaacggccctcacgggnntaaaggctttcntggngagcgngaggganggcgagagcgggcacgggagctgtgctgccctgaagctcgggccgccgctgccgcctgctgatctanctgc

SEQ ID NO: 522298 - DNA, 695 bp, Homo sapiens
  misc_feature (38)..(38): n is a, c, g, or t
  misc_feature (138)..(138): n is a, c, g, or t
  misc_feature (168)..(168): n is a, c, g, or t
cccaaaaatctccatgtcaacagaaaagtacatttctnaagccacattcttcaaatgttgttatctctatcccagataagggagttataaaattcagtatcaatagattccaaatccttaatagtaagttttttactnaacatacgcttgtagaatggtaaagagaanccagtatcgataactttccatgaaatagtgccatggcaataaacgaccaatgaaacagaagtatgaaagatggtctggattaatggttgatgctggatttatctgcagacaatagttgttcttgcccgcatactcaaataagcaatacattgggttcaaaacttcatgtgaaagcaagaaaaaccattctccatgactgatgttcctgaagaaaaatggaacaaatggaacagaaaaaatattcaaagacataatagaagaaaacttccctgacattaaggaagatcttaatatattcctcgctaggccaccataatcaagtccttcttctcctctaaatattacatataagcgcctcctcaagtcatagggttttaatgccataatctgttggaaggaatcttcaaacaatgtctgccgggacacattgatctttacatgactaggtagtgcattgactggcacaaataacggaagtgagcaagcttccacctaaaccgcgttcataagcaatttgtggaccacct

SEQ ID NO: 522299 - DNA, 182 bp, Homo sapiens
atgtgggaggacgagatgaccttagagcatggtgacgttggcaccagagatgaccatcatgagattacagacgttgaagacttggtacacacctacccacaccgtccatgcaactgctgtgtgccaatgatgtgcggagagcagtgaggtgaggcagattacccagctggatccgctgtgta

SEQ ID NO: 522300 - DNA, 1237 bp, Homo sapiens
ggtcgttctgtacagctcagctctcaagacaagttctattcatgaatagttggtagcattggggctctctactgtgacttactagagcttgatgccataataggattgcaatcttccattttaaataggggtgctgcgctctttagcgactgacttgtagcatatccaacctgacacgtggttctggacagtctgtgttacctggcatgcataacactaatttatgagtaagctactcggctgacccaagtgtacagactattcaatattgttcaggctactgtggaccgtgaacgtctacacccgggttactacctataccactttcttgactgtgttggtgcttgatttacctagcgatgttctcccgtggtacacttttcccgtgtgtagcaactttggcggaatgagagagcgataactttctacggcacagaaggttccaacgaggaagtccagggaaaaagccgagtgaccgggagtcaagttctctgttctcgacacgggtcgtgaaagacgcgcgacgaccgacagcagaactcaaaagccagacagcacacgttcaagcgacacacaagtctggcgaaactagtgtgatcaagagttgaatttgagtagtacagtaggccgctattccgatgtagtgcgcgccgaaagaaattgtgtagcaccaccttgttcgccccagaacgtttttgtgccttccggtgaaaccaagacactccgttcaaatgggttacacgacgggtgccgcaccgacattctaacggggtttacttgatacctaaggcgtgcgcaggtgggttgtttatactatcaagcaccttgatagtataaccgcatttgttggggcccgccgtgggagatggatttatcacattgggggcgattcacccatgtgcgggtcggtgggggaaccgaaattgggtttcccttgacacaggcacaccatgtggggcaattggtttgggtttaacttaaaattttgagtagcatattgtacgcagttgcgggggcttgggatttccttttaaaaacgaagagacgactttgccccagattggggcaaagaaggatgtgtgccaaattgcccgaagcgcgtttattatatgatagccaaaggagcgaaagaggttagaatttcgacagggaaatttccacagagatggcgatttcgcgaaaagaggtatagacggggagtaacagcgtttgaaacgcagatttgcgcaaagagaaa

SEQ ID NO: 522301 - DNA, 176 bp, Homo sapiens
aacgggtgagccggtgggacaggattccaggccaccacaggctcttgggcaggctatgtcctgaggaggcctgggctgcgctagagaagccggccgtattgaggtggctgcttctgtgcataactaccgagctcttgaactgctggtgggaaccaccatgcaaaccaaccgaatca

SEQ ID NO: 522302 - DNA, 255 bp, Homo sapiens
agccggtacctgagacacgtggtgaaacccatctctactaaaaaaaattacaaaaattagccgggagtggtggtgggcacctgtaatcccagttactcgggaggctgaggcaagagaatctcttgagctcaggaggcagaggttgcagtgagctgagattgcgccactgcactccagcctgggtgacagagggagactccgtcccaaaaaaaagaaaagagaaacagctgtcacctcacgcagaacgcgcctaat

SEQ ID NO: 522303 - DNA, 416 bp, Homo sapiens
  misc_feature (31)..(31): n is a, c, g, or t
  misc_feature (62)..(63): n is a, c, g, or t
  misc_feature (67)..(67): n is a, c, g, or t
  misc_feature (207)..(207): n is a, c, g, or t
  misc_feature (360)..(360): n is a, c, g, or t
  misc_feature (391)..(391): n is a, c, g, or t
attgaactcctgaccccaaatgatccacctncctcccaaagtgctgggattataggcgtacnnctantgcccagcctcctggctaattttttttgttgttttatttttgttagagataaggtcttactttattgcccaggctggtcttgaacgcttgggttcaagtgatcctcgtgccttgtcctcccaaagagctgggattacagncgtgagccactgtgccgggcctccttctggttttttcaatcttattttgtttttttcctctagaagcatttggggatcttctggttatccttgttggttttctgaaatggtacgatatgccttaatgtggggtcattttaaattgcattatgnattaatctttgtcagtctaggaaatgtgtanaatttgggttttggaaaacttgtaa

SEQ ID NO: 522304 - DNA, 1091 bp, Homo sapiens
  misc_feature (1)..(1): n is a, c, g, or t
nggtgtccattgtgtccagtcagggtggggggtcgatgcctgttgagggcgtctgggttcaaggttgtccacgtcagaggggtgccgcgttgctctcagccacgacgggtgtgttgtggtggtcccttgcctggtggttgtactgaccgactgttgtgctcgtgtgaggccccccgacgcacctattgggtggttgatggtcatttccctctcttgtccgcgttctctcggctctttgtgtctcttgtggcgggtgcaccctctttcgcaatcatgccgcgtgtgggtgtcctcgctcacgagccactttgtcctgcactactttctctcttttgggcggcccccgcgtcctgttgttttgtttgtgttgtcccccctcgggagctttttttttcacttggtgttgggcgggtgaagcccccggtgttgtcacaaagctctttggtgtgtcataagtggggggcccactccacggagcaccaccacgctgttgtggtgtgtactctctctcgcgtgaagaatggtcttgtgtttccagcggcatcgctacacagactcttggtgtccccctcctcgagactccctcgcgtctctcacctctttcgggcgccacgtgtgtctccccgcagtgttctctggtcaccccatcggtgttctctccgcgcgcgagatccccgcagcgtgagtgtgtctctcgctcgagagatgttctctttatactgcgggctgcgtttaactcgttggtgaccactggctctccacgaggcccggtcgcaccgcggggtgcgccccgcaccctcatctccgggcgccgcctcgattgtgcgcccttctctctccccccctatcctcccggctctccgccgcccttgtgtgggagtccggtctttggtcccgacagctgtctgcccccggcaactttctcccatagtccccgggccttctctcctcctgcggtgcgacagccacactttgtgggagaacctcggccccccttgggtatcttttcttctctgtggggtccgttttattttttatccatggacttattgcgtggtccgtgtccacccccaaaaaagggttttttctta

SEQ ID NO: 522305 - DNA, 1715 bp, Homo sapiens
tttgttggtcctttgtcgctgctggtttagctggtgtttcgtttgtgctgttttgtcgtgggctgtggttggtctggtttgttgcgttggtggtgtgttgtgttgtggttgtcgtgtggttttgttttttgtgtgctgtgttcgtgtgtcttgtggttgtttctgttgtggcttgtggtgttggtcttatctttgtcgggttggtgtctgtgttgtttgtttgtcgttctctctggtggctggtcttgcctatgttctgcgttgtttggtgtgtcggtttgttgtttctgtccggtgtgccctgaggtggcgctgcgtgttcctggtcgggtgtcccttctctggtgtgtgtgcgctactcttcgttttggttgtgccatctgtctttgtcttgttttcttcgtttggcccgagtgggtcctccctgcgggtcttggttgccttcagtgtctgtttgctgtttgtttctctctgtcttggttgcgtgacgttttatcttgttgtctcttgtgttctcccctcggagttgtgtgggtggtgcgtctctctgttgtctttgttgtgcgcctcgtggtgtttgtgtggttgttcacacaggggtgggtgtgtgccaccgtggtggggggtttgtctgtttgttgttttgttgcttttgcgtttttttgtggttttcgctggtgtgggtgtgctttggggtgtgtgttctctcatgtgttggtcatgtggttgtgttcctctctctctatggttcgcgtctttctctttgggggcttgtgttgttgctcccctcagtgtgggtggttgtgcttggtggtgctcaccatccttgtgttgctcttttctatctccgtttgtgggggtgccctctgttgggttctcgttgctcttgctcctgggtttgacccgctgttcgtgccgctgcgggtgaatcatccacacatctctccggcttgctctcttgtcgctctctctttcgtctctgctcgcctcactcgctggtggttgtgacgctcttttggctatgtgtcgctggttgttttagacccgcgtgtgtgtagagtgttttacgcagtttggcttgctcctgtggcttgtgtgggtgttcctcttgtctctctcccggtgtgtgatgtgtgcggtggcgttgtgtgttgtctctttgtggtggcgtccccatagtgagtgtctctctgcgggataatcccctgtgtgagtgtgtgtatatcttcgggggcgtccccccactcgagacccctctttttctgttgtccccggaatcacacctggcgtgttgtcgccgcccactctcccacgcggtgtccaccacccccgacacccgccacgcagaggtgggccccgtctgtgtaccacactggagagggactccggcgccctcggtgtgtcttctcgtgtgttcctcgtataatagtaggactcggtgcgagcccccgcgccgcgtgaataggaatgtgttataggtggtgtttggagaaacatatgtcgctggtggtgtggagacaataaactatatctacccacaaaccctgctatgtgtgtggtgagcactgactcgttacgtttgtgaactgcttgataccatgtatttttagtggctattccatgctctccagaacttgttctgttcccgagacacatgaatacatatgcccctgtcataagccccttgtccctgggatttaatattactactggta

SEQ ID NO: 522306 - DNA, 312 bp, Homo sapiens
  misc_feature (40)..(40): n is a, c, g, or t
  misc_feature (80)..(80): n is a, c, g, or t
  misc_feature (121)..(123): n is a, c, g, or t
  misc_feature (127)..(128): n is a, c, g, or t
  misc_feature (140)..(142): n is a, c, g, or t
  misc_feature (150)..(150): n is a, c, g, or t
  misc_feature (153)..(153): n is a, c, g, or t
  misc_feature (197)..(197): n is a, c, g, or t
  misc_feature (211)..(211): n is a, c, g, or t
  misc_feature (213)..(214): n is a, c, g, or t
  misc_feature (216)..(216): n is a, c, g, or t
  misc_feature (276)..(276): n is a, c, g, or t
  misc_feature (279)..(280): n is a, c, g, or t
tgccactgtccaaagtctgtcacagtcctccatatggcanagttgaagaaaattggcaatcttttttggggtaccaaggntctcagtttgtacggtctttataaatgctgaacaagttgtnnntttnntgcccccttttnnncacttggnaanaaaaaaaaacaacaaaaaaaattaacatcaaatgaaaatgttanaactttttatatantnntntcaactttaaaaaaaaaatatcatataattagtttaataatatatatagaataaaaaaantanngagagaaaataatctaaaaatagaaaaacacc

SEQ ID NO: 522307 - DNA, 853 bp, Homo sapiens
  misc_feature (718)..(718): n is a, c, g, or t
  misc_feature (760)..(760): n is a, c, g, or t
  misc_feature (808)..(809): n is a, c, g, or t
  misc_feature (814)..(815): n is a, c, g, or t
  misc_feature (817)..(819): n is a, c, g, or t
tcttgaggggggggcttgggattttcatctagcctggcctaggtttcctttatggtatgggttttggcccttcatccgtgcaccgccaggtttgggggtgacataaaggggccccccccccccatctgcgccgtctggacacatttttgtggtttgttggttttgttacaatctgacattatgccgaactattgttgtaccgattgtttacaaagttatttatgccaggtttggaagccataccccggtttttattgttttgagattgccccttgttccggatttccctaaggtaggagagaattttaacggggacttcatcgaccaccaccccatctaccaatggccccgatctaaccaagtaggctatagaccttcccacttaaagcgctgtttaactggaagttgagagtctgctttgtacctccagagttaccatgagcatgttgtggataaatgtaaattatagtccaagtaagatactctgcccagtttcctctgtagaggattcacttttctccaattttaaaatttcgacttcagcccttgcaactcacggaggttctgctcccgcactgagcttcttgtacttacatagatctaatttataccgtgagtccagacgtaggaataaatgctcccaaccttagcctcttcttttgcttttgcttctctccttctgagagtgtgagttgagttctcatttaggtttgtaacntggctatttcctagttgtaaagttctgcatttataagtgccnttgttgtaaggtggtgtttcctagaccttccctgatgcgattttaccnntgttnnannngtataaaccattgtacaaaagcgacccctcttga

SEQ ID NO: 522308 - DNA, 1217 bp, Homo sapiens
gtacatgaaacactagaggactgcatgtacattctgtggggggtgcaacaccttggttctggttcaaaccagctgtcacttttgcatcagctgtgccaggacagggttcaggacccaactacaacattcacatgttggttgtccaacatgtcagctgtgtttccctcaactttcatgtattttccctgaagcacaacacacacaaatcaacatcttttcatttccacacatcacacaacacacacacaacaaacaaacaacacaaacacaaacaaaaaaacaaacaacaacacacacaacaaaaaaaaaaacaaaacaaacaacacaaaaaaaaaaaaagcaaaaaccaccgccgcagaaagcaacaaacaaaagaacgaacagcaagaaacacagaacacaaaaaagaaacacaaagaagaggaagcacaaaaaaaaaagagaagaacacaagagagaacagaagagaagacagacgccacaaccaacagcagacaaaaaacacaaagaagaaagaacagaaggagaacacacaaacgcgacccacagacaaagaggaaaaggagagagacgagaaagacaagcgaagggaacgcagacaaccgcgaagcaagaaaacgaagcggggaaagagagaacgagacgcagaaacaaaaccaacaaacaaacagaaagaagagaagacaacaagaagagaaaaacaacaggcaaaaacaagcgcagacgacaagaacgagatcgagcgagagaacagcgaagcaacaaagaaggagcgacggcacgagagagaccaggagcagaacacaagaacagacgacgacgaagagcgggcgagagggcaagggagagcgagagagagagaaggaggacaagaggagcaagcagtgacgcagccggcgacacacgaaggaaccagacccaagaccgaacaggccgaaagacaaagcacgacggacgacacgccagaacgagagaaagcaggggacgaacagcgacaaagcgcccaacacgggagagagccgggacgaagcgaagacggacgggggaaggacgggcaaggagaggcaggaagaggaggggggacgaagcggcgcgaggacaacgagagacccaggccccgggggagtcggcagggagaggaggggcagggcggagcaaggaacgggagcgagggagaccgggcgggagagcgacccacgaagcgggggcacaggagg

SEQ ID NO: 522309 - DNA, 238 bp, Homo sapiens
ttttttttaaaggataattgggccgggggtggctcccccccattatccccgcccttttggaggcttaggccggggggtccccttagctcggggggtttagggtgccgtgatttattattgcccccccgccctccccccgcccgatggcagaggggggccccctctcttttcatatgtatatttttctctctttatggggccaggtgggagaaaaaaaaatttttttttttgttgttga

SEQ ID NO: 522310 - DNA, 522 bp, Homo sapiens
  misc_feature (437)..(437): n is a, c, g, or t
aagtctcccacccatcatggtgaaccatgtttaggcagatgaggaccatgatggtgatgtcaaaagcttgtctggtcacgatgtcaaagacaaaccctggaacttgttctgagaaaaacaagagatagtggcatcagggcctttgggccaggacaaaaccaggcatctgtgttatctgtagatgagttttgtctccatcacactccacatcttaacagaagcgaaatactatccttacctcttccaaaatttcacttttagttgactctacctcattgccccagttcaagtccttaatacctctcctggccctttgatgccaccaggcccttcttttgtcctggtctgtgcccttgcctctattcacaatgccctcctatctcctctcttggctgtctaaattccaacaggcttgactaataggtcagattccagcncccctactggccccttcagagaaccaaggctttgggtgtctgggctctggggagtgggctctgccactgtgagtgcctgcaggca

SEQ ID NO: 522311 - DNA, 228 bp, Homo sapiens
tggggagcacacagtggcaacttcattgttgtcttattttcagaatattcacagcttccccaacctttcgcaacaactatcctgataaggtcaacagccatcaacactgaggcaagactcttcagcaaaaatattgcaacttgctgaagactcagatgatgatgatgatattttagcaatacagttttttttttcttttttctttttgtagagatgggtcatcctatg

SEQ ID NO: 522312 - DNA, 445 bp, Homo sapiens
  misc_feature (77)..(77): n is a, c, g, or t
  misc_feature (380)..(380): n is a, c, g, or t
  misc_feature (388)..(388): n is a, c, g, or t
aatggcccttcaaaacaacccccaaactttccttgcaagagcatgacttttctggccaagaagcaaagcccatgaanccctgcccgggaccctggcactattcctgagtgttgggggcataatggggaaaaagtggcagcccacattaagattcatgaccaaggccgggtgtggtggctcacacctgcaatcctagcactttgagagactgaggcaggcagatcacttgaggccaggacaacatggcaaacttggtctctacaaaaaatgcaaaaattagccgggcgagatggcatgtgcctgtaatctcagctactcaggaggctgaagcaaggagattgcttgagcccagggaagtcaaggctacagtgagccataantctgccantgcactgcagcctgggtgagagagtgacagtgacagaccctgtctggggaaaaaaaa

SEQ ID NO: 522313 - DNA, 149 bp, Homo sapiens
tacagacctgtgtggaagagacagagctgcagcagcggaacagcagcatcaggcctggctccaatagcatcgcggagaaagacaacaagcctggttcctattggcaagccagcctcagagcactatgatgacgaggcagaagcaggaag

SEQ ID NO: 522314 - DNA, 139 bp, Homo sapiens
  misc_feature (21)..(21): n is a, c, g, or t
  misc_feature (24)..(24): n is a, c, g, or t
  misc_feature (31)..(31): n is a, c, g, or t
  misc_feature (46)..(46): n is a, c, g, or t
tccccgccgacagccatgctntgnaaatgcnctaccctgtctaggnaggctgtcatttctgcacctgtgtaaaagtctaagtcctcctataaagtgactacagactgcttatctggctgccctgtcgggctagtcgggg

SEQ ID NO: 522315 - DNA, 882 bp, Homo sapiens
ggtcctatcacaatctctactagtgaagaccccaaccaggccaaactagaaattctaatggacaagccaaagcatgaatgtggtatttgatagaatgtcatatccagaccaactgggtgaatgttaaacttagaggaatcatgtgtgggttattatcggtacccagtacagcatcgtgccatgctggaaattttattgagcatggcattcttgtgattcgtttctctgcgccccctggtggatcgagttggattacagaatgacctcttctccttggctcgagctggaagtcattagcactgtatgaggttctaacatagtctatggtaggcattggtgtgaatgagcccaagttatactgtagtggagcgagctgagctgtagcctggggattctctcaactctcttgtccctcacagacttctatgaggaaatccaggagtttggtgagagatgtcttttcacctataggggagagactggggctgggacccctaatatcctggtacgaaggtcatctcgatcgcactcctgaggggcttgagttctgggaatacactaggaagaagcgagtgacatacaggcttaggaacgttgagaagaaggcccgtcgtcggttggaaggaccacagtgtaagggaaaacagattctctccggttgatctgaggagtcctgtctactctgacttgtttcgaagcatggtgatggcagtactttagactcttatgttgaaatacgtttcatagactcaatgcagatttgcgggaagaggaaaaaccgacttcgaaaagagtccttggcgctactcttttgtctgacctgattcaatgagtcctcacgtttgcactttcagaagacgtgcgtccaccggacactgtatg

SEQ ID NO: 522316 - DNA, 1770 bp, Homo sapiens
gcatcgacgcgggctgtgccaagtcactggaaagggaaagggtgggggttatgtgggaaggttggggtgtgacccaggcaaaggatctcagacgagtcagacagatgccacttgggcacttggggtacagccaggtgtcagcgataacagtttatcatgctcattaatctggggatttcaaaagacagcaaagtgagacaagtcacaccctatcctcacgccccaagttgcagtgtctccatcatgttacaagagataagttaccgatctgaaatatattccttttacttttcttgttgttcttgcgctagttgttgggattggttttactagcgaacagtactcgtgatttcggggagagataatacatgtagacgaatggagacgggtgtattgtacgtggagattgtccaataggagccacattgcgtgaccaagtgcacatcacaaatgcgtgatcaaagacaaggaacgtagagatagcgacaaccgcacacagctgatgagccaaggaaacgcaatccgcagcattagggagagcacagatctaacacaccgggagacaggcgcatcccgagagcgccagaagacgattgaggacaccatcacagcagaaaccagacttacacaagaccacagcccaccacacacaagaagagcagcgaagaaacaaggtgcatatacccaacacaaagacggaagaccacaaaggacaacggtgcaaccgaaggacgagcggcagcacaactggcacaatactacatacccacgcgcagcgagaccagatacattcaacagaagagacagcaataggtgggatcacaaacgacacagaaccaaatgaacacgaaaggcaaacacagtacaagggcgcacaaacaaaaacaccaaagggagaaagacaacacatctggcataacaatggcactcatgaccgaatgaaggtcaggtagcactcagacacacagcacatgacacttacaacacaccatagagaatgaagcacgctaacaagccaacggtgagcaacagacaagtacaacggagagaatcacaacatgaccaatgtccaatgactatagacaatgacaactaaaggaggaaagaagagaacgcacaggcaaacatgtgaaagcaacaggacacagcacacatagaacataatatcaacaccacagcacatacacaatcaatcaaagtgacaaaccgacgacaaatacgaaagacgaaagagatcgacaacacgcaggaaaggagaagacaatgaagcacatagacaaagaaaagaccacgtaacacatggaacacatgacaggaacagaccaaagagacatgaacatagagaaagacaacaaagcaaggacacgccaagcacaccgagagaagacaaggacaaagacaaacagccaccagacgcaggagcaccagacacgacaaccgctcagtccgcgacgtctaacagtatcagcagacaacacacagacaacccacaaggcgacaacgcaggtggaacccaaagcagacaagaagacgatgacaccaaatcacggacatcaacgacaagaacaagaacgacggtgccgaacagataatgagaagacacacgcagcgaacgacagacataggatgaacaccagccatgcagcaacagtagccacaggatcgaatgatgacgcacacacaggcatcggcgcaatacagaagcagagcgaatgacataccgataacacactacatatcgacgtcatgcacgaacacgaccctgagaaa

SEQ ID NO: 522317 - DNA, 166 bp, Homo sapiens
gttttaaaaaagggaattccaaaaatgttgggactgaaagccctgttgaaaatggggaacggccttttttttccctttggcttttaacaatatcaggccacttcccccttaaagaaagttggcccaaggtttttcccaataaaaaaaaaccccctttttcccggga

SEQ ID NO: 522318 - DNA, 287 bp, Homo sapiens
  misc_feature (250)..(250): n is a, c, g, or t
  misc_feature (270)..(270): n is a, c, g, or t
  misc_feature (284)..(284): n is a, c, g, or t
gagctcggtaccggtcttcgggcggccttcgtgtggctctttggggggcgcgtgtgatagggtgggctaaaaaccatgcactctggaatttgttgtattttctcccaaagagcctgcacaaatgagccacaccaatgagccacccaaggagcccctgtgtgtggctgcgtgggtggcgacctcgtgagcagaacccatagctccgatgcagtacattgctaatgacttcaccatgtcaatagcgaactanctatactcaatttgatccancataacttgaccanacg

SEQ ID NO: 522319 - DNA, 700 bp, Homo sapiens
agtagtctcgctccatctctaatagactaaacctagatgcctctatgacggactgttgctatccaagcgtttggtgttaccttctcctgggaggtcctgctgcaactcaagttccacaggatggtcatactttcaaacaacaagtttacatcattgtaattattactggtatttacaatttgcaagagttttgggttagttttttttggcttgttgtttgtacaaaaagagtctaagcattttgggccaaacagatatttttttagtgaaaagaagagatacataggatgtgtgaattcccagttttttttaattattttaatcccaaacatcttcctgaaaataacattcccttaaacatgctgtggaataaacgggttggtgatgaaaaaaaaaaaaaaaaaaaaaaaaaaaaaaaaaaaacacaacaaccaacaaacacaaaacaaaacaaaaagggggggccgggcgccgctataaaagataccccccggagggggcgcgcaccacgaataaagcccgccaccccccatgttttattaggaacacaagagggcgccccctatggggagggacgcataatatacacacgcgagcgcgggcccgcgtgtaacaaccaggctcgggatgggaaaacacccccgcgggacgacttggaagaagaccgcacttggggggggcacaaattgggacaccagca

SEQ ID NO: 522320 - DNA, 411 bp, Homo sapiens
ccggacccaagagcagagggacgagacaacatacaggattttagacaatatccaaaagatccaagattttgggtaacatccaaaatacacaggaactcaaacatctcaatagtatgcaatcaaataatccaattaaaacggacgcatgggcaaggggcctgaagagacacttctaaaaagaagacatagaagtggccgacaggtatatgaaaaaaatgctcaacatcactaatcagggaaatgcaaatcaaaaccacaatgaaataccacttcacacctgtaaaaatggctattaccaaaaagacaaaagataacaagtgttgatgatgatggggagaaaaaggaacactggtacactgttggtgggaatggagattagtacatccattatgggctcattgggttccgatg

SEQ ID NO: 522321 - DNA, 602 bp, Homo sapiens
acccacactttttaacatttaatcttttactttttttatttttttactataaattttttaaattattttaatcgataacaaataaccttcccacctttctaaaaaagaaacccccaaaaaaaaaacaaaaaactaaaaacaaccccccccccttaaaaacagaatttttttctcccacaaaaaaaaaaaaaaaaaataataccccccacaaaaacacacaaatcccacaacaacaaaaaaaaagcccccttccaaaaaaaaaaaaaaaaaccccctcaaaacaatccaatagtcaaaaaaaaaaaaacaaatttatcccacaaaaaaaaccttacccccaaaaaaaacacaaaaaactattattttttcccccctctattaaacaaaaacaccctcaaatttcaaacaaaaaaaaaaacgtaaaacaccccccccgagaatctcaacaaaaaaaacacccccaatatcttcgttttacacccccacaccccaacaaaaaaacaacaccacccccaaatacttttatacacaaaccacaaaaattactgcacaaaaacaaacaaataatttcctctacaaaaaccccacccaacccacacaac

SEQ ID NO: 522322 - DNA, 427 bp, Homo sapiens
tccttgcaaagtaaatctgctggtaccatgtggcattaatccttttccctagagtgactcttatcttctgccaaaggttagttttaggatttagacaaaatttgcattctccacactgtggaatgtaaagtggaatgacagtgtcacccgctttcagcttagtaactccctcaccaacactttccacaattccagcaccttcatgtcccaagatcactggaaaacaaccctcaggatcagctccactcagggtataggcatcgtgtgtgcgcaaaccgcagtgacaatgctcttgattcgatcttcatgacgcttttgggggtgccacctctatctcctatagagagagaggctttacagcctcaaaagcatctacaagctgtgcacttgataacctcgttcgccatgttcgcgtattcgggtcgcc

SEQ ID NO: 522323 - DNA, 255 bp, Homo sapiens
cgtcgacatggtaggaaaatgtctctgatctgctgttgaatctactacacatggtagtaaaatgtgtctctggtctgctattgaatctatctctgctactgctctctgtctctgctcctgctctgcctctctgctcctgctctccgtctctactgctctctgtctcgactgctctctgtctctgctcctgctctctgtctctactgctctctgtctctactgctctctgtctctactgctctctgtctgtcgacc

SEQ ID NO: 522324 - DNA, 521 bp, Homo sapiens
gcagcggtggtctggggtgattggtggtctgggctcaggcgccgacagggaaccacaccaggcgaggatgcctgtaccaaataagccgtgaaagcccatgagcaaaccccgcgctttgctgcctttgggcagataacccttgatttcaacacaggcatataccccgacgaacagggccagcatcagccagtgcagggttattgaaagttttccaaatcgggttacgacggtgtcgctggtcataagaagcgtctcttgattgttgtgagggacggttgatccggttgccttgaaccggctgcgtaaccctgctcgtactgtcttaagagagtctgaagatcgactctcgggttaaccttctttcaccttcagacttcgttaagaaatggcttggatacttcgctcaaacccattgagggaggcgttcggcccatgcccgattttgactggaacatacccctgccgttgcatttcggccaagctgaaacgccgccgttgaccctgacaggcgtccgtagcgg

SEQ ID NO: 522325 - DNA, 897 bp, Homo sapiens
aatataataccgtgatctctcacgtctatacggggatctagtcgaagtcctttcatacactatgatctcccgccgtgggaagcccttttcccacccggtgaaaaaatttgcgcccctttgtgacaagaccggcctctctttcgcaccccggggactattcacattctaccagaagcggcgcccaccttctctaaacgccaacaggcctcccttggtgtcgcaaaacacaaaacgccccctttaatcttcgggaatattggcgtcaactcgaagagcctgcctaaacaaagttcgacttgcgaaggatgcccgccaccaattgggggccacccatacacacaagcctctggagcgcacccctggtcgaacacaagccatttattggtggatggcatcccgaagataaatagccaatcattctcccaacataacgaacggtgataaccaatcaactccgccgcctgctcatccttctttttgcgcgcctctgcggcgcctcccttttgtccctgtctcccacactggacgccggcttatgcccaatccttggagaaacagttccagcgggggattgatcctgcacaccgcataccgttccccgcgacgggttcacgaatggccccggccccctcgcccctggcaagcaggcaacaagcggcgcgttgaaccccccaatatagaacagacagaaagcgaacgatgtgcccaacagcgggaccaccaggggtgctacactccccgcccaccaaggcggcatcggtggagaaaacgacccgacgcagacaggcgaggctatgtcacaggagccacgcggagacgccaccttttttcggaagctccccgccggaacccgggataaaggccccccccacccggaaaaagaactttcgacataca

SEQ ID NO: 522326 - DNA, 245 bp, Homo sapiens
cccatggcactagtcaacagacatgctgcgatcctgaggcagtatagtcctgtaagaatgttagcctcatgtatgcagcttacaaaaaaaagtatatggcctctgctcatttgtgaaaggacgctagagccataattcgtgtaattcctttgggaacctcattctggctgttttttgttttcctggggcccctacatcactcggtcagacgaagtgctccaaacaaactgtacggctcccttggc

SEQ ID NO: 522327 - DNA, 826 bp, Homo sapiens
cagagatggatttggttgtggacgtggtccagccacctcagtaaaattggagaggattattatgcaatgaataaacttacagtcaaaaaaaaaaaaaaaaagaaagctgcaaaaaagtgcagtgaggtgcctcagcatgagaaaaagacagggtctcgctctggccatccaggagagagtgcagcggttgtgatcatagctcactggtaactggtaacttctgggactcaagcaatcctcccacctcagccttccgagtagctgggaactacagtggcctggttctggatgcccagtctgggagtgcagtgggtgtgatctgggctcactggaacctccacccatggggatccagcgattcttccacctcagcctcctgagtagctgggattacaggctggagtgaagtggcacgatctcggctcaactgaaacctctgtctcccgggttcaagcaattctcctgcctcagcctcccagacagggtctcacttggttgcccaggctgagtgcaatggccaatcatggctcatggcctcacctccaggtcaagccatcctcttatctcaagctcctgatgtagttgagacaacggctgtgccaccagtgtctgcgtatatttcacctaccacttttgtgacgacgggtctccatttgttgcccaggttgatctcaaggcgggataagactcatggagggtttaacttgagttcactgggagatagtctggggggaaaactatctggtagggctaaaattggtgaggctcgaatctgggaacagtcttttacgacggcaaaaggtctgtaacatggatccggagaaat

SEQ ID NO: 522328 - DNA, 309 bp, Homo sapiens
  misc_feature (29)..(29): n is a, c, g, or t
  misc_feature (37)..(37): n is a, c, g, or t
  misc_feature (216)..(216): n is a, c, g, or t
  misc_feature (241)..(241): n is a, c, g, or t
  misc_feature (289)..(289): n is a, c, g, or t
tttaaattttttttttgagacagagtctnactctgtnacccaggctaaagtgcagtggcccaatctgggctcactacaacctctgcctactgggttcaagccattctcatgtctcagccttctgagtagctggaattataggcacacatcaccatgcctagctaatttttgtgtttttttttttgtagagaccaagttctgccacattgccctggntggtctcgaactcctggcttcaggnaatccacccgccacccaaagcgctgggattacagcatgagccaccatnccaggacgcaaagttattat

SEQ ID NO: 522329 - DNA, 331 bp, Homo sapiens
tatgacctccgcctcccaggtccaagcgactcttccgcctcagcctcccaagtagccggaaccacaggcacacgccaccacacccagctaatttttgtatttttagtagacatggagtctcaccatattggccaggctggtcttgaactcctgacctcaagtgatccactgcctgggtctccacacagtgctgggagtacaggcgtgagcccgtcatgcccggccccagctcctcacattctacggaagttgtgacatggcagttaagaggactgcactcgagggcaggattagggacttctaatgtgatgcagtgttattcctctacctg

SEQ ID NO: 522330 - DNA, 535 bp, Homo sapiens
atttacttattttttttagagatggggtcttgctatgtgaggccaggctggttgtgaacttgtgggctcaggcattcctcctgccttggcctcccagagtgttgggatgacaggtgtaagccacggcacctgactcccaaagctcctttacctgcattactcccgagctcaaagagagtcggcctgctgtgactctccctcctagagtaggcctgaactggccaccaactcaccagaccactcagagctctgcaggaaccctctgttctaggcagccacaacttaacttctgttagcctgccattccttcgacctccaacaagccccttcctcatcccagctttcatcaagtctggcatcctttcacccaccttgggcaggtagtgctccctcattttaatctcatccttttaaaaattattcatacccttccttgttagccaggagttcacagtgtatatctgtttgaaaatatgccttcatcttttctacaagggtttagcacatccctataccctcagctagactgtcaaag

SEQ ID NO: 522331 - DNA, 132 bp, Homo sapiens
gcagccttgggttgcctgaaccccagcatagccttatggaacccctgccaaggtcctaggcactggtttgaactggggcacaagtaatcaatcaatgaattaattaattaattgaatcaattaatagtgaaa

SEQ ID NO: 522332 - DNA, 538 bp, Homo sapiens
  misc_feature (39)..(39): n is a, c, g, or t
  misc_feature (43)..(43): n is a, c, g, or t
  misc_feature (78)..(78): n is a, c, g, or t
  misc_feature (381)..(381): n is a, c, g, or t
  misc_feature (494)..(496): n is a, c, g, or t
gcggccgcctactactactaaattcgcggccgcgtcganatgnaagcgtggaggtggaaagcatggaacgggcggganattaaaggaaataatcccagatggaagcgtggaggtggaaagcatggaacgggcgggaaattaaaggaaataatcccagatggaagcgtggaggtggaaagcatggaacgggcgggaaattaaaggaaataatcccagatggaagcgtggaggtggaaagcatggaacgggcgggaaattaaaggaaataatcccagatggaagcgtggaggtggaaagcatggaacgggcgggaaattaaaggaaataatcccagatggaagcgtggaggtggaaagcatggaacgggcgggaaattaaagnaaataatcccagatggaagcgtggaggtggaaagcatggaacgggcgggaaattaaaggaaataatcccagatggaagcgtggaggtggaaagcatggaacgggcgggaaatnnnaggaaataatcccagatggaagcgtggaggtggaaagcatgg

SEQ ID NO: 522333 - DNA, 442 bp, Homo sapiens
  misc_feature (132)..(132): n is a, c, g, or t
  misc_feature (135)..(135): n is a, c, g, or t
  misc_feature (142)..(142): n is a, c, g, or t
  misc_feature (152)..(152): n is a, c, g, or t
  misc_feature (165)..(165): n is a, c, g, or t
  misc_feature (173)..(173): n is a, c, g, or t
  misc_feature (224)..(224): n is a, c, g, or t
  misc_feature (227)..(227): n is a, c, g, or t
  misc_feature (286)..(286): n is a, c, g, or t
  misc_feature (303)..(303): n is a, c, g, or t
  misc_feature (346)..(346): n is a, c, g, or t
ccagttcctgcttcttgaaacatttcattgctgttttcctactggtatgattgggaggcttcctgagtcctcccagaagcagaagccactatgctttatttacagcctgcagaaccgtgagccaattaaacnccntttcatnatgatcatanagaaaataaagtnctgcgaantggagctatgaaatatcttcaatgacatttccccatcgtcttggctattancantggacttcttttaatgcaaatatctgaaggcttcttgaagtttccccctgaaaatgganttctttttcttctgcantgccaggctgcaacaaagatagctgaaaatgtaaagcaggttnagaagtgggtaacagccagaggttggagagtctggagatcttgaaagaagacaggaagatgaaggaaagtttggaccattgttggcccttatcgag

SEQ ID NO: 522334 - DNA, 604 bp, Homo sapiens
agcgtgtgctcaatgttgcccagtctggagtgcagtggtgtgatctcggctcgctacaacctccacctcccagccgcctgctttggcctcccaaagtgccgagattgcagcctctgcccagcagccaccccgtctgggaagtgaggagcatctctgcttggccgcccatcgtctgggatgtgaggagcctctctgcctggccgcccagtctgggaagtgaggagcgtctctgcccggccccccgtcgtctgagatgtggggagcgcctctgccccgccgcccgtctgggatgtgaggagcgcctctgcccggccggacccgtctgggaactgaggagtgtctctgctcgaccgcacccatctgggaggtcagagcgtctctgcccgggcgcccgtctgagaagtgagaagcccctccgaccggaagccgcccatcggggaagtgaggagcccctccgccgggagcgacaccgacgagggaagtgaggagcgtctccgcccggcaacgacccatccgggaggttggggggccgcttctggccggatgcaacccgactgagaggtgtaccaacagcccaatgaggggggccaggatgacagagggg

SEQ ID NO: 522335 - DNA, 241 bp, Homo sapiens
agatctagtgcctgtcggccaggaagccgcggcgctccctagcctgacgctgcagaaagaaggtgtgcttggcgtgaccgaggagcaggtgcaccacatcgtgaagcatgccctgtcgcgctacagtgaggaccgcatcgggctggcagactgagccctggagtcaggaggggccagcgtcatcagcacccgatgttctgagacctacgaggccaagacggacctcctcaggggtaccgag

SEQ ID NO: 522336 - DNA, 281 bp, Homo sapiens
tgcatcactgtcagttatatgcagaataagtggtcttctatgcagtataggatcctttggcaatactaacactttgggaaccataataatgtggggcccactctgtatcaacttctgaactagtttcatgaggttggtggtggcagcttctcggatggcgtatacctggtccacgaagccaggcatacataaagaattccagcttttcaacaaagaattccacatccaaggtggctggcagcagcggcatacactgacagtgatggtccgggtactcgagc

SEQ ID NO: 522337 - DNA, 330 bp, Homo sapiens
tgttaaagacctgggaataattttattgtataggacactattgatgacacatagaatgggagctgtaagtatgttgcattggaacaagccttacaaatattggattttaagaatacacacattttttacaggtggtctgttttaaaaaatttgaagttatagctacgacttaactacgtacagggaagcattttacgtatgttgagtgattaaagaagaggatgaatggttcaaagaaaagaagcccccattcttgccagctatttattgtattccttcaaaagcaactgtacatgctgccttcagatcatagttaaatatttctagtaa

SEQ ID NO: 522338 - DNA, 330 bp, Homo sapiens
gtgtccatcccccttcgtgtgtccatcccccttcgtgtgtccatcccccttcgtgtgtccatcccccttcgtgtgtccatcccccttcgtgtgtccatcccccttcgtgtgtccatcccccttcgtgtgtccatcccccttcgtgtgtccatcccccttcgtggtgctgggataactggctagccatatgcagaagactgaaactgaaccacttcttacaccacagacaaaaatcaactcaagatggattaaagagttagatgtaaaatccaaaactacaaaaaccctggaagacaacgtaggcaataccatcctgacgaagggggatgg

SEQ ID NO: 522339 - DNA, 974 bp, Homo sapiens
ggcgccacggagtcccggtgacctcagcaagtacaactttgagaacaagtatggcgtcccgggccctgcattgtgtactcagcacatcctgagccagactgagaacaaagtgcctgtgcaccaggataccctggaggggtcccagccttcttccgggacatgaagcagggcctgcatagtcttgtggagcatcaggtaggacagaggatctcaccaggaatgggtgtcgtggacgtggagaacgactgttccatcagcaaagttcctgaacccgaagtcctgggagctggacggtgcatcagacgcagaaggcccatggtaccagatacattctcagacgcccgttcgaacagacatcatcgagatggacaacgacgggagcgggcaaagtaccgagcattgggcgtcctggacccttggatacgaggatatccgagcgagactctacgacgagaagaagacacaagcagcgatgttaccataggcatctcacgggaaaacatcggcaggaccgagcagagttgagtcatatgtatcaaagagtacaggcgtgagatccaggaagggcattgaaagatgagagaagagaaccggctctttgccaataggatccagccttgagagacagtgaaaccggagggcccagccatatttagaagagggcaagttcaatagccccattctttcggactaaccgaacgggagtagcccggaaggtgtaaaggacagaagaaccgcacgaggaatttggccccagtgacgtacagggcgaaggcacgccacaagtaaacctacggacgagacccatgatatttacattaactaccaagaggttgtgttacccaagaggccccgccaaagccacatttagagagacctgagaagaagaagcacgcaaaagacattgtgagactggaccccagattgagacaaggcgcatttccctggcacgagacacagaaggttatacagac

SEQ ID NO: 522340 - DNA, 210 bp, Homo sapiens
gtgtccatcccccttcgtgtgtccatcccccttcgtgtgtccatcccccttcgtgtgtccatcccccttcgtgtgtccatcccccttcgtgtgtccatcccccttcgtgtgtccatcccccttcgtgtgtccatcccccttcgtgtgtccatcccccttcgtgctctctacctctgctactccaccagtctcttaatgttttaacaacag

SEQ ID NO: 522341 - DNA, 401 bp, Homo sapiens
  misc_feature (316)..(316): n is a, c, g, or t
gcgatgagatctcctgggcagtggcggggctttgcttcccacgctccagagctgcgtcaccagggcgcccagcttcctctaccccagctccctttcctccccgctgcctaaatctcttgctcgtgggcccttcgctgccagcctgggacctgcctgtcctgttgaaatccctggctgtagccccgtctccaggcgcccccctcccggctgcagcacctccaccttcttgggggttgcctggacttgtttcctctacggcaaggcttggtgcctgtggctcttcttcctgtgctggctgcctgcggcccgtccccanatagctgtccttcctttgggaagcctgttgccgggaaaggaaccacagagttgattgaagttgcagttgggtgagcctttccaag

SEQ ID NO: 522342 - DNA, 171 bp, Homo sapiens
  misc_feature (38)..(38): n is a, c, g, or t
tcgctaagattaggggtctcatcgtctcactgcacganatctttatctatcctgactcaatatcgatacaggtctctatttgcttcaagataagtaaatatgccgggtgttgtggctcacacctcttatccctagcaccttggatacccaaatgggttgtattgctttatg

SEQ ID NO: 522343 - DNA, 1007 bp, Homo sapiens
tcgggggaaccactgaactaggctaggtacgaggctggtttgagaggcaagctcagccagcctaaggcagaagtctgtcgaggcgatgaacgtggctagctgggctccggtatagtgcccgatgggagcatggttatcctgggtttccatgccaatgaggtttgtggtgtgtaaccctcggtcagacgagaagctgtcagcatcgtcaactgtggtggagggcaccgtgtcgtgggcattctctgatactgagagcggccgatggcctttgcgttgtcctcgaagggatggtggagtgtcagtgctgtacaggaggtctcgtgggttggcgtgcacccgggcacatcgtgattctcgcgtggagggtctgctgtggtccgtgagagtcgcttgtgttgcagcgtgtgggcacctagttgcccgtgtgggcctgaatatggagtgcccagcttcatgcgagtcctgatgactctggtgcctggcgttgaggggcccgactatgactggccattgtgatcacgtgtagctgaggaccactaactgtctgtagtcctacgtcacgtccctacgaacataggctcaagaccatgcactacacagctgtttgtaagccatagtctcctcggaacgtgctgtggctgtgtggggcacttggcaaggcccagtgtggccctcaggatcctcagtcgggctgactgcccatgtggctgtctgcgggggggcgggctgggactgcgctgctatcagacaatcagtgggtactcgccggtcccccagggaccccaagaccggctccggcgtggcattgttctgccttcccttttgtgcccagccggtagattagttttgtgggcccggggcgccattctgggaccgggctggcgtatggggcaccccagaggcctcgggggatgttccttggtctgtggtggcactggcgcaacggggttgccccctcggtggttccccgccgtgatgggcggcgagacgccttggggaatttgggc

SEQ ID NO: 522344 - DNA, 324 bp, Homo sapiens
gtaatcaactgtccaatgatcgccctctctcgcgccaaaagtaatctcacgggacccagatgggactcgaacccacaatccccagctccggaggctgatgccttatccattaggccactgggtcaccacaggatccggcttctcacaccctctccatacgcgatgccatcatcacgctcccgcccccgcacatcgcggtctcgcaccgagaggcaagtgatttggcagccgcccccagcggcggcggcgcgcgcctgcgctattctgcgtccctgtcgtccgcgtggacttcccgcgcgatgcaccatgggcccggagcggccg

SEQ ID NO: 522345 - DNA, 301 bp, Homo sapiens
cggatgaggcgctcaggttactgtgtccttgcccttagatccgagtggagttgaacatcctactccatctggtaggagcacatagtgcactatgcccagtgccatcacaggcttgatttcttcactggtccagtttacggcgatacatgatcatggcgtggctgatgtttcccaggcgggctgcctgaaagtctgtattcttgatgagcacaaggtccatgacataatagttgctgttacaccatagagagggctcctgccttcgaagcgtagatgtactcttcaccaccatgtcactcac

SEQ ID NO: 522346 - DNA, 835 bp, Homo sapiens
  misc_feature (169)..(169): n is a, c, g, or t
  misc_feature (298)..(298): n is a, c, g, or t
  misc_feature (347)..(347): n is a, c, g, or t
  misc_feature (565)..(565): n is a, c, g, or t
  misc_feature (614)..(614): n is a, c, g, or t
  misc_feature (627)..(627): n is a, c, g, or t
gtggtagtgttacttgcctttgacacctctgcatatgttttaatgactagatccaaactgtgttgttcttaaatcaaaaattggataatttgtaatatttatgtgttaatcacacagtatgctctctgaagttctcttaagccttcagtttatactcttaatttaattntctttctgagctggagaactggctttgcactttggttacacagaacattggtttccaattcagtttaactgaaatttgctgctgatatgttgagtttggtctttaaaaaatagctcatatatctcatcntttcttctgtcttagaagaacagacctaactagtgaatgtataatgaanatgcattatttagagctgcatgaagagttagctcttacttataactgtgatatgatatgcagctgatacatgtactatcatattaaaatattcacttctcttgacttagacctttgagctgataaactgcttgaaaatagctctgctacgatgcatacaaataatttttgctgataaaaatacttgatacaaaggctatctttcatggtttggatgcnaagagtgtatggtattaatattcattaataggtactgtaaaaaaaagcnggccgtcccatcnccttaatagcgttacaatactggcccgtttcacatcgattggaaaactggtacaactattcgtgagaaaaccctttcacttgggtatcaaagccctccatgccttcaaaattcgaccctaggaaggaatttgccgtattttaaaaccgaatttgtaaactttttcaacccaggtggacttataaactcatacgcatcttttgttgtcg

SEQ ID NO: 522347 - DNA, 120 bp, Homo sapiens
  misc_feature (59)..(59): n is a, c, g, or t
  misc_feature (91)..(91): n is a, c, g, or t
tgaggcctgacaggaggtgtatgggtcatgggggcagatgcctcatgaatagatccatncccttgggtatagggagttaatccttactctnagtccccacgggaactggttgttaaaaag

SEQ ID NO: 522348 - DNA, 366 bp, Homo sapiens
  misc_feature (185)..(185): n is a, c, g, or t
gagatgatggctggaatgttgactatgccagggtgtgagatagttgaaagtaagtcacattatgagggaggaactccatacagtctattcagtttctcccacttatcagaggaaatgacttaacatcttgccttgttgtgccaaagcagagtatagtgtatatatgtggttctcttctggttgtncctcttctggctcttcttctgagccactgaagcccagatctgtagagataggcaaaatgatgctctttccctctgatatttctgacaaaaagtattacaagtatatttaaaaaggttggaaaacaccatttttattgtgttggtctaatacccatcaatgaccttctggttcaataatgaa

SEQ ID NO: 522349 - DNA, 241 bp, Homo sapiens
atgtatgtgctgcgctagtgtgtgtgctggtgtgcatgtgtgtgctgtgtctttgtgtgtgtgctgtgtgctagtgtgctgtgtgtccatgttgtgcgttgctgtgcgtatgtgtgctgtgtgctcgtgtgtgtgctgtgtgtgcgtgtgtgctgtgcgtttgtgtgtgctgtgcgtttgcgtgtgtgctgtgtgtgcatgtgtgtgcgtgtgtgtgccgtgcgtttgtgtgctgtgtgtg

SEQ ID NO: 522350 - DNA, 753 bp, Homo sapiens
ctgagtacttggaggacacgaagaataaaggagatgtgaagaaacattctcagatttattaggactatcccattacgtctttttgtggagaaggaacgtgataaagaagtaagcgatgatgacggctgacagaccaacggacagaccaacagacacgaacgacaaacacgacaaccacgaacgacgaaacgacgtcggaacgacaatacctgaaacttgacagatgttggttctgactgaggacacgaagaaacagaaggatggtgacaagaacgacacgcaagaagaagattaaggaaaagtacatcgatcaagaagagctcaacaaaacaaagcccatctggaccagaaatcccgacgatattactaatgaggagtacggagaattctataagagcttgaccaatgactgggaagatcacttggcagtgacagcatatttcagttgaaggacagttggaattcagagcccttctattagtcccacgacgtgctccttctgatctgtttgaaaacagaaagaaaaagaacaatatcaaattgtatgtacgcagagtttacatcatggataactgtgaggagctaatccctgaatatctgaacttcattagaggggtggtagactcggaggatctccctctaaacatatcccgtgagatgtagcaacaaagcacaatctagaaagttatcaggaagaatttggtcaaaaaaatgcttagaactcattactgaactggcggaagatcaagagac

SEQ ID NO: 522351 - DNA, 345 bp, Homo sapiens
ttaggctaacaggagaaatgcttaaccctggaggcgagttgcagtgagcccagattgcgccactgcactccagcctgggtgacagacgtgggactccactctcacaaaagaaaaaaaaagaacgcagcagcagcaaactctgcccagccttttgagatctcagaaaggccccaggtttttttctttgggttccaggttctccttttccgagcttttgggagcctttttctacttattcaccgggcacccggtctccgggttttttcttcccaggtcttctttgcctatcggaagccggcccgttttctttgaacgggttgcctcgttcgttgtgttaccacgaat

SEQ ID NO: 522352 - DNA, 664 bp, Homo sapiens
  misc_feature (475)..(475): n is a, c, g, or t
ggaccgaccttcagcagggctgtggctaaccatgttctctcgcgcgggtgtcgctgggctgtctggcctggaccttgcagccgcaatgggattcacagttcgaaatatggcacactttgaacagatatcaccccagggaagacttaaaatggtccaattcaaaaaaacaattccaggaaaaattaacccaaaggtctatgacaacctgggtaagcgtgccagccaaaaattattgcccccgaggttggcagcagcagcacgcctggaaagaccaaggctacggaaattacttctggggacattgcgcgcgacctcctattaaggcactcctgtggtacattgcaacacaaacacggctgtggaataattacaaacggggtggtgcccttgggaaaggacacccaaaaggaacgaagggaagaaagccaaggcctgtttcccccttgttgggggatgggtttggttcctcagtccnaggacactttcgaggaacgggcaacctatggattgatatcgcggagcggcataatcattcgaccagggtgtttcacgaattgccacaatgtttgtgggcatttaaaaacacgccaagggaattgttcggaccaagcactacagggcaatgcaaccggggccggctctctcggcgcatattaaaaccaca

SEQ ID NO: 522353 - DNA, 823 bp, Homo sapiens
  misc_feature (2)..(2): n is a, c, g, or t
  misc_feature (66)..(66): n is a, c, g, or t
  misc_feature (116)..(117): n is a, c, g, or t
  misc_feature (120)..(120): n is a, c, g, or t
  misc_feature (123)..(123): n is a, c, g, or t
  misc_feature (136)..(137): n is a, c, g, or t
  misc_feature (142)..(142): n is a, c, g, or t
  misc_feature (151)..(151): n is a, c, g, or t
  misc_feature (155)..(155): n is a, c, g, or t
  misc_feature (176)..(176): n is a, c, g, or t
  misc_feature (182)..(182): n is a, c, g, or t
  misc_feature (201)..(201): n is a, c, g, or t
  misc_feature (313)..(313): n is a, c, g, or t
  misc_feature (351)..(351): n is a, c, g, or t
  misc_feature (386)..(386): n is a, c, g, or t
  misc_feature (390)..(390): n is a, c, g, or t
  misc_feature (404)..(404): n is a, c, g, or t
  misc_feature (408)..(408): n is a, c, g, or t
  misc_feature (424)..(424): n is a, c, g, or t
  misc_feature (588)..(588): n is a, c, g, or t
  misc_feature (657)..(657): n is a, c, g, or t
  misc_feature (659)..(659): n is a, c, g, or t
  misc_feature (664)..(664): n is a, c, g, or t
  misc_feature (677)..(678): n is a, c, g, or t
  misc_feature (682)..(682): n is a, c, g, or t
  misc_feature (686)..(686): n is a, c, g, or t
  misc_feature (688)..(689): n is a, c, g, or t
  misc_feature (693)..(693): n is a, c, g, or t
  misc_feature (706)..(706): n is a, c, g, or t
  misc_feature (710)..(711): n is a, c, g, or t
  misc_feature (757)..(757): n is a, c, g, or t
  misc_feature (809)..(809): n is a, c, g, or t
anttcacacatttaggcctcatttagacaatgaggaggctgacctgtccctccacctcccattgcnatggttagagggcaataaccctccctaatactagctcagtgagtagaggnngtnacntacctaaccaggnngtccncattttggntganatggcacaggtcctgaacatnccactntgtacttccctgctccatntccccacacatgtaaacagagtttttgggctgagtttgataagatgcctctatgctttgagaaggaagtagggcatcccctaaatgcaaggggaatgtgcttggatttttantttggtcccagtacaagaaacagaaagcactgcctttnagagctctggctagtaaatgccacacatatctggnaggntgaggaagcttccncgcntttttcctcaaccacnatagagaagggaaatgggacagaccacgatgagggcacctgtttttgctctgcctccccaggagggttgggggtgccccacccaatggaacataaacagatttttggcagtgttgtgggactggggaggagagaaacacaagctccaccagaacaaggaaggcnctggggagtacaggggaggagaaggaggtgggaaacaggatcctccctccccgccgccacacacacacnanccccngttttcgttgctnnggcnctgngnncccntccagagaactcngtgnngggtgggggctctgtatccttcccagagttgtgacctaggggagtnggtctgattcccgccctgttggaagaggcagccttggttaagaatggcaganaacctggagatggc

SEQ ID NO: 522354 - DNA, 805 bp, Homo sapiens
gagtttttaaaaattgaggtgagatccatataacataaaattaaccttttaaaatgaacaattcagtagcatttaggacattcacagtgttgtccaaccaccacctctgtctagctccaaaacatgatatcacctcaaaaggaaactgtacccattgagcaattgcttctcattgcccacctccaccagcccgtgacaaccaccagtctgcattttgtctctatgaatttacctgttctgaatatttcatttaaaggaactcatacagtatgtgaccttttgtttctgcctcctttctcttagcatattttgatggtcatccactttgtagctagtatcaatctttttatggctgaataatattccgtgtgtgtgtgtgtgtgtgtgtgtgtgtgtgtgtgtgtatctcaaaattttatattttttatatattatatttttagagagacagagtctcactctgtcgctcacgctggagtgcagcggcgagatctcggctcagtgaaagctccgtctcccgggtacacaacattctcctgactcagacttccagagtatcgtgggaatacaggcgcgcgacaaacaggaccagcataatacgtagtaatacacaatagaaaagggggtaaccagtggtgtaagcaagagagcgagtatcagatccatccacagaacacaagagcataccagaccagtacaacgacgactcacaagaagtgactggagaattaacaacgacataaacaacaagaagagacgccggcacgtaatataaacaaagagcaaagacaagaaaaccatagaa

SEQ ID NO: 522355 - DNA, 1254 bp, Homo sapiens
ggacgcgtgggaggccctcagcccccaggtccagcatggtgcatgcgacgacgggcaccggttccacgaaggcctatcgctggatacatagggctgagtgagatcggccgccacatgcaggccgtgggccgaggccgtgggcccagcgttcagggaagcgtctgccgcccgccggctagcatgctgctggacaccacagaactaagtttccgctttctttcaaggctgtccgggtaactgatgctctggatggatgaggtcaacctgcagatggatgcccaggagcgtccccggggatgtgtcctccgcggcatctagtcatcaatgaactcatgcaatggcatcgagaggcacgaggatacgatggcccgggcacgtagccgcttctcctcctgcatcgacgtggggaaggagctgctggccaggagccacgtatgctggccgagggagatctcagagaatgctgtctcagctgcaggcacggcgccaggagacagctgagaagtggcaggagcacgatggactggcttcagctggaatggaggtgcttgtagttgggaacgagatgcagggatggcacgaggcctggctctgcatccaggagccactggtgcgcagtgctgagctgggttgcacggtcgacgaagattgagagcctcatcaagcggttacgaggccttctagaagtcagcagtggcctgtgaggagcgatactgtgcgctggaagcacgcttactgcaccaagaagagccgggaccaaggagcgaggcacaacacgagcgcggcggcaggaacgctggaacatattccggctggtccggaaaccacaaggcatatgggccctccggtggacctgtggggcggcccaacaggtttcgtgcacacgcgtgggaaagcaaccagcgccgaggaacacacagatcaaagagggacccacgggtgtcagaggaggtttgtaccgacattgagaaaggcctccagactccacttgtgtgcaacacacagagctcgtggacatacagcagctccccgagagggaggagaagcgcctaaaggaagaaggaaaaggaacctagaagaagaaagacggcacatgtctagtctcgccattcatcatcatagtctaaatagcaatagtaagctttacagcaaactagtagcaatatagaaggctactgatcgaaatacaaaagcacttgactacggcgtctaactaagcaagacacacgacgaaagttacatagtacgtaagaa

SEQ ID NO: 522356 - DNA, 999 bp, Homo sapiens
  misc_feature (621)..(621): n is a, c, g, or t
  misc_feature (623)..(623): n is a, c, g, or t
  misc_feature (632)..(632): n is a, c, g, or t
  misc_feature (641)..(641): n is a, c, g, or t
  misc_feature (660)..(660): n is a, c, g, or t
  misc_feature (662)..(662): n is a, c, g, or t
ggcggcgcggcggttggccgccccggctccgccgagtgcagcgcgcccgaaggccagtgcctgcgtccgtccgtggcccggcgccaggtgggcgggaggccgccggcagtcgccgacgctacaccgccgggcgtcgtttcgcgtcgcccgttccggccaccgggcgcattttgttcgcgcggaagcgccgcggtaggtgtgggaacccaagcgggagagccgcgggatttgccggccgccgccaatgccgttcgtccccgctgcgggtggcggtggtgtgctcgagcaaccagaaccggagcatggaggcgcacaacatcctcagcaaacggggattcagcgtccgatcctttggaacagggactcacgtgaagcttccaggaccagctcccgacaagcccaatgtttatgatttcaaaaccacatatgaccagatgtacaatgatctttcttaggaaagacaaagaaactcctatacacagaatgggattttacatatgctggacagaaataagagaatcaagccccggcagaaagattccagaatgaaaggacctgtttgatctgatcctcattgcgaagagaagagtgtatgaccagggtggtggaagatctgaattncnagaaacagngagacctgncagccttgtgcacgtggtnantgtggactccaggacaaccacggaggagggccccccttgggggcggttctcatcttgtgagctctggcaagtgtttccagcacacgggacagaccttgcggcacgagctccgcgagcttgtcgcaggagttcgaggagaaagagtgggcggcctttcttgagccgttggtctatgaggcaggccgtttggcgctctgggtccgtggcagagttcctctcgaatggttatcacgggttcgcgcgggggccacccacatcgtgttattggggggccccccacaagacgtttttcctttgggggtgacttcacacgagaggcgctatgttccccggcaga

SEQ ID NO: 522357 - DNA, 135 bp, Homo sapiens
cggcatgggatatgtagtcctgctactttggaggcgaggtgggaggatcacctaagcccataaagttgaggctgcaatgttccatgatcgtgccattgcactcccacctgggtggcacagtgagaccctttctcc

SEQ ID NO: 522358 - DNA, 405 bp, Homo sapiens
taagttttgacatttagcagaaaaagagtagctttaaaaaataaaaaaaaaattgtctgggcgtgttggctaacacccgtaatcccagcactttgggaggcctgaggcgggcagatcacctgaggatgggagttcgagaccagcctgaccaacatggagaaaccccatctctaataaaaattaaaaattagccaggcgtgttggctcatgcctgtaatcctagctacttaggaggctgaggcaggagaattgcttgaacccaggacgtggaggttgccatgagctgagatcacgccattgcactccagcctgggcaacaagagcgaaactccatctcaaaaaaaaattattttgattttttttgggggggattttattttctgattgtaaaagtaatccatgttg

SEQ ID NO: 522359 - DNA, 136 bp, Homo sapiens
agtagtcgggacgtagtgatggctgcgactctccatgctcctgtgcatggcctcctgtaactccatctgagtcaaatcccccagtaaagtgcaatcgacatcccaatagatgctgggaaaaaaatcttccccacgg

SEQ ID NO: 522360 - DNA, 388 bp, Homo sapiens
ccccctgcggctctcataattgcagtgtgtggacttaggtcctatgtctccagagggtgatagctggcgtctgtcacgtgtcctactgagacagcgcagcggagctagctagcgacatttgtataggctgaacgatatatacttatagaatacagtcaaagatacacaatctgaaacagctacatggggtgaactctaacagttgttgccatgttctagaatgagacttacgttctctgctatctagatctggactcctatggcttctttacttagttcaagccccagtctagggaaagccagttacataccacttggcgtcaggagtcttagagctcaccctgaatataagacccgcaaggggagaccaagcacgaatacgcagacc

SEQ ID NO: 522361 - DNA, 135 bp, Homo sapiens
ataggagggggtgagactggggaaaagtgcgatgcagaaatgcctttctgggagcaatgtagatgatgatttggtgggcagagatgttgagcctttcaaataggtcagtgttgtccaggctgacctcgaacttcc

SEQ ID NO: 522362 - DNA, 279 bp, Homo sapiens
gaaaaaaaaaaggggagggggttttttttttccccaaaacctaggcggggggaatttggtaggttccaaattttcccccggttttgccaaatggggggaaaatttccccaccccatggggccaaaaccccctggggggggcccaatttcccaaatttaaagccaatttttttggggaaaattttttttttttccgggaaattggggttttaggggttttttggtttaaaaaaaagttttgggaaatcctttgaaaggggggtttttttaagggttttta

SEQ ID NO: 522363 - DNA, 148 bp, Homo sapiens
aagctcggtaccccgaactggcgcgcgtcgacctgcgccttgtcgaactcgaaccagggatcgggctcgttctctcgaggtataactgcaaccgcgaccagagcgccttgcggttgtcggcatcgtcgagcaccttcttcttgacatg

SEQ ID NO: 522364 - DNA, 834 bp, Homo sapiens
  misc_feature (92)..(92): n is a, c, g, or t
  misc_feature (124)..(124): n is a, c, g, or t
  misc_feature (144)..(144): n is a, c, g, or t
  misc_feature (164)..(164): n is a, c, g, or t
  misc_feature (234)..(234): n is a, c, g, or t
  misc_feature (256)..(256): n is a, c, g, or t
tgtccacatccttcatgcaagactgctgccttcatgtaaccctgggcacagtgtgtatatagctgctgcttacagacgtcagaaactcatgngaagggccacctcagcgagggggatataatgntcgtgtgtaaatatcctgtnggttttctgcacttcaccangtatgaggtgtagcctcggaccccggcgcgccttatctggtttgcccaaagccgatccttgggcatctcnagcacttacactctcgtctatngtctgttctagcaagcaatacaaagcaagaaatacggagtatacggacactgctgggctttgcacaatagacagtggggtctccagcataccgttgaacaggcatacgaatttgacctctggttccgtaacagatgcagctattctcaaattgtgttacctggaaactgcaaccatttagcaaagaaggtgggtccctgtttccaggttgaaactttttagctccaatgacagaccagcctgtagttatcctgtgtaacacagtttacagcttacaaaaacctacttgggtaattattaccggaaaaggtgctcagtctcaattgttcagtgggtacttcctttcagggcaaaaatattcccttggccccaagaaactccttcatttgggcatttctaccagtgggccacgaggccttcatgtgccacgttctacgaccagcgggcttccacgggctaaatggaagtgccggccccgaattttttccctcttttgcgccaacttaccttcttcgctggcttttgggcacaggtttccccatatttatgtccccttcggacccggggcggaacaatttc

SEQ ID NO: 522365 - DNA, 102 bp, Homo sapiens
tctacaggatcccaagtatccagcagagaaggaagtttaatcataaggctgccgaataggagacaggggaaacctcaaatctgcctgtctgagccgtttagg

SEQ ID NO: 522366 - DNA, 120 bp, Homo sapiens
ttttactggagaatttttaatttttaatttcatataatttcacgcagacattctgctttatagactttgacttcacacctcccgtcttcaaagcggcgaaaattcagccacggctgcttt

SEQ ID NO: 522367 - DNA, 130 bp, Homo sapiens
tggtgtctatgactcctgcattatcttcaaaataaagaaacacgccaccgtttctacggtatgactttcgttgtcgaatgaccactggctgatgtaccttttttctgagctctggtttgcctttcttgac

SEQ ID NO: 522368 - DNA, 246 bp, Homo sapiens
cgattacaggtgtagacgctatcgcacccagccagaagccaacacattatatcaaagctgaaaaattcaaagttgagacaagccttcggcaaaaaaaacttatcatcttgtaagaaccaaagatttgctcaatagcgtgtatccgttaataagcagcagggctatggacgtcgcctctattttctaacggtaaaatctcaaaattcgtaggaataaattcattctttgtaggaagtttaaatttcc

SEQ ID NO: 522369 - DNA, 671 bp, Homo sapiens
cttatatgtagagctgtggctgccagatccttgactgtgcggaccgccagcaagacgtcgtgacttagcggtacgctgtcatgtctaggatatagaactcaataagcgttgcctctgctcctcgtgagcagaggggacaaccgactgccagcaggtgtgggagctagacttaacagagagacgtgtaccaagcggcacgtcagcgcaggtgagcaaagactatgctcgatagttaccacgtagacatcatagacgggacagagtatgacgacatgagagaataggaccatcaagcgagaggcgaacagacaatcccaatgataaatggccgcgagtgccttgcaagggaatagaaaccgcttcggagaactaacacagtttacagcaacgacgaaaggcaagcactcgaaatgataggtttccctacacgagttcactacgctttccgaaagatggccttcctgatggggccacttccatagaagagcccctattgggcgtcaccaagataatagatacaaccaaacgggacatacagtataaagagcccccattttgggcgatacacacatcgaaaccgagcacatgttcggcaatcgcttggaatcagcagtataggtgattatatataagaaagcagcgtgtcatccaactaataaatgacacaaaag

SEQ ID NO: 522370 - DNA, 510 bp, Homo sapiens
  misc_feature (443)..(443): n is a, c, g, or t
tgtcagtgaggagcccgcccagcccacaccttcatcgtggacttccagcctccaggagggggggaaaatcagggtctggtggtctaagctgcccagtctatgggacttcaggctggcaaccccggcagatggagaccaagcccaggtgacttctctcctgacggggatcggtgcaggcggctgtgtgcatatgtcaagaaagcctctttgccaggaaacaggcaattatacccacacttacctgctacctcaagagtcggcgaggggagagacttcaggagcatgagcaattactcgagttcccctcccaagtcatttcaatctcctgtgggttaccgggctcattcagtctgccccacagttctatggcaaacagagccctctgtgttcatgggacggttcaagaacaccaagggttcctgccagcatttgtctctctaatngcacgttctgcaaagcagaccttggactgggccagccctttgtgatctttttccccaaagaaaacac

SEQ ID NO: 522371 - DNA, 944 bp, Homo sapiens
  misc_feature (1)..(1): n is a, c, g, or t
nctactgctacatcagacaatacagtgcggacggcgtatatataggtcgttgagggagcctgcgttttatgccaccgtggtcttgtatctcgcatgtatcccggcccccttttggttcccccagtggttggaccctgtgggccattacgggtaggctgatcccctggtcgggataggaggggcctatcggcaacgcggcgtgcagttaagttcccccagtttttccccggctgcgcaaacctatcgggcccgctcgctgtcatcccccctgcgtggtagatttagagactgacgtcttgccgtgaggactcactgatgccgtatgtgcgtgccggtcgatgttttggatccggtcggcagcctcgttttgtggacgccacgttctcgtggccgacccgatgaatggctgcgcccggcgcaaaacttcctctgtttcgccccgcgatgctgcccctacgaggtgtatgtgctggaaatgtccgagtatgtctatgcgcgatcctagctctctcattatccgtcttcagaaggatcctctagacaattatctccccctcatagggattgtaccgagggtttgcgcctacgcgctactgtatccttgctgcgcgtggcgccccccccattgttgatcccacgcgggaggtacacccattagcctcctaaccccctgtgtctccctgacccacaaataactttgccccatccactggagcccttctctacattggtttctccacccatatcatccccgtcgtaacttacactgtttccccgcatatcctctaggtgttcccatctctcccccaaaggctactcactaataacccgtcttctccacccaggtataacacccctccttgttccaataaccctatcctcccattatctttccttgaccctaagacccccaaaacttccggggtttccccccaaacataaca

SEQ ID NO: 522372 - DNA, 235 bp, Homo sapiens
ttacataacacaagatttaacaattagctgggtgtgagtgctactgcatgtattcctggctacttcagagtgctgacggtggaaggatcactatgacgggaggagtttgaggctgcagatgagttatgatggcactgctgcactccagcctgggggacagagtgagaccctgtctgaaaaaaagagagaaagaaagaaagaaagcgcgagcacgaacagaaagcaagaaagaaag

SEQ ID NO: 522373 - DNA, 262 bp, Homo sapiens
  misc_feature (21)..(21): n is a, c, g, or t
  misc_feature (239)..(239): n is a, c, g, or t
  misc_feature (256)..(256): n is a, c, g, or t
  misc_feature (258)..(258): n is a, c, g, or t
gtttccccctcctgtggatgnaataactgaagcctagagaaacgagctagtgctactgaactgtttaaattatttttgtgttaatagtacactttgagtatctttccacatttaaaaagaactttccgaattataaatgttttccttacgttatttaacaatgtacactgtttaaaactgaattcaaaccttggggtttctcagcagccgttacctgtacatttgcactaactccgggnctgcgcttctgtaagantncgct

SEQ ID NO: 522374 - DNA, 142 bp, Homo sapiens
cttgccccggcccccatggaccatcagtctgaaaacaatgatatcgatgaagttatcattcccacagctcccttatacaaacagatcctgaatctcgctgcaaaacaaaacgctattgaagacactatcttttacttgggag

SEQ ID NO: 522375 - DNA, 2499 bp, Homo sapiens
  misc_feature (26)..(26): n is a, c, g, or t
agcggcgacgcagcgtgacttcacanggggaggggcgggccgagggtcctgccggcgcgcgggcgtgttcatcggagtcgctgtttgggacgctgggtgtgcggtgttctgtctccgctcccgtttcgctgtcacagcccgttccttcccggagcccgggacaggctgggcgcgcgcccgtgacgcgtgaccaaaaccaaagacggccatgaagtgagatcgtgcaaagtagcagataaaacgggcagcatcactatttccgtgtgggatgagatcggaggtcttatacagccaggggatattattcggttgaccagagggtatgcatccatgtggaaaggatgtctgacactttatactggaaggggtggtgaacttcaaaaaattggggaagattttgtatggtttattcagaagtgccaaatttcagtgaacccaacccagattatcgaggacagcagaacaaaggggcacagagtgaacagaagaataattccatgaatagtaatatgggtacaggtacatttggaccagtgggaaatggtgttcacactggccctgaatcaagggaacaccagttttcacatgctggcagaagcaatggccggggacttataaatccacaactacaaggaacagctagtaatcaaacagtgatgaccacaataagtaatggcagggaccctcggagagcctttaaaagatgacctatgctaaatactcatgtgtagtttttatactacatgccctacttgaacacttattgcacttttatttattgttaactgtgaaaagtacgtcctttattgggtttccttttatattcttggtttgttaagaagaatggtttgtttttatagcaaaactgttaagctgctcgagtctcctgttgaagaatgggaacactgaaaagtaggggcatttatttttagagtaaaaagattattggatagcctttaaaaaacctgcacccatttcatgggtgagttacttaagacatcagctttatagcctctatgagtctatcttctgtataagttttgtaatatttaacataaggcttaatgggagatgttcttttgtcttgtattcagatattgccaactaaagcaataaccatcaaaaaacacaagaacttgtcaatgctagcagtaatttttgagtgtttgtggctctcggaatgattgacttcgttcagtgactactattaagattttccaaggactgactcatcccaaatttttgttgtattaccaaaaaaacagattccttatcagaatttggaatagaatgtgatctctattgcaacaagtaattttaaaagaaagctacatttattttagagtagtgctcctaacatgtattatcaactttgtggattacattggaggaaaatttaaaactggggccttgaatatttattttttgaaactaccatgttaaatactgaagtataatttgggggagttataaagttatgataaacattcatctgattattttaaacaatagttgtggtagataaacatactggaggtgagtcaaattgaattcatatagtaacatgcagtctgaagtcctagttacttaataggtactcagcctggagtgaaaatcctgggtactgactttgagaggagtgagtgtgcatgttgtcaaagtttctgaacacagttcacatagccttattagcaaaagttttaagaaatggctctatcaaagaagcaattgcagctttattcagaaatataaaagtggaatttatgtacatgtcataagtggtacccacttcccctttttactgtagggtggataactcttaggatttaactctttgaatattatctcttgaataaagcatgtgttaatgttaacaaacctacgtaatttttgccctttcaatgacttacagtggagagccagtacatcttaactactgttgtagtgatggtatcaacctcatggttacttagctctgcatttgttgctttgttttttttccacttcaaatcacaaaataagtagattttgttttctgaaaactccatagcatttgaatacaaaaagttgtgccagattgtttgccctaattcactgtgtttaacaaatatttcagtacacactatgtattaggcactgtgtggaaagtgttaaggggtagacaagataccgaataatctccacaagtttatttgtggtctatagtacttttgtaactggggttacaaaaattatagaaatttttttcctttgttcatatgcatattcatgattataatttggctttgtttgtgattaatgttttcttaagattttcacattatagaatacctcaaaagaagttgtctaaggactgggatagagagtatgtttcataaaattgtagatgtttagaatttttaaaaaccctacaaattagtatatgattgttttatataagtaagataggagcaacactttaaattatttgtgggagaatacagcattaaaggtgatttt

SEQ ID NO: 522376 - DNA, 1335 bp, Homo sapiens
  misc_feature (26)..(26): n is a, c, g, or t
agcggcgacgcagcgtgacttcacanggggaggggcgggccgagggtcctgccggcgcgcgggcgtgttcatcggagtcgctgtttgggacgctgggtgtgcggtgttctgtctccgctcccgtttcgctgtcacagcccgttccttcccggagcccgggacaggctgggcgcgcgcccgtgtgagtgagcgggactcagggcagaagtgtcccctcactgcgtttttttttccttttatccaaagaacggggcagttagtacgcttgccttcctgtcgcccggttgggagcggggttggtgtgcggagtggttcgcctttttttctttagaacttgtgagcctttttttttttttttttttcttttctttttttaggctcagtgctgtccgggctggtttgcccggtccctgactaacggctttctgccccttctctcgccacccctgcccaaggtcgcccctctgccttcgcccctgtcccgggagggtgggaagctttgaccccgccctgcccactcgcgtctccgcagccgtagccgcgcctgtcccaatatgaatagggtcaacgacccacttatttttataagagatattaagcccggactgaaaaacttaaatgtcgtctttattgtcctggagataggacgcgtgaccaaaaccaaagacggccatgaagtgagatcgtgcaaagtagcagataaaacgggcagcatcactatttccgtgtgggatgagatcggaggtcttatacagccaggggatattattcggttgaccagagggtatgcatccatgtggaaaggatgtctgacactttatactggaaggggtggtgaacttcaaaaaattggggaagattttgtatggtttattcagaagtgccaaatttcagtgaacccaacccagattatcgaggacagcagaacaaaggggcacagagtgaacagaagaataattccatgaatagtaatatgggtacaggtacatttggaccagtgggaaatggtgttcacactggccctgaatcaagggaacaccagttttcacatgctggcagaagcaatggccggggacttataaatccacaactacaaggaacagctagtaatcaaacagtgatgaccacaataagtaatggcagggaccctcggagagcctttaaaagatgacctatgctaaatactcatgtgtagatcaatgctacatggggcagaactggaccccctcaggccctcctcgacgcgtcacggcgacaagtacgctcccacagggctgccccaaacaccgggcggccacacaccgcgcctcaaacgaaacgcaaggggcgcatcca

SEQ ID NO: 522377 - DNA, 966 bp, Homo sapiens
ggacatctgggctgctagctgcatgaaggagctacccgctgtgggtctcctctttgctgacagctggacacttgacagaatgacctgcctgaactcgggacctgcagaatgatgggactgaagaagctgtaacacaaacagggctaaaacacgcactctcctccccctgtccccagcgcccacccaattgccacattggacggtgatgagaaggagagaagagctgtggcctttcagggagcatagtcccaggggctctctgagccaggctgtgaaaccctctatccgggcactgcagtacctgggcatctccaaactttctgagtgccagcgcattccccgacgtccggatgcagggtcaatgcacagaaagaaaatctctctccatgacctttagtacaagggcacggataggaggccacagtccaaggatggttcgatggggcacccaagagatactgacaaagggcatacacgactgagacaaagttatgggaaacactctgcaagtgcgtgtagagacttgcaatttcacgtacataacatgagcttggtgggaacactgaaagtggagggcaagaactcacaacggccatttgccaaaacctggactatatgggccattccagtatcacaaatccccatggtcggcattgagacgacaagcttattaagatctgtgactttccctattaggaaagttggccctccaaaacggagggtattcccaagaacgtcgatttggacagtcaacaagggcaggaaacaggaagtccagcactggcaaggggtacagtaccacaagtccctctgaaatgacagctacaaccaacaccccattccacgacaataacgcaagtgagggcgccatagccacacttccacccacacatgtggatacagctcgcatcgcaggtaagcagcatgtggtagccgcacgccacagacactgcgaacagataccca

SEQ ID NO: 522378 - DNA, 1358 bp, Homo sapiens
  misc_feature (26)..(26): n is a, c, g, or t
agcggcgacgcagcgtgacttcacanggggaggggcgggccgagggtcctgccggcgcgcgggcgtgttcatcggagtcgctgtttgggacgctgggtgtgcggtgttctgtctccgctcccgtttcgctgtcacagcccgttccttcccggagcccgggacaggctgggcgcgcgcccgtgtgagtgagcgggactcagggcagaagtgtcccctcactgcgtttttttttccttttatccaaagaacggggcagttagtacgcttgccttcctgtcgcccggttgggagcggggttggtgtgcggagtggttcgcctttttttctttagaacttgtgagcctttttttttttttttttttcttttctttttttaggctcagtgctgtccgggctggtttgcccggtccctgactaacggctttctgccccttctctcgccacccctgcccaaggtcgcccctctgccttcgcccctgtcccgggagggtgggaagctttgaccccgccctgcccactcgcgtctccgcagccgtagccgcgcctgtcccaatatgaatagggtcaacgacccacttatttttataagagatattaagcccggactgaaaaacttaaatgtcgtctttattgtcctggagataggacgcgtgaccaaaaccaaagacggccatgaagtgagatcgtgcaaagtagcagataaaacgggcagcatcactatttccgtgtgggatgagatcggaggtcttatacagccaggggatattattcggttgaccagagggtatgcatccatgtggaaaggatgtctgacactttatactggaaggggtggtgaacttcaaaaaattggggatctaggtgcggtgcaggcagccgcaatgcgagattccatacactactaccctggtaatgatctccaccctgacctggaggagccatcctctctaggggtgtaagattttgtatggtttattcagaagtgccaaatttcagtgaacccaacccagattatcgaggacagcagaacaaaggggtaattgtgtagtatacttttatgattaggctaattttgactgtgttataattctatgattaggctagccctgttgatacttagtataaagaagataatttttaaaaggatacttaatttttattgtatgttttgtgaggatatgtatctgaggtgtcatctactagatatatgtgccattttgcactttgtggtgtgctgagtaattatcaggaaataggatgtaacagagctctgaaaggtttgggaaacgtttcttaacattataacctttaatgacctaggaaaaatctttaaaaaatttgttaattaaaaaaaaaaa

SEQ ID NO: 522379 - DNA, 391 bp, Homo sapiens
accgcagtatatcctgagcctgatggaacttatcctgtctcaggcactcacttccaaagactgctcaaattgaggtgagcactcccagccagccttcaagtcagtagctctgtcttctgacacatacaagctaccatcattgaaccagaaagaaacagaaactctaatcagaccaataatgagtaacatgatcaaaatagtagtaaaaaatctcccatcaaggacaagctcaggacctgatggattcagtactgaattcggcgaaacatttagagaactaataccaagtctactcaaactatttcaagaaactgaaggggggaatacttccaaattcatcaatgaggcgtagcataaccctgataacagaagcagagaaggtagagccgag

SEQ ID NO: 522380 - DNA, 1328 bp, Homo sapiens
  misc_feature (26)..(26): n is a, c, g, or t
  misc_feature (1140)..(1140): n is a, c, g, or t
agcggcgacgcagcgtgacttcacanggggaggggcgggccgagggtcctgccggcgcgcgggcgtgttcatcggagtcgctgtttgggacgctgggtgtgcggtgttctgtctccgctcccgtttcgctgtcacagcccgttccttcccggagcccgggacaggctgggcgcgcgcccgtgtgagtgagcgggactcagggcagaagtgtcccctcactgcgtttttttttccttttatccaaagaacggggcagttagtacgcttgccttcctgtcgcccggttgggagcggggttggtgtgcggagtggttcgcctttttttctttagaacttgtgagcctttttttttttttttttttcttttctttttttaggctcagtgctgtccgggctggtttgcccggtccctgactaacggctttctgccccttctctcgccacccctgcccaaggtcgcccctctgccttcgcccctgtcccgggagggtgggaagctttgaccccgccctgcccactcgcgtctccgcagccgtagccgcgcctgtcccaatatgaatagggtcaacgacccacttatttttataagagatattaagcccggactgaaaaacttaaatgtcgtctttattgtcctggagataggacgcgtgaccaaaaccaaagacggccatgaagtgagatcgtgcaaagtagcagataaaacgggcagcatcactatttccgtgtgggatgagatcggaggtcttatacagccaggggatattattcggttgaccagagggtatgcatccatgtggaaaggatgtctgacactttatactggaaggggtggtgaacttcaaaaaattggggagtaagtattaaaatgcattttgtataattgcatatattataaataatatctacggaatgattggtaggtatgaacttgtaaacctctttggcttttttgactagtaaactgaatgtctttggtagcttaattggaaaaataacttcgtgtataccaatttaacacttgtcagtactgttttctgtggttaaaagtgtcaatttttcctggcaaagagcagtagaagaagctgcagttgagaccaggcctagttggaagcattcctgtaggttttagaatgtgcntttttaggtgtcacaagagccatttgaagtagaattctctttgtagtgattcaccattttacgaagcctaatggatcaccccagtttcaggcctaagttcaactttcctttcctatggcatggggggacattggtcccccggttccccagggctgtgcggacgaaaactggaatccctattatcccac

SEQ ID NO: 522381 - DNA, 163 bp, Homo sapiens
taaaaaaccagatcgggaggactgtgaccagcagttaacgccatgtagacttcccttgttcgtaagtgtttgaactcagtgtttatactgatccgttgtaactattttatatctgaagacggagagcctgtaatattcttcagattaaatgaagcgtgagaca

SEQ ID NO: 522382 - DNA, 230 bp, Homo sapiens
tggcctcgtggatgtcagcatcgactatcctggctgagccatttgcagttcatcccatatccacaagagagtagggctcagcccaggccatacacagtcggtgtagacccttgggcgaccccgtccggtttgactgcagatgcataagctgtcgattattctcacgcattcagtctgtcgttctacagtgtcgagaatgtagcatggtagtacggtgcagtctgttagag

SEQ ID NO: 522383 - DNA, 557 bp, Homo sapiens
gcaggttatggcatcgttgtagacagcttaggatcttctctatatcatcctctatctcctcattgtggttatgttaaatataaagatagtacttcttgatatttagcgctattcttcaagaatttactgtcttaaagtataaactattacaatatgaatattatagttgtcatagagatcccttactggtattacccttatcatatactgctatgattaatgctgagtggccatatgttgatagttgtcatagcttgtccctgaagggatagaaataagattttagagactctcgagtccagcattatctatataatatctgtgggccctcacactgctcctaagagattattttggccattaacaaagaactttgtatgatgggttatagagatggtttaatctggagtttaatcagaaaaaaaaaaattcttgggaaggcaaaagaaaagcctatgtagtgctgaagccaaatttattatacctatatttgaagctggcatttctaattcagggtatagacagttatagtcacaaaatttcttcaggtacccttc

SEQ ID NO: 522384 - DNA, 80 bp, Homo sapiens
gcacgaggattgactcactcaaggttatatagctaggtgtgaaggggctggaactggaatcggggtactccttttctaga

SEQ ID NO: 522385 - DNA, 136 bp, Homo sapiens
tgtgcagctacctgcacctaattcacaaggatagcctaggacgaatccaatgctaaagatgactgagtgcagaacggcctcctcccctcagccattatctgagagcgaatggcttcataagctcagccttgcagcc

SEQ ID NO: 522386 - DNA, 145 bp, Homo sapiens
gggaaaaaagtaggaatttattgacaggaacttcctttggcttttactctaaaacggggtatcaaagggctgaagataatgaagggcccccctccacctcttcctgcagctgtttttgtaccaaaatattattttactgtcttca

SEQ ID NO: 522387 - DNA, 283 bp, Homo sapiens
  misc_feature (161)..(162): n is a, c, g, or t
  misc_feature (258)..(258): n is a, c, g, or t
catacctggaccttctcatcatgatcaagtggtattattccccaggatgccaggatggtccaatatatgcaaatcaatcaatgtgatacatcatatcaacacaatgaaggaaaacataattatttcaattgatactagaaagcatttgacaaaagtttaanncattccttcataagctttcaacaaacactgggtatagaacggaagaacgtaatacaaagccactatgtgcacagactcacatcgctaatataccanaatggacgaatcacactgaaagctt

SEQ ID NO: 522388 - DNA, 188 bp, Homo sapiens
ctgcatgacatctcagagagaggaaaagctcttgtagaatgatagtgctaatactgaaaaggccgaaacacacaaccaaagcatggctacttgctttcggtataaagaggaaagaacaccacgtgcacacaaggatagattgctttcagaatttttctttaatgaggcttacgaaagctttattttgt

SEQ ID NO: 522389 - DNA, 249 bp, Homo sapiens
ctcaaatccggagtagtgtaaactctaggatcgacttcatggcacgtctgtgtcatataacaactttctgggtctgatacgtggattgggcttaccgggtcgtatccgcaggcagtcggttacaaagtgccatagcatcgatccacgccggctcacgcaggagcgggttcttaccatttaagtttgaaataggtgagatcgtttcggcccaaagactctaatcattcggcttaccggataaaactgcgt

SEQ ID NO: 522390 - DNA, 282 bp, Homo sapiens
  misc_feature (167)..(167): n is a, c, g, or t
cgctaagaccagcccacagatataccagactcaagtataggactcttcagtagtccgatatgtacacagcctaccctagatgctttaacgaaaagtaacttactttcacttatattactatatgtaaacaaacaaaacccacaaatgctgtatagtacagtactatngatgccaagcagtaaaaaatactgactccaatttagttagaaaatgttaactaagaaatctgaattgctgctatgaaaaaaaatagggataaaacaagccattcttgttggggac

SEQ ID NO: 522391 - DNA, 387 bp, Homo sapiens
ccaattttaaaaaaaaaaaaaaaaaaaaaaaaaaaaaagagccaaaaaaaaaaaaaaaaaaaaaaaaaaaaaaaaaaaaaaaaaaaaaaaaaaccatgtggcccgcttgggcccagccgattttagattggagaaggtttatgctggcggccgaatttggggttaattggcccaattggccttatgggggggggtattacaattaattggcggcggttttacacggtggggacgggaaaacccttggggttccccaatttaatcgcttggaagaaaatccccttttggccggttgcggtataacggaaggggccggaacggatggtttttccaaacggttgccaagcctgatggccgaagggaattggtaggcggaaatatttggtt

SEQ ID NO: 522392 - DNA, 738 bp, Homo sapiens
gagcggggtggcctggagtgggcgtgggtgagaagtgctgcgcgcgggtaaaggggccgcctcgagcgcggtccgagcgttcagcggactgcgcgcggcctcgatctctgtgactctgtcacctgccccatctccccatcccagcacagccagtcacccatgtgaaacctgtgtcgcaactcgcctgtgcctgacctgaatgctggtttcatggcagcctcaaatgaaggcaggatgtagtgggccattggttgtgggtgcggtggaccagggcaccagttcgacgcgcttctttggtttatcaattcagaagaacagctgaactacttacgtcatcatcaagtagaaagtaaatagcaacgagttcccaagaggaacggatgggtggaacagggaccctaacggaaattctacaattctgtctatgagtgtataggcgaaaacatgtgagaaacttggacatgctcaaaatttgactatttccaacataaaagctattggtgtcagcaaccagagggaaaccacttgtaagtctgggacaagataactggagagcctctctacaaatgctgtggctgttggcttgatctagagaacccagtctaccggtgagagtcttcagtaaaacgaactaaccggaagataagtaactttgtcaagtccaagacaacgccttccacttagcacttaccttcagctgcagtgaaaaccttcgttggctccttgacaatgtgagaa

SEQ ID NO: 522393 - DNA, 830 bp, Homo sapiens
agcgggtcctgaagctccgggaaccctggcggaatccggaactgacggggagagctggctttcgatcggccagggtcagctcagaccgctaccggctcgccactcgtaccatcatccttctagtccgagtcctcaggttacgcgtgtcctggggctttcggttatgcgctccgagttgcgcgtgtgtgagcgtgcttgtgtgactgcgcgactatctaatgatcgtctagcttcttgtccctcagtccctagtcagcggtcgcggcgtgtgcccatctcgtgcgtcttgtgggtctctagctgacgttccctctggagtcttgtactgaccttgtgcgcgggctacctagtgcggacgcaggagtggggatcggcgacttccgttgtggacccgtcgaatcgattaaaggcaacgctgcaatctggaaaatacacgtagacgcgcagaacctacttagactgcgtctctttgaatcttggatgcagtcggagaaagtactaatacggcactctaatctaaaccgttttacccgtaagcataacgcaatttgactgagacggattcaagcggagtggggtagttctgggcatgacatgtgttccctgatcagtctgcatcctgtgaaaagacagtgcttcagaaaaaccttgatgagttgttcactagtggcttccacgttaggtatggtaacggtgtcgggactttcactcacaacatatttgccaattccacagccactttgggaaaggtgtgtgtaaaaatggtaacacctccgggcaaatttttctcaaaaacatcggggggacacaacactcaatggggggaaaaa

SEQ ID NO: 522394 - DNA, 241 bp, Homo sapiens
  misc_feature (64)..(64): n is a, c, g, or t
  misc_feature (71)..(71): n is a, c, g, or t
  misc_feature (75)..(75): n is a, c, g, or t
  misc_feature (121)..(121): n is a, c, g, or t
  misc_feature (124)..(124): n is a, c, g, or t
tgggcttggcaaggagaaacgccatgtcacctacgttgtagccaaaaaaggtgtgggccgcaangtgcgcnggcnagctggagtcagaggtcatttcaaggtggtggactcaaggatgaanaangaccaaagagcacaacaacttaaggaacatatgataatactcttactgaagtaagcatatctgccaggttcccaagacatcatgggttcttagaagaaaggtttgtcatttgtataa

SEQ ID NO: 522395 - DNA, 246 bp, Homo sapiens
ggatcaaaaatattcaagcgagaaacaaacaagaaaaaaacaacagtaaaaaaagcaataacaaataatacaaactaaaaaatacagctagactgccaccgcactccagcctgagcaccaagagagaacactctgtctcaaaaaaagaaaaaaacaacggagctaaatacaatgggaagacaacgcaagggccaggttaaataaatcggaatgccaaacaatggccccccctctctatacacactg

SEQ ID NO: 522396 - DNA, 134 bp, Homo sapiens
agccctgcagcggcgttgcacccagtgcttgcgcgacgggactcgttgtcgggaacgtcctgactcgtagaaagtaccgttgctgtaggtactggtgacacttggtagcgtgctgtgccattacgcgcccgaaa

SEQ ID NO: 522397 - DNA, 239 bp, Homo sapiens
gtgtgcaggatacttgtaatggagtggtccttcaccaggacttgagggttggtatctggtaccttcagcagttgtaggagataaagtgggttccagtagaagtggtgacaggtgtgctggtgtcaacaggagttgtggaaagggtgctagtctcagaactgaccactggcgtggtgctgaaagacatatttgttagtggagtgcttccttcactataagttgaggttggcatgctagta

SEQ ID NO: 522398 - DNA, 308 bp, Homo sapiens
ccagcttcctgagtagctggaattacaggcgcttaccaccacgcctgactgcttttcgaatgtgtgcgtatgtgtgtgtatgcgtgttagagagaaagagagagagggagatggagtttcactcttgttgcccaggctggagggcaatgacatgatctcggcccatacaacctcagcctcctgggttcaagtgattctcctgcctcagcctcctgagtagctaggattacaggcatgtgccaccacacctggctaattttgtatttttagtagatatggggcttccccatgttggtcaggaagctggt

SEQ ID NO: 522399 - DNA, 610 bp, Homo sapiens
taaaggagtactatctggataagttcaaagagctccttattataaaatacaaactatttaatatcaaaatagaaaataccgagactcacactcatacacacacacaagcacacacacgcacacacacatatcacagttctggtcccttatgagttgaaaagtcaggaataaatgtgtggaaaagttatcgtggggatacaaaggaagaaatcttggggtgattccctgattagcactcgtgaatgtttaagttatgaacactttgtagctataacctggaaaatctacctgactctttgtaagagtatttaagatacacaagtgattgtgctctagaaaggtgtgacctggtcttctgtataaagcccactctgtagaccaggattgatctaagtgccgacatcagaagcaaacaggcaagatttaaacgttgggcaagtaatttctgtgcgcaatcggtacaggggaatccctagaatcgctcacgtacctgcacataaaggcatggcgacctcacgggtgtcgacccaggctgatctgacacctctgggggcacacggggacctccccaagaacgcgggaataacagtcaagaggccaaccggggccc

SEQ ID NO: 522400 - DNA, 971 bp, Homo sapiens
  misc_feature (6)..(6): n is a, c, g, or t
  misc_feature (8)..(8): n is a, c, g, or t
  misc_feature (33)..(33): n is a, c, g, or t
  misc_feature (102)..(102): n is a, c, g, or t
  misc_feature (106)..(106): n is a, c, g, or t
  misc_feature (114)..(114): n is a, c, g, or t
  misc_feature (135)..(135): n is a, c, g, or t
  misc_feature (170)..(170): n is a, c, g, or t
  misc_feature (175)..(176): n is a, c, g, or t
  misc_feature (179)..(179): n is a, c, g, or t
  misc_feature (182)..(182): n is a, c, g, or t
  misc_feature (763)..(763): n is a, c, g, or t
tcattngnaggattgactttaataacacgcctntactgaacaaatggcgattaactggggaaaacggaattatggtaaccgaggtaacggggtcggggactntttntccttcgntgcatgctgggtggcgggganagaccgctctgaggaggtttggtctgtcggccacngtagnncgnggngcattctgggtcctggcaatatggcgtcctccttgatgggctgatgagatgagtttcactgtagctccaaaccagagggcaaagctcccatgacccaataagcccacattgtccctttcctccgtggttccgtgtcgcccgtttctcaggactcgttctcaggcaggagagagcctcggggctgaaggccaggaccagccaggccgcgcggacctgaggttgaggaaccgggtgcaggcgagcacgatgggccggtcgtggctctggttgcagcagctcagacgagtgcgggacccgcagggctgagagtggctggaggagacccagggccctttgaacccgatcccttggccggagacctcagcccagtcggcccagtgggcgaaccggcaccaagagcggcctgcctgtcttcggaactgctgaggcggtggaggccgagagcagggtcatcgtgaggcctgaagtctcttacgcttttggcagctcccctcgcagcccctctggaaacgtacagcctcaggagcagccagtggcttgggacctggggtggtgtgtgtctgcggagcttcttgggctgncccgatttcctagcggccccagctccccagttcccgctcagagttagagatacaggatctcagactttggcctgagtaagggtctccgcagctcttttatccatttgggttttcgatttcccgtgtttgtttcttatttcaccaattctggtacacgctagttttaacggctggaggttctcgagcgctgctgccagggactccccaa

SEQ ID NO: 522401 - DNA, 87 bp, Homo sapiens
ggatttgctggtgcagtacaactaggcttaatagggctcgaattcgactcgaattcgaggggcaacagagtgagactctgtctcaaa

SEQ ID NO: 522402 - DNA, 763 bp, Homo sapiens
cggttagatctagtttgctggtgcttgttccacgttaccgctccctggctgccgcatacgaccacgctggggggcttgagagttagccccggagtcgtataccttttgtatcgtgttgtccccgtcgaattgagtgaggctatggcggtaaacttgacgttctatgtgatcgagagatagttcgataatgaggggtcggggaaactcccacgagggagagaacttgtgattcgcctcctctccgtcttcgcgcttacattatgtgtatagagagagagtctgctagcgtgcgaagctgaccctcctgtctcgtatctccctacgtaggttacatcaggagtcacccacatcacatagataaacatacatccgcgcttcttcttcacacacactcactctggactacacacacttacaagatgccgctattcacgacccttttcgcttgcctacaatatatcatttgggtgacacacacatatcatcttccgccactcgggtgcaattttagaacaccacacgtctatttgccccaaacccacactttcttgtgacaatatgttttttttgttataatatatgatcatttttttttatagaatgttttcggcgctttcttatatgctctccgccaccctcgtatctttctctactttttcttaaaaactttccacatatcagcacagttgtcagagttgttgagagagttaacccccctcttatacacccgtttattaccgcgcgcccacaataatcaataaaa

SEQ ID NO: 522403 - DNA, 137 bp, Homo sapiens
aatagcgacggagttgagaggaattagtgaattaatgcacctaagaaatttagaaccggatgtggcacaaactgccacgtgttagcgcagttattatcatagacgccctccgtgtgtgagggcatgtcccatgctct

SEQ ID NO: 522404 - DNA, 656 bp, Homo sapiens
gatatattgcacatgttctgtgataagaatattctataggtactgatattttgattgctgcagaagcggcggacctctatgagtttctgagagattatgacggacaccgatagaaccagaggagacacagctcaattttactctagagcttgctcttactgctctgtgagttactaagccttggcgggagaacgctccgtttgttaggagggtcgttctcaacttacggtggttctgaccgctctgcagaagatgttatgaccttctaaaggagcatcagggagggatgcatacgctgactgtatgggctgtacatagcaagcctcgttctggacagatattttgcgtgcctacagtggttgagtcaaaacgcacagcccgatgacgcgcatgtcacgtactacaggtgtgttactgttgatgcgagacgatgccatagttctaacgattatgcgcagttagcagagacggtatgtagaaggcagcagatgattgtagctgccttgtgggactttcggactatcatgagcgaacattctgagggtgagagtgccgtaacgtgccaaccatgttgatctatgtaataagatggctggctagaaggataccgtgggcgtagccgctcacatgtctgcttccaggggatttgactggcg

SEQ ID NO: 522405 - DNA, 372 bp, Homo sapiens
tgctgaacgcaaaaaaaagggtgggaatcaaccctttcctgtttgccctttgggtccctcctttcacctttccctcgattaaatttccccttggacacttggttaaacccctttcaggtcaggaagcccatttttggattgtggttcccaccaaccctggagcattatgggtttttcccccccttcccccccaaaaccctgtgtttatttggtgtttctggaaacaggggctcccacattttaggccttcggggaaactgcccattttccccccagttacttggccccccacgcataaatttaggtttaaaaacaagttttaatttttctttccaaatttttgtataaataaaaatttttggggcctcctta

SEQ ID NO: 522406 - DNA, 180 bp, Homo sapiens
  misc_feature (107)..(108): n is a, c, g, or t
  misc_feature (147)..(147): n is a, c, g, or t
gatcctgcagaagaataacctgaatctgctcagagacctaagctgtgcacattgcccatagcctcaggaacagtccagactggggcggtgtggtcatattacacagnnaggagggtgattcagagttcatgaatatcattgccaatnagattgggtcagaggagaccctcctgttcttaa

SEQ ID NO: 522407 - DNA, 156 bp, Homo sapiens
aacagagagatggctacagcagtgaggaggcgagaatgaggaagatgaggatagacaccgaggaggctgaagacggacgatgacgaagaagaagaagagatgactggtgccagggactggaacggcaacgtgttcagatcctctactgcagagaga

SEQ ID NO: 522408 - DNA, 928 bp, Homo sapiens
tacgagcccacgtggaggctgccgaagaagctgctcgtggagacggctggcggagcttgagggccgggagcaggtggccagggctggcagccgcacttcgcaccgccggtgtactcagcctgtgggctgagatggcctgagatcctctccctgtgaatgtgggctgatctgcacatgctggctcagtgcatgctgcagtggcttgaccctgggcaccagtgccctggacccctgagctgctcccacatgactggatgctccatcctgggctcctggacaagaactgccaccttcttcggctgtccattagaggagcagcagccccagaaggatggtgggacagacggagctggtacccagggagcgtgcaggacgacgccagagccggagggaggatgagccgaacgactgagagacagggctggagtccagccccaggccggagcatggagcccagaccccaaaacacgaggaaaaagcccaggacaacccgagacgcgggagcccagaccttggaggaggacagggcccaagaacacccacgaggatggaggaccccagccccaaggggtggccgacccaacacgcaagcaacaagttcaacggccggcctccagtcactacccggggagcacagaacaaagaccagacggccgaaatactggaccggctctggccacctccccagaacccatcaccacctgacaggtacccacgcgcgatgcctggacgacacgaggtcaccacggaaatcaccacggacctccgtgtccctatcagagctccccgggtaagaatcctggctgggcgcgattcacacggaaccaggtgcacttgaaaccggctccccactcaaccgggagattaccacagggaaaccgattgcccggggatccgtgacgtgattgcactcccctgtcaactgctg

SEQ ID NO: 522409 - DNA, 1604 bp, Homo sapiens
ggcggaggcttttggagctgctaaaatgccggattacctcggtgccgatcagcggcaagaccaaagcacggcatgaccacggacgacaaacccatccgagctctggcatgcagggggcctattgccttgcttgacaaacttactggtcagacgcaccttacctctagcgcacgactcaaggctaagctcgacagactgacacttcacgcacaccttcgtcatagaacatattacactgagcctcagctggctacttcacaagaactcttgaccaactggcccgtggacccacaccagtcacatcttgggcatcactggacttgcacgcactacacgccacgagcactttctcaagaggttgtaacaggcccattttaccaaaggtttgcccacgtgatgtaacaaaaacgacttcatttcaaattggcttgactttcagcgaacggggaacgctcagaatgacattaacaagttttaacttccaaaagccgattgagaaaatgatcaagcgctcttgacgccaatggcgtatataggctagcgcagtggagcaaacccttactaacgcctggcaacttcccagcgcggtttgcgggacaaactccccttaaacctttaggtaacccactttttcggcacaatgacacaatggtggcgaaactctcgaacgacaaccgcttggcgatgccccagattggaaggcactttacgcgcaccactcactttaagacaccttaactctaccacgagaccattttcggacaacaaaggtttcatccaacaaaacttcatgcacctactattcccacacatataaaaaacaaaacctagttgacaagcaccacacaaagatctcaatgcactgtaaccgaccccacacctcggaatcatgtgcccctcggcgccttgtctgcaaaaatggcaacgccagccaatcccgccttatgtcaaaactgcgcattggacgcccactctgtatgtctcacacggactcgggccaacatcgtcctcccgggcagacaaagcggacccccctggcacatacacacgtgcggaacagcagccccacgctccaccttacgcgtgacgagcacaataaccaaccttggcgcgctaacagagaccacggattagaaccaatctgtcagcaccaggagtccgcccacccctaaccttctacccgtttcctccgacagtcaccccaagaggtaaaacaccaccggcagcaaagagccggataaccaaaacaccgcgcgttattgtcgcgacacacgatcccgagagagcacctcacgacactccctcgcccgagaataggaccaacaggagcattcactcgtctggaagcaatcgcgattactaataaggagagaaccatggcacaacagcccaccgaggcgccaatggacacacgggtggtcgtaacaaccagacaaccagacaccgtctcctattgcgtgctgcgcgaccctagagttgtgccacagtaggaatatcaggtcccatccacagaacgtcacgcaggaaaagaccttctggaccgtgacgacgggggtatgagcacgcttataagatgttccaacgaacaacgtcatctacaacaa

SEQ ID NO: 522410 - DNA, 964 bp, Homo sapiens
  misc_feature (275)..(275): n is a, c, g, or t
  misc_feature (669)..(669): n is a, c, g, or t
ggcacagccaagatggcggcgtccgtgcgacaggcacgcagcctactaggtgtggcggcgaccctggccccgggttcccgtggctaccgggcgcggccgcccccgcgccgcaggccgggaccccggtggccagaccccgaggacctcctgaccccgcggtggcagctgggaccgcgctacgcggctaagcagttcgcgcgttacggcgccgcctccggggtggtccccggttcgttatggccgtctgccggagcagctgcgggagctggaggccngaagaacgcgaatggtacccgagcctggcgaccatgcaggagtcgctgcgggtgaagcagctggccgaagagcagaagcgtcgggagagggagcagcacatcgcagagtgcatggccaagatgccacagatgattgtgaactggcagcagcagcagcgggagaactgggagaaggcccagtgctgacaaggagaggagggcccgactgcaggctgaggcccaggagctcctgggctaccaggtggacccaaggagtgcccgcttccaggagctgctccaggacctagagaaagaaggagcgcaagcgcctcaaggaggaaaaaacagaaacggaagaaggaggcgcggagcttgttgcattggcttgcagctgtgggcttcaagacccagcagnctctggggcacccaggctcctgaggctttgtccttcccaataaagctgctacctggcagtaccccttaatgaaaaaacaacaaatactaacaacaacctcaataaacacaaacacacacaaccaaacacaaaaacagtgaggaacataatacagagacagagaaacaacaccctacaacaacgaacaaaccacataacagttccccccacccaacaccctttttcaacagagagactaaaaggagtccacaaaagagggagcagataacgacgaacggaccatcacaacagacac

SEQ ID NO: 522411 - DNA, 181 bp, Homo sapiens
aggatcccatggagaccaggctgagaatacagtgtctcactgagacaggctgaggagacgatgaccggcgtccctggccccaggggtcgaagcatgtccaggaccagtcactcctataccctgagtcatgggccgggctctcatgcagtaatagacagccgtgtcttcagatctcaaacta

SEQ ID NO: 522412 - DNA, 126 bp, Homo sapiens
gacctgagactgcctcttagaagaaaaacgaagaagaaaaagaagggtgtcagcaccctttgcgaggagcatgtagaaactgagaccgggctgccatgctagcacggacagagaagtcacccagca

SEQ ID NO: 522413 - DNA, 1468 bp, Homo sapiens
  misc_feature (275)..(275): n is a, c, g, or t
  misc_feature (669)..(669): n is a, c, g, or t
ggcacagccaagatggcggcgtccgtgcgacaggcacgcagcctactaggtgtggcggcgaccctggccccgggttcccgtggctaccgggcgcggccgcccccgcgccgcaggccgggaccccggtggccagaccccgaggacctcctgaccccgcggtggcagctgggaccgcgctacgcggctaagcagttcgcgcgttacggcgccgcctccggggtggtccccggttcgttatggccgtctgccggagcagctgcgggagctggaggccngaagaacgcgaatggtacccgagcctggcgaccatgcaggagtcgctgcgggtgaagcagctggccgaagagcagaagcgtcgggagagggagcagcacatcgcagagtgcatggccaagatgccacagatgattgtgaactggcagcagcagcagcgggagaactgggagaaggcccagtgctgacaaggagaggagggcccgactgcaggctgaggcccaggagctcctgggctaccaggtggacccaaggagtgcccgcttccaggagctgctccaggacctagagaaagaaggagcgcaagcgcctcaaggaggaaaaaacagaaacggaagaaggaggcgcggagcttgttgcattggcttgcagctgtgggcttcaagacccagcagnctctggggcacccaggctcctgaggctttgtccttcccaataaagctgctacctggcagtaccccttgaaggagatctgagtcactctcaaggtgtgtctcttcctgggtccccctggttcctcccccaatacttactagctgtggaatcccccacttggttgtactcaaaagggggagagtggactcttgggtcctgcctgagtaaatgagggcttcagatggggaggataatagggggggttgtaaagggcgtccaggtagtggacgatgtgagtatgaattacaacgtacgatagggtttgtcaatacataggtttatttacagataattataccattataaggatgatggggggagtgtgtatagagaaaagagattgtggtgactgactggtgggcaggctgtgcagaaaaaggtcttttgttacagttagtaatccgtaggttatttatgcttttggaaaagttgatatactttggggggagagttatactggagacgtttttaactagtgcaggggattgaccgatatcctctagtattaaaaggagtggggcaccaatgaggtgttagtcggatagattccctataaaggcaggtctagtagggccggtatcaccgaatagagagtaaagagctagttaaagtttttatgtaaagcgtgataaaaatgagaaggttggggagagagcggggaacaaatgcgttaaagtagagtagagcgcacaggaggagatcagcagattgagaggtggacaattagagaggacctctcaaaaagtagagcacatgtgag

SEQ ID NO: 522414 - DNA, 430 bp, Homo sapiens
ccccactgataactcttcatcatgacacttggacacaactgagtagctggcttctcttatactaacccagagttcgtcccttactgtgtaggtgaatgcaaactccatcgttgagcctggggtgtaagacttcaagccaagcgtatgtatcaattctagtcttccaggattcacggtgcacatgctggcattcaacatgtggaaagcttgtcttagagggcttaactttgtatgtgtagcttgctagtttgttttctacatttgaaaatgtttagtttagaataagcgcattatccaattatagaggtacaattttccaaacttccagaaactcatcaaatgaacagacaatgtcaaaactactgtgtctgataccaaaatgcttcagtatttgtaatttttcaagtcagaagctgatgttcctggtaaa

SEQ ID NO: 522415 - DNA, 112 bp, Homo sapiens
tagcgggtctcatatcacgaacagcaacgcgaccaaaggtggatagtctgagatgctctcaacacacatgggcttgcatggaaccatatcaacaatggcagcatacaccaga

SEQ ID NO: 522416 - DNA, 405 bp, Homo sapiens
  misc_feature (65)..(65): n is a, c, g, or t
  misc_feature (184)..(184): n is a, c, g, or t
  misc_feature (283)..(283): n is a, c, g, or t
  misc_feature (392)..(392): n is a, c, g, or t
tttttgaaggctcagtgtgctttgtgaactgagttcttagtgtttagtggcaaggcaggcccgcnttttgcttgccttacaaggtcatttcatctctgttgtacaaaacacggctgctcctgctctacctctctgttaaagcaaagcaagtcacattcttgaagactggaatgcttactttttngtttgtttcttactgagaaccttgtataagcagctactactgccaccttcagctcctgatgatctgtgagccgggttctagccattctttaagatcctnggtcagactcccttcccttcgctctgtcagcccctcttaactattcctgatatcagacagcatgcagaaacattgtgcgcatgttgactcagatgctcctcagtgactngaattctttcagg

SEQ ID NO: 522417 - DNA, 532 bp, Homo sapiens
ggcggtaccagcggcatctctgatacagtaatgaaacaggcaaaaaagaaatcatgaaggtatctcatttataatagctacaaaaagaaaaaagaaaaaagaaaaaaagaaaaaaaaacccaacaacctaggaataaatttaaccaagaagatgagagatctctacaaggaaaactacaaagcactgatgaaacaaatcgaagaggacacaaacaaatggaaagacatcccatgctcatggattggaagaattaatattgttaaaatgactcttctatccaaggcaatgggtagattcaatgcaaccgctatcaaaacaccaacatcagtttttcaaagttagaaaaaacaatcctaaaattcatatggaaccaaaaaagagcccaaatagctgaagcaatcctgagcaaaagggacaaagctggaggcatcacactaccggacttcaaaatatactacaaggctctagtaaccaaaacagcatggtattgacctaaaaacagacacagaccaatgtatgcagagaatgctt

SEQ ID NO: 522418 - DNA, 1368 bp, Homo sapiens
  misc_feature (569)..(569): n is a, c, g, or t
ggcacagccaagatggcggcgtccgtgcgacaggcacgcagcctactaggtgtggcggcgaccctggccccgggttcccgtggctaccgggcgcggccgcccccgcgccgcaggccgggaccccggtggccagaccccgaggacctcctgaccccgcggtggcagctgggaccgcgctacgcggctaagcagttcgcgcgttacggcgccgcctccggggtggtccccggttcgttatggccgtctgccggagcagcgggagagggagcagcacatcgcagagtgcatggccaagatgccacagatgattgtgaactggcagcagcagcagcgggagaactgggagaaggcccagtgctgacaaggagaggagggcccgactgcaggctgaggcccaggagctcctgggctaccaggtggacccaaggagtgcccgcttccaggagctgctccaggacctagagaaagaaggagcgcaagcgcctcaaggaggaaaaaacagaaacggaagaaggaggcgcggagcttgttgcattggcttgcagctgtgggcttcaagacccagcagnctctggggcacccaggctcctgaggctttgtccttcccaataaagctgctacctggcagtaccccttgaaggagatctgagtcactctcaaggtgtgtctcttcctgggtccccctggttcctcccccaatacttactagctgtggaatcccccacttggttgtactcaaaagggggagagtggactcttgggtcctgcctgagtaaatgagggcttcagatggggaggataatagggggggttgtaaagggcgtccaggtagtggacgatgtgagtatgaattacaacgtacgatagggtttgtcaatacataggtttatttacagataattataccattataaggatgatggggggagtgtgtatagagaaaagagattgtggtgactgactggtgggcaggctgtgcagaaaaaggtcttttgttacagttagtaatccgtaggttatttatgcttttggaaaagttgatatactttggggggagagttatactggagacgtttttaactagtgcaggggattgaccgatatcctctagtattaaaaggagtggggcaccaatgaggtgttagtcggatagattccctataaaggcaggtctagtagggccggtatcaccgaatagagagtaaagagctagttaaagtttttatgtaaagcgtgataaaaatgagaaggttggggagagagcggggaacaaatgcgttaaagtagagtagagcgcacaggaggagatcagcagattgagaggtggacaattagagaggacctctcaaaaagtagagcacatgtgag

SEQ ID NO: 522419 - DNA, 1631 bp, Homo sapiens
gccgggaaagggatacgtgcttaatcctggtgcagggggcgagcatggccgctccgcgagtattcccactttcctgtgcggtgcagcagtatgcctgggggaagatgggttccaacagcgaagtggcgcggctgttggccagcagtgatccactggcccagatcgcagaggacaagccttatgcagagttgtggatggggactcacccccgaggggatgccaagatccttgacaaccgcatctcacagaagaccctaagccagtggattgctgagaaccaggacagcttgggctcaaaggtcaaggacacctttaatggcaacctgcccttcctcttcaaagtgctctcagttgaaacacccctgtccatccaggcacaccctaacaaggagctggcagagaagctgcacctccaggctccgcagcactaccccgatgccaaccacaagccagagatggccattgccctcacccccttccagggcttgtgtggcttccggccagttgaggagattgtaacctttctaaagacggctgccggaaacaacatggaggacatctttggggagcttttgctacagctgcaccagcagtacccaggtgatatcggctgctttgccatctacttcctgaacctgcttaccctgaagcctggggaggccatgtttctggaggccaacgtaccccatgcctacctgaaaggagactgcgtggagtgcatggcgtgttcagacaacacagttcgtgctggcctgacacccaagttcattgatgtgccaaccctgtgtgaaatgctcagctatacccctagctccagcaaggacaggctctttctcccaacacggagtcaggaagacccctacctctcaatctatgacccccctgtaccagacttcaccattatgaagacggaggtccctggctctgtcactgaatacaaggtcttggcactggactctgccagcatcctcctgatggtacaggggacagtaatagccagcacacccacaacccagacaccaatccctctgcaacgtggtggcgtgctcttcattggggccaatgagagtgtctcactgaagcttactgagccgaaggacctgctgatattccgtgcctgctgtctgctgtaaaggctgcagcctccccagctctcctctgccagccaccctaaattccagccaacctcacctcctcgggcccagctcaagcccccttccttgctctggaccccttaggtataccctggaagagctggggtgggggaggagggagcgtgaaggtagtgactcctgaacacacccaggtggaaccatctttggggaggagaggcccgtgtgaggggtctgatactccctttgtcttccctctctactcctcgctacacctgagccaggctcttgccaactctgttccagcctatggctttaggctagctgttaaatatgtgacccagcattagctcagcatctgtcagagcaagagaccaggtaatttctaagaacagggttctagcgatgggactgcccatttcctcagctgcagaggaggaaagggaaagggtaggcctgtagactaacgctgtttacacccttgttctgtcaaagcaattaaagatcacttgtgttgag

SEQ ID NO: 522420 - DNA, 1499 bp, Homo sapiens
gggtgccaagttatgataggtcgagccgggtgttaatcgtgcacgtggcctggccgctccgctgaggtgagccattggctggggtgtcggcgagtgtgttcgtggagcgcgtcctggggacgactcccggcattatcggccaggttgagtccgctcctggcattccgcggaaagatgggtgggtgccgggcagaggtgtggccacctgcgatggggattgacctccgaggggagggggcccttctagacgtcgtgccgtgggataggtaccttctgctccctccccgccaccctgcctcagatcagcacaaggtccttactgctgcccatctgacagttgggaacatcgaggcctgcagcggaggggggtctcatccaacagcctacaaaacccttatttgactctgtccccagtgagcacccccagctcttgcctggtttcccgggacactagggtggggcctgaggagtggagtggcagctgaccctgtctgtgccccttccgcgagtattcccactttcctgtgcggtgcagcagtatgcctgggggaagatgggttccaacagcgaagtggcgcggctgttggccagcagtgatccactggcccagatcgcagaggacaagccttatgcagagttgtggatggggactcacccccgaggggatgccaagatccttgacaaccgcatctcacagaagaccctaagccagtggattgctgagaaccaggacagcttgggctcaaaggtcaaggacacctttaatggcaacctgcccttcctcttcaaagtgctctcagttgaaacacccctgtccatccaggcacaccctcatcctcctgatggtacaggggacagtaatagccagcacacccacaacccagacaccaatccctctgcaacgtggtggcgtgctcttcattggggccaatgagagtgtctcactgaagcttactgagccgaaggacctgctgatattccgtgcctgctgtctgctgtaaaggctgcagcctccccagctctcctctgccagccaccctaaattccagccaacctcacctcctcgggcccagctcaagcccccttccttgctctggaccccttaggtataccctggaagagctggggtgggggaggagggagcgtgaaggtagtgactcctgaacacacccaggtggaaccatctttggggaggagaggcccgtgtgaggggtctgatactccctttgtcttccctctctactcctcgctacacctgagccaggctcttgccaactctgttccagcctatggctttaggctagctgttaaatatgtgacccagcattagctcagcatctgtcagagcaagagaccaggtaatttctaagaacagggttctagcgatgggactgcccatttcctcagctgcagaggaggaaagggaaagggtaggcctgtagactaacgctgtttacacccttgttctgtcaaagcaattaaagatcacttgtgttgag

SEQ ID NO: 522421 - DNA, 737 bp, Homo sapiens
ggccactcgagtgcgctggcgcctggcgaattaccgggtctcaccatggagcggaaagtgcttgtcgctcctaggccctgaaagaaaaggaccaaggccaggaaggacatagcccaagggaaattctgaaatctctagcgaccgagggctctgctccccattctgagagtgatctacctaggatgcaggacagaggagattctggggatctgatgatgatgagcgaagaagagtcctaatgagttactgtgaatggaggttatcatcttgtgaaaattggagatctattcaagtgggagatagcagtgtgatccgagagttaggctggggacactgttataacagtatggttatcatgggatagttcaggggaagaaagtatgtggcgatgaacagtagtagaaaagtgctgaatcattagagatggagagacagatactagatgaaatccggttgctgaagtcagttcgcagagttcagaccctaatggtccaaagtagcagacattggttgttcaagatactagatgacttggaacttatcaggagttaagtggaacccagtatctgcagtgggtattggaagctcctgggggcatcattcttgtcaagttggatcatccaaattccaatatatcaggggctgcccactgccgttgtgtcaaaaaagaacttagttcaagacacgtgtccacagcgttcttgatgtatttacatagccaagtgcccgtatcatcc

SEQ ID NO: 522422 - DNA, 334 bp, Homo sapiens
  misc_feature (289)..(289): n is a, c, g, or t
  misc_feature (313)..(313): n is a, c, g, or t
  misc_feature (322)..(322): n is a, c, g, or t
ggacatgaggttagatgtgcctctcttctgacccatggagaatgacagatgaggccagaagtttttaacagtgtagtttcagacaacagtgagaatcccgagaggagtcatatctgatactcgtatctgccctgtgttctgtaggctggggtcccgcttcatcttcagagacagaatccaaggctgcaggaacccattggcgtcacgtgcataggctttctgttaaaggggacatacatgtactctagtttttccttcaggggagctggtataggactgttcgctgtangttttttaaccggcacgagtgagngcctcttgnttcctcaacaac

SEQ ID NO: 522423 - DNA, 233 bp, Homo sapiens
ggctcagacagccaggagccctgggcgggaggagggagaggcccggcctgaccttgccccggtccaggacatgaaagacccattcatggtcgcagaagcctgggtggcagctgagccaccggtgggggtggggcctccctcaaggcctttgtccctgaggtctctctgcctagaacgtcctccccgcacacccctaccctcacccccctgcttggatctatggtccctctaag

SEQ ID NO: 522424 - DNA, 1172 bp, Homo sapiens
  misc_feature (40)..(40): n is a, c, g, or t
  misc_feature (42)..(42): n is a, c, g, or t
gtgggagactacagagttggggctccccaacccccagggntnaacatgactcccctctgacaataatgggtgacctgtcacctgtttttggtatttgatatcttaaccccattctcccagagaatacaattcatggaaatttttacctaacttggcatggggttcatggagctcaggttaggaggcccagaactggagagctaaggcatacttcatcagcttagcacatgacgactgtctctccagactgcgtggagtgcatggcgtgttcagacaacacagttcgtgctggcctgacacccaagttcattgatgtgccaaccctgtgtgaaatgctcagctatacccctagctccagcaaggacaggctctttctcccaacacggagtcaggaagacccctacctctcaatctatgacccccctgtaccagacttcaccattatgaagacggaggtccctggctctgtcactgaatacaaggtcttggcactggactctgccagcatcctcctgatggtacaggggacagtaatagccagcacacccacaacccagacaccaatccctctgcaacgtggtggcgtgctcttcattggggccaatgagagtgtctcactgaagcttactgagccgaaggacctgctgatattccgtgcctgctgtctgctgtaaaggctgcagcctccccagctctcctctgccagccaccctaaattccagccaacctcacctcctcgggcccagctcaagcccccttccttgctctggaccccttaggtataccctggaagagctggggtgggggaggagggagcgtgaaggtagtgactcctgaacacacccaggtggaaccatctttggggaggagaggcccgtgtgaggggtctgatactccctttgtcttccctctctactcctcgctacacctgagccaggctcttgccaactctgttccagcctatggctttaggctagctgttaaatatgtgacccagcattagctcagcatctgtcagagcaagagaccaggtaatttctaagaacagggttctagcgatgggactgcccatttcctcagctgcagaggaggaaagggaaagggtaggcctgtagactaacgctgtttacacccttgttctgtcaaagcaattaaagatcacttgtgttgag

SEQ ID NO: 522425 - DNA, 1463 bp, Homo sapiens
  misc_feature (40)..(40): n is a, c, g, or t
  misc_feature (42)..(42): n is a, c, g, or t
  misc_feature (462)..(462): n is a, c, g, or t
  misc_feature (622)..(622): n is a, c, g, or t
gtgggagactacagagttggggctccccaacccccagggntnaacatgactcccctctgacaataatgggtgacctgtcacctgtttttggtatttgatatcttaaccccattctcccagagaatacaattcatggaaatttttacctaacttggcatggggttcatggagctcaggttaggaggcccagaactggagagctaaggcatacttcatcagcttagcacatgacgactgtctctccagactgcgtggagtgcatggcgtgttcagacaacacagttcgtgctggcctgacacccaagttcattgatgtgccaaccctgtgtgaaatgctcagctatacccctagctccagcaaggacaggctctttctcccaacacggagtcaggaagacccctacctctcaatctatgacccccctgtaccagacttcaccattatgaagacggaggtgagtnaggggctatgatgggtgtccttcgtgtgccatgaaaatctctggcaagggtcacgatgtggaggacacctggggctgggtttcctgtcaagcccacttggcggagggtggccccagggctgcccattccttcctgtaccagggaccaggcctctatgctnactgagcctgggttgtgcgagaaggtggcagagctctccctcgtgccctggggactgtcctgggcccatgagctgatgagagcagagtctgagctgcactgccttatcatttcttcctgcccaggtccctggctctgtcactgaatacaaggtcttggcactggactctgccagcatcctcctgatggtacaggggacagtaatagccagcacacccacaacccagacaccaatccctctgcaacgtggtggcgtgctcttcattggggccaatgagagtgtctcactgaagcttactgagccgaaggacctgctgatattccgtgcctgctgtctgctgtaaaggctgcagcctccccagctctcctctgccagccaccctaaattccagccaacctcacctcctcgggcccagctcaagcccccttccttgctctggaccccttaggtataccctggaagagctggggtgggggaggagggagcgtgaaggtagtgactcctgaacacacccaggtggaaccatctttggggaggagaggcccgtgtgaggggtctgatactccctttgtcttccctctctactcctcgctacacctgagccaggctcttgccaactctgttccagcctatggctttaggctagctgttaaatatgtgacccagcattagctcagcatctgtcagagcaagagaccaggtaatttctaagaacagggttctagcgatgggactgcccatttcctcagctgcagaggaggaaagggaaagggtaggcctgtagactaacgctgtttacacccttgttctgtcaaagcaattaaagatcacttgtgttgag

SEQ ID NO: 522426 - DNA, 1464 bp, Homo sapiens
gggtgccaagttatgataggtcgagccgggtgttaatcgtgcacgtggcctggccgctccgctgaggtgagccattggctggggtgtcggcgagtgtgttcgtggagcgcgtcctggggacgactcccggcattatcggccaggttgagtccgctcctggcattccgcggaaagatgggtgggtgccgggcagaggtgtggccacctgcgatggggattgacctccgaggggagggggcccttctagacgtcgtgccgtgggataggtaccttctgctccctccccgccaccctgcctcagatcagcacaaggtccttactgctgcccatctgacagttgggaacatcgaggcctgcagcggaggggggtctcatccaacagcctacaaaacccttatttgactctgtccccagtgagcacccccagctcttgcctggtttcccgggacactagggtggggcctgaggagtggagtggcagctgaccctgtctgtgccccttccgcgagtattcccactttcctgtgcggtgcagcagtatgcctgggggaagatgggttccaacagcgaagtggcgcggctgttggccagcagtgatccactggcccagatcgcagaggacaagccttatgcagagttgtggatggggactcacccccgaggggatgccaagatccttgacaaccgcatctcacagaagaccctaagccagtggattgctgagaaccaggacagcttgggctcaaaggtcaaggacacctttaatggcaacctgcccttcctcttcaaagtgctctcagttgaaacacccctgtccatccaggcacaccctgcacacccacaacccagacaccaatccctctgcaacgtggtggcgtgctcttcattggggccaatgagagtgtctcactgaagcttactgagccgaaggacctgctgatattccgtgcctgctgtctgctgtaaaggctgcagcctccccagctctcctctgccagccaccctaaattccagccaacctcacctcctcgggcccagctcaagcccccttccttgctctggaccccttaggtataccctggaagagctggggtgggggaggagggagcgtgaaggtagtgactcctgaacacacccaggtggaaccatctttggggaggagaggcccgtgtgaggggtctgatactccctttgtcttccctctctactcctcgctacacctgagccaggctcttgccaactctgttccagcctatggctttaggctagctgttaaatatgtgacccagcattagctcagcatctgtcagagcaagagaccaggtaatttctaagaacagggttctagcgatgggactgcccatttcctcagctgcagaggaggaaagggaaagggtaggcctgtagactaacgctgtttacacccttgttctgtcaaagcaattaaagatcacttgtgttgag

SEQ ID NO: 522427 - DNA, 242 bp, Homo sapiens
gtgacttagaggatttcccgactagccgacaggcattcattccatcatcatctctccagccatcatgtgtcatcactccccctccctccagccttccatccatccatctacccacccacccatccagccatccagccagccagccagcgttccattccatccatccggcgctcaccatcaaccctaccatcgccgagggcccatcccctaccagcgagggccgcctgtcgggctagtcgggg

SEQ ID NO: 522428 - DNA, 195 bp, Homo sapiens
gttagggaaggctggtgcaatgacacgcgagctgtcattatatcgagagctagcgtcgacaagtgaagtacgggttgtcttgaaggttgatattctagttgatgtaaattccgtttcaatataggtagctgctatctatgggggaacctactaaactattagttaggcctacatattattgccgaagcttgatca

SEQ ID NO: 522429 - DNA, 1500 bp, Homo sapiens
gggtgccaagttatgataggtcgagccgggtgttaatcgtgcacgtggcctggccgctccgctgaggtgagccattggctggggtgtcggcgagtgtgttcgtggagcgcgtcctggggacgactcccggcattatcggccaggttgagtccgctcctggcattccgcggaaagatgggtgggtgccgggcagaggtgtggccacctgcgatggggattgacctccgaggggagggggcccttctagacgtcgtgccgtgggataggtaccttctgctccctccccgccaccctgcctcagatcagcacaaggtccttactgctgcccatctgacagttgggaacatcgaggcctgcagcggaggggggtctcatccaacagcctacaaaacccttatttgactctgtccccagtgagcacccccagctcttgcctggtttcccgggacactagggtggggcctgaggagtggagtggcagctgaccctgtctgtgccccttccgcgagtattcccactttcctgtgcggtgcagcagtatgcctgggggaagatgggttccaacagcgaagtggcgcggctgttggccagcagtgatccactggcccagatcgcagaggacaagccttatgcagagttgtggatggggactcacccccgaggggatgccaagatccttgacaaccgcatctcacagaagaccctaagccagtggattgctgagaaccaggacagcttgggctcaaaggtcaaggacacctttaatggcaacctgcccttcctcttcaaagtgctctcagttgaaacacccctgtccatccaggcacaccctcatcctcctgatggtacaggggacagtaatagccagcacacccacaacccagacaccaatccctctgcaacgtggtggcgtgctcttcattggggccaatgagagtgtctcactgaagcttactgagccgaaggacctgctgatattccgtgcctgctgtctgctgtaaaggctgcagcctccccagctctcctctgccagccaccctaaattccagccaacctcacctcctcgggcccagctcaagcccccttccttgctctggaccccttaggtataccctggaagagctggggtgggggaggagggagcgtgaaggtagtgactcctgaacacacccaggtggaaccatctttgggtgtgagaggtccttgttaggcgtatagttctccctacgtcatcctctatccttcttctttcaacctggcccggctcttgccacatttgtctcatcctatggcttaaggcctgctggctaatatgtgatctagcttttgcttttgcttctttacagtcttgttcccctgtattttctattttccagctttctttccttcgtgtttgtctattttcctagctgtctcagttcgtctagctacagggttaccctcttcgtataaatatcttttaatacctttgtctcctattgccattatatgcttccttcg

SEQ ID NO: 522430 - DNA, 232 bp, Homo sapiens
  misc_feature (107)..(108): n is a, c, g, or t
  misc_feature (110)..(110): n is a, c, g, or t
  misc_feature (113)..(113): n is a, c, g, or t
  misc_feature (159)..(159): n is a, c, g, or t
cctaggattttcatgtgtatgggcttttcaagtgaattttgtatacagagcaaggcgattactttaaaacatgaaaaaaattagcgctgggggttaaaggcaaaatnntnctntgggctttcctctctcctgatgagatgatgcaaatggactccatanagaaacgctgcccgtgtaacaatgcagttacgcaacccggtgcatgacacatgaattgcagcgcacctgaaat

SEQ ID NO: 522431 - DNA, 129 bp, Homo sapiens
cacagagccgtgtctttcccaatacatctaagcatattcctcactgtttatctcttgtctgtacaacatcatcaaggcagaaacagtttcccaacaggttatattttctgaatgcgtccgtcgaagttg

SEQ ID NO: 522432 - DNA, 943 bp, Homo sapiens
cttaattatgtaagagatgtatccgcattctggctagtattcatcatcgcatcatgcgaagcacacaagctatattggtctggttccccagtccttgtaccgtcgtcaccgtctcataacatcctgagcgcctagatactaaactatctgaccttaatgaggctcactctccactgatggtctcgtctcagattggctcaatttattcacatgaggaaaccacagcatgaatcgatcgtataagcatgctcttatcaccttctcattattaccctaagaatttctccccattatcgtatctcgcttaaatttaatatcttttacatagttcaatggaagaagtaatagatgtcctactacttcttcctgtccgaaaaaaacctacctacaattactgccccaagcgcattgggtctaatcgaattcgatctcaccggagtgtacggcgaggccacaaagctctatgagaccgccattgaagatcagcgtgtgtcacaactaacatattcattcattctcataacgatgcccataagatatggggcgtacgcacattttcacgctcattaacttccaatgcggaccactgaatttctcaactaacattcaagcatatcatccacataaggggcatctacattatcattaaatttcgtacttcacatcatgtacttaacttgtcacatagttgactatcagagggcacatgagccgacacttttcgttagaatattgactatgacgtggttgaaatatagtcatctatctatgtgcgagattactcatcaatcatcgcgtagtcgaaattttatgaccagcgctagaagcactcgtggttggtaaccccccggtgtggttgggttaaaaaacgtaactttgaccggcatgtatctaatggggtacctatggcggggatcatgggaaatggtagggcggtagaaca

SEQ ID NO: 522433 - DNA, 227 bp, Homo sapiens
cgagagacgtgttgcagtgtctctccacatgtagtagtagtgacttgaaataggaacacactcttcatctcaaagtcaggcctcagcttctgccgtggggacctgacatgctgcgcaatggtctgcagagacgtatttccacaaaagggaaaccaatacagaacacttcaggcccacgagtcctagcttgggtgaagtcacctggttgccccattgcaacacggtct

SEQ ID NO: 522434 - DNA, 198 bp, Homo sapiens
acagcaagcaaggatccaacttctgcgggaagcaataacagtcccgcggttaagtgttggttcagttactagcagaacaagtactcccacactaggcacaccaagcccacagaccatgtctgtctcaactaaagtagggactcccatgtacctcacaggtcaaaggtttacagtacagatgcctacttctcatgtcat

SEQ ID NO: 522435 - DNA, 519 bp, Homo sapiens
  misc_feature (454)..(454): n is a, c, g, or t
tagtaaaaataaggttttgggcttgttgcccaggctagtcttgaacttctgggctcaagaaaactcttgccgtgttttgggccctcccaacatgtgcgtgggatttgcaggttgttgagccaccacgttcgtggcctttgactctgctttcaacacttttagcctcttctagaaatttcagaaaaagtggtcatcggatgttcaccgcctgtggaaccctttcttgtgtgggtgggctctcttatacgtggtaagtgcctttgtgagaatttcactctgtggtgccgtgttgagtgtgctcctcgtgcagctccatctcctctcgtgtgtggagtgtgtttctccagtagtctccattctcccctttctcacgtgggcgtgaagtataggatattctcactgtggtattacattttatttccacttattttgtgctctccattttcacataagnatttattaacacgagcttggggcttggcttttcaacaagaacaaaacaaaaacaacaaaagaggg

SEQ ID NO: 522436 - DNA, 730 bp, Homo sapiens
tctatgtactatgcccatgtggttaatcagtcacgattgccacaaccctgacagtgactccacgcctgcgcacgctgctgctgactgcgtgcatggatacatgctgtgaccctgcgcacccctgcggtgacccctggagtgctcgggctggagccctggagagccctgcttgaaactggcttcccccagtgaagttgagtggccaaacaatggacgatagccagagggctgttcccatggagccaggtctgttggcagatctggcccatattcatggccagtgggcacttgtgagtgaacagacacctcgtgactgctgctgaatgaacatcctactaactgccccagaatcttccatcctgatgcctgatgtcggtagtgaatgccatgtgccatgcacctgcatggctggtccaaccctccagacaagatgaagcatgttgctgtgcagccttggatgctagcaacttcctgatgctcgatgccccccacaaatcctggactccagtgtctgctgtgcccctgtgccaggatgtgaaacagatggcttgacgactgtcagttgtttcatgcatgggatgtgtgaccaggagctgtctctctcccaagagcctcaagggaatgcttgatgcctcttccctcaccagatccctcaacctgacctttgccacacctcttcagccacagtcagtgcagaggcctggctttggcccgcagactccagcccgcg

SEQ ID NO: 522437 - DNA, 441 bp, Homo sapiens
aagtatcccccacgatcgtctcagctactccggaggctgacgcaggagagttgcttgaacctggtgaggcggagattgcagtgagctgagattgccccactgcactccagcgtgggctacagactgagactctgcctcaaaaaaaaaaaaaaaaattaccaagatcaatttttacctccgctgggaacctcttgtaaggtgccccagacaagatttgcaccagaggctttctgtccgcggcggttcttgaccggctctgtgaaccatgctctcctttcccctgaagaactcctcaggcttgtccctggtggctcacacctgtaaggtgccccagacaagatttgccctgagggctttctgcctctgaggacagcctttctactgctcctcagctgcacctccccacagagagagcgtcagctgaggaccatcgttggggtc

SEQ ID NO: 522438 - DNA, 305 bp, Homo sapiens
tcgtaatgatgtatagagtcatgtgtctgatcctacaaaagaatgagatggagattttttattttattatattgtattttttttagggttgcccccacagcatatggaggttcccaggctaggagtctaatcggagctgcagctgctggcctacaccacagccacagcaacgccggatccaagctgtgtctgcaccctacaccacagttcatggcaacgccggatccccaaaccactgagcgaggccagggatcgaacccgcaacttcatggttcctagtcagattcatttctgctgcaccacga

SEQ ID NO: 522439 - DNA, 455 bp, Homo sapiens
ccctcggctgcaggttcggcacgagagagagagagagagagagagagagagagagagagagagcgagagtgacacactgcgcccgacatatctgagcgctactcttctacaccgggtttcctcttcttctcctcgctgttctctctctcctgccctcatcttattcacctgcctccctctcctcttgttcttccattccctgtctgcacctccttcccctttccttctttctgccattttctcctttgcttttcctcctctccgttattccttttttctcctccatctctctccttctctctttcctccttcgtcttatcccctcgcttttctctctctcctccttccttccccttcccttcctatccttcctgttcttcccttgtccccctctctcttttcggttccctttccttctcttctccttccttcctcttcctctccctttctctcct

SEQ ID NO: 522440 - DNA, 568 bp, Homo sapiens
taagtggggtgatgaggaatagtgtaaggagtatggttatcattggtttggaggttagttggattagtcatggtggggtggtgattaagtcgggtggtgtgatgaaatatttgggaggtgggggatcaatagagggggaaatagaatgatcagtactggcgggcgggtaggcctaggattggtgggggcaatgatttgaagcgaacagattttcgtctcatttgggtctctcagggttggttataatttttaaattcttatatggggctttgggtagacggagacggtacggtgggtacgttggtggttataatattttatagtggggtagactgaggacatacgtggtacacggagtactgggggtacattattggtggggccaataccggtagtattcagtgggggcatgggatgtagggtgtcagggtaatggtgacggtaagtcaaaggccaaatggtggtgggaaattggaaactatgtagggctaggcccacgggtggtttcagcagggggcaaagactagtatgggaataaggcccaatattgggctcaagagggagtggg

SEQ ID NO: 522441 - DNA, 395 bp, Homo sapiens
cacctaccaccggtattggcgctcctgtttcccggcggggcggaggcgcgggtgtacgacatgtaccggagtgattctcccaagggcgcgttttgcgacgcgatcggggatgcgtgcgtggcggacctcgcggtggagaacgccttcttccagaatcccgccgtgctggccaccggggaaagcgactggaacttcgacggcgacatcgcggccaagaccaacctcgagccgggatccgatcccggaaatctcgtcacggaaacggagtcgaacgggggcgtgggaatttccacggggaggttcggggtcggtgcgagcatgagctggcaaaaagacgccgtggaaggaaagctgctgatcttcgacgaaaacggaaacccgctcaccgcgcgcat

SEQ ID NO: 522442 - DNA, 968 bp, Homo sapiens
taagggaccccttaccttccggctcttctcctgatctgccattaaaataatttatggtccaagtgatatagctcaacaacctcaataataactccctactatgcgctagcaagggaagtacattacgagataagttgttcaataatagctagtttgtgattaacgcggtccaagagccactcgcgtcattatgggaaataatgggtggctacttagagaatactcaaggtgctttgacagacagtgggaaaggaatttggtcgagagattaaaaaaatgaactgaggtgtggaaatctcgaaaggtgtatataggacatagacataaggtgcttaaggctagacctactggagtttgcttacacaggaggtccgctccgcaggcaccatcgaatattaacaaatccactgccccttggacggtgggccaaaaccacgccagctgtacttgctgacattcgatcggacaacccacccagaagcgcttaattacattaaggcactcattcccctcgtacactacttctctcgcacccccacacggtccagcctcaccaacgccttatcttaggcttggtttcgccccaaacgcttttgccctccgaaagccccccttacaaaactcccacttaccgtaaatatctaaatgttaagccttgcatgcttagcgcctcaccaactccattgggcaacaggccagcggccatctttaatcccaagtgaaacccacgtattccatcgacacagacatcctaccttgctctaattctaattctgcccatacacaatttgccgttaacttaatacctgtcaccaggcacgagaacctcactcatattgcatcacacgtctgacgaaaacacgactgtatcccacctggctatcatcagccgacgtaggaccaggcataacgcctgatgcagggcaatctgcccatttacaactgatatggcccttcctactctgccg

SEQ ID NO: 522443 - DNA, 131 bp, Homo sapiens
tgtagaacgtacttctggtggtgcactgtgctggaatccttgcgtgctgccctcagtgagctgcctgccttgaaaggcatggcctgtctcctcacttgagttcagggtccatcgaccacagccctgttctg

SEQ ID NO: 522444 - DNA, 474 bp, Homo sapiens
cgcaaaagttaggtcatgaaagctgtccaattgggccccctttagggtaagacgcttcgcccggcgagttacatgggccagttgagtgtcagccctctctatctggaaccttgattccagtaccttatccattctcaggatgaacttgggtgctcaaagttctaaaacccctttagcgttgcatttcacccccgggcatggccgtccctagttgttcttgcggtcacgcacccaggggtcgctgagagccccctcttgggtggttaaccgtctcccttcaatcacacctgtgccaacaatgttgtagggccgccgggcatacgccttcctaagttctgggtcggtttcgtccggtttcttggcagggtcagctggattaaacgtcagcggcgttccgctagggctcccggtgtagaggctttgtatagcattctctcacctccgccccgccgcgagatcctctcgcggccccct

SEQ ID NO: 522445 - DNA, 499 bp, Homo sapiens
cctctcatttcctttccatcatggaaatctatcctcaaggagatcacttctcagtgttccatctgctattctactacccctcagggattgttcaggtcccctccctttcctacacatcaagctcgaagatttgtccctgcccaggactggcaaattgacttaaatacctcttagtctagtcctcagtcttcaggaaaggtagaacggactaatggtcttttaaaaacacacctcaccaagctcagccaccaacttaaaaaagactggacaatacttttaccactttcccttctcagaattcaggcctgtccttggaatgctacaagtcatactcctattcaccgttctcagctactcatacatgccctgctcttgtttacactgccggtttacactgtttccccaagccatcacagctgatatctcctggtgctatccccaaaccgacactcttccactcttgaagtaaataaataatctttaaagaaaggaaaaaaaa

SEQ ID NO: 522446 - DNA, 370 bp, Homo sapiens
gtcatttagctcttcctctccagggacatcgtgcactttcagattttctcattactcagccacagaatcgccaccacctgctacacacatgcacaccggggggtgacttaggtttcgagagtaggtgtcccccttctctccaccttgaccccctgcttccctcaacttaattttcatctgtacaatcttcagcacgtaaagggttgaaggaaaagccccgatgctgcacggtcagctcaccacaccccgtttacaccaaggtcgcgcgcattttacaggtgttccgataccgtgggaggctacgtcgtctgcctcgcatattgggttacaggggtgaactcgctatgttgggcacgccacctgttgtacc

SEQ ID NO: 522447 - DNA, 356 bp, Homo sapiens
tacctagaggatcccgtgccccctgtggattgtcaggcagcatcaggtgatggtcaggcggttgttatgctgcctctctaaaatagacacacctgaagctggtgattggcagcttcctgataagattgcaggagttgggcaagtagactcaagcacatgcactaagaggcaaaatggtggagttaactagtctatgaccttcctctaggaacactcaactactaaggggaaaatgcctcaagggagcatgtgcacagcttcagtgaacactctgcgcacggggcccctcccaagtgctgtgcgggcacactcctgttgatagcccacccccagggaagaatccaaggagaagggag

SEQ ID NO: 522448 - DNA, 176 bp, Homo sapiens
gaggtcttccggaaggcctcctctctcccccggtgtggatccgctcgtgggagaagccctacgcgtgcggggactgcggcaaggccttcagccagaacatgcacctcatcgtgcaccagcgcacgcacaccggggagaagccgtacgtggtgccccgagtgcgggcgagccttcag

SEQ ID NO: 522449 - DNA, 137 bp, Homo sapiens
ggggcccctttcccccgaaaaaattaaattggggccccccttgggtttaaaagggttaaaattcccccgcctttttttaaaagggggagggggggcccccaaaaaccccttttttaaaaaaaattccccccctttta

SEQ ID NO: 522450 - DNA, 130 bp, Homo sapiens
caacaccattctggcactcaaaaaacggatcagttacctgcttcaccatgatatattctgggaaagcgatcatctaatgaagtgaagaacgtgcacccaagggaacacaacagtagatgagttaatgatg

SEQ ID NO: 522451 - DNA, 428 bp, Homo sapiens
  misc_feature (81)..(81): n is a, c, g, or t
  misc_feature (123)..(123): n is a, c, g, or t
ggccccctttttatccctctcctagacacttggggcgggagaaaaagggagaaacaagccctttcccctcccttcacccantcccccgggctttatcaaaacaaaacagcttacccctctcancctcccctacccaattataaaagaaatacagttgctccttgacttacaatgggattacatcccaataaacccattataagttgaaaatattatgtcaaaaatgcatttagtacatccaacctactgaacatcatagcttagcctaccttaaacgtgtgcaggacacttacattagtctatagttgggcaaaataatctaaccaaagcctatttcataataaagtgttgaataggcttatttattttattttcatttatttatttatttgtctatttttgagacagagtccagcctgggcgacaga

SEQ ID NO: 522452 - DNA, 90 bp, Homo sapiens
tctgaggacacggccgtttattactgtgcgaggggtccccaggagatatggtatgatgttgccgatcaatttgaccactggggccaggga

SEQ ID NO: 522453 - DNA, 263 bp, Homo sapiens
attactctagacggcatggttaacattccacgaagaaaaataacccactgcttttccctaggaacagaaacttggcgtcatggatgtcaaaggaacctaatggttggttctttggaacagagcaactgacgctcaaagacaatcattttgttgaaagatcaaacataccaggccaggcattgtctattgctgatctctgatcataatctctgatcaggtcatctgctgatctctgaacataatttacccctaagcattaattt

SEQ ID NO: 522454 - DNA, 1681 bp, Homo sapiens
tcccaaaaagggatattttttttatccaaggtaagcggcaaattgaggaaacaccagaagagaggggagccccgagggggggcacaaatccgagtggctatacccctctccccaaacgagaacacgaggggggagggagggtggcccctaacaccctttatagtgggtcgaatcggggccccctgtgggatccaactctcgtgtgggtgcgagcaactcctatgaggggcgaggggccccacactcttctccgcgtgggacacagggaggatagctcgggctcacacccagagctctgtgcgcaagtgcgccacaagagcgcctctcttctcccaccacaagagagagagtatatctgtggggggagacggggctactgcgtggggcccagaacagcgaggagagcgccacagtgagacggggagtgcacacccttgtgtggcgcgccgtggtaatagccaagccgagccagagtgaagcggaagtggctccacaaacaagtggggacacctgtggggacacacaaaaaaacacacaccaacaacagctgtgctcccgagagaggctataagttgtcggggacacacgagaggaggcggcacacaaggagtggggacacacgccgagataaaccgtgtggggggcgtgcgccgaggggtacagtgacaccccaaggagaggggggggagttttgtgaaaaacgcggggcccgagggggtgaaagcccatcctgtgggataaatgtggggggtcgcccctacatttctgtggagggacagggggcgcagaaaaaaggtgcggcgtagcaagaggtggggggggcagaacaccaccacaacacgataacggcgaggcctaaacaggggagacaacaaaacggccccccaacaagacccccaaacaccctacaaaggggggggcgggggcaccccacaagagggtgcgcccctaaggggggaggacactcacaaccgtggtgggaccccaaaaaaagacggtgtggacacggctgcgaaattctacgcaaaaattacaaccccaacaatatagagttggttcacccaccgagaaaactcccccaaggggcgggggcaaggcgcaccaagaggaggcgggccctggcaggtgcccacaagggtgaaacaagaacggagcgagcaagtgggggaacacctacccacccctatcggggaccactactccagtggtatgcccccgaaaagggggggggcgtgccgcaccaacccaatatgacgacggggggggcaaataatgggaaacaatgtggggggacaatggatgataacaaacatggtggggtgccccccaaggtgtgttaggtacaaaacaaaacaaagactggtggtgggggggagcaaacactgtgtgggggtcgaccacaccccccccccctgttgtgtgacacacccaggatgtatgcgacgcgaccatctgacatgaaagcgagtcgcgcgacaaaaaagaggctggggggcccccgctaagcgggggggaaacacctacggacgcccaacgttgataaacatcagacaaataatagtatgagagaggatgaggccggccacacaaacaagcagtgaccaaccagaagtagtgacacagatggtcggagttgaatgatcacacgagagatgatagtggaaggaacgaagaacaaaca

SEQ ID NO: 522455 - DNA, 375 bp, Homo sapiens
ttccagcttgatttcgttcacgacccaacgctcatgcaggagcaggttatttaatctccatgtatttgcatggtttggaaggttccttttggagttgatttccagttttattccacagtggtctgagtgagtgcttgatataatttcaattttcttaagtttattggggctcattttatgacctatcttatggtctatcttggagaaagttccatgagctgttgaatagaatgtgtatcctgtgggttttggatgaaatgttctgtatatatctgttaagtccattttttccaaggtatagtttaaatccattgtttctttgttgaatttccctcttgatgacctgtctagtgctgtcagtggaatattgaagtc

SEQ ID NO: 522456 - DNA, 123 bp, Homo sapiens
gcggattcgccatcgattttcaaaatggctgcagctcctcaagcacccggggcgggggttctttccgttaaggacaaggccctcttggtttttaaggacggtgggtttggccaacccattcca

SEQ ID NO: 522457 - DNA, 241 bp, Homo sapiens
tttgaaagtatatttctttcataaatgcagtcctataataaaacgaaatcattttgtaatattgattttacttgttttagatttgcttcaaaatatagagaagtgggagagtggatgggattgaggttgaggcaggaatggtcatggtgagtcattgttggggccaggtgatggatagatggtgattcattatactatatgcttactttttgtatatttgaaataaaccaattaaaagttg

SEQ ID NO: 522458 - DNA, 1878 bp, Homo sapiens
  misc_feature (1878)..(1878): n is a, c, g, or t
cgtgacgcggggctcccaccccaagccgctttcacaacactccgtttacttaccgtaggtttctcccctcacgccgcccagtggcgagcgacacggctgcggacgcctaacgccgcacacaccgagccgcctattcccgtagaatactcaacacacaccactcacctcacctcaggatacaccatatgatccaacgacacccctgccctccgccgtacacacaaagaactctcactcgcacgcactcctaccctcctcccacgcaggccgcaccaactccaaacaacacaaacacaaagaaaaacaaccacaaccatcaccaatcaacacacacacaaacactataaaaaaaacaacaaaacgagaacacacacaagacaaacaaaacaaacggaaaaacacaacaacaacacccaaacaacaacacaacacatcaccaacaccacccaatcaccacacaaaaatcacaaacccacacctacacacaccaaccacaccaaacaccctaccacccaaaccaacaacaactccaaacaacacacacaacaccatacatactaccctaccctcacaccataccacacaaactacaaaaactacacagctcaaaccacacaccaagagagaacaacaaaacacaaaaaaaaaacaacaaagccacagacaaaccgagccacacaaaaaccaatacagcaaccatccaccaaaccgaacatcatagagacagcaagacacaagcaagacacgccacccaaaccagcaacgctaagcacactcatataccaaacacaagccaccaccagacagaccgacacacacatcacccgcaacacgaaacacggcctagacactccaaaaccatagcataggatatccagcataacagaaattatgtacgacacttgagtctgctactcactataatatatacggctcaccagcgtctatctactcgacaagaagcttcagcataaacgaagcagcctacaacgcgagacgcaagtaccagtacgcatcacatcaagagatcaagcttacctgcactacagaccaagtatcaatgactcatcacacaagtctgcatcaagacagatatacaacgcacatgaacacgcgcgacaacgccgctaacagctatactacccaacaccaatcaccaaaatcacactacaatcactaacataatccacacattcaaacacaaactactacatcacatcagatataacataacaatgacaatacaaccatcctacaccacatcaaccaactcacaaacacacaaccacatacaacagataatcactatccaatctaaaatatcaacacttatcctaataacacaacaacgactacataccactcgacccttaccaaatcactctaaccgctatacacatatacaaatacacacgtcaaattcacaccatacataatataacatccaacaatactacactacaataccacaccaactaacaaacacacacaacaaatccatacacacaaccttcaacacgaacatacactatcaatctcaacataacatcctctatcactccttccacatcaacttacacacaatcacactaacatatctaacatataatatacacactcaacactactacaaactaaacaaacaaccatcaacccacactacacaatctacaacacacagacacttatacacttacacactaccactcaacacacaacaaacaacacactaatcatacaaatcacatatatattataatatacagacctattacacaattacactaacacaccacgaacacacatcacacactaatcatatcatcaactaatacacactacactaactcactacacactctcactcctaaatcacan

SEQ ID NO: 522459 - DNA, 826 bp, Homo sapiens
gagacgttcttcgccgagagtcgtcggggtttcctgcttcaacagtgcttggacggaacccggcgctcgttccccaccaccggtctggctgcccatagcaatgacctccgtcacctcttcacacgcaccctcggacgtgacccaatggccacacccgccagactgcatccagctgcctgatgcaagccacacgaacaggagacccggcagaacatcatccattagatccgccgaccatgaacgaccgcgtaccacactcgacaggtgcgccagaaattaccaccaggactcacgaggccgacatacaaccgccaagatcaagcctggagctactacgcctcctaccgtttacctgtccactgtcttactacattatgaaccgcagatgactgtggacgtttgaaagaaaactttgccaagactacctatactctcacccacatctccattgagcgagaagggacgcactgcctgcagacacccacgactgaaaagctggctgcaacccagaccgacggtggacacgcactcttcactcccacgactcatcccaggaaaacgcacccagaaccgcgggggaactgaacctggggccacaagaacggcgacatgcacagctgccaacgcggaacggaggtgccagtgacccctcacgcgaccgccacaaaccggcgaagatcaccggcccagccaacgccgggacaaacgcggcaccacacacacaggcagcccacaatgaaccgcaacagacacaacccccgaagaagacagatgccatccacctccccataacccccataaccctggaaatgcgccgcgcgcgcac

SEQ ID NO: 522460 - DNA, 308 bp, Homo sapiens
  misc_feature (298)..(298): n is a, c, g, or t
tgtatgtcagaaagcaatgtaatagatagaccaagcacagtggctcacacctataatgccagcactttgggaggccaaggctggaggattgcttgagtctaggagttcaagccgagcctgggcagcatagtgagcccccatctctacaaaaaataaacagaatttgccagacgtggtagtgcatgcctgtagacccaagtatttggaaggttaaggtgaaaggttcgcttgagccctggaagtcgaggcttcagtgaggcaagatcacaccactgcgctccagcctgggagagcaagnccctgtctcc

SEQ ID NO: 522461 - DNA, 273 bp, Homo sapiens
ttagaggatcttgaaaattagcgacggaataattcgctgtggaatctgaatggtgacaagagtgaaatttatggtcttggaggaattttttgatcaaaacattagagctcccaataaagtagagagaaggttaggttgatctgaggaagtgaaatattgatgagtaatgattgagaaaattaaatgaaattaaatagagggtgcctaagatagcgtctggtacaaatcagccacttagcaagcagtagttcagttctctttccttccgagatg

SEQ ID NO: 522462 - DNA, 307 bp, Homo sapiens
  misc_feature (3)..(3): n is a, c, g, or t
ggngcaagaacttgattgtaaggagaacgatttactattttttatcaatattctacaaaacctgtctcttgtgtgacccatgcgacagaggtgagtcttctctcctggactctccagatgcctggacaagattacttcatgatataccatgtttcccagttggctcatgggaaatggtaatcttggactgttgtttggtagaatcaacagctgcattttaaactcgaagttgctctaaatattccctgccaagagcctcgtgtcctgtgagagcgactcaatgagagtgctcagctgttaaatacct

SEQ ID NO: 522463 - DNA, 100 bp, Homo sapiens
aggaagtctcgtggggggaaactggaagatgaacgggcggaagaggagtctgggggagctcatcggcactctgaacgcggccaaggtgccgaacgacacc

SEQ ID NO: 522464 - DNA, 174 bp, Homo sapiens
gacttatgagtgatccaggcgctgttacggaggccctgttacggaggcgcgttcgttacggaggccgctcgttacggagggcgctcgttacggacggcgctcgttacggaggcgctgttacggagccgctcgttacggaggcgctcgttagggcgctcgttactggagtatccg

SEQ ID NO: 522465 - DNA, 375 bp, Homo sapiens
ggaaccaaaaaggcatcatagaagcaaagacagcacaagatttcatgaagaacgaagagtacatcaagaagaaccagtaggctatggtgtttgcagcttctggagggaggggctgctgtggttaactggcataactaaccctgactctcctggctttccctcccagcctggtgcagtgagcaggatgtcatagtcagcggggctgaggggaagctgcacttcccagaaagcctccacctatattatgagagcaagcaacggtgtgtctggaccctgctggtaccagaggaaatgcatgtgttgctcagtttttcccacctagatgttgagtctcgtcaccacgtcgaaacggccggaatttagtagtagtaggcg

SEQ ID NO: 522466 - DNA, 879 bp, Homo sapiens
gggtgttcctctcagccccgattcttctgagaacaggtgaactggcagaacagcccctgcgccgttggcccagacgcagctctctgtgttgcgccctatagagcctctgtgccctcagttccgtcctgctcttggcaaattccagaccctttcagaaagtggcctgaagccctatagtcctcgtccgtcactctgcagctccgcgaaaatacagaacaactttacggagtgcttctcttgtcgggtggtggtggttgttgaatctccgaggagagtttacagagaatcgattgctccgaccgaaaatgatgaatattgagcaattcctcccataagggggggcggactgtgacttatgtcgccctggagaagagcgccgcgaaacgagccaagggtcactagcccaagcgatatcaggtagcgcgaggaggaggagcccacatgacaacgaggagggcaagatctaaacaggaacaaggagggcggcgatcgtcgtagacaatgagagttcactgcaacacgtgacagcaacaaggtggcacagagtgaggaaaaactgtccatggcgtaggacgaagggaacgccgtttattaatcaagggggcggcgggggagggacacacaaattagggagatgggcgtggatggaccaccatgtagagaagggtaattgctagccggccgtaagagggggagatacgcaatttacgagaagtctttgcgtcaccctggtgatacccaccggtagtttgccactaaaccgtgggaattagacggctcttaccgtatttgagcccatgtcggcgctaccactggggaagttcacttctaaacacagacatttagtgacccccagcacggtgctgaggatataacggt

SEQ ID NO: 522467 - DNA, 339 bp, Homo sapiens
  misc_feature (279)..(279): n is a, c, g, or t
gtgagttctttccattttagagccactaagaacaattgtgattcatgggaggaggttaacatatcaacatgaatcacaattgttcttagtggctctaaaatggtgagttctttccataaggttttcaatttactttgcccagatccattagaggaatcgccatctacagcagctatagccttacgaaatgtatttctgaatactaagactgaaaagttgaaattactccttgatccatgggttgcagaatggatgttgtgttagcaggcatgaaaacancattcatctcttcgaacatcttcctcagagatctcaggtgcattgttaatgagtagtaat

SEQ ID NO: 522468 - DNA, 414 bp, Homo sapiens
  misc_feature (5)..(5): n is a, c, g, or t
  misc_feature (41)..(41): n is a, c, g, or t
  misc_feature (63)..(63): n is a, c, g, or t
  misc_feature (157)..(157): n is a, c, g, or t
  misc_feature (210)..(210): n is a, c, g, or t
  misc_feature (217)..(217): n is a, c, g, or t
  misc_feature (303)..(303): n is a, c, g, or t
  misc_feature (319)..(319): n is a, c, g, or t
  misc_feature (344)..(344): n is a, c, g, or t
tgtanccggttccaatctcacacttgcctataaagaaaatnccctgagactgggtaacttatnaaaggaaaaaaggtttaattggctcatggttccaatgggctgtacaggaagtatgacttggggaggtctcagggagcttttactcatggcaacnagcaaagccagagcaggtatcttcacagggctagagcaagaggaaaagagagnggggagntgctacacactttttatgcaaccaaatctcatgagaactctatcacgagacagcagtagggggacagtgctaaatcattcatgagnaactacctgcgtggtncagtcaccttgcaccaggccccacntcccacattggggattacaattaaacatgagatttgggtggggatacagatctaaactgtatcattactc

SEQ ID NO: 522469 - DNA, 1069 bp, Homo sapiens
gatacatgtgttgccataatgacatctcatatgtgtgccgtcgtctttgcacaaaattatgtgggctcttcccccgctcatgttgtggtgtccctgcccttctttagccccgaagctgaaatgtcgggtctcacaaattgcttctcaagaaaatcgtttgagccccctttctttgcaggacctatccagggaagaaaatggtgggaagccgggcgcccctgaaatggctggcaccctgtccttaaaagacttatggccaaggctttttggcaggctcatttggttgggtttcccccaggcatcccttagttccccggatcctctgccaagagtagctcattggacctgagcacagcgctttcaggaggactgtactggttgttcccccggaccacaagagagtcacttttgactccatcaactttcaaggggacagagcctaggcagcagattctcctaatttttaaccctgaaattcaaggaaccagtggaggaaagaatgccttactacccccgatagaaataggggaactcatagaacttctcgactagtacctgtcagctctccaaagcacttcttgtgtctttgcttgagctgcccaagaagggtcaccacaagctgttcttcctccactggaagaagtgccctcggggttgacacgggctgcaaagtgacacactgcacctgaatgaccctttattttttggctttggcttattatttagcacctgggaggcccacggggaaattggtgattacacgtagcacctttgggaaagttaaagccccccttgggcttgctttggagagatgatggcacatgcttggtattccactttggataatcacggaagcctccctagtccacatccactattgtgtcacgaggtgggagttaaccacacccctggaaagagtcccctgccacaaaagaagtagttgctttcactggaaatttcccaaagcttttggatttttctggatcacagtaacccacctttttataaacctcgaggtcaaggagttcgagaccagcctggtaaacatggtgaaaccccgtttctatta

SEQ ID NO: 522470 - DNA, 331 bp, Homo sapiens
gtactgccactcatagccccacttgcccacgcgagccacgcggagcggcggttgaagcgggtatcttgagagcaagatattgaccgtacccttattaactggaagccgcaaaggaaggaggagtcgtggctgaagttaatgcagtagagggtggcagggtcagtgcctcggcgcagctccaccagtttctccttggattgtggtgtcaagaggcgaataagggtacccttctgggaggcttgaagccactacagtgcctggcttgtttagagacacacaggctatgtcactctgattgtgcattgatcgtgaatggagcagacgaggtgcc

SEQ ID NO: 522471 - DNA, 786 bp, Homo sapiens
  misc_feature (14)..(14): n is a, c, g, or t
  misc_feature (120)..(120): n is a, c, g, or t
  misc_feature (144)..(144): n is a, c, g, or t
  misc_feature (206)..(206): n is a, c, g, or t
  misc_feature (224)..(224): n is a, c, g, or t
  misc_feature (233)..(233): n is a, c, g, or t
  misc_feature (251)..(252): n is a, c, g, or t
  misc_feature (254)..(254): n is a, c, g, or t
  misc_feature (260)..(261): n is a, c, g, or t
  misc_feature (309)..(310): n is a, c, g, or t
  misc_feature (315)..(315): n is a, c, g, or t
  misc_feature (331)..(331): n is a, c, g, or t
  misc_feature (356)..(356): n is a, c, g, or t
  misc_feature (360)..(360): n is a, c, g, or t
  misc_feature (365)..(365): n is a, c, g, or t
  misc_feature (367)..(367): n is a, c, g, or t
  misc_feature (394)..(394): n is a, c, g, or t
  misc_feature (411)..(413): n is a, c, g, or t
  misc_feature (415)..(415): n is a, c, g, or t
  misc_feature (417)..(417): n is a, c, g, or t
  misc_feature (430)..(430): n is a, c, g, or t
  misc_feature (434)..(434): n is a, c, g, or t
  misc_feature (451)..(451): n is a, c, g, or t
  misc_feature (459)..(459): n is a, c, g, or t
  misc_feature (497)..(497): n is a, c, g, or t
  misc_feature (508)..(508): n is a, c, g, or t
  misc_feature (553)..(553): n is a, c, g, or t
  misc_feature (563)..(563): n is a, c, g, or t
  misc_feature (675)..(675): n is a, c, g, or t
  misc_feature (786)..(786): n is a, c, g, or t
ctcaggcctaaganggtagatagatatatgaggcaaggaacccaaaggcactgtgcttatcataggaactggagagcaattgtaaaaaagggaaactgaaagcatggacttaaaaactcnggctgacggcagactgattacttntagtataagctaattatagacaattgattcagctaccaggagagaaaattaagtgtaagaancatgataccaaactatantaaaaaaanaccatcatcctactttannantaaaannatccaacggccctaatatatggatgagaaaaaagaaaaacgtaaaagnngggtnatccccctccagtgcntataacctagttgagggatccaaanaagnaaaancngacaaaaaataaggacaaagaacaganccagaaaaggtgaaggnnnangnttaatggtcagantcanaggtccgtctcctctgntcaattgnccagtctttgactagacctgctacgtgaactttgtcanagtggcaagtnagagctagcgtggctgagaatcctttgtgggaggaaaagtaaggnattgaaaatntaggtgtagggaatacacccccagaacactgccagggaaggcagcagagcaggctgctgcagtgagcggcccctgacactttctccacggtcccctggcacaggaagacaantccgagagagagcgctggcagcacctggctgacctggccgacttcgcgctggccatgaaggatacgctcaccaacatcaacaaccagtccttcaataacttcatgctgcgn

SEQ ID NO: 522472 - DNA, 710 bp, Homo sapiens
agcggaggcgccgccgcagccggagcggctcccgggccctgggccgccgccggccaggaagaaatacttgtgtttggctgcatttccagggatgctaccacgagctcaaggctgtcacctgggtcttgcccattaacgagcctgttcttagcaggcagtgactttgatgaacgtgctttccttgctgactggaagtaggttctgctacgagcttggccattgcgacattacgataccgcttcgatgtgagtcctattactaacatactgccgttctgcagacagacgttcactagtgcaagacacgttgaaacatgccgtggcaagcatctctgtgtgttctttcatctaccttatcactgcgctttttcgcagtcgctgcgcagatttggagtgatatgactattccagaggggcaccttacatcaaagccattcttcaacaggacccacctggcagtaagattgcacacatacattcaacgatggccagtcaagcctcctgaagacactgcggagtctcaggcctctgatgagctggagtgcaaaatctgttacaactcgatacaatctgaaacagaggaaacccaaagtgctggagtgttgtcatagggtttgtgccaaattgcctcttacaagatcatagactttggggactccccacagaggtgtcattgtctgtcctttctgcaggtttgagacgtgcctgcca

SEQ ID NO: 522473 - DNA, 141 bp, Homo sapiens
atcctaattttgataggggggtggactactaactatgtggggtacttctcgggcgtgaggaaaatgttctggaattacctcagattgggtgattaggtcacacaactttgtggataaactaagaaccatgaagttgtatac

SEQ ID NO: 522474 - DNA, 262 bp, Homo sapiens
gaatccccctttgtccagcagatgtggcatatggcctgtcagggtgcatgagtgcgacactgaggatgcaggatatggaggggataatcacaggaacaaaatgtttgaatctgcacgagaagatgggacctaggacacagtagaggggcttgcctacagaatcatagcaaggatcagttgcatctttgtacaccaggcacagcacaagtcatcatttgcagtcactgcatcaacacgcactattggttagcatttgcatcat

SEQ ID NO: 522475 - DNA, 118 bp, Homo sapiens
aataacatgatacaattcgagctcgtacctctcatggaactggttgacacactatggaagcaaacagaatcaaaggctgcacagacaacttgactctcactgtagccagatctgaaca

SEQ ID NO: 522476 - DNA, 356 bp, Homo sapiens
aattgcctatactggtgtctaagtctccagcccttcactcaatctgcctaatggaccttcaggggaatctgaccttccatgcatatccatttccagctcacaaacagttttgtaaaaatggactaagctcaaccacaggggaagaaggaccataaaccttcaaagccaaaaggaagagacttgggtgaaaacctgcctgtgtgacgtcatctctctgaacttcaatttccttgtctgtaaaatgggaaaagaaatgggacctaccatagggttgtcctgaggtatgaatgagacaatgcacatttaaaatccttgtatgttcaataaattatctcgttgacttgaaaaaaaaaaaa

SEQ ID NO: 522477 - DNA, 1956 bp, Homo sapiens
taggcttttgaggcagcctagcgcagggagcttctgtggtgagggggcaggcggagctatgaggaagaccggcagatagctgtcgtgatcctcttggcccagactagtggagataaatacagtctagttaaaacattatcgtcaactaggtccctacgtatatgggcttaggcgtaaaagttctcaaagcgataattaggaaaagtaggcttacccgaacttacacgcggacgatgaatacgtgagaggactctcggagaacgacggtcagcctgttgcgggcaagggtccaccggcctaacggcgggttccataaacacgcagttaacggcgagggttcggagacttgaagggctttcctatccagtgggtaggtaccacgacacgtgtttttctacctacgacccattgggcgatgaaaagggatattaggaagaagcccgcggaatttgaattgaccaatatgagaaggggggcataggtgcttgaacagcatttaatgcgtgagggtgttgaattaataacccagtttaaagaggtacagggttatacaacagttgtgtacgggtgagacaccaatcaatagggagaggcgatcttttgactaaagagattaaaaatgcgagggggtgattaaaaaacagagcttttagaaaaactctgaatggcctggcaggggaatgacttttgcgctcactttgacgacggccctaaggtacaacggccattcatcctaacacaggccagacggaccactgggcacccgattacatgtggcgggggtggtccggtcttgccacccattggggggcgacgacaagactttgggtgtgggcacctggcgcacacaacgactttcggggaccgcgacaacaccactcttcgacgagcgggctttcacaccacacactctgttcccgcaccacaagcactctccgggcagagtgggggcgacaaccaaccacaagcacaaaaacatgtcgtcggccgccgggacgctaaccattggcgcgcccggagcatactaatctatcaccagtgtccaagcacggcatggttcatcgccgtccgtcacgccgcgagacgcagcagcaacgacatacgcaacgagccagcagaaagaaggactacgccacgaggacgagacagccaggccaccacaacgagcgcagcaagccagcaccgaaagcgcgacgacaggagagaagcagggggaacgcgggggagcaggcagagcgagacccggagccagacgcagagaagaagagcgaagcacagacgcgggacccgcgacgcagaggaagcagaacgcgaagcagccgcgggggacgacaacacgccagagaacggagagcacgcgcgacgcgaacaaggagagaagaccggagagaaggggaggaggcggaacgcaggaggaggccgggacacaggaagggcgcaggagagagggcgggagggagcgacaggcaaagaagagcaggaacgggcaggaagcgaccgcaccagcgagaggaggaaagcaccgaagggacaagccaggaggggaagagagaggaacgagcggagcgaggactggggagtgcgaggcggggacaggagagaagggagggcagcaagagagatgaacagggcaagcagcgcggcagaggaggcgaggagggaggagcgagcggcgggcggaaagcgagcgcaggacggagagacgccgagagaagcagacacgagagcagcacgggaagaggccacagagcaagcgacgcacaagaacaagagcaacgagcgagccagcgccggcgcgacgagagcgacgacacaggagaaggacgtggaggagaacgcaagggaaagaagcagacgggacgcgacagcgacaggcctacacacggccaagagacgcgggcacgaagggacggcgaacagacagcgatgagacaaagaagaagagagcgagcaagt

SEQ ID NO: 522478 - DNA, 541 bp, Homo sapiens
cccctttctctctctctctctctctctctctctctctctctctctctctctctctctcgctctctcgctcttcctccaacttccttcatacagtgacagagaaagcctgtgtgccttttctctctcgtaatagaaaagtggggagccgctggggagccaccccattcatccccgtatttccccctctcataacttctccccatcccaggaggagttctcagcgcctggggtggggccccggtgtgtgtgcgggggaccgatatccaactgctgtgtgctgacgaaggaacgagacttctctcttgaagcagtgtggctgttgtatacatatttgaactctattaccaagtagaggttgtgtgttaaaaaaacacaaaaaaaaaaaaaaaaaaaaacaaaaaaaaaaaacaaaaaaaaaacaacacaaaaaaacacaaaagcggaggcggggcgcgcgacatctcacatctaacccgccagggggggcggccttccgcgcatcgccccccgacggcagcgggctcgcaccagtggccccctc

SEQ ID NO: 522479 - DNA, 356 bp, Homo sapiens
ggaagacaatcagtttgacgggctacattgctgatgattactgctagactagcaggacaatgatcacacacagaaacacacatcagatacacccatagacacacagatgccacatgaggcattcacagagaaacacccgtagtacacaccaggatacactttcacacattgattcaccactcatagacacacataatcacatcatccatttggcacacacccattaggcatcatcatcataaatgagacacacacagacacacaccctttgtacacacactcacacagaagcacccaccctttgggctcacatcatcatgacacatatatgatcacggtctatctgacccatcctt

SEQ ID NO: 522480 - DNA, 155 bp, Homo sapiens
tgctaagatctagaagtaatagaaaagatccaattacacttggaggtttcaacactctaattaatatacagaactagtagacagaaaatcagcaaaaatatacaagaactgaacaccatcatcaaccgtcattacctgacatgggtagtcacaga

SEQ ID NO: 522481 - DNA, 228 bp, Homo sapiens
attagaggatcctggagcaggaactggttgtcatcagtacactaattctagaaattttcatcataccaaaaagaaacctgtattcattagcagtccacatcgggatgtggtagagttaggcagttcacatcgggatgcggtaaagttaggcagttcaccatctgggacgaggtttaggccagagttagagttcccatcgggatgtggtaagttaggcagttcaccatc

SEQ ID NO: 522482 - DNA, 318 bp, Homo sapiens
agtgctgtgacggaatgtattttagcaacacgaacgatatagaggttgatggatatatcacactatttttcgccgcaaggtttaccaaaaagatgaatcaccattgagagcaaaagttaaaagactgatgggttttcgaggtatgcagatgtaatacattcaataattgcaacatatggaggtggttaaatgcaaccgatatcaatgcaaggtgtctatgtttaactcggagaactacaaattcaactctcagggtactgcgaaaagctcagagtgtactcttgtatacctacagcctcctgcatacgatttacacaa

SEQ ID NO: 522483 - DNA, 105 bp, Homo sapiens
atgagtgactccaaggaaccaagactgcagcagctgggcctcctggaggaggaacagctgagaggccttggattccgacagactcgtcgtaatcaaaagtgctga

SEQ ID NO: 522484 - DNA, 487 bp, Homo sapiens
gacccacacgtacgagtacgccacaccgcactggcaggtcgatgtgccattgagtgcggtggtgagcgtagactcgttgacgtcatggcagtcacgttgaaaccggggtaccgagtgcgtaacgctccgccagttctccgttagcaagcttgggtgaatagaccagagctgacacaccgacaagtaagccgcctgccgtgcttgcgaccaactccgtcagtgcggccactgctgaccgaatggcagcttgcagcgtgatggtaatcccttctgctgtagcgataggtcccgactgaggtcatgactatcgcttgagtcgcagaagcagtgcccgacagtcgatcggtattggctactcgtaccgcttcaatacgcgcttgggccgttgctacctgctgcgcacgttctgcgaggtcgctgattgcattggaggcgttggcaagaaaccgcgcggactctgacttcagcacaaaatcatggtggctga

SEQ ID NO: 522485 - DNA, 1054 bp, Homo sapiens
  misc_feature (11)..(11): n is a, c, g, or t
ctcctgcagangtgatcctgtgacagtatttgcctcactttccccagaggtctgctgatcatcgaagctccccaggtccctccttactcaacatttggagagagcagtttcaacaacgagcttccccaggacagccaggaagtcacctgtacctgagatgccagtactggcccatccttgttttgtccccaaccctagggcttctctgattccaggatacattactttagctgaactcagatttagtgcaagtaaaatgttagagggtgcgggggtgaggactgaccacagattccctggatagtgtagtggtagatttctccacaggatagcgcaattggcaaatcatgcttggttgtgttaggccaaaatactagttttgctttctttaccttttctatcttgatgaaaatgttgcacattctatagttgcaaaacacataaaaggggacttaacatttcacgttgtatcttacttgcagtgaatgcaagggttacttttctctggggacctcccccatcacccaggttcctactctgggctcccgattcccatggctcccaaaccatgccgcatggtttggttaatgaaacccagtagctaaccccactgtgcttccacatgcctggcctaaaatgggtgatatacaggtcttatatccccatatggaatttatccatcaaccacataaaaacaaacagtgccttctgccctctgcccagatgtgtccagcacgttctcaaagtttccacattagcactccctaaggacgctgggagcctgtcagtttatgatctgacctaggtcccccctttcttctgtcccctgtgtttaagtcgggatttttacagagggagctgtctccagacagctccatcaggaaccaagcaaaggccagatagcctgacagataggctagtggtattgtgtatatgggcgggacgtgtgtgtcattattatttgagttatgctgttgtttaggggtaaataacagtaaataattaataataataataataataataaaggagctgacgttcttaaaaaaaaaaa

SEQ ID NO: 522486 - DNA, 1054 bp, Homo sapiens
  misc_feature (11)..(11): n is a, c, g, or t
ctcctgcagangtgatcctgtgacagtatttgcctcactttccccagaggtctgctgatcatcgaagctccccaggtccctccttactcaacatttggagagagcagtttcaacaacgagcttccccaggacagccaggaagtcacctgtacctgagatgccagtactggcccatccttgttttgtccccaaccctagggcttctctgattccaggatacattactttagctgaactcagatttagtgcaagtaaaatgttagagggtgcgggggtgaggactgaccacagattccctggatagtgtagtggtagatttctccacaggatagcgcaattggcaaatcatgcttggttgtgttaggccaaaatactagttttgctttctttaccttttctatcttgatgaaaatgttgcacattctatagttgcaaaacacataaaaggggacttaacatttcacgttgtatcttacttgcagtgaatgcaagggttacttttctctggggacctcccccatcacccaggttcctactctgggctcccgattcccatggctcccaaaccatgccgcatggtttggttaatgaaacccagtagctaaccccactgtgcttccacatgcctggcctaaaatgggtgatatacaggtcttatatccccatatggaatttatccatcaaccacataaaaacaaacagtgccttctgccctctgcccagatgtgtccagcacgttctcaaagtttccacattagcactccctaaggacgctgggagcctgtcagtttatgatctgacctaggtcccccctttcttctgtcccctgtgtttaagtcgggatttttacagagggagctgtctccagacagctccatcaggaaccaagcaaaggccagatagcctgacagataggctagtggtattgtgtatatgggcgggacgtgtgtgtcattattatttgagttatgctgttgtttaggggtaaataacagtaaataattaataataataataataataataataaaggagctgacgttcttggaaaaaa

SEQ ID NO: 522487 - DNA, 215 bp, Homo sapiens
cagtgtctcgatcactgtactagctagaaccaaagtggagattacatatcccacgtatgcgtgagccctatagctgcagagcagtttaaattcacacataagctgtctcgccagatcgcttctacccatatcttaaaactcataggacctggcggtgcttcatactccctcttgaggagcctgtgtggtattcttgtcctcccagatcaacctca

SEQ ID NO: 522488 - DNA, 709 bp, Homo sapiens
  misc_feature (42)..(42): n is a, c, g, or t
  misc_feature (49)..(49): n is a, c, g, or t
atggggggctacttccggtgttctactgcaggatgcaggttntttctcnggacctccccataccagggtctactctggctccgatccatgctaccaacatgctgatggttggtaatgaacccagtagctaaccccactgtgcttccacatgcctggcctaaaatgggtgatatacaggtcttatatccccatatggaatttatccatcaaccacataaaaacaaacagtgccttctgccctctgcccagatgtgtccagcacgttctcaaagtttccacattagcactccctaaggacgctgggagcctgtcagtttatgatctgacctaggtcccccctttcttctgtcccctgtgtttaagtcgggatttttacagagggagctgtctccagacagctccatcaggaaccaagcaaaggccagatagcctgacagataggctagtggtattgtgtatatgggcgggacgtgtgtgtcattattatttgagtcgggatttttacagagggagctgtctccagacagctccatcaggaaccaagcaaaggccagatagcctgacagataggctagtggtattgtgtatatgggcgggacgtgtgtgtcattattatttgagttatgctgttgtttaggggtaaataacagtaaataattaataataataataataataataataaaggagctgacgttcttggaaaaaa

SEQ ID NO: 522489 - DNA, 580 bp, Homo sapiens
  misc_feature (42)..(42): n is a, c, g, or t
  misc_feature (49)..(49): n is a, c, g, or t
atggggggctacttccggtgttctactgcaggatgcaggttntttctcnggacctccccataccagggtctactctggctccgatccatgctaccaacatgctgatggttggtaatgaacccagtagctaaccccactgtgcttccacatgcctggcctaaaatgggtgatatacaggtcttatatccccatatggaatttatccatcaaccacataaaaacaaacagtgccttctgccctctgcccagatgtgtccagcacgttctcaaagtttccacattagcactccctaaggacgctgggagcctgtcagtttatgatctgacctaggtcccccctttcttctgtcccctgtgtttaagtcgggatttttacagagggagctgtctccagacagctccatcaggaaccaagcaaaggccagatagcctgacagataggctagtggtattgtgtatatgggcgggacgtgtgtgtcattattatttgagttatgctgttgtttaggggtaaataacagtaaataattaataataataataataataataaaggagctgacgttcttaaaaaaaaaaa

SEQ ID NO: 522490 - DNA, 1183 bp, Homo sapiens
  misc_feature (11)..(11): n is a, c, g, or t
ctcctgcagangtgatcctgtgacagtatttgcctcactttccccagaggtctgctgatcatcgaagctccccaggtccctccttactcaacatttggagagagcagtttcaacaacgagcttccccaggacagccaggaagtcacctgtacctgagatgccagtactggcccatccttgttttgtccccaaccctagggcttctctgattccaggatacattactttagctgaactcagatttagtgcaagtaaaatgttagagggtgcgggggtgaggactgaccacagattccctggatagtgtagtggtagatttctccacaggatagcgcaattggcaaatcatgcttggttgtgttaggccaaaatactagttttgctttctttaccttttctatcttgatgaaaatgttgcacattctatagttgcaaaacacataaaaggggacttaacatttcacgttgtatcttacttgcagtgaatgcaagggttacttttctctggggacctcccccatcacccaggttcctactctgggctcccgattcccatggctcccaaaccatgccgcatggtttggttaatgaaacccagtagctaaccccactgtgcttccacatgcctggcctaaaatgggtgatatacaggtcttatatccccatatggaatttatccatcaaccacataaaaacaaacagtgccttctgccctctgcccagatgtgtccagcacgttctcaaagtttccacattagcactccctaaggacgctgggagcctgtcagtttatgatctgacctaggtcccccctttcttctgtcccctgtgtttaagtcgggatttttacagagggagctgtctccagacagctccatcaggaaccaagcaaaggccagatagcctgacagataggctagtggtattgtgtatatgggcgggacgtgtgtgtcattattatttgagtcgggatttttacagagggagctgtctccagacagctccatcaggaaccaagcaaaggccagatagcctgacagataggctagtggtattgtgtatatgggcgggacgtgtgtgtcattattatttgagttatgctgttgtttaggggtaaataacagtaaataattaataataataataataataataataaaggagctgacgttcttggaaaaaa

SEQ ID NO: 522491 - DNA, 1363 bp, Homo sapiens
tttttttggggggtctaaagggggtaaagggggggcaaagagggtaaaataagcgggccctatatttacaaagatattttagaggggaatataatttcctaggaacaaggggcctatgaaaaggggtggttgggccccacagtatttacaaagccttgtgccgcgttgtttataccccgcggttgcggtgtgtagcggggtaaagaggtggttgtgggtgttataaagagttcggggaacattgtggatttgtgtgttttataaccctcataatgtgtgtgggggaacaagctctcagtgagagtgtgaaaaagagtttgtgtgggaagtgactaattatattatatatcgcacagacgggggggggctctcacaagcggcggggagttaacatcccctcgcaagtggggctcaacgcgcctcagaggagagtctcgcagagcgtgtgcccgcgggggatcccataggaaacataggagggcgggggaaagagttatagtgtgtgagagagagtgtgtgaaaaaataatttaaatcctcgcccgcgcgagtagaatgttgggggaaatatatatttttttataaaaaactcgcgggagagaagggggggggcggactctcccacaaaagagattatatctccccctcgacgaggaggggggggggccccacaaaatggtcttttatcagcgcgcggtattaaccccacgaggattctaatcgtcttgtgtgtgctacacacaggaggggtggtgggcgtcccccaataatatgagagggaggaaacgcggcggaatatttattaatataacgacgcctaaataaaagagacccaccatggtggggcccccgaagacagcagtagattaccaccacaaaaagcgctcctccgagtacaacacccgggcggcgaacacccacaccgcgtgccgacaataacccacgtgggagggagaacccaccccttgaggggcggcagaaaaccgcgggaacacccccctatataaaccccacccagcggggaggggggggggggggacaccccattatatcatggtgtggggggcacccaaaaacaaaaatattaaaacccctcctaagcagagagaagaataatttttaaaaagaaagggctccttcatacaagggaggggggtaaaaacaatacattattttctcaaacaaaatttcttttatcaaaacgacaggggggggggtaatatacacacagcggtgtggtggtgtttaacacacaagataataagagcttcgtggacgaaattataatggtacccagtggtgcaggcatgcgtattggtaaaaagaaaacattttagtggggacaataaaaaacgcgaggtgaa

SEQ ID NO: 522492 - DNA, 277 bp, Homo sapiens
cagccagacagataatgatgggcccccggtcccggtgtttttatgagaagtgtggttattcaagtgttttttcaaaggcatgtgtctccagacagctccatcaggaaccaagcaaaggccagatagcctgacagataggctagtggtattgtgtatatgggcgggacgtgtgtgtcattattatttgagttatgctgttgtttaggggtaaataacagtaaataattaataataataataataataataaaggagctgacgttcttaaaaaaaaaaa

SEQ ID NO: 522493 - DNA, 630 bp, Homo sapiens
ttattattattattattattattattattttgaaacagagtcttgctctgtcacccaggctgtagtggcatgatctcggctcacgtgcaagctctgtgctttcccgggtttcatgccattctccgtgcctcagcctccgtgaactagctggaactacaggcgcccgccaccacaccgtggctaatttgtgtgtgtgtgtgtgtgtatgtgtgtttttatagtaaaaacggggttttcctccagtgttgtggctcaggcgtggctcctcgaaacctcccaaccctcagtgttgactcccaaagtgtgtttaggcattacacgggtgttgagccaccacaacccagccagttagtgtggcttttataaccttcttcaggcgtggagttacaggtggcacgaatcacggcttcacgtgcagcctttgaccttctgtgggtttcaagcagtcctccttacctcagttccccaaatagctgaaactacaggcacgcacaaccatacctgggctaatttctggtatttcttgggtgaaaggcaaggtttccaccatggttgccccaggttgggtctcaaactcctaagcctcaagcgatacctcccaactcgacctaaccaaactaacgaggcctt

SEQ ID NO: 522494 - DNA, 127 bp, Homo sapiens
aagaacttatctttatcggagagcctaagacatcataacaataacaaatggccgggcatggtggctcatgcctgtaatgccagctactcgggaggctgagacaggagaatcacttgaagccaggagg

SEQ ID NO: 522495 - DNA, 699 bp, Homo sapiens
cgagtgacaagtaatttgtcatgtcgacgaggcggtaacctggtgcagttggccaaagaatttgactaagtggcactgtatctagggccgtacttttaagagcggttaacccaacacgttcaaattctgcatttaaaaatggtaaatcaaaattaacattgtgcgccacaaagattgtgccttgtagcatcgcaagaagtgtcattgcgacgtcttcaaagaacggtgccccttttaccatgttttgggtgataccggtcaattgtgtaatattgcggggaatttgctcgcccggattaaccaatgttgaaaattgattaatgatttttttgttttgtacgaatgcgaccgcaatctgaataatacggcccgtttcgctcgttgtacgagttgtttctaagtccacaaccgcatagatgtctctatttagcatcagagcgtaccacgaccttcttttataatatttaaattataccatacgttttactgattcatttccctatttataggcgggtttggtatgatagtagcagtttaaaaacaaaaatgagaatggattggtggtttctaatagtggaaaagctagcgagtggttctagccacgccaaagtgatcttgcttggcgaacacgcggtcgtttatggccaacctgccattgccctccctttaccggacttggcaatgacagcaacaatcgag

SEQ ID NO: 522496 - DNA, 1159 bp, Homo sapiens
  misc_feature (388)..(388): n is a, c, g, or t
tgaaacactatgccagttcttaaaatgctgctttgtcctcggtgagaacatccataattcggggcccctgagttttacccagactcaaggagttggtaagagggttaatagccagatagtagaacccagtgacggatggattgcggccaacagattcttgatatcttgaaccaagatgtgaagacatagaaatgcttgtgaggtgcgattctaagcagatcctccatggtctaatttagcaacctgttgtcgtggatgcgacagcttctgaccgttgcttgactacaaagcctgtggaggctctgatgatgtcccttgaatgggctgctagacctcagaggactgcaccctgagcaagtgtaaacggacaccattcctttacttgtgncccgtgggtgcaaaagccaatgctgagtgacgcttatacagacttacctgtatgtacttgcccaatactgtgtcgatacgaaccatcgtgctgagaatcgtcttacatgcatacatttatgtgtagtttgcttaacaggcactacaggaaagttggaacaattgaccgaacaaggtcaggaatgcacgacgatttggtgcccgattcctcaatatttcgtgtcttgctagattaatgtagtaactgccgagcgtgaaacttcagtctagtacacaggtccacggaccgaacatatgccaccagatgagtactagtttctatggtcgtatgcaacgtacaggctcatattacactatgtccccctggccacaattcactcagtcgtccagtctgaccgaacgaagcacaagatcttcggaaccacattgttcctttcactgcctgttttagcacgttggccaacgtataaaaggtagttaattttcggggatagagagggcacggacgctggtgtacaccacacgactcccacaaacgtaatgtgttccaagcactttcaatacacaaacagaaaattcatgggaccgccattttcgcatataaaacaacgcgccaaaagagcatcacttaagagccaaaggcagattgccgcaacaatgtgcaacatgaggcccaacaaactccccatggatacgtgtagggcgttacccagcagttggggggataatcctggacacataatgatgtgtcgccaccaacatgttcccaacc

SEQ ID NO: 522497 - DNA, 230 bp, Homo sapiens
ggagcaaggaaggccacaaaagcagacacagaaggcaagacactcatagactacctcatgccatgaaggataccacacacctttctccacaacaagcaggccacagaaattagaattcctcttctcaaagatgagttatggacactagactccctcttcctcaaaaccagccatgaaacctagatcagttactccaaaaaaccccaaccctccacgtacgtgtgtagtag

SEQ ID NO: 522498 - DNA, 200 bp, Homo sapiens
gagcgctcctgattgtatctattcacattagtatatagcgaatttcaaacatcagttatctgcaacatgctggcaacctttaactgatatttcaatcaaccggtggaggaataaattaagaaatcccttcacggatattccgtgcatttacactgcttaaaacggtacacgtgttcatataacagtgtaattctcggttc

SEQ ID NO: 522499 - DNA, 547 bp, Homo sapiens
  misc_feature (31)..(31): n is a, c, g, or t
  misc_feature (53)..(53): n is a, c, g, or t
  misc_feature (91)..(91): n is a, c, g, or t
  misc_feature (107)..(107): n is a, c, g, or t
ccccccttgttaaaccagccccatttgccanttgcaaaaatggaacttagccnaatgccatccattcaccaagcaaattaaagaaacgtgncatatatatcttgtgnaatgctactcagccataaaaaggaacgaaataatggcattcacagcaatctagatggagttggaaaccattatgctaaatgaagagactcaggaatgaaaaaccaagctggtggcaagcacctgtaatcccagctactcgggaggctgaggcagagaattgcttgaacctgggaggtgaggttacagtgagccgagatcacgccactgcactccagcctgggtgacagagcgagactccgtctcaaaaagaaagaatgatacagtggactttggggcttcaaggggaagggtgggaggggtgtgaaggataaaagactacacattggatatagtgtacactgcttgggtgatgggtgcaccaaaatctcagaaatcaccactgaagaagttatccatgtaaccaaacacaccacctgttccccaaaaacctgttgaaatt

SEQ ID NO: 522500 - DNA, 178 bp, Homo sapiens
atgatacgagtcgagctcgtgaccttttgattgaaagtgagagacgtgttactcttcctttcacttgaacacttacaggtcatcataaggttattaattggcctaatttcaacactgccgtgtctccaggaataggcaggctcagggagaggaagagagacagaggaaggcccggtgg

SEQ ID NO: 522501 - DNA, 331 bp, Homo sapiens
  misc_feature (286)..(286): n is a, c, g, or t
tggggcaacacagcaagatcctatcacttaaaataataataatataaaaaattaggctgggagtggtggcttactgtgatcccagcactctgggaggctgaggcaggcggattacctaaggtcaggagttcaagactagcctggccaacatggtgaaaccccatctctacaaaatacaaaaattagccaggcgtggtggaacatgcctgtaatcccagctactcaggaggctaaggcaggagaatcacttgaacccgggagggagcagttgcagtgagccaaaatnacaccactgcactccagcctaggcgacagagcaagatttcatctc

SEQ ID NO: 522502 - DNA, 306 bp, Homo sapiens
ggcccagttcttacccttactgggaggtggagcttgcagtagccgagattgcaccactgcactccagcctgggcaacagcaggagtctcaaaaaaaaaaaaaaaaaaaagaagcccaccatgcaaagctctcaggatagttgccctatgtggaaaataccagggggagctgaaatgtggcccgggactccagagcagcaccgtccaatggaaccttgggcagtgatggaacgggtctacaaattctgtgctgcccattagttactcattgattttggaccatttgggaagggtggcatatggcaaa

SEQ ID NO: 522503 - DNA, 153 bp, Homo sapiens
gtggaagtgacatcgtctttaaccctgcgtggcaatcctgacgcaccgccgtgatgccagggaagacagggcgacctgaaggtcaactactttccttaagataatccaactattggatgatatcccaatgttcattttggggagacaatttgg

SEQ ID NO: 522504 - DNA, 521 bp, Homo sapiens
  misc_feature (138)..(139): n is a, c, g, or t
ccagtttgaatttcgttgcggcgaagaagcggggggtggtatctcaccgagggtccgattagccttttctctgccttgcttgcttgagtttcagcggaattcgaaatggctgccggtaaggctggaaaggactcctanngggggccgtattcatagacacctaaaatctaggacgaccagtcatgccccgcccgcgcgcgactcccgctgtgtacagcgcagccatcctggagtacctaaccgcagaggcacttgaactggcaggaaacgcacccgcagacgaagaatcggctattttcatcaaggttacctttgcttgttggtcgcgcccattccacaccaccacagaccttctgctttgtgaagaacggtccccccccgccctgtctaaagccatgcccgagaattctctgttttctcagacctccaaatcaccttaaccgcctcccccacgcatctgccacccccgcgctcctcccactctcggcacaagccaccggctgcaactacggaaagtcaat

SEQ ID NO: 522505 - DNA, 430 bp, Homo sapiens
agagacctagaccttccctctgacagagcctacccaaatgaacaaaccctggtaatatgacaaaacaagacgcttcaacaccccccaaaaaacatactagttcactggcaatggatccaaaccaagaagaaatacctgatttacctgaaaaagaattcaggaggttagttattaatcagggaaggaccagagaaaggtgaagcccaatgtaaggaaatccaaaaaatgatacaagaagtgaagggagaaatcactcagggaaatagatagcttaaagaaaaaacaatcaaaaattcaggaaactttggacacatttttagaaatgcaaaatgctctggaaagtctcagcaatagaattcaacaagtagaataaagaaattcagagctcgaagacaaggtcttcaaattaacccaatccaacaaagacaaa

SEQ ID NO: 522506 - DNA, 2430 bp, Homo sapiens
tcagctcgcactgcatatgcaacgcaactcaactcatgctgcgtatgcaactcaactcacactgtatgcaactcagctcgctctgcatatgcaattcaactcgcactgcgtatgcaaatcaacttactgcatatgcaactcaactcactgcgtatgcaactcaactcgcactgcgtatgcaactcaactcgcactgcgtatgcaactcaactcgcactgcgtatgcaactcagctcgcactgcgtatgcaactcaactgttgcaagtacttatttccggccacttcctttttctaactaccacaccaagccagtatttctcctccctgaagtcagcccaggatgaggcactagacagcaggacatgctgtatgcccttgggcctgctggaagtatgcagactagccagccccagacttcatcctgccctgtcctgcctttcctgtgaaaaccctgtggcctctgcctcccctggctctgacttctgcctcctgcccagctctgcagctccccttgggccctgcctggagtgatgtgccgccttctcttgacactgtgagtgataaactttccatgtcaggaacctgtgtgtgtcactcactcaccttgacgagtccgcgtctaggccccaccagtggtgtggttttcctcatagtctctctacctaagcacatgtctgtgacaaggtcttacccagcccagggattcttgaactatctgtaggaactgccatgttgactcctgggcagttttattctttctctctactcgttcaaccttcttagggagtgacgttttttccaaagtggttgtgaaacagcatctccttggggtgttggtttgcacttctcttcattactgatagtatgaacatggttttgcttacgctggctattttcctttttggatgaagtacctggtcttgttttttcctggtttgtttgatctttgttcttttttagaaatagtgaggctgttgtgaggtgagtcaccacttgtgacttagaagattgcagtggtttccacttcacctgtttccacttttgtgatgatgccttaaggaaaaagattgtgccaggtgtggtggctcaggcctgtaatcccaacactttgggaggccgaggtgggtggatcacaaggtcaggagatcaagaccatcctggccaacatggtgaaacgccatctctactaaaaatagaaaaattggctagatgtggtggtgcacgcctgtaatcccagctccttgggaggctgaggcaggagaattgcttgaagatgggaagcacagattgcagtgaaccgagatcgcgccactgcactccagcctggcaacagagtgagactctgtctcaaaaaaaaaggaaaaatatttcttaattttggcatactcaaatttatacaacctttcctttatcttcatcagaaatttcttttctcctaaggccttaaatatgctgtactattttggcttccacagtttctatgttttatcccaagttgcttaatccatttggagttgatttttgttgaccgtatctgtagagtgtaatgtcatttttcccactatggacataaaaatttttgcaaggcctcttttttttaatgaagaaaagaggtttattttgttcacaattctgaaggcctggagggtcccagaagcttggcaccagcacccactaggctccagatcggggcctcatgctgacttccgttttcacacaacgagtgggaaacaggtgtcctaacactgtgagagaaaaaatcccaaagtttagtttttcccattcgcttgccctggcctccaggcattcctgcagcagcaaacacatcatcagccttaggagctggcctgtgaggttgaccactctgtaggtggacaagcctcgcccgagaagagacatgagcagttctgcgtaggctttaagacagaatcaacatggaaagcacgacccacatggtttcaatagaacttgcctcctgaacctgactaggttactcgcctgatgaaccagtatctccatcacccgtgggactgacagacccagagtgtcataacctaaaattcagaagtgtagactataatcttaaattattcagcatatgtgcaacagccttggggagcagtgttatgataccaaatggctaacattcatgacctcagtatcctggaagaaaaggagaaagtgtgatgtagtaaaaccacttgaaaaaataatgatgaaacatttctcatatttggtgtaagataaaaacttaagtttgaagaggttccatgagccccagacaggataaacctaaagaaaaccaagcccaggccgggggcggtggctcacacctgtaatcccagcactttgggaggccgaggtgggcggatcacaaggtcaggagatcatgaccatcctggccaacacagtgaaacctcgtctctagt

SEQ ID NO: 522507 - DNA, 1429 bp, Homo sapiens
cagcccaccagggagaagagaagccatgagaggcaggcccgcaccctgtgtccacagacccgcaccttcccgaattcccattagaaccctgccgagtccatatcatcatgacgctcatggaacctcgtttcttgtgagtcattcttattatcattatatctcccacctcttattatggcttctaaagaaaaggtcatattatgaatgcaaagggtcacatgaactggccagtcagcatcacgagagatgcacatccatgccagatgagaccacatttatacactggacattatcatcattagacacgcgaccgacggtcatggccatagatgaggaacctgccatgaacaatcaaacgattggcatattccaagaaagaaccagggacacataatatatgacgcaatcatcagtattatacccttgggtgaacccatgaattttaccatggatggtacccaccatcggaaaggcgggcaagcatggatgcacaaagcgaagacatcgttgcccacagtgattgccacatgacaagaacaattacacatataaggacacaaaccaactagatcccagatatacaccatatcttaatggggccgcaggaaccatcaccatggagtatcaatagaccacagtggacaatcacaccaatacaaattcgagatagacattcacaattccctgggaaagtgtaagagccacaaaaggaattgagcatagaatcccaaaggacaaattaggagggaaggtgaagatagacataatgaatatggagatatgacgaaaaactgagatataagggagatcaacgggagattccaaggatcatggaaaagtatagtgaagagcaagaatacaaaaagtataggacatataaaaaaacaattagccaatgatagaaagaatagggatattataaggcaatgccaagcaggggtccctagcaaaaacacaacgaccaatggattacaccacaaccgcaatacgtgcgaagacagcacagaagttaaaccaaacgaaggaacacaacaaaggaagaaatgtgcggcacaaaacgaggacattgaggcgaccccagaacgcgtatgaaaacacgacagcaggaaccggaagacaccaacaaaggagacaacacaggcaatcacaacgggtgatttcacaaacaaagcgagaaccaacggacatcagaaacaagagaacagcagaaatggcccatagagaatgatgcaagactcaagcgccaacgtagaaaaagacacgacacaagggagagacgagaagtacccagacaagccaacagaaccagcaattcaggaggtcaaaaatgaaacaaggacatgaaataagtgccaaaaaaaggacggaacacaagcacaagagccgacaagacaagagagaaacgtagacgagagaagcatggaaatac

SEQ ID NO: 522508 - DNA, 316 bp, Homo sapiens
attaccttctgtattgccacgttgatagagacaatctggcactcagacaagccagctactctctctactcatctcgacaggccctactctcaggccgcacttccacagatgtccagctagggataggtcattcagaaaaatgatgatgtacaaagctgatggctaaagcccctccatgactctgggggtcacagccatagacccaagctgtaggtcatttaaagaagtatctccaacataaaatcttagtgtcatgcacacaggtatggccaatgccctctccactcatgttgtcagggctcaacgggttggtttg

SEQ ID NO: 522509 - DNA, 308 bp, Homo sapiens
gctgggggaaggctgcgtggggaagacgtcgctggtgctgcgttactgcgagaaccaggtttaacgacaggcacatcaccactttgcaggcatcattcttaacaaagaggttaaatattggtgggaaaggggtaaaccttgccattttgggatacggcaggtcaagggagattccatgcattggggtccactttactacagagattcacatggagcgattttagtttatgacatacacatgaagatcttttcagaggtaaaaactgggtcacagaattacgggaaatgttggggaaatgaaatctgtt

SEQ ID NO: 522510 - DNA, 135 bp, Homo sapiens
cgaaaaaaaaaaaaaaaaaaaaaaaaaaaaaaaaaaaaaaaaaaaaaaacaaaaaaaaaaaaaaaaaaacttatggaccccgcctcctggcggaccatctttccctaccgggagtcccggaccggctcgtggtgg

SEQ ID NO: 522511 - DNA, 351 bp, Homo sapiens
cacgaggacgacacctccacccatgttatcctgaggggcgtaacaaaccatacccaatttcgcgcgtatgttgaggtgaccctgatcccaagatgcgcagttttgaccagcgccctcaaaatgcaaaactcgctgaatttccccattatccccacatgatgtcacatgagaaagtcaagcacacctctcaagttctgaaggctgcgagaatttctgccaaaaattacaaagtccaaaggtatccgaggcctgtattacagattcagtttctgcgtgaacggtaccatcatataccgagcagcaaaattttgtcttgtgcagagggtgaaaggcaccatccacgaatccaag

SEQ ID NO: 522512 - DNA, 843 bp, Homo sapiens
  misc_feature (27)..(27): n is a, c, g, or t
  misc_feature (86)..(86): n is a, c, g, or t
  misc_feature (107)..(107): n is a, c, g, or t
  misc_feature (156)..(156): n is a, c, g, or t
  misc_feature (161)..(161): n is a, c, g, or t
  misc_feature (173)..(173): n is a, c, g, or t
  misc_feature (176)..(176): n is a, c, g, or t
  misc_feature (190)..(190): n is a, c, g, or t
  misc_feature (194)..(195): n is a, c, g, or t
  misc_feature (221)..(222): n is a, c, g, or t
  misc_feature (254)..(254): n is a, c, g, or t
  misc_feature (353)..(353): n is a, c, g, or t
  misc_feature (465)..(465): n is a, c, g, or t
  misc_feature (591)..(591): n is a, c, g, or t
  misc_feature (661)..(661): n is a, c, g, or t
  misc_feature (688)..(688): n is a, c, g, or t
  misc_feature (751)..(751): n is a, c, g, or t
  misc_feature (802)..(802): n is a, c, g, or t
aagaggggggtgtatgaggggcatctncggggtgggttttctttaagaggtgagaacttggaatcttgcaagcactgggagtggantcgcggcggcggcgcgagacngggagcagggagcgtcctcgggccacctgcctcaggaagagtccctctngcggncgtccttgcctntgncattctggtgctgnccgnngctcttcaggggtgcagagccggcgnngtcatcatccaggacgtcctcgggcttccggngcttctcgtagatgaagatgatggtgaccagcaccagcacctcagccacgatgcccaggaagggccagagggcggccaggtggctgcgcacgcggaggnacggatggcctggtcggagcccttggcagctggtgccgttgcaccggtactggccggggtcggcctccatgtgcaggttctcaatgtgtagctctgaccggccctgcgaggnactcacgaagaacctgcgctcggagccgttcatgagggccttgtcctcagagtcagtgatcttgtaccagcgcccagttagtgacaggtggcacggactctgacttgcagaccagcatggcgcgtntccccctcgttgatgtgtgctgagcgacttcacagccttcactctgggaggcccgtggagctggatgtcngccgtgcccatgggctcggggaggaanacgcaggagtactctccccactggtcgtccgagtgcaccttgaactccgttttctggccgggnagcgcatcctccttcagcaccacgccccccttcagccagcggtgccctgtnacctctgtcgcgctgtcattcaaggagcaggtgaggagtat

SEQ ID NO: 522513 - DNA, 1051 bp, Homo sapiens
tgttgtgggttgtctggcgtttgcgtctgtgtgctttgctcgccgtcgtgggttcccttttgtgcagtttccgcccccgctgcctttgtggtcccttgtgtctgtcctttgactaggcgagggctgtagccctcgtgggtctcggcgcggttcaagcttgtgcgccgccctttcccacgggtgtgtagccccttttgggggcgtgtacaagttgtccgcagagcgttgcgagggtgtgcgcggtggttgcgccgctgcgggccgcttgtgggccagtgcttgcctgttgcgccgtggtcagggcgtcccaccgtgcagaggtggtccagattttgaccggaccctggtgcggcaggtgccgtttgctttcgccgctttccagagcagatccgcgaagcctcagccaccatcatcgagccagcgggcgagtcagacaaccctttgcggtttacctcgtgggttgtgtggttgccctggatggtgatgccaccctggagcactgtccacggattccttcagagacacctgttaaggtcccggtcttatatcccgatggcccggctcacgatgattcccccccagcctgcagacttccggaatcctggccccgggcggcacccggctcactcacctccacggtgttattcttctcgccaccacccgccttggaccacgaggcactgcccacgcgtggaaagtgaggctgctgctggcctaccaacatcccagtgcgtctgccattcccacaaatgcccctggatggagggtggtgagatgtccacccccaggtggaaacccagccatcgagggcccccattccccttccagccaagcctgtaaaagtttataataatagccccaacctgcacggcgctaaggccaaaacaccagtcttccccacccgtggcctagagggccctttctttaggtggtccagaatgagcccagcctgaagccacttcacctggaattgatgtgtaggcttaaggagtatgtgacccttaccagtctcatctggtatccaaccccggctaccttgttttttccatta

SEQ ID NO: 522514 - DNA, 1096 bp, Homo sapiens
tagtactctgcgttgttataacatcgtatggggtcatcgcagaggctttgctcaggttgcaattgatgcaaaagtgcccattattcctatgtttacacaaaatattcgagaaggatttagatcacttggaggaacaaggttatttaggtggctttatgcaaaaattccgctatccatttgctccaatgtatggaggttttccagtgaagttacggacctatttaggcgaccccattccgtatgacccacagataacagcggaagaattagctgaaaagacgaagaatgctgttcaagctttgattgataagcaccaaagaataccaggaaacattatgagtgctttgttagaacgttttcattgataacaaagggtcaactagaagatgatttagtacatttatattaaatgtttgtatctaaggtactgtcttctgaattttgtaggtcctataattagtattttttaaaaaaatcatgttaataagcatctttcacagaattcgtttctttaaaatagtcaattttgtttttgcaattgtgtcaaatactaacaaattacacacctagtaattcagaaaaagatgtcttatttgtaaattcctaacaatttatgctaaacatatagattcttaagtttattaataacagcagtttaggttaaacaaacattcctggataatgcgttaaatttctgtatctgtcgccctgagctgattttgaaagatggtataagctaggggttagtatagttgtttaagttagaaaaaacatgctgttgtctgcccctcattcccttcatgaccttgggcaagtcacgtaatgtttttgtgcctcaacaattcactttttaaaaacatgatcgtatgatgaatgatattattttgttatttatatttactgtgattgataactgttgaaccaaaataataaaataattaatttaaacaatgtcaaaatcctttagcagttatgtatatattttctccattgtgtgtttaaattatgtcatgtccagttgccaagcacaatgaaaaagatgtattattttttaaattgaataaaaaattaggaaaaataaaatttctaattatta

SEQ ID NO: 522515 - DNA, 1390 bp, Homo sapiens
gctaaacctagccccaaacccactccaccttactaccagacaaccttagctaaaccatgttacccaaataaagtcataggcgcatagcaacattgcaacacctggcgcaatagcatatagtacccgcacaggcgcaacagcatgcaacaacattataaccgaaagcgataatcatagcacaggcactaaccccatataccgttctgccatcaagtgcaattcaactcagcaaatcaacgtttgccaaggcagcagcccgaagcagctaaaaacccgcagaagaccagcacgcagctaccgtaagcaacagctcaacgcagagcgacaccccgatctatgtagcgaaaatcaggtgggcacagcattggcatcagagtcagaggcgcacgaaccgtaaccagagccctggtgcatcagcgtggtctgtccaaaggaataggacagtctatacgagttgcaagcttgtacaagttgtgccacacgagacacccagtctaaaattcaccgcgttgattacacactcgtcaaacgtgttgtagagttcccacaagcaaggcaacacacagcgtcatatcgagcaccacataggggaaaacacaacccttggtatagcacgacgaggtacaaagacaagattggaaaccaagccacgacttaggttaagtgcactaaaagatgcacggaccaccgaatttacacgacaaggccgattaccaagccatcaaccgaggcgcaagcataacccgtacaagaagaatcccacacaagaaagtaattaagcttgaaacttccctacacaagacacaacattggggagaccaaagatcctgagttcaagccccccctaatacaggaacacggaaaacgcatcaacagcggacgacaaggcactcaacgggacaacaagcaggttggaaagcaaagccagtatcagacgcgaggtccgggacaaatacacgccaccagtgcagggacccaacggacactgtagcagcaccagccagccgtgggaaaccgaggaaccaacagaagcaacacaagggacgcccagcgaactagcagaaggaacgcgcaaaccccaaagaacacagcacacgcacgccacgtctaacacgccggtcacacgaggggtacaaaacaccccagacagcacgacaacgggacagtgcgcgaccacacgaaacggggacacacgggcatcacagacgacaccaacaggtgagacgaccgggcacacaccgagaccaagacacacgaacgcccgccgggagcggagagagacgacagagagaccacacacgatcgaagggagtccaaccacacaccggacgacaggcgcagcgcaagcagcaggcccgagaagcaacacaggcagcacaagagcaccgag

SEQ ID NO: 522516 - DNA, 1743 bp, Homo sapiens
tagtactctgcgttgttataacatcgtatggggtcatcgcagaggctttgctcaggttgcaattgatgcaaaagtgcccattattcctatgtttacacaaaatattcgagaaggatttagatcacttggaggaacaaggttatttaggtggctttatgcaaaaattccgctatccatttgctccaatgtatggaggttttccagtgaagttacggacctatttaggcgaccccattccgtatgacccacagataacagcggaagaattagctgaaaagacgaagaatgctgttcaagctttgattgataagcaccaaagaataccaggaaacattatgagtgctttgttagaacgttttcattgataacaaagggtcaactagaagatgatttagtacatttatattaaatgtttgtatctaaggtactgtcttctgaattttgtaggtcctataattagtattttttaaaaaaatcatgttaataagcatctttcacagaattcgtttctttaaaatagtcaattttgtttttgcaattgtgtcaaatactaacaaattacacacctagtaattcagaaaaagatgtcttatttgtaaattcctaacaatttatgctaaacatatagattcttaagtttattaataacagcagtttaggttaaacaaacattcctggataatgcgttaaatttctgtatctgtcgccctgagctgattttgaaagatggtataagctaggggttagtatagttgtttaagttagaaaaaacatgctgttgtctgcccctcattcccttcatgaccttgggcaagtcacgtaatgtttttgtgcctcaacaattcactttttaaaaacatgatcgtatgatgaatgatattattttgttatttatatttactgtgattgataactgttgaaccaaaataataaaataattaatttaaacaatgtcaaaatcctttagcagttatgtatatattttctccattgtgtgtttaaattatgtcatgtccagttgccaagcacaatgaaaaagatgtattattttttaaattgaataaaaaattaggaaaaataaaatttctaattattatttttagtatgatatttttaacaagagtctataggcaaacaatatagggtgtgctgtgcattgtcagccctatactgtggtcttaataatgccagcttaaaaattactgttgtgctctgcatttcgtgtgttagaagctgattctaggctgaggaaagcaagagttctctacttttgctcaatattgaggcttacccagtttgactctacagctagtgaagtggtttattgcttcaataaaaatatacttgaatgatgaatttatttatgttttgttttgtttttatttagagatggggttttgccatgttggccaggctggtctcgaactcctgacctcaggtgatccacctgcctcagcctcccaacttgctgggattacaggtgtgagccaccatgcccagcctgaatgatgaatttatgtgaacacaaagccctctgaaaaattaatgattttcaatttgttgtcttcttgaaaactgaatttaagtattatttaaacagaaaagtgtcagaaatcaaatgcagtatctccctctcccttttttaaatgttgaattagtagggtttttgtatagctttttgtattgtgtgtatttatgatatgtgaaatgtacataaaattaaacaatgtgaaaataaacctg

SEQ ID NO: 522517 - DNA, 640 bp, Homo sapiens
  misc_feature (8)..(8): n is a, c, g, or t
cggggtancgggatgtatcttctctcttttctggagttagattagtctgaagccgcaccagccccaggcccgcgatgcagaagaaaagcgggagggaacggcggaggccgccgcctgacctgcaccgccctcctggaggccacttggagagtccggaccccgaggaggccatggccacaagtgcccacagctggccccagggagcagtcctgcccctccccgagcctgcagtctccatgtcgatcactgatgttggaggaggtcccacatgggggtctggatgtgacccatccttggcctgggggcagaaggtctcagaagatggccttggacccatcctctgctcaccagccagacctgtgcagccctgatcgcagagaacatgccgctatcctgtcactttcattcaagagcaaggatgtgatgattgcaacggcctggtggcaacttggagcacggatgggcaagcacaggaggacagaaaactactggtgagtggccatacccactggacaccagactcggcccggcaccggaaacatacctgaaaccgggactggcgggcaaaacgacagttgaccgacactggagactcctacagacagttgggaatcgatcctacaaaagacacacctggaac

SEQ ID NO: 522518 - DNA, 93 bp, Homo sapiens
gcggccgcctactactactactgctcgaattcaagcttctaacgatgtacggggacatgcttttttctgtaaaggaccagataataaatattc

SEQ ID NO: 522519 - DNA, 502 bp, Homo sapiens
tttagtagacgtggggtttcaccgtgttgcccaggctggtctcaaactcctgagctcaggcaatccacctgcctcggccttccaaagtgctaggattacaaacgtgagccaccacgccctaatttttgtatttttagtaaagacgtggtttcaccatgtcggcaggctggtctcaaccctgacctcattattcacctgcctcggctctcaaagtgctgggattacaggtgtgagccaccatgcccagcccagaaacttttcaaaagatctctttcttaaattcaaaataactttttaaatcaatttcaaaagaagagtgttttaattcctcacaatctgagacattcaacgagatccaatgctgtcaatgagagcctagccttatacactagtgggaaaaaaaaaaatggccttgtctgaaacacttttcacttgtcaatggttattttaactcagttaaaggtacaaaggtagttggaaagaaggtttcagtgctaattcc

SEQ ID NO: 522520 - DNA, 1258 bp, Homo sapiens
tagtactctgcgttgttataacatcgtatggggtcatcgcagaggctttgctcaggttgcaattgatgcaaaagtgcccattattcctatgtttacacaaaatattcgagaaggatttagatcacttggaggaacaaggttatttaggtggctttatgcaaaaattccgctatccatttgctccaatgtatggaggttttccagtgaagttacggacctatttaggcgaccccattccgtatgacccacagataacagcggaagaattagctgaaaagacgaagaatgctgttcaagctttgattgataagcaccaaagaataccaggaaacattatgagtgctttgttagaacgttttcattgataacaaagggtcaactagaagatgatttagtacatttatattaaatgtttgtatctaaggtactgtcttctgaattttgtaggtcctataattagtattttttaaaaaaatcatgttaataagcatctttcacagaattcgtttctttaaaatagtcaattttgtttttgcaattgtgtcaaatactaacaaattacacacctagtaattcagaaaaagatgtcttatttgtaaattcctaacaatttatgctaaacatatagattcttaagtttattaataacagcagtttaggttaaacaaacattcctggataatgcgttaaatttctgtatctgtcgccctgagctgattttgaaagatggtataagctaggggttagtatagttgtttaagttagaaaaaacatgctgttgtctgcccctcattcccttcatgaccttgggcaagtcacgtaatgtttttgtgcctcaacaattcactttttaaaaacatgatcgtatgatgaatgatattattttgttatttatatttactgtgattgataactgttgaaccaaaataataaaataattaatttaaacaatgtcaaaatcctttagcagttatgtatatattttctccattgtgtgtttaaattccatgcccagcctgaatgatgaatttatgtgaacacaaagccctctgaaaaattaatgattttcaatttgttgtcttcttgaaaactgaatttaagtattatttaaacagaaaagtgtcagaaatcaaatgcagtatctccctctcccttttttaaatgttgaattagtagggtttttgtatagctttttgtattgtgtgtatttatgatatgtgaaatgtacataaaattaaacaatgtgaaaataaacctg

SEQ ID NO: 522521 - DNA, 671 bp, Homo sapiens
  misc_feature (226)..(226): n is a, c, g, or t
  misc_feature (283)..(283): n is a, c, g, or t
  misc_feature (512)..(513): n is a, c, g, or t
  misc_feature (536)..(536): n is a, c, g, or t
  misc_feature (539)..(539): n is a, c, g, or t
  misc_feature (567)..(567): n is a, c, g, or t
  misc_feature (574)..(574): n is a, c, g, or t
  misc_feature (577)..(577): n is a, c, g, or t
  misc_feature (581)..(581): n is a, c, g, or t
tatttcagtgacgggctggcgttcgttgaacattacgttaggacctggggtgtacaattttaaggtagtgcggactagcggtgtgagcagagcgagccacggggcccgtcatgcgccggcggcctgacatgggcgccagcgggtccaaagctcggggcctgtggcccttcgcctcggcggccggaggcggcggctcagaggcagcaggagctgagcaagctttggngcggcctcggggccgagctgtgccccccttcgtattcacgcgccgcggctctatgtnctatgatagagggatggggatctggcatcacggagatactaatagaggagacaatcgtaaacacaagaaacgggacagaagcgggccaagctgaggcgagtgccataaggaatctgattcctcagggcatcgtgaagctggatcacccgcggatccacgtggatatccctgtgatcctctatgaggtgtgaccctgggaggtggcagacagaagcaccccctgccccgnnaagaaactcccaggctcaatcanggngtggcttccattgaggagcccaggctgnggccaanccntganataaactctgttggcccataagccttacagtctgtgagcgtggtcgggtaccacacagtattggttgggtgtcggtttgtgtgtggacaa

SEQ ID NO: 522522 - DNA, 421 bp, Homo sapiens
  misc_feature (409)..(409): n is a, c, g, or t
gaagcgaggtgactgacagccctgtggagccccgtggagcgtccctgcagaggactccggccagcctgagtgacgcaatccaaagagcgctcccgggtaggaaatggccccggtggaacgccttgccagagcagcgcatagcaggctcccgagaaggattaacactggctgaacaccgggaaggaaatggcacttgaagtccagacatctgaagcttgtcaagactagtctttggaacttgccccactccatgtgagtggaagcatggcctgatcacccacggtgtgcctgtattggcacctttgttctggttttgactcggcttgacttggtaggactagtcttttgaacttgccccactccacctaagtggaagcgtggcctgatcaacccaaggtgtgcccttatnggcacctttgtt

SEQ ID NO: 522523 - DNA, 496 bp, Homo sapiens
  misc_feature (226)..(226): n is a, c, g, or t
  misc_feature (283)..(283): n is a, c, g, or t
  misc_feature (337)..(338): n is a, c, g, or t
  misc_feature (361)..(361): n is a, c, g, or t
  misc_feature (364)..(364): n is a, c, g, or t
  misc_feature (392)..(392): n is a, c, g, or t
  misc_feature (399)..(399): n is a, c, g, or t
  misc_feature (402)..(402): n is a, c, g, or t
  misc_feature (406)..(406): n is a, c, g, or t
tatttcagtgacgggctggcgttcgttgaacattacgttaggacctggggtgtacaattttaaggtagtgcggactagcggtgtgagcagagcgagccacggggcccgtcatgcgccggcggcctgacatgggcgccagcgggtccaaagctcggggcctgtggcccttcgcctcggcggccggaggcggcggctcagaggcagcaggagctgagcaagctttggngcggcctcggggccgagctgtgccccccttcgtattcacgcgccgcggctctatgtnctatgatgaggtgtgaccctgggaggtggcagacagaagcaccccctgccccgnnaagaaactcccaggctcaatcanggngtggcttccattgaggagcccaggctgnggccaanccntganataaactctgttggcccataagccttacagtctgtgagcgtggtcgggtaccacacagtattggttgggtgtcggtttgtgtgtggacaa

SEQ ID NO: 522524 - DNA, 150 bp, Homo sapiens
acggtgtaagtggagcctagtaaaaaggctacaggtcgtagagcactgaagggagaaatcataaccaaagaagaaaaatcagaccttgtaaactatcaacccaaagagcctccatacagacgtttctggagtgtgtccaaacaataatca

SEQ ID NO: 522525 - DNA, 93 bp, Homo sapiens
tcgacgggcatgaatgccgaaagccgtccaccagggctccccgtccggcctcttagccggcggcccggggggctcgggtctgcgggcccgcca

SEQ ID NO: 522526 - DNA, 403 bp, Homo sapiens
ccatcgcattatattatccgcagttttgctctatctagcaaccactggggaatttttacactggcagttgaatgtgccttgacctatcttctcttcatccccattgacgaggtgatcaacctcaatttggcctattatgctgctgtgctctggatacagaactcatcatattcatcggcccctgtgtgaatttgttgtcctctagacagcgaatcctagtgtaataagaactgctttgcttcgcttactgatgttttgggaattccctttgtgtatccggattcatgtactccagacagaagtgtttcccacagagattgcaagagaaacagaggtcataacggtaaagagccgtacgcatctcccaggagattgggaaccttatgaaggagatcgagaccct

SEQ ID NO: 522527 - DNA, 373 bp, Homo sapiens
aactactgcaaaggagagaaattactctctagacactatggaagaaggcagtttaattttactgtatctgttcaagtccgcagtagaaactagggtctaccctaggctttaataatttttttaagtgttcgtttatagctttattttatttttatttattttgagacggagttttgctctcattgcccaggctggagtgcagtggagcaatctcggctcactgcaactgccgccttctggtttcaagtgattctcctgccccagccccctgaatacaggcacccaccaccacgcccagctaattttttagtagagatggggtttcaccatgttgccaggctggtcttgaactcctgaccttgcgaactaccca

SEQ ID NO: 522528 - DNA, 448 bp, Homo sapiens
cgccttcagcttccttgagtaactgggatcaaccacagctgcacatcaccatgcctggctaaataaaaaaagttttttttctgttagagatggggtctcactatattgcctaggctggtcttgaactcctgggctcaagtgatcctttcttccaacttgatctctgaaagtgctgagattataggcatgagccaccgcaccgtgccgcccccaggattcttttaagaataaaaagaaatgagtgtggacatgaaaatacagtatttcgggggaagggatagcattgggagatatacctaatgctagatgacgagttagtgggtgcagcgcaccagcatggcacatgtatacgtatgtaactaacctgcacattgtacacatgtaccctaaaacttaaagtatgataataataaataaataaataaaatacagtatttcataaatttaa

SEQ ID NO: 522529 - DNA, 1014 bp, Homo sapiens
  misc_feature (123)..(123): n is a, c, g, or t
  misc_feature (262)..(262): n is a, c, g, or t
  misc_feature (273)..(275): n is a, c, g, or t
  misc_feature (291)..(291): n is a, c, g, or t
ggtgttatcggcacgagggtcacagaagcctagtgtgtcacagaggtccactcagtgacaaacacacactgaaggcctgaggaagacgagatgtcacagaggtccactcagtgacaaacacanactgtaaggcctgaggaatgacgagatgtcacagaggtccagctctagtgacaaacgactcactgtagagggcctgaggaaggatgagatgtcacgatgaggtccgagcgtcgagtgacgaatatcgactacacgtgtngtggccgtgannngaatattgaggatgtnacagaggtccagctcgagtgacgaaacgacacgtggtgtgtgtgccgtgatcgactgtgttagggatggttatcgcgtagaggagtccagatttcgagtgttagatcgaagagcaactagcttgttcgtgatttgctcctgacgtcgaagtgccgggagcgagtgaatgcgaaagaacggggtcccacaatccgagttcgagtaaatagcgtcagggtgggtagcacgaggtgcccctggagtgaagtagctttggatcggaaagtgattattagcaagaaaggggttccccacactgcggaatatctgaggaggcgagaaagaaatcaagctagactagttggatgtgccaccgtgtgcaagtgacagatagtcgtcgtgacgaaatccttcttagcgaggaccgctgctttcccagcagtggcgagtgtgagagcaaagagaaataaagacatagcgtggtcgatgtggcaccttgaacgcggagatctgtcggcccaaaccgactaagcgaggacagggttcctacaaatgaaggtctggacaaagagcgacacacgagaacgaggcggaaggtggcatgaggacgagaagcacgcgccgcaaatactagcgggaaccgcgaccaccaaatggccttagaggaaaaagacacaaggcgattgacctggaccttagacagagcgaccccagaaaagctaagagggagggaccacacagggg

SEQ ID NO: 522530 - DNA, 138 bp, Homo sapiens
cgcattgactgagagggcgaattccatccactggggagctctggcggggcctgtctgtgtgaggccctgccagtgtcgaaagccgctggacatacttgtcacgcctgtgtcacgtgaatggttaccctgtgctgcaat

SEQ ID NO: 522531 - DNA, 843 bp, Homo sapiens
cctggctggcctgaaggctggcctggaaggggaatggggctagcagtgtgtgtaaacatgatgggttccatcaggctggtggcagggtgtgcctgccttcctgcacacttgatgtgaaccctcccctctccctcgtgtgacatcttgccctgcccctcagcaccctgcctatgtctccatgtgagtgtcctgaatgctctgtgtgtgacctcttgtgtggggcaatggtgtgtgtgttgatgtgcctgggtgggatgtagtgtgaggtcagtgctgtggtctagagcccacatgatgcatgtgagatgcttgccagtgtcttgcccatctgaccatgtgtttgctatgtgtgcccctggaagcccactgggtctaggtagattgccatatgcaagccaccacctgctggctgcctatgtggcttgctggcatgtggactcgtgcctctgtggatgtgtttaccatctgcccccactctgtgcccccatgctcatgcccccctgcactgcatgccctgactatgcatgtctatgatggcctgagtgcttctgaggtccttgagttgactggtggctaggcatgaccccagagggtgtctgtccatgccaagtcctgcctcagtctgcaagaggtggtccctctgatgcaatgctgccctgtgaagttggtgccattcgtgaacattaggacataattcccaaagagccaaattgtcaccaatttgtggaaaccaaaattggccttgagatccaaaacgcttcgaaagaccccaaaatacctgcacattcgtcatgaaccaaccacccaatgaaaatcctggcaaccaaaatggtgaccaggagg

SEQ ID NO: 522532 - DNA, 129 bp, Homo sapiens
acgcggattcatggggctttcctggtcccattccctgcaaccccccagtgtgtaaaatcctctttctcctttctccagagggccccagagtacctgcagccccccggccatttcccattgcccccatta

SEQ ID NO: 522533 - DNA, 1056 bp, Homo sapiens
cgggctggctgggcgtagtggggctgcgcggctgccacggagctagagggcaagtgtgctcggccagcgtgcagggaagcgggcggccagacaacgggctggcgctccggtggctgccgccgctggcgcgggcgcgctagcggctagggcggcgggcgtcggcgcgggccgctactgcatctcctaccattgcctgcagtaagggcggccgcggcgagcctttgaggggaagcacttcggtcggtagtccctaaccaggagatgtctctgagtcctggctgtggatcccccggagcgtcacatcacatttaccgatcacttcaaaagtggttaaaaaactaatatttatagtacagaagaaaaaagatgtcattccgtaaagtaaacatcatcatcttggtcctggctgttgctctcttcttactggttttgcaccataacttcctcagcttgagctttgttaaggaatgaggttacagattcaggaattgtagggcctcaacctatagactttgtcccaaatgctctccgacatgcagtagatgggagacaagaggagattccgttggtcatcgctgcatctgaagacaggcttggggggggccattgcagctataaacaggcattcaggcaccaacacctggctccaaggatttttttctacattgttactctcaacaatcacaggcagaccatctccggtcctgggctgcaacagcggattccctgaaaaggcatcagatacaaaattgcattttagccctaaacttttggaaggaaaaggtaaaggaggatcctgaccagggggaatccatgaaacctttaacctttgcaaggttctacttgccaattctggttcccagcgcaaattaaggccatatacatggatgatgatgtaattgtcgaaggtgatattcttgccctttacaatcacgactgaagccagacatgcagctcgattttcagaagattgtgattcagcctctactaaagttgtcatccgtggagcaggaaaccagtacaattacattggctatcttgactataaaaaggaaa

SEQ ID NO: 522534 - DNA, 103 bp, Homo sapiens
cccaaaacagcttcctccatttcctgaaagtttattgatcaaagaaatgttgtcctgggtgtgttttttcaatcttctaaaaaataaaatctggaatcctgca

SEQ ID NO: 522535 - DNA, 191 bp, Homo sapiens
  misc_feature (149)..(149): n is a, c, g, or t
accaagatcaagccactgcactccagcctgggtgacaggagcaaaactccatgtcaaagaaaagaaaaaagaaagaaagcaaatattccagattaaatacaggtcacttgattttggactagcatgtcgtaagtgtcatgtacacctanggaggtaatacttagaaacaattggggtatacccaaaccctc

SEQ ID NO: 522536 - DNA, 955 bp, Homo sapiens
cagaaacaaagacacgggcgaaagaacaagaagaaagctacgacgcagaaaagagtgaagaacagactaagaaggaagtgaacacggtggaaaacaggagaaagtgaagcaaacaggctgcgaagtaacagaagtaccgaaaacaccatcaaacacccatagaaaaggaggacaatacgagaaacgcaggctgtgtcagagcatgaatcagaaagatcagttgatgcatgtctgtcgatatatgagttgagcatatttgtccatggggatttaaatacaccaaggacagaaagcccagccattccgaccctcccttaccgatcggaacaagcttccagaaccactccgggatcacctgtccttgatagtaacacaacgagaccgggaatggacgaaggctgagaagaaatgttacttcttgatgacgacaattgaacgagagatcaggggaagatatcacaaggaacagtgagaacggaaactgccattgatgtgggagaacagaaagagccggtacacagctgctgaagccaaacaagggactgtaaataacttgctgccacaagctgcttagaaggttgatcagaagggcgattccaagaaaagctaaggaaactgcggaggaacaccccagggacggcggaaaagaagaaatcgtgtggaccgcagcacagtcaccaaagaagacactcagtctagtgacaacagtaaggcagactgacggcaggagacatgggggtcagtaacacgtccggaaaggagagacaacaccagagtggcgaattgaagacattggggacctcctcgagataaccttaggagcagcagcgtcctatgaaaacggacaaatgatgtctgaatcacccatgaaggagacccttggaacctttggtccccagttgtgaagtgtaccaaaactttctcgtctacgcactcctctgaaaataactatcgc

SEQ ID NO: 522537 - DNA, 107 bp, Homo sapiens
gtccctgcatgctgcttcctcttcaccgccactctggagcaggcgcgcacaacaaccggtttcgagagatgactggactcctctcatatccccgtggtcccagctct

SEQ ID NO: 522538 - DNA, 120 bp, Homo sapiens
cgactgtgggccttaaatatcgcgggatcgatgtagcatctggagcgacagcctctactccggacgcacatggcattccccgcgcccctccagccctcgccgccctcgccaccgctcccg

SEQ ID NO: 522539 - DNA, 425 bp, Homo sapiens
atgaaaaagcttagagtattgtgagaattaccaaaatgtgactcaaagacatgacgtgagcacattactgttggaaaaatggcaccaagagactttctcaatgcaggattgccacaaaccttcaatttgtaaaatatgcagtgatctggatacaatatacaatataatctgtgaagtgcaatggaaacagatatgcctgtgtatatagtgttcaatactatatggtttcagggccaggcatggtggctcatgcctgtaatcctaacacttagggaggccaaggcaggcagactgcttgaagccaggagtttgagaccagcctggccaacctggtgaaatactgtcactactaaaaatttaaaaattagccaggtgtggtggcgggcgcttctagtcccagctactctggaggctgaggcacgaga

SEQ ID NO: 522540 - DNA, 258 bp, Homo sapiens
ttcaatttctacacatctggggaagacatgagaacagtaagtgcactggtcctgaggcagacaaagtggactgtccataatgtaaaaagatttgagtacttggagtggaataagagagggagctgtggcctgaaatagcaatagagaaacaggacagggcagatcacactggactttgtaggccatggccagaggcatggattttgtcgtgtgtagaaattgaaccggtgaagagacatgagaggtgtagaaattgaa

SEQ ID NO: 522541 - DNA, 168 bp, Homo sapiens
cgggtgacgctggttgttggggtcccagtgccccactcttggcaggcagtgcggctgccatccatccagtggcatcttgtcagcctgtcagtgtgggtgtgtggtcaccatccgtggcagtgggtgtattgtgcagcctgtcaccatgtggtgttctgttgcagccca

SEQ ID NO: 522542 - DNA, 907 bp, Homo sapiens
ggccgagtgggtgtcggggaggctgcgcaatgggggcgatgcccgggcagccggcgcaacccccgaccccagccgcacccacctgacgccccagcagcagcacaaggaagagatggcggccgacggctggggaagccagtggctgtcccaccatggacgacgggtttagtgagcctggactctgccctcctatgtcctgtacatgggacagagcagaatgggctgatatagatccggtgcctgcagaatgatggccccaatcccgtggatccagatcatttatagtgacaaatttagagatgtatatgattacttccgagctgtcctgcagcgtgatgaaagaagtgaacgagcttttaagctaacccgggatgctattgagttcacactgcagccaattatacagtagtggacaatatccggagagttctttagaagtcacattcaccaaggatctacatgaggaactgacctacatcactgcaataattgaggagcagcccaaaaactatccacgtattggcatcataggacgagtattcagtggcaatggctaaggagatccatctcaggagcttgaattaattgctgatatactatactcaggatgcacaagaattctcattgcctggagccgcaatcgacaatggggttcatccaggaataaaaccttacggcgattactgagctgcacgtaatgtggaccgaaattctgcaaacgaaggattgatgacgcaaatacaatctggtctaggaaacccaagcgaacactttctcgtcataacctaaaaagcccacctgggctaacacaatgacatagtgcctgccacttagcaagacaccgaagatccaatcaccacatccagacaccactgactcaccagtacgacacccacattaggagaac

SEQ ID NO: 522543 - DNA, 116 bp, Homo sapiens
gctatgccagaaggaccagtccttacagctcccttctctgtcagtaatgacgtcatcaggcaggctggaagcattaatgaactaattcgttttgacacatatataccaagcttgca

SEQ ID NO: 522544 - DNA, 816 bp, Homo sapiens
tgcccctcattcactataagtatcatactagcatccaccatctcactctctaggaatcactagtagatcgctcacgcctcatatcctccctactatgcctaacaggaggaatactcactagtcgctgtgcattactagctacctctcataaccctcaagacccactccccgtcttagccaattattggtgccttattggcctatactagtcttatgccgcctgccgaaggcatggtgggcctagccctactagtctcaatctccaacacgtatggcctagagtagagtacatacctgaaatcgtactccagatgtcggtagaactaatcgtcccaacaatgtatattactacaaagtgaggatgtaggttttccgagagagaagacacgataatttgaatcgaacacgaaccaccccacaggctaatgtataagcatcatcgcctctactattttgtaacgcagagtcaagcaacaacctatggggctgtgccccaacctttacctccgacccgtaaaaaaccgctcctaataataaccatgaagagactgagagccaagggtcggacctgaacttttggggctgcgtgtggccccttgggaaactgtcaagacggatagagtcggcagggaggcccacgcaaggtacacgagaaaactccggacagatggttgcccgtcgagcgtcccgggctgagagatggatcggggcgcccgcaccaaataagaacgcccggggactcgcggagctggaagaaccggacaaggcacgcagaagtatggggctagaggggggggccgagagcagatatgcgga

SEQ ID NO: 522545 - DNA, 279 bp, Homo sapiens
ggtacccctgaattgctatgtgtcttgggtatcatccatccgacattgaagtgttactgaagaaatggagagagaattgaaagaagtggatgctattcagacttgtctttcagacaaggaactggtctttctatctccttgttagctacacttgaattcgccccgcgactgaaaagatgagagagtattgcctgtccgtggtgatagccatgtagacttatgctcactgccccaaggatacgttaagctgtggatcggagaacatgctaagccagctac

SEQ ID NO: 522546 - DNA, 160 bp, Homo sapiens
aacagagtctcggatccccaggctattggtggatgactgactgacaccttgtatgacatccggcagagactggaccaaccagcggctcaacactcaaatcacccagtggagttggtcccactacatggaaatggaaatgcctgagccagggccagcgggg

SEQ ID NO: 522547 - DNA, 326 bp, Homo sapiens
tttgtttttgagacggattttgctctgtaaccaggttggagtgcaagatgtgatgacagctcactaaaaatttaaactggtagactcaagtgattctcctgcctcagccttccgagcaagccggatcacaagtgagcagcaccacactactcaagttttttttttttgtaaagataggtctcaccatgtttgcaaggctggtctcaaactcctggcctcatgcaatcctcctgcctcagcctcccaaaatgctgggattacaggcacgagcaccaaaccgggccccatatgttatttttaatggcagaagaagaaacatttttgta

SEQ ID NO: 522548 - DNA, 132 bp, Homo sapiens
cggcccatcttaagcatacccgattccgctacgacatcatacacctcctatgaaaaaacttcctaccactcacccttcgccctattcttcatagccgaatacacaaacattattataataaacaccctcacc

SEQ ID NO: 522549 - DNA, 498 bp, Homo sapiens
  misc_feature (11)..(11): n is a, c, g, or t
cttaatagatncaggccttgagctagttacttaacctctttatgcctgtctcttcatctgtaaaactgaagataataactgatatggagtgatttctagaatattttgaagcaagctgagtgcaaaaaaaatttacgatatactccctttcatgtaaaaagaaagacataggaaaatacatgtgtatctgttcatttttgcaaaagaaatataggaagtggccaggtgcggtggctcactcctgtaaccccagcaccttgggaggccgaggcgggcagatcacgagttcagagatcgagaccagcctggccaacatggtgaaaccccatctctactaaaaatacaaaagttagccgggcatggtgatgtatgcctataatcccagttacttgggaggttgaggcaggagaattgctcaaacccgggaggtggaggttgcagtgagcagagatcgtgccactgcactccagcctgggcaataaagtgagactccgtctc

SEQ ID NO: 522550 - DNA, 179 bp, Homo sapiens
ttcacttatctagggagagaaccaaatcccaaatctataaagcctctagcccaagggtatccaatcttttggcttccttgggccacacataaaatacattaacactaacaatagctgatgagcttaaaacaaaaacaaaaaaacaaaaccctcagtattttaagaaagtttacaaattt

SEQ ID NO: 522551 - DNA, 806 bp, Homo sapiens
tgggaagggcttgtggagaggacacagtctttgtttaaaaactttgtcccgatccatccagaaaagagtaggtagcttgcatcctgacagcctggcaaagtcaagaaagttgaaggagaaacatacctttggagagggggtttctttaaaactagtgttaagaaatgcttagggatttttttttttttccttattttgcataactaaagcctttcacccagagccggcctctgttggcacttggcctgccgactttgcaaaacttttgggcagggtgggagactgagtctcatctctgtcacccaggctgggatgtgcagtgggcccgatctcagcttactggaacctctgccctccaggttctgggcaattccgcctcagtctcctgagtagctggggattacagggcttgcgccaccacaccggggttaatttttggtattttaagtagagaccaggttctcatcatgtggggcaggatggtcttgaaccctttgacctcaggtgatcgtgcccatctcggctctcaaagtgcctgggatcacaagttgtgagccatcggcgcccggccttgcaaaccttttgggaggtattgcgtgggtcagacaaatccttaaggttaacttcggcggaggtcggggttgcctagctcctggtttcccaaggtcgaaactacctggggcttattttgtggaaattatggcctatttgtgctcggatcctgtgacaggggagcaaccctttgggaactggtttgcgcgcacgcaaccccacttgtttcggcgtgtgaccggtcacgggggacc

SEQ ID NO: 522552 - DNA, 212 bp, Homo sapiens
ctcccaggttcaagcgattctcctgcctcagcctcctgagtagctgggactacaggcacatgccaccatgcctagctaatttttgtattttagtagagagaggatttcaccatattggtcaggctggtctcaagctcttgaccttaggtgatccccctgccacccctccctgccgccccaaaggctggattatagggtagcactgcactgct

SEQ ID NO: 522553 - DNA, 300 bp, Homo sapiens
tttttttttttaaacagagcaatcctccatcttttaaggtgataactttccacaccctctccaggtagaggcacaaaggagctggtcggggaagttggtcgggagggtgcagaagggtcaggcgggacggccggtcacatccggagaccacactaaacctttataagccatggtctcggaccggtatggtagccggaaaaataaagcaaagtgagtcaaacctcgggctcccacttccggacccagggctccccacacccatcttcaaggacccctccggccacagtccggcctccggat

SEQ ID NO: 522554 - DNA, 1002 bp, Homo sapiens
  misc_feature (1)..(1): n is a, c, g, or t
  misc_feature (156)..(156): n is a, c, g, or t
nctgggcccacaagatgagattcttgggtgtccgggaacatcccccgggtcccacgtctagaatttggggccgtcaaagcccacggggtcttccccggaggccccccctgcaagatgcgcgagccacgcggtagaagctgccccacttaagggatncccccacccccaagtgtgtcccgagactgtagggcccccccctgctagcggggccacaaacaagggacagaggcgcccggccaactgcgttgagatacacacagacgcctgagttggacacctccaacgtgggcccgtggacaatcagaagattgcccccccctctccagaggaaaaccttctgtggacggccgagagaagaacccccggcctttgagatcttggggaagccagggaacacaatgagtatttctactaccgggtaggacacccccccaaccggcgtaatatccaacgagtgtgtctctgtagacctctggcccctattgtgggggccctctcaccaagaccccccgccgtctcaaacgtttacgcacaccctgggcggtcccgaccctgttgtgctcttgtgcgccgggctccacgcttccttcacacccgcaccacggtcctctccacgggcccgtttggttgtttaaagaagagttcgacgaacacacgctctgatttggaacacttgggtgttctgacagtgtcctctcttgaaagttcctcggccccacgtggtacacagcttccggcaggccccttcccccgcctatacccctctccttgcgctctgccccacgagcctctgggagataggaaggcccctatagcacagggtgaacaaacttgggggacaggaaacaccacctgagggtcaaccctatccctcaggcccccctggggggatttaatacctggggacacccccttgcccaagccttccaggtaccaaaaccaatccattgctttttttttttggtcccaaaattaaacctcaggtaactcttcccaattcca

SEQ ID NO: 522555 - DNA, 979 bp, Homo sapiens
acgggcctttcgaatttttgcacggagaacggcttgcaacacccccgaatcccagcagggcacgtcccggttgtcaatacagcccgcaaaatgcccaggggagttatccggagacgttaccagaaacatttttcggcacatgtggactggtggatccccaagcaatctgggaattggtgaaaatgtcaagcagggcacataaactccatgttctgatcaaataaatgcaggtgcatggtcaataaatagagagctcacagaagatggaacttgaaaaaacttgctgccaatactctgggtgtgtacattctcacgaccggcctgatccctggttgctggagaaagaacacgacccccgagtgataaccgtctcctcaggaggaatgttggttcagaaactgaacaccaatgatctccagtccgaaagaacaccatttgatggaactactggtctatgctacaaaacaagaggcagcaagtggttctcgacggatcgcgtgggcccaagggcacccggccatcccatgattcgtcaccaggcatccgtggctgggccgacaccccacggtgtgaggcaggcgatacacggggtgtccacgccaggttcgcgggaccgcccgcgctccgaggcccagggcgtcgcgacaaccatgctgtggctggccctgacctccgctcgcacgaacccgcaagccagcccagcggccagcctttcgtaattcaagcatcggaagccagtttctacacacttgcctctcgctacagcgtcctcctcaccgcgccgaagaggacaaactcattgacaatcgtggaaccagctggctcagacatttaaataggccaacccagacacagtgcgagtaccagaattgccttagcagataccagaaggtgacggtctagggaaccagatgaataagaagaccccacttcaacttcccctcgaagacgttgtgcctacagtaagcgctagcacgga

SEQ ID NO: 522556 - DNA, 268 bp, Homo sapiens
aactttagtctggaatgagtacaaaaggagcccattttataatataaaccttgatgtacatgtggagatattgggacaatgaaaatgccttaaaaggaatgcatatggataaagtggcacttatatcacccttcaacaaaatctaattttaaatggtcttttccttttctattaaggggttttcttttcaggtggtctaccattggtacttataactggttattaaattaccaaattcaaacaattataaaaggcggtaacatttcct

SEQ ID NO: 522557 - DNA, 1032 bp, Homo sapiens
ggaagccttcaaacaaacttcaaactgaactataacgcggattgaactgcggagcttcgctacgcactgggaacactgcgacagcagcgcaacacaggagtaaaacatgcgaatactcccaactctggagcttagaatgtatgtgcggaaacgtagtagtagaggggcaggtgaaacagccagacttgtgaggggatctcagctgtcacattgagcacactcttggcacttgactactggcaaagtcagctaaaggacgctaacagcagcttgcttgactgtgcgacttcttcttttagcaaggagggcacttaatggctagacaggcacaacgcagcaccacgcaccacccacacctcctgggcctcccccggcgccaccttgctgctccccgccacgcccctccttccggcccagctcccccctcctgcctccccgggcgacctccccgcctctcccgcaccccccacggcttctctccacctccctgctccctccccagcctgcactccaccggcccctggaacgctgccccgtgcgccacgcacctcacctggcctccacctgaccagcccctctggccctctccccgcggccatccacgcgtgactcccctcccccacgccttcagccccctccccgcagctcggccctggggcacccacagggtggcatgggcaccagggcctgggcctaactcggtccgcgctcactcgccccgacgctgccggccgtgctccccactgcctcagtccccaaacggcatcgtctaccgtaccacaaaacaaccccctgcacccactttactacccttgaacatcccaccaccccatacccttctaaagcctccactctcaaacctgaccattacaaacctacccacaaccacacttcaccccctccccagccccacccacgaaccacacaaacacctcaaccactcacaccgaccaccccccccaacatccccacccccaaccccccaccacatccccctcactctcccccgacacccccatcccagcccaccac

SEQ ID NO: 522558 - DNA, 271 bp, Homo sapiens
aacatcatctacgttaatcatacgggtggatggatcgcacttttccacttatttcaacacataatttttctaactagtcatgaatgattagcacaccatttcggccattaagcttttaccccaccacacaccattattcattcccatttccagcctgaatcaggtagtaaattgtcaaaacttgcatgcatccaaccactcaccagcatcactttttcaagcacatctcgttggctaacgccgcccaaccaccagcacgatcacattcagt

SEQ ID NO: 522559 - DNA, 926 bp, Homo sapiens
aaccacgagctgcccaaactgagatcacatgtctcatcaacgtgaatggtattatgctgggttgaacggatcggctgtgatcttgcgcggtacccctgatacgtccgtgcacataagttttgactcagtgaacaagtgtatgagggcacgtctgttgaatcgtcacgcggacatagctgccacaggccctgtgagaaccgtgcttgtggcagagacactcgtggcgacgccgacacggtctcaatggagaatcgatcaatcacagctcgcttgccagtcgtgcctgttgggtcagaacatggatctgtcggcttcacaagtttcagacaattgaattttagccgcttgcacatcacgaggactagaatgctgtgtaagtatgtcgacatgtaactacccctgttaggagagaaatcgccgcaggacccgttcgatgtttgaggaatatacatgagattggacaaagtgtgcatcgtcatctaggtcgctgtcccgttaattgacggaccatgctgtgtgcgatcggataccccaagggcaatatatgaaatgtgctgacagtcgctgaacataccttgcttggattagaaagtaagacctgcgcggtggaacgccacgcacttcttgggacatgcaatgcaactggctgtcaacagtcacgcactactggaacagaatgcttggttgccataacagaggtatccactgacatagagactttcatccaccctctggtcagagcccatgtgttgacaacatgtgatctgcctacaaaagcaatgggtttgataagggcctgtgacccttccgttgagacaacatccatttgcttaaaacaggcgtcgtcacccattactcgttgaagtgagacaccgttttgacaacgtaatttgaccgacttagtcaacgttgcagacacataccca

SEQ ID NO: 522560 - DNA, 178 bp, Homo sapiens
cctcaacgcagacacggcttaccggagcatgcttcaagatcgggaggaccagtccattctatgcacaggcgagtctggagccgggaaaaccgagaacaccaagaagggccaactcagtgacgatgagaagttcctctttgtggacaaaaacttcatcaacagcccagtggcccaggct

SEQ ID NO: 522561 - DNA, 500 bp, Homo sapiens
  misc_feature (96)..(96): n is a, c, g, or t
  misc_feature (114)..(114): n is a, c, g, or t
  misc_feature (117)..(117): n is a, c, g, or t
  misc_feature (206)..(206): n is a, c, g, or t
  misc_feature (232)..(232): n is a, c, g, or t
  misc_feature (235)..(235): n is a, c, g, or t
  misc_feature (262)..(262): n is a, c, g, or t
  misc_feature (291)..(291): n is a, c, g, or t
  misc_feature (306)..(306): n is a, c, g, or t
  misc_feature (371)..(371): n is a, c, g, or t
  misc_feature (403)..(403): n is a, c, g, or t
  misc_feature (434)..(434): n is a, c, g, or t
  misc_feature (443)..(443): n is a, c, g, or t
  misc_feature (482)..(483): n is a, c, g, or t
atttactatttattgcacataactcagggtctttaactgctaaccaccgaaggttcaaaggactatttttccatgaagtttaacattaacattagngaattcatttactcatgnggngttttttattgtaaacatctgaatgattcacattgccgtagatcctgaactcataagcgtggaccatgcacaggctggcagcaagccanaaagccactctgcaagcaaacagatnctntgcataaagaggaaattcatagcacancattgaatgtccaacctaagtcatctcanaattatacatatatngactttttaattcacataaaatctggaactcaactggttggttggttggagatggggttagaccntgattttcgggagaaatattcctggaaataanttaagggaaatggggggttcaatcttttttnttaacctgnttgggtcctccccaaaccccttaaaatttttttttttcnncctttttaaaccttttt

SEQ ID NO: 522562 - DNA, 257 bp, Homo sapiens
ttcccagtcctgttgaaggctttttcgcccagaatctacaggctgagcggggagcccaggatctccccaggggctgccctgcagctgatgctggcggtgcgagacccacataaagcccactttctgttctgccaccgctccccagccctgttgcatagagccacgcgttggagtatcaggtagatggagcggcagccttgaagagaagcatgcacggtgccactcaccacctccgaagatggcagcgccttggagga

SEQ ID NO: 522563 - DNA, 200 bp, Homo sapiens
cgccacgaagttagggaagcgctctctccagggtggactggcccgcggtccgggagaggactgcccgcgaaggggtcggggtgggctccaggctgggagaagatctgactttgctgacctcgaagcctggatgggaagctgcccccaggagaagatgattgccccgcgaaggaaatgaagttgctaagaacagcctggct

SEQ ID NO: 522564 - DNA, 400 bp, Homo sapiens
gttggacccctatgcgtgaccaacactaaattcaagctgtcattaatgaataacaacatgaatttcaaactgtcattattgaataacaacagaggagattaaaactgttcccaacttgcagttattacaaatgtgctaacaaacacaatttgtgttccttgccccttctaccgtcttggaaaaaaaagcaggtttttttttttttgggtttcgggggggaaacaaaaaatttttgctccccaagttatataattttttttttgcctaactttaaggggccctacttaccatctttgggcgggtttcttggggaatttcccaattttaagaaaattttttgagcctactcccaaggtttttttacaactgggtttttttttttgggcaccagccttgaaga

SEQ ID NO: 522565 - DNA, 794 bp, Homo sapiens
agcggctcggcttctatctctctccaattgccctccctggcctgtggccgaccggtcctccttcccagcccagtgcagccaggcacccgggttcggcttgctcaggtctctgtccgggactgcgaagccacggagggccgggaacagtggcacactcctggcagctcaagcttcctactctctcatcgctgagtaactaccgtgcaggactgggtggacacagcaacagcatatttaggtccttgatgggctgctgggtggatggagctggaaagtgatgggcactgctttctggggcgtgcccacggttccttccgacggtgctcgcgttttcctggtgctacgaagcgggaacagcagcgatggggcatgccgtatcgcgaagacgcaaatagtcgagaactagctatccggggagaagcaggtgtctgtggggcccaagagaagtaccatctcgttaaaaacttcatgattgaactagtcttacaaatggctcccagaagatccactccctgtgggaacacagcagttgtggaacgtgacagacaccgactggacccacgaataagggttcaaatactgtggggaaatctgacctctaaattcttataagtcagagagtgactgaacaacagcagtgagacatcgaagagtttaatactctgctgtaaaccttggtgacctgattcatttacttctctaagactgaatccaaaaaggcacaatggaatactataataagctgagacagccatggtgaattccagaaaagcctgagattccctaatagccaa

SEQ ID NO: 522566 - DNA, 161 bp, Homo sapiens
tcctttatccaagcagtcgcgggggctgaggctgtaggtcctgtggcgtgacatgagctcttgcttgggctcgagtatcacacagagtcggaggtagttagagagtggaattggacagcccacaccgagtgatgtttttaggagagctgatccaacatctg

SEQ ID NO: 522567 - DNA, 506 bp, Homo sapiens
tttttttaagttccaaacatctgctagtatataatgcagatttaaactcagtgaggtgtggagtgggggaagttgattgggtctagaccccccacctttgacgaacttgcccagagccctgcatgcatcagacctacagcagacattgcaggcctgaagaaagcaccttttctgctgccatgacaaccatgcaaggaatggaacagtccatgccagggcctgctcctgttgcgccccagttgcgaaacatggctgccatacattcacatcctgtggaaaggattgcaagagaagttcttgaagggagaacccaaagtcctttggcttgcgcagattctgcctgccctgctgagccttatcatgccaataaccactgatttctatcgcatctaatacttatgcaaagcaccctatttccgtgtttttcgggtccacaatttggtcgttcactaatgcttattatctcagcttcctttacaaatgccccttcactttttcccccctcg

SEQ ID NO: 522568 - DNA, 192 bp, Homo sapiens
acctaaatgcactacactacataaaagtaaatggacatccagaatattgatgtgattatagtcttaaactagagtattattaaaccaatgatgctgaaaatcagtgatgcatttgttatagagatataactcatcagtttacagatatgtttaagattggtcagtatcatactatagatggttacagggcgc

SEQ ID NO: 522569 - DNA, 110 bp, Homo sapiens
gattatagggatactgggcaggaaacatattatcttaagctacagtatagtaaaaactttaggctcgtgggccatgtagtctctgcctcaactgctccactccgttcgcc

SEQ ID NO: 522570 - DNA, 784 bp, Homo sapiens
agtcgtgtgctaacctccctcacgcgtaggtgcgtgacgggaccctagcaggttcagcgtggagcggcggcgcgaggcacatggcagagaccgcggcggagtggcgccgcttcaagaccaactatgctgtggagcgcaaaagttgagccttatctagaagggcggaaaagcacagctgcgaccagactggccagcaactcttctgcgtctgtggcaccagagtcaacattctggaagtggcctcgggggccgtgctgcggagtctgtagcaggaggaccaggagggacatcagtgcctttgacctcatgccctgacaacgaggtgctggtgacagccagtcgggcattgctgctggctcagtggtgcctggcaagtagggcagcgttacccgactgtggaaggcgatacacactggtcccctggtggccaccatggccttcgacccatctccactctggtagccaaaggtggctgtgatggggccgtgcgcgtctgggacaatcgttgcgggagtacgggagcacaccatttccgaggctcgccccggtgtcgtgcacctgaggtgccttccagccgggagccttacatgccttggtgttcttctaccttcggccacggtatgccgccatccgcgtgtgggacactgcacggaccggtcatgcctggttgtgctggacttgcccattacagcgcctgtcgctcattgggccttcaggtgtctgccgtgctaaccttgttcaggtccggccgtgcccggagttttttccctggcccttagagtgg

SEQ ID NO: 522571 - DNA, 286 bp, Homo sapiens
cgtcgcatcattcatggatgaagcggacgccttccttgcggaagcgagccactggaggagataagcaaggacctcagagccagacgtgaacgccttctgtaccacatgggccaacacagcaacaaattcatgctggtcctggccagcaatctgactgagcagttcgactgtgaccatcaacagccgcatcgacgtgatggtccacttcgaccggccgcagcaggaggagcgggagcgcctgggtgagactgcatttggacaactgtggtacttaaggccggccaca

SEQ ID NO: 522572 - DNA, 100 bp, Homo sapiens
ctagtgtccatggtttaaaatgttgctttgtaggattttccatcctgttattaagaagaatggctttcttcagaattataatcgttattaaagctgtgat

SEQ ID NO: 522573 - DNA, 145 bp, Homo sapiens
atcacacacacaatactatgggaataccactgtcatcggtgtcttggatatctatggctttgaaatctttgacaacaacagtttcgaacaacttctgtatcaattactgcaagtgtgaaactgcagtcagctcgcccttgagttt

SEQ ID NO: 522574 - DNA, 341 bp, Homo sapiens
  misc_feature (24)..(24): n is a, c, g, or t
  misc_feature (54)..(54): n is a, c, g, or t
  misc_feature (67)..(67): n is a, c, g, or t
  misc_feature (112)..(112): n is a, c, g, or t
  misc_feature (192)..(192): n is a, c, g, or t
  misc_feature (206)..(207): n is a, c, g, or t
  misc_feature (223)..(224): n is a, c, g, or t
gagcagcggttctcaaagtgtganccctgaatcagcatcacctgagaaggtgtnagaactgtaaatncttggccccaccccaggcctactgaatcagagactctagaggagncccagcaatctgtgttttcacaagccttccagttgattctgatgcaggaagagtttaagaactactgatttaggaacttntcttttcatccctnnaaattactccctagtnntcttacccccaggtgctcccacttaccccccacccccaagtgccatccattctctgggctggcagtgacaatcttaggtagattttagtcacataatcttgagtttcttcttctatg

SEQ ID NO: 522575 - DNA, 616 bp, Homo sapiens
ggtgaaccattcgccttttctcagcccagaacccaagtatctacactgggctctcaaggaaaaccacgcatggaatcagctgattcaggatgctcagaagcgtggtgccacttattaagacctgtgacaaaacactatagacatgatgcagtgaagattctgaaactcaagcctgtgctgcagagaagtctcactcaccctcctaccatagccccagaggggtccagaccccagggtggttagcccagcagcaagctagacagtggatttgccaagacatctgtcgctgcttctctataccacacaccctctgactccaaggaaattactcttactgttacttcaaaggaccctgaaagacctcctgttcatgaccaacttccggacaccaagacaggcgagagagagagaggggacagaggggccaggggaggaataccctgggggatccaaaacctcgagcccccagcatccggagaaacaactcctacgggcgagccgggcttccctgtcgtacaacaggacctgagccatatacagcagcccgctgctgtaagtggcagctctgacgcagccacaaaacctcccgtgcggggcgaacctccagctggcaggt

SEQ ID NO: 522576 - DNA, 82 bp, Homo sapiens
  misc_feature (45)..(45): n is a, c, g, or t
tatttttatttatattattatatgtattttttgagatggtgtctnactcccgtcatgcaggctggagagcagtggcacgatc

SEQ ID NO: 522577 - DNA, 1453 bp, Homo sapiens
  misc_feature (478)..(478): n is a, c, g, or t
  misc_feature (1381)..(1381): n is a, c, g, or t
agcgggttcttctctcccgggcggcttactttgcggcagcgccgagaactcccaaccccttatactttgcggaatcaccaatggctgcgcgtgggatcccgtgttactagcgtagtcctagaacaatctggtagagtgccttcaatggtctctcagtacgctgctcagatacaagacgggtgctcagggtcctgacctgctcttccgttatcctaagcgccagtttccattctatgtgtccaaaactcaatccgcaaccctcctggagaattgtactcgcgatcaaagaatttttcctgggctcgggcacaggttccccaggcaattttgcaggttgtgaatgcatgggcattgttctgctgactgcgtttggacgagggcaagctgcccattgggcgctaacgtacttgttggaaggtcccactgcaggcgaaagcctgtgcgtggcggtgcaaaaggataaatcctgcccggaggnagcggggccagggcctaagtctgccccagcgatttggcgctcggccccagctgggggcttggcaagacctttatttcggcctgggtgtttaccccggccaattcacttaatggctgtgacgccacccacaaggtgcccaaagattgacacccctaggggggttagcttatacccctccaaaaggcttttgtgggaccccattttccaactttggtcgatcgtcaaaccaaagaacggagaaacagcaaatgggggtccccaactttttggaaagaacacctttgggcgaatacatggcggaacagagcggcagaacaggttggaaatgggcggcacagcgaacaagttataccctaggggcggcagcgcctcagggcgttcggggaaatttggcgtcttttacactcttttcgacaagagggaacccgaagtgtggaacccctattatactgccctcggcgcttgagggagcgctgggaaaacccgtgaccgtttgaacaccacaatttttggccgcgcttgtgggagcccaaactttacgagacgcacacgagtttgcggcgtaccgttgggccagacacccccgcttgagtagtagggattgaggggcttacccttacattacgacacgcgcccacgcggttttatccgattataggaaaaaagcacccaatatgtcagcatctctctttccgcccgggccgcctatggagggcccccatttatattatcggccgctaagaatttacgacgcccatacaagcccggtgtcactgtggagggaggtttattaccccccatacccaaacgcacttttgtgcgcaatcgtttgcaagcagagccaacatgtgatcgccccaccgaaaggtattctaacccaggtgggggccctttgtgattccncgttttaggcggcgatccaggaaaaagtggtggtaaagacacacttgtggctgggcttgcaacgcgaacaag

SEQ ID NO: 522578 - DNA, 677 bp, Homo sapiens
taagctatactaaaaacctaaaaatatctgtgaatggagcaagttcaggggtcttatggaggtggcccggcccctccccgctcccttccactctgcacgaggccgccacaccggcgctggctccctgcccggccggccctccctggcaatccctgggctctcttgcacccctaactgccccctgcctgctccggcactggctccctgcccggcccggcctccctggcaatccctgggctctcttgcacccctaactgccccctgctgctccggcactggcccaggcccagctcctggcctaggtccctcccagccccatgtgccctgccgcatacctccacacatccctgtccccccaaccgggaacctgcctctccagagggcgacgccctggggcccatgacaagccccttcgccaggctggcgagaacagcagaatgagatacgaattcagtggctgcccccacacgaagatgggcaccacaacgggactaattgcgaggccaccgaggggacccctacaccagcagcacacaacctacatcagagtatccatctactgaatgacaagggcgacagcaagcaaactagtacgctgaaagccacaggccaggcccacaaccccatgatcaaatggaaacgcagatcctcggcaacacccagtacgcgcgacacaa

SEQ ID NO: 522579 - DNA, 609 bp, Homo sapiens
  misc_feature (1)..(1): n is a, c, g, or t
  misc_feature (84)..(84): n is a, c, g, or t
  misc_feature (86)..(86): n is a, c, g, or t
  misc_feature (125)..(125): n is a, c, g, or t
  misc_feature (142)..(142): n is a, c, g, or t
  misc_feature (173)..(173): n is a, c, g, or t
  misc_feature (191)..(191): n is a, c, g, or t
  misc_feature (195)..(195): n is a, c, g, or t
  misc_feature (213)..(213): n is a, c, g, or t
  misc_feature (224)..(224): n is a, c, g, or t
  misc_feature (226)..(229): n is a, c, g, or t
  misc_feature (241)..(241): n is a, c, g, or t
  misc_feature (253)..(253): n is a, c, g, or t
  misc_feature (255)..(255): n is a, c, g, or t
  misc_feature (268)..(268): n is a, c, g, or t
  misc_feature (270)..(270): n is a, c, g, or t
  misc_feature (287)..(287): n is a, c, g, or t
  misc_feature (293)..(297): n is a, c, g, or t
  misc_feature (348)..(348): n is a, c, g, or t
  misc_feature (421)..(421): n is a, c, g, or t
  misc_feature (497)..(497): n is a, c, g, or t
ngggcgtcgctttgccaagaggagaaatcatttcttaaatcagtatgagttatagcataaagatggatgagaaaaaagcgatangncatacatggcgtcactgaatattccatcaatcaaatganttgtgccactgtgaganaaactactatgacaccttttacatcaaagtngtctcacgcctgtttatncganctttatatatctttttancagtataaaangnnnnctttagtaagtnacactgagaaancngtctggcctttgngnggggggcctgggtggcngggggnnnnnctcaatgtatccggcctcttctctctgctccacagcctccccagtgccccncctccagacacacagggcaggggccaggggccaggtgtgtgtccgcaggaaaggggggatggaattggttggngccgccacagaacggccactctatgtgggggcctaagtcctccgtacacactcctgttctataatgaacccttggngcagttccttaaaaaaataaaataaaaacaaaaataatgtgcatcaactctgactcacaggttattcttagggggccagcatgactgccacagagtttgatatttgttcagc

SEQ ID NO: 522580 - DNA, 210 bp, Homo sapiens
  misc_feature (150)..(150): n is a, c, g, or t
  misc_feature (161)..(161): n is a, c, g, or t
taggagacagagtctcactgttgtagctcaggctggactagcagtggtagcgaccttggattactagaacctctgcctcccgagcacaagcagattctcgtgcctcatgcctcccaatgtagctgggattacatggcacctggttaccanagcccagctanattttttgtatcttctagtcggagcacggggtttcacccatgtttggtc

SEQ ID NO: 522581 - DNA, 831 bp, Homo sapiens
  misc_feature (754)..(754): n is a, c, g, or t
accaacaacagacaaacagagagccaaatcatgggtgaactcccattcacaattgcttcaaagagaataaaatacctaggaatccaacttacaagggatgtgaaggacctcttcaaggagaactacaaaccactgctcaaggaaataaaagaggacacaaacaaatggaagaacattccatgctcatgggtaggaagaatcaatatcgtgaaaatggccatactgcccaaggtaatttacagattcaatgccatccccatcaagctaccaatgactttcttcacagaattggaaaaaactactttaaagttcatatggaaccaaaaaagagcccgcatcgccaagtcaatcctaagccaaaagaacaaagctggaggcatcacactacctgacttcaaactatactacaaggctacagtaaccaaaacagcatggtactggtaccaaaacagagatatagatcaatggaacagaacagagccctcagaaataatgccgcatatctacaactatctgatctttgacaaacctgagaaaaacaagcaatggggaaaggattccctatttaataaatggtgctgggaaaactggctagccatatgtagaaagctgaaactggatcccttccttacaccttatcaaaaatcaattcaaggatggattaaagatttaaacgttagacctaaaaccataaaaaccctagaagaaaacctagcattaccattcaggacatagcgtggccaggacttatgtncaaacccaaagcatgcaccaaaagccagattgcaaatggatctaataactaagagctttgccagcaaagaacttcat

SEQ ID NO: 522582 - DNA, 836 bp, Homo sapiens
ggccgctgtgctgcagtcatgtctctagtgatccctgaaaagtgccaacatattgggcgagtactcaacaccaacatcgatgggcggcggaaaatagccttgccatcactgccattaagggtgtgggccgaagatatgctcatgtggtgtcgaggaaagcagagattgacctcagcaagagggctgggagaactcactgagagatgaggtggaacgtgtgatcagcattatgcatgaatccacgccagtacaagatcccagacatggttcttgaacagaacagaaggatgtagagaggatggaaaatacagccaggtccgtagccaatggtctggagcgacaagctccgtgaagacctggagcgactgaagaagattcggaggtccatagagggctgtgtcacttcgtggggccttcgtgtacgagggcagcattaacaaagaccagtggtcgtcgtggccgacagcgctgggtgtgtccataggaagagatagagtctgtaggccttgtctgttagataaatagttaatatacgcaaaagagcggaatggggagcggggggtgggaattcaggtggcgtgcgagaggaagatgtgattgacttgggcgagtgggggaacaggagtgtcttggagcgagatgatgtgacacagggggaaagactgtgggggtctcccttttggggagtcgattagattggaggaagcaggttacgtgctagaacggggaaaaaggctggtggataatatggtggggaattggggagagtaaaagatggtccttagtaaggtggcgaaatggtggtggaccatggtctgggtgaatagggatgtccg

SEQ ID NO: 522583 - DNA, 246 bp, Homo sapiens
accgcatactcggcatacgacctaaatagattttttctaaagaagatgtatgggagttctcggtcgtggctcagtggttaacaaacccgactagtatccatgcggacgcaggttcaatccctggcattgctcagtgggttaaggatccggtgttgccgtgagctgtggtgtaggttgcagactcggcctggatcgtgcttttctgtggctctggtgtaggccagcggctatagcttcaatgcgacc

SEQ ID NO: 522584 - DNA, 209 bp, Homo sapiens
ccaattggagctcggcaccccgccgtcgaccataaccccagtttcgccactgcgacgacgatgcggcgccttgacgccaaccgccagttcttcctcgacatcggcagtggcctcttccggaccgccacccaatgcgatgagcttttcgacaacggactgggcgctggcgttgtgctctcctaccgctgcatacaaggcgttgatgtcgg

SEQ ID NO: 522585 - DNA, 155 bp, Homo sapiens
gacactagagatccctgactcattatcatctgattctgtactgacatgctctgtgatgataggcacagaatggatcgtaacctcccatggggtccatggcatactataaggcatatacatggaactgtatatgtcatatatgagtatgattaggg

SEQ ID NO: 522586 - DNA, 286 bp, Homo sapiens
gaacggccccgatagctgcctgcgtgggaaggagtgcagaatcaaacgcttccagcaggtggagcgtcgctggggctacagcgggagcagtgaccgaatcaggttctcagtccacaagcgcatcttcgtggtgggatttagaggcagtatggatccatccacgggcccaccgactaccaagtgaacatccagattattcacaccgatagcaacaccgtacttgggccagaacgacacgggcttcagctatcgacggctcagccagcaacttccgcgtccgtagcgg

SEQ ID NO: 522587 - DNA, 579 bp, Homo sapiens
taaattttatgtgtgttttaccccaataaaaactgaaaaaagggatatatgttcccttaaataaaaatttcatatgttgaactcagaacccccagtacttaagaacatgcccttttttgaaaatgggattgttgttaatgtaattagttaagatgaggtcatgctgtaatagggtgggccccttaatccaatatgatttgtgtctttataaaaaagggaaatttgtgcacaaagataacccaggggatatcccatatgaagatgaaggcagatttttccaagcccagggatgccaaagattgccagcaaccccccagaagttaggagagaagtgtggattagatttttcctcacagccctcagaaggatccaaccctgccaagaacttgatttcagacttttagtctccagaactgtgagacagtgcattttgttttgtaagtcacccatatggtttgtggcactttgttatggcagccctaggagatgaagccaatatgcaccatggtatgtccattatagaacactgtgggccataaatgtgttctttggcctgaaaaaataaaatttggtggtcca

SEQ ID NO: 522588 - DNA, 321 bp, Homo sapiens
aggacacttgatggagcagcagaacaagatcatcacagccagcgtggacaatgccaacatcctgttacagattgaccatgcccgtctggctgctgatgactaccgcaccaggtttgagacatgagcaggccctgcacctgagtgtggaggccgagatcaatggcctgcgcagtggtgctggatgacctgaccctggccagagcctgacctggagatgcagattgagaacctcaaggatgtgagcttggccaacctgaagaagaagccacgatggaggagatgacctgccctgcaaggccaggtgggtgttgagatcaaggt

SEQ ID NO: 522589 - DNA, 416 bp, Homo sapiens
cctgctaagtcgactctagagttatccccttcattacgcaaatctgaaatggaatgtctccaacatggcagtgcctccctttccgtcctccctacgaccacaccaataaccagctcccaatcacaatttccttgctcccatttttatctgtacggttgggggtgggaccttcaggctgctatctttgccatctagctgttctaacttggaaatacgctcatcttgattgcagatcgttgtctcttattgatatgatctcttttaaaatctcatcccacttggtctctcatttcgcacactggccgtgtctgtggttttctatgggtatgctgatcacgtcgcacttcttgtttgcagtgagcttgctatccggaatgttcttcttgaccaccttgagatccctgtttttccctaat

SEQ ID NO: 522590 - DNA, 463 bp, Homo sapiens
  misc_feature (63)..(63): n is a, c, g, or t
  misc_feature (65)..(65): n is a, c, g, or t
  misc_feature (175)..(175): n is a, c, g, or t
  misc_feature (300)..(301): n is a, c, g, or t
  misc_feature (322)..(322): n is a, c, g, or t
  misc_feature (378)..(378): n is a, c, g, or t
tatgctctccaatgccgggcttgatggcctcgggaagcacagggaggcataggtcaggtcccntnttcatggccctctgcacatctgcacgtgccaccgccctgtggcgttggccttggtaaaaggaggccacactcgcagatgagctgtcacgggccttggtgttgattgcaantggggttgaatctcacgttgccaccagcagcttgaaaatggggtgcacagcaggcagctggcggtaaccattttgcaatgccaaaaacctcagacaccagatgtgttcgcagaaggtgggtgaanntggtctggtggacgtggaagntcactggaacgcacccagattttggccaaaagccagtcgtattttgcatccgaagngaggaaaatagggttctcatcacccggggatttggttgagctggatggcaatggggacaatcttgttttggccaaggttcttata

SEQ ID NO: 522591 - DNA, 351 bp, Homo sapiens
tcggggctccgtcagggggggaacgacaaacaaggtttccccatgaagcaggtgtctggacccagggccgtgtccgccggctactggagtaaggggcattccggttacagaccaaggagaacgggagaaagaaagagaaaatcagttcggggtggcatggtggatgcaaatctgagcgttctcaactgggttatggtaaaaaaaggagagaaggatattccgggagggactgatactacagtgcctcgcggccggggccccaaaagagctagcagaatcggcaaacttttcaatctctctaaagaagatgatgtccgccagtatgtggtaagaaaggggtacggagctcga

SEQ ID NO: 522592 - DNA, 213 bp, Homo sapiens
ccctatttctccattcgctatcatatacttaggtaccttgagaccccatggacaaaaaaatatctaacgtccagaactaccaataacaggaagaagagaaatttttttttttttctctcgaaaatgaaatgtatcccattcatagtggattctagaagcactgttctccacgttatgctggcgtgctagttaggcttgtcttttgggatataa

SEQ ID NO: 522593 - DNA, 118 bp, Homo sapiens
  misc_feature (94)..(94): n is a, c, g, or t
accggtgaaatagcccgtacgaaatcgtcatcgacaggcgcacgcccaggcggtgcagctccgcgatcgtgcgcagctgtgcccgccgtggcgntcagcaccacgccttccgtgatct

SEQ ID NO: 522594 - DNA, 244 bp, Homo sapiens
  misc_feature (95)..(95): n is a, c, g, or t
ttttttttttcccccccccccggggtttccccccccccggggggggggggggggggggggggggggggggccccccacaaattttttttgcctcnaaaagaggggggggggggggggggtttttcccccccccgggggggccccccccagggggggggggggggccccccccttgggggggggtttttttttttttttaaaaaaaccccccccccttttggggtttttttttgggggccccgga

SEQ ID NO: 522595 - DNA, 116 bp, Homo sapiens
gcggccgcctactactactactgctcgaattcaagcttctaacgatgtacggggacatgaatatgtgggctaagaaatagttcctcttgataaataaacaattaacaaataaaaaa

SEQ ID NO: 522596 - DNA, 496 bp, Homo sapiens
gaatcccttgtcaggagagccttagaacacgagcgtacaccacgattaccacaagacatgacgaacattaaagcaagtatactctggccagaaaccagcagtaccaaggccaagacactgcagcgcatattttccgcaaaacttggagtcgtaagcaacagaagttctcgccagaaagggtcgcttgtagataaccaattgactcagagcacaccttgtgttctagagaactgcaagggtagggctcgttcaatgaagaagtggactcaacggcatggtctaacaatcatatcactataggagtccttgtcatggcacaagagcaggtatcagatagtcccttaacatttgcaacactttataagaggaaaaacgcaggatcatcccatccgcttaacgaaaaccccctgtaatgtataccttcttatctacgagtaggcacgtgcagtaggtatagtacgaaatgatgtaatccttgcagccattgcctgcccct

SEQ ID NO: 522597 - DNA, 1092 bp, Homo sapiens
gcgtaggagtgacaaaagcgggggtctcgctcccttgtcttctgtctttctcatttcgctattagtgggtttgtgtgcctagtgtcacctgtcttcgtttgtattatttcctctttcatgtgtctttcctttgggttcagctgtcatctcgggcctgtcttggttttacatgtcaaatgcaacggtgccatcgatctaccttcatctgacgcgacctgacccctggcctgacgatgtagattttactgggccaagggggctatccgtccccggaccatgagcttgatgaaaaccccagcctggcttcgttgatctcgctcttctgcgctgtgtgtcctggcaaaagcgcatgcctgcgccagagcataatgggagtatgtagtggatcaccgtagcacgctatcaggtgctttctgccctatctatgtgttcggcggaccttggttgttctcttcagccccgtggaagattatctataggctctgctggacctggggaagcgggagggttagttcatgagggcagcaccatcaagcacagtcagcccctccctccctattttcccaccctcccacctcgtcacagggccatgcgccagcccgtaacccccgtcccttaacccccagtcctcactgtcctgtctttcttaggcactgagggatcttgagtagttctgggatgcgacaggaaagggacaaagtagggtgtgtgcattctcccgtgacccctagtcgcggaccgccgatcccaggtgcgtcgtgtctctgtctctcctagcccctctctcacacatcacattacccatggtggctccttaagaaaggcccaggaagcgccaggcatggagataacagcctcttgcccgtcggccatgcgtcggccctggggtaccatgtggccacaactgctgtggccccactgtccccaagacactttaccccttgtctccctggttgcctctcttgccccttgtcctgaagcccagcgacacagtaagggggtgggacgtcgtctatggtgagaaagggagacgaggtcagaggagggcatgggttggcagggtgggcgtttgttaacctcaggtggcttttt

SEQ ID NO: 522598 - DNA, 1147 bp, Homo sapiens
  misc_feature (496)..(496): n is a, c, g, or t
  misc_feature (511)..(511): n is a, c, g, or t
  misc_feature (687)..(687): n is a, c, g, or t
  misc_feature (1147)..(1147): n is a, c, g, or t
ggcctgcgcggtgagtgtagtctagatccgacgctcgtgagtcatgccgtcctagagggcccgctgtcacgctctgtgcaggtcttcgggtacgcaacgaagactagctgacagctgtaggcgtccactgcgaagactgctgtgcgaatgtgtcgtccatcaacggctgaacggcgtcggccctctggagatgagttagatgcccgcgtctagcgctgacagctacatagctgggtggcattggcctacggtgcgttgcttgctctggcaatacgggatgcagatgtagtctggtggtagacattcgctgatgtcacggttgtgaactggcgtgtgttggtcgacgtaggcgctcagactttgtatgcatatcgcgagtccaagtacacatcattcgaaagcccatggttgcgcctgattaaccatgacaatacttgttgtgatagatgggctttccaatgagagcgacgagtcaagagcaacgatctcttcagtncgcagagtaggtgancgcgagagccggctggtctggctagacttgaacacgcttcggtacgtcgtgacgaggttcctaaagaaaggtttgggaagcggcacgctggttgacccgttgtcgtgcggctacccatagagatttcttatgcgcgatttacaaggcccgagttctgttgggcattcaacatagcnttcagactttggtaagtacatttaatagcgacggtatattgaaagagagtggactctattaaagatgctttttcacagaatatattataatttaagaatatatatatagcactattgcgacgagggcgcggtactacctaaattatggcgccggggagtagagcgcgtgcagacgaaaacggcgaggctggtgaacactgagaacactcgtggcgggccattttggggccccaaaaaagggcttgaaggtttgccccccgttggggagcgcccaaaggtggggtttcacttttggggccaccaacaaaccgcgcgggtggaccacaacatctttcgccccggggtttcctccccccaaaatttctggggtggaagcgacccaggtaactacaaggagtttcccacgaagaaaaaagaccccgaggggggttatagaccccttgcgcttttcgtagagagn

SEQ ID NO: 522599 - DNA, 111 bp, Homo sapiens
ggccagggaaagcgcgtgtgcggcggaggcccggatggccccggggcccagcgtgaagaggctccgggccagcgccggagcggggtgggggtacgcggatccacagagcgt

SEQ ID NO: 522600 - DNA, 1257 bp, Homo sapiens
  misc_feature (328)..(328): n is a, c, g, or t
  misc_feature (1228)..(1228): n is a, c, g, or t
ggtaagcaccaagcggaacatatagcactcaacgagagtgatctgcatccactcccatccttcgcatatatagtcaacttacacagccatcgcatgaagaagtattatggagaccactgggaccatgggctgactgtgacttagtccgaccacagcgagcaagggcgacgaagcaactgacaggtgaccttggaaagtcagtgatggcatctaccagcatgtggatgtgcgggaggcagggcaaagggaacaagtgctcttcagtccgtgggagcctactcatgctggaatcaaagcaagatgaggaacttctgcaacgcattgtggnagtgagcattgttgctcgcttatggtccaggccatggctatcctttgcccgggacgctgtctgaagtcacaagtagttatcaggagctgcatgcgggtggggaccgcaagaaattagaggagctgctcatcaaaagctaagaaggagaagcccaccttcatcccttatttcatctgtgcctgcaaggaagctgcccggcgaagttcctactgggataccagccccggggtaaacccaggatagaatatgtaacggtgactccagagggattccggtaccggggccagatcttcccaaccgtgaatggactgtttagatggtttaaggatcactagcaggatcctgtaccaggcatcacccctagcagcagcagcaggaccggagcacctagctctatcaatgctaccccagtcaacattcaacttgcagaatctgacacgggctgtgaatgccctggcctcagaagcatgactttcacggatgttcagggacaattgctgccggtgacaaggccagggacagaacgctaaatgccaccccaagccaatggtggctccacagccagataagggttatggaggcaatggaagacgggacagaatggtttacacacggtattcccccaacggcccaggagcaggagcaccgggggccaccccactataatagcgccgcgaagtaacctatacaagacaccgaagaggaagcgacaagagcgcccgcagtaggaccaaggactagacgggagcgaacactaacagtgaacggcgtgcacacagacacatatcccggaacgaaggacgaaacagaccatacaacgcatgtgaaaatggagacgcgaaacgtacaaagcgaaaacgagaagcgcgtccagtacgaacagaacacacgagcgggagngagcacgcacatatacatcggacaggtgt

SEQ ID NO: 522601 - DNA, 828 bp, Homo sapiens
attagggaaacgaggtccctatgtgcccaggctggtctcaaactcctggtctcaagcagttctcccgcttggcctcccaaaatgctgggattacaggtatgagtcaccatgcctagcctccaatgtatggcctgtcttttaatagagtttgtagagtacaagattttaatttttctgcagtttatcagtttttccttttatggattgtgctttgggtgtcaaaagtaagaactctgccgagcactagcttccgaaatttttctcatacttttaatttttttaaaaaaattctctagttttacatttaagtctgtgatccatttgagatttttttttttttttttggacttatgaacttccactggtacggggactattggttggaaaaagggtctcgggcggctttataagggttaaccttggtcttcggtattctagaatatcccactataaggtgtctagataggggattccctttatctttctggtaatatccggggtcggagggctaaaggtttctaattattcgggaaacttctcggccatttttttcttcaaatagtctctctccagattctatctataattccttgggtaatctaagacagttaaggtaaggttacctcctctggtctggtatctaactcatatatccaggatagtaaatctgaatactggtcaggtcaattccaggtccccactcttttcacaataggccagtcttttttacccatccactgaattactcagcaatcaggcggagcggaggacttcagaattcggctattgatacggaggctgggcctatcccgttaatcaagattggcg

SEQ ID NO: 522602 - DNA, 322 bp, Homo sapiens
ttctcaaatagagaagggctttaaaaaattagaaatctctgccgggcgcagtggctcacgcctgtaatctcaacactttgggaggccgagatgggcggatcatgaggtcaggagatcgagaccatcctggctaacacggtgaaaccccatctctactaaaaatacaaaaaattagccaggcgtggtggtgtgggcggctgtagtcccagctactcgggaggctgagtcaggaaaatggcatgaacctgggaggcggagcttgcagtgagccgagatcgcgcccctgcactccagcccgggccccagagcgagactctgtctc

SEQ ID NO: 522603 - DNA, 974 bp, Homo sapiens
  misc_feature (355)..(355): n is a, c, g, or t
  misc_feature (419)..(419): n is a, c, g, or t
gggatttttgtttaaacagagtctcgctctgtcgcccaggctgaagtgcagtggtgccatcttggctcactgcaacctccacctcctgggttcaagagattctcctgcttcaacctcccaagcagctgggactacaggcattgagactgtgtctcaaaaaacatgataaacaaacaaacattgaccaaaatatgtccccaaataccttcctaggcaaagtggctttttcagtaaaaacaatgactgaccacctaattcttaaggctgctctggtccactccttgtgaatatccacctctttcttgaattcagcatttccgaagctgacctcaccaacagcccagcctccaaaccngctcctcttccattgtctccctttgaattacagctccattctctcttgcatgctgtctgagganttcccctttcctttcccatctttttcccacctgtcagacagatttccttctgctgatcagcaccgcaactttctcagccctcattccttcccactcagcctgactgtaaaagtgtgtgtgtgtgaattatgtgttgagctaataattgggtattacagtgttattttatatattattttgagatggaatctcgcctctgtcgccccaggctgagtgcagtggtgtgagggtttgtcacagggaacttccgccttccggggttcaagcaggttctccggccgtaagccctccgcaggttgctggattgtcgatgtgaccccatgggccgctattggttgggttttggtgacaccgcgggttcccattggggcggggggttctgaacctgcgcagcgatgccgctagagccaccagggggggtctcgtgtgccgccgtgctcccttttatgcgtgtgtttccccccaatatttttgcaagcagtgttccccagtgtgtgtttgtgtcaacgttcgcccatcatttttttctccgcgcgttctgacttcccacttttc

SEQ ID NO: 522604 - DNA, 941 bp, Homo sapiens
gagtgattttggggttcaaaaaaaaggtgattgttaactgctcaggagcgtagaatggacaacactccaagactctgaaggtccttacaacactagcattccccttcatgccttaggggatctctacatgatgtcctgctcagatgatggaaagccagcccccttcctcttgcaaactggcttcttgcacagtcacctggccttagactacaaccatggctctcaaatttcagggaaagtttgatcaagcagttcttttttttgcacaaaggccacatggacagggcaatcctttttcaagaagacccacagcacttctcctgcctaggctctgagaaaccacaaatacgtgtccttccactaggctttaacgagagaagagcccactctcattttcatacaccaccttattctttctcaacacctacaaaaacactggtcgccttggaagctcttccaagatcctgtcacaaaccttttagttgttataatgtaccgaaacttgacgcccgaaaggagacctataagttatctgcacccctaaaatagtctcctgccatactggtgaaaagtgttgctcacttgccctgataaccgtacaccgaattggacaaggagaagtaatacgcgtaccatggtctaacctttcacccccgagacggtcaattttctgtgttacgggacatattaagcctaccctacaggttctcttctaccttctctccacccttgcaggattatacccgcctaatcttcgcattcatgtagtccgtcctccgcccattcccgcgatgctacttaacatgcatcgctttataggcagctcccctcgcatcgcttacttgcaagcaaatatgataatcgtccgctctttctcaccacatcactacaaaccccgcttccatactcaccatgcctcgcatctcttacctatcttttct

SEQ ID NO: 522605 - DNA, 424 bp, Homo sapiens
tcactcgggacctctataggatcgccaagctttagggtatcatttttgatggtggccattgttaagcctccagaaactatacctttaaaatggttaacagatagccaatttggatagaacaatggccgctaagtaaagtaaaactggaggctttaggggacttagttactgaacaattagaaaaaggacacatagctccaacatttcccccttggaattctccagtcttcgtaattaagaaaacatcaggtaaacggagaatgttaactgacttaagagccattaattcagttatataacctatggggacattacagccaggactgccttctcctgtggattccaaaaaattggcctttaattgtcatagatttaaaagactgtttctttactatccctttagctgagcaagactgtgaacggt

SEQ ID NO: 522606 - DNA, 1635 bp, Homo sapiens
  misc_feature (1624)..(1624): n is a, c, g, or t
ggctacctgtgcgactccagccgccctgcaccggaatctggggagacccgccccccgccccaccggatctgctggccctccgacccagtcgcaggtgcaggtgcggcgttctctgcaccgctttcgaccccaggctgcatccgctcggcgtgactggcatgtgcggcgaggtagactgccccgcagggaccagctaccatctggatcggggagtcagtcgttactatcactccatgaggagctgggacagcccatccatttcgccgtgggaacgtgtcagtgcaatcaacacgaccgattcctccggtagctatccgagggcgcagagcatgggcacgaggggcacggagtcaagcagggcaccaggacacggaatcacatgagtcgacacaaatccaacgaacagggaggtcgccagacgggcatgcccgttcagagcgtttcaaaccgagatgtggggttgagcggcgtgggcttgatccacatgcgttgctcacacgatggcgatgcatcctatcgacagcgtcgccatcgaaagcttctctatatgcccttagataaccgccaggttggcagaataccacaggagaaagagacaagagcttgctcgccaattctcgttcgcgagccaggcccattgcagtagagtcccaaataaccttggagatagcctccattttaggccacagttggaacaagctaagagggcttggggtcgaaaggggaagggaacgaagttgaagtccccccgagtacctcccatcttcttgtcgattcccacgttcgacaacaaatggggacccatcccggctccaatggcctttccaagtccaacacatccctttatcaagatgggcaggttcgcgataacaaggggagcgatgccacatccatttcagagggcaaggcttggtggttaacccaattggcgcccgtaccgaacctaagcaagacaacctcttctttgcccttccaggctgtggccaaaagtgccctgtgcttgatgaaatcgttgtgggctggccacctatgggcacatggcttccattgggtgcccaggggggccaagagtggacaggttggaacctagccggaacaataccctctttgaccccgtgggggaggtaacgtttacaatcacacgacaccctggttgtttgggggacaatcacatcaattgttcccaagccgggggtggtaacaccatggaaagccattggcagcgccagccgtagaaggagttggcgcccgagctacatagccaggggccacacagtacaaagagtcgacatcgcaaacggggtgcacaacgcatcacacgggaaagatgtgttggaaccacaaaaggcgtgagagcgaccgatcacaaagacggaaggcgagaacggaggaaatcacccaatgatcccacagaagagaaagacgattgaaccgacgacaattttgactcggcggaacgaggacggggaacgaagaccgagagtgagcccacgaagaccggtacgaaatcaagtcatgtgtcgcaacggaacgatgacaaaccagcaagctgaggatcgacaaccagcacacacagcaacaggaggagacgacaacaagagagggctgacaagacagccgcacngcgaggagcgg

SEQ ID NO: 522607 - DNA, 207 bp, Homo sapiens
  misc_feature (50)..(50): n is a, c, g, or t
  misc_feature (59)..(59): n is a, c, g, or t
  misc_feature (76)..(76): n is a, c, g, or t
  misc_feature (80)..(80): n is a, c, g, or t
  misc_feature (109)..(109): n is a, c, g, or t
atgaatctggtggggacctgtgatatgtcggcagcaggcggattcagacngtactcggnactttcatatccacctngttncaaatcggtccaggacagagtgacacagngcacagcatgttggagtccaccaggtagctgttgatctgcttcaggaatacctggaactttgcatcggtgttgatatatttattgaatctcttgaatg

SEQ ID NO: 522608 - DNA, 545 bp, Homo sapiens
cagctgactgtcatgataccttgcggagtagctgggaaaaagtctccccttccacacaatcattacgagcagatctagcgcgatcgcggtcctgcctcaccaggcgcgcgctactgagactataaggcgcggcgtgattgcggccgagtacgtggtccgtgggcagtggctggtcgtcgatgggtactggggactctgagtagacaatcacgacattcggtgcagagtctgcgggctgcgtgtgatgccatagtcgcagggcaagtctgcacccgtggacgtagccgagctagtccctgtggggacgtgtgtgttgccaagtactcaaggaattttcgaacacagcgagtagagtgcgatagcacagcgactaacggaacaacccgaggtgacgccacacgggaggtccgcggtgactttgcaggtgatcgatggggctattgcccaatcctcatgtggaatggtctggtgtgaaaggaatcctccgcgtcgagggtggcaattgccttgacctgtaacatgagagacactgggtgaagacaatg

SEQ ID NO: 522609 - DNA, 699 bp, Homo sapiens
gggacccagaatcatggctggacatttaatgggggcttggttctaggacggacttcaaggacaaccaattggtccatacatcgcaatcgcattgtctgacagttgaccccttatcaacgatcacatcttcgctggccggttcaagctcagccgctgataccgcaagcagtggcagacgttgtcacctaccagcttggtttccacagtattgaactgaacgagcctccactagtccacacagccgccagtctctttaaggagatgtgttaccggtacagagaagatctgatgcaggaatcatcattgcaggctggaccctcaagaaggaggcagggtgtactctgttcccatggggggtatgatggtaagacagtcctttgccatcggaggctccgggagctcgtacatctatggctatgttgatgctacgtatcgggaaggcatgaccaaggacgaatgtctgcagttcactgccaactgtctcgctttggccatggaacgcgacggctccagtggaggggtgatccgcttggcagccattcaggagtcaggggtagagcggcaggtgcttttgggagaccaaatccccaagttcaccattgccacgttgccacctccctgaggcctggtgttctagggagtagtaaaggatggtccataccgacgcagaagctaataaacagtttgttaaagagaaaa

SEQ ID NO: 522610 - DNA, 255 bp, Homo sapiens
ttggagcgctttgaggagggcctgtgcataatggctggcgacctggagttctcagtgactcacgaggaggattggacgaggtgggtgcagacccggtcccagggcctctttggacctgggtccagttgttgcggcccgaagttgactggccccctggtcaggcactttgccggtaattggcgggctctcgcctgggccaggacgcccgcaggcaagccccttgggtggcccctttttccccggtggcccctctga

SEQ ID NO: 522611 - DNA, 442 bp, Homo sapiens
gtgatgacattggaataagaacatgagaaacaatatagaattgaagatctaaaaaaaattttcttttgagatggagcgtgctctgtcacccagactggagtgcagtggtgcaacctcagctcactgcaacctctgcctcttgggttcaagcctcatgagtagctgggattacaggtgcacaccaccacacctggctaatttttgcatttttagtagagacagggtcttgccatgttggctcgaactcctgacctcaagtgatcctcctgcctcggcctcccaaagtgctggaattataagcatgagcccctgtgcctgccctaaattacattttctttgcttttgtttttttttttttttttttttgggaaaaggagtctggctctttggccagggggggagggggagggcacaacccgggctcagggaaacttgggcctcc

SEQ ID NO: 522612 - DNA, 396 bp, Homo sapiens
atcggcgtaggtgaatgccagctcacagattgtatttctagactgcttaatcattgcctcgatcactgctcaagctctgcctttgtatccaaaggttacctgtgcaaaaacttctttttctatgctcgaaattcaatcagggaggcacagatgagtccactgaataacagagccttaaacactcacatagagcaacaactttgctggagtgtgtgtgcagtgaaccacatcaaggaatcagcatagtgtgcatggcagttcatcattgcaggttcaagcacattctacaaatatttcgaccatctccatatactcactcctttcccccctgagtggagagactcagctaccaagagaggaagctcaaaaaaaaagaagttcaaacaaacaagcaac

SEQ ID NO: 522613 - DNA, 284 bp, Homo sapiens
ggctcggaccgtagtctgaactcctgggctcagcactcggcctgcctcatagtgctgggattagaggtgtgggccaccacagtcggccccaaaattcttttcaaaataacatatcttaataatttaggagtaagtgccaaaagaatagaaaatatgttttcttttttgggaggtataacgcgtagagtgaaccatgcagcacagattatcaccttcttgtaactgccaacgttgttccgtgtgtcatttcttgcttgttggtaacttggtggcggattaaagaa

SEQ ID NO: 522614 - DNA, 208 bp, Homo sapiens
ggtcgatctctagacggatccccattggtcccgagagaaattaggatgttcagacagctgcctattggctggagggagaggcttacgcgccgaagccctattactttgctaaggtggcccttcagaacgtctgctgggctcagcaaggctcttacgtcgtgcttgagatgtgatgcctttcgaaagcgatactccgcccatgcccagt

SEQ ID NO: 522615 - DNA, 274 bp, Homo sapiens
ttgactcctcaggatgttctcaataatgggtacactaacatatcatcatatctataataccctccggaagtacatttctttattccttttatacatctactagatgtgtaattttaaactcccgtcctggaaagagaagggcggccatcacagcagctttagaagtgggtatgaatcactgcatctgctcctctcattgtgtatgcattcatgaaaagaggagtacactggtctttttttaagacttcttcgatgggctcacctgcatttgaat

SEQ ID NO: 522616 - DNA, 797 bp, Homo sapiens
  misc_feature (610)..(610): n is a, c, g, or t
tggaaagggagtctcgttctgtcacccaggttaaagcccaggggggtggttctcattggaacctccgcctttgggtttcaagcgattctcccacctcagcctcaacaagttagctggggaccacgggtgacattgccgaccaacagccgggtgtaattttggtatgtttagaatacagacggggttcaccatggttgggccaggctagtctcaaactccgtgacctcaggtgatccgccatacctcgtgcctcccaaaggtgcggggattacaagtgtgagccactctggccaggcctagtggtcccgtgttattataccagtcatctggtcttacagccagctgacatggtattacttacctgaagctcaggggtgcttatgctctggaagtccaagaaccggggttcaaatcccggtgttcacagttataacccgtggtgacatggggcatgttacttaagttctccgagcccgtttcctcattgataaaaggagggatgtgtaataaaacccacctgggagccggttgcatgtgtccggagtctgtaatcccagccagtcaggaggcccagggtaaagagggtccccttaaggccaagaagtttggnaagaccagcctgggcaaacaatagcaagacccctgtcctctaccaaagaaagatacacatgatcagaccgaaaaaccgcgggactcatgggggccgcaaaacagaaatgaagcgccgtgaaatgtccgcaccgttttttgaaagggatatcgggcccaaaggggataatggaaccgaataaactaaa

SEQ ID NO: 522617 - DNA, 402 bp, Homo sapiens
ggattttttaagaaaatgcagccaacccagacatgggggaaatcgccagtttcgataaggccaagttgaagaaacgggagacgcaggagaagaaccccctgccgaccaaagagaccattgagcaggagaagcggagtgaaatttcttaagatcctggaggatttcctacccccgtccttttcgagaccccagtcgtgatgtggaggaaaagccccctgcaaaatggacacgagccccaagttgccttttgaacttgggcactccgcgccgatgcccccggcctgtgggtttttgaagggacccccccccaatcggactgccaaattttccggtttgccccgggattttatagaaaattttttgtttgaataatgaaaataaaacccccctcgtggcatggca

SEQ ID NO: 522618 - DNA, 193 bp, Homo sapiens
aatatcgctgctctgtgtatctcgtttctgactgggctggtcaccctccttaggcaactggtggtccccgctcccggtagctcaccatattgatgccgaacttagtgcggacacccgatctggcatagcgcactacagcccagaactcctgggctcaagtgctcctcccacctcagcctcccgagtagctggg

SEQ ID NO: 522619 - DNA, 135 bp, Homo sapiens
ttacatattatacgagcatataacatctcacttcgaggaatacgagtatatcgcacacacctcatatcctccctactatgcccagacggaataatacaatcgcggtccattatagcgctcataaccctcaacacc

SEQ ID NO: 522620 - DNA, 608 bp, Homo sapiens
  misc_feature (86)..(86): n is a, c, g, or t
  misc_feature (378)..(378): n is a, c, g, or t
  misc_feature (392)..(392): n is a, c, g, or t
  misc_feature (403)..(403): n is a, c, g, or t
  misc_feature (427)..(427): n is a, c, g, or t
  misc_feature (433)..(433): n is a, c, g, or t
  misc_feature (472)..(472): n is a, c, g, or t
  misc_feature (496)..(496): n is a, c, g, or t
  misc_feature (504)..(504): n is a, c, g, or t
  misc_feature (513)..(513): n is a, c, g, or t
  misc_feature (574)..(576): n is a, c, g, or t
  misc_feature (606)..(606): n is a, c, g, or t
cttcgtacacagtgccttgcccataataggtactcaataagcaattgttcctcatagagtcttttgccatgatttatggtgttttntgaaatttgtcttaattgaaaaaagaccaaatatttcaaatgagcttataggcagctgtggccagtgaaaatatggggttgtacagttagttcctagaatgttattttgcactagttgtcacttagaaagatggggttcctgtagattttttggtgctaagggatactttgtcattatgatgaagtaagtgttaagtgtcagataaatagcacacagaatagttctttctgctggtctgttttttctcttcgttgttgttgtttttaattggtaaattggttatcaatcaanactattgtagcagnctacaaagtanattcaccaggcatgacaaaatggntcaaanaaattagtcatcacgcacttaagaaaatgaaacgcaacnttttgaaatttttctgttaaaatntgtcaaantatattttnatgaaagaatttatcaaaaagggcgaaaataaaatgtacactttcattggttcatgacttnnntttttttaaataaaaaagtgaggtttcaanca

SEQ ID NO: 522621 - DNA, 508 bp, Homo sapiens
  misc_feature (258)..(258): n is a, c, g, or t
  misc_feature (302)..(302): n is a, c, g, or t
  misc_feature (326)..(326): n is a, c, g, or t
  misc_feature (358)..(358): n is a, c, g, or t
  misc_feature (389)..(389): n is a, c, g, or t
  misc_feature (426)..(426): n is a, c, g, or t
tttttttttaatttaatttataggagaacagaagagggaacagaagaaaaaaacggaaaaacaagcagaaacaaagaaaaaaaagaaaagcgaagaaagacgacaaaactacgaagaagaacgccaaagaaagaaagaaaggacaaggaaaaaagggagaaagaacgaagaagaaagaaacaaaaagcaaaaagggaaaagaagaagaaacaaaaagaggggaaggacgagcaagaaacactaaactcaaagagaatncagtcattggttaatctgtcttctcttcacaacattggtactgnagaaattcccaccctcaggttatnaaaatgtctgaacacccaacacatagcactgnagatatgagctcgacaagagtttctcagccncagagattcgcagcctagggcaggaggacactgtacnccaggcagaatgacatgggaattgcgctcaagattggcttgaagaagcaaggactgtgggaggtgggctttgcagtaacaag

SEQ ID NO: 522622 - DNA, 495 bp, Homo sapiens
aacatgtcgaggctgggctagggtggctcagctttaatcccagcacttgggaggtaggcggattacctgaggtcaggagttcaagaccaatctgaccaacatggagaaaccccgtctctattaaaaatacacaaaattagccaggtgtggtggtggacacctgtaattccagctgctcggaaggctgaggtaggagaatctcttggacccgggaggcggaggttgcagtgagctgagatcaagccattgcactccagcctgggcaacaagaacgaaactccatctcaaaaaaaaaaaaaaaaaaaaaaggtttggacgggaaccttggaatttgtaaatttagggggaaaaaacttaggggaaaaggtttttggaattgggcggggcaaaatttttttggggaatatggcccattatgtgacatggagcgggcaaaaaaggcaaaatggggttaagtgggatggcattcaacttaaatttttgtatagcaaagaa

SEQ ID NO: 522623 - DNA, 1139 bp, Homo sapiens
  misc_feature (190)..(190): n is a, c, g, or t
  misc_feature (252)..(252): n is a, c, g, or t
  misc_feature (360)..(360): n is a, c, g, or t
  misc_feature (366)..(366): n is a, c, g, or t
  misc_feature (497)..(497): n is a, c, g, or t
  misc_feature (699)..(699): n is a, c, g, or t
  misc_feature (708)..(708): n is a, c, g, or t
gctttgtagaacagagcacgctagaaaagcaagaaccaagaaagcaatactgtacactaaacatgtcattatagtatctttccataccctggcactggtgtgtctcgtcgcaacacggtggtgcactgggacaacggagcgtgtagactagttaagaagacaacacacaaacaaacaacaatgccgccgnacaacattcaacgtagcttatggcaagcattcgcaaaagaacatcgctattagcggtccacnggaagcctgatacttgtcaagcatgcagatacacaggacaacagacgaagtacgaaaacactcacgcgcatgagcattattccaggcacacacatcaactgaagcccntcacgnaagatagatcagggagcgcatatgaaacgagacacgtacacgcatatgtacaagtacatgccaattgcaagcgtatgcatacacatattcgcgtacaattattgatccacggaaagctttttcattttatntgcaccgatttgcccattgatccgtttgcaataacaaactttcaaacaggaaccaacatggggaattcttgaggcctgcagtggatactgagttgtggtaagtgattggaaaagggaaagatatcaagcacccgtattgaattggacagtctggaagtggagcgtaacttacttagtaaaaaaactcgtaatactgtacagnctaagcgtnttgttaggaaaaagcagcgatgtgcctggggctaagttgaagagtatgagtatgtcagtaactaccagccccagaagacgtaaatagttggttaggtaaacattgttgtatctatgtacgaaggaaagttagctcattttacatccgttgggccttttgtaaaccgtccctgttagagtgtctgtacctgtatctaaggaaggggcgcaaaagacccagaagaaagtagtcgtttggcatgaggcaaggaaacgcgtggcggacacagagaacaagagccccagtgcaacacacgtgtaattcctagagagtgtcaaaaagttgcacacaaagcttggaagcccaaaaaccttctttgtggtggtattattagccaatcttctacaaatactaatttattcacgccttgtggattggtaaaggtacctaat

SEQ ID NO: 522624 - DNA, 380 bp, Homo sapiens
gctctagaggatctccttctttatgggatttggcatcatctgccatggatatggctcttcccaagacaaaatctagtgagaagggaaattctaaaaaaaaaaaaaaaaaaaaaagccattggcagtaaaggtttttatggaaatggttttttgacagcgggaaatgtaaagttggcttagaacctggaattttttcttgggcccacacagaatggggaaattcgacgggtgcttgggcgggcaatctaacgaacctggtggtactgtggtaagtggcctttaaagtggaaaaaaaaaagtgttgcgctgcaaatggacaataggcagacatcacatcgttcccataatgggccaataaaagaagggaaaacaagggggga

SEQ ID NO: 522625 - DNA, 303 bp, Homo sapiens
caggtggatcagttgaggttagaagtttgcaaccagcctggcaacacggtgaaactgcgtctctactaaaaatacaaaaatcagccaggcatggtggcacatgcctgtaatcctgtaatcccagctactcaggaggctgaggcaggagaatcacttgaacccggggggcagaggttgcagtgagccaagagtacgccactgcacttcagcctggacaacagagtgagactctgtctaaaaaaaaaaaggatctcaaaatagtagccaaatcttcaccccagagggtctggctgggggcaccga

SEQ ID NO: 522626 - DNA, 151 bp, Homo sapiens
  misc_feature (63)..(63): n is a, c, g, or t
tggtggatcactgggtcaggagttgagactggctgacagacatgtgtggcgcatctctactanaaatacaaaattggcgggcgtggtggtgcatgctgtagtcccagctacccaggaggctgacacacaagaattgcttgaacctgggagg

SEQ ID NO: 522627 - DNA, 264 bp, Homo sapiens
atccaaagaattcggcacgaggggctgctggggaggatggggggatgttatataaatatagatataatttccctttcggagctaagatggtgttatttaagggtggtgatgggtgagcgctcttgcccaggctgggccagacttccgcccaagcatgaaacaggacttgaccatctttctcaaacccctgtgggggaggacatttgtcaacctactttggggagggacacagccttcagcacagaccttttcctgcggggcaga

SEQ ID NO: 522628 - DNA, 417 bp, Homo sapiens
gcgtcagcggctgagtgcacgccttggatagctcggtagagcaacgtggatccataacttgcaccattatcgcttgtgtccgtgcgttagtctcctactctgcgtgagccgtcattacgcgcccggtccggagaccccggtgtagccgtcgactttgaaggatgacctctaggaataatgtgttgctcgacgttatcagcgctgagagattctggagttcgggaagacattgatcatgaactacgatgctgataatatactctacaatcaagtcgcctgtcttggatctcacttactgaccaacgacgtgatggtgcatgacatgctagacacaatgcatatatgggacactagcaagacaggcggttccagtcgcacgagtgtgcgcttttacagaggtgcagacagtgcgttctg

SEQ ID NO: 522629 - DNA, 872 bp, Homo sapiens
  misc_feature (667)..(667): n is a, c, g, or t
gctcttctccccgccctcccccagctcctagctgcctcccaggcctcaggtgtggctgtctggtggagaccataccccgcaagcccttgcctcggcacctccttgtctcacccatttcctgcagtgtgtctgacgccaggcctcccggctccgttgggcgacttgctcctaggcggatgtctctggctcaccatccgtgtgtccgatcaccatatcctcctcgcgagtgtttccacctatatcattgtgatgttatagagaatggaaacaggacagtattcccggaaaggaatcgcgtctctcagttcattcgcgtaaggtgtcgtttccacctcactcgtcgcacagctcgtccgatcgtatcgccaggttatgacaaacatggtggcgtttcgccccaactcaagtgaaagcggattgagagcaggccttggggacgggccggtgtctcggcattgctagggcctgcgctggggctctggtctgtggcggctagcactggcttgactcggactttcctcggctgtttccctacccacttccctcactcctccctagtacctctcctccgattctttttgtctcttctttttgcctctagccagtccttcatgacccctattcttcctctggcaggtgggattgtagagtttatacactaatcttntgagggctgcgatgtggtggtcggacgagcggcgagtcgggtgttcagagaatgtgagcgttaagtcgggtgatgacctgggcaaattgtggatgctgcagttgaggactggagagagggggccgtggagttggacaattgaggggctttatgcaggtagtggcccagtgacaggtgatacatggagtcactatgttgagaaact

SEQ ID NO: 522630 - DNA, 312 bp, Homo sapiens
tgtgggtgattagaggatcggtgttgagagctggagtctggtcggagaggcaggaaggaagaggggggttgggttcgggcaggaaggcacaggtgttcccagcgccggggctccccgaagcgggaggggggtccacactgcctggactgatgactgtgttgagctagtggttataggttataagtctggagggaagggcagtgccggtggtgctgagtgggtgggctcttgaagtggggagaggggacacatcacggatgcttggtgaaaaacccggggttgttcccgagggcagtgaaacaaagcgaaaag

SEQ ID NO: 522631 - DNA, 1190 bp, Homo sapiens
atggcacatgcagcgcaggtaggtcgtactaagacgctactttccctcgtcatcatagaagagcttatcaccgttatcatgatctaggtgccctcaataagctattgtgtcctatatctggcattccttagtccgtagtaatggcccttatttcacttaacgactcaacgaacgagacaactgaactaatagctaaccatcgtcagtacgctccaggatacatacgataagccgtacgtgaacgtaatactctagccgcgcactagtcgatcctaggtcctccatctgccactccacatccctagcgcatgccttttagcattaacatgactgaggtctggacgatcgccgtgcccttgaaccatcaaattacaactagggcacactaatagggtactaggaacctgactgaagttacaccctggttgacgtgcggggcacctaaagtcttactagcttcactaacgataactctccccacaattaattgcctatatgaaccaatggctagaccttggcaggatctacctgtggacgtattgaccgaactccggaggttagatatcgtcacgcggaatggtcgcagagactccggcaactctccagttattaaacttagatataaccagatctaccacaagggaagtcgtcatttgaggaactgtccaaactgaagtcatgatcgcgctcaatcgaataaagtgcctttaaatagagaactagggatgacgacattctccccgggaacacgctcttaaaaccaaaacccacctcttcaaccctgcttatcagtcgaaaccgcgggcgttcatacctaaccggatccaactgccatcttgacacacattcatggtcggaaggcaacaacccaacaggtctctcaagttgccacccattcggtacactaggacattcacaatttccccgcttaaccaaaaaagttccttttggaaagagctaagcgggggcccggcttaacttcttaacccccgcttaaataatgccagaccgaccacgtacataaaacaccacctgtcgttaaggaggtccaacgccaagcacgcatcacgactctcgagacacgacacccacacaagcaaagagcagactcgctcgcaaggccgacctgtgccgccgcgcacgtgcacacagcaccttagctccatcacaccctcacagacatttcggca

SEQ ID NO: 522632 - DNA, 194 bp, Homo sapiens
gccatcagcttgccattgctttacaaacaagctactgcacagttctgagtaaatgactcttttcatatctgagagtttttagaggccccttaaatgattttaatgtggctttaatatacagataggggaagaatcattcagttggactgtttaaataagaatatttgattagaaatgaggcatgatcatggctt

SEQ ID NO: 522633 - DNA, 93 bp, Homo sapiens
gcggctcggaggaggccaaggtgcaacttccttcggtcgtcccgaatccgggttcatccgccaacaagccagtcatccaacaatccagcctga

SEQ ID NO: 522634 - DNA, 145 bp, Homo sapiens
agaccaactgacaatatggtgaaaccttgtctctactcaaaaacacaaaaatgcgccgggcatggtggtggtgtgtacctgtagtcccagctactcaggaggcagaggtgcgagaattgctcacacccaggcggcataagttgca

SEQ ID NO: 522635 - DNA, 165 bp, Homo sapiens
acttacctggcgtatactccactttgatccatgcccaataggggatgtccaaaatttaataatactatcggtgtacaagagaataaatggggagtgaaatagaataaaagatgagggaggggagtgctatatatttacacgtcgagtattctatatcaccatcat

SEQ ID NO: 522636 - DNA, 631 bp, Homo sapiens
  misc_feature (2)..(2): n is a, c, g, or t
  misc_feature (247)..(247): n is a, c, g, or t
  misc_feature (260)..(260): n is a, c, g, or t
  misc_feature (265)..(265): n is a, c, g, or t
  misc_feature (275)..(275): n is a, c, g, or t
  misc_feature (277)..(277): n is a, c, g, or t
  misc_feature (281)..(281): n is a, c, g, or t
  misc_feature (292)..(292): n is a, c, g, or t
  misc_feature (327)..(327): n is a, c, g, or t
  misc_feature (331)..(331): n is a, c, g, or t
  misc_feature (344)..(344): n is a, c, g, or t
  misc_feature (346)..(346): n is a, c, g, or t
  misc_feature (349)..(349): n is a, c, g, or t
  misc_feature (357)..(357): n is a, c, g, or t
  misc_feature (360)..(360): n is a, c, g, or t
  misc_feature (364)..(364): n is a, c, g, or t
  misc_feature (367)..(368): n is a, c, g, or t
  misc_feature (374)..(374): n is a, c, g, or t
  misc_feature (376)..(376): n is a, c, g, or t
  misc_feature (388)..(388): n is a, c, g, or t
  misc_feature (419)..(419): n is a, c, g, or t
  misc_feature (422)..(422): n is a, c, g, or t
  misc_feature (432)..(432): n is a, c, g, or t
  misc_feature (441)..(441): n is a, c, g, or t
  misc_feature (455)..(455): n is a, c, g, or t
  misc_feature (457)..(457): n is a, c, g, or t
  misc_feature (459)..(459): n is a, c, g, or t
  misc_feature (488)..(488): n is a, c, g, or t
  misc_feature (493)..(493): n is a, c, g, or t
  misc_feature (502)..(502): n is a, c, g, or t
  misc_feature (538)..(538): n is a, c, g, or t
  misc_feature (563)..(563): n is a, c, g, or t
  misc_feature (631)..(631): n is a, c, g, or t
gncctgggcagtacactcctctctcctctctatagcactcattccttctgaggtgtcatttcaccagccacctgagtaagtgctccagctatccccagaccagctagagacatcccaagcatggtcatgttagcatcaatgtccaggcatactcagggctcagaatcgtgggttagtaccactttttcccactaccccctttatattccacaagggactcacagccagacaggttaactctcccctnccctacccccacnaaacnctggaaaatnanaganagcctttttanagctcctctttctcggcccccttcttctggaaggnagtnaggatgtttaagntnttntggagctnctncttnttnncgtcantnatcttgttcttntcaataagaatggagataagatgtaaaatangangaagggaagnaaataaaantggtataagaaatnananaagaaattaaggtattgaaaggaaaaatnattangagtataantaaaaaattgagaggttatattgaaaatgaataaanagggaatggagggaataaaaaaaanaagaaatgatgaaataaaaggaaagggagtagtataaaggaaggaaaaaaggaataaatagagtagan

SEQ ID NO: 522637 - DNA, 467 bp, Homo sapiens
  misc_feature (2)..(2): n is a, c, g, or t
  misc_feature (247)..(247): n is a, c, g, or t
  misc_feature (260)..(260): n is a, c, g, or t
  misc_feature (265)..(265): n is a, c, g, or t
  misc_feature (275)..(275): n is a, c, g, or t
  misc_feature (277)..(277): n is a, c, g, or t
  misc_feature (281)..(281): n is a, c, g, or t
  misc_feature (292)..(292): n is a, c, g, or t
  misc_feature (327)..(327): n is a, c, g, or t
  misc_feature (331)..(331): n is a, c, g, or t
  misc_feature (344)..(344): n is a, c, g, or t
  misc_feature (346)..(346): n is a, c, g, or t
  misc_feature (349)..(349): n is a, c, g, or t
  misc_feature (357)..(357): n is a, c, g, or t
  misc_feature (360)..(360): n is a, c, g, or t
  misc_feature (364)..(364): n is a, c, g, or t
  misc_feature (367)..(368): n is a, c, g, or t
  misc_feature (374)..(374): n is a, c, g, or t
  misc_feature (376)..(376): n is a, c, g, or t
  misc_feature (388)..(388): n is a, c, g, or t
  misc_feature (456)..(456): n is a, c, g, or t
gncctgggcagtacactcctctctcctctctatagcactcattccttctgaggtgtcatttcaccagccacctgagtaagtgctccagctatccccagaccagctagagacatcccaagcatggtcatgttagcatcaatgtccaggcatactcagggctcagaatcgtgggttagtaccactttttcccactaccccctttatattccacaagggactcacagccagacaggttaactctcccctnccctacccccacnaaacnctggaaaatnanaganagcctttttanagctcctctttctcggcccccttcttctggaaggnagtnaggatgtttaagntnttntggagctnctncttnttnncgtcantnatcttgttcttntcaatcagcctggcgatccgtgtcatctctgatgcggggaagtcctcccctttgtgtctaagaacttncccatgaactt

SEQ ID NO: 522638 - DNA, 431 bp, Homo sapiens
agtgacactcgttcgtgacatgtggaaaatcacatggcttatttcttagaggttttgtttattcttctttactgctttttctttatatttgtctgactgtgttatttcagagagccggtgtttgagccctgagattctttccttagctggtcaattctgctgttaatgctagcaattgtattctgaaattctcaaagtgagttttaaatctatcagatgagtttggttctttcttgtaatggtcatttgttcatcagctcacgtattgttttatcctaatccttagattccttggattaggtttcaactttctcatgaatgtcaataatcttcattcctatccatattctgaattcaatatctgtcatttcagacatttcagcttgggtaagaaccacactgggttaagtaagcagggggatctctagaat

SEQ ID NO: 522639 - DNA, 301 bp, Homo sapiens
  misc_feature (199)..(199): n is a, c, g, or t
  misc_feature (259)..(259): n is a, c, g, or t
  misc_feature (266)..(266): n is a, c, g, or t
gagatagtctcaatgtaaagatcttaagtgttttatttatttttaattcctgtgggtacacagtaggtgtatatatttatggggtatgtgagatgtcttattataggcatgcaatgtgaaataagcacatcatgaagaatagggtattcatcttctcaagcatttatccactgagttgcaaacaatcctattacatttngtcttattttaaaatgtatagtcaccctgttgtgctatcaaatagtatgtcttattaatnctacttnttgtacctattaactatccccacttccctctattt

SEQ ID NO: 522640 - DNA, 242 bp, Homo sapiens
taccttgaagatctgaagtccaagagctctgaatactactggctagaaaacaaatgcgtatgtctgaactacctattgatactgtgagttcacatgttactagacaactggatgaatgagtcttttggcatcttaaaacagtatacacagaattctctctgcaagtctgatcatgggtgcagaagatacaggttgctacaggattatacttttataacacagcagatttcacaatgacgaac

SEQ ID NO: 522641 - DNA, 319 bp, Homo sapiens
caaatagctgggattacaggcacccaccaccgcgccctgcttatttttgtacttttagtagagatgggttttcaccatgttgactaggctggtctcgaattccaggccacaggtgatccacctgccttggcctcccaaagtgctgggattacaggcatgagccaccacacctggccccctgtatcttttatataatgaaatctgttaattcatattgatacctttagttccagctcaacaccatgaggtcattgtagtgtgcccaaccctcctcccccataatttgtatttatcctatcaatagaatgagcctagttcg

SEQ ID NO: 522642 - DNA, 554 bp, Homo sapiens
gactctagcaggatctgaacagcggctcggtgtccagtcagatgaaatgatttatcagatgtactttcaggaaatggaaggtcagtagtgcacagctggtgagggtagttcacatcttttcactggacttttgggagttggaaccttggcctttaactggtggtggtcaactaagtgatggaaccagaatagaaagggatgatgcaagtacgtttactgtgagttccttcggggttactcctgcagtaggtggactatcatctgggacagttggggaagcctcgacaggcctgagttcagcagcccaggtagctttgcagtctctctctcatgcaatggcttcagccgagcaacagctacaggtgctgcaagagaaacagcagcagcttttgaagcttcagcaacagaaagcaaagctggaagccaagttacatcagacaacagctgcagcagctgcagcagcatcagcagtaggtcctgttcacaactctgtgccttccaaaccagtggctgcccctggattcttcattcatccatctgatgttattccaccc

SEQ ID NO: 522643 - DNA, 90 bp, Homo sapiens
agttccagctgatccggcagacactcctcatcttcttccaagacctgcgcatccgaagagagtgcttctggaagcatatgcaagaaactg

SEQ ID NO: 522644 - DNA, 378 bp, Homo sapiens
  misc_feature (371)..(371): n is a, c, g, or t
gctttttgcatggctgcttcattttcacctttgaggctgcctgccttttatcttggattaaatgtattctcttatctaaattctcagtatttatcagagcaccttgtttgtttgagtctagcactttagatattatttggtaatttactaatttattatgtatctcccccagtaaattttaagctgagaacagggactgtaactgttttactcacattatatttgtattgctttgcacagagactagatattaaatatttattaaagataggaaataaggaagtgatgctactttgtattcaaaggctttatatattcctaggacctttggcttatcctgtttaaaaacaggacctagccatattaacctnatattag

SEQ ID NO: 522645 - DNA, 210 bp, Homo sapiens
gtttgtgtgatatcgttggcacgtaagagccagtcaacagaccctgcgccacactggtcaggtcacctagggtagctttaaaagtgcaggtttggctgggcgcggtggctcacgcctgtagtcccagcactctgggaggccgaggcggcggatcacgaggtcaggagttcgagaccagcctggccaacatgatgaaacccggtctccacc

SEQ ID NO: 522646 - DNA, 353 bp, Homo sapiens
gggagagtctggctctgtcgcccaggccagagtgcagtggtgcaatctcggctcactgcaacctctgcctcccggattcaagctattctcctgcctcagcctcccaagtagctgggactacaggtgtccaccaccaagcctggctaattttttgtatttttagtagagatggggtttcaccatgttagccaggatggtcttgatttcctgacctcgtgatctgcctgcctcagcctcccaaagtgctgggattacaggcgtgagccaccgcgcccggctgcactttttaataaacaacgattctgcagcaagtctcggccgaactgtggggccttcccttctgtcgtcttctc

SEQ ID NO: 522647 - DNA, 313 bp, Homo sapiens
ctagaggatcggctgctgtctgctctgtggaatatctgtccacctacagcctggggccctgcttctgcttctgggacctggcttggggttttctagctgcccaggctgagctcttcacactccccccacctccccactgttgaacactgccacttctggcctctcccctgccagaatcttgactatcccaaccctgcaccataaccgtcttcctggctggcttgggggatgggagctgtctgcccagggtacagagcgaggttggaaaggttgagagtcatgatgctcagagccagaggtcacactgctggtt

SEQ ID NO: 522648 - DNA, 385 bp, Homo sapiens
tggcgagtctctaaaaactaaaaatagaaatattataccatctgatctagcaatcccactgctgatccaaaagaaaggaaatcagtaagttgaagaggtatctgcactcccatgtttgttgctgcactgttcacaggtagccaagatatggaatcaacttaagtgttcttcagcagatgaatggataaagaaaatgtatatatacagcaatggaatattatttagccatagaaagaataaaattctgtcatttgcagcaacatggatgcagaacattatgtttagtgaaataatccaggcacagaaagacaaatatcacaggtactccctcctatgtgggagttaataaaaggtcatcttatgaaggccgtccggggtaaggctg

SEQ ID NO: 522649 - DNA, 114 bp, Homo sapiens
ggtctcatccgcttcctccaccacagtcatttcttcttcccgatagcggcgcccttttttggtcatcatccgcttcctccaccacagtcatttcttcttcccgatagcggccgc

SEQ ID NO: 522650 - DNA, 1507 bp, Homo sapiens
ctctgggtgattttacgcatgtacttaagtgttaaaatcacagtaaatggtcattagtctctatcagagattgagattaataaacggtattcagagtgttaatgatttaacacttacaaaaggtaaaattgcaaaactgcaatgggtaatgaatctaatagtaagtctaaataggagaattattgtaatatacttcctgtaattgatgaaaaaatatagagaatggtttttgaaccagtgacatgtattattgacagcccccagttttggagtacacactctagggcctttcttctaatatatgtacagattaagccatttttcttgccctatgctcaggccctttaactcctcaggtgaagttaatttaaatgggtaattgatcttcaactatccaatgacgttgtgcttttcctgtctgcctgtcctcatcccaaatttaacaagtgcttatatcgagtttagatcacgagtgtattgcagtattttgactccgtcttaatgccataatttttgtcccaatcttgttcagcgttacgaagcagttcatatagatgatctcatattcggtggcctgactgaccttaggtgtatactcagaagcaatgggggcatcacaatagtggctgctcatttataatacatgatccggatgacattgattcccctacagtgtgccaagggtaccactatctcacggagagagaaacaacaggtggtttctaaccctgcttgatctaacacgtggatctaaaacagagcctatccagctgagcacacattagccagactacttgtttcctttcttagatcctataacgatatacatgacatttcatctccacaaccccaccacaagccacacacccacctcctataacaggcgaagacagcgccagcggccatacggccacggggaggcaagaccggcagggaggcgagcgagggagagaagcacacagaaatgacggggcgacgaagcaagcgcgagaggggcaagggacggcagggcgacgccgggagcagggcgcgagagagaggaccagggggagcagcgcggcgcactagcggcgtcggcgagtcgggtgaccaccgaacgagaccggagcaccagagaaggcgagcagcaggcgacacgacagcgacgcaccgggagggggcaggcacaccgacagcccgcccgaaggggcggaggagccggccgggggccggcagaccgagcggccgcgcgcagcgaggcgcgccggcgcgacgggcgcccggaccggcacacgccagacgggcccgaccccggcccacgacgcaggaccgccgaccaggacggcggagaagggagcggaggccgccagcgagccagggccgcgccggcggcccgaccgcacgagagcagaacgcggcagacacggaggcgaggccggcgagcgcgcacgcgcgccaacgccgccagacgcagccgacgaggccgggcgcgggagcggcacgtcgcgcggcacgacagaaccagccc

SEQ ID NO: 522651 - DNA, 431 bp, Homo sapiens
ggggctgatcgaccaaaatagagtttagagaaatgtaccttgcacatgaaatgttgctgtgatcaccccattaatgttgaaaatcctgctgcttgccctggttctttccgtacttccctagggacacagagccagcaccaaaggatcattatccaagcgacgccgtatgctgcaccatgacagaacactatcccatgcttatgtataaatggctaatgactgctgatgcgcacatttaacccaattgctagccgtgcgacactgactggtttaaacttgaacaactgccagtctggctaaatactgacgtacctatcatattccttttgtcgcacattctcattagggcaatttttatcacatcaaatacactcatttcaatagtcagtttcaacagcatattactcttgatcaacaatgacatctcgttt

SEQ ID NO: 522652 - DNA, 305 bp, Homo sapiens
  misc_feature (251)..(251): n is a, c, g, or t
  misc_feature (295)..(295): n is a, c, g, or t
ggtgattggaacctgtctgattttacaggagtggcccttgtggcgagggatggaattccaaacccgtttcctttctgatgggttttggggttcccgtggggccaggagtcccaatgctcccttgaaatgagtggatatccaagctagcagggcagagaaggggatgtggcaaaacgaatccacacctgctgtagttgaatttgctcagggcagctgagacgcgtggtcctgagtctccagtcacacccttnttgcacaagcagtttgggttttgcttttgaggggggtcatttgnttcttttccc

SEQ ID NO: 522653 - DNA, 80 bp, Homo sapiens
  misc_feature (9)..(9): n is a, c, g, or t
catcatctngccatccatctatccatctacccacccacttaaccacccttctatctatccatccatccatctactcttct

SEQ ID NO: 522654 - DNA, 813 bp, Homo sapiens
tcgggagaatcgcaccatgcacctttcatgcgatctttctctcacggactacttgctcaaacacatggtcacgcacaccgcggcgtgcgcgccttccagtgcaccgtctgcggcaagcgcttcacgcagaagagctcgctcaacgggccacatgcgcaactcactcggcccgagacgtgcgaccaaatgccaccgccatccaggcaaaagggtctttcttcagcacacagcaggcgcctagcatggaagcgcccaaccgtgcccagggcgcacaccctgcgtcccatgatcggccgctcggggcacttggaccatcgcccacggttggatccggggcctacccgcacagtacggcaacgcccgcatgcgaggacctagctcggttccacgaccacctagaacgccactgctgccactccttgaggcgccaggtcctctcatcgtaccctttcaaccctattactccataccagggcataagtccgccttaccgtcctctcctccatgtacttgaaccctccaggtggtaccgggctggggtctggtgctggttacgaccacttctgagaagatggactatcttcactagcgtaaaaccgggacgctcatggcagcatatggaccctggcccaagatttgactccggttctcaccccgccctctcatgcggtgctggtgggaggatgggggccgcttgcctgccccagggtcaggctgggcaaggtccctagctctctacctcaagctgttactcccgtcatggggctgcctaaggagactcaagtggacccataatatacgggggctggcctt

SEQ ID NO: 522655 - DNA, 331 bp, Homo sapiens
  misc_feature (306)..(306): n is a, c, g, or t
ggaacagagctacttcgtacgtctgggcgtccctgtcggatgaggctgcggcagcacgcctatgagcactcgcctgggtcaagccttcgagtccaccaatgcagatgggcacatggaggcgtctgcatggcagcttgttcggcatggcgccctatacgacgctgcaatggcatagacatcgtcgagagcaacggccagttggactccagtagagctggctgagcaaagagccgagcgcacgaaggcctgcaacacagcactcgttgcgcgttcaagtcctcgggacaccccacgtaacacgccganaggcgtcccccaacgtgtgtccccc

SEQ ID NO: 522656 - DNA, 132 bp, Homo sapiens
gggaatatgacctgtcagctgctcctgcagctcagagatcacgccttccagctcccgtttctcgcgctgtcctgcgccgcggaatctccagctgcagctagaagtccgccgattctccgcctccaggtcctt

SEQ ID NO: 522657 - DNA, 223 bp, Homo sapiens
tcttgagagatatcaggcgatgaagagacgtagtagcatgcgataagctgcgagaagatgagcaaacacacattgatccgcagatttccgaatggaggaaaaccggccgaaaggtcatcgtatactgaatacaatagggatacagaagcgaacgcagtgaactgaaacatctaagtagctgcaggaacagaactcaaacgagaggggctcctctagaagtcga

SEQ ID NO: 522658 - DNA, 219 bp, Homo sapiens
ttggcggcatcgggtttgggaatatttgcgggacagggagtagccctatgtaggtccctgccgacagcgcgaccgcatgctatggctatccatcatcccggaatggggacagggactggaatgaaggactcaagcgctgccatttgatagagcttctatggctgggacaggaagactaagttgatgatccccgccggaaaggctggggaccgagctcga

SEQ ID NO: 522659 - DNA, 593 bp, Homo sapiens
gaagaaaaaaaaaacagtgggaacagagttgtcacctacctaacagggctctctcagagccctgttaggtaggtaacactctgagaagagcggggaggcccaaaaggggctggacagaaggtacaagtgacaaatcctgttcgttgggctcacagggttctcgagcagtgggtgccgcagcggggaagttccttgctaggagggccagggccgtgtgcccaaggcgttcgagttctctcagtgccagaaggaggcaaatgcccaggctgtcagcattttccagaatgagagcagaaggggagaagccttaaacccagggtcaagacatccagcaattggagtccgacagcccagcaccatctgggacacctgagaagcacctctgcccggccccacaccgtgttggaacgtgaggagcacctctgcctggccgcaccccgtcctggcaaggtgacggagcgcctctgcccggccgctgtgcaaacttccaagtgtgaagtgacagccttgtgtgtcgatgtttctgccttccccaagttggcactttcgacattaaagtttacttttgagttaaacaacaaaatcgagaaaaa

SEQ ID NO: 522660 - DNA, 855 bp, Homo sapiens
gggcaataagtcgcaaggtggacactacagtagagggcgaccacgcgagggagcgggacgcccgaagatacaggggtataaaacacaagcggggctattaagccgcatgggcctccaagggcccccggcacaacgggaagaaaagccccgccccatccgggaacaaaaagcggtttcccccccgccgcttggactggtaaccccgcgcccaagctacacctctggcagcgtaagggcagtccaaccaccccgaagcgggtgtagaacactgcccccccttctggccccccaacttcacgaccttccacttcctctcgaaacacaacgccccaccaaaccattcttcaggacacagcaactctagaaccacccatcgtagcagtaaacaagcacttttatcccctaacaggttaaaaaagagcactctccccctgactctctggcacgcgtcatcattttgtttcctatgtcaaatacccacacgcgcacacactattgggagtgggcacctgcaaagacacattttctccgttcagacaaaccccaggatacgtctatccatgggtgggtaacgctcgggtggactcttcccacagagcacaagcccagtgggggccaaaatagctttcaggaagggccacagacacaggcggctacaaccctcccaggcggtggggcccctaaaagagccccgtctctacggtgaatgcactaatgttactcagtgcggcctctgccgtgcttaggttatctgctctctctgttgtgtctttgtgaagccacacgcccctggctctgcagttgcccaaaagagaggaatggtaaaaaaccaggaatattgcccccacaaaaaca

SEQ ID NO: 522661 - DNA, 629 bp, Homo sapiens
tactggttcaggggtgctgagaaacatcataacatcacttttgccactactcaatgactatcctgttactaaggttgggccaaaattaaagggggggtcataggcccccacctctttttttattttcagacagggtctccctccgctgtccaggctggagtgcaggggcgcaatcatagctcactgcagccttgacctcccaggctcaagcaatcctcctgcttcagcctcccaagtagctgggacatgggcatgcatcatcacagctggctaattaaaaacatttttttgttgagacggagtctcgctctgttgtccaggctggagtggagtggtgcgctctcggttcactgcaacctctgcctcctgggttcaagcaattctcctgcctcagcctcccgagtacctgggattacaggtgcccaacaccacacctggctaattttttgtattttagtaagagacaggatttcaccatgctgcccaggctggtctcaaactcctcagctcaggcaacccgtctgcctttggctcccaaagtgctaggattacaggcatgagtgaccatgcccagtctaaaaactttttttaagggatgggtcttgctaggatgccaggtggtcttgagt

SEQ ID NO: 522662 - DNA, 137 bp, Homo sapiens
ggtttttaaaggggggggggggggggcccccccccccgggggggggggtttttccccttttttcccggggggggggctttttgggggggggggcccggggggggcctttttttttttaaaaaaccccccttttttta

SEQ ID NO: 522663 - DNA, 1482 bp, Homo sapiens
tcttaaatttacaaataaccaaaaaattttatattttcctacctggcaacacatttcttcaaagggtatagctgctgaacaactacagtgctctaagaattcacagaaatattcaatacgtcactttctagggtttataacagttattttagactttacaccacaagaagttatcaccgaacaacacacaaacacaaacaaaaacaaaaaaaaaacaaaaacaaaaaaaaaaaagggggcgggcgcccccacaaaacgagctcccccccgggcgggcccccacacccacaggacgcacgaaccccccggatgacttacgacgaccaaagacggagggcgccccataccacggggcgcgcggcccctctcactatacaacccacgagcgaacagcgagcgacacgccaagttaacgacaacacagccaaaacaaccgtcgcggacacacaccggtagtccagaggccgcgcaacccactgacgaaacaacaaaccaacaacataaacctgcatgcccgaagaccacaaacagacccaccacaccacccaccaccaacaaaaaacgacactaacacacacacctaacagagaccaaccaacacacacaaaaacaaacaaaagcacgcgacacccatcaccggggtggtacaccaaaacacacgcagcaggagaacaacagagccgacgacgcacttacatggcaacaacgcagtccctagtcacagccggcgcgacacactcccatccaccatccacacaacaaacacatgtaacaaacaccaccaaggacagataaaccacccaacaagcaaacacaacccccacaacgagagctggacagaccacaagatcacgccagggcgacgcttgccgcgcgacgtgcggcgaccgtccgacaccaacgcaagcaacaagggcaccgcatagtccaccacgccacaccaccaagacgccgaaagagacggaaacacgagccgggcccagacggcggcgcggccgcgacagaacgggcgtgttacgatcgcgagtgagactgggtccgagcacgcgctcgtgactgagagtccgtcaacgagcggcgagcgtagagtatgtggccgtgctgatgccttcacaagaacaggttaagaactccatgcgtcgaaaacggaaaaacggcaagtcgcgtagacaaatacgaacgcacacaacggagagctaatgattggacagtgcagccatattgttaaatactaagatgaaagtctatacactttcaatccagccagtgagatagctagtcgaccagctgagagtgcgatgaaccatccgattcgaggtgtgttctatgtcaattcgtgcatagtcttgtgtattgtcgtaatctagttgcagtagaatagctaataataacaacatcacaagacaataaggtcaaggattaggagaagcacgcctactagacatagactcgcatccgactaccataacataccgaatcatt

SEQ ID NO: 522664 - DNA, 115 bp, Homo sapiens
ctcgggtcggcaaaggatgtcactggaggggatacaagacggaatatttggtagacaataaagttcacgcaagaagaccctttggtcgaacccccttggccgacctttggccgaa

SEQ ID NO: 522665 - DNA, 924 bp, Homo sapiens
ccacctctcgaaatttttcctgccccccctgccacaacattcttggggaccattgagaaggactacctttttaaacgttccaaatctgatacctttgaaaagggcacactcttctcgctccgggtaataaacaaaattttctttgaacacgcctgggtcaaccctccctaaccccttgtttacacggtggttttaaataccccccgctcccacaggaaaccttgttatcccattccatcggtgagtatctctcgcgcaaaaagcctctcttctctccctttattgtaagcgccccccacctctgggtgagaaacaacgtgcgtgccactcaccacctcagtccgcgagccccccccggtggtgaaacacagactgaggcatcggttgatgtgattaccgtcggcaaaaagtggggtatctattaagaacctccagagggaggcccaacttatttatggagggaaagacacaaaccaccctagtatggccacccaccttctctttgcccgcctccgcccagcgcgaaacctgctggtcccccacatggtgtattattatgttcatttcgggctgttcctctaatggagcgtgtgagatagattcttgttaaagattagtcgctcacacgctagattcataaaatatggggacggaccaccatgcactgtttcttatagaaatgatatgatgtctatataattgtttgtcccacaatttcgttatatgtattaacaaattaactgtgacaaacaacaaacagataatcgatctccattaagtcgttctctcctccgccccccccagcattgttttcccaccgcaatcacattgaacatcaatcatcagtatggacaagttcgaagataaaatggcgcccccctttatagaaaaccaaaattaacatttaaaacccccaacaaaaca

SEQ ID NO: 522666 - DNA, 197 bp, Homo sapiens
cctcctggaggagacgccgactgtcagctgccggtgaatctcaatgaggatggcagtcctaatctggacttcaaggcctgaagagcagtaccagcttgacatcaaggatgagttcagatgttccccctgtaggagctggtactgtggagcgtgaggcaggaagacactaggtgttgcttctcctggtgtaatggctg

SEQ ID NO: 522667 - DNA, 134 bp, Homo sapiens
cccggcgggggcgggcccccccccccccccggggggccctttgggtgggggtttttcccggcgccctttgggcccctcccggggttttggggtgcccccccccccttgggggggggaacccccgggggctttta

SEQ ID NO: 522668 - DNA, 401 bp, Homo sapiens
aattttaacggtggctggtcggtgaggcagtgacgctgctgcagtcctcgatgaaaatatggattcacaaaccacaggcggtcattatcctaccgacggaccgatttcacaggacacagtttgcgtcacgggctgtgggcctgaggctggagactaggaggaatcacggtgggcccggtctcttgaggggctctgaatggattcccatcattatcttgtggaggattcagcgaggagtaccagaaacccagacccaggttggcagatggtctcaaggtccgtgaagctgctggcctcaaggatggcctgaggtagccgcagtgtgaagggcagtaaagtctctactgacacagtagaaacgcaaatcaatctgaagatgtcctcaaacaccaggtcattca

SEQ ID NO: 522669 - DNA, 470 bp, Homo sapiens
  misc_feature (27)..(27): n is a, c, g, or t
  misc_feature (417)..(417): n is a, c, g, or t
  misc_feature (461)..(461): n is a, c, g, or t
gtctccagcagcagcggcctcgctgcnccagcctgttgtcgcgcaccttcctcctgcaacagaatgggatacgacacgggtcttacacagcctctcggaaacatatctatattgataaaaatacgaagattatttgccagggtttcacaggcaaacagggtacctttcacagtcagcaggctttggagtacggcaccaaactcgtgggaggaaccactccagggaagggtggccagaagcacctgggcttgccgtctttaatactgtgaaggaagccaaagagaaaacaggagcaacggcttctgtcatctatgtccctcctccttttgctgctgctgccattaatgaagcaatcgacgcggagattcccttggttgtgtgcattacggaaggtattccgcagcaggatatggtgcnggtcaagcacagactgacacgccagggaacgacgaagctaatcnggccaactg

SEQ ID NO: 522670 - DNA, 1514 bp, Homo sapiens
  misc_feature (313)..(313): n is a, c, g, or t
  misc_feature (912)..(912): n is a, c, g, or t
gcacacatggtgcgggttacagaaatggaacagtgtctaacctgaagcgtcctaacgagtggagaggtgcctgactactatcctggcgtgcgtcgaagacatggttcacgtcgagtacaagctccctggcgactactgatggataagagcagtcgctgctgtgtgcctcctcgcactcctgagggcgggcttacttcgcaggcgccgctacactacgagatggcacatgtcctcattagaagtgggtggactggtggtcctgtgtcaggatgcgtggaggaatacacgtcgtttctgggtctatgggctgcanccatggcatttgacaccactgcgcggtaggggaacccaagtcgggtcgagtccctgtgggaaggtatattagacgtcgcaacctcatgagtcacgggtataggttaccagagtcggcctattggcatccaatgcccgctcgatcgatacgtatgctaattggtactaggtggcgacccattgttgctgctcgcttgtcttctccttcgcggcagcggtgcgcgaaagactcccgcgatcgaatcgatgctggtccaacctaggttagggggacccgaaggctggtccccgcgccggcatgcggtcgggaggcacaaagccgcattgaggctttggggggacggtggtggaattggggctggttatcctaagggggcgtctcttatccttcatattgtggccccttggccagttcggcccagccgctgaacaccgaatatggccaagaagctccttcaccgaaaggtaagaatggttttcggttggaacggcgtcggtgtggccgaacgaagtctttgggcccccccagcgaatttcgcccttcgagaaagaatttgtacaatacctagacaaagggtgcattttttcttcgtttcgatnttattccaccgcggaggtttgggggagcctggccttcagaggagaggacggcgaaatcgaccctatggaagcggggaacacaaaaataccagccacccattataaacgggggtaaaccccattgggttggctcgaagcgcggccatctgtttagcgcactagtttgccaatgtgccccaatgaaacggccacaggggagtttggttgggccagattatgagcagcccccacctaatgtgatgaacgcgcgcaagggggttttccgtattacttgggtctgaaggaaaacccccctttggtttggaagccgtggacggaaaagcatttgggcttaagcattaaacgtgggcttaagcggggaccgggggaaaaacatcggggacttcgaaacgttcgttggggcctgccggggttgtgagacagcaagttcaaccaagattaattacgtggagacgagacagtttcccttatttgggccgccacatctttatgccatttttatttacgcccacgggacacgcaacaacaacacccattatagagagcacacattcatacagcgcgcgtaacacgcatattactaatatcatccagagcggggc

SEQ ID NO: 522671 - DNA, 335 bp, Homo sapiens
gccctccacagcagcacaggccagtgacatcaacacggcttcagggggcagcagagacccgacaccatggcatgactgtcagtggtaacacaagccaccgacatcaatacctccccctgctgcagcaggaccacagacggacccaagcacggccctgggcagcagcagtcaaatatacgtggcaaacattttttatcagccgagggatcaacgagggaccatgtcttttgtttttgttgccgttattaatctttttttgttagtctgtttcttttgattggggaactgagattattaatatatagttattaaaaagcatgtattatttcctgtca

SEQ ID NO: 522672 - DNA, 453 bp, Homo sapiens
acagttccagagcctgacccaccagtctccaccccagcaaaacgtccagcctaagaaacaggagctgcgtgctgcctccgtggtccagccccagcccctcgtggtggtgaaggaggagaacatcatcaccacatcgcagcgagccttcgccctcgctgcggcgagcccccaagcaccggagagctcagccccgtcactgccacgcgaatgaactgtggatgtcgggagcgtgatcggcccaagcaacgcacgcacaggggcctgacagacaacagaacggagcgagatcagtgcgccaaagactgaatcagacatggctctggcagctatgcaagcatcgacaccctctcacagcagtcatcagcgaagtcgagcagtcgcggcgtcggaaagagacgtgagaggccctgagtcagcgaccgctgaaggagagagcgtggagacgctgagagc

SEQ ID NO: 522673 - DNA, 282 bp, Homo sapiens
tgaaatacccagagtcaggcccggaagaaattgataatcctcattgtgctagtagttgtgttgctgggcatttagcattgattattggactttccgtctgttgctgagttaagagtcggctatgaggctggtgcgctggaactcaactgtttcactccggacttggtgtggcaccctttcttcggcttgagatggggctgaatggctcctggagcggttacccgtcttggttcttgacccctggctgccagtacattccctgggatgtgctcttaccggtta

SEQ ID NO: 522674 - DNA, 124 bp, Homo sapiens
tttgactcatccagctaacgctgcaacttctcttgtaccttctgtagccctacttctacttctctttctctagcagctgtgtcaacaggcttaggaggtaccgagctcgattgcgtcctcgtgg

SEQ ID NO: 522675 - DNA, 620 bp, Homo sapiens
accaatcttacaaatactagggttggattttgcctggccttatgatgtacatcttttgtaaagaggtcggtagggctcttcgctatacaccacttggataagggcatgttgtgcaagcgatctaagatcggtactccagtgttttctcagtcatcacgttgttacactctggccagtgaagtgtaatccgactcgcaatgggccaactggggactcgggcaccccctcgagcttttgtacttctctttcctttacaacaggagtgtccaatttagcttatatttgcacccaggctgctcggcgttgcatgccacaggactacaggtcagcgactggccatctgcttactttcagcccggccagatgtcagttggataagcgcagcagctcttgatgactatcaccaggtacgtcgcagtgctctctgcactcattctctgagtagtacttgttcccgttgccgtggcagcctctgtagtggaaatgtacgctcttccccttgacagcatcatatgcccatagctggatgaaggcttggcacgggcccggaactatggggagattgcaggccgccacagttcggcaggtctgcgacactccttttgtgtgacgaagttgtc

SEQ ID NO: 522676 - DNA, 350 bp, Homo sapiens
  misc_feature (207)..(207): n is a, c, g, or t
aaggaaccagagacaacggacaaaccggggagggccacggcgccaaccaaagaagccacgtctggaacggcgccgataagcagcgaaacgactcccaaccacaggaactccaaccgggccagtcacagaggcagcatctgcacccttatacccatcaaccacatcaaactcgacagtttcaccatctccaacacggcgcagaaatanccgtgcgccatcaaaaagagggcagtctgatggacaaagacatcttcataggaggcagttcgattaataaaaccagagccatatcagacgttgaaccatttgacagagccaaggactttggggcgagaacttttttcaccgcg

SEQ ID NO: 522677 - DNA, 892 bp, Homo sapiens
ccagacttgaagaaccgtagtgtgagcgggtcttcgattatagatattgagctgcccgggagtgagcagggagacttgccagagctcaaggagttcgtggacctttctaccagctagctgtgaccatgagaggcgctggtgagggcccagggagggctgtcgtacttgctgacagtgttttcctagagcatataattacaatctttgaaagtcgcacactagatttcagaggttttgtacgatgctatagggctatcagggtggtgggaacatgtaggataaaggcataccaggtctgccccactgggtctggcagccctcccgggatgggcctacatccaacttccagtccctggccaggggtgagaggcaggaccagcagctggacttgatccctctgtgtctttttgcttctggcgtggtagataatgtcaacctgacagtactgatgcccagaccctgtacactcctcctttactgttgtgtgatcagttagtgctttattctgtatttgtctcccatgtcttgctcttctcctggagaattctgtcttctctttggccatctcaaattgagaacctaaacgtattcctgcagaactgcctggtgggcgtccagaagtagtagctctcgttccagcaggaccaagggagccatgctccagtgagtgactccagcaagtggaggcaacgtcatccttgatggtctgggagcctgggctcagaagggggcttcctgactctgggtccagtgaaagctgaattggtctcacttggtgggtcacactcttaactttctggtaggcatcttggccacggggggttacagtggcccgggaattatggcacagggaatgggcttaagggctggacttgattggaagcctaaaaac

SEQ ID NO: 522678 - DNA, 122 bp, Homo sapiens
tttgagtcagcccagcacttcatgtagtttatgcattacgggaatggctgctgctgcctcagagcattgtattgtgtataaagtaaggtgttaaatattcctacttcattggtaccttactt

SEQ ID NO: 522679 - DNA, 443 bp, Homo sapiens
  misc_feature (2)..(2): n is a, c, g, or t
  misc_feature (58)..(58): n is a, c, g, or t
  misc_feature (98)..(98): n is a, c, g, or t
  misc_feature (111)..(111): n is a, c, g, or t
  misc_feature (116)..(116): n is a, c, g, or t
  misc_feature (138)..(138): n is a, c, g, or t
  misc_feature (150)..(150): n is a, c, g, or t
  misc_feature (156)..(156): n is a, c, g, or t
cncgaagtgataacatggtaaacgtgatcttatcagactgactgaatgccgatttccntgggtgatctagttctacgtattacagggtgtaatatcgngagtgtaaataanggaangtacactgattaactgacgttnctcgttgttctnactgtnctgtattatagtatgtgggtataatatctacagtatacacacatatgtacttgtattccactattgtaactgaagaagactatgtattccttttttaattccgtactggtatttgtgttatttaaaagcaaaattctgctctatttagttgtataatattagaggatactttgctgtgcacaattccaagtgccttagaacattgtttagctttcctaagtatatataaatgcatatatgtataaaattgggaaaagttacctcaataaaatcattgggaaatcccc

SEQ ID NO: 522680 - DNA, 153 bp, Homo sapiens
gaatgtataatattttaattcacactttggtgtactcggttaactcgagggaagtgttgagtcccggtgttttcaaaagatgaaattttttttttttccccttgaacagagtcttgctctgtcacctaggctggagtgcagtggtgcatactt

SEQ ID NO: 522681 - DNA, 652 bp, Homo sapiens
  misc_feature (89)..(89): n is a, c, g, or t
ccactagttacttatagaaaaaaattccttttttttcaccgaaaatttagtttttctacacccccaagggagcccaacccgagggcggncttggggggccagacatttaaaacccaccccgtgggtgaaccaagccgcccggcctttttgccacctcttctggattcctaaaacttataactttaccggcttttaaaaaaccgacgaatgccttatgttttttacaaacccaaacagtttttttttaatagggcttctaccccaaagaaaataaacgtgaggctctcggtcttaacagcgaaactttgaaattatttcttgtataaaccacagcgagatatcaccaacccttgggaagcaattaaaactaatatttcaataacgcaatgaagtgccagctccatttacagatggggctcgtgttttagccattttcagaaccaggggttatggcctttttctttgaattctttcaggagaacactctttaaaaaaaaactcctccccctttcgggggaatgtgtaaaagaaacaacaaaggttccccaaaaattttttgtccaacagttttccttccagacacccggttgacaacctttaattatgtcccacaccctttgtaatttgtgggataacaccaatcttcaaggtg

SEQ ID NO: 522682 - DNA, 104 bp, Homo sapiens
cgactgcggccgggatggaggaccccagaggtgtcggcgatgggggtgtacatgggcgctgagcggggtcatgtaggtaaaggtggagtagagccggtgccctg

SEQ ID NO: 522683 - DNA, 320 bp, Homo sapiens
cctcacattttatgagtggcatgatgcctttcgtgtcgcgcgcctcagcgcctctccaccgctcgcccttctccgttggtccacatggagatctggttcctcccgcctagtcgtccgctctccatcaggtcctgcttctgcttgcccaccggtcgcgcacgctgtctctttgtcgccgtccgtgctgaagtcctctgcatgcagcgatgtggtctgtgcgccgtgcccaggccgttcacgaccggtctcagctgcgagcccttcaggctcgttggctaagactgcccgtaggtagcgactctcctcctgcagtgcctgta

SEQ ID NO: 522684 - DNA, 289 bp, Homo sapiens
  misc_feature (101)..(101): n is a, c, g, or t
  misc_feature (129)..(129): n is a, c, g, or t
  misc_feature (160)..(160): n is a, c, g, or t
  misc_feature (192)..(192): n is a, c, g, or t
  misc_feature (229)..(229): n is a, c, g, or t
  misc_feature (235)..(235): n is a, c, g, or t
cttcccacttcagccctccccaagtagctggtacctacaggtgtgtgcccacgacacccggctaagtttttgaaatttattttttgtagagacaggatttncctatgttgcccaggctggtttcaaacncctggccgtaagcgatttttccggcctcccnaaacgttgcgattataagtgtgagccactgcncctggccccacattttctttatccatttgtacattgntggacncttaagatgattccatatctttgctattgtgaatagtgcttcaataaatatgtg

SEQ ID NO: 522685 - DNA, 325 bp, Homo sapiens
  misc_feature (98)..(98): n is a, c, g, or t
  misc_feature (255)..(255): n is a, c, g, or t
atgaaatcagatagcagcagtcactaaattggaaacaaaaggttgcaacgtgacaaaaaaaattgtgtagtatttaccagcaccattcagtaatacanccttaaccatacctccttgacaagttatgaagtagttcaaggaggtatggttaaggctgtattacttcataacttgtcaagaaaagcagtttgcagcaagggcatgtggtgtgcacctagtattaaaattgctttgtcttaaaattgaacatgaggntattaaaaatacattgtgaaggaggactgcttatctcagagtgaagatactgcgggctgaaaagcactag

SEQ ID NO: 522686 - DNA, 955 bp, Homo sapiens
gcttaaaggggccggcgctctacctggcgaagccacccagccctggtagtggagaggcttgggactagaggatgagattcggcctcatactccgcgctgtcgtgtgagccgcacaaccccaaagaccaggctatgtcccaagggcacccgcctcgggcggccgcggtggcggcggcggcgagacttctcctagaggcgtctcggcgcaaccgccaacgccccgagccaggggccgaggccaggaccagccccgagaccagaggctttaccattaccgcagacgctcgcctggagacctgatgatctagcgccctgcagaagtcctgacggaggcgtacccccgggagaccccggaaagacccgagaagccagcacgcgaccgtcattccagtcagacaaacatgggcctgcaggggcaacgcagccagagtgcgcccctgccaaacaacgtccggactttggactttagcacaggaaggcgtccacggactcagctgtggtaagggctcagagatttagcctgtcaccacggcgaagagaaacctccgatctaggtttcctcagatataccatgaggtcacctggaggacagctagtgcaggagccccaggattgtcatgtcaggttaccaatagagacaggcacaagttacaccaagatgattaagagtccagatcccccggtgagaccatttgggccataggagcgcaggaagacagtgcatcgtaatacataccgaaggaaagaagagaggctaaaacgttagcaaccctttgccctttgctaaagtttaaggagactcatcaatatagacagggacccgctcggcaaattaggcgttggcaagtggcatgaaaatgggtacggaaaggagaagggatacatagctggacgtaaggtgataaaggataccccgtgctacaaaatgtctggtacgtgccttgacacaggactg

SEQ ID NO: 522687 - DNA, 435 bp, Homo sapiens
cttctgtgtgtacgtcagagagacccctagcaccagaacggtcaatgctatttcttgagcaagacagtaggcaagaaaataaaagcgtctcttgcctccgtaaccccgtagtcaaattgttaaaagaaggttctggaagtgagttcatcttgacgatatgtaatagctaatatataatatggatagtagagcaactcatgcaaacatatcgtaaactaatgaggacgtagcaggtcccagagttgagggagtggggacctccgaggtcatactacatccatagtgagccatggttgtaagtgctgtggaaaggaaactcagctcttacagtactgggctcaagagacaaagcccggtcctaggtgtttctcccatgagccattgggctttgagcacaggcagagtcccaaaaaagcaaaccaaatgcgcccaaca

SEQ ID NO: 522688 - DNA, 609 bp, Homo sapiens
aactataaaaagaagggggaattggtcaccaagcccgggttccggcgcctttctctctgcccccctggaccctgaaccgtatatcctatggccctgactgaaaggatttttacgtagtggaacccctggcatttgaaggtacccctaaccaaaaggctttggttattggtggaaaggcttgtatgtggggaaaatatgtggacaacacaaacctggtccccaggttttggcccaaaacaggggctgttcccaaaaggctgtggagcaacaagttgacatttgccctgacatttgcctatgaacgtttgtcccacttccgctgtgagttgttgaggggaggtgtccaggcccaccccctcaatgtaggtttttgtgagcaggagtttgaacaaacctgagccccaggccccaaggagggtgctggctgtaggtgaatggtagtggagccaggcttcccctgcatcctggccaggggagggagccccttgcctttgggccccttgcctgggggcccctgggtttggaaaaaaaggggccggggggggggttcgcattcaaaaaaaagtaatggggcatttttttaaaaaaaacatggattccctgggttta

SEQ ID NO: 522689 - DNA, 404 bp, Homo sapiens
  misc_feature (1)..(1): n is a, c, g, or t
  misc_feature (228)..(228): n is a, c, g, or t
  misc_feature (234)..(234): n is a, c, g, or t
  misc_feature (236)..(236): n is a, c, g, or t
  misc_feature (243)..(244): n is a, c, g, or t
  misc_feature (259)..(259): n is a, c, g, or t
  misc_feature (263)..(263): n is a, c, g, or t
  misc_feature (268)..(268): n is a, c, g, or t
  misc_feature (276)..(276): n is a, c, g, or t
  misc_feature (307)..(307): n is a, c, g, or t
  misc_feature (312)..(312): n is a, c, g, or t
naagttctggagaatgcttctgtctgattttatatgaagatattcccgtttccaacgaaaccttcaaagctatccaaatatccacttgcagattctacaaaaagagtgtttccaaaatgctgtatccaaacaaaggttcaactcttttagttgagaacacacatcgcaaataagtttctgagaatgctttggtctagtttttattggaagatatttcctttttcacanaggctnanagcgctnnaaatgtccactccanatantacanaaagagtnttcaaacctgctctatgaagggaatgttcanctctntgagtggaatgcaaacatcacagagaagtttctgagaatgcttctgtcttgattttatatgaagatattcccgtttccaacgaaaccttcaa

SEQ ID NO: 522690 - DNA, 208 bp, Homo sapiens
cacaggaatcaacaaaggaaagggacaggccaggtgtggtggctcacgcctgtaatcccagcactttgggaggccgaggtgggcggattgtgtgagtccaggagttcaagaccagtctgggcaacatgcgaaattccatctgtatggaaaactaaccgggaatgatggcgcgcaccggtggtcccagctacttgggaggctgaggtgg

SEQ ID NO: 522691 - DNA, 116 bp, Homo sapiens
cattcacatgggcctctcttcctttgctgtgccattgcatgggtgcactggcattgcggtgtgcacatccaggcaggaggcaggagagcacgtgtcagcaagtttcaacagcatag

SEQ ID NO: 522692 - DNA, 525 bp, Homo sapiens
  misc_feature (18)..(18): n is a, c, g, or t
  misc_feature (37)..(37): n is a, c, g, or t
  misc_feature (69)..(69): n is a, c, g, or t
cctgctgacaaccctatnccctcctccccctgaatgnccttccccagtggctggaagggccccccctgnggtatcctggttagaacagtcccctgtacacaattccctcccctaaaaacatcccttttttaaaaaaagaattggttccagcccataaagaaagaacaagatccatgccctttgcagggacatgggatgggagctggaggcccattatcccttcataaactattgcaggaacagaaaacccaaacactcccatattcctcacttgtaagtgggagctagatgagaacacgtggacacatagagggaaacaacacacactggggcctatgagagggcggaaggtgggaggagggagagatcaggaaaaataactaatggatacttagggtgatgaaataatctgtgtaacaaacccccatgacacacctttatgtatgtaacaaaccagcacttcctgcgcatgtacccctgaacttaaaagttaaaaaaaagttgaacttaaaaataacagattgc

SEQ ID NO: 522693 - DNA, 1570 bp, Homo sapiens
  misc_feature (2)..(2): n is a, c, g, or t
  misc_feature (95)..(95): n is a, c, g, or t
  misc_feature (104)..(104): n is a, c, g, or t
  misc_feature (358)..(360): n is a, c, g, or t
  misc_feature (362)..(362): n is a, c, g, or t
  misc_feature (369)..(371): n is a, c, g, or t
  misc_feature (373)..(373): n is a, c, g, or t
  misc_feature (378)..(378): n is a, c, g, or t
  misc_feature (387)..(387): n is a, c, g, or t
  misc_feature (394)..(394): n is a, c, g, or t
  misc_feature (398)..(398): n is a, c, g, or t
  misc_feature (402)..(402): n is a, c, g, or t
  misc_feature (406)..(407): n is a, c, g, or t
  misc_feature (415)..(416): n is a, c, g, or t
  misc_feature (425)..(425): n is a, c, g, or t
  misc_feature (439)..(439): n is a, c, g, or t
  misc_feature (442)..(443): n is a, c, g, or t
  misc_feature (449)..(449): n is a, c, g, or t
  misc_feature (451)..(451): n is a, c, g, or t
  misc_feature (456)..(456): n is a, c, g, or t
  misc_feature (458)..(458): n is a, c, g, or t
  misc_feature (460)..(461): n is a, c, g, or t
  misc_feature (464)..(464): n is a, c, g, or t
  misc_feature (471)..(471): n is a, c, g, or t
  misc_feature (473)..(473): n is a, c, g, or t
  misc_feature (493)..(493): n is a, c, g, or t
  misc_feature (497)..(497): n is a, c, g, or t
  misc_feature (506)..(506): n is a, c, g, or t
  misc_feature (510)..(510): n is a, c, g, or t
  misc_feature (529)..(529): n is a, c, g, or t
  misc_feature (567)..(567): n is a, c, g, or t
  misc_feature (569)..(569): n is a, c, g, or t
  misc_feature (578)..(578): n is a, c, g, or t
  misc_feature (592)..(592): n is a, c, g, or t
  misc_feature (595)..(595): n is a, c, g, or t
  misc_feature (599)..(599): n is a, c, g, or t
  misc_feature (607)..(607): n is a, c, g, or t
  misc_feature (630)..(630): n is a, c, g, or t
  misc_feature (656)..(656): n is a, c, g, or t
  misc_feature (658)..(658): n is a, c, g, or t
  misc_feature (662)..(662): n is a, c, g, or t
  misc_feature (746)..(746): n is a, c, g, or t
  misc_feature (867)..(867): n is a, c, g, or t
  misc_feature (880)..(880): n is a, c, g, or t
  misc_feature (885)..(885): n is a, c, g, or t
  misc_feature (1057)..(1057): n is a, c, g, or t
  misc_feature (1080)..(1080): n is a, c, g, or t
  misc_feature (1102)..(1102): n is a, c, g, or t
  misc_feature (1196)..(1196): n is a, c, g, or t
  misc_feature (1206)..(1206): n is a, c, g, or t
  misc_feature (1214)..(1214): n is a, c, g, or t
  misc_feature (1223)..(1223): n is a, c, g, or t
  misc_feature (1238)..(1238): n is a, c, g, or t
  misc_feature (1250)..(1250): n is a, c, g, or t
  misc_feature (1543)..(1543): n is a, c, g, or t
  misc_feature (1545)..(1545): n is a, c, g, or t
  misc_feature (1549)..(1549): n is a, c, g, or t
anatttttaatgggacagacggaagtgaaaatgtgacaggattggacctttcagatttcccagcattagcagaccgagacaggagggaaggacantgtaacccnactccattaataaaccccttggctggaagagctccttatgttggaatggtaacaaaaccagcaaatgaacaatcccaggacttctcaatacacaatgaagattttccagcattaccaggctccagctataaagatccaacatcaagtaatgatgacagtaaatctaatttgaatacatctggcaagacaacttcaagtacagatggacccaaattccctggagataaaagttcaacaacacaaaataataaccnnnanaaaaaannnanccagntgttacctnatggtcnggtnactnacanncctcaagnnatggtcacngaccaatttggaangannggcctntnaacantnannagngcagcananacagacccaggaatggtacntctngcattaggnagtnacttaacaacattaggccncaatctgaactctcctgaaaatctctaccccaaatttncntcaccctgngcatcttcaccttntcnaccncaacacanacacttccatgttccatctgagnacttaacgaacattcacattaggganangctngctgcaataaaacttggccgatatggtgaagaccttctcttctatctctatcacatgaatggaggagacgtattacaacttttngctgcagtggagctttttaaccgtgattggagataccacaaagaagaacgagtatggattaccagggcaccaggcatggagccaacaatgaaaaccaatacctatgagaggggaacatatnacttctttcactntcttnactggaggaaagtagctaaggagttccatctggaatatgacaaattagaagaacggcctcacctgccatccaccttcaactacaaccctgctcagcaagccttctaaaaaaaaaaaaaaaaaaaaaaaaaaaatttcccttttcttggggttatggcttgtctcagcacaantactcaacataactgcagaactngatgtggctcaggcaccctggntttaattccttgaggatctggcaatgggtttacgcaaaaggtcaccattttgaggctcctgccttactaatttattgtgcgtgcccaacaactnaaattttgtnaattggtntttcctctnagtttggagcagggntctgaatttttnccatttatttccctttttttgccagcagacagacttgagtctgtaaagacaagcaaatacacctgacagaagttttcaccatagttctaaaattgttacaaaagaaaacccccaaaagactcaggaaatttagcccccaatttttggctttgtccttttgtgagcccttttggcgtattaaaataaacaactgtttggtcgctttttttattgtgaagacccttctcgttttcattcgggaaagatgagcaagaggtctgcttccttcatttactcccccttctgtttttgananggcngttcgccaagcttaatggcag

SEQ ID NO: 522694 - DNA, 397 bp, Homo sapiens
  misc_feature (27)..(27): n is a, c, g, or t
  misc_feature (42)..(42): n is a, c, g, or t
  misc_feature (76)..(76): n is a, c, g, or t
  misc_feature (108)..(108): n is a, c, g, or t
  misc_feature (177)..(177): n is a, c, g, or t
  misc_feature (282)..(282): n is a, c, g, or t
  misc_feature (372)..(372): n is a, c, g, or t
ttttagtagagacagggtttcacagtnttagccaggatcgcngaatctcctgacctcataatccgcccgcctcggnctcccaaagcgctgggattacaggcgtgaacncgcgcccggccccatatttgtattttaaaatgacccctttggtaaccgtgtggctatttccccgctagnacttaagcaggtaagatgcatttcaataatccagggtgtgaagtgatagggagcctaaactaaggagagtgggcagtagggagacgaagagggaaagatagattncaagagggcagaattttattcagatctattgagccaaaagaatgttaggggagggtaaaaaggagggggaacaattccaaagttcccaangttttttgagtcttagttcaggtta

SEQ ID NO: 522695 - DNA, 734 bp, Homo sapiens
  misc_feature (221)..(221): n is a, c, g, or t
  misc_feature (244)..(244): n is a, c, g, or t
  misc_feature (266)..(266): n is a, c, g, or t
  misc_feature (360)..(360): n is a, c, g, or t
  misc_feature (370)..(370): n is a, c, g, or t
  misc_feature (378)..(378): n is a, c, g, or t
  misc_feature (387)..(387): n is a, c, g, or t
  misc_feature (402)..(402): n is a, c, g, or t
  misc_feature (414)..(414): n is a, c, g, or t
  misc_feature (707)..(707): n is a, c, g, or t
  misc_feature (709)..(709): n is a, c, g, or t
  misc_feature (713)..(713): n is a, c, g, or t
ctatgtcttacgtttgacacatgtaaaatgaaaaggaagatatctaaattcttgaatttgtttttataggagttccatctggaatatgacaaattagaagaacggcctcacctgccatccaccttcaactacaaccctgctcagcaagccttctaaaaaaaaaaaaaaaaaaaaaaaaaaaatttcccttttcttggggttatggcttgtctcagcacaantactcaacataactgcagaactngatgtggctcaggcaccctggntttaattccttgaggatctggcaatgggtttacgcaaaaggtcaccattttgaggctcctgccttactaatttattgtgcgtgcccaacaactnaaattttgtnaattggtntttcctctnagtttggagcagggntctgaatttttnccatttatttccctttttttgccagcagacagacttgagtctgtaaagacaagcaaatacacctgacagaagttttcaccatagttctaaaattgttacaaaagaaaacccccaaaagactcaggaaatttagcccccaatttttggctttgtccttttgtgagcccttttggcgtattaaaataaacaactgtttggtcgctttttttattgtgaagacccttctcgttttcattcgggaaagatgagcaagaggtctgcttccttcatttactcccccttctgtttttgananggcngttcgccaagcttaatggcag

SEQ ID NO: 522696 - DNA, 217 bp, Homo sapiens
aaatgtgtgagatcccgttagaaccatcacaagaccaaatggttcgtgccttgggccacccaatcattgttacaagatccaaaacatttaagatgtcatcccaaggtaatcttgatccttctgatatcatgtatactgttcagcattcccctcccccacattgagatgagtcctctcgtgccctttcgtgctgtttatcctgcaggcgttgcctctt

SEQ ID NO: 522697 - DNA, 830 bp, Homo sapiens
aacaggtatgatgaggtgcggacgtggtttatttcgtcacgggggctcgggttcgtagacgctgtcggtgctagtgtatgctccccgggctgcgcctgctcccccgcaggcccggggctctgtcctgctggtgcccgctgctgctcgccccgagccagtgagaacgagctcgaggagtgatgcctgggcccgtcccgcgctggccccgtggtgagtgcactgccctgctgctgccctgccggcggccatgggaaaggagctggtgctgcctgctgcttgtcccccgcctggcgcgctgcactgacttgatgacctgccactgggcaggccccctggcctgctggggtcccctgagtgacgctggctggcacctgagagtgtggctgctgggcccggggccacgcaggctggatgcccagtgtccagtgaagcgtctgaggaccctggccgccctgtgcctgcctgccatggtgatgtcccatgggcacctacactgttcctcacgtgcttcgccgtgcttctggctcatctggggtctcatcgtcctgctcttgctagcttcttgcagcttccttgctgccgcctgcctcaaacggcgccaggaggagcgactgcgcgagcataaccttgcgcgccctagaacttggagcccctcgaactcgaggggcagtctaggccgggagcccccccgggcctgactgccgccgagcaccaacacactgtaacccgcttggaggggcggctcatgcgcacgcgcaaccaacccgaccacagcctcctgaccgcggctaagactttggtcgccaggcctgagaccgggcagggatcgg

SEQ ID NO: 522698 - DNA, 512 bp, Homo sapiens
  misc_feature (170)..(170): n is a, c, g, or t
agtgactctagcaggatccccaacttcgacgacgcattcaggattgacaacaataaggatgtattattgaaatgtaaaaataaatttaaaacttcaggccgggggtagtggctcaagcctgtaatcccagcactatgggaggctgaggcgggcagatcacctgaggctgngagttcgagaccagcctggctaacatggtgaaacctcgtttccactaaaaaatacaaaattagctggacatggaggtgcatgcctataatcccagctactcaggaggctgaggcaggagaatcgcttgaacccatggagacggaaagttgcagttgagccaaggatcatgccattggcacttccagccctgggcaaatggagtaagactccggcgtccaaaaacaaacaaataaacaaagaaaagccttcattttactcatttgatttcaacttatcacccttcccagtaagtacagaatagtaaaacggcaggccaattaataggctgtcaccttctctgg

SEQ ID NO: 522699 - DNA, 211 bp, Homo sapiens
gcatgtatccctgatggcatatgcgtgaataacgtaacatatgacttatggctatcagtgtatcttctttgctgaggtgcttattcaggttttatagtcaattttaaattgtgatagtagaaatgtcttatttcagatataaaagagttctgtataatattttggatgatattattttaccagatatgtcttaggtaaaatattttatcca

SEQ ID NO: 522700 - DNA, 148 bp, Homo sapiens
ggcggcggaggccttggcagctcgggacttagtgcaagagtcagcatgactcttcagaggctcttcaggctctcctctgtcattcggtcagccgtctcagtccagttgcggaggacattggtgttacaacagtgcattaataaggact

SEQ ID NO: 522701 - DNA, 119 bp, Homo sapiens
gagcagatgctggaggatgaaaccctgggaaggctcctgagttgtctacccattgacccagaggttctttgacagctttcaaggataggctttattctgcaagcaatcaaataataaat

SEQ ID NO: 522702 - DNA, 157 bp, Homo sapiens
gataataacaataaaatgtgatgcagataatagacagattttcaagttatggaaaccagattgagacaattagaattaaagatatctactaaatgcattgaagatgagtatatattgattatataggataacttttaatctttcaatattaaactat

SEQ ID NO: 522703 - DNA, 267 bp, Homo sapiens
gagaggtggggagcagagaatctcttaccaacacaacatcttggtcagattgaacctcaatctcttgcactcaaagcttgttaagacagttaagcgtgcataagttaacgcccaatttacatactctgcttagaatttgggggaaaatttagaaacatataattgacaggacttattggaaatgctgttataatgaatgaaacatttgcatataagcattcatatttacgtcttatacatttgataaagtaaggcatggttgtggtt

SEQ ID NO: 522704 - DNA, 1415 bp, Homo sapiens
attaccgctgcgacctctctgtcttccagttgtatagccccgcgggcagcggggggcgcaacctcaccacgactgggcatcattcgagacgcagacaccaacaaggtggtgtgctcgtcaccacatcatgcacccgacctaccgacaaggaggatcgctggggtatggtggacgaccgcgtgtgcaagaagtgcccgccacagcgcctggcgcgtcctcgaggcacggagtgccgcaacgtacccgcacacactagctcatacaacgggctgtgcagcagtacttccacgctgcgccggtcctatgcgacgccacactgcatgcagacgacccatggcccatggaacctcaacggctccactcccaccttgcagctagccgcctagacatcacaccgcacgacgggctgtgcgacgatccacgcgaaatccgcctccgcggaccaccgagccatcactcccgccgacgaagaccttaccacgcgctggactgccgcacgtccggcagaacacccgccgaacgccacccacccgaccacctgcccccctactcctctggcgaagcggcccggaagccgcgccccaacagacacgactactggcgacagccctaaaaaaaacatgcacgagggacgcatgccgagcctgtgacccccggccaagacacgctataccaaactgacaacatcggagaggccgaccaatacaggagaagaggaacaatctccatgcgacacactcacgcctacaatgggccacttcaacgaaccacgccatgcccaagcaaccaccgccccacctagaccaagacgcccgcccatgcacacctgggccccctgccccaccgcgaccccacctaaaccgcatggagatagacaacgaaagcggcaatcccaacgggcaacaccctgcgacctgcgagaacgaacacccccccggagtagaaaccgtaaccacccactacccacgatcagacacactgctaccacgcacaccccagccacgccgccacatgcctcgcctgagcaaacccaccagagaacatgacaaacccacgaaaaatggagcccgcatcaacaccacatgcaaacccagcccgagcctcaccgcgccccaacacacaccgtcccacgaccccccacctccgaggcacacaacatcgagaccgcacacctgcccccccccacagcccgccacaacatgcccgatgcaggacaccgacacgcatcacccactaccggcacgaacccacacccacggcaagaacagcactctagacgcacccccacccatacggcaaccccacgcggcccacagcaccgccgccaacaccgcaccgcaacacagacaacacccctcgcagaacacacacgcacagctaatcccgcaccacaaagagcggcacaccgagtacaa

SEQ ID NO: 522705 - DNA, 128 bp, Homo sapiens
acgctcggcccgctactgcggccaggctttttatttaatgtaaatagttttgcttccaatgaggcagtttctggtactcctatgcaatattactaagcttttttctattgtaaaacagaaaaatcaac

SEQ ID NO: 522706 - DNA, 834 bp, Homo sapiens
agcgggctcgggctcgcgaggccggggggacacggggggcgcggcaggagccgcgcgggaacccgaggctagcgcgcgcgcagcgcgactctccttgggctgctgagggctggagcgatatgccgtggaggcgccatgtaggggcctacgctagtcgctgtaggtcgggccgacgctggcccgatgcccagaggtctatggagctattgcgcgaccggagcccaagtatgtgtagtgattgtctgctagtgcaccgggatagcctcggtgccctgcgctgggcttggaagggcccttggtgagcgtacgcggggggcgtcggtgcgcgggcggtatggcatgggcgtgctgctttgtgcggtgtggtctcgggcagtcgtgtacaactagttcgagtggctcacttggcgaagaggatcggaactaagatgcaatccgtcgagcctagtggagatggcaacccccgaataccgcctgcgtgcctggccatcgaaagctgcgacatgcccgacattggcgacaacgcagcgaacggacgtacaaggctgatcgtgcgctggtatggtccgcagacggagcctagatggtggtgggctccccatagacctgcaagcataccagtcgcaataaatcaacatcccgcataaagcctctgacagcgagggtggatgcgacgggagggagctatgccggaattaaggcgggggggttaatatctagtacgcgggctggcataggtttcggaggaagtctgagcgactttaatgatggttaatgatacggagactgggctaaaagcgcctcgcgaaaatgctgttaagatgtgcggctatt

SEQ ID NO: 522707 - DNA, 414 bp, Homo sapiens
ttttttttagggcagttttagattcatagaaaaattgagagacaggcacagagacattccctgggtccatctggtcaacaccctccaccagaatggggcatctgtagcatggacaatcattgtcctcactcagtctacaccctacacagcattcatgctttgagctgcatgttctgggttcacagatgcatgtcttctacaatgtatacagaccagcttcactgacctcggataccccgtgctccaccttgtccatattttctcaaagtgtttcaaagcccccagattcaatagcttccaggagttctgatttgacactcatggggtcaaagtgcaggcaaatggtggaacctctggaaggtcatcagacacacaacctggtggttgcagcagaaatcaccaggcaagtaggta

SEQ ID NO: 522708 - DNA, 294 bp, Homo sapiens
cgcccgcccgccgctggagcggctggagaagcccccacctcccggcggcctttgttagcccggcgggaacacaccaccctgctcagctggcttcctgccggctccctccgggactcatctcggctccgtccccatggaggtcatcggcctagggaacttctcgaggcttttctccctctgctgctgacgggaggccgaaggagggcacagcctccactcttgggaccctcctctgtgaaagatcacacctcaacagggcaggaataaaacttccacgcagctttcaatgccaaa

SEQ ID NO: 522709 - DNA, 1395 bp, Homo sapiens
aagctcagaacccagatgcaaaaactacagaactaattagaagaattgcccagcgttggcagggaactatcctgattcaaagcaaaaaaatatcatcaagatgcttatcagggcggcagtggcaggtcatatacaagcaagcagataagcagatttcaaagaacagctaactccaagtcagattatgtccttttggcaacaaagacacatccatgggacacaacatttcaaaaaagtgcaacagctcatggaaccacacaacacaacaacgacgagttcacaccacgtgcttgcgaaaaaacccaacacgaagaccctcgtttccagctctcatcacacggttctacatcgtcacgcttgcaacagacattccccacagcacaggctcacaagggtgaatatccaccggaaaaggacaaaacagcatgccaacgcacctgtcaacaggcaaaacacttgcgcaaaacacatccttgctctgagactcctgccaacaaggggacatataatcattatttacgaggcgatgcttaaagagtaaggcacgaaaaactcgggtagtatcgcatcaaattgcaacagtgcaaggtataggggggaaaagaaaacaaaaaagtgcatttggcaaggtctggcccacggcaaacaggaatcagtatcatcagagagtacggaaaaaccaacagtcaccaacgcacacaccaaacacgcaacaaaaatatgtggggatggcccctgcacgggcaacgggcctccacacacggttacgcaacacgacacttgcaagacaatggtgcatcccacccaacaggagcaatacgggcccccagggaccaaccccaaagaacaaaggaaccatccacaatcaccccatgacaacgaccaacaccggcaaagaacagctcagagcacacgggacataacacggctgaggaacacaaccgaagaaaacatcatgacaggaaagcagcagaacaacaccaagacgtaaggcggaaacatcccggcccaagcgataacacactcgggcacgcaggggaaaaaaccccaaaaacaaaacgggttccagggcacaacccaccaccaccaggcgatcacacaacctactggaaggaacaaacgagaacaaccaagcaacagcggtaagcaagtaaaaccatacagacacacaggaacaacacaacagacaaaacacgaaaaacaccacgaacgcaccaccatcgacaagcaaaacccgtaaacaggaaaaaaaagagcgaacgaaaacaaaacgaacaataggagaaacggaaacaaccgagcaacaagaacaaaccgagtaacaaacagagagacaacggacaaccacacaaaaagcaccgagaacacgaagagacaaggaaagccacgcaacca

SEQ ID NO: 522710 - DNA, 128 bp, Homo sapiens
ccgtcgcctgcaccgttgtcttttgttggggacgacttgactctgtagggcctctgccttgactgccgcacgtctttctatggccccgactctacggacaccgacttaccctgacgacgtctgaccac

SEQ ID NO: 522711 - DNA, 139 bp, Homo sapiens
ggtgatctacgtttaggctccacagtgctgggattacgaagcgtgagctcatgcaggcttccagacctattcggctccaggactttatctatctatcccttctcatggactctatctatcccttctcatgtcatacatg

SEQ ID NO: 522712 - DNA, 1064 bp, Homo sapiens
  misc_feature (344)..(344): n is a, c, g, or t
gcggagacacgcggcggagtgctgtgttgggcagggccgactaccgtgatctagagggggcacggtcctacgtgccagacggacggactcagcagaacagcagctctgcaattggcgggagacggggtcaacctgacaagtgactgttctcagttcgtcccgtgggctaccatcggacatatcaacatgcaggaacgcagtgtgggaacctggatctatgcatgtctactgcacacacaggaaagatagtcaggggctgtacagaccccagctgggtgttccatctcggcatgggacagccgaagtcacattgaaggctgggactggtcagtaggcatactgantgctgtacaggcggtgtatggggggttcatgcccaggcgagatagatgctacatccctgtaacttccaagggccaactgaaaggattacggcagacagatgagacgaacatagtggaatcagggggaatatcatgcacagaacccacgtggtgggtcgctccagcgccccaacggactcagggatgacgcgaggatagatgttcatgatgggacacaatggacctcgggcagtaggatatctcctcgacgagtgactcaccgaaatacgacatggaccaatcgagggccctggggatgaggggaagcctggattgcgatggggccatcaggcgttctccttccagggggacatgtgtgattttcttgctccagacaagcaggggacgcgaaccattcgtaattggtgtatcttttgcgagaggaaggaactacatgtattcacattaggaagggggaagagaacggtttggaagatggggttatgtcccacaacggagaagaagtgggcgagttggaaccacagtcgaataggaggccggagggacatatattgaagagagtttgtcttggggagtgggggccaacggggaaagggacaggggggaacatagggttggggacacatattaggttcataagtggaaaggagtgaactagagatgcttttggtgggaccgaatcaaattggaacccggggaccatgaagctggaaggaagac

SEQ ID NO: 522713 - DNA, 241 bp, Homo sapiens
gctgtcatgactgtgggcacatcacttcatctcactgaatgtcattcttcatttgtggatgtttgcatggtcaatgccgagcacatttcctcacatatgccatttcaggatacagggagaagctagtagtctccaagagagaaagaaagccttcaccagatacagagacctgccagagccatgatcttggactttccaccttccagaccgtgagaaataaaagcctattgcttaagccaaa

SEQ ID NO: 522714 - DNA, 150 bp, Homo sapiens
  misc_feature (119)..(119): n is a, c, g, or t
gtaggaccccagcgccccctttttttagcatcttcctaggcggtccttacacactttttttccagcttttgtgattctttcatatggagggggagggttgtggctcatgctccgatggnctattgtggagtagagaaacccactggatct

SEQ ID NO: 522715 - DNA, 539 bp, Homo sapiens
  misc_feature (22)..(22): n is a, c, g, or t
  misc_feature (67)..(67): n is a, c, g, or t
  misc_feature (70)..(70): n is a, c, g, or t
  misc_feature (73)..(73): n is a, c, g, or t
  misc_feature (103)..(103): n is a, c, g, or t
  misc_feature (115)..(115): n is a, c, g, or t
  misc_feature (123)..(123): n is a, c, g, or t
  misc_feature (147)..(147): n is a, c, g, or t
  misc_feature (172)..(175): n is a, c, g, or t
  misc_feature (195)..(196): n is a, c, g, or t
  misc_feature (198)..(199): n is a, c, g, or t
  misc_feature (220)..(220): n is a, c, g, or t
  misc_feature (232)..(232): n is a, c, g, or t
  misc_feature (235)..(235): n is a, c, g, or t
  misc_feature (243)..(243): n is a, c, g, or t
  misc_feature (262)..(262): n is a, c, g, or t
  misc_feature (272)..(272): n is a, c, g, or t
  misc_feature (275)..(275): n is a, c, g, or t
  misc_feature (305)..(305): n is a, c, g, or t
  misc_feature (393)..(393): n is a, c, g, or t
  misc_feature (410)..(410): n is a, c, g, or t
  misc_feature (429)..(429): n is a, c, g, or t
  misc_feature (435)..(435): n is a, c, g, or t
  misc_feature (443)..(443): n is a, c, g, or t
  misc_feature (454)..(454): n is a, c, g, or t
  misc_feature (462)..(462): n is a, c, g, or t
  misc_feature (521)..(521): n is a, c, g, or t
tggatgctccactgtgcttgcnaagatgaagtgcgtattggtggccactgagggcgcagaggtcctnttntantggacagataaggagtttgaagagagtatncggctgaagttngggcagtnagagaatgaggaagaagagctccntgcactggaggaccagctaagcaannnnctagccccggtcataatatnnannatgaagatgatggagaagctntaggaaaaatanacntgcttctncacggaaaatggcaacttnatgtatgtanttnacatggatgcgggccccagacctggcgcangtgctccagctgtgggagcacttccagagcctgctgtggacctacagccgcctgcgggagagaagcagtgcttcgccgtggaggtgantactgggcgcgggagtnctcaagacttgaagctgtnagccanagtgccanctccctgcgcncggccganctgcttgccctcatcctcctggttcaggacctctaccccagcgagagcacagcagaggncgacattcaggagaaaga

SEQ ID NO: 522716 - DNA, 343 bp, Homo sapiens
actgggataacggtcgggtagattaacaccccgtgagtataacaccttcatgtaggttactattggcccatagacctagataacaaatcagctaagcagcaggaagtccaatacaaaggtgagaaaaatactggatcaaaggtgttgaagacagtagccaagactaataaatacccttacagcttgagctttctggggcagataaaaagattcccagaattttacttttcagaatagatcttaataggggatgaaaaattatagtagtgttacagcattactaactgcccaaggatgatagagtattaccagtactagctatgtggatgaggatgggtgtggt

SEQ ID NO: 522717 - DNA, 632 bp, Homo sapiens
acatataagtatttagagcagatttgcaattagattcttgtatctgaaaacactcaaaaagtctaggcagaagataatgcaaccaacagtcaacttctagaagttgactgttggttgcattatcttctagaaccttggaggaaaagccatttcaagacagtgctttaaaacactaacaaatttgcttctgaaatatggtagctttccatgtgcaaaaaatgtagtcttctgaaaaatctgtgaagaaaatcttatttcttacattctcaaaaaactacattaaattaatatatgtataagcatatgtgataaggcaatgcaacctcactgaggagcacaattgggtccattctgttggatcacactttgtatgtgatgacagattttacagatattttttctaaccattggaaatcaagatatactatgtctggtagctataagtcaatcaaagtataacaattgacctatcttaactgctgtattttcatttcatttgtgaaaatttagtcgattgatataattatataaaaacttaatatgtgcaaatatttcacaaatgtaggtaccctgttacttctaaaaggcattagccaggcaatggagatagatcattgttctctccatctccc

SEQ ID NO: 522718 - DNA, 144 bp, Homo sapiens
agatacgaatcgagctggtaccctaatccccttccccgtggcatccggcggggccagctgtccgattaaatctggtagtcaatcaccgcatccagctgcgacgagaaaaccttgtccttgatttcggtcagcgacagcgtcggg

SEQ ID NO: 522719 - DNA, 352 bp, Homo sapiens
tgaacatgcgtgtccaggagttgtgggccacgtgaactattactgaaccactgcactccagcctaggtgacagaacaagacctcatctctaaagacaatttaaaaagtcacaaatgttaaaaattaggccgggtgcagtggctcatgcctctaatcccatcactttggcaagacaaggcaggcggatcacctgagctcaggagttcgagaccagcctggccaacaaggcaaaacccatctccactgaaataaatactaaaattcgctggatgcggtggcgcacacctgcaatcccagccactccggaggccgaggcactggaattgcctgaacctggggacacgaatgttca

SEQ ID NO: 522720 - DNA, 115 bp, Homo sapiens
  misc_feature (43)..(43): n is a, c, g, or t
  misc_feature (63)..(63): n is a, c, g, or t
  misc_feature (91)..(91): n is a, c, g, or t
gttaagtggcttaaagagcactcagcctctaaacacacgttgncttagtgttattagcttggntactaaatgtgccatgcccagttttcgngtgcacctgagagcacatgggatg

SEQ ID NO: 522721 - DNA, 163 bp, Homo sapiens
ctccctgatttgcagctgctgagagactggtcatcctcacaccccacaggctggagggtggaacgtgcggctgcgtggacctccacgatgacatgcaaactctgaccggagagcacgtgggtgcgggactcttgcacgtcgcgggctcgagccccagtgaagt

SEQ ID NO: 522722 - DNA, 461 bp, Homo sapiens
agggcacgtagcccttcgagagcaccgtggcgtagcggctgtccgcgaggttctggtaatcgaagaagccgtcgctgatgctggcattgacgttgatgtcgcgggccgcccgcaacgtcagcgcccccggttcggtgccgaagcgataggcgaactggatcgtgctcgtggccgggttgaagtattggtagctgatcgtggtgggaaacaatccgttcaggaaggtcaggctgtaagtggacaggttgcccatggtgccggccgcgagattccacgcgctcgccacggtgatgtcgccgccattgacgccgaggtcgggattgatcagttcgaccccggggcgcaggtggaaattggtaatggtcgagagctggctcgcctgtgcgctggtcagcatctgcaacgtgttgagcgactgctgcgtgaagccggccagcgtagactggtagaatcccttgtga

SEQ ID NO: 522723 - DNA, 963 bp, Homo sapiens
taaacttcgaaaaacacccggtcccaaaattacaaaaaaaaaaaaaaaaaaaaaaaaaaccctcacccaggggtttcacccccttctacaaccaccacacacaacacgacacagaccccctcgatgggcgccgccaccccccagcagacgaaccgccccccaccaagcaggcgacacacaaaagagacacacctcggggcgccacatcaccgagcacgcgcgacgatcgaccgagcgagctgcgatcgaccaacacgggagcccacacctcccgccaaatgaagggacgccaccacgtggaggactcccaacagccccctcttcgacggaagaaaggcgtggtctatgaaaaaacgctccgcggggcagacctcactagtgcactataccacgggagccacccccaccgcggaggagccaccacaccagggggagcgccccacaacccaacaaagacaaacaccctcgcgggccgacagcgggactctcaaacaaatcgaaacccccacccacgtgagcacacaacgcctcgtctgcagcgcagccccacaacctgcgaagaggcaacaacacaagcgggtcagcgcgacacaaaacccacgacaagaactacaccagggagggaaggggcccccaacaccaagaagggagaccgccagagcacgcgcggacaacaggacgacctagcagggacacaactacgtagcccctcccgccaaaagagagccccaagagtagcgtggcgccacccaaaggccgtctcacaaacagcaggacaacacacaaatgcgcaccccagccgacactatcaaaacgcgggcactcaacacaatcgccagagaaaagattcgtgacagaacaatcggcgcgggttatcacaaccccccaaccgtacaacggaacaggggcaccccccaagagtatccaccgactagtactcccccacccggcgccacccccgcg

SEQ ID NO: 522724 - DNA, 107 bp, Homo sapiens
gcccccccccccccctggggccttggggaaaaattaattttttcaaacccccgcccggggccttttaaaaaaaagcaacccttttttaataaagccttgggggccca

SEQ ID NO: 522725 - DNA, 654 bp, Homo sapiens
  misc_feature (167)..(167): n is a, c, g, or t
  misc_feature (191)..(191): n is a, c, g, or t
ctggatttaaaagcaaaaagtagttacggtttcatggggtggcccctctctctctcaccctctgggtttcgggaggtcgagtggggtattctctttgtttggcagtggttgctgtcctcttgagcgatctgaagatctctgtatcccctgatcacccgatcagaggncgccatgtcatatcttcgccgtgntgttggcacttctagcacctctcctgttacatgtactgcacggctctcgtgttgcgtgcatgtgtgcgctgtatatacatgtatagagagatatattgtggcggccgggcggagcgggacggggtggagtgaagctcagggctgagccaggacagccatggagctgtatctgccccttccgtgttggtgagattaagggaagaaggtgggagggcattagtcaagccggactgccccagtctttgactggttaccctcctctctgcaggtaggtttttctggatgataggacagatgatggattcttcaccaccattttccttgtactcttctctccacccttcttagggctggaggatggcatttatctctagatgactgttcccaaggagatgccactctgctctgccttactgttgggaaggagagaggaacccactcacctcttatcaagcttagagtg

SEQ ID NO: 522726 - DNA, 1026 bp, Homo sapiens
gccggagaacgaaaagaaggagaatagaggagctgctggctgagaaaatggctgttgatggtgggtgtgtgggacactggagactggtgaaggtcgctgtgaaccatgtgagagaagttcctcggagcgatctggacgccgttcagccgacacccgtgactttcggaaccgagacactgaagtctcgttccaggttctatgtatagatacatgtatagcgttctagtcattggagctggcggcttaggatgtgagctcctgaataaatctgggcatgtctggcttttagacacggattcatgttatagatatggacactagtagtatgttctccaagtcgtacataggcaggtgtttgtagtgtaggcctaaagataatctggagagacctacggctgcagagtcgcgtgcagagactttcatagaaatcgacggcagtttcgcttagattgtcagagtggtagttatccatcgagttctcagaccaagacttgcgagaggatttataagcgaccactttcgtatcgcacaactttcatcacttagttggtactgtggtactgggactctatcatcgaccagtaagcatggactcaagtggcatgcggagtatctcttcattcgagttatgaacgatgggtgttctctaggactccagagtgctccgagttggtcgcctgtgtgacctaggagtggggggggcacccgaaacagggctctttgaaagggcaaaagtggccccggggtggaattgcttgttcctggaacacttgtcgtgcctaaggtaatcggtgagtgccatcgactggggatgcggttattctgactaggccatggggggtcttaactttcttgcccagtgggtggcttcccaatttgggcaattcctatgtgggccaagggttagcccagaaggcccctggtatttgggcggctctgttcacgtggatgcttgtgccgggggtccctgggcccccgggccttgtggggagacgcggggcgtgtccttcaccctggggtctccat

SEQ ID NO: 522727 - DNA, 282 bp, Homo sapiens
tccaggagcttcctggctctgggggaccacggtgggacttagcagtgaccgtactggccgccttgggttgctctcttagacgccatgggacctccgtccctcattcatcttgcacgcacatcccatttcttgacaagccttgtgagacgtcggtttggtagacttggacatctctctgggttctgaagagccttgacgctggcctggaccattcctgtccctttgttaccatacttgtctctggcgtgctggtgtccgttccctgccccaccatgcatgctc

SEQ ID NO: 522728 - DNA, 851 bp, Homo sapiens
ttcatcatcattttgttggctatgtacacctctgcactttgaaccctgcgcacacgtggcgtccgctcgtacttgtatgttcgcatcacaaaatttatggggtgccgtgctcctgatggttggcgcaacaacactacggttgtggtatctgttgcgtcgctgcgcaccttcgttggctatgtgcaccggctgcgggtgcggggcagctcgacaacatcgcgtcgctctaagggtctaggcaacacatgtttgtctctctcggcagacacagtagtgggtggctcgtcttcatcagagttcatgcgttgcgtacacagattatagcacctctttaaagcgctcctaactctttcaacaagatagggtctttaaaggcacatttatgtgctcgctccgcgcatgcatctatagatgtatcattacgctcacgctcgtcgtaagaggatacagaactctctcctcacagattacacacacacgttcatattcttgtgtagtggacactcactcacaactcagctccctcactctcgcgccgcccttgtatatttgtacattcacacggaatcgcagtccatccgcttcgctctatagcatctggtatgtttgtttatcgcacgcagtcacgctcagctcactgctcttctgttcgactatgtagtccaccaccacccttctatgctcatgacgtcaccctattcataactcccgcactcctcgtctaattatctataacctacctattgtctctattacccctctctccacacattctcatgtctccacgccactccaccgccccatctgtttccactcgatgacccactctttccgacaccgacaataaacaa

SEQ ID NO: 522729 - DNA, 137 bp, Homo sapiens
cttcctggttgggccctgccctgagctgccaccggggaagccagcctcaggggactgcagcggacccccaaacacccctcccccaggatgtcggaggagatcatcacgccggtgtactgcactggggtgtcagccca

SEQ ID NO: 522730 - DNA, 207 bp, Homo sapiens
actctgtgatcatagctactgcccgtcctcttgtggctagcacatgatctgagcaatatacccggactgttcgccatagatcaagtactaccggaagactcccaaaaggcagagagtcagaatacatttgaagcgactgacttagaattcaaaaaatgctttccttctgatgaaacctgtgagacaccagtagatgaaaccagcgaa

SEQ ID NO: 522731 - DNA, 252 bp, Homo sapiens
acagtaacgtatacgttataaagaagataaacacttacaggtactgggaagggtgaggtattggcagctgtccatggacgttgggtttctcatgatgtactgggtccctgaagatactccgctctacgagagggacctttctgctgtgtacctctgcgaaaaaaggaggatagttgaaacatcataaagaaccccaaatgtaggatcttccactgaactgtaaagttactggttattcacaataaaccagcg

SEQ ID NO: 522732 - DNA, 172 bp, Homo sapiens
gcacacacaataatacagggattacaattcaagatgagatttgggtggggacacagagcctaaccatatcacatggtatagcagcatatgaaagattctaagtttttcactatttatcacgatttattcaacacttttccccaatcttaatagctcatataacatgcaaatc

SEQ ID NO: 522733 - DNA, 394 bp, Homo sapiens
ccacaagcctcataccttggtcaacaatctacaaccttccacagctagcccagtgcgaactgaaaacacactcttacctgacgacaggataacctcaggcctcgtggaggcatctacacccatccacagcagcactggctcgctacacacaacactgaccccgtgccagctccacaagcgcgtggcttcaggcagaaatctactacttgccagagctggccaagttcaagtgacacacacatcttcagctcccgggagcacagcagtcccttgattgaagtatccaaaaactagcacagacgccccagctccatgtcgacaacacacttttctgaccagtccacaaccttgggccgtagtgaggaatcaaaacagtccacagcaagccaagtgc

SEQ ID NO: 522734 - DNA, 1076 bp, Homo sapiens
agcggagacggagcgcgcccggccgagcgggccatggccgcgggggccgccgccgacaggtggtggcgcgcggtgacggagagcgcggcgcctccctccggggccggagtggcaacgcggctcggcgggcgggctagtgccggcgtccacgggctggaactggtgctggctgtgctcggctcggtgcctgcgttctgaagcccgagagggagtccacaactggagatcgccgccgtctgccgtctccggcatgtgcacaaagcaggggtcagtcagaagccctctcgcagttcacaagatggataactaccgaaaaacactgcccatgtgatcagtggaatcccatgtgcgccaattactgaaagtacacaggccttttcacagaggctccactgtaccacgaaacttttaacggacatgcgtcaccaagcacgttcggcctaggtagccgaactggttcaccacaactttttgttgcgccaacgcacacgaagcaatttgggcaacaacaacttgtttaccctggacgtcccaatttaagccaagcctggggcctgtgcccatgggtgacaccggaaaccttgggctacggcgttccccctttctacagttgtgtacatacaaattggacccacaacattgggggttcgtgataacccacagccgggctgtcgaaccgcacactggtcaggggtttggtaacggaaaaggggcccgccttggtgacagttctctgaacaagccgggtgcaaacgagaaaagcggacttcttaaccggcaaaatcagtgtttagtaagaacatatatgtaaacaagattggtgtttaaaatggaaagttttgcgcggaccccctttggagcgttaaaaccgcgcccactgttgttgtaacagagtggccgcaaccttgggggccctttaaaataacgttcgctggggagaaacgctgcctacagagtctgggcctttcccaatataacgcccacagccctttgggtgtcgcaaggctcgaaagcaagagactttttccccacaccgggtggttttataaccgcaaggcaacaaaagaggtcacact

SEQ ID NO: 522735 - DNA, 134 bp, Homo sapiens
tgagttagaggatcccttatttaaacctctaagtggtgtaattggtttcggtagtaatagaaaactaaaacaagattatcacccacttcaatgataatggctaaattatgagatatctggtttagttttctatg

SEQ ID NO: 522736 - DNA, 102 bp, Homo sapiens
tatgtgctagtggcagagacaggatacagcgtgacagtcaacaattccacgcaatctcctggagacagatgctatcctttggcagtgggccatatgggaagc

SEQ ID NO: 522737 - DNA, 266 bp, Homo sapiens
aatacagaacatggacaagattggtaataagagcagactatgcaagttttaccacacaactatgtgcatctacgagaaacagaagacgcgcacttttgctgtccagtcaacagttacttcatatgtcatacacaaacaaaagtgatgaaatcccaaatgaagatggctggagccagtgtctaccacagcaacaacactgcaggcagttcacaagaagatggatccacaaaagacattacaaacaatgcagaattaccagaaggacc

SEQ ID NO: 522738 - DNA, 236 bp, Homo sapiens
catactgtcttcagatgggggcggaggcacgagataccaactgataagcgtacttcatagctaaggaagtgtctaccacctgagcgaaccatatctgacaggatctcgaaagttatccactttcggtggtttcagaagcacaagtgagcaaaagaggacgcccatgccgggaagcactggaaaagtctcatatttccccgacattttgagacctttggcgccaaattttcatacct

SEQ ID NO: 522739 - DNA, 102 bp, Homo sapiens
  misc_feature (54)..(54): n is a, c, g, or t
ccagctccagtcggacaggcgcggagactcttctggaaggatccgccgcgatgnccgcccagggagagccgcaggtccagttcaagctcgtcctggtgggcg

SEQ ID NO: 522740 - DNA, 331 bp, Homo sapiens
gacctagaggatcccgtgcgagtgcatggctttgcatataacagtaatgactcagaagccaggaagcatatcatctagcggtgaagataagcattaataagtaatcatatagcaatattttgaacaggataaaattcctcttacagtcaacactcaaatgtgctggataaaatatgacattttgggcgggcgcagtggctcatgcctgtaatcccagcactttgtggagtgcgaggcaggcggatcatgaggtcaggatatcgagaacatccctgggctaacacggtgaacacctgtctctactaaaaacacaaaaaattatgccaggcat

SEQ ID NO: 522741 - DNA, 969 bp, Homo sapiens
taccagtcaaactacaattcgtgtgtcgcgatggtcgcataatcgcatgaccaggattccgcttgacaaatcgctctagaggcagacctgactgactatcctatccgcataccttcgagaagaatcgttggctgcctcatcttgggaactaacagtattgcggtggactcggaagcattatgtgcaaccagaaaggaaacttgaggaaactgtaaaatgacgaatctacctttgggcgtacagtagatcccatcacgaaaggacagcagattttccgagatcgagtgcattaatcgccgtatgtatccctcgatggctgatgggtgcaacttgactccacctgtattttctgacccattgattgctcagagacagtgatggactactagagctggtgaaagaaagagacatgtagatgagcgctcttccgatggtaggttgtgtatagaggcatggctaattggcgcttgatagtttatgtggcctggctgtaacttcttcccttgtggatgcccttacccttcgtgacttgagggttcaacccggttccatgatgtccacttgaacttgctccggggccgcttgatgctctgctggttgctggttccaatttagggcttttgagcacgtgtggggacccgctttgctctgacccggcgtggctttcaccccctttgtgcctgcacttgttcgtaatgcgttgctttgttggcaaaccttgggttgagtcccggccggtcctgggggacgcgaccttttccccgtaaccccgggtgctcccgaccgtgtcacgacacatcgcttttgtagcgcccgggatgactgccgccctgggttcactgccgtatatttgccgtcacatgttcgcgccctctcttttgaagatttgtcactcacgtctctgggtgttccgcggtcttctacgcgtctggtctggctctggcgcataggggccgggcgcccctcggg

SEQ ID NO: 522742 - DNA, 226 bp, Homo sapiens
gggggggggggcccaggttttccccccgggggaaaattgtttttttccccagggggaccccccccgtgtgttttaggatttttttttttgggggggggcccccccccggggggggggccccttttcccgggggggttttttttgggggcctttttttcccccccccccgggccggccccccccccctcggggggggggggggtttttggggggttttcccttttta

SEQ ID NO: 522743 - DNA, 746 bp, Homo sapiens
ctcttgtcgcccaggctggagtgcagtggtgtgatcttggctcactgcaacctctgcctcctgggttgaagtgattcagcctcccaagtagctgggaatacaggtgccagccaccatgcccagcccagctaatttttttggtatttttagtagacacagagtttcaccatgttggccaggctggtcttgaacttctgacctcaggtgatccgcctgcctcagcctcccaaagtgctaggattacaggtgtgagccaccacacctgaccacatttatttcttacagttttagaggctgggaagtccaaggttgaggggcatatctgatgagacccttcttggtggtgggaactctctctagagttcttttttttgagacagggtctcactctgtcactcaggctgtactgcagtggagctatcatggctcattgcagcctcaaccttctaggcccaagtgatcctcccacctcagcctcccaagtaactgggaccacagggcgtgtgccaccatgcccggctaattttgtttatttttatagagacagggatctccctatgttgcccaggctggtctcaaactcctaggccaaggcgatcctctgcagagttctgaggtggtgcagggcatcacatggcgagggggctgagtgtgctagctccgggttcctttcctcttcttatagcaccatgagacccactcccacgataaccccggtaatctgttaatcatgggatccataaatg

SEQ ID NO: 522744 - DNA, 140 bp, Homo sapiens
tagatgtgtttggaaatttatggcatgtagatactgatcgggggctctcctgtgcacactagacatgcctagtcctctctttgaaactctccatccaggtaaaaagagaggcacatcgattggcccaaaatcttgcagtc

SEQ ID NO: 522745 - DNA, 1596 bp, Homo sapiens
  misc_feature (410)..(410): n is a, c, g, or t
cgtctcctgagagctcttggtttatcaatgactccatagtatcgtctcaacagagaaactcgtgtaaaatggacttgatccatgtgtttgtgcagattctataaaaacattgggccgcgatggtttcaagttgatcaacttcatcggcaatgttgagtccattagaactctctgcaacaggaacgaacatgggcacattatcctgtgtactcctgtgtctcagtagcgcgtactttagtactatggaggtatgttaactgtgcgtgcagaatattaccatgacgaaacttcaatgtaccacttaagagaatccgttccaattgtttcataaaatcctatctagtgtctgagatctacccattgatctggtcagtgtacagtaacagggcacagagtacactccttgtggnaatgggctctggctgtagagcgccaatgtggcacgagaggacaggattcactgtcgctcatgtgaatgcagtcgcaagcggcgtgtatgcaagtgccattttgtatggacatattctacttgacttgcagaggtaacattcagctacataacttgaacttcagcgtgctagcgaagggcgaccactccctttagtacgcatcgttctgcggggtgcgtacttcctttacacataaataagctcccccttggggtcacattaatgcgaagggccaggaggggatctgggcgaacgtctgagaagctacagatttaaaggcatcgtctctttaaaagaccgttgcgggacttatccaaacacgtggacatcgttgtcataaatcgcagtcttgtggacattaggctaaaccttggttttcctccatgcattctccagttattttcttattgcttaactttttaccaggagactacgaaaccttatttccttgcgtcaaggaacgcataataacattccgctcatatatatatgaagccagaaaatcccagctgagggctgcacttggaaacctacgcatttttccctcacatgggcaacccctttgtttttctttggagaaaagatcacgatccaaatgattgggtataaccccttatattcccccattttcactttctccaatttttttaaaggcacgcagtaaatcatatatacgcgcggtctgtggcctctttttcagaagggggagattctcccagtgtagaaaccttatatagtgcgggggcaaaacaagatcaacaaataaaagcgggcgcgcagcgacggttggtagtgacaccgccgtgtgagcccacccgcattagtggtaggcggcgaccaagcagggtgacaccacaacacaagacggttggtgcaacaccaacctcgtgacagacgacagacaaaagaggtcgcctgggccgcacaacacaaaagcggcggtgaacacgcaataggccccctctactacgccacatcccgactcgatagttaaccgcgcgccgaccttagtctgacgaacccacaccctgtgtgagtatagagatctcgccatcagtactaatttacacttcataccataacgacgacgtatcattctagcaaacaactatacttcaaaaccgagcaacctacgtaactgcagtaa

SEQ ID NO: 522746 - DNA, 132 bp, Homo sapiens
gccaaagctgccaaggaggccaatggaagaacggtgaaaattgaatggaaaataaagttaccttggaactgggccaaacctaagggtgaaggtggcttacgggggtcgtggtggaagtagaagcgtcttgga

SEQ ID NO: 522747 - DNA, 228 bp, Homo sapiens
ctggatattatcctaccacctgtctcaagacagggtcctgacccactcgccccagtaagtgcacacgattcagggatctttcaagaaccaaactggtagttgttacggactcatgtcttacaaactgatgaagtacctgtaatacaggtcttcgcaacctggcttctatttacttttcttacagtctaatctttaagctattcctgacgatctaacccgagcattttt

SEQ ID NO: 522748 - DNA, 109 bp, Homo sapiens
aaggggccccctttttccccaaattaaggggttttttaaaaccccttcttggtttttttttgggtttttccggggggagggggccaaaataacctttttccccccccca

SEQ ID NO: 522749 - DNA, 776 bp, Homo sapiens
ttcgagcccgcggaggaggagagcccgattcctatagcaacaccgtattctgattgttcggtcacggcctgaagtttatattcttatcctaccagggttcggaataatctcccatatgtaagttactactccggaaaaaaagaaccattggatacataggtatggtctgagctatgatatcaagtgggctgtcctagggttgtatcgtgtgagcacaccatatatttgacagtaggaatagagcgtagacacagcgagcatatttgcacctccgctaccataatgcatcgctatccccaccgggcgtcaagagtatttagctgactcgccacactccacggaagcaatatgaaatgatctgctgcagggtctgagccctaggattcatctttcttttcaccgtaggtgggctgactgggcatgtattagcaaagctcatcactgagacatcgtactacacgaggacgtactacggtggtagcgtcacttccactatgtcctatcaataggagctgtatttgccatcataggaggcttcattcacgtgatttcccctagttctcaggctacaccctgagaccgaaagctaggccaaagatccatttcactatcatattcatcggggtaaatctaactttgttcccacaagactttctcggctatccggaatggcccgacgttactcggactaccccgatgtgtagacagatgaaagatctatcatctgtgggctcattcattctctagagcgtatatgaataagccatgatgagaac

SEQ ID NO: 522750 - DNA, 353 bp, Homo sapiens
  misc_feature (323)..(323): n is a, c, g, or t
  misc_feature (326)..(326): n is a, c, g, or t
  misc_feature (351)..(351): n is a, c, g, or t
gatcctgactcccaggaacctggctcctggaggcaggtgacagccagggccgccagaggcctcaggcagagggatcctggcgccccactccccacgcgtccacagtcgcccgcttcccgggtgcacacgacgctctggggaggctgggcccgcgcccgggtcactgagaggaagggcggaccccaggctcaggagcacaggggcgaggcccgagaagggcctgagcggttatggggtgggcgcagagtgaagggcagagccttgtgtatctgtgtgtgtgtgtgagcatgtaagcctgtgtgtgtgtgcgtgggtgtgtgggnggntgtttccgagggtgccatggggagngg

SEQ ID NO: 522751 - DNA, 398 bp, Homo sapiens
  misc_feature (210)..(210): n is a, c, g, or t
  misc_feature (212)..(212): n is a, c, g, or t
  misc_feature (215)..(215): n is a, c, g, or t
  misc_feature (376)..(376): n is a, c, g, or t
gtcgacatcgtaggcaggcctacagcttgcgttcgcgttgggttcgccgccggggttctccgggatgccggtatcgccttcgagaaaggttcccgtggcaccgttataggcatgggcatttcatggtagagggcgttgactggggcgctgtcttcatccagtgagtaggaggggttgtagtgtatttccccgcctgtagcgccagccgcntnggnattatgggtgatgtagccctgggctgcgggctctagcgtttcaagggtattgcccgctgccaagtggttgcgaacagccgcgttattgaaaaagtaacgaccgttatcttcagtcaactcagtgatgcgaacgggggcatcgttttgctgagccttggctncggcggtactgagcatcttctt

SEQ ID NO: 522752 - DNA, 139 bp, Homo sapiens
cagagatgctctcaagtcacgtgtcaatggcttttgggattcttttctgcatcgtctaggctgattactttcatattgtggggatggtgcacggcctagaattctttgttaaccagagggagaacaaccataggttttg

SEQ ID NO: 522753 - DNA, 243 bp, Homo sapiens
atcgctcgaaattgtgaggccctggcttcttcgggatcagtgctatggacatcatgtgctcgagccttcaggttgatggtggattatgtgctcccggtgcctgtctcctgcacggggctccacggagcccagctcccatacacgctactatgtgcctactggttgccctgctgttgcgccttgctcccagggtacgcaaccatgcaagagcgccacgcaagctactaggtcccgtggcggctt

SEQ ID NO: 522754 - DNA, 943 bp, Homo sapiens
  misc_feature (22)..(22): n is a, c, g, or t
  misc_feature (161)..(161): n is a, c, g, or t
  misc_feature (163)..(163): n is a, c, g, or t
  misc_feature (176)..(176): n is a, c, g, or t
  misc_feature (217)..(217): n is a, c, g, or t
  misc_feature (219)..(219): n is a, c, g, or t
  misc_feature (238)..(238): n is a, c, g, or t
  misc_feature (243)..(243): n is a, c, g, or t
  misc_feature (245)..(246): n is a, c, g, or t
  misc_feature (250)..(250): n is a, c, g, or t
  misc_feature (257)..(257): n is a, c, g, or t
  misc_feature (262)..(262): n is a, c, g, or t
  misc_feature (325)..(325): n is a, c, g, or t
  misc_feature (346)..(347): n is a, c, g, or t
  misc_feature (354)..(354): n is a, c, g, or t
  misc_feature (357)..(357): n is a, c, g, or t
  misc_feature (361)..(361): n is a, c, g, or t
  misc_feature (364)..(364): n is a, c, g, or t
  misc_feature (368)..(368): n is a, c, g, or t
  misc_feature (371)..(371): n is a, c, g, or t
  misc_feature (395)..(395): n is a, c, g, or t
  misc_feature (411)..(411): n is a, c, g, or t
  misc_feature (430)..(430): n is a, c, g, or t
  misc_feature (454)..(454): n is a, c, g, or t
  misc_feature (457)..(457): n is a, c, g, or t
  misc_feature (473)..(473): n is a, c, g, or t
  misc_feature (499)..(499): n is a, c, g, or t
  misc_feature (558)..(558): n is a, c, g, or t
  misc_feature (594)..(594): n is a, c, g, or t
  misc_feature (599)..(599): n is a, c, g, or t
  misc_feature (617)..(617): n is a, c, g, or t
  misc_feature (619)..(619): n is a, c, g, or t
  misc_feature (629)..(630): n is a, c, g, or t
  misc_feature (681)..(681): n is a, c, g, or t
  misc_feature (937)..(937): n is a, c, g, or t
taggtagtaagaggggtgtggnggtgtatttagaagttggcttgtcagatatactataagttagtgtctgtatttaatattgacaaccaaaaatatatataaatatcttgcatctatacacaacagggcaggagtctccatgtcttcttgagcagtgagtntnaaggatcccaganggcctcttctcatggtaatagtgtggccctcagtgcaaagnanactagaacccggcagcccngaatngnncttnccctctnctccntgcactccagtgctcccaactggtttttggttaagttagatttttttgtgtggttgggttggntgtgttgggttggggcaattnntaatggngcntganccnttgngtngggaggtctaggccagctgaatgngtgggcttagcttttnctgggatagaagctttgtngttcatagttcgtttagtgtgttnttnggtcattggttctgcnctgcagattagctgggtggggagggngagtgtctcgacagggcttagtctccaccctcaggcatgggaccattcagggtgaagcntgggatgtggtgctcaggtgactctggctgttattntagtnataaaatctgttatatananattataaaanntgttgcttgtttgaatagatttgagctacagtcttgcttttgttaaaatgntggtgctgttatgtgcgtgaatattcttctggacatcattgctggctggagaaaggagccccaggcccggctcggctgacatctgtcaggtttggaagtctcatccagctgcctgtgctcctgagagatccttagggctgctgggagcaggccgggctggtgatctggggcgactcacacttgggaatcagcccccaggggatggaacagctcctcgggtgtcttgtcactttggctggctcccccctgccggaanccggaa

SEQ ID NO: 522755 - DNA, 265 bp, Homo sapiens
ggatccggttgcagtgagccgagatcatgccactaactccagtctgggtgacagagcgagactccatctcaaaaaaaaaaaaagaaaaaaaaggaaagggaaacaccttcaacttcacaatgatgaaaacagcacatctcaaaacatgtggcaaatgaggattcaggatgcagctaatagttcctaggttgaaaatgctggtctttaatgcctatattttaaaaagaaggcttggtcaggcatggtggctcacacctgtaatccc

SEQ ID NO: 522756 - DNA, 148 bp, Homo sapiens
gaagtcttgatagtcctgcgcgggacgtattatgacacgaccacttgtcatggaaagactatgcaggacagctaagttatgttcaaataaggctgtaagcgctgccgtgcaaggactcggctgcaaccttagggtatatatagacagt

SEQ ID NO: 522757 - DNA, 414 bp, Homo sapiens
gccccttcctgaccccgccccctctcgctctccccgcagcggtgcaggtggcggtgggtgcgcgcggcgaggcgcgcggcgcgtggacacgcttcccggtggcggtgctcgccgtgttccggagcggagaggagcgcgcgcggcgcgggagtagcgcgctgtgggtgcccgccggggatgcggcctgcggctgcccgcgcctgctccccggccgccgctacctcctgctggggggcgggcctggagccgcggctgggggcgcggggggccgggggcccgggctcatcgccgcccgcggaagcctcgtgctaccctggagggacgcgtggacgcggcgcctgcggaggctgcagcgacgcgaacggcgggggcgctgcagcgccgcctgagcccgccggctgggcagggcggccg

SEQ ID NO: 522758 - DNA, 402 bp, Homo sapiens
tcatgtttccgtgaatacccgttagctgttaataccatgaaaacttagtggagtcatcctatctccctttcttgtgcggtgtatgtattgttcccacacaaatgttatacccagagatcattatagaaatagttctaacattataccagttaagtcaaaacgggaggcattcactataaactggttctggaatgtcagtatgtctaatggaagaggccagtgagttagctcttctatggtcaacttgatactctggcatgtttcatttttgtaggcagaggtttcacatcaggttccaagtcttattttcttttctttcttaaaaatttgtaattttttcttaattttggacactgggggctcaaccatgttgccctggatggtctcaaactcctggacaac

SEQ ID NO: 522759 - DNA, 1308 bp, Homo sapiens
gaggcacactattctgggcaaacgtttctcaaatctgcttcatgccaatgtgaagttccatcttgcgagcattatactcatgcacaacagcagtcaacgtatcgcaaatgcacggtgttcaattatatgctaactgggttcaacatattttgctcaactggttcaacgattaatattataccaaagtaggcattttgcagggtgaggggatgctctcatcatgagaggggatgggggatgccagatgatctcatgaaggggatggaaggtgccagatgaacatctgagagggatggggagatgccagatcgtcatctgaaggggagtaggagagagtagccgacataaacatcatgaaaggcaggagatggagagagatgacgagagtcatcaatcatgacgaggagagatgagaagagaagaaaatgcatcacaatcacagaagagagagatggaaaatggccaaatgaatcatcaatgaaagggagatagaagaaataacagacaaactaacaacgtaacgagaggagccaaagacatcacagaggaggaacagatcaacaaggcgatacaaagggaagataaagagaaagcaagaaaataacatataaacaggcaacgaaccaaaaataacacagacataacacaaaacaagagaaaagcccatgcatgaccacgacacaacaacacgaacgaaagcacaagcacactagaacaagggacacatcacaaatggagaagaaggacataagacaattggagaccagaaacacattacaaaaacaaataaaaaaccacagagaaaaaaaatccaagaacaaaacgaagaaaaaaaaccaaaaagaatgaccgaggtacaaaaaagcaaagaagaaaaagacttaaaaaaaagagaaagtaagggaccacaacaaattgactataagaaaacatgaatatcaaataaaaaaaaaagtttaaataatgacatatcaataaaatgaaatgaaaatataaggaggatagacaaataataaaaaatatataaaagagagagaaaaaagacacaaaaaaagataaaaaaagaaaaaaatgcaaaaccaaagaaaacaacagaaaaaaccacgcaaaagaaaacaagagaaccaacagacaaaagaaagagtagcagagagaagaaaagaagggaaaaacaaaaaacaggaacaacagagaaaccgaaagaaaaaaggcacaagaacaggaaaaaacagaaagagaagcaagaaaaaaaggaagaaaaaaaagaaaacaaaacaagaaagacaccgaaccaacaaaaaccaagaa

SEQ ID NO: 522760 - DNA, 420 bp, Homo sapiens
  misc_feature (1)..(1): n is a, c, g, or t
naaagaatgtcttcatagtgtaaaatgcctgtacattcacgagtgaactctgatacatttagataacaaagagatccagttgagtcatcctccctcatctagcaaagtcacaattcactctacttatatcaattcactaattagcaacatccttagaagtgctcttagaatcagtcagtctgcatatgactgaaaatgttcaattaacaaacaactattcataagctgtggtatataaactatacagagttgggttccaacagttcgttgtgcttcatagctacctgagaagtaaatccattgtaactggacactaccatcacataagactgtggctgctgctccgttctctcagtgatctcttacaaatgatcatcagattcctaagtctgtacgtcatgtgtaagagtttgtgtttct

SEQ ID NO: 522761 - DNA, 659 bp, Homo sapiens
  misc_feature (531)..(531): n is a, c, g, or t
gaggccggagtggtctggaacccctacttccttcagaattccgaccacaagaccaaaaacaacttacggggttttttcttaccttgccttcttcctttttttttacccgacactttttaattcatccttggctctttaaaacccagtgaaaaataccagggtactggggggcacctctttcttatgataggccattatggctttaagcaaagaatattaccagttttaactgcagcattaccaattaggaaaaaaaaaaaattacgttccctgcggacatgtaactttgccatcagttttgatgtgggaaacactgtgatatataaaatgttgttggacaacagtagttttaagagtaaaatatgaaacgtttaaaaagttccaaaaaaagctagctctgtcctttacttattgagacacttttaacttttcctttgtatttccattgtattagataaataaatgtgaatgtaaaattgtataaattactgtacttgaatccttctgtttccagtgttgcttgctggacantttagtgccttggacttctattgcttctgccattagcatcaacttaccagaccccagatcaataaagggcatgtggaaggaaatcgtaggtccatgtgaccccagcagtccagcagtggttatgccaa

SEQ ID NO: 522762 - DNA, 193 bp, Homo sapiens
gatctgacgactgaggtggaggagtcctcctacgataatcatctcgagggctcatgaccccaatgagggaggtgggccacgatttctacttcttgtgcaccatacgacagttccactcttacacggcagccacatagtgttcttccatcgtagctctcgtgactgcatcagcatgcatctcgtgggatcttca

SEQ ID NO: 522763 - DNA, 210 bp, Homo sapiens
accttgtctcagaaaaaaaaaaaaaagagagagacagccgggatctgtctccctttatgcatgtctagagaaaaggccctgcgaggatatattgagaaggcgggagaaaattattccagaaactgaattcgctggcaccttgatcttggccttctggcctccagaactaggaggaagaaaattttttctgtgttagccgccccgcctaat

SEQ ID NO: 522764 - DNA, 296 bp, Homo sapiens
ccatagcccattaaaataaaaattatacaaaccctgaggaccaaaatgaactgagaatctgttcgcttcattcattgcccccagaatcctaggcctacccgccgcagtactgatcattctatttcccccttctatttgtatccccacctccaaacatctcatcatcaaccgactaatcaccaccctactatgactaatcgaacttacctctaaacatatgatgaccattcactacactaaaggactaaccttatctcttatactagtatccttgatcatttttattgccacaactg

SEQ ID NO: 522765 - DNA, 263 bp, Homo sapiens
gtgtccctgtctcagagtgctatgcccatcttgtctgaccttttcaccgccttcaatttgtcaacagtatcgggcttttcttcaatacttcgcacagttcacggtatctaatgcagtaccaaacggcagcttgtacttctttgccctgtaaaactaccccataactgtgggtcatgcctcacagtcaaatgtgaaatgaatttagtgggttctgaacattaaagaacaacacgaccagttttctgtgtgtactgtcctgtaac

SEQ ID NO: 522766 - DNA, 302 bp, Homo sapiens
tgggaatcctaggggggtccatgaccccttcccccccagacccagacttgggccgttgttttgacatggacacagccaggacaaactgctcaaacctgcttccctgggagggggtgacggaaccagccctgtgtggagaccagcttcaaggagcggaaggctggctttaggccccccagctggggcggggacttttgtttgcctgtgctccatgggggggcggctccccccagcctgcgcccctgtgtttttaaaaggcttccaaaaaaaacggcccccccatcaataaagaactgagcaga

SEQ ID NO: 522767 - DNA, 202 bp, Homo sapiens
cggtctgtcagatccgcgacagaaaaatgacatttccgtgagggttgcgcgccttacgaattcgtaatcggcgtgttggtgaattgacgtggttgggtccgtaaagtgtcttcagcgcttggggcctgtgcgaggctcctttcagggttgacagacccctacaaaaagcgtgcaggcgcggcaaccgctttgaatcatctag

SEQ ID NO: 522768 - DNA, 380 bp, Homo sapiens
  misc_feature (30)..(30): n is a, c, g, or t
  misc_feature (61)..(61): n is a, c, g, or t
  misc_feature (119)..(119): n is a, c, g, or t
cctcagtttcctcaccttgcaaaacagagncctgaaacagcactttcaatccagggcgcanagcacaggcaccacttaagctttaaagccacaagaggcggccgggctccgtggctcanacctgtaatcccagcactttgggaggccgaggtgggatgatcgcttgatcccagtagttcaagaacagcctgggcaacatatggacagcccatctctacaaaaaattaaaattagctgggcatggtgagcacctgcctgtagtcccagctactcaagaggctgaggcgggaggatcacttgagcccaggagttcaaggctgcagtgaactatgattgtggcactgcactgcaccctgggtgacagtgggacctcggctctt

SEQ ID NO: 522769 - DNA, 292 bp, Homo sapiens
tagtagatgtaccagaaacgggctcaatcgggtcacttgctcacggtcactgatatggtttcgctgtgtcccctcccaaatctcatcttgaattgtagctcccataattctcatgtgttgtgggagggacccagtgggagataactgagtcatgggggcggtttctcgcacactgttctcatggcagtgaataagtctcatgagatctgatggggtttttttatatttgttatttttgtttcgtttagtgtcgttttgagacagagtttcactcttgttgcccaggctggag

SEQ ID NO: 522770 - DNA, 477 bp, Homo sapiens
gtcacctctagcaggatccccattgtgtcactccagcggagagcaaatagagaccaggcaagtgtgtcacccagcacccgggtagaaagtactgttgttttctggaggcagtgaaccacgagatatcctctgaatgctgtagttctgccaacgattgatactccacaggtttatgtaccttcctgcgggccgcttgtcaggtgatgacctgtttagctggatataggatcgcctttggctagcctccaacccagctggcaatcttagggctcacgacagggccctgtattttagtgacagctcatctcagccgactcagccattctaccattccttcaaaatcgatctagtatcctccttgcacacctcccgagttcagaggcagatcgtggtctccgtacacgacttaccctagaagagctttgtgccccttctggacagcaaatacgtcctctgtgtgtgggatatttggcagtc

SEQ ID NO: 522771 - DNA, 923 bp, Homo sapiens
ggaatgggcgcttgttgataaagtgcgcggggaaaattgcttagaaatgtggggtgccacaagctgtgggttgagtggtggccgatacttgttcggccgggatagctttgaaataaaacttttggtggccggttcatatggaggaaaaccttgtttgtgaagtcggcgagccagggtgttgggggtgtggtgcgagcaatggcaatgacctgttgcgtttaccaccgtgcgaccgctgtaatgttttcatgaaactgtgtacacacgttgcggggttttcatcacattaagagtacgcgaagaaaatattgtgtttaggctgtctcttgttgatggcacggggggttcaaggaacccggttcttgtaagtagggaaagtgcgttaagatgggccctgcggtttctcatccggacgaggttgttgaagaaagtaattaacacaggtgtgaaacgcgttaagtactttactatctacgggtgggtatatagagattccgccccacaaaagttgtgttgtgatgaactgctcatgagggaaccccgcagctggtgtgaaggtcactggttgttgaggtatgagtggaggtgattctgtggaagttcaagtcgcacaagaagagacaaagcgcgagggtacatgcggagagcgcagcaagaatggttcggcgatccagtccccaggcgccagacaaaggggcagaatgtacaccagaaaaaaaaaaacaagagtgaggataaactgggggaggttttagaagaaccataatgggagacagagtaaatatccggggagcaaggttacgaatacgacccgcccagaatagggtgaaaagtaaaatcgcccccgctggctttgccccagaaaggggcccaccagtaccatttcaaaaagttaaaccacacaaaaaaagaaccccaagaca

SEQ ID NO: 522772 - DNA, 147 bp, Homo sapiens
catgagcaggtaatctctgatgtcaagctgaaaggtgagtgtcgaagagttgatgtagacattgatgagtctgaaacgtcccattatctttgggtgggcttgctggggggcgtcctgagggtagaggaggagagggatgttggcaag

SEQ ID NO: 522773 - DNA, 818 bp, Homo sapiens
  misc_feature (1)..(1): n is a, c, g, or t
  misc_feature (79)..(79): n is a, c, g, or t
  misc_feature (87)..(88): n is a, c, g, or t
  misc_feature (90)..(90): n is a, c, g, or t
  misc_feature (200)..(200): n is a, c, g, or t
  misc_feature (224)..(224): n is a, c, g, or t
  misc_feature (228)..(229): n is a, c, g, or t
  misc_feature (236)..(236): n is a, c, g, or t
  misc_feature (238)..(238): n is a, c, g, or t
  misc_feature (242)..(244): n is a, c, g, or t
  misc_feature (247)..(247): n is a, c, g, or t
  misc_feature (253)..(253): n is a, c, g, or t
  misc_feature (255)..(255): n is a, c, g, or t
  misc_feature (257)..(257): n is a, c, g, or t
  misc_feature (262)..(262): n is a, c, g, or t
  misc_feature (264)..(264): n is a, c, g, or t
  misc_feature (275)..(275): n is a, c, g, or t
  misc_feature (315)..(315): n is a, c, g, or t
  misc_feature (318)..(318): n is a, c, g, or t
  misc_feature (321)..(321): n is a, c, g, or t
  misc_feature (324)..(324): n is a, c, g, or t
  misc_feature (336)..(336): n is a, c, g, or t
  misc_feature (355)..(355): n is a, c, g, or t
  misc_feature (378)..(378): n is a, c, g, or t
  misc_feature (385)..(385): n is a, c, g, or t
  misc_feature (396)..(396): n is a, c, g, or t
  misc_feature (405)..(405): n is a, c, g, or t
  misc_feature (421)..(421): n is a, c, g, or t
  misc_feature (429)..(430): n is a, c, g, or t
  misc_feature (433)..(433): n is a, c, g, or t
  misc_feature (450)..(452): n is a, c, g, or t
  misc_feature (471)..(471): n is a, c, g, or t
  misc_feature (475)..(475): n is a, c, g, or t
  misc_feature (478)..(478): n is a, c, g, or t
  misc_feature (571)..(571): n is a, c, g, or t
  misc_feature (578)..(578): n is a, c, g, or t
  misc_feature (584)..(584): n is a, c, g, or t
  misc_feature (597)..(597): n is a, c, g, or t
  misc_feature (711)..(711): n is a, c, g, or t
  misc_feature (713)..(713): n is a, c, g, or t
  misc_feature (815)..(815): n is a, c, g, or t
naagcactggtcctctgaaataaagcaggcaatcaccattcaataaacacacttgatttattttgtataaaagggttangtttacanntnaacttttttaaaaagtttagcatgaataagtacatcattacacttttgaatgcagaaatagacatctctgccactatacaagaaaactctaattaaagagttcacaaggnttcactcaaatagatatatttatntatnnatatatncncagnnntcngaaggngngngtcananaggtaatttcngaccaaaagacttcatttaagtgactgaatactggatccntcnggnatncacgctccaccnttgaaaaaaggcaaagtcngcttagattgggcaattccttgngattttnacgttttcgcnccccatggngggaatagtatataangaaaaccnnccnactgcagaaagggcatnnnaaagtctttttcataaatnacgntancacagtccaagtcagagaacaccctggggagatgatcattcttagttttccttccattttttttttctttttaaaaaggtccaaaaaaaaagncctcccngtgccntggttgacaaatnagttcagcacttaaaagattccgtgaatttgttgttgttgttgttgtgcaaagaataaaagaaatcatgaacaccgcttattcagccacacagtgctttgctgtcatttgacantnactcagaagggaattcagaagcctgctaggacaggatgctgatatccgtgttgagggtggtcagcggcgtcctggacgctgggttctgcccgggtctctggngat

SEQ ID NO: 522774 - DNA, 272 bp, Homo sapiens
  misc_feature (161)..(161): n is a, c, g, or t
  misc_feature (193)..(193): n is a, c, g, or t
ttcgacggtgtctgctttgtacccaggctgagagtgaagtggtacaatcatagctcattgcagcctcaaacttatttatttacttttttagagatggggtcttgctgtgttgttcaggctgatcatcactgtcttgggaaccaagtccaggaaggcttcancagaaaaaaaaatgcttcagccaggtttcagntggaggcataaatactgtgcatggggccaggtgccattgctgatgcctgtaatcccagtactttgggaggctgagatgg

SEQ ID NO: 522775 - DNA, 1573 bp, Homo sapiens
  misc_feature (1408)..(1408): n is a, c, g, or t
ggacgcgtgggatcgacccacgacgtcgacattctggacacataagaacagatagagtgttaaaaactcatatcccattaaacagagtgtagggaatgggatattgacagaatctgaaaagcatgacctgcactatacattagtacactgaaactatacactaatatatctaaagtcatgcatgtctctgaaacagcttacctagttttgtaaatagacttacatatggataatatcttatattaatgggaaaaacgtagtgcagacaatgtaacgtaccagaccaagtactgcaaaaaccatgtatacgctaatatgacacaaaattccacatagttgtagacatacatgatgataaactctatgatggaccagctaggacgaggataacaatcaagcataaagtgtatctttaaccagcatgattgaatacatatgcatggaacatgtacataaaatgaattccccctcaagtatcctgaagaccatatcacaatccacatacagtgagaaaataagaataacgtacaccatagtgaaatatacgagacaggcacaaaaaacgacagacaatcacgtagcgtaaagagtagaaacggtaaacagcaaacaagagcaacaaacaacacatacacaagaagaaaggaacaaaaggagaagagagaaccacaacacaaaaacgggcacgagggacacagacgaagaaagataagcagagaaaacagaagacggaccgaaacacagcgaatagcgacaaagagcagacaacgagaagagacggacagcagaaaaggaaagacgaaccgacggaaagaggaaaaacaccacaacaaaaaggaccagacaccacacgagccacaccacaaaaaacaaaagaaaaacaacgccagaacaacagcaaaaaaaaacacaacacagggaacaagaacacaagagaaacaccaaacccaaaaaaagaacacacaacaagagccgaacaaaagaaagaaaaaaaaaagacaacaaaagcaaggcacagagacgcgcagaagagaggaaacagcatgcgggagcgcaggagagagcaagaggagaagcaaaggggaggagcgaagagagaaaagacgggagaggacaggagcagacagcggaggaacggaacaaagacgagaggcagcgaggtagtcgagagcaacagaggccagaagccagagagcagacagcgacgagaaaggcaagaggacgggagagaagaagcaacgagggaagaggcgagaaggaaggcgaggagcggaagacgagaggagacagacaagaggacgagagcgagggaagacgggccagaagaagagaagggagaggggcaagccaaacaagaagacgagagacagcaaaggggaacgagggaagagaggagccgaacgcggcncagacacacgaagagagagacaaagagagaaggagaaaggagggccaggaagacggcaacagaggcgagagcagaacgagaagagaacagcgaggtggcacagacgagcgacgagggagagaagcgagaacgcaggagagagagagaggaggagtgagagcgagg

SEQ ID NO: 522776 - DNA, 948 bp, Homo sapiens
taaaagggttgggggggggtccccccccccttttgagggtttttgaaaattggggtttttttttccccaaaaaaaaaaaatgttgtccccggcctcctggtagaaatatggcgcaattattcgtggtaattcaatggtgaggagagaaatttattagactaacagcaaaggtaaaaaaaacatttgtgtgccaagagagtatactcatgggtaaaacaccccttctagtagttataaacaaagacatagtattatgtgtactactagtagtaataaggaatggggggggccaataatatataaaacgacaaagagataacacaatattaaagaggcaccaagatatagaaaactaattattaccccaggggggatgagcaccgagaagattggagaaacgtctattaaaaacaaaaaacgagcgcgcacatagtttgtcgccaattttatgtggtccccctttttttcaaaaaatctgcggtgggggcgctcctccttagagaggatttagtagaattctctgatggagaaaaaagagaaaatcattgggtactcatgagtatataaagaggagagcaaacaaagacaaaaacaatagggggcagaagaaacaaaaattgtgatggagacaggaaatatcctcggtctggtaaacaacaaaatcacgtgtggagggaaagaaaacatcagccgggggagcacaccaccacagagcaggaggagagaaaaaacacacaacccaatggggtgaattcaaaaaccaaatctgggggaatcatctcttgatcgtacacacccaggaggaggggtcccacaagagaagagggggacattcatcaggatgagagagaaaaaaaagagcagggaggggagaataaatgaatcagagggcacttatcacagaagagaaaagcggatcttctttggaaaaaaaaagcgcatcgaagc

SEQ ID NO: 522777 - DNA, 173 bp, Homo sapiens
tctcgacattatggctaaaaagaagcacactattggtaaaagtttcatgctgtttaaaatttaataatctccctgggcccatgtgtggtttttcttctatttgaaaatcctgataaggcagtttcggatggtggttatttaataccagaaaaccttttctttggtgcacaact

SEQ ID NO: 522778 - DNA, 142 bp, Homo sapiens
tatagaatagaagaaccagaaacgtctgcttgctggaggaagctggcatgtccgctcctccactccttttcttttccccttaggagcggtttatggttccttttgttttattcttttatttgtacaccgtgcttatctcaat

SEQ ID NO: 522779 - DNA, 259 bp, Homo sapiens
  misc_feature (57)..(57): n is a, c, g, or t
  misc_feature (77)..(77): n is a, c, g, or t
  misc_feature (173)..(173): n is a, c, g, or t
actgggttctgagagcttccagatcgctgaacatgtggtggttcctgaagggtggtnggccctggggagggcatggnaagctccacgtcccttcccacatgccttgccctatgcagctcttcatctgtatcctttggcaatatcctttactataaaccagtgtaacataaggnaaagtgtttccttgagttttgtggaggccctcctaacaaattcaatttaaacccacggagggtttgtgggggaaccccaatttcat

SEQ ID NO: 522780 - DNA, 503 bp, Homo sapiens
ttccctggttgatgccagtgttctcgacactctttccttatcatgcctcactgccccagccccattctaggactgaggaccttttagcgcaaagtcaaagcttctatcaccttttcttgcccccttcaagcagagtcccctcgcggctcctctccgctagtccggcccctgacccctttccccagtacccacttcctgcctctctcattaagccttccgtggctggctcaccatgaccccatcagaatccagttacaagactcttccaaatttcccaaggttcctcaataccccatctctctaacccatcaaaagggcctacagcccatcgtgaacaagctctgctcatgcagtcttcttagaccaacacaatctccatataggacccctatcctccctgttagaaagtctgatggctcataccgactcgttcacaaactccgagccagtcagtcaagctgtcctccgtattcatcccatagtccataacccctatccacttc

SEQ ID NO: 522781 - DNA, 474 bp, Homo sapiens
  misc_feature (112)..(112): n is a, c, g, or t
ttgcctcgctatctatattgttagcaagtatcgaggcgtatagtatcttccggtctgtagagtctccaggtttaagactcgcagcactgatggtctccaggtcatgcacatntgtgtcacagcgatcaatcctgtggctctgtgatcaggcccaaatcacaacagtgtgcctctcgagtatggcatctaatcgtgaggatgacactggcctgagctaggctagacatgcggtacgctagtaggtctgggacccgttccagaagccccgtcttcaagcatgaactcgactaaccatatctgttgagccgtaccacaacagaaagcttgtgcgacgagaaggacaatgataccggccttcatcatggaccgcgtgtgcttacataatcagggcaccttacaacgtccttgtaacggtcctacacgatatggtacatctgcactatctgcaggatctcatacagccgaacgtggtcg

SEQ ID NO: 522782 - DNA, 758 bp, Homo sapiens
  misc_feature (673)..(673): n is a, c, g, or t
  misc_feature (733)..(733): n is a, c, g, or t
  misc_feature (746)..(747): n is a, c, g, or t
  misc_feature (750)..(750): n is a, c, g, or t
  misc_feature (758)..(758): n is a, c, g, or t
gtggagacactttacatccggcacaggaagccttctgatggagcacacctggcccatgaaaagacaagggaaagaaacggggccaaaggtcacagtcctctcatcccatcatcctccttaaaatcatcctaatttcatgggccctgaagccagggctgtttctttacacctagaggccttggcgccgggcctcaattccgccctgttccttaccgtctaagacatgttgggaaaatccctagagccaggatcttcattcctgctaagccagacagccggaagacacacccaaattctgtccctcttacttcagggaacatgtccactttcggcagcgttacaattttggcaccaaatgtgctaactgcaattccaccatacaatgcgtaactggaaatggaggcaacatctccgatcctgaacgatcgatgcgagaatccaggatatgcacggcttattttggccttttcccactgaaacaagggccagtattaaaaatggcacgctatcctctgtttcactccctgcttttaaacgtctccgatgtttctccctgagacagggcctcacttccgtcagccgggcttttctacggtataattttccttgtttgcttttgtccaaattagaactttttatttcatctctaggaaacgttgatccattatcacanacgtatggaaatattatcaaacatgctgtgagatacgttgtttttattttcatcaattcnttaataaaccccnnatncgcccagn

SEQ ID NO: 522783 - DNA, 280 bp, Homo sapiens
ccctgtttgctgcctgctgagtacctgggattacaggcacgtgccaccacaactgtctacttttttgtatttttagtagagatgggggttcaccatgttagctggcatgtcttgaacccctgacctcaggtgatctgcccacctcggccttccaaagagccggattacaggcgtgagccacctgtcctgaacaattattattattttttaagagacagggtctcatgctgtcacccagactgtaatgagtgacatgaatgtagctcactgcagcctcaaa

SEQ ID NO: 522784 - DNA, 581 bp, Homo sapiens
attttggttgagttttttatttaaggccttgtaaaaaaaaaaaaaaaaaaaaggaaaaaaaaaaaaaactcgtccttcctgcccccttggccccttggctgcgttcacccggcccttttggcgttcatttgccgcccatttgcccgtccttgcccggggttcccccgtgttaccccgtgtggccccctcctacccatctcccttgcgttcccttttgctccccctgcgggtccggccctgtcccctttccggcccgtcctgccgcccgttgggcgccctggcctggccacggtgggcttttggcgttagttccggttcaattcgcgggtagttcggggctggttcaccccattggtcaaccttcgggccgtttgggccaatcccctttttgccctagcgttggtccgatatggcccgattcggcctccgggtcgcccctttcggcccttggtttgaacgttaatgcgctttcaccggcgttgcgctttgccccgttgctgccccttttgtttacccacgtcctcgttacccgtgttcggtccgggccgtttccgggccctcttggggccctttggggggct

SEQ ID NO: 522785 - DNA, 649 bp, Homo sapiens
  misc_feature (422)..(422): n is a, c, g, or t
  misc_feature (649)..(649): n is a, c, g, or t
gtggagacactttacatccggcacaggaagccttctgatggagcacacctggcccatgaaaagacaagggaaagaaacggggccaaaggtcacagtcctctcatcccatcatcctccttaaaatcatcctaatttcatgggccctgaagccagggctgtttctttacacctagaggccttggcgccgggcccttcattattcgcccttgttcccttacacgttctgaaaacgagtgttgggcaaaatcccctgagagggcgaggattcttcatattcgggataacccgagacaagccggaaagacgacaccccaaatttaggtccctcatgagttttaagggaacattgtgcccctttcgggcagccatacaattcttgggacgccaatagtgcctaacctggaagttgccgccataaccantggcggaacctgggaaatgcgagggactctatctgcccaacgctgaaccgagcggaatgcgcagaattacaggatattgcacaggtttgatgttagagcctcttccccttgaaacaaggggctatcatttaaaaaggcccccctaccccactgtgggaatccctggatgttaaagcatatcccattttcgtcctcgaagaggggcttacattaactaagagtgttcn

SEQ ID NO: 522786 - DNA, 122 bp, Homo sapiens
gcgcagtgcccttgcttctgcggtctgatctcttgaggactcccccttgcccttcagttttggctgattcactttctagtacgtgctcttacctagcaatttagcgcccttttctaggcggt

SEQ ID NO: 522787 - DNA, 408 bp, Homo sapiens
ttatatctctcagccgtatttttataactccccagtttattttgaaatattcatgattttgacattatctcacaatccacagaaattaccctacctctgcctatacatttactaaatgctgatgaagaatccttattcaatatttaagcatgccacataacaccacttttcgccacttttaaaattattttaaaaaataagccaatttatattggccatctgggttacatgtgcatccaaaaacagtcatattcctcaactgaccatagactagcatacaagtgtcctcctttctcgacgtaattaagtttcacagccaaagtggttcagatggcagccaatgggctgacctcctcatgaagtaaactcgacaaaactcatgacgccttgaaggtgccaacgactgat

SEQ ID NO: 522788 - DNA, 523 bp, Homo sapiens
  misc_feature (25)..(25): n is a, c, g, or t
  misc_feature (38)..(38): n is a, c, g, or t
  misc_feature (67)..(67): n is a, c, g, or t
  misc_feature (94)..(94): n is a, c, g, or t
  misc_feature (114)..(114): n is a, c, g, or t
  misc_feature (138)..(138): n is a, c, g, or t
  misc_feature (148)..(148): n is a, c, g, or t
ccttcaaagaaaagtccaggccctnatggcttcactgntgaattcatactgacagttaaagaagaanttcatacccagttctcaaacttcatcntgtgagggcagcatttaccntgattccaaaactagatatggacncaagaaaaanaatctataggccagtatccctgatgaacatagatgcaagaatcctcaacaagaccaggtgtggtggttcatgcctgtaatcccagcactttgggaggccaaggcaggtggatcacctgaggtcaggaatttgagaccagcctggccaacatggcaaaaccctgtctgtactaaaaatacaaaaattagccgggcaaggtggcgtgtgcctgtaatcctagctacttgggaggctgaggcaggagaattgcttgaacctggagggaggaggggcagaagttgcagcgagctcagatcgtcccactgcactccagcctgggtgacagagtgagactccatctcaaaataagtaaataaataaagagactcaactagc

SEQ ID NO: 522789 - DNA, 521 bp, Homo sapiens
atgtctgggtgactctgaggatcccgtgggctgggtctgtaggagatggtgccagcaggcaggcttcgagttcatgctgcgctacatctactacgggaggtcacatgccgccgatgactcgctgcattctcactccccagtgaactcccaggtccccaccaaggtgtcctggcacccacctcaggtggctttgaggcccgctctcctgccccagctaggtgatcttggcccagcgcctccctccagagggtttgctggtgcctggggctgggcctggtgctctctgaagcagttggcagctggcaaggaggggtttgcagccaggaggaaccagtgggttcctgaccctcacaactgcccagaggacggggtgggtcattgctttgtgtgacagttgagcacagacatggaggtactccttatgtcacttcagtaggggtctgaacatggagggtcaggatgcctgttaggcctgcaaggccatggaacagcgctacagatgtacagaccccatggggggg

SEQ ID NO: 522790 - DNA, 105 bp, Homo sapiens
gtgtggttgccgtgttggctaccaggccgtcggcccgccaggcatccgtccgttcgggctcacggcttggctctccagggctgggtcggccagttgctcaggcgg

SEQ ID NO: 522791 - DNA, 2371 bp, Homo sapiens
ggtcgcggtactgctaatcctgggccgtgcggtgcctagcttgcttgcgccgtaacgtgatccatgcacgtctatgccggcttcacttcatcctgtggacagcgccgagactcgtcgcgtagagcctcaggctctgagcagcacgtccgtcacgagcaagtgttgacggcacccgacgtgtgcatgcacccaaggggaactgacccggcttttacgcgcacggactccaatgccccactgacttgcgccgctgatgtggacacaggccacagactctaggggtcccaattgcgaacgctaacactccgtacgtcgccggtcccctctccccgctatgcgcccccttcgaagcaacatgatctcctgcgatatacaagagcctaccaacctgtcgcgtttacgacaccgctcccatgacccggcgcacaccaaacatcactttcaacgcttgtccccgtcacagcatcccttgtgaaaacccgcactggctcccaaacgccacactcgacggccccaatgctgccagtatggccaacagctcccacaagcgcccaaatctcgtctgcgcgccatccccttggcaacatggggaaacgtattgacccggccgacgcattgctctcgataacggcaccgccctctagccgagcccccgccaccgccggcccccccacacgcaacgcaaccaccgccacaccgccggaaccctccagccgcaacccgcgcacactgcaggcaccaccaaccgcccaccccgggcccacccacccccccctacgaccccccgcacccgacccaaagccccccggcaccccaccctcaacccgctacctatcatcccttgaatcactccaatctttagccccacactctccagtcacaacttatcacctttctatatccacactctacgccttacgctccctacaacccccccccccccatcctaaccactctgtccccacaaccaacccgcccaatcctcccaaccctcacactccccccacctccaccacaccaccaacagcctaccccatcctcccccgcctcccccaaaccaccaaccttcaccacacatccacgctacccactccgcccataacctccacacccgacaacacatcccctttcaactctcgcctaccaacacgctcccccctcccacccttatccccccccacattttccccaatcccccctcctcaccccactaccacccccccacccgtgcaacctccacccacgcaaacagccgggcagaccacatcaaaaccgccacagcaatggccccccgcgcagcccactttctcctccccgccaactaagttgcccaacgcaacacatgaacgggaccccaccccgtgcacacaccaatacggcagatcatacacacgtctcgcaccacgcgaacaaattcggtaaacacaaacccccacaactgagcggaacctataaaactggccaccatgttagacaaacacacctattcacacaatcgtacaaatagcctccccaccatccactcacacatctacttcatctactctataaacactaatatcttatactccacacaactatacatcaccttaacacacattacgacaaatgaatactcttcactaccaatcaaataacatatatcaaccacccccactaatacaactgttgctactcactccacatatactccataatatatacacattagactatcacccaatccctctactgatgttaatactacctcacctacacccctctcaaccaactcctctaaccaccttgtgatccaccccacccccgatataacacaactcatgaccccacataactaagactctcaccatcatcacttcacacctcatatcttcacttcaccagcactcttctccaagcagcacactacaaactataccttcgcaccttctattcttaacccctacctaccaacatcttcatcacctcaatagcgctacgactcatccatctctctcatcgaacaactaccccactcaacatgctctccacctacataactcaccctataccctccaccctccttccatctcgcctactcccacaacactcatccctaccaaccctcttaccacatcaccacacacactaacccactacaactaccactctacacacacaaccccaacacattcacacacacctaacatcatcacacactgccgtccctccccactcactctgatctacatctcacttcaatacactagccaaccacttcccacacatccatcacccccctcaactcatccacacacacactccttcaatcttcacatgccctctaacataccactactactaccaccacaccatttctcgtcatcccaca

SEQ ID NO: 522792 - DNA, 445 bp, Homo sapiens
aaaggcagtggaaaaggcatgagcaaagacgaatgccacatctcactgaagatgatgcacagttaatttttaaaaaatgctggtggataaatttcaagcaaattatgtgagtgaaaagagcaatctcaaaagaagcatatagccaggtgtggtggtgtgcacctgtggtcccactaccggggagggtgaggtgggaggatcgcttgagcctgggaggtagaggtggcagtgagccaagcatctagccgctgcactccagcctgagtgacagagctagactccgtctcaaacaaacaaacacccctgtccttgctcagtcatctataatagctcttagttgcttatttaaaacaaaaatctttaaagcccatcccaccctaggttacccagcccctactttcagtgcctctctgagctactgtgtctgtaaaatcaaggtattgta

SEQ ID NO: 522793 - DNA, 350 bp, Homo sapiens
  misc_feature (5)..(5): n is a, c, g, or t
  misc_feature (16)..(16): n is a, c, g, or t
  misc_feature (46)..(46): n is a, c, g, or t
ccccnacccaaaaccncatgttgaaaatgtaaacccccaatgccgnaggtgggacccggtgggaagaatggatcatgggggagttttcctcatgatttaacaacatccgccctttgttgtcatgatagtgagttcttgtgagatctggttgtttaaaaatatgtgacacctccccccaccttccttctgctctggccatgtaaagtgctcactccccctttgccttccaccatgattgtaagtttcctgaagcctccctagaagctgagcagatgtccagcatcatgcttgctgtgcagcctgtcagaactgtgagtccaattaaacctctttatgaataaaaaaaaaaa

SEQ ID NO: 522794 - DNA, 669 bp, Homo sapiens
cgaattcggccattatggccgggcgcggtggctcacgtctgtatttccagcactttgggaggccgaggcaggtggatcacgaggtcaggagattgagaccatctggctaacatggtgaaaccccgtctctactaaaaaatacaaaaattatccgggcgtggtggcgggcgcctgtagtcccagctactcggaaggatgaggtgggaagatcacttgagcccagcaggttgaggttgcagcagtgagccatgattgcaccattgcactctagtctgagcaataatagagcgactctgtcttccatccatgcccgccgtctactccgagctctctccttttactgggaccacacctgcctcgcacctccgtcctaccgtctcctctacccagctagcactgcgactgcccgacgcccctacggcccgccccatcgtccctcccccatgcttctatccccccccctccttccctccaccgcactatcccccctcctcccccgcccctcctcctcgcattccctcctcgcatcctcctcccctcccgcccctcccccctgtcccctctcccgatcgtacctcacactccccctcctccccctgctcgtttctacccccttgtctcctcccgcgtccccacagtctgtgcccctcttctctccccctccttccg

SEQ ID NO: 522795 - DNA, 180 bp, Homo sapiens
gtagagacagggttttgcaattttggccacggccggtcttgaactcctgacctcgcgtgatcctctcttctcggcctcccaaagtgctggctgggatcccaaagtgctggctgggattaccaccatgagccaaggcacccagcctatcgtacttttttattgttgtactaacttaaattt

SEQ ID NO: 522796 - DNA, 1055 bp, Homo sapiens
ttgtgctgctcgtattctctgttggcggtcgctgtgatgtagagggttatgcccctttctgggtgtggtgatttcttggggggtgccttggttctcggcgtgcctggtcggcggttcctttgttctccccctgttagttgctggctacgggttgggttgtatcgtcgagggcgtggtgggccttgcgttctcctatggaaggtgctgccagggggctgtgttgcagttcggactgggtcgtagctacgcttgggtagtgtgtcgtttgctagggcgcgcgtgtgctggttgctagtgttagattgactttgttcctctagctgcttgctggggcgggtctaggaccgccctttgggtcacgcgtgttgggagattggctgggtaggctcaatgcactcggaagatcctggttaaagcatgatgcatctaggtgagccttcgaactgctggtccgttccctgtgtgtcggtccccgtctgggtgcctctatgcaggaagagcacgatctgggtgttccagggaggcccagtgctaccctcggctgatcttcctccgctgccgccgaggtcctggaacgaggggcaaggagcacgttccatttgcctcgtgatagccagtggagtccgtaggcagcgcccgttaagccccgtggcgtgagcaagctgtgatacagcttacgccctgcctcgcagttgcaccatcttctagatgtgcactgtgtaaaagatctaagctagtgggatgggagaaacttgagggtgagtcgggaacctcccctgctgagggtggtcgtcagggttccgtgactccatgtgggccagtggtagcctgtcccagacaactcctgtcaccccagctctgcctgtgccatttatcccctgatcagctgctgcactagccttccatgcttccctaaggacttagtggagggggaaagttgtttttggtactacttggtgggaagtaaggggaaggttggatcttggttactgctctacccacctcagagaaaagactacaacctgggagaaaaatatatagttttttcctgtcag

SEQ ID NO: 522797 - DNA, 408 bp, Homo sapiens
ggtactgtgagctcccggaggtgcatccaccgtccaagcggtggcggacacgagacaggcacgacacaaggctgcccgtacgttcatagtgaagttcggctctcgcgagtgggtgctgggccgcgtggagtaggactcatgggtgagcgacgtgccgctcagcctcaatcttgccgctggtcatcgtgccccatgggtgggtcggtcatcgcggtgtgtgctctcgcgtgcatagctgggaaggaaggaggccagtaggcctacagcggatacggtagttaagaggatcgatggtcccagtgtggagggcctggaggagacgcgtgcgggaccgtctgccaagaaggaatgtcacatgatccgtgagtgactctgatgagtggatggagcatgtaccaaagaggtgct

SEQ ID NO: 522798 - DNA, 259 bp, Homo sapiens
agttctgccctcaggagtattacactcttttcttatcagcaaagctctttatgtctgtgagtacacgactcatctagtataaagagcctctgtatacaggactgatatgcatctgtgctctatctcattgttcttacgtcccttccctgatcttctcttctttttttttgggcagggtctggcgcgggggcccaggtgggtttcccagggtcgcaatcgctcggggccactagttaccgtccagcctcccaggctccag

SEQ ID NO: 522799 - DNA, 114 bp, Homo sapiens
  misc_feature (93)..(93): n is a, c, g, or t
ggcagaagacatgtttaataacattttcatatttaaaaaatacagcaacaattctctatctgtccaccatcttgctcttctttgcctgttgcngaggcagacaaaggaaaggga

SEQ ID NO: 522800 - DNA, 140 bp, Homo sapiens
cacctgattcctaattacggggagaagggcgtggctgttcggtgtgtacagtgcttcactggcctttattcaagtcaagcactcgtattcttgatttactgctaaatcctcctttggatttctatatgctttcataaaaa

SEQ ID NO: 522801 - DNA, 107 bp, Homo sapiens
agatggcggaggtggaggttttgtgctttatggttgaggaaatttttttggggggtttggggaaattggtggggtaaaaaggtaattattggggggaaggttgtgtt

SEQ ID NO: 522802 - DNA, 237 bp, Homo sapiens
  misc_feature (19)..(20): n is a, c, g, or t
  misc_feature (46)..(46): n is a, c, g, or t
  misc_feature (67)..(67): n is a, c, g, or t
  misc_feature (84)..(84): n is a, c, g, or t
  misc_feature (123)..(123): n is a, c, g, or t
  misc_feature (205)..(205): n is a, c, g, or t
  misc_feature (207)..(208): n is a, c, g, or t
gaaaagctccaaactcctnnccccttccataagggccccccaaaantgtgttggggccatgtgttgntgggtccctccaattanctgtgactgttagtattgaagaaggttcagggtttttgncccttttgcatccctcccttgttccctttgggtggtccctcaccggcctcaatgtgttgccctggggactcattactttggnanntggctttttataaaaatgggtcaaaccca

SEQ ID NO: 522803 - DNA, 245 bp, Homo sapiens
atgagatgtggtttctccaagttggtcaagctggtggcaactcgggacctcatgtgatccgcccacctcacgtcgtccaatgctgctagcgagttgcaagcatgagccactgcgtgatgaccatctataatctactgttagtcactatggaaacggaccctccaccttagcaaccagagatcgaacccgtcaagacatgcatcaagacccttcacaagaaacgtcggggctacatgaggggtacc

SEQ ID NO: 522804 - DNA, 420 bp, Homo sapiens
ctatgaccatgctttcggtttcagtggccatcggtttacatccaacatttattcacttcttaaatctatttgtcagggtattgagacagggactccttacgtcaccccggctagaatgcagtggtttgatctcagctcactgcaaccttggcctcgcaggctcaagcagtcctcccacctcagccccctgaggaggtggtactacaggtgcgtgccaccatgcccggctaatttttgtatttcgagaagaggcgcttttttgctatgttgcccaggctggtctggaactcctgagatcaagtgatcctcccacctcagcctcccaaactgctgggattacaggcgagagccaccacgtctggctcacttcttaaatattgcctcgcgtcttttagctggctttctcccaacaagaccatt

SEQ ID NO: 522805 - DNA, 212 bp, Homo sapiens
tggggggagggggtctatttttgtcccccgggggggggggcgggggcacaatttaagttaatggaaccctcggcttccgggttaaagggaattttttgcctaaccctccttaaaagtggaaatggggggcttttcccccccccccaagttatttttggttttttaagaaaaaagggcccactggaaaaaccccctttttttctcaaaaaaaa

SEQ ID NO: 522806 - DNA, 200 bp, Homo sapiens
agtcagtggccagaactagcactctgaaaagtaaaatgatcgtatgcagctccaaggacgcaatctaaaagaaatttcaaggcagtatacatgaatgtcaagcatatggaccagaacgatctcaatcgggcttgtattgctgataagtttcgtggatcctttattgttgcctttgaaggatgccctgtgtagattattca

SEQ ID NO: 522807 - DNA, 150 bp, Homo sapiens
  misc_feature (84)..(84): n is a, c, g, or t
tattgcctcactcaaaactgagttaaaaataatctcggctgggtgcagtggctcatgcctgtaatcccagcactttgacaggtngacgcgggccctgcgatcgtcccaccgcactccccaccctggtgccagagtgagccaccctctcaa

SEQ ID NO: 522808 - DNA, 838 bp, Homo sapiens
acaggaggagccaggacaatttcggcaaacgggaatccgctgtggccgacgccgcatacacagtgcggagacggccgttggcataaaggccgaggccgccgacgacaatggttacaccacgggtgcccaacccgggggggcaaaaccccagcccaggtcgggcccctggggtggcaccgccgacccaccagaacaggaatgggtggcccaacccggccacaggacgccgcgagtcccgcgcccgccgcatagcgcccgcccgaagacaacctaggaggtgtaatcagggccacccaacaaccctggtgcgtaaccaggcaacataggaggattaatagaagctcaccagccccctcaggggcaactttataagccccgaggatgaggtgcacaccacagcttgataatccgccgagacccgcacgcgcccccccgacagcacaccgtcgcgggcaaccagtctctcaccactccagcaatgtgccgccggcagcccccaaagtagtggggaggaagtccactccaaaacccgccccgcacttaggtgtggggaaataaaaaaacccccccccccaaatgttcttccaccttgccggggagagaaccccccccagctgccggggccggggggtgccaaacccaatgagaaccccaccaccactgaggagcagtagcgagggcacggagaacaagcacctctggaggtcccagagcccactggactcccccctcgcgggtccaccacacgggggaggaaaccccaccctcttcttggctgaaaaaaaccaagaggaccccacccgggggaaaaaaccgatccaccccctccacaataaca

SEQ ID NO: 522809 - DNA, 1132 bp, Homo sapiens
tatgaaaaaggggtttttctctggcccccccggtgttccccccggggggacaaaggaaaaaaaaatttttccgaaaaacaaagaggtatagaaacccccacgtggtggtgggcgacaaacaaaaacatgagagacaccacgaaaaaccgcgggggcgtgagcaagagcggcgaggacacaacaaagaaacaaccatagagagaaaaacaacacaacaccatgatgggcaaaatttactaaaaaaagaaaaagaaatctatcaaaaacgcaagagggaataattctacgacaagagagtaagagaggggaagacaccaacggagcgggcgagcgagaaaataagtaagaacaaacacagagcaacagttggaggcggacaagggagtagaacaaacaacgagaacagcatgaggagagagacaaaagagaggtagtgaagaaaaaaaagaggacgaaataacaaaagtaaagaccggacgacacacagtagagaggcagaaaaaaaataacgaacagagagagagtgaaaaaaagacaaagaacataacaagcaaaaagagagaagaagagagaggagagacgacacacacaccagacgagaacgaagtagaagaaaaaacaaaaaaaaaaaaaaaacaaagaaaaagaacacatcaatgataccaacgccacagagaagagatgatgacaaaagggaagagaacagtagacgacagagtagacagacgaagcggaggtagcaacgaaagagagagaaaaaacaaagatggaggaggacaacacagcagaagaaagcggggaccaccacgagcagaagacgcagcacgaccagagaaggaaacaagaagcacaaaaccaaagaggaggaagaggcgaaggacgaacaaaaaaagaacaacagaacgaaagagaaagaaagcagagagaaaagacaaaaacgagaaagagaaagaaaacaaaagtaaatgcaagaaggaacaaaacacaaatagatataaaaagaagaagggagcaaaaaaagagaagagagagaggagatcacgaaacagaaaacaagaaaccggaaccaacaacacaagaaagacacacaacgtgacggccagcgtataccatgaagaaggaggaaacgaat

SEQ ID NO: 522810 - DNA, 105 bp, Homo sapiens
ctctccttgcggccgccagtgtggtgaattcgcatccgcccagacagatggataccaagcaactatccaattactgaaaactttcgagccatatacttgacctta

SEQ ID NO: 522811 - DNA, 153 bp, Homo sapiens
acagctggcaggggtactgtgtgtgtgttttctggatagggtgctgtgtgtgtgttgtccggccagctggggtactgtgtgtgtgtgtgtccggccagctggggtgttgtgtgtgtgtgtgttccggctgtctggtgtgctgtgtgtgtgtgt

SEQ ID NO: 522812 - DNA, 332 bp, Homo sapiens
tgattggccatagaagccggcgtaaagagtgttaagtcaccccctccccaattaaagctaatgctcatctgagtcgtaaaagactccagttgacacgaaaatagactacgaaaggggctttatagctatgtctgatcgatcacaataggtaagacccaaactgggattagataccccagtatgcttagccctaaaactcaacagttatatcaacgaaactgctcgccagaacactacgagccacagctgacaactcaaaggacctggcggtgcttcatatccctctgagaggagcctgttctgtcatcgataaaccccaatcaatcataggg

SEQ ID NO: 522813 - DNA, 367 bp, Homo sapiens
  misc_feature (17)..(17): n is a, c, g, or t
cgggcagtacggatgtngtgctgttcatatgtttgatcaaaggccaggacgaagacctagaagtcatgcttatcaaaggagctcatggcagaggtaagaggagggctacctgatggatggtgaaattctgattcaaaatgatcttgagatgtcgaaatgaacaatgcaatcaataatagaattgaatccagctcaacgctgcactatgacattaagaaccatgccccaatcaaggaaaataaagtcttgtagcttgggagcaataaaaatatggacacagaaggtctggggttggtgcggaggtccagagtctgtgtgaaaagaccgggaatggatctaagaagtgatgggagtagcctccccacat

SEQ ID NO: 522814 - DNA, 1041 bp, Homo sapiens
  misc_feature (1041)..(1041): n is a, c, g, or t
caggaaagtgttctcctgggtttgtgcccaccatggtgcgaatcctgacccaaggcctcctgtctcccttcaaagggagacccttttgggggatgagtttgccagactccccgtgctggtttctttgttactatttgtttggggtttgttttagttctttttttttttttttctttctcttttttaaaaatatgtggctgtgaacttgaatgaacactgctcaaactttctgctatgggggggggggtgggatgggaagaaggggcgttggttaatcctggggtgtttccaggtgcaataaatagctacaaactttcttgtgcacctctgtgtttgtcccgtgtctgggtcaagccccttgagcggggaggtttcggtaagttcccagttccagatctgcccctgggcaaaataaaagtccgggtctacatctcgtgatgggaaaaacacaaacaacaaagaaaccaacaaaaacaaaatacaacaaaaaaacaacaagcaacaacaaaaaaagaaggagggggggccggcgcctacaaagataccccccggggggcggccccaacacaggcgcacgcacagcccaagtctattggatgaaaggggcggggagccccccacagaggggaggccgacgtcaaaatgacagcgaacagagcgacaaggacggacgcagattaaaacaagacagcgccgcgcaggactgggaacaaacaagtgtcaccagagcggagacaccatgcggggacaggaagcccccacgtcagcaggagcgggggggggaaatcataatgggtgggcgaccacacaccttcttccatatgggaagttatatgatcgcgccgcctatgggaggcctaaaatttaaccggacgtctggcagggcatagtatagcgggtctgtaaccaacaccaccagcgctgacatactctcctcggcctgctgctacacagaatagttagtgctcagccgaggagagatgtcattatgtgagcgagactattttccacggcagccacctgctgagcagtagatcaggn

SEQ ID NO: 522815 - DNA, 307 bp, Homo sapiens
ccccgactagcccgacagggggataacacgttcgcgagccgaagcagggcaaggcattgcctcactcgggaagcacaagcacaaggggtcaggacccacttgaggaggcagtctgtccattctcagatctccagctgcatgctgggagaaccactactctcttcaaatctgtcagacagggacatttaagtctgcagaggattctgctgccttttgtttggctgtgccctgtcgggctagtcggggactgtcgggctagtcggggactgtcgggctagtcggggatactatcctgtcgggctagtcg

SEQ ID NO: 522816 - DNA, 150 bp, Homo sapiens
  misc_feature (4)..(4): n is a, c, g, or t
ctgnttacacgaagcctgatttggttgttgtaaagaatgtgtgatatctaaaataactggtgcataattttgcatcacaggaattccacgataatctaccactaaatctccgtaacctaacattgttccacgctcgataattgctacatt

SEQ ID NO: 522817 - DNA, 840 bp, Homo sapiens
atgatatcaatggcttcctagggtggatcgtgtgagcacaccatatattgacagtaggaatagacgtagacacacggagcatatttcacctccgctaccataatcatacgctatccccacgcggtcgtcaaagtatttacgctgatctcgtccgacactccagcggaagcaatatgaaatgatctgctgcagagctctgagaccctaggattcatctttcttttcaccgtaggtggcctgactggcatgtattagcaaactcatcactagacatcgtgactacacgacacgtactacgttgtagcttcactgtccactatgtcctagtcaagtaggagctgtatttgccactcatagggaggtcttgcattcactgtattgtcccctattctcaggctacaccgctatgagcaaagggtacgccgaaaatccatttcactatcatattcatcgggtaaagtctaaggtttcttacccacaaaactgtactcggcctatccggaatgccccgtacgttactccggagctaccccagatgcatactaccacatgaagacatcgctatcatcttgtaggcgtcattcagttgtctctaacgagcgagtaatattaatcaattttcgtgatttgggagtgccttcgcttcgaagcgaaaagtcctaatagtagaagaacctccatgaagctggagtgactatatggatgccccgaggctacaaacattcgaagaacccggatagcataaaattctagagcaaaaaggggaggaatcgaacccccagaagcggtttcaaaggcaacccaatggctccatgacttttccaaggaaaaaaactctag

SEQ ID NO: 522818 - DNA, 1020 bp, Homo sapiens
cagccataaaaaggaacaagatcatgttctttgcagggacacggatgaagtgggaagccattatcctcagcaaactaatgcaggagtggaaaaccaaacgctgtatgttctcacttataagtgggagctgaacaatgagaatacatggacacagggaggggaacaacacttactggggcctgtggtgcgagggagggctaggggaaagcattaggaaaaacagctaatgcatgctgggcttaatacctaggtgatgggttgttaggtgcagcaaaccaccatggcacatgcttacctacgtaacaaacctgcacatcctgcacatgtaccctgaaacttaaaaaaaaaacacacaataaaataaccaaattacacgcttcaaaaaaaaacaaaacaagtcgaaaaaaaaaaaacttgtgtgggggcgggcctggggccctctggaaaagaggttttgtagagacccattgcggtgggggcgcgcgaggggccccaaagggtgaacaggtggaacacgtgggtgcaaacgggtggtgatccacgagggagaaaacccggggggccagaaaataaggcgtggggaattctctcaaccaaaattaaacaaaggccccggggggggaacacacacaagacactattttctgaaacaaaaccccaaaagggggaacttcagggagaggaccacacacagggggggaaccattacacaacagcaggggggttcaccaaagggagaagacccagaacaatcacaaaaatattagggcccccacgtcacggggtggtccaaaagagagagaaagagcgcgagaaaaacgcaaacgacaacagagaaaagagaaaagaaaaaagaaagaaaaacaacaaagaaaaagaaagaaaagaaggacgaccaagaaaagaggaagaatactaaaaaggagaagaaagcaaaaggagaccagaacaaacgaaagaaacaagaggagaagaagaaagaagagaggagcggaaagaagagagacgaagagaaaaaga

SEQ ID NO: 522819 - DNA, 371 bp, Homo sapiens
  misc_feature (50)..(50): n is a, c, g, or t
  misc_feature (200)..(200): n is a, c, g, or t
  misc_feature (284)..(284): n is a, c, g, or t
  misc_feature (330)..(330): n is a, c, g, or t
  misc_feature (351)..(351): n is a, c, g, or t
  misc_feature (370)..(370): n is a, c, g, or t
cccatctccacaaaaaataaaaaaattagttcggtgtgggcgcatgctantagtcccagttactcaggaggctgaggtgagaggatggcttgaacccaggagtttgaggcttaagtgcactatgatggtaccactgtactccagccttggtgacagagcaacatcctgcctctaaataaataaagttaaatcttcaaaanttttgttcaacataaaattgagattgttgggttcccccttctcaatttaggggaggaaagtcatatactttttagctttaaggnagttttgtcccattttaagtcttctggaggttttacaagtctggantttatatttccatttttaggnggattaacccttctgtatna

SEQ ID NO: 522820 - DNA, 208 bp, Homo sapiens
tttgggagaaatgtaaaataatgtaaagatgcagtattaaatcatagctgcataaaatgaactgtaatacacagtatgttactgaaataatttcacagccacctcctgttgctatgcagtgagctcaagtgttggcgtatgcacttaaaatgctgtgacactaatcacctgtgcatgaacaactcatcgccccagtaaactgcatatc

SEQ ID NO: 522821 - DNA, 526 bp, Homo sapiens
  misc_feature (17)..(17): n is a, c, g, or t
  misc_feature (66)..(66): n is a, c, g, or t
  misc_feature (103)..(103): n is a, c, g, or t
  misc_feature (107)..(107): n is a, c, g, or t
  misc_feature (116)..(116): n is a, c, g, or t
  misc_feature (131)..(131): n is a, c, g, or t
  misc_feature (154)..(154): n is a, c, g, or t
  misc_feature (167)..(167): n is a, c, g, or t
  misc_feature (175)..(177): n is a, c, g, or t
  misc_feature (194)..(194): n is a, c, g, or t
  misc_feature (227)..(227): n is a, c, g, or t
  misc_feature (283)..(283): n is a, c, g, or t
  misc_feature (337)..(337): n is a, c, g, or t
  misc_feature (440)..(440): n is a, c, g, or t
tgttctgctggggggtngctctttacaaatggggctggggtgttgtcagattatgaactgttaaanccaggttcttttttggtttttgaaagctaacattgtntttntctttcttncttgattcagttttnttttctcattcaaattaagttgntttaatatttatnatctaaannncatctgtttttttaccngcaaaagtcttttgaattcaagttatgcatgtngggccatcaaatctctgggtgagcctgaacgttgggacctggaaccaatgtgagtntgtgttaatcaatgtactgtgccatccagcggaagccttctccgtaaccttgtnttttgagcacactacacatgaaaacttctaagggtcgggcattcagttctttcagagatatactcccctttcctgttgtctgaccatataaaccaaacatctntcgcaacctctcttcactgatggcttcaggtctgtcgatcttattcccaagaatcagtataggcacattagcaatggtttcatctg

SEQ ID NO: 522822 - DNA, 182 bp, Homo sapiens
atgcagtggtcacagggtggtcggaagagtgtcggcatcggtggtgtcagaagccccatcgctatcgggcgggtacagtggctctccgcgagattcgccgctaccagaagtacagcgagctgctgatcagaaagctgccttaacagcgtctggtgcgtgagatcgcgcaggacttcaagacc

SEQ ID NO: 522823 - DNA, 138 bp, Homo sapiens
ggcacttaccgtcatacagctctgtccagctagagctcaatatggatcacaccgtggtgctgcagctggcagagaagaatggctacgtgactgtcagatgagatcaaagccagtcttaaatgggagaccgagcgagcg

SEQ ID NO: 522824 - DNA, 370 bp, Homo sapiens
  misc_feature (55)..(55): n is a, c, g, or t
agcgaacctctgtctcaaaaaaatgaaaaaattaaacttgaatgaataatgaaanaaaaagggacaaaactatatttaaaaattttagactgggtgcagtggctcacacttgtaatcccagcagtttgggagctgagacaggcagattatttgagcccaggagttcgagaccagcctggacaacatggcaagaccttgcctctacaaaaaaatcggaaaatagccaggcatggtgccatacacctgtggtcccagctactcagaaggctaaagtggggggactgcttgagcacagaaaggtcgaggctgcagtaagctatgattatgccattgcattccaacctaggcaacagagcaagactcttattta

SEQ ID NO: 522825 - DNA, 693 bp, Homo sapiens
aaaccaaacgttggttttttattttttttcccacattgttttatcctcttttccaaacatggactttggggggttttcacctattgggcacttgtgaaaacccggctttaaacatgaaggaggaatagctgtgttcccccttcattctttcgaatatattccggaagtacaatccaatttcgcacgagggtaatccttacaagctcaaagtttctccatatcagacatccgttgtacttttcgactagtgaccaaagtgcgcatcctcaccaacatgtggtttagacagtaacctctctaagtgactgtacggtgcagtctcattgttattgtgatctgcattacctaaggattagcctcggagaacgtgttttcatatggttgctggccatgggtcgatcatctctggaaagatatctgttcgaaggtccagggcgcgtgctcctccgggcacctggtccggggttaggtgtagagatcatgtattctggaatatgcggtgcccagtaaagctgtgcgcccccttgtccgtcctgaggtggacgtttgtggggaacatcgcgtgatcacttctgtttaaaacctgatctcggtatgggtttcgtacacaacataagcaggttccccgcaccgattaaaggaaagacagcccggcaacaaaggtttgttcttctttaccaactagcatagtat

SEQ ID NO: 522826 - DNA, 300 bp, Homo sapiens
taaaattttttttttgttgagacggattttttatgttgcccaggctggtttcaggctcctgggctcaaatggtcctcctgcctcagcttccaaaggcacaggccaagttgtagctttgtcccttgccatcatgcccaacaaaaggttttatcccttttaatgaattgactttcaaaaattggttatgttggtgggcaagttttttaagctggaaattgtaaattccccctgaaatgttttttcatccagttcccatgaactaatactccaataaaggatggttttgggggtcaattttta

SEQ ID NO: 522827 - DNA, 619 bp, Homo sapiens
  misc_feature (49)..(49): n is a, c, g, or t
  misc_feature (74)..(74): n is a, c, g, or t
  misc_feature (172)..(172): n is a, c, g, or t
  misc_feature (216)..(216): n is a, c, g, or t
  misc_feature (220)..(220): n is a, c, g, or t
  misc_feature (261)..(262): n is a, c, g, or t
  misc_feature (265)..(265): n is a, c, g, or t
  misc_feature (273)..(273): n is a, c, g, or t
  misc_feature (282)..(282): n is a, c, g, or t
  misc_feature (287)..(287): n is a, c, g, or t
  misc_feature (291)..(291): n is a, c, g, or t
  misc_feature (305)..(305): n is a, c, g, or t
  misc_feature (317)..(318): n is a, c, g, or t
  misc_feature (334)..(334): n is a, c, g, or t
  misc_feature (344)..(345): n is a, c, g, or t
  misc_feature (381)..(381): n is a, c, g, or t
  misc_feature (395)..(395): n is a, c, g, or t
  misc_feature (410)..(410): n is a, c, g, or t
  misc_feature (421)..(421): n is a, c, g, or t
  misc_feature (433)..(433): n is a, c, g, or t
  misc_feature (457)..(457): n is a, c, g, or t
  misc_feature (473)..(473): n is a, c, g, or t
  misc_feature (480)..(480): n is a, c, g, or t
  misc_feature (486)..(486): n is a, c, g, or t
  misc_feature (493)..(493): n is a, c, g, or t
  misc_feature (498)..(498): n is a, c, g, or t
  misc_feature (537)..(537): n is a, c, g, or t
  misc_feature (541)..(541): n is a, c, g, or t
  misc_feature (616)..(616): n is a, c, g, or t
caccttgaccatttttcactttttggaaatgaaaggcacttcccacttnctctttgaaggcaattccattctcnccaaggtccttatttccttcccatattctctcacactcccaaacttctgaagaagcggagcaaacattgtgcgccgagcgaggacaggagtgcgagcngcctctgtacttgtcactgcacctagcactgttgaatccacccntccngggtcacgccgcggtgctgggcggtcacagcctaggacccnntanagccgcancctccatgngaacnggantcaggtctggtgcngtgtcctcagtnnagtggcacacttgcancagaacctcnnggggctcggtagaggcaccaagggtcacgaagcaantctacccaaagatnctggggcgaccaacnaaccccacaangaagagaacaanaaatggctgtgcccaaccagcacnggcagctgacccaacncaacccngtccancccctcnacctnagcaaacactttcagcggccctcgagaaatggtaggatnggcnatgtgcagagcctagtggcacagcagcccacggaggcacgcaccgcgcctcaggccgcgcgtggccttggcaggnccc

SEQ ID NO: 522828 - DNA, 606 bp, Homo sapiens
  misc_feature (195)..(195): n is a, c, g, or t
tctctgatcgctcagtgattctcagttactcttctgattctctgattcgaaagtgctactgaagagaaatcacaagaatacgaaaaaagaaacatcggaaaaattcccgaaaacacaagaaagaaaagaaaaagcgaaagaaaagcaagaagagtgcatctagtgagagtgaagctgaaaatcttgaagcacaancccagtctactgtccgtccagaagagatctctcctatatctgaaaatagattcctaatgagaaaaagtcctcctaaagctgatgagaaggaaaaggaaaaacagagagagagaaagggaaagagagtgtaatccacctaactcccagcctgctttcataccagagacgacttttagttactagatctggcaggaaaattaaaggaagaggaccaaggcgttatcgaactccttccagatccagatcaagggatcgtttcagacgtagtgagactcctccacattggaggcaagagatgcagagagctcaaagaatgagggtatcaagtggtgaaagatggatcagggggataagagtgagttgaatgaaataacagaaaatcagagacgtccagttcgagtaacagagagc

SEQ ID NO: 522829 - DNA, 466 bp, Homo sapiens
agactgtagtgtgcaggagtacagtaggtcatcgctaagtatgttccagtaggaatctgtactcgacaactgcgcttctcatagataggacggggaattacaaaaacattccagatgagatagtaaatagttctggctaagctgtcatataggattttgcaatgggggaatgttgtacttagtacgcatttcaaaattacatgtgcttgatctattaaatgtgataactcaggaaccgggaagagcagaatttggtggcttatcctcatgatggaaaaatcttttacggcacctcacaagatatccctcctgaaaatgaactgcttattgatcatagccgagattatgctcaacagataggtgttcctgaacagccagatgtgcatctctgtaactgtggcaaggagtgcaattcttacacagagttcaaagcccatctgaccaggcacatccataagcatcttcc

SEQ ID NO: 522830 - DNA, 165 bp, Homo sapiens
cttcagagcgcctctgacacatcatcttcttcatcttcatcttcatcatcatcttcttcctcttctttctcaagtactcgctcttctccacctctcttgctgcgagacgggcggcgctggcggccggcggcggtccgggcctgtccccgcggggtcgagaagcgc

SEQ ID NO: 522831 - DNA, 206 bp, Homo sapiens
gattaaaaaccgaaggacactagaatgaggacaagctggagaagctggaggagctgacaatggatggggccaaggttaaaggctatactaggatgccacacggtcctccatgggcatggacatatctagccatagacttgataaacatacgagagctaactccagtacgtagtggagactatatctataaatacccggggtaccgg

SEQ ID NO: 522832 - DNA, 1108 bp, Homo sapiens
gagtgaacgacacagagcaggtccgtcgttccatctcctagaaatgagcatccaagcgttcaaacccgcgtcagcaatgtaaactgtcgcgaagctaaggcaagggcgaaagagtatggcttcttcctgcagcaattgcggaaggcacaccgagggtccactggtccgggtggttggagcaagtgtaagtccatagcaggagcaaggcttggcctttgcgaagtcatggcagacaagcagttacattcagagcatcaatgggttggtcttttgtggggacaaaggcaagcaacataatgccaggttatgtggatctggggtccagcaacagcagtggggaacttccagtggaactttgagctagattctgaggatggggggattcctattgagacgacgcagtggacaaagcaacggggtgggactttgacaaggacgtaggggatcaaaaggttcaggaacacggaagcacacgggtatctcggacggctgaccataacgttactgacactatttagccacgctgtgttgtacattgtccacattcgcaccaatgactgtgttgcgccaaaaaagcgttatggggaacaccacaagagaccccccggggacattagttagagtagaatgtcacatcggcctggaaccggcgacacgaggaagggacacggcttctaatggaggcgtttcagtagatttgattgaaaacaacaacagtggtaaccgaaaggggttaaaaacaaaagggagggaggcatagtgtatagcaactcggaaaactgtggacatgactgttttgtaagaagatgaattatcaatagggtatatgcgcagcggccacacaccaattagcaacaacaggcacgcgtcggcgcaagcttcaagcctggggggcgatgcgcacaggaggaaacgccccaccctttgcggcacggtggggcaccagcgctgagcaccactggcggcacggcaggacacaacggggtcacagcaagagggacacacttgggccacacgaggcgagacacaatgtgcaagagcgcagacacgaggaggcgggaggcagggcagacacaccaacagggcggatgagcacacagcgaacaca

SEQ ID NO: 522833 - DNA, 580 bp, Homo sapiens
gaaactgttagcattttatagtaactaaccaagttgtttgtcatttgttgataaaaatcaataacaagaggtaataactgtgtagttagagtacatgtgttttccatatgataatacagtcactgactgtcagccagggtgtaaaaacattaaaaaattagcccagtggccaggcgcggtggctcacacctgtaatcccaacactttgggagtccaaagccggcaaaatcacgagatcaggagctcgagaccagcctggtcaacatggtgaaaccctgtctctactaaaaacacaaaaattagctgcgtgtggtggcgtgcacctgtagtcccagctactcgggaggctgaggcgagagaatcacttgaacccaggaggtggaggttgcagtgagccgagatcacaccactgcactctagcctgggagacagagcagactccgtctcaaaataaataaataaataaacaaacaaacaaataaaaataaataaaataaaaaataggctgggcacagtggctcatgcctgtaattccagaactttgggaggcagcagcatgagaatcatttgaggtaaggag

SEQ ID NO: 522834 - DNA, 184 bp, Homo sapiens
tctagaggatcaccatggaagatgtgctgggatactgagtctctgtctcctaaatttgaatttaattatgcaggcagactataccagttggtactataaattaaagctgaagaaaaagcaccatgaagcagagttgggttcatggcaaggcacatgaaatgcacattcttccaattggagatgt

SEQ ID NO: 522835 - DNA, 384 bp, Homo sapiens
gtgtccacactcaggaaagagcgtatacggggcgtcgttaatacttgaggaacagagctactcagcggccgatcgcttatacacgtggggaaagagctataccgggccggcgttttgatggagggagaaagtatacttgcgagctacggatcagcccgcggttcatggtcagcttgccgcaggctgacctcaggcggagtctgtactcagagggaggagcagtagccgggtgggactggggcgtttacatctcgagtcaggtcaggcagagtctggtccagcatcctttgtgtacagaggtgctcctctatgaatgcattacagtttatcttccaggtcatcaattgtctttaccagcttggctaccgatctctcagcaaactc

SEQ ID NO: 522836 - DNA, 118 bp, Homo sapiens
cgtcagcccagggtgggcacctagatgtctcatgcagaaagcctcaggatctcagtcgaagttttattaacaacccgcacagcctacccgtcttccaccgcctacccgtcttccacag

SEQ ID NO: 522837 - DNA, 337 bp, Homo sapiens
aagagatggccactgagctgtacttttctattagttataaagcctttagagcatcagtgcagtctgggttatcagagcatttttctcaaatgctgtcaactattttactagtcatttatgttcttatatttatgtatatttgttaaaactgtaaaaaaatttcacagatttttttccaatacctgtgcaagatacatgtgtagctcaaaactatttgtgatctactgtttgcatgtaagagaccaggatatgtaactcttatattttaagtgtatacatattgtgtatataacatatggatattaaaaatggggaattgcacattttaccttttgga

SEQ ID NO: 522838 - DNA, 460 bp, Homo sapiens
  misc_feature (94)..(94): n is a, c, g, or t
  misc_feature (110)..(110): n is a, c, g, or t
  misc_feature (114)..(114): n is a, c, g, or t
agtgcatggtggtgtgagagaagtgctagagtcaggagagagggctccctttcatttacacctggacacttggcttcctctgtggggaatcccngtgctagaatgttccngccngggccttgttctaatgacccactttcataggatcatggccgggacgcctctccccgccacaccctgacatacccttattagggctgcttagttccttctgctccagacgttacttcctgttaaattcggatatgcctacccgaggagaacacaccgagcctcatccatccttatgctgagttttttccttgggatgatttgttcccgccctccagtaccgagcctggcaccgagaagcacttgctgaaccagatagagacccatcccactccctctgtaaatatgggcgccaatgccccctatgtgtcaagccctgtgctcgtgccgggatcctctacgttcagcc

SEQ ID NO: 522839 - DNA, 212 bp, Homo sapiens
ctcttgtagagatgaggtcgccaagaatacgaggaagtgatctgtcccagccagcgggttgaagtcctgtgccccaagtccagtgatcctactccacctcattggcgaccttcttcacttgccaagagtttgttattcggaatcagtccgcagccactctcgctggatctcatacacactttttctgagacactcatcttttcagtgttcct

SEQ ID NO: 522840 - DNA, 242 bp, Homo sapiens
cacaaagaggcacattgaacatgggaagggcaggcgcgatggctcatgctgtaatcctagcattttgggaagctgaggcaggcaggttattgagcccaggagtttgagaccagcctgggcaacacggcaagaccgtctacaaaaacatacaaaaatttacttggtgtggtggtgcgcatttgtagtcccagctactcaggaggctgaggtgggaagtcagggttttgggggaaattccctac

SEQ ID NO: 522841 - DNA, 132 bp, Homo sapiens
  misc_feature (98)..(98): n is a, c, g, or t
ctccccacccatctgagagacttcatctggctgcagcacagtgaagactgtgtgtgtccctggacgggcgcctggctggggggtggctcccagtgcgnacctcttcggtggagtaagcgaggttctcgttga

SEQ ID NO: 522842 - DNA, 115 bp, Homo sapiens
tggactcgacgtttgctggaactggaacggtttggcatggcactgtacgtttggatagtaactgcaacgtttggctctggaactgcaccgttcggcaggacactcgtaacatacg

SEQ ID NO: 522843 - DNA, 308 bp, Homo sapiens
ttcggccggggtgctagaagccagctgggctctgatctgaggcacctgcaccctggagagacggagcaagacctcggggcctttgcacagccttccaaaccgagcacccacaagatgaatggatctttcatttctaatatttatcccctctcattgctgggtatatacccaaaggattataaatcatgctgctataaagacacatgcacatgtatgtttattgcagcactattcacaatagcaaagacttggaaccaacccaaatatccatcagtgatagactggattaagaaaatgtggcgcgtata

SEQ ID NO: 522844 - DNA, 382 bp, Homo sapiens
  misc_feature (342)..(343): n is a, c, g, or t
  misc_feature (358)..(358): n is a, c, g, or t
  misc_feature (365)..(365): n is a, c, g, or t
  misc_feature (373)..(373): n is a, c, g, or t
ggccaccggcaagcccccccagtacattgcggtgcaagtggtcccggaccagctcatggcctttggggggtccagcgaaccgtgggcgttttgcagcctgcacagcattggcaaaattggcggggggcagaaccgctcctacagcaaactgttgttcggcctgttggccgagggcctgcgcatcagcccggacagggtttacatcaactattacgacatgaacgcggccaatgtggggtggaacaactccccctttgcctaaaagccgcagggacccccgctgtttgggctggctccccccgggaaccccccgcccgctgtgttttaggcccgccccccccnnccttttggtgggganaaataancggtttanagactagga

SEQ ID NO: 522845 - DNA, 578 bp, Homo sapiens
  misc_feature (52)..(56): n is a, c, g, or t
  misc_feature (84)..(84): n is a, c, g, or t
  misc_feature (161)..(161): n is a, c, g, or t
  misc_feature (356)..(356): n is a, c, g, or t
gaattcggcacgaggcagggtacaaacaagaggtggagcagctacgtcgacnnnnngcgtggcttcagatgaggctggacatcngtcactgctgtgcccctccagcagagccccccatggactatgaggatgattttacatgtttgaaggagtcagatggnaggatactgaggattttggctctgatcacagtgaaggctgcctttcagaagcaagctgggaaactgttgataagaaagagactgaggtgactcgctgggttccagaccatatggcatcacacttgctataactgtgactgtgaattctgggtggcaaacgaagacaccattgcagaaattgtgggaatgtatttngtgctggatgctgccacctaagctgcccattcctgacagcaactctatgaccagttctcgtctgaactcatgttacgacaaattcaagtctttcgtgccagggacttatgaccacagtgagaacccattgtacagtcagttgatgcggggagaacctgccattttagaggtttgaggggacttttcagtttagttggaggtcttgtgtggtatgattaaaga

SEQ ID NO: 522846 - DNA, 259 bp, Homo sapiens
gcctttgagattcatccatggtgttgcatgtataatttctctctattgcaaagtggtattctgttgactggatataccttactttgtctatctgatcacccattggtggatatctggcttatcccagtatttaactattaagataaagctattatgagcatcttgagtaactgtcttcgtggacacacagtcatttctctctggtaactacctaggtgtgatattgctgagtcacatatatgtcagtgtatactctagg

SEQ ID NO: 522847 - DNA, 93 bp, Homo sapiens
ggaggaggcggcgtgcgtggagctgcctcctgccggcgggccgggccgggccgagcccggggcgctgcggtgacgcctggatcctgcctccgc

SEQ ID NO: 522848 - DNA, 104 bp, Homo sapiens
  misc_feature (15)..(15): n is a, c, g, or t
  misc_feature (45)..(45): n is a, c, g, or t
acacgaccgggggtntactacggtcaatgctctgaaatctgtggngcaaaccacagcatgcccatcgtcctagaaaattcccctaaaaatctttgaaatagggc

SEQ ID NO: 522849 - DNA, 192 bp, Homo sapiens
cctttttttctacttgtgttgaggtcagtagcattatgcgtaggtagaagtagaggttaagtgagggtgatggtggctatgatggtggggatgatgaggctattgttatgtgaattcttcgataatggccatttgtgccaaatgcctggttagcgggggcaggcctccatatggagaggcagtggtggcatg

SEQ ID NO: 522850 - DNA, 668 bp, Homo sapiens
  misc_feature (147)..(147): n is a, c, g, or t
  misc_feature (168)..(168): n is a, c, g, or t
  misc_feature (365)..(365): n is a, c, g, or t
  misc_feature (369)..(369): n is a, c, g, or t
ttgggtcagtgcatcctcatggtcacgccctgtatctctaggggctgccaacatcagtctagttccatgtctagaagcaaagaggggtgggggcagatcctgggaagcagcagcttggtcctgctatcagcagcctcaggcagtccnatttcctcaggcagtacaggnttaacccactcagatgagttggggaggctaccactagggttaggaaggcctcttccactgaagactcatcaggatttaggggttgtcttcactgttcatcagggtcaccccacacatcctcatcccaactgacaggatcccattccttcctaaccaatgccttcatttgcacagcagacaccgtgaggctgggagtnccanatgtgctataatccagccactggaagggcgagattctgggtttgattttcagtagtctcagacccgcagctaaaggaggtaagagtctctcttgggacagtcataactttcagattattcatgtgacacttcagctgggaatctgaatcctgagctcactcccatgatactttttctgagatggagtctcactctgtagcccaggctggaatgcagtggggcaatcccggctcactgcaacctctgcctcccaggtgcaagtaattctcctgcctcagcctcccagagagccggaaggg

SEQ ID NO: 522851 - DNA, 806 bp, Homo sapiens
ggcacgcgtgggtccggacgcgtgggtcgacccacgcgtccgctaaaagccaaaatgggaaaggaaaagactcatatcaacagttgtcgtcattgcgacacgctagcattcgtggcaagctccaccgactacatgcgcccatctgactctatagaactgcaggttggcgagtcgaccacatatagaacccattgaacaatagttgtgacgacaggacggctggctgacgcactgcggcaaagcggctccctatcaagagtagtgccctggagatacttgcgattaaaccttcgaaacaggcttagagcgccgttgaaccacgtgcgttactcaccccatttcgactaatcttcccattgttgcgaaaacttttgcgaacgaccaagccacacgttacctaactagttgacctagtccatatggaattagcccccaaggaaacatcaaagaccgactcttctctaagttccaacacaatcagttgcagttaacccacaggggcaacaacttctttcacgcgccatggacacttggtggccttgttcacataggactttgataatagcagttgctctgcgcattgctttagcggctaggacactctttcggaacacggcatagggctaactacgtccgcctaaaaggcagaatcgggcgccaagaaaccaccacgctaggcgacgcccaattggacccacattttacataggcgcgctataagcgagccaacccctagcgggccattgcttcgcaacacaccaacacgcctcagaactttcggcaccgacgactgactgacacaacca

SEQ ID NO: 522852 - DNA, 265 bp, Homo sapiens
gtatacatgatggttggtttgtctgtctatccatccatcccatccttatgaatgcatggcatctttggaagagtaaacaacaacaaaaaaatgatggctggttacctccagtgaaggggaactaaaagtctcagagctggatatacgagggaattttttttttttttttttttggagacggcttcctcgcttagtggcccaggcatgaagtgagactccgtcctaaaattaaaattttaaaattccacgagtatgagcggccgga

SEQ ID NO: 522853 - DNA, 432 bp, Homo sapiens
gctgggtgatctagaggatctccgccgttgtcagtgatggaacagtaggtgacctagaggtaggcctgatgacaggttgtgtggatgcataaagggtcttggaaagttaagacagcgtttgtagtcacagggccgtgtatgggcttttcattacttgtgtaatgggtgaggctggacatgtaggagcgtaaaagttgaactgcacgacctgtcagggtattttcggtcatttcattgatggagaagttggccaatgactgcatatgtaggagttagaaggggctttttccttcattacgagggtggtaggttaagctagtaactacccagtttttcgtgggaatgagagtggcaacgtaagtggtagctgatagagaaatgcaaagccagcgtccttcgccaaagaagggttggactggtctcaacagagag

SEQ ID NO: 522854 - DNA, 787 bp, Homo sapiens
  misc_feature (1)..(1): n is a, c, g, or t
  misc_feature (273)..(273): n is a, c, g, or t
nggtgttttatctggaaaattagtaagtccgttcctcacacgggtatatttttcctcgtcgcacatgtatctcctttcctcaaaatttcttctggggcgcaaaaaaacaggtggttctccagtgcgcgcctcacttgccacactgtttacatactccggggggggggtcgctcccctccccacatggtgttgtctcacacttctcgctcatacctgctgcgctcatacgcaattgctcactcccacacaccggtgtttctcggaaagtcaccnttctctcttcccaatgagagccccctctttttggtctggcgacaacacaggtgtctccctcttttttttgtacgacacaccaggatctcccctccactaggtgacgggccgggggactgccctagagtagcctcctcggagagacaccctctctagggcgagaggagagtcgtgcctacagacgtcaccacggtgttttatacccccgcacccctgcgggtgtccccccttggtgcgagggtcgccagcgctctctttctctctatagcactcctgcttccagcagagagtggctcccccacccggagatacatggggttttgttcgcctctcttagagggctgggggcccagttcccccggctgaggtttttggccctctattccccccccggcccgaaaaaaattttttataataaacccgcgggttttgaaaccccagggggaacgacccccacaccccctttccaaggggggttccccccccccccaaaaaagttgtttggggggggaga

SEQ ID NO: 522855 - DNA, 561 bp, Homo sapiens
  misc_feature (524)..(524): n is a, c, g, or t
tcgcgaacgtgtgatctatgttgggtagagacaagtagagccgagaacgaggggctgtttatgctaatgggctttatctttaaatagtctcagtcctcggtgggatcgcgtcacccctggggccagggccctctggccccactcaaacgttggtgtgtgtgtgtgtgtgtgtgttgatgttgttgcggggggagggtcgagatcgcctctcccctcaacctgtggcatagtcagcagacatcaacatgcccagctgtctttttcttttggcttcaaaataaacctcaagggtggacagtgaagaagcatcagagcgcaggactagtgcaggtcggggatggggtctgctggggactggccccggataaaatgtggaacaaattatcccaacacagccgggatcgctttgactttggggtcttggggcccaaggccctaagcgttggaaaggacactttgcctatgcagcagctttcccggcagaaagtgaattcaaatcgaagatgtttcaccacgcgggtttngcctaagtatgcattttttcacacctctctaaaaaac

SEQ ID NO: 522856 - DNA, 907 bp, Homo sapiens
agcggcgtggactagaatcctgcagggcatcgtggtgggggcgtcttgcgaggaacgggcggggtgtgacgcacgcctaggaggcctggcactgcagagtggcgtgggccttcctccactcctcccgttgccgctggtgggcctcgggatttatcgtggctggctagcgtctagactgggtacgcggggccgtcactcctcgcgtggaaccccggaaccttctctgcgagggactgtgggcccagcggccccggagggaagcgcgtcgctgcgcgcgcgtcatgtgtagccgaaggttcggaggccgcgggggaggcgagccttcgcggcagcgcctcggggttctcccgtgggtgcgtgcgggtgcgcgtcaagcattggcccttctcccgtgttgcgacgcctgtgtgctgccgttggcgagagcgttcgcaacagcctcatttggcgaggggcccgatagtagccaacgtgagggagggcgtgtgctgacgggacaggtaagccctggcagccacagggttggcgccgcatggggcaacatgggccgagccccgcgggcggccaaaaatgagcggtcccggccggagagcgtgcccgggccctgtggaccaggggcatggccggcctgtcggaagaacgaaacacctcggggggtccgggtcccctttgacgacaccagacggtccgcggcaagcaacatgggaaagggtgtcgcccctgcgcgagcgggcggacgggtatacctgaaggagggaaagccccccgacttggttaccagcattgcctaggcgtctggcaccgggttagcccagaaacaagcccgcggggacccactacaagggcgcaccgggggtggaagtgcacaggcgcgtggccggggcctgaataccaatgggccgacctt

SEQ ID NO: 522857 - DNA, 171 bp, Homo sapiens
gtaacagcgtgacacacagaagcaaatatgagactccagctgtatcttactaagcagaccttaaagcagatttgcaaatatctaaaataatgctatttctctcacttttttatggtattggaaacatcattttccatacaaggtcatttatgttaacaggtgacagattta

SEQ ID NO: 522858 - DNA, 782 bp, Homo sapiens
cgtgggctgtcgcgtggagtggtttctatcagatccatgcttcctgttcctgtggttggtgtgggatagatgagttcgggatcctacttgggttctgccgccaggccgcgggatagacagctctccagtggtagtcgcaagtgcgatgaaacaaggcccgaatgtcttaagaacttcatactggtcgagcagagcgatcggtgaccgtagagacattagagagggtgggctccatcccctcatgtggaaagccttgcatgatgttctagtatggctagttcgtatggcgcatgcctacagacaaggtagccaatgtcccgttcatgattgcatcccgattattccttgtagacccctgatgctggtgcataatgcactttaaatggtactcctcattgcagtgatgataatacacttacgaatggatgttggaagagagagttctggtagaatggagctatgatcttaggagaaatcctgagatgcggttcttggcaacccaggtaaaatgagttgttggaagaagggtcaaagggggtcagggagaggtcactgatattgagggaatctaagatgatatgcgtagagttgtcctatggggtcacgagtgtccggtatagggcaatgtaggtgatggcttattgatctgtgcctattacgtgttataatgggtgtggcttgggtgattgtgaggattggtcagaaggcgatggcacgtttctggcggtaaaaatacctaaggtgcctgtgtgtattggcatgagcgagagagtctggggtca

SEQ ID NO: 522859 - DNA, 393 bp, Homo sapiens
atgtccttgaagtttctttttttaaaaaaattatgagtacatggcatatatatttatagggtacatgacacattttgatagaggcatgcagtgtgtaataatcacatcagggtaagtgggatatccacctcaagcatttaatgattttcaaagattccaattatacctttagttatctttgtacaataaacttaactgtaattaccctgatgtgctatcaaatactagatcttattcgttttatctaactatatttttgtacccattaaccacttcccccagccccactaccctttccagcctctaatagccatcattctgctctctatctgcatgaatttgtttcaatttttagctcttacaaatgaatgagtatgcgtttgtctttcttgc

SEQ ID NO: 522860 - DNA, 196 bp, Homo sapiens
ccccctccatagtgtgtgcccaaatattaaattactaggtattagaatctttattaaaaacaacactgtagaatatttaacacggcgaattttttaacacggttggggagacagagtttccctctagatgcccagcctgtagggcagcgccacaacctgggctcacagcaacctcggcctcccaggttcatccaat

SEQ ID NO: 522861 - DNA, 145 bp, Homo sapiens
aaaaaaaacacacaccaacaaaaaaaaaaaagtaagtactaacgcatatacccatacaattgtggggggcggcaatggcccggtcggtttttatatttttgttccctgaaaacgacgagcgcaggagtagtgagcgaggaagcgg

SEQ ID NO: 522862 - DNA, 270 bp, Homo sapiens
atatctgtaggacattatgtaaattgaatcatacagtatgtattcttttgttcactggcttctttcactacgtatgtactcaaaatattcatccatatatgcagcatgtatcactagtttcgttcttttttatttggagtaatattctagtcacatggagtataaccgttgtgagcacattacgtgttcatcgatttgatgagacatttagggttatttctcactttttaggctcttatgaactcatgctcgctataacacagtcatggt

SEQ ID NO: 522863 - DNA, 151 bp, Homo sapiens
  misc_feature (29)..(29): n is a, c, g, or t
  misc_feature (55)..(55): n is a, c, g, or t
  misc_feature (125)..(125): n is a, c, g, or t
acttacagaattaaagatggcccatagcngaattccagaccaatatttcttctgnggtttattctatgttttatatattatctaaatatatgtatatgctgtgtcatactcataatcgtggaaantgaataaaagtgaatatattccgtgg

SEQ ID NO: 522864 - DNA, 501 bp, Homo sapiens
  misc_feature (2)..(2): n is a, c, g, or t
tnctcactaggtcgcacaggttgtcaaactcctagctacaagtgatccttccaccttggcttgtagtacccaagcgagttagaaaaacgccacactttgagacaaattaagagtcttttattagccggcgacctagagacggctaatgctcaaaattctctcggccccaaggaaggggcttgattaacttttataccttggtttaggaaggggagggggggtctagttaaaacaattttacggaagtaaagtagtcaaaaagttaaaaggacaaatggttacaggaaagtaaacagttccaggtgcaggggctttaagactattacaaggtgatagatccggggctttgggcgtttatcaatcggacgaattcctgggaactgcggatatagcttgccacagtatcttatcagttaattgcattcttggatgtgctaggagtcagcttgcacaagttaagtccttgaggaaggggctgccactgaaagagccaagatggag

SEQ ID NO: 522865 - DNA, 480 bp, Homo sapiens
  misc_feature (383)..(383): n is a, c, g, or t
ccaagatgccccaccttggataggccccgtagccccctgcgcgacctcaggggggggccaagggggctccccttttttttggcaagcaaaattggttggaatgggaggttgtgcaatgaggccaattaaaacctcatcttttaaaagccttcaaggaaaaaaaacccggcccctgcgcaggcagagggaaggttgccggttggccctaacctttttttttttttttttttaaaaaaaaaaaacctttaaaaaacccccccttaaaaaccaacctcttttgggttttaacaaaggaattttccaaatttgattgggttcttggtttaaaggttaggaaaattttcagcccaaaaagccccccggtttaaggccctctaaatttnaaggttggggaatgggggagggcaaggggtttttttttttttttttttaaagggggggggaacaaaaggaaataaaacaggggctgtggacctttta

SEQ ID NO: 522866 - DNA, 513 bp, Homo sapiens
ttgatggatcctggttgatacatggaagacgaactcagcagtctggctgatctccatcacagagtgtgttgcgtagaggcgccatttggagcctagagcaccggtggtccatcgatgtagatgggccgtcgaccctcattggcaatgaagaaatcaccgttgtacttcagcttgatgacaccttgtttccgggatatcttcgcgaggccggaccctccagagagaggtccacatcaatctggttctccttggttgctctgcccatgggttgatctcacgcgaagggcatcaggtaccgcaccatgcggccccgaggcactgccagtgtactggttgtcgaagtccggagaactcatgcctgtgatggctgtccactcagcactagcagttatgcagttcctgtgccagttgccgaatctctcgcttctggggccggtcagacaccatcagctcatgttccaggacctcatctcgcatgtccttaagcttattgtacatcaatcaggtcctctg

SEQ ID NO: 522867 - DNA, 258 bp, Homo sapiens
agccggtccggtgttcccttgtcttccttccttttttttttttaaaaagagacagggtggggccggggagccggtagctcatgactataatcccagcacttgggaaagctgagccggggggatcaccggaggtcgggagttggagtctgtaaggagcggtgatcgtaccacggcactaggtgacaagagcaagaccctatctcaaaataaaaattttttgggttcaaaaagtagggataccagacaaggggaaccacg

SEQ ID NO: 522868 - DNA, 921 bp, Homo sapiens
agcggggcactatggtcatggcggaggggacggcagtgctgaggcggaacaggccgggcaccaaggcgcagtatattccacacaacatacgagcagattgctccgagtatagagaaaatgatggagacgaaggtgaagagccgaaggagagaagggtgatgtggagaggtaggaatcaatcagaggaggagggagtgaagattgagagcataaaatggaagaatgaatgggaagaggataaggagggtagagatggaagggcggaagaaggagaagggagagggcgaggagtggaacggcggacgagagggacagacagagggggaggaagaggacagacagtggagggcaggggagcagctgaaaagaggagccgaagcaagagggagggggcgcgcgggagagagcggagccagaagacgcaagcagcacagaagaggcgcggggacgggggaggggcgcggcaagtgcgacaggaggagagcaacgatagagacagagcaagaaaccaagggggagcacacacgacggaaggggccaaagggcgagcaaagagagagaaaagtaagagaggagggagagcagggcagaccgcagcgggaaaacacaggcactaggcacgcgaagaggaaacaacacagggagaagcagaggacgagacgatagaccgtaatggagagcaaagcaggacgagccaggagacagagcgggagagagcagtagtggagaagaggggcagacggaggaggcagtagggcagtcggggagaagcggagtagaagcgagggggagaggaaagacaaaccggaggagagtggcgcgacagggcagaagaggcggggaggcggggaggggagaggcgagaagcaaaggaggggacagaggaggagaacaggagagagagacgaaggaggcaacgag

SEQ ID NO: 522869 - DNA, 917 bp, Homo sapiens
ggcggcaaccacgggcagctctcagggaatctccgtcggtgaggccgagaggctccagatccccgtcgagtccagatgccggtgtccagtcctgccaagacagatagatcacaggaagaagatggtaagcagagggtgatgtctgctgctgagagtgaattggggaggaggaaagagaggtgaggaggagtcggagtcgggaggtacatgacatgaagtaatgaaaatggagatgtgtccgaaagtggtaactgatgatggatatatgagccgatggcgcaggcatggtgaggtgtggtcagggatgtaagatgcttggagcgctggaagaaagcaagattctctggagtgcttagaggaagaacgtttgggttcaggggatacgacactgaagtcatgcatggtgcgtttgtggtggatggagggaaacgttgggggtgcatgaagaacgaagggcctccctgaagaatacctcctggaatgcccctctcttgcgagggtgtgcctggtcgagacggccgctggcacttcctcgttgaatttcccgacaagtgtacaacggagtgggcgggaggaattcttaactacgcagaggccgtctcatggctacgtgggatattgttggatacaaagggaacacctccagggagtagctcgaaagcgtagagtggatggacattgcttgggggcgaaaagaacatccctatgagcggcaagcccccattgggcaaccggaggcctttggaagaacagcggccgatggtttgagaatccgtcatggaggaccgacaggccgtaccatagaggggcggagaccccctagcgaaagagaacccagggaaatcgccaaaggagggggcaattgacacagagtaggggaaacctggtccaaggaaatcccgcgggaaaccgtaaaa

SEQ ID NO: 522870 - DNA, 103 bp, Homo sapiens
tgtatttgacaagagctgaagctgttcggcgagtatgggctcctggaacaaactgtgaggtctggagggtcaaatttaccctggccaatgatcctgcaaggcg

SEQ ID NO: 522871 - DNA, 371 bp, Homo sapiens
gtcttttcatgaacctgaaagtgaggccctcaccagacaccaaactggttgagcattgtcttcccattctctagaactataagaaataaatttctgttatttataagccacccagttttcagtatgttgttacagccgcccaaatgggctaagacagccactccactagggaagcctgagtgtggagccatcaaagccagcttggggaaatagattgctggcctttggcacccacatggctcatttttgcccagtgggggctaaaaatatctcctaaatgctgctgccctccctattggtttgggccatccttagtccatcccaatttaggccctgtatttccctctttcccccggttccctttggggaaa

SEQ ID NO: 522872 - DNA, 481 bp, Homo sapiens
cgaagcattttttacaaattgttgttcactgaaatgatgccaagcgataattgtggcttgtgccggttgcactgttggtagaaaaacagaagccgccgagaacagggcgcgattttacctgtgacttagagttcacttctcttcttctgttggcacgtggggataatttaagcagcgcaggtgtaaaactgagggattgccctgtcggattgacagaattttaaacgctccttggaaaaaaaggacgccgtattatcaggcgggccggacggatgcacttaaactgcaaaaatatcccttacaacacttagtaggtttgaaaacgcctggggctggtgcaagaggagctaaacctgtgcggtgcgattggggatatgtgtttcacttaaacaaagcgtaaaggtacatgcatggaacgcgaagcgattaaatggcatctctaagatatcatatgcgcaatcgactttcctaggtgttgaag

SEQ ID NO: 522873 - DNA, 114 bp, Homo sapiens
ggaaatctcctcgggagaagagctgcatccatggacaacaacagtaaatttgctaagagccgaagccgagctgccaagagggaaggatctctccagtcttggccagagggtgct

SEQ ID NO: 522874 - DNA, 501 bp, Homo sapiens
ttggggctcagtcaggtcttcacgaagatctggcatcccacctctgagagggagcaccaggtgcagcggggcctctttcggggatgtggtagtcggagagggatgcgtccatcttccagctgtttcccagcaaagatcaacctcggcgggtcaggagggatgccttcctgtgtctgggatcttggccttgacattctcaagggtgtcactcggctccacttcgagagtgagggtcttaccagtcagggttcttcacgaaagatctgcatcccacctctaagagggagcaccaggtgccgggtggccacttcctggatgtggtcgtcggagggggtgcgtccatcttccagctgtttcccagcaaagatcaagctctgctgggtcaggagggatgccttcctggtcttggatcttggccttgacattctcaagggtgtcactcggctccacttcgagagtgagggtcttaccagtcagggtcttcacgaagatctgcatccc

SEQ ID NO: 522875 - DNA, 211 bp, Homo sapiens
ggatccttagaggcacaaggaggggaacggctgagtatgttgcagatgagacaggctccccaccagctataaggaagaggtgcgcttgtgccttcctgggacctgcccctttcctgtgactctcctcctgcctgtctcagtcactcagactgtggacccttggtactggggagagagcccagcctttggcaccacgccaacctgtgcctgc

SEQ ID NO: 522876 - DNA, 122 bp, Homo sapiens
tccccgttatagaggaccacgtgttatcgatgcagtatattctcatcatgccatgtaagacatgctaatcaactacggcactctcttttcaggatgcatccaggaagctgctagtcatcatt

SEQ ID NO: 522877 - DNA, 414 bp, Homo sapiens
atacacataggaagggatctagagaacacgtcgccaggggcttgagaaggtaactagagtgagttattgggagtcttactaaaataaactagatattaggtccataccattaaatcagtgccagtgtctccttgaactgcgtcacaaactagaaggcttctctaccacagtagtagtgcccctatcactcataattgttctatagaggagaagggggtactactgtaaacatctagcctaaagtatacaactgcctgggggggcagggttaggaatctcttcactaccctgattctagagtcctggctctaccctgtctgtcccttttctttgaccagatcttctcttccctgaacgttgcttcttccctggacggcagcctccttgttgttacgaggcgtgatgacttgtgca

SEQ ID NO: 522878 - DNA, 422 bp, Homo sapiens
gggagggagagggggagaggaaggggaggaagagaggaagggaaaggaggggaaggagaggaagaggggagagggggaagaggggagagagagagggagaggaggagaagaggaggggagagaggggggagagagaaagggagggggggagggaagaggagaggggggaggggggaggaaggggagaggagaagggaggagaagaaggagaagaggaggggaggaaggaggggggaggggaggggaggagagagagagggagaaggggagaaggggggaaaggagagaggggaggaggaaaagggaggagagggggagaggagagagagagaggaagaagggaaaggggaggtgtagctatcgctctatatatatctatatatatatatatatatatctactatatctatactatatccgcg

SEQ ID NO: 522879 - DNA, 263 bp, Homo sapiens
ccgtattgaagcatgaccctcgctggagagcacaggacatcaggaagggaagaaacttgagtcatggatatgagggaggagggggccacagattagaagtttgaccttctggccgagcacggtggctcatgcctgtaatcccagcactttgggaggccaaggtgggcagatcacgaggtcatgagttcgagaccagcctgaccaacatggtgaaaccccatctctactacaaatacaaaaattagccaggcgtgtggcgcaca

SEQ ID NO: 522880 - DNA, 1171 bp, Homo sapiens
  misc_feature (476)..(476): n is a, c, g, or t
ggcaagacagtgcgcccgagctccgtcgatgtcgagggccacaccggagagctcgtgccacagttctcaccgcacgggtctgtgctcctggctggtgccttaagtagagcccaggtcatatcactcgtgaccattctttctcgtcttccactgtgggagtcagcgactccgcgcgccctcactgcagccactctgcgtcgtcgggggtcgtcgctcgcgaccggcgtgtcggttcctgcatcagagccaacgattgcctcagtctagcatcgagactgcggctactgaggagccctgtgcttaggagagtgcagacttaaattccaaaccatgatcgccgtgggctcatctggattaataaagaggagaatgatcttccagagtcccatggatagcagtgcatgccaaggcatggctgggacattcaactaagggatgccttgttggttccaggacgctgggccacttcacgacanggcctgatacaaagcaggggaaaaggagccgagatccctaagacgtggaaggccaactttcgactgtgccatgaactccctgccagatatcgaggaggtgaaagaccagagcaggaacaagggcagctcagctgtgcgagtgtaccggatgcttccacctctcagcaagaaccagagaaaagacagacagtcgaagtccagccgagatgctacagagcaaggcaagaggaagtcatgtgcggattccagccctgataccttctctgatggactcagcaggtccactcttgcctgatgaccacagcagcttacacaagttccaggctacattgcaggacttgggaggttggagcaggcctgaatccagcacttgtcggcaatgttcctcgtccagcagccctccttcccgaatggacaatcccaagtggcaagttggtgccggaacagcacccgcgtgatcctgcgtcaaccttcccgggtgcaccccagtgggcgtccaaacttggtgaggttacacggaattagtgactgacgagcgcgggaaatacctgcgggcactctgtaagtcttgtgccactgggatgtgaccacaaaacgtggtcgagggagtacacagtaacggaagaaaccaggtatagaatgacttagggaggccaatacccaggcgtgatagactcaggcgtcactacaacact

SEQ ID NO: 522881 - DNA, 133 bp, Homo sapiens
tggggtaacataaacaatggcacgtgttcagagggatcacatagacacttatccaggattaagatctaaataggctgtaagattatcttgttacagtcatgaacaatgtatggcagagatcactatctcgcaa

SEQ ID NO: 522882 - DNA, 234 bp, Homo sapiens
cagtggtcttgagcgttggaggtggctatcagtacccagcagtggcagagccattggcgggtggcctcagctactataggaggcggcagtaccaccatcaagtacaccaccacctcctcctccagcaggaagagctaataagcactaaagtgcgtctgatagctctcggtcccacagtcctcaggcccctctctggctgcagagccctctcctcatgttgccatacggagaaca

SEQ ID NO: 522883 - DNA, 1169 bp, Homo sapiens
aaagccagtgctggctcctggtcctgggaatttatgggcatcgcgggcgtgcgtgttgcctggtgtccctggcctgtgctgactccgcttcttggggccgtgcctgggcctccgcgagtacctgggtgtcgatcttcggatgtctgcgatgcccacgccatgggtgtgcccgcttcccacccctctccccgagcggcgtccccgtcggggtcgaaccttcctccctgcgacatgtgctgcccatgcctgcccttgttcccccatgtgccttttgcctgctggacctgcctctgtgtgaatctgtgctgtcttgtgtgatgcccctgatgtgtgtgcttggctgtgtgactctgtgtgtgcccctggggccattgctgtgcatgcctgctcccctgctcctctcctgcggaacacagtccccctgtggcccacaatgcagcggtatggcctggcaatgcctgtgccgttttctttgctcactcggcttgccagcccgggtcttgacccacctggaaccctgtgcagccctgtgaaccccctcgtcaggcttgccccttgtcggtgacctctgtcagccctgaatttgcccttgcgcccccgtgggactcaatgatccctggtcccaattggcctcgtttctcaaactgtgccttgcgagtggaaaatttccttgctcagagggtccactttccatgaacgcctctggtgcacccccgtgtgagtacacgggccttgctgtaatgtcgtacatgtcgatctgcctttccctagagtgggatccacgcggtttacacagtggggccgtcgtctccttggccttggtgactcacctatgcacagatactgccggggaggggttccgcaaccgaaggaccccaggataacttgagcgtccacctagtgtgggcgcttcctcgctgcatgagtaaaggcgactactcgaggtcaggcagattatgcccacttaggcggatgagcgacagctctttccagttggtgcatcacatacgaggcgccgcagccaaataggtaccaggagaccagcgaatcagtagaagacgccgcgtagagtaccataaggttaaccgctcaggtaagggcatactcggttcaagtgcccataaagttcagcgcgacacacaacatggagtagttggagtcaccaacca

SEQ ID NO: 522884 - DNA, 853 bp, Homo sapiens
cccacgcgatcggactgcgaggccttctgccaccgcaactgcagcgccgcgccgcagtcccgagcccgccgccggtctcgccacggtatcccgagctgcgcctcttcgggggcctgctagcgcctgcgacgcagctgcctcgaagcggcttgcgaagcagtggcctggccagccttccgccagtcccagcgccgagcgcgcggaggtgctggcgggacttacgcagtgccgctgagccctacaagttcctagtcagttcggcttacttcatggcaaataatctccccaaagcctatcgccgcttgcttcacgaccgtttctacgtgaagcatccttgattgatgaagatgatgaagaggaactatggcgatatttatgaggagcctgcctggtgccgaggactatcgagttaaacgacgcttggaatgccaacgtcgtatgaccagcctgttcgatcccgagccagtgcggggcaatacaagcggtgagaactggagaaacaatctcatcactagaccatggagctggcccttcccagacttcttcaaagcgcttttgacagagtgtcgtcgcgagcctgcgagggttccgggtagatcgaggacttccaggctttctacctttccatagcagatcatcatgtagaagttctggaatgcgaaatacagtgtgaacgagaatctcagcccagttataggaggctaatccggtggacgacatttggtggctactatgtatcattgacttgcagtaagccgtatgatcatgttgaacgacctgaacgaatgcagcccccttgtgcagtcagctatctgctctgtgatcagcaatgaccaaggtcctgcagtagaac

SEQ ID NO: 522885 - DNA, 146 bp, Homo sapiens
gagcaggatcttatacatgaccaagcatcatggtgctgtaagtcgagtgtatacaccactgcggtgcatgcctccctgtacaagtaccgtcgacacgtgagcacgtgctgactccaaatatcgtaagctggagctggtcgactcta

SEQ ID NO: 522886 - DNA, 478 bp, Homo sapiens
  misc_feature (364)..(364): n is a, c, g, or t
  misc_feature (430)..(430): n is a, c, g, or t
  misc_feature (456)..(456): n is a, c, g, or t
  misc_feature (472)..(472): n is a, c, g, or t
atcatattggaagaaacatgggatattaatacattggctgcatgtacagagggaagatgatgtgaagacacggagagaagatggccatctacatgctaaggagagaggcctggctggaacagatcctccctcatgatcatcagaaagaaccaatcttgatgacaccttgatctcagattttgagcctcaagaaccatccaggaggtacatgtacagctttgttacctgggtacattgtgtgatgctgaagtttgagtatgaatgatcctgtcactcagcccccacgtgaatcattcaagagttaaacaagagaaatggttcctgtcagtgcaggtgattgaaagagatcattacaacataactngaaggtcaagacaaggataaataccagcaaaatcattgtaagaatgatgctatcagggcttatgcntggcctactgatcccagaggagagantcatagagaatttgtngaattt

SEQ ID NO: 522887 - DNA, 306 bp, Homo sapiens
atctgatagtgagatcatagcatgtctactctctccctttatttttagtctaatgtcttccacttttttactgacttctgtggttttaactgaacattttatataattccatttctctcctttcttagcattagttttacttcttttattcgtgtttgttggaggttgccctagagtttgaaatatacatttacaagtccactttgaaataacactatactactttatggttagtgcaagtaccttataataataatttttaaatatcccaattcctctctctcatctcttttatcatcactatca

SEQ ID NO: 522888 - DNA, 153 bp, Homo sapiens
accgttgcatgtccagggctctgtttgtcacaaagtactaaattcaaccatatctccgtatttgaggagaagtagatccttccacatccttggcttgacaagcaatagtcagttccaccccacagattatcatttgttttgcaactccaacag

SEQ ID NO: 522889 - DNA, 675 bp, Homo sapiens
ggtggcaagtgtatggactgtggagtaagaagtacctgcctctgcctctgacttgggttctggcctataggaacaagacattttcagtaatggaagaagcttcttccagtaatggaagaaggggaagatcatcgtttccagtggtagctgactgagatgatacgacaccacttctgggaagccaaatagacagaagagagagaacatactaagtgctagccctaaagtgaacgaatgggcaaagccagctgaaataacaggaaaaatgaaaatgcacgatgtaatgtctgtgaggagagagcaggcagttcttcagggaggggtctgtcatcgaaatgtggctgtgggcttcacagaggagtggcgtttggaccagtctcagaaggtctgtacaaggaagtaagtggagaactacatcaactagtatcatagggtatcgaggcacaagcagatcgctcttcaagtggagcaaggagaacccccaggatagcagaaggagcagccacagtcaatctgtcaggtatcatccaggagaggacctacagatggagggaaatgcaggaaagtagaaaatcacacctcatgcagatctgctaccgcggacacagcgctcagaacacagagcatgaaacatcaggcttctccgcacctgtacagagggaccatagctggaca

SEQ ID NO: 522890 - DNA, 279 bp, Homo sapiens
aaactctagaatttcgagctgttcgtcccaccccacttcttccacccccacttcttccttcaccaacatgcaagtttcttcccttcccgtgccagccagattgaatgacagatggaaaaggcaggcgcggccttcgttgtcagtgctctttatttgaaaggggcagcacagtcttttaaacttgatccaccctcttgcatcttacaaagttaacagctaaaagaagtaaaataagaaggcaatgcttgtgcaatgtacagtgcatatgggctgcaccct

SEQ ID NO: 522891 - DNA, 352 bp, Homo sapiens
tcccgtctgacgggcccttgagcctttattggcgaggcagaagaagaatgttgtgcaataaaaagaaatattccgacccttcgtcgaataataaccgacggcaacaggcggtcattctcaccaagggattaaacctttcctctgtgcagggcacatcatagctggctttgccctataaaaggggcgaataaccatcccagcttatggctatagcatcgttatcgttacgtgcttatgacaaaacgatcattgaatacatgtgacctattggttagaactctacacaggttggcgccgtaacggtgccgacacatcggctcgccacgccggcagcgagcctaccaacggcaga

SEQ ID NO: 522892 - DNA, 281 bp, Homo sapiens
  misc_feature (31)..(31): n is a, c, g, or t
  misc_feature (258)..(258): n is a, c, g, or t
ggtgagactcagtgagtcaggagatcactanttttcttttagcgaatcaaacagacttccagaggcacaattctctgatttaacggaggtttaacgctatccctcccacagacttatagagcatgaaatgataaaattttgtgaagcgtaaacaaaacattccacctaaagccacaaaatcccacactctacctgataaaaattgccacgcaacttaattagcacggaaaaccgtttttcgccaacacgaacaaaatngcagcaatacatttgctataacc

SEQ ID NO: 522893 - DNA, 681 bp, Homo sapiens
  misc_feature (228)..(228): n is a, c, g, or t
ccgtgtggtggtgcgcgggtttgtggccccctgttaacttttttcgtgctgcgcactggagtgtctaaagaacactggtaattaagggggtgggcaagcaggtggtccgtatataagtggggtgcctgcttggtcttaaagacctctttctggcgggacaccccacagggtggtacacaactgtggcggagggggaaccaccacaacgtgggccactctatgtatgtncacacgcgtgcggacccccccagatgagccttctcttgttccaccaccgcgcagaaatgttttctgtgctacccctatcgcccatatgaaagaggggctacataaactacttgcaggttatattccatcgttcttcccactataagtatctcttttacctaccacccgcctattttacaagctataaagaaattgttttatccccacagcctcaccgctctataaaataagaccgtgcttcctagtacatccccactctatttttacgttccctcaagattttacacccctgttctcgcccttattttggaatcattaagaaaaataagaaccttttctatccccttataattatatcttatatataattattactaacagcttaacaaaatatcagctaataaataagaatattaaaacaaaaatatctctgtttatcaattatcagagcaa

SEQ ID NO: 522894 - DNA, 347 bp, Homo sapiens
cacgaggggccagctcggcctcgatgccgatgcgtgtctggaaggcgacgcctgcgccgcgcttggccatctgcagggccagctccaccgaactggtttccagcggcgccttgtgccgcgggcgagtgcgtgcgagcagcggcgccagcaggtgatggatggaaaggtcgctcttggccaggattagcgggtactcggcgcaggtggcgaagctgacgtcccggcgttcggccagtggatgccccggcgcgacgatggcgcccagacggaaatgaccgacgcccagctgctgcaggtcggcggtacgcggcagggcgaaggccagaccgatatccgcctggccgctg

SEQ ID NO: 522895 - DNA, 249 bp, Homo sapiens
tggagaaaccttgtctctacaaaaaaatacaaaattacacgggtgtggtggcacgtgccggtaatcccgagtggctgggactacaagtgcacgagattggcacttttaaattcgctgttgatggaagcgtcgcgcatatgcgcgacgcttccatcaatagggtccatgatccatgtggggttgtccgttaagatacttttttcccgagctggaggccaaggttgatgcattgatggaagcgtcgcgcat

SEQ ID NO: 522896 - DNA, 901 bp, Homo sapiens
catttcttaaaagaacaacagtcttgtcttcaagactcaagttgctttataaagttgctggatacaacgaaaatatacagttgtactgttatttctgactaattgagaaacctagtctttctaaggcatttttctcctcatcttaagcagttttgaaactacgtgttatttcttaaatgttataggatgtagctttacaattatattgtactatgtacaccgtgtaaaaaaggacaaatagaagttctttcctatattgatgtctgaggtctctattgatttatttaagaagtttggcgtatattagtattgaagaatgtccatgctcttaacttgaggatttgatgtctaatcataaatacacttgaagtttgccagagaactaaatagtaatagtttcatagaatgagaatctatttattcacttaaatattcatttctcaacgttgagtgagttcccacttctagttttaggcttccgacgcaaactggaagccttctaggtgctatcagagtttatgtatatcatcggctacatccgatgacattggctgagttatgtgctcctctggctgggtatacttgtgctttgggaagaaaaagagttgatagtcctataatgagatactggcacaggtgatgtcactcggaaattcagtaatgtctagtggtatggaatgatgataagtctttaagttattgtgctgatagttggttagatcaagtcaaattaattacgtagtaatgaatctacaggagtgggggaagcagcttatggtagttaaaggtaggtacattacagtaagttagagtaatttgcgataaaaagaggtaggttatttttttaaacaaagaaataaaaatggcatagggaaattgttttacaatttttcttttttga

SEQ ID NO: 522897 - DNA, 1176 bp, Homo sapiens
  misc_feature (1176)..(1176): n is a, c, g, or t
gttggtcaacgggccgtgcgacaagcgcttcgccacgtccgaagagctgctgagccacttgcggacccatacggcatttcccgggacagacaaactgctgtcgggctagcccagctcgtcgtctctggccagcgctgccggcggccgccatggcttgccacatgcacatccccacctcgggcgcaccgggcagccctgggacgctggcgctgtgcaggccccaccacgcgctgggactctagcagccggcttaccacgcccttactccaatgagcccagcgttcccacgcctggacgccccctgtgccggtgccctgacggtcgaccggaccggtacgtacgtccgccactatcgcctcgtcgtaacggacgacgagaactgactcgacgcgcctctggcgcgtggggtatcagtgagggcggccgggagggcgagcgagggacgacggacgggagagggggaggggaggagtccagggagaggcgggatcacgggccaggctggtgacacccgcgcgtggggaggcactcgggccacgaagggaaagaaatgtataccgaatctatctaagccgatagcagcgaccgggacccggttgggaacactccccgttgtccccacatttcaccgtcctgcagaccagaacttttatctctagtttgaggaagtatcatttgacttcttagtaggaagactgaatggaaggatccgaaggaattcaatcaggagagcggtccaaggaggtggccatgtgtgaccgggcaaagcggtttcctggcccaacgtttttgtgttccaggggggtagactgggcagcgccgaaaaaaggccgccaaagtcacaaggccggtactggagcccacacaaaaagtgtgtggtgaacaccccatagacaagacagagtgctctagacacccagttatgtgggggtttgcgcgtgaaaaaacaccaacgggagcaaagctgtgccgcaacaaacactcaccccaaaactgggggggggaaaccccccacacaactaaaaggggggacacatcatcttgggaccaccaaccaacacgtgcagccggctacgcgcgggcgcccccgccaaaaggaagacacacaagcagggcacgaacgacacgaaacaagagtcgtcgcaccccacacggaggccgagaacaaaaccaacn

SEQ ID NO: 522898 - DNA, 274 bp, Homo sapiens
tcctttgcgacgccgataaagcttcagctggaagagatcgctttcgacgcctccctgcgtgtcatcccacctgacctacggacccccccattgcaacgcatgctgcctggcttgcaggcacctctcaggaccctctctggaatccccgaaaagagcaagtcagacatactgtacctctttgactgctcacccaaccttgtgggccatttccctatttctctgtaacttactctcctagcatgatcgatgagctcaatgacgtggccagaaacga

SEQ ID NO: 522899 - DNA, 854 bp, Homo sapiens
aatgcatgtgtgcaaccctgtgcccagctgctcctgatgcgacctggcgcaatgtggttcgatgtgccacagacagcagtgaccccagagtgtgccttgctggtgatgtgtggcctgctgcctggtggcctggtgtgcccccctgactgatgtggaccagcaaaacctggcttagtgaggagatcgagaagaagtggcatggagctggagaagctgcccctgctgggagaataatgcgggtgcccctcactgccctgctcaacccaaagcctgctgggagagctgccgagggcccccaagtgaccggccacgaggcactgggagaaggagtgttcaggctcttcgtgggcccacgctggatgtgcgtggcgtctccaaggggagtgctcctcagagtgcactgagatcccaggaggattggcacatccccccgggtacatctcacaggaggcatgtcagctgcagcctggcagagatgagtcctcgcaccagcaggtgatggaggagctgagcggaccaagagcgggagctgagggcctgtgaggagaaggagtggtctggctgatgagaatggagcacggctcagcattgaggccatgagaggctatagggagagcttgagcgagagctggcaaacaggagttcagcaggccgggatggctcggaggccagtagattttggggctgaggaaagtggtgaacggggcatcggagtgctggattgggcctcggggtggagggagaccttgccgttatggccggatttgcaacgagcatcgctagatacgggttcggatagggggaagcagcgaaacggggaaaaaagtgggatgggattctatgtgcacctcctg

SEQ ID NO: 522900 - DNA, 289 bp, Homo sapiens
ggtatggagcagacatcttgggggaaatccatgcatggcgacttatacctttgcacccaaacataccatgagcgtaggaaagagatctagcaactctactgatgttagaattttttttttttttcgagacggagtttctctcttgttgcccaggctggagtgcaatggagtgatctcggttcactgcaacctccgcctcccgggttcaagcaattctcctgcctcaacctcctgagtagctgggattgtaggcatgcaccaccacacccagctaattttgtatttttag

SEQ ID NO: 522901 - DNA, 233 bp, Homo sapiens
gcaacgtgcgctgggcactggctcacatcggaaccagtgtcttcctggagatttggcgatggagatgtccacgcaggtggactctgtgacgtcaccgtatgccctgacatggtggccccagagcagactctatgaacaacctcgtttccataccacagaccacagccggagagtccaggccgacttgcgcactcagagcagaagggtaggagtcctctccacgcctctgtatt

SEQ ID NO: 522902 - DNA, 149 bp, Homo sapiens
tccagtgtgacgcttgcttgttgtaggtagaatcatagagcgatccccctacatttgcaggagaatctacttgaacttgataggtggaggatgcagtgagccgaggagtcacgctcattgcactccagtcttgggcagacagagccaga

SEQ ID NO: 522903 - DNA, 873 bp, Homo sapiens
gggggtgtggtgtgtgtgttattttttctttttccttctcttcacgttcttttattgtatttttggttttgttgttggagtagggttgtgtttgcgtgcgttctcttgggatgttttgtgtgttttctttctcctcctcttctctctgttgtggttggtattgttgttttttttctttttttcttactctcctcctcttcgcgctggttgtgggttgcgcaccgcctctctctctctgtatttatcttttttgttttctgtttttatttgattttttttgtctcctcgcgccccctcttggttttcttctttcttgtgtgttgtttgtgtcgtgtcctctctctatctcttgtttgttgtgctctctccctcgctctcctttttcttttgttttattatgttgcttgcttttctctctagatatatatttggtttgtgcttctatcctctccccgctcctcgttcttgtggtttggttgtgttgtcttgtttttttttcccgctctcgctcttctgtgttgttttgtatgttgtttgtttctctgtctctctctctctcatacgatgtgcgtagttgtgtgtgtgtgtattgagtttttgttttttctctcttgctcgtgtgctggattgatgatatatatttatttctctccccctcccctcgttgtgtgtttctctgtcgtcggttttctttttttcttttgccttcctcttctcgcttgtggtttctttacaatgaagtagcaggtggtttggttgtttttttttcgtcttcctcttatgtgttgcgctttttttttttttttttttgtttgttggtgtgcgtcgtcgcgggacccccccccccctccccccctcctgtgtgttgtgtta

SEQ ID NO: 522904 - DNA, 147 bp, Homo sapiens
aacgggtgatgcggttgtcgtgagggtatgtgtggttgtggggtctgcagagggggactgatttctgagcccgttgagtcaccaggtgcgagcatgccgtacttagtggaactgcgggaccagcgcatgcagcgtggcgaagggcca

SEQ ID NO: 522905 - DNA, 109 bp, Homo sapiens
gacggcaaaggatgtgctcgccgaatggcgagactgctgaccagacgcctgtctctgactggagccgcccgaggggaggccccttaatgttccacatggcctgtggaga

SEQ ID NO: 522906 - DNA, 360 bp, Homo sapiens
ggaacacccgttatgtgacctgacagtcagctctacattgtgatactacattcacagatgatccccaagtatccttggcattagaagctttggaccttttgtgccactgacttggggctgatctgtcacacactaaatacataatctgatgtcatggcgtctgtccatctctgaatatgcattggcatgaccagactgatgctatgagagaatatgttggacacatactgtcataccaggttccacttactgagttactgcacagctgactgtcttctatggtgactacatagaagattcttcaatggttttcgtatgcagtgctaaaccattaacaggggaaatagaggtggcgggcct

SEQ ID NO: 522907 - DNA, 264 bp, Homo sapiens
aagtgggatggtcagggcctgggcccttgccaccaaaatgggggctttctgggtaggggggtccctccctttactccctgaggtagggttagggagggtttttgcccccacccttgcaatgggaggtggaggggcagggtcagcctcctcattgtttaaatgaggccttaatgtgtgaagggcgatttttggttttgtggaccccccccccccctttccccaggtgcctttgggggtttgtgtcaataaaaagcccaaccctga

SEQ ID NO: 522908 - DNA, 450 bp, Homo sapiens
  misc_feature (377)..(377): n is a, c, g, or t
gctcactgcaaccttcacctcctggttcaagcgattctcctgcctcagcctcctgagtagctgggattacatgtgcctgccaccatgcctggctaattttgtatttttagtagagacgggatttctctatgttggttaggctgttctcgaactcctaacctcaggtgatctgcccgccttggcctcccaaagtgctggggattacaggggtgagccaccatgcccggccttaaatacttttttaaaattttaaaatgactcatttttattgaagttcagagtgataaacaaacgttccgttaggccctatgtcctgctgtgctctgctaggttaactgacttcttggaattctcttttcccttttccttgtaaaatngttaattattcaaaaattatatgatatgcttctgatgggacgaagatgggccatcagcactatcaacagtcac

SEQ ID NO: 522909 - DNA, 144 bp, Homo sapiens
aatttaatgacctctgataaccttataagtgctctcaacaaacatggtttaggtactgccctgatggcgagactggagattaactacgatatcttaaagtcctttcagactccagacacacaaaggagacgtggggtaggaggt

SEQ ID NO: 522910 - DNA, 300 bp, Homo sapiens
  misc_feature (160)..(160): n is a, c, g, or t
  misc_feature (227)..(227): n is a, c, g, or t
tttgcttggctctcattgttcctgagatgctgttagagtccctaggtgtcagcagcagtttttgcttttcatcattgggttctcataattgtatttacagcacaccttagaactcccatcaggtttagattggattttagatgcttctggtgagtgtaanggatatatacacactatcttccctgttggcttcttggaattctcttttcccttttccttgtaaaatngttaattattcaaaaattatatgatatgcttctgatgggacgaagatgggccatcagcactatcaacagtcac

SEQ ID NO: 522911 - DNA, 135 bp, Homo sapiens
gagatgggaaaaaggtggatcagtacaagggaaagcggggaattgggagtcactgaggggagtacgtagagtcgcagcatgcagcgacagagacctgaggccacggagaccgtaacgcccctcagaggccccggt

SEQ ID NO: 522912 - DNA, 246 bp, Homo sapiens
  misc_feature (246)..(246): n is a, c, g, or t
gacccactccaccttacgtaccagacaacctttagccaaaccatttaccaaataaagttataggccatagagattgaaacctggcgcaatagatatagtaccccaagggagagatgagaaattataaccgagcataatatagcaaggactaacccctatacactctcgcataatgacttaactagagatagacttttcacaggagagacccaagctgagacaccccgcgaccagaggagatattcn

SEQ ID NO: 522913 - DNA, 212 bp, Homo sapiens
aggcctcatcccctgcagagttcctgacactagtgatggtgaccaaggcaacatttcatcagaaaacacagtgctaggcttgtgaaagtgtctagtagggcttccactgccccgtataggctgcaggcagctgctttagttgagagatagagtgagctcctcaaagaattcctatttaagttacaaagcagcgactggatgccctgctgggt

SEQ ID NO: 522914 - DNA, 772 bp, Homo sapiens
  misc_feature (2)..(4): n is a, c, g, or t
  misc_feature (12)..(13): n is a, c, g, or t
  misc_feature (270)..(270): n is a, c, g, or t
cnnnggggcgtnngcagaccataaactacttatacaagtatgtaaaatagtaggattgaagctagtcagaaaacgtcgtagaagtcgcaaaccaccaacaccaaccctccagcggcacgatgcagaccaatcctaatacataccatctccaccgcttgtgtatgttatgatacaggtcaaactcgacttatgaaagtgataataaaatatttaatctatattaataatcgagcctggagcgcgcaaacagccccaccgccacacgctgcnaaatctctcaacatccagtgacctgtgtctctttcagaaggggacatactattcaattcatcaagctcttcacccgcatctcgcacgcggctcagaatctacaccgagagcacataccacagagagtcgctctcacacgcacgaaagtattgatctgcatgttaacctaataggatgcagcacataagctctcgctcgtgtgtatcgtgtgggcccgcgcgcgcagcgcggtcgaggcggctctcccgacgcgtcctctcctctacgcagtctacgcgcgagatagcgtcggcgcgtagtgttcgtggcgtccgtttgctgccgatcactgaagactccgctgtgttggcggtctgagcgggcggcacgggcagaagcccgatgagtcagacgcagagagaagcagaaagtcgcatctaaagtgcgcgcgggctgctatgctcgcggtggcggggcgcgtgtgcggaggtatgcgcgttcctatattatcttatgatggtcg

SEQ ID NO: 522915 - DNA, 871 bp, Homo sapiens
  misc_feature (13)..(13): n is a, c, g, or t
  misc_feature (254)..(254): n is a, c, g, or t
  misc_feature (295)..(295): n is a, c, g, or t
  misc_feature (302)..(302): n is a, c, g, or t
  misc_feature (313)..(313): n is a, c, g, or t
  misc_feature (360)..(360): n is a, c, g, or t
  misc_feature (376)..(376): n is a, c, g, or t
  misc_feature (382)..(382): n is a, c, g, or t
  misc_feature (385)..(385): n is a, c, g, or t
  misc_feature (401)..(401): n is a, c, g, or t
  misc_feature (411)..(411): n is a, c, g, or t
  misc_feature (420)..(420): n is a, c, g, or t
  misc_feature (428)..(428): n is a, c, g, or t
  misc_feature (437)..(437): n is a, c, g, or t
  misc_feature (501)..(501): n is a, c, g, or t
  misc_feature (529)..(529): n is a, c, g, or t
  misc_feature (541)..(541): n is a, c, g, or t
  misc_feature (612)..(612): n is a, c, g, or t
  misc_feature (635)..(635): n is a, c, g, or t
  misc_feature (704)..(704): n is a, c, g, or t
  misc_feature (710)..(710): n is a, c, g, or t
  misc_feature (743)..(743): n is a, c, g, or t
  misc_feature (797)..(797): n is a, c, g, or t
  misc_feature (840)..(840): n is a, c, g, or t
ttatatggtgatnagtaaacatacagtggtctgttatggcacttacttaaagttagatttgcgtaggttatatctgttgcatagccacagtataacttcacatgttcattaaaaaggcaatattgaccgctaaaacttcataagaaaaagtactaataaaaaaagttttaccccaaaattgcaaacaaatacattaaaagattagaagaggtgatagaaagcaccagatatttaacaaaataataaataataanataaattcaacttaaaaggtccccatttagcaaatactttnttaagtntggtctgtttnttaattgtgctatatcaaggactttttagcagataattgctcggttnttttatcttaggtttntttttnttnagtgaaggtataaaanttaccaaacntttagttanttttaaantggcacatnggttttaatgctattggtttttccttcctaacttttttattttttcccatggtctttgttgatnaactattttaaacgttttttactccatnctacttttaacntatttgtctttcagatatgtcatcagtcatgtctaacaggcaaatagcaaaataacagatttaaaactatncttaactagctagcaggacattnactttggattctgcataactgcaaactgacatatttgtaaagctaaaaatcagttttaatacatgattnacaganactctcatcatgctcattactttaactattgcnctttcaatcgctatagaaatatcacttaatccaataagcttgatttcaatagtncaggaagaaaaggtcaaaaaggcacaatgtgaccttagctganaagaattaccatcctgtctcaagtcttttgt

SEQ ID NO: 522916 - DNA, 137 bp, Homo sapiens
aaaaatagttcatcatcagagaatggtcagtttccattcccccatttgaaagattttaaaatggggttgaattttagtttaaagttagcagactacccaaatttggccccctgccaataaagtttcattggaaccca

SEQ ID NO: 522917 - DNA, 171 bp, Homo sapiens
tggctgcaccacacctgggctaattattagccaggggggggggtacatgccggttaggcccagctactcaggaggctgagccaagaaaatcatttgaacccaggaggtcgaggctgcaggtgagccatgattccaggccctacactccagccggggcaacagagggagacg

SEQ ID NO: 522918 - DNA, 1191 bp, Homo sapiens
  misc_feature (60)..(60): n is a, c, g, or t
  misc_feature (63)..(63): n is a, c, g, or t
  misc_feature (85)..(85): n is a, c, g, or t
  misc_feature (95)..(96): n is a, c, g, or t
  misc_feature (125)..(125): n is a, c, g, or t
  misc_feature (128)..(128): n is a, c, g, or t
  misc_feature (131)..(131): n is a, c, g, or t
ggtgcggacgactttgtctgtaggagcagcggcggcttgaggacccggggagaccctcangantcgacccatcaggacgccaganctgcttcagnnggtgaccaccttctccctctaacacattnttnccnttcttcacaaactggcccactgtcatgacgaatgtgctcaacggtgtgtgatgcctgcctgctccctggccgctgccccctgtgactcccagggctttgctctatcagtgggtgctgtgtgtgttgtgccgcgctgtgcgagtcgggctcctcgtgccttgtgtgggctctgtggccaatttccctgtggcccccatcgcaatcactccaatggcctatgcttgcagacttggcccatcacgcgcggtgcctcgtgcaagcagccaggagccctcgcgtccaggaacctgaatgtagctgacggacgaggcggtcagggtgcgcgtgcagggcagggccaactgatcgcgactgcgccctatccgagggcgcagccgggggacggcagcgtggcacgcagactcgaacgatgctgcctcctgagctggctgtcacagtcccatgcgccccacacgtgactgggagacgcgccgcagccagcgccgtgcacggaaccacgccatagagctgagcaggggggccccatggcagcctgcgtggcacgaccctgctgtgagcaaccatggcacaattgccggcacgcacttctgccacgctgtcatggccatgtcacctgcttgggtgggccgggatacctggcacggccgcgcgctgcgcggactgcgctgccgcgggactgccacatactcaatcgcgcgacgtggcagctcaggcaccgctgcgcacgccactccagggacgcaccgtgccggcgaccctgcggatgccctgccgttaagcctgactgccgcctgctggaccagacgaacccttgcgacaccggggcgccgcccacggccctcctcgcccaacacctggctcggggccgtacacccagtgctcgcgtgccttgcgtggagaacactccgaccgtgaacggccacccgcggccgcccacgggcccacacacacagacacgagcaccaggccaagacagactcctagcaccacctacgaccacaccctaaaccagccccgccacgcgccaagtacacccaatgacaagaccgcagaaccacac

SEQ ID NO: 522919 - DNA, 1103 bp, Homo sapiens
  misc_feature (60)..(60): n is a, c, g, or t
  misc_feature (63)..(63): n is a, c, g, or t
  misc_feature (85)..(85): n is a, c, g, or t
  misc_feature (95)..(96): n is a, c, g, or t
  misc_feature (125)..(125): n is a, c, g, or t
  misc_feature (128)..(128): n is a, c, g, or t
  misc_feature (131)..(131): n is a, c, g, or t
ggtgcggacgactttgtctgtaggagcagcggcggcttgaggacccggggagaccctcangantcgacccatcaggacgccaganctgcttcagnnggtgaccaccttctccctctaacacattnttnccnttcttcacaagatcggccgcaggtcagcacgagaggctcgaagggggagccggcctggccctggcgctgccgcccggcctcccagggtttgctcttcagggggccggtggcggcgggcggctggctggcatcctgcggcgtgggtggctctgggctaattgccctggcacccctagctgctagaccttcgcaagggctatgctagctaagagtgggccagtcgacctgctgggcatctggagaggtatgccaggacgcgctctcgtccagaaaactcgagtgaagtgatggatgaggctgtcatgtggtctggcaaggagggccgatagtacgggtcatgcctatcctggaggaccaaggcggggacggacggtaggacgcgggactcgaagtgatgctggccatccggatgttgcctggtcactaggcccaatgggcgccctcagctgctggagggaaggccggacgcagggcggtggcggaccgatgcagatgaagcgaagaggcggggccctgggatgcttgctgggtcggaccttgttgctgagacacagttgggacagattggcctgcagaatctgctggccaagcgtgtctgtgggcattgcatccctgcttggggtgggggccgggtatcctgggagggcgggggggcttggagggacttgcggtgtgcggggcgggtacaccctcatcgcgcacgtggcagtcagaggtcgttggccgccatccaggagcaagtgtgcttggtccctgggtggccctggggtaacgatggctggtgctggctggaaccgcgagggcctgggaagcacggggggcggcgtctagggccgcctacttcagccaatactccgtgacaagggcccgaaaagccaggaaggtcgggggttggtggcagtcggtcccactgggacggggtaaccaagggatacaaagggggccatggacaaacgggggcaaagccaacgc

SEQ ID NO: 522920 - DNA, 617 bp, Homo sapiens
  misc_feature (296)..(296): n is a, c, g, or t
gcactcattggtgtggaaaccccccaccaaaatgcgtcactgggctccatgaaccttgccaataagcaatattacgccatccctcggtccagagttttccaaggtccttggtattctggcaactccaggaggttcatcagggtggggtggggtgcaagaattccattataacaccaagcatctcggtcatctttagagcaccgttctctggtatctggtgtttgccatccggcattgtttcggtcatacgatccgaagaacaatccgatgtcaagagcaaggagccgagtttctcncatcagtgtaaacgacgatccatgagtgcacagccggctgtacctctgcaagtgttcattgagatgtggtatttgttggcttcattttggacaggcactcccagaaaatgagcgtttatcttgactcctgcctacagatcatgcagtccatgcttacgtagtcatcgacataaaagcagtatactgtgtagaatagaggacacactataaacagtgaacagtatgcgtcagtacatccgttcaggcattcacggaatgtaatattggtggattacatgtagcagcactgtaagcagaagccgcgatagagcggcagatacg

SEQ ID NO: 522921 - DNA, 937 bp, Homo sapiens
gaggagctggcacgagcaggagatcgctagggctagtactgacagatgaggagaaagagtctattggagaacgtaggggcttaactctgctctgaagacacgtcctctcatctaaagacaagaggaacaaattctggaacgtgtgcggaggcagatctcgaaatagaatagatctgctcaagagagccgcaggacaaagcaagggtgctatgttgggggctttacgagagcaagggtcttggaaatacacagcccagaatatggagcattcggagaacagagtacagcattcctggaggaacagaatttgtcccttctagatcaactgaggaaactccaggacacatggtgattgagagtaatcaagacgaaaaccagcagcagcagcacgctgcatcttggtcagtaactagtctccttctgcctcctccttgtacctgcatatgtactccatctgacacaagggggagccttgccagctgagcatggagtagttgtcccgccagcttcagtgccctcccctagtgaggacccttaccagactggagtctgcgttgccctgcgagtcagaattgcgcgaaaagacaggacacaccagtggttagacggctcaagactgtgtacatccaggcccctggcaacacttacgctgcgatgcctgcattacatagcctcaggctcccagtgacagagcctcccactggagtggccattccctgacctgcttctcagagcctctctgccgaggtcccatcctccgcctgcaggcaaatctcatcaaggaagggaggatggcttcctactggtagcccctctgtcatctttggacaggacagatactcaggctagatatgaggatatgtggggggtctcagcagggagccaggggggctccccattctgtgtccaaatataacgccgagggccaaggctagcc

SEQ ID NO: 522922 - DNA, 935 bp, Homo sapiens
  misc_feature (587)..(587): n is a, c, g, or t
  misc_feature (935)..(935): n is a, c, g, or t
tacacataaatatcatcgcaatcaggtgatcaagtacagacacaataggggccagtcccgtctaacggatcaaagagacaaccactttggcgaatcagtatcaaattacaatccaaggtccaaagtatcatgcttggataatcactgtgtgttctgaacgtatattgaacgatctaaagtgatatcagatttcgtttgttggagagttgagtccgttgctaaggagtctgagattagaagtttaatgagtggacttgagcccctaatggcattcgttgtatgttggaagaattgtttagcaacgagtgaaagagtgtgtagtttctggtatatggttacgcgataagtttgatgtatgtagtgtccagatctcatgtagaaatttaatatttattaataactgaaactgttggtcttccgttggtatatagtctcgcatattatattatagcaggccaagataaaatttgacagctctttaagcccacatgcagcagtgggtcagataaccctgtggcagtgacacgggcaaattggcatttgaataaagccctgggaccacctcaacatgcgtagcctcttgtctntaaatgtactccccatggcagcatggaggaggccagactgtgggtcaattttgaactggccttacttgattttaaacagagactcagggaagtactaaccaaaagtttctgatttacttgggttctggagttggttacggacaagcttgtcaggaatataacgggagaggttaggatcacagatttaatatttcaccaaggattacttacattcgagtgatatcactttttccataatcagggtaggaaaaatgaaaataagggaaaaaggtggggttgaaaaaactgtgttgggggtatttttgttaaaaaaagggggcaatgggggaatacatgtaacaattaacn

SEQ ID NO: 522923 - DNA, 239 bp, Homo sapiens
tgtccgagagaaattaggattttaaacatacaagttgcatttagacattaatgtatggaagcttaaatacagtaaactagataatgtgtatcctaagtatgcattctctgtcagtctacactagagtggatcttgtcttagttcctcttaagtaaaagacaaaacatttacctcatctaaaaatgaaggtcaaacgaaagaggcaaaaataaatattgctaatttctctcggaccaatg

SEQ ID NO: 522924 - DNA, 340 bp, Homo sapiens
ctccgacccctcataatgtgtgcccaacaaaaagtggttattctgactggttatggagatgactgatcagactaaggcatcagatgccttcatcagctgttatttggcctgagatctatttaagataaccttttcttatattgtctactcagtattggccataatcgtatcattcaagattcagtgtgggctatttctttgataagcactgaatgcggtcgatcggagcggctcacgcctgcaatcccagcactttgggaggccgaggtgcgaggctcacaaggtcaggagatcgagaccatcactgctaacacgctgtagccctggctctactaaaaat

SEQ ID NO: 522925 - DNA, 344 bp, Homo sapiens
gggcaattttttttttttggggggggggccccatttttaacaaggccccaaaaaaataaaacaggttttaaacccacaaatttcggaaaaaaaaatataaaaacccaaggttttgcaaactgggttaattaaaaatccaaatttttgggctttaataaccaagttggttaaaagaattttgggccatgtaaaaaaaaaaaagaaggaaaaagttaaaaacccgggttcaaaatgtaaaaaataagccgggccttgtgggtaaattggaacagttaaataaaaaaaaacccccccttttaaaaaaataaaagggtcttaagtaaaaaaaacccgttaaaaatata

SEQ ID NO: 522926 - DNA, 102 bp, Homo sapiens
  misc_feature (60)..(60): n is a, c, g, or t
cacgcagacgcgccaaccgaagcgtcgaacgtatctacctcatatggcgcctcctgctanatacgaacgacgagcgcagcgaagtagttagcgaggaagcgg

SEQ ID NO: 522927 - DNA, 806 bp, Homo sapiens
  misc_feature (42)..(42): n is a, c, g, or t
  misc_feature (62)..(62): n is a, c, g, or t
  misc_feature (111)..(111): n is a, c, g, or t
  misc_feature (114)..(114): n is a, c, g, or t
  misc_feature (133)..(133): n is a, c, g, or t
  misc_feature (136)..(137): n is a, c, g, or t
  misc_feature (139)..(139): n is a, c, g, or t
  misc_feature (148)..(149): n is a, c, g, or t
  misc_feature (158)..(158): n is a, c, g, or t
  misc_feature (164)..(164): n is a, c, g, or t
  misc_feature (175)..(175): n is a, c, g, or t
  misc_feature (189)..(189): n is a, c, g, or t
  misc_feature (201)..(201): n is a, c, g, or t
  misc_feature (228)..(228): n is a, c, g, or t
  misc_feature (232)..(232): n is a, c, g, or t
  misc_feature (243)..(243): n is a, c, g, or t
  misc_feature (252)..(252): n is a, c, g, or t
  misc_feature (259)..(259): n is a, c, g, or t
  misc_feature (271)..(272): n is a, c, g, or t
  misc_feature (278)..(279): n is a, c, g, or t
  misc_feature (287)..(287): n is a, c, g, or t
  misc_feature (298)..(298): n is a, c, g, or t
  misc_feature (316)..(316): n is a, c, g, or t
  misc_feature (334)..(334): n is a, c, g, or t
  misc_feature (537)..(537): n is a, c, g, or t
  misc_feature (796)..(796): n is a, c, g, or t
atcccgaaaatataaacacaaaccagtaaaaaacaaaaccgnaaaacgtcaggcctggagcngcaataagagaggaggagaggagcagctcacacgtggcctagggggggnggncgaggccataaatagtggnggnngncggcaaggnngccctaccncgaggngaaagcagggngtcggcagcgaganggctccgggggnttagacactgctgggttggggcccggnggcnacctgcctctnactccaggngcgagcngcttcatttggnnccctgnncctccgantcctcctcgtngtcttcgtacatctcgcnctcttcctcggccgtggngtcctggtactgctggtactcggacaccaggtcgttcatgttgctctcggcctcggtgaactccatctcgtccatgccctcgcccgtgtaccagtgcaggaaggccttgcgccggaacatggccgtgaactgctcggagatgcgcttgaacagctcctggatggccgtgctgttcccgatgaaggtggaggacatcttgaggncgcggggcgggatgtcacacacggccaccttcacgttgttggggatccactccacgaagtagctgctgttcttgctctggatggccagcatctgctcgtccacctccttcatggacatgcggccccggaacacggtggccacgtcagtagcggccgtggcgcgggtcgcaggcggccatcatgttcttggcatcgaacatctgctgggtgagctcgggcacggtcagggcccggtactgctggctgccccgggctgtcnagggggcgac

SEQ ID NO: 522928 - DNA, 547 bp, Homo sapiens
tctgaagtagctttggaaagtagagaagaaaatccagtttgcttcttgggagaacactggacagctgaataaatgcagtatctaaatataaaagaggactgcaatgccatggctttctgtgctaaaatgaggagctccaagaagactgaggtgaacctggaggcccctgagccaggggtggaagtgatcttctatctgtcggacagggagcccctccggctgggcagtggagagtacacagcagaggaactgtgcatcagggctgcacaggcatgccgtatctctcctctttgtcacaacctctttgccctgtatgacgagaacaccaagctctggtatgctccaaatcgcaccatcaccgttgacgacaagatgtccctccggctccactaccggatgaggttctatttcaccaattggcatggaaccaacgacaatgagcagtcagtgtggcgtcattctccaaagaagatgaaaggaaaaagaggcgacgagaaagaaataagattgcagctgcaaagtgccgaaacaagaagaagaaacgcaa

SEQ ID NO: 522929 - DNA, 678 bp, Homo sapiens
  misc_feature (88)..(88): n is a, c, g, or t
  misc_feature (385)..(385): n is a, c, g, or t
  misc_feature (405)..(405): n is a, c, g, or t
  misc_feature (416)..(416): n is a, c, g, or t
  misc_feature (481)..(481): n is a, c, g, or t
  misc_feature (492)..(492): n is a, c, g, or t
  misc_feature (511)..(511): n is a, c, g, or t
  misc_feature (528)..(528): n is a, c, g, or t
  misc_feature (551)..(551): n is a, c, g, or t
  misc_feature (586)..(586): n is a, c, g, or t
  misc_feature (631)..(631): n is a, c, g, or t
  misc_feature (640)..(640): n is a, c, g, or t
  misc_feature (671)..(671): n is a, c, g, or t
caacaacactgggggcgtcgatcaggttcagcaggtcatcctcctcctggtgctgggcgtacgtgagccgggagcgttcctgtgcggnacacagcaccttctgtagcacctcaatgctccgcagcttcttgcagaggctcgcctcccgcaccgactcctcgtgatgagccatggctctgcgcaagtgggacttccccagctgtcggcgctgctgatcattcttcagtgtggccaagggtgtcagcccctctggcatgtggtcgtagagctgggacaggcacttctcctggtggtccagatccgtgcctggcttacctggtggtcgatgaggaggatggcaagtgaagtaatgggccagggccgcgtagtggtgggccttacgcangctaagctggccaagagtangggatgttctntttaccggcgcctggctcatggcttgcgtgtagctgttggtagacctctccacctgaaatagaanggacacttggnaaaggcaccccggcacaanggcccttatgaacccantttgcaaaagaaagaaccctttnttttttccattcaacaaccccttgccaagggctgnttccagaaatctgggaagcaacttccaaaaagaacccctccgttntttcatttncacaagttaacaaaggggggatcaaggctgnttggcat

SEQ ID NO: 522930 - DNA, 126 bp, Homo sapiens
ctccagcctggacagcagcacgagagcttgtctgttttttcaaaaaagaggaacactaacctttgatgtattgatactttaataaatttcctgtatctttttggaaattttgattgatgaaacata

SEQ ID NO: 522931 - DNA, 1109 bp, Homo sapiens
caggaggccgccattgtcggctactgcgacgccaaatacgtctgggcagccacggccgggggcgtctttcagcagcattacgccaactagaaatagactatgattgctacggaaaacgaccgggaaggtcttctttaccaaccggtctcgactcttggccgcgaagaaatgctcagtgtatcagagcatagctctataacgtcgcatggctgacctgcaccaactggacactccgggacacacagagctcacaggctgcggcgagccacacactaccacactgtggcatgctcgcgccacgacgccctggctagcacgcaactcgggctccctacgctcactgggcgcaacacgcgcaaccgatgctcccacagcgaacgcggccaccaaaccctctacacgcaccaggcaaacagccaactcactgcacacctccgccattctcactaaccctggcacgcggcaacgcgctccctgaattggttgctacaaggccaacggcaccattcttcccccccactacgtaaccccttcagcaaaaccatgggctccttttccagctccaccagcccaacctgccccttaacacctctcactggcggctacgcagccacacctggccattaaccccagcgcaccccttggggcatcagcaactgcggctaagccgcccttaaacctttctacactgccacatgtttagccccccatcaaacattatactatatcagccttaaacacattggggtctccccacttcggcaactcttcccacccctgtcggtatacactgtggaccccccccaacaccacattgggcggaccatatccccaacattttcattcttcgcgcttaccacttggggattattcaacaacacgcacgccacacaaccgatggggcataaatcgtagcggcataaacagcacgcacgccgcacaacacgccaccagccgccattatctaaacactacacactatggggcggcgacagcaaacaccgaacatttataaccagcagtttagtcagaggatcaccagcacgcagacacactcacgaccagcatgtcaccaacatccattatgtgggaacaacttcctatagcgg

SEQ ID NO: 522932 - DNA, 275 bp, Homo sapiens
gatctccgacgagttgtccgagttatggatatttatttaaatacaaggtattactctggtgccctgactggagttatatggtgattatggttccctaaagcatattttttgagggatcaggaattccttatacgtcagtcttccaagtaggtctgactgcaattagtgtgcaatcgaatctgactgattgtaaagtcctgactgacggcttcttattggttatgtttgtttctgaagatttggtagagaagaatttgactactttgcacaagctt

SEQ ID NO: 522933 - DNA, 124 bp, Homo sapiens
  misc_feature (100)..(100): n is a, c, g, or t
tatccctttcattgatctaatgtatcagtatctaaaacacctttcgctttctaaactcgtctagctcataattggtgttttgcctgtgctacgccaaccntgaggagttcgtacatacgaacag

SEQ ID NO: 522934 - DNA, 430 bp, Homo sapiens
  misc_feature (430)..(430): n is a, c, g, or t
gggctctgaaaacccggctccacacgtgtgatctttttactttacaatccttaatccagacttgctctgatgggtgtctggagggaccaacgaaagtgtggagacgctccaaggattaagtgatcggcgctggttaataaaaccttccaaacagataaaccccacccaccctaacaaatatgaggctgctggagagaatgaggaaagactggtttatggtcggaatagtgctggcgatcgctggagctaaactggagccgtccataggggtgaatgggggaccacttaagccactaactgtatcatacattgctgctgcaacaatattatataacagcggactatcattgataacagacgatctgaccaccgctttggtgcatctaaggctttttctttaccttttatcaattacacccattacctggtn

SEQ ID NO: 522935 - DNA, 166 bp, Homo sapiens
gacggtggaagcgcggtcgaccttctgggcgcggtgcggaaaatacagccacgaacgcggagcatgaacagtgagccgaggataaagccgagcagcggcgagatgaagatgaacgcgatggtcttcagcagcccgtcgatgttcagcgagctccagcccgacttgg

SEQ ID NO: 522936 - DNA, 180 bp, Homo sapiens
  misc_feature (7)..(7): n is a, c, g, or t
tttgggnagcttcttgatggaggggatggaaggagggtggtctcagctacagcagggagagctttctgtttttgagctaaagacataacagggtgcagagctgagaaaaggagagtctaagcaacatgtcacgagctatgtacctcttcacactgcttctgaaataaaactaacagtagg

SEQ ID NO: 522937 - DNA, 216 bp, Homo sapiens
catactatgtgagataatgttaataaaaaaagtactagactcgtgtggttcatatgtgctggatgtggttcttgtgatcgtgtggttcttgtgatggatgtggttcattgtgctcgtgtggtatcttgtgctggatgtggtatattgagatcgatgtggttcttgtgcatgggattggtgagctcacaccttgtaatcccaagcacttctgggagg

SEQ ID NO: 522938 - DNA, 417 bp, Homo sapiens
  misc_feature (32)..(32): n is a, c, g, or t
  misc_feature (45)..(45): n is a, c, g, or t
gcccccaatggaatcagcgataagtgcgcgtngggatctttcctngagctgggcttccggcagagaactggtgatgtactcaatgctggtgtacccggcggctttcagaacgtcgacagccgatgggtggacgccttccagaagaaggaacttgatcttgctcttatcgagagaagtcttgctcatctgcgtaagcctgtatcccggagaaaattggcagggagtcgagcagcgcaagctgacccggacggcaggaaagccgtcaccgcagaaacgccctttgggtctgtcctgcgggggcggtatgctagcatacgcaccccgctaaacacctattcctgcgacgtgaagcgttctcaggatgaccatgaattgttcgtgtgttctgtcgatgacccatcctgccctgattgatga

SEQ ID NO: 522939 - DNA, 933 bp, Homo sapiens
aggaagccagatcctgttcctctaaccagacagatcgtgggcagacacagtgaagggtggacaaaagctcgactgctgcgtctaccaagtacgatgtcttcagacaatttgctctggaagggtctggactaagtgttgaagacctgaagagataacactccttcaggtaaaaaagtgatcgatgatttggctgactctccagctccgagtaagagttgtgtctattccaataaaaccgtccgtgagcaataggtccctggggaggaggaaaagcagtggactttcagaacagcaccaaaagaaggactcgtgaccatcatgctgaagatcctataaaattctcacgcttccattaggtggctatgggagtgtttggcacaccggtaggactttgaagtatgcacatctctgtccagtatgtaacatgaaattggctgaatgatgggaggagaatcgtgtaacccagtgtgcattgtctggattaggcctcatcttgagtaatttacccaagcagatgtgaggtagtgcctcagcactcactacccatgtcatgacgagagtaaatgtgggaatccgcaccttacgagacacgaacccttcaaattctcctctcaagataatgagaaagcagtacgttccactttgggccagttcgttgagaaaacaatcagcccatggaacaatactacatctcgcaagagtacaacagaccatatttagtaaagttgaagattgctcttacgcaagagagacgcacgctttcccagcttctgtgccagtaattaagatggacacagattcctcagaccaagtgagcacaaaggaatgatgaaagatcagagagtataaagatttcccaacaaacaggagctgtctacggttgaacggggccaggagggcatgttgtccccaggccagcgtccatggtgcttc

SEQ ID NO: 522940 - DNA, 184 bp, Homo sapiens
gggactacacgcatggcatcttactagtgtgctttgctgaatgaatttaaaatatccattagaaaagcaggaacacacattcgagagctacgcgaatcttctgctgatcctgggagtaatattaaatatcctgtagtatgagaaacggcgctggatggtagacgccccagtaacagcgtacctt

SEQ ID NO: 522941 - DNA, 967 bp, Homo sapiens
ttaggctaggtacgaggctgggtgttgaatcggccgagggcgaataggaacagctctggtctacagctcccagcgtgagcgacgcagaagacgggtgatttctgcatttccatctgaggtaccgggttcatctcactagggagtgccagacagtgggcgcaggccagtgtgtgtgcacaccgtgcgcgagccgaagcagggcgaggcattgcctcacctgggaagcgcaaggggtcagggagttccctttctgagtcaaagaaaggggtgacggacgcacctggaaaatcgggtcactcccacccgaatatgcgcttttcagaccggcttaagaaacggcgcaccacgagactatatcccacacctggctcggagggtcctacgcccacggaatctcgctgattgctagcacagcagtctgagaccaaactgcaaggcagcaacgaggctgggggaggggcgcccgccattgcccaggcttgcttaggtaaacaaagcagccaggaagctcgaactgggtggagcccaccacagctcaaggaggcctgcctgcctctgtaggctccacctctgggggcagggcacagacaaacaaaaagacagcagtaacctctgcagacttaagtgtccctgtctgacagctttgaagagagcagtggttctcccagcacgcagctggagatctgagaacgggcagactgctcctcaagtgggttcctgaccccgtgaccccgagcagctaactgggaggcacccccagcagggcacactgacacctcacacagaggtattccaacagaactgcatctgggggtctggctgttgaggaaactacaaccagaaggaattaacggaaaccattgtttaccttattaaagaccaagtgtatacccaggtggggaaacggcggaaaatggacttaagggggacttttccagagggtccagagaaaggggggttgggcaag

SEQ ID NO: 522942 - DNA, 165 bp, Homo sapiens
tgaataataagaaacaacacgctcacacgttactggggttggcgctgttgggaggcttgatgaccacaggtaaatgtgcaggcgggcggcttctccacgccaacctacggtgcgcctggctgggggcgcgcgtttggtggcggttcattgttcaagaacgaccca

SEQ ID NO: 522943 - DNA, 365 bp, Homo sapiens
  misc_feature (77)..(77): n is a, c, g, or t
  misc_feature (173)..(174): n is a, c, g, or t
  misc_feature (192)..(193): n is a, c, g, or t
  misc_feature (211)..(211): n is a, c, g, or t
  misc_feature (332)..(332): n is a, c, g, or t
  misc_feature (346)..(346): n is a, c, g, or t
  misc_feature (359)..(359): n is a, c, g, or t
ccttagatattgcaaggcaccgaaatcaaacccctttgcccattgatcaagccatattccggtcctaggttgccacnccatagatactgcttaacacctccaaactataggctgacctctttacagaaaggcatccacttctgcgggaagaatcccagtcccgcggttaagtnntggttcagttactagcannccaagtactcccacactnggcacaccaaccccacagacccatgtctgtttcaactacagtagggactcccatgtccctcacaggtcaaaggtttacagtacagatgcctacttctcagtctccagctgtaaaagcttcnaatttcctggcaanctccagcagtttnagaatg

SEQ ID NO: 522944 - DNA, 545 bp, Homo sapiens
ggatatacataggaagctgtgttacacatggacaggggacatatgggaacatctcagtaccttccactcaatgttgtgtgtgaaactaagactgtgctaaaaaaatacagtctattaagacatgaataataatcacagagtagggccagaggcaatgtagatgccaaaataggccatgagttggtaactgttgaacctggaaagggataattgagagagttcactattctgttctctttacttttgtatgcttgacattttccataataaaacttaggtttaagtaggcaggaaagtttttacaaaagcagtgggacttactccattctacctacctacatgaaaccacccctccaatgctatgttcaagtacagactcacgcattcggagagaaagacacacagtgaagcgagtagagacaaggtgaccaaaacagtgagcagctggggccttgaagagtgagcaaaggagacgtgatggaagtacacagtcacagtctctaggactacctaaaggccatcctgtgggagaggaagggactgtc

SEQ ID NO: 522945 - DNA, 494 bp, Homo sapiens
  misc_feature (25)..(25): n is a, c, g, or t
  misc_feature (267)..(267): n is a, c, g, or t
tgcttggcttctttgcctgatgatntgcctcattcagaagcaggaatgagagtaaaaactgaccaatggatgctgatgatagcaacaattgtactggacagaatgaacatcaaagagaaaattcaggtcataggagagatcagattatagagaaagatgctgccttgtgtgtcctaattgatgagatgaatgaaagaccatgaaagatgtttctttttctttttttccttttgataatagcatcatatattagttcattttctttgngacagtcttaagagaagtttccactaaaaatgtaaccagctttaatctggactccaaatttttcaattatgagatgtcatagccagtaatttcgctgtataccaagcatagccaaatgagggtccctgccttaagaagattccctttaaaaaccaaagtgttagctgctgttgtatgggccattcctatgttttagagttccagtaaacctttgatgataccctcca

SEQ ID NO: 522946 - DNA, 246 bp, Homo sapiens
  misc_feature (47)..(47): n is a, c, g, or t
  misc_feature (93)..(94): n is a, c, g, or t
  misc_feature (122)..(122): n is a, c, g, or t
atttttttccccaaatggggattttaggggtaaaaacccccgggctnctgggggaaatattttggcccttcccgggggccaaggataaaaccnncaggggcagtttccaattttggatggcncatttttgggttaaatatcccatggggccgatttttaaatttggaagaaccaaatttgtttaaaaaaaccccctggtctagttttggggccctgggggcttttggaataaaatccaggaagcca

SEQ ID NO: 522947 - DNA, 358 bp, Homo sapiens
gccagagccactatgaagtgggtaacctttatttccctactagggctctatagctaggattattcgaggggcgcgtgaccccgagatgcacacaggagagagggcgctcatcggtggaatcttcagcagtgtccatatgaagatcatgccatattcgagaatgaagtaactggctttgctaatacatgagatgatgatgagtcagctgaaacaggtgacacatcactacataccctatttggagacagattatgcacaggtgcctctataagagcctctggagaagtggctgactgatgagcataccatgaacctgcgagagatgtgctcattgccacacagataggacagcccatcg

SEQ ID NO: 522948 - DNA, 390 bp, Homo sapiens
tttgatacagagttccgctcttgttgcctagcctggagtgcaatggcgccatctcggctcactgcaatctccgcctcccgggttcaggtgattctcctgtctcagcttcctgagtagctgagattacaggcacctgccaccatgcccagctaatttttgtgttttagtagagatggggtttcaccatgttaaggtgggaattctcaaagcatggtccctgtaccagcaacatcagcatcacctgggaacttgttagaaatgcagactttggctgggcacagtggatcacaaatcctgtaatcccagaactgagggaggctgaggtgggaggatcttctgagcctaggagttactggacaacatggcaagaccgtatctctaccccccacc

SEQ ID NO: 522949 - DNA, 1729 bp, Homo sapiens
  misc_feature (474)..(474): n is a, c, g, or t
agcgagtggtataggcgtgctgattgatggtgtctgttcagatacagcgatcgaatgcgtgggtctgcggagacaagctgttgttgacctcgtgggccgtataacgcaaccacatcaccgctgtcgcgccgcggaggacaccacgcgatttgaggcaacaatagtggtggtgtcacgtgccccgcgatgattgttgtcttgcgcgcgctcggtgagtgagttgatgtccaccctactgatgagttgtgtagatctcggaccgagtgaatagacacgacggctggtgaggacaagatgaggttgcgttggtggttggggaatgccactgttgggctcttgtgctgcgtggctggtgttggttcgggtgggccgcccgcacgagtagttgtgtgtccgcgtgtgcggaaggatgggtggaggtcgtgtgcggacgtcatcgcgtggagtcgtgctgttttcgatcggactcgggtncgttgtgcaatggttgtatggtcggcgtgctcctgccgccgcccgcggggcggtgctgcagagtctgtttggttgtgtgggtgcttggctgcggtgcgccgcacctctctcctcctgccgccgtggagtgcgcacctactctctgtgtggtgttgttggtgttttgtggtgtgggcgcctacgcgtcgtttgtgtagtggactcggcggatgggagggtgttcggtcagggttggttggtgtggttcgttccggcccccaagggtgggtgggtcgaccgcgtgcgttggggcccgtcggtgtttgttttgtgttcgccggcacgaggcgcagcttacgttgtagttgtgaaggactagtttgtgtgtggggtgatgcagctccgcctgggacagtacgggttgtgtgagtgggtggtgtggtggtggccgttcgccctcgccgcgcacattgctgtggctgtcttctcttagctctctacttcggaggagggagggggagcgtttgttggtgtggctgccccccgccctcagaggggggggggtgctcttctctgtcttcccccccgggtgtgtgtcccgcccgcgtcactgttttttcgcgcggtggggactacacactgctctcgggttgcgcacgctcgcgatgtggctcccgcacacgtgtagtctctctcttttcgtctcttgttacttgtattgttttgtctctcgcgcgcgcggaggggattttatgctcattgtttcttgtctcctgcacgccacacacaatgtatcttgtcgtgcgggctctctctcccggagagagggacaccccgcgcgcgcggttgttgcgcggcggggtcccgccccgcggggcgggctcgcacaccacccccccgtggtcacctcactctcttctctctctcttgtgtggggcgcctcgctctctccttttttcttctccaccccccgcgcactatattattataaatgttttcttctgttgtgtgttagaacactctctctctctctctctctctcgagagccgcgaaaatctctctcttactatatgtgtagaaggacacacgccccccctctcccccggcgggggagaagaaaagagagagagcccccccccccccccaccacccacccgcaggaaacccccacacaacacacaaattattaaaccacaaaaaaagagagagaggaggcgccccccccccacgcggggtgaagcgcacacccccccgggccccacccgttttttttca

SEQ ID NO: 522950 - DNA, 620 bp, Homo sapiens
  misc_feature (99)..(100): n is a, c, g, or t
  misc_feature (418)..(418): n is a, c, g, or t
  misc_feature (423)..(423): n is a, c, g, or t
  misc_feature (615)..(615): n is a, c, g, or t
aaaaaaaacaacccccccccccctaaggtttcccaaaaaaaaaagaggtttcttttaatacccgggggcggggttaataaaaggaagaaaaaaaaaagnnaacccccctttttttccccgccccggaaaattttttttttgtgggggcccccccccccgaaaggggaaaaacaaaaaaacaacaagcccgcccccggaagagagaaaaaatattatgtggtggattttctcccccccggggggggggtgttttttcttcccccccccccccccctatataaaaagaaaggaagaagagaaggaaaaaaccccccccccctataaaaggaggaggtggggagggggggttttttaaatagccctgggggggtttttaaaattttaaaagggggggaaaaaactcccaaaaggggggggnttttnaaaaatttttaagagaggggccccccccccccaaaaaaagaagggggaaaataaaccctaaaaacccccctctcgggggaaaagggaccccccccaaagcaccccaaacccggaaaaaagggaagccccaggcaagctattttgttttttgaaagcaggtctgtagcaccagcggtctaactctggccaagnacagc

SEQ ID NO: 522951 - DNA, 299 bp, Homo sapiens
agttcccatttctcctacctcagcctcctgagtagctgggattataggcacgcaccaccacacccagctaatttttaatttttagtagagacggggtttcaccatgttgggcgggatggtctcaaactcctcacctcgtgatccgcccgcctcggcctcccaaagttttgggattacaggcatgagccaccatgctcggcctgaaacatggagcctttgagcatccccaaaatcatcttcttgatgggcttatgctgataccatttgcagtaagtctgacagaggcaggtgaaatggga

SEQ ID NO: 522952 - DNA, 869 bp, Homo sapiens
gcataggggcttcggcgccaggcccagcgcaagtcggcctggtagggattacaaaaggtgcggtatgagcaggtctgaagactacattttgtgagttgtaaacacagaaacgctgtagaaagtgtggtgtctcagcaagggcctcagtttccttccttacagccctgtgtaattggacatcgtgctgcttcatattttcatacataatgcagtaacactccaccatatagaccccggtttataccttatatcagtgacactggttaacagtagctccagaaaaagtgcttatgtggggcaatgctaaatatgggcggcagtttttatggcattgtgttacccatttattgtgcgtaataagcaagttcatgctctgagtcctgaagaagaagttatcatcaaattaaacaagggctggcctgtgtactttggaatactgagttgtcaaggactttctatgtgtggcaaatttccagaaaaaaacccttttgtgtgcacatgtaagtggagctgtgctaaccttgtgtatggggctcattatattattgtgtgttccagaccatccttttcctaacaaaatgaggcaaaatcccatgaacacacgtcttctggctcagactggggttggtatctggtgtggaaggaaagtggcacttagcattgctgccttgctcatcacgttttggccaggggcaattgtggcgcctggctttgaacagaacctcctttggagcccgcaggacaagtgtttttgttcaattgatcctatgggacaaggaggatgagataccccttgggttcccgactaccttcgggtgtcacacatcttcggggggccgccatgatacccttagaggcgggctaaaaaa

SEQ ID NO: 522953 - DNA, 278 bp, Homo sapiens
aaaattttgggggccccaaaaaaacccccccccctttttttgaaaaggtttttttccccccgggcccccccccccgtgttttttttttggggggggggaccccaaaatccccccccccccccaatttccccctttttttttttcccccccagggttttggggaaaacccacgggggcccccctttttttaaccccaaaaattttttcccccgatttcccccccttttttttaaaaattttttttttttttttttttccccccccccccccccccctta

SEQ ID NO: 522954 - DNA, 126 bp, Homo sapiens
gctggcattcatggaagccgactccgtgtcgtccaagggcttacccaggcccttacaacatgtcttcggctccgggactcccgatccggctcccgctcgggatcatcgctcacggatctcgcatcc

SEQ ID NO: 522955 - DNA, 476 bp, Homo sapiens
ctgtgagctccttgggtacgggtaccttgtatgtttaattttatatccctagcacaaagcaagtgcctggcacatagtcagtgctcaagtatctgcatagtcaagaatgccagcctctcttgtgtctgggctccgtacgggcgtaaagggcttgattttgggctcagatagggagcctcttgccgcaatgaactggcctattatatgcgtcatggtgtcgctatgcttctgtctcgcccatcaagtctgttattagcgttcgcagcaaggaactcgtcgtgacgccgctgacacttagaagtgcatgatcacatgcgtagttccgtgatcagcggagttcctagtggtatggttcacgcgcaagccaagcattcctttgtgctgctggatcagcctttaaaacggagtgttctggccagcagggagaggacccaacagcgtcacagatatagggtctcacgtgcagaaaggaaggg

SEQ ID NO: 522956 - DNA, 120 bp, Homo sapiens
gagagactggatttttatttcaaagacaaacacacaagctgtactgcagataaaactatatgattcaatgcatgagtaatcatgagtacatagagcgagctctctcttgtcatgcatctg

SEQ ID NO: 522957 - DNA, 327 bp, Homo sapiens
ctagaggatccccattgagccccggatgccatcactagatagtgttgagagagggagggggtcaatcttgatcacgagaaagcaatacatgtagcaaccatctgcatgccagattgatgttagtagtgttccacgagtcaagtaatgctggcatccaccattcaatgaagtaccggcagccatatagcaaatgtctctctcctacagcctcctaaagcacagtcgcgtgggcctgcgaagctagccttgttttaggctcaatgattctagacttttggagtactagccgcgagaactgtgagataatgaatttctgtggttataagt

SEQ ID NO: 522958 - DNA, 948 bp, Homo sapiens
gtccccacccccaggacacaacccctggtcttggaccagtagaggacacggagggttcagacccctcctcagaccctccccacatctgaaactgcctccccccaaccacagcagcagcagggcctcctcccccacagtcgtccccacagggcccctcagacatcatggagacccgcaggacggggcttagccacccactcaaacccagggccccctgtgcacctggacatctggcccgtgtatttcatggacacagaggccccacacttatcactaacatcgatgactcccattccgcacttcttttccgtactgtgaagaaagaactctcacaacaccagagatacacacgccatgcccactggaactggagtaggaggaactgtagccatacataccaccaggaagaaaacaagaccacactacatgactcgacatgagggtgggacgtgattctgtgatagcccactgaaggggggttccagaagatgagcaggagccacctaggactcccagagagccagaacaagacataacagagacaagaaacgcaagacatgaagaccgagaggacatacgaaccagcgaacaccaacgaattaggacaagagagaagaaaccatcaaacgaaaagagcacacaataggcaaagaagcaccaaaacaacgcatgctacgcacaggaaaagggtcatgaggcaaaggtggcgcaacatcgagggaagtagccaagaagagacagtacgagcaataaaggaggagacaatagagaataggagaccaaagggcagaacaggagagacacaagagaccgaaggcaacgatcacgatcagggcaagttcgacgacgtgcacgccataagatacatcgcaggataacatgaccccagaaaaggaaaaggacaaaagacatagaagaaagaagaagcgaaagcaacgcgaaaaagaa

SEQ ID NO: 522959 - DNA, 284 bp, Homo sapiens
gtacaaacacataacataaatagtgtacttaatatctataggtgtagtaataaataatgaaataataatagcaactcaccatcatgtagaatcagtgggagcctggagctagtattcctgcatactaaacagcagttccatctaggaggtagatggaagacaatgacagatcatcaggcataagattctacataaaggagccataatactaagataccctcgtaatgtgcagttcacagtagggcaggagctcctaatgagaatactaatagccacagctagat

SEQ ID NO: 522960 - DNA, 102 bp, Homo sapiens
  misc_feature (13)..(13): n is a, c, g, or t
  misc_feature (31)..(31): n is a, c, g, or t
aaaggactactcntccctgagaaggcagagntgctggctggcctgcccttccccaggcttggataccttgggcccccttattcctgcaccaacagcaaactc

SEQ ID NO: 522961 - DNA, 306 bp, Homo sapiens
attcggccataatggccgggggtccgggttggaacttaatcaatgttccaaattggacctgttccagggatgtgaaaaaactgattgcagccaaggcctttcggaaacccaaaatggtgaccagcttctggggttgaattaattgaggggccttttgacatgagtttggcttggcccaacttcttagttcttaatattaaagacggatggttttttggtttttaattgaggggccttttgacatgagtttggcttggcccaacttcccaagtttttaatattaaagccggatggttttttaattgg

SEQ ID NO: 522962 - DNA, 681 bp, Homo sapiens
tggtgagctggaacatcaatgagattcggatacccctgcgaggggtggctaatcatgaacccaactactgtgccgccgtggccgtggggcgcattttggacgagctggatgcggatatcgtctgtctccaggaagaccaagagctgaccagggtatgcactgacgagagccccgtggctatcggttgagggttatcatcgtcctatttcagcttcagccgcaaccgtagcggctattctggtgtagccacacttctgtaaggacgaggctaccccagtggctgctgaaaaaggcctgagctggccgtgctttgccacccagaatggggatgttggcttgctactgtgaaacagtggatgagcttgacgccacagaggagactccgggtctctgtgctagtgatgggcagggccctcctcatcacagcataagatccgcacatgggaaggtacaggagaagaccttgaccctaagtcagcgtgtactggcccccatgcggaccctgggaggcctgagcggctagtctttcagatgcgcttctatcggcagctgcaaatccgatgcagtaagccctcctgagcggcaggctagcccatgtgatccattctgggtgacctgaatacagcccgacgcccattgaccactgcgatgcagtcaacctggaatgctttgaagaggacc

SEQ ID NO: 522963 - DNA, 163 bp, Homo sapiens
gcggcgcccttattttcctccttccgctcagtctggggctatctgcttctcttcccgtgaacccttctctttccgtggtagtagtccttatataggtatgggtctctagcaaactatatttagcatacaaactagggccatacttctacacatcagtattcac

SEQ ID NO: 522964 - DNA, 127 bp, Homo sapiens
tgcacagctgaatatcaaactacatcatagcatctgtgtggacgaagttgttgctgcaacaacttcgtccaccgggatcttgctcagtctggggtctcgtgcgtgtgcagtgatacctgagctcgaa

SEQ ID NO: 522965 - DNA, 215 bp, Homo sapiens
gctctgctctctgctctgctctcttcgcttcttctgcagctaaaataaaaatgtcaaatacaatcttagttcttacaagataatgtcttacgtcctcgtaccacttcaggtagacgtagaggcctaaccttgacttaagggtatactcacgctttaacacattgttgaggacaggaccacgtttgaccagagtcgatatactaataacgaagcta

SEQ ID NO: 522966 - DNA, 437 bp, Homo sapiens
tcctggagcaagcggggaaagggcacattggaaccaggatcgcccggacaggggctggccttttggtatgtgtttccccacccccgtgacctagcgggtatctgggggatgtttctggtgacaggggtaaaagtaaataaatggcatttaaggggtaagcaggtgtttaaaaacaaaacaaaacaaaaggaaagaaggtggtcgcagctaaggaggtttccacatgtggtttaactccagtaaagtctggatccagcatctgaggcatacaagggttttcttcttgggcatgagccattttctcttctaagtcatcaaggcttttctccaattaagttacggacctctcggaaaactcagccggagtctcagcctccttcagctggtgggaagggacctggatctcttcctcatatctgtcttccttcggcgagtac

SEQ ID NO: 522967 - DNA, 338 bp, Homo sapiens
  misc_feature (17)..(17): n is a, c, g, or t
  misc_feature (110)..(110): n is a, c, g, or t
aaaaaaaaaataggaanttgcctcggggccccccctttcaaagggggtgtgtcccacaaacccttctatgggtggggtgggggggtggggtgctgcgtaaccagtgtttnacttttttttcaagtgggggaaagtgggaaaggactaaaagtaaggcaagttttccccagcccctgtccgtttgtttgtttgtttgggggggtttttgttttttgggaggaaagggaggataaaaagtcattcccccccccttccaggcctcctgtaaaatttgggggacctgactggtttgggtggagtcccaaaagaatgggggccctttaaaaaaggaaagcaaa

SEQ ID NO: 522968 - DNA, 111 bp, Homo sapiens
gtcatttgctacagctacactgtctctgttctctcttccagtgaactcctaacattacatattgattgtctatgtcttttttctttatttattcttgtgtatgaaattgaa

SEQ ID NO: 522969 - DNA, 513 bp, Homo sapiens
  misc_feature (9)..(9): n is a, c, g, or t
  misc_feature (15)..(15): n is a, c, g, or t
  misc_feature (44)..(44): n is a, c, g, or t
  misc_feature (459)..(459): n is a, c, g, or t
  misc_feature (475)..(475): n is a, c, g, or t
tagatcagntatccnagaggatttttactcctccagtgccaagncaggcctacgtcccattaaactcagccaggaagtagttacggaaaacagatctccgccccttctgcagcccccttaagatttaaggaggagtatctaatctctgaaagggggaatgaggtaggaggtgggactcaactctggaagtggggctcaggcactcagaccaaactgagcactagctaaaataggtccagggcagatgctagtttccataggacacaccgacctgtgtcaagtcagttcaccatggctctggcagcacccagaagttaccaccctcaccctggaaatgtctgcataaactgccccttcgatttgcatataattaaaagtggatacaaataccactgcagaactgcctctgagctgctactgtgggcgcacacctgtagggcagccctgctttgcaagganagcgcctctgctgctntgtcacagccggccgcttcaataaaagttgctaacacc

SEQ ID NO: 522970 - DNA, 261 bp, Homo sapiens
gggtttgccgcacgggcgattaaagcgggcgatggcgatttgctgatcgccggtggcgtggagtcaatgtcacgggcaccgtttgttatgggcaaggcagccagtgcattttctcgtcaggctgagatgttcgataccactattggctggcgatttgtgaacccgctcatggctcagcaatttggaactgacagcatgccggaaacgcaggagaatgtagctgaactgttaaaaatctcacgagaagatcaagatagtttt

SEQ ID NO: 522971 - DNA, 403 bp, Homo sapiens
gatgaacaggcagccaaggattcagttgctgtgaccacaaccacacagtcatcctactatctttctccagacccagcatctgtccagcagccgatcctccaaaacaagttcagagctcacactgctgtcaccacatccactgctgctaccctagtcagggccgatctcgcctggttcctgtaacaaaactaagccaggtctcctggctgctgagctttgcccgctatgctctgctctcctgtagcagccagagtgtccctgctgagaacacaagtcagatccagtcacttctctactcatggcctttctgtgctgctcctgttgcactccagataaaagccagagccttcatggtgactagtgagctccccacaggctcctgacctctccccccacatcccgc

SEQ ID NO: 522972 - DNA, 133 bp, Homo sapiens
gcggccgcctactactactactactgctcgaattcaagcttctaacgatgtacggggacatgttcatacacctatcccccattctcctcctatccctcaaccccgacatcattaccgggttttcctcccaaaa

SEQ ID NO: 522973 - DNA, 928 bp, Homo sapiens
  misc_feature (65)..(65): n is a, c, g, or t
  misc_feature (115)..(115): n is a, c, g, or t
  misc_feature (154)..(154): n is a, c, g, or t
  misc_feature (180)..(180): n is a, c, g, or t
  misc_feature (184)..(189): n is a, c, g, or t
  misc_feature (192)..(192): n is a, c, g, or t
  misc_feature (215)..(216): n is a, c, g, or t
  misc_feature (233)..(234): n is a, c, g, or t
  misc_feature (239)..(239): n is a, c, g, or t
  misc_feature (251)..(255): n is a, c, g, or t
  misc_feature (272)..(272): n is a, c, g, or t
  misc_feature (311)..(312): n is a, c, g, or t
  misc_feature (316)..(316): n is a, c, g, or t
  misc_feature (318)..(318): n is a, c, g, or t
  misc_feature (327)..(327): n is a, c, g, or t
  misc_feature (337)..(337): n is a, c, g, or t
  misc_feature (344)..(344): n is a, c, g, or t
  misc_feature (382)..(382): n is a, c, g, or t
  misc_feature (386)..(386): n is a, c, g, or t
  misc_feature (395)..(395): n is a, c, g, or t
  misc_feature (398)..(398): n is a, c, g, or t
  misc_feature (422)..(423): n is a, c, g, or t
  misc_feature (428)..(428): n is a, c, g, or t
  misc_feature (433)..(433): n is a, c, g, or t
  misc_feature (444)..(444): n is a, c, g, or t
  misc_feature (446)..(446): n is a, c, g, or t
  misc_feature (453)..(453): n is a, c, g, or t
  misc_feature (455)..(455): n is a, c, g, or t
  misc_feature (472)..(472): n is a, c, g, or t
  misc_feature (478)..(478): n is a, c, g, or t
  misc_feature (482)..(482): n is a, c, g, or t
  misc_feature (487)..(487): n is a, c, g, or t
  misc_feature (495)..(495): n is a, c, g, or t
  misc_feature (499)..(499): n is a, c, g, or t
  misc_feature (511)..(511): n is a, c, g, or t
  misc_feature (515)..(515): n is a, c, g, or t
  misc_feature (519)..(519): n is a, c, g, or t
  misc_feature (523)..(523): n is a, c, g, or t
  misc_feature (532)..(532): n is a, c, g, or t
  misc_feature (536)..(536): n is a, c, g, or t
  misc_feature (539)..(539): n is a, c, g, or t
  misc_feature (557)..(557): n is a, c, g, or t
  misc_feature (581)..(581): n is a, c, g, or t
  misc_feature (587)..(587): n is a, c, g, or t
  misc_feature (589)..(589): n is a, c, g, or t
  misc_feature (709)..(709): n is a, c, g, or t
  misc_feature (713)..(713): n is a, c, g, or t
  misc_feature (724)..(724): n is a, c, g, or t
  misc_feature (728)..(728): n is a, c, g, or t
  misc_feature (836)..(836): n is a, c, g, or t
  misc_feature (838)..(838): n is a, c, g, or t
  misc_feature (853)..(853): n is a, c, g, or t
  misc_feature (861)..(862): n is a, c, g, or t
  misc_feature (922)..(922): n is a, c, g, or t
aaccttaagcaccgtatttgaattttagaatgtggcaatctatataacagtaaatatatgactgngattcttttctatcttctctaaacgccattcaattctctcctctctttanttgaatttgggaaacaaggtttgacaaagggatacaatntttaaagtctactagaagcacaaggnaaannnnnnccnccagggcacatcgacacgtttgnnctccccacccctttttnnctgangagccccaattnnnnnactagaggcgttatggnctattgtgaacacacatcttgggggtgggctcagatttnntttntnttctttttntttttttttnccttttntttttttgtttttttttttttttttttttttttttttnaganactgtgagngtncttaagtccaaagttcctgggaannttggntgtanaagagaagttncnatgcaancnaccccaatgggctcttngtgagnagcnggttnttttttcnttcnctccctcatgtntgcnggcntttntggggtctntggnatngcgtcgtatttggtagangaggagtggagagacgtcaggggngggggngngaaaatgtgtgttttctaggcctccagtggtctttcttctctttagatggtttaactgcaggtgagttgatctttctcttcctttggcgtgacggtgttgggatgtgctatgggtagaantctntgggggctctnaaanatcttgtctcagttcttcttggatggtcatctccagagcccaggtccatggcttctgggtagctggggaattcctgaggtaaagggaactcctctgctgaagagtgantncagtgcccgaacacnttttcctnnagctcagtgatgtcattgcggatgtcagccagcataagtagcaggaagtcgaaagaacanggggtc

SEQ ID NO: 522974 - DNA, 233 bp, Homo sapiens
cgtggggaacagtgggagtgagactgacccttcggtttgcatggtgagctgggatgaggcctgtgacgtgcatggcgtttccccgctagtttccactggacaaccgtgcagggcatcagcagaggctaggcataagtcttccgtaggttacacaagctcgcagggacctggggaatctcactccatatcccgctacagcaggccagcgagcgaagaccgcacccgaaaggagg

SEQ ID NO: 522975 - DNA, 234 bp, Homo sapiens
  misc_feature (1)..(2): n is a, c, g, or t
  misc_feature (186)..(186): n is a, c, g, or t
  misc_feature (215)..(215): n is a, c, g, or t
nnctatgtccagatgaggttagggctaagcatagtgggctatctaatccagtcggtcttagctattgtgtgttcagatatgttaaagccactttcgtagtctattttgtgtcaacttggagttttttacaactcaggtgagttttaggctttacttgggggagggaggtgctctacaaacactctnttacgccagttccctcatccttggggagngggtacccgaggctccgaa

SEQ ID NO: 522976 - DNA, 283 bp, Homo sapiens
gggggggtttttagaaaaaaggggtggggggaggggggggccccccccaagggggggggggaaggggctttcttcccgcccggccgccccccttttttgagaaccttttttggggggttccaaggggggggggttcaaaaaaaattgggccctgggggggggaggttttgtggtttgtttcggggttttttcggggggtttgggtttttttttttttttttggggggaccttgggggggcccccccacccccccccggggttttttaaaggggtttttcccca

SEQ ID NO: 522977 - DNA, 341 bp, Homo sapiens
aaaaaaaaaaacaccgccccccccacgcccggggcacccccctcgcggccctcccccgccccaccccgcgcgcgccgctcgctccctccccaccccgcgccctctctctctctctctcccccgctccccgtcctcccccctccccgggggagcgccgcgtgggggcggcggcggggggagaagggtcggggcggcaggggccggcggcggcccggcggcgggggcacggtcccccgcgaggggggcccgggcacccggggggccggcggcggcggcgactctggacgcgagccgggcccttcccgtggatcgccccagctgcggcgggcgtcgcggccgct

SEQ ID NO: 522978 - DNA, 923 bp, Homo sapiens
caatgaataaggagatgtatagaggccaagaaataatgtgtccttagtcagcagggtcatgcagtactctctaatgtcccatgtcgtcattaagcaaatcgttagtaaagcgtgggaggttgcctgtaatggttcctctagttattaagcaatgcgtggctaattagtataggagccctgtataggaagagcatgtgcagcagacccgagattaactataaatttctggaagatgagagtctgtagactgcctctcacattcgattctatctcacactatcgtatttccaagtctgcagggccttacagtgatgtcgtgacatggggagtggttacagtaagccccgcaagataggcgggaaaaggggaatgaatcttagcgtggccaatgattcgcagaaactagaagataaggtggccactgatagtgatgatgctcgtgcgccactggtttacaactgaaaagttctgggtcagagttagaaaagtcaattaggtggaggacctctgatagtaattgagaacagaatatgatgaggggagcagtcagaaatttgaagtgataaacctgtatatggtggtggagtatctggaggtttgttcttttcgtcttttatcaaactgggtgtgatcccgatggaatgcgctagtgtcacatgaacgctaggtagtaatgttgtgtgtatggtcggtgatgaatctctcttgtcttatataattccccccttttctataccattaccttcgttaaatctgctacccctaccgggaaagccaggggggggaaacgcgagctgccactaggggcggtcctggggtcacacgggcctgtatccagagaaagaacttggtttgccggtggctgaaagtggggacagcccatttgtgcaataaatctgggcggacacggtcgactggggtta

SEQ ID NO: 522979 - DNA, 356 bp, Homo sapiens
  misc_feature (24)..(24): n is a, c, g, or t
  misc_feature (63)..(64): n is a, c, g, or t
  misc_feature (91)..(91): n is a, c, g, or t
aaaaaaaaaaaaaaaaaaaaaaanaaaaaaaaaaaaaaaaaaaaaaaaaaaaaaaaaaaaaannaaaaaaaaaaaaaaaaaaaaaaaaaanaacagaaacacaaagaaaaaaaaaaaaaaaaaaaaaaaaaaaacgaacacacagtaatcccccctccccgggggagcgccgcgtgggggcggcggcggggggagaagggtcggggcggcaggggccggcggcggcccggcggcgggggcacggtcccccgcgaggggggcccgggcacccggggggccggcggcggcggcgactctggacgcgagccgggcccttcccgtggatcgccccagctgcggcgggcgtcgcggccgct

SEQ ID NO: 522980 - DNA, 1527 bp, Homo sapiens
agcggggtgcggacggcctggtggcctgagggtagcttgagcgcggtggcgggttgttcagtcagagcgagaacattccagagtgtctgcccatgtctcctgagcgctgacgggtgtggaccagctggacggtcgcttgggacagccccctccccgctgctcgtgccggctgggcaccttgtgccctggctgatccctcgccttggcgctttctggtctccgtcatcctccggaactctggacttctggtttatattgcggccgtcaagccttcattccccaatgtctcctgggtcgaagcatgttgttcgggtgtttgtcattgttcctttttattttttgacctgaagaaacgcggagggcttggttcggcaggcagagcccaattgtgggttaagcgcattgttacttcctgcgcgggaaacagccaagtaatgcagtaacgaaatgcagcagaaaggccttgtaagcaaggaggcttcaagggttgcgctgacacacaacctcgttgtcttccactttgtttccagtggatgcaactcgggagggaagacgcttccttgtggcagaggctccgggttttaagtttggtccaattcccgctttatccatgtccttcgccatggaaccatggacaagaataacgccagagagagacgcttttgcacagcttctacagagggacttccttctttttccagtccgtttagttttggagttacatgactgggcccgagcttaaagactaaaacggcgccaaacgagacattggtccttcgtcccacacttgtgttccgaaactccgtggcaagggctggttggtttcaaagagaagcccaatgggttacttaaagttccaggcttaacataaagaatttggccccacctgggtctgggaatttgggcccaacgtgggtctttgagacggggcgcccacaagtgatgcccaatcttgttgggcaacatttccacacgagaaccaaggttcaattaccggttcagcacacattcggggtttttggaccatgttttggccccaccaatgggtgctgtctcttaaaactcctggggtggccttcccaaaagcgggttaatttccaccaaccccaaagattactttttgtggggctctgtatgtaagccattgtgggagatcgaacgagaaccccccaagcttttggcacttggtcttacaaggcaaactgcaccgcgcgtcaccattgtggtcacactcgggcatccatccattgaatgcgcgcaaattacagcttgccacacgacccattgttgtgccctgtcgaatcccacttcaaccacacattctgggtcgctccgtgttgccgcggcacatgttgtgtacaacttcttgtaacaccggacacgcgcgatggtgcaaatgccgaccacaaaaccgacacgaacggcgggccacgtcgataaacagacacgttgctgctacactgcggccattgactgtgcgacccgcaccactacaaacccatttcgtgcctctaactatcccacgaa

SEQ ID NO: 522981 - DNA, 161 bp, Homo sapiens
  misc_feature (115)..(115): n is a, c, g, or t
cgagtcagttgcggagatctggggaatagctcttaatatttcaagttttggagcagtggttctaggtctgagtgaagtgaaaagaatctctaggggcatgtggtaacagataatnccatactatgtactgcgtagagttaaacgagaagaggcgagagcat

SEQ ID NO: 522982 - DNA, 592 bp, Homo sapiens
  misc_feature (330)..(331): n is a, c, g, or t
cccgttttgcgtattcatgggctcctgccctgggtctggtggtaggttcacatgtcagcaaccacgagctaatctcacctcacagttactctaatttctcgtgtctgtcaagtttcccaaggaggagttgttttcccaaatcagcctgtttctttttataatataagctgtttagaggccaggcacagtggctcacacctgtaatcccagcattttgggaggccaaggcgggcagatcacctgaggtcaggagttccaggccagcctagccaacatagtgaaaccccatccctaataaaaatacaaaaattaggtagggccaggtgcggnngtcacgcccataaccccaggactttgggaggccgaggtgggcagatcacctgaggtcaggagaccagcctggccaacatggcaaaaccctatttctagtaaaagtacaaaaattagctggtgtggtggtgcacgcctgtaatcccaactactcgggaggctgaggtgggagaatctctagaacccaggaaacagaggttgcagtgagccaagatcatgccactgcactccagcctgcgcaacagagtaagacactgtctca

SEQ ID NO: 522983 - DNA, 696 bp, Homo sapiens
  misc_feature (298)..(298): n is a, c, g, or t
  misc_feature (324)..(324): n is a, c, g, or t
  misc_feature (326)..(328): n is a, c, g, or t
  misc_feature (330)..(331): n is a, c, g, or t
  misc_feature (333)..(333): n is a, c, g, or t
  misc_feature (353)..(353): n is a, c, g, or t
  misc_feature (367)..(367): n is a, c, g, or t
  misc_feature (373)..(373): n is a, c, g, or t
  misc_feature (410)..(410): n is a, c, g, or t
  misc_feature (415)..(415): n is a, c, g, or t
  misc_feature (421)..(421): n is a, c, g, or t
cgggtgctttcccgccgcggactcggcggtgtgcttcgtgctgtagttatcgttagttcctcttcccgagatggggccgccgagagaccccagcgcctttgaaaagcaaggttgtgctgcgcttccagttccgaaaagcagatgtttaagcccttggactgagggtgggatcgcagctccgaagacggagaggagggaaatggggccctttcccctctattgcatccccctgcccgatccttccccgcacccacgtgccctagattcatggcagaaaatgaccaaatcctgtgtattngttttatatatttaataactgttttntnnngnntnttagtaaaaaaatacaaacnaaaaagattaaatngctatngctgtagtaagagaagctcttgtatctgaacatagtngtatngaaatntgtggtacaccaatcttctcctacaacacttcggggggagggcatgggaaggatctaaccaccgaatataatacgttaccggcttgacgatgaacctcttatgacaccctttgcccaacgttgactcgtatccagtggaccgtgggcctggtgcgcgccgcttcacctatctctgtacgttaactgctgggttctcccccgggcctattagcatacagagcatgcgtcccgttccgaggcacaaccataccacacacacagcacgctactacacg

SEQ ID NO: 522984 - DNA, 897 bp, Homo sapiens
tggcccacttagtcctcaagctcccaacctgctgtccctcaagccccgcttctaccagcctgtggagttcaggaggcgagacatcctggcctcctttgagaactgatgggatctaccccctgtccacgcgggacagtttctcagaactggttcatagaccacctgtgtcaccaacagccagatacctaatccctgagcctcctttgggaaggtctggggccgagggtctgggaattttttttttttttttttttggggacagagtctcattctgtcccccaggctaaagttgcaggggcattgactctgggcctccctgcaagcctccacctccggggttcaagcgattctcttggcctcagcctccgtggagtagctgggactacttgcgcacaccaccagcgtccggcataatttggggatttaaggtagagacggggtttcaccagtgttgtggccaggctgtggctctgtgaacctccgtgaccctcggtgatccacccgcctttagccttcccaaagtgtgctgggattacaggcgttgagccaccggtgcccggcccaggacttttaaaacaagcttcccaggggatctccggtgcctaccagaaagtcgcaagctgttgggctctggagggcgcctaggagatcggagtcgcctaagaggggataagggctctagggcaagctcctagccttccccaatatctcgtgcctaagacccctgggcccagttgcgtggggcacatgagcataacaccgtgaggcttccaagaaggtcgggtggccaacgggaacggaccttgtgagaaaccttccaaacgccgccagggtcccaagggcccgtgccgcacccgtgggggaacaaccaaggaagttctgttcccgacaagaccg

SEQ ID NO: 522985 - DNA, 205 bp, Homo sapiens
ctctcacggatccccacacttcgatcgcggagaaggccataggagttatgcaacacttcgactcgcggtagaagtgagagctacagcgcgacgctcgcttcatatttgatggagaatgatgcttgagtccttcttgatcgccatccgattagcccgaggagaactgagactctgcttttccaccgcagtgcgtggtcttctctcc

SEQ ID NO: 522986 - DNA, 485 bp, Homo sapiens
  misc_feature (298)..(298): n is a, c, g, or t
  misc_feature (324)..(324): n is a, c, g, or t
  misc_feature (326)..(328): n is a, c, g, or t
  misc_feature (330)..(331): n is a, c, g, or t
  misc_feature (333)..(333): n is a, c, g, or t
  misc_feature (353)..(353): n is a, c, g, or t
  misc_feature (367)..(367): n is a, c, g, or t
  misc_feature (373)..(373): n is a, c, g, or t
  misc_feature (410)..(410): n is a, c, g, or t
  misc_feature (415)..(415): n is a, c, g, or t
  misc_feature (421)..(421): n is a, c, g, or t
  misc_feature (445)..(446): n is a, c, g, or t
cgggtgctttcccgccgcggactcggcggtgtgcttcgtgctgtagttatcgttagttcctcttcccgagatggggccgccgagagaccccagcgcctttgaaaagcaaggttgtgctgcgcttccagttccgaaaagcagatgtttaagcccttggactgagggtgggatcgcagctccgaagacggagaggagggaaatggggccctttcccctctattgcatccccctgcccgatccttccccgcacccacgtgccctagattcatggcagaaaatgaccaaatcctgtgtattngttttatatatttaataactgttttntnnngnntnttagtaaaaaaatacaaacnaaaaagattaaatngctatngctgtagtaagagaagctcttgtatctgaacatagtngtatngaaatntgtggtttttaatttatttaaatnngggggcatggaaggattaacaccgatatattgttaccgc

SEQ ID NO: 522987 - DNA, 366 bp, Homo sapiens
tgttagagcaggaacgataggaaataaagtacacttggaggagggccaggtgggcatcttgagagagcaagtacacggttttgacctttgacttggggtttatatcttggcatgcttctgggggctgcgtcccttctcccctgattcttcccttggggtgggctgtccgcatgcgcagtggcctgccgacacttgggagggccgcgtgcacagtgtgcttactggagttgtgcggtgccctcttgaggcaatcttcccttacgagttcctaggggaaggtcacactctgggggaacttgtccgtggggctcttagggagcattctttacgggggtggccaacggggggggggtgggtaaagggggt

SEQ ID NO: 522988 - DNA, 206 bp, Homo sapiens
ccccattcgacgtatgattgctctctaccatcttttttattgctccatcgtcacatggcgctcatgcatcctgatctcccgctctcctcagttttttcagtgcgctcaccccccaaaggtgtctgtgaccctgccactccgagataaccagtggatgcccaggatcttatacggacaggcctctgtaataaaagagttttaacaaa

SEQ ID NO: 522989 - DNA, 203 bp, Homo sapiens
  misc_feature (6)..(6): n is a, c, g, or t
  misc_feature (12)..(12): n is a, c, g, or t
  misc_feature (156)..(156): n is a, c, g, or t
  misc_feature (162)..(162): n is a, c, g, or t
  misc_feature (201)..(201): n is a, c, g, or t
tcggcngttagnatgctactatgctgcttagttgtcctgacacattattttttcagtgttaatggtatgtcatatttttactgttaagtacttaatgtatgaataaatgtaagaaaacaattgcctattgttagcatgtagattaagagtcaggantgccgnctcttgttgacatgggtggctgagatagtgacacctttncc

SEQ ID NO: 522990 - DNA, 148 bp, Homo sapiens
agggcggcgaagctgtggtcttagatttatttttgcatattatcgatgctgtacaggtgctagctttgtaaacgctgtgtattccctctgcccccatgctgctggtgtaaataactgcatctccccggtacagctccccgggataaca

SEQ ID NO: 522991 - DNA, 155 bp, Homo sapiens
catggatttgctggtgcagtacaactaggcttaatagggacatggtggctcatgcctggaatccgagcactttgagagactgaggcagtaggatcgcttgagctcaggagtttgagagtagcctgggcaatatggtgagaccttgtttcttatca

SEQ ID NO: 522992 - DNA, 191 bp, Homo sapiens
cgtccttcatcatacctacccgtcccaagagaagaacaggtcccctgttctagaaacagagattctggttgagaagatcaccttgaaaggatccatgtcctccacagaaggaccccaatgcaaattcatgacagcaccccctctcctctcatctcctgttggtcatgcccaggtaggtatgatgaaggacg

SEQ ID NO: 522993 - DNA, 168 bp, Homo sapiens
tttacgacatacaccctgacctccagatgatctacctgcctggcctcccaaagtgctagggattacaggtgtgagccaccatgcctggcctcatatcattatataaataagggtaatattgactagtacctttaccaatttaggatgtctatattatcttccattatg

SEQ ID NO: 522994 - DNA, 216 bp, Homo sapiens
ggggaccgaggcctagtggtttgcctaccttttgaaatgacacctgtttctatcagctgacacacatcctcatgccagctggctgaatataatgatgttttttatacgagctgtcggctctccactcacccaacaatagaacatctgacgccgctgcgtagaatgcatttctatatcttaccctcacgggaacccggtatgctttcttgcccgttg

SEQ ID NO: 522995 - DNA, 162 bp, Homo sapiens
tcctttgcctgggttttaattccagcgctgccccttcctttttgcccctcctggcaagttttttttattccccccgtttaaaacgatggcccccccgtcccagggtggtgtgaggattacccagtgtggtaggtgctcaataaatgttggtcattgttttca

SEQ ID NO: 522996 - DNA, 162 bp, Homo sapiens
tgctctgtaggtcatgcatacttaatattatcttgtaattcaatacgggtgccgatgtaatagcgaggtgccgaatgtaatagcgtatgtgccgatgtaatagcgaggtgccgatgaatagcgtaggtgccgatgtaatagcgaggtgccgatgtaatagcg

SEQ ID NO: 522997 - DNA, 872 bp, Homo sapiens
gcggagtacaggagtcagactgtaggacgagctcgggtcccatgtgtccccggtagctcgccggccggagcccccgtgttcccggtggcggtgggaccttagcggagccacacacagcctactttgcaacgcggagctcatgtctggtaagctggcatttgcggctgcaaacggtggaagaaaacagggcacaaaagatgaggatgtgattcggagtgggtatcccctgtcaaagatgctcgagttgtgctctgtgatataagactggacagttgtggtgtggaacattgaatcgcctcgtaaccctggcctgagtttgaaatcattgctatgttcatcagaggggataagattcttgatacgtggcactctctaatgattggagagaatagtctgtttacaccaatggagcttgagacatggcgcctgtgacgagagaagtgagcgtggagctgtgtggtgcactccttgaaggaccttgcccactgtgcttcctcctgggttcatcgatcggagggcatctcgcaagcgggagaaccctcatgatgctgttgtcgtttcacccaataggtttgttcgtggaagaccctagaaacctgccagagaagagtgtggtgggaacgcgaggtccctgcgaagatgcaggccagttgagagaaagttcccgcatctggagttgaggagtattcggggaaactcgaaacccggttctggaagctggaggagcagcaggagttcagtgccatcatcctggcaacagctggctggaggcaatgggtgggcacaccgcgtgggggagatcctggccctgaggaattgatggtttctgtggccagggctggggtgtaatgggagcccagggccggcgcttg

SEQ ID NO: 522998 - DNA, 131 bp, Homo sapiens
aaagcacgccagatgttcacttatagacactacataagagtgtttcaaacctgctctgtgaaagggaatgttcagcactgtgacttcaattgaaacatcccatagaagtttctgagaatgcttctgtctag

SEQ ID NO: 522999 - DNA, 203 bp, Homo sapiens
ggggggggggggggttttccccttttttaaaacccccctttttttccctttggggccccgggccttttttccaaggggttccccctaatgttgggccctttggggagggtttttgggggggggcccccctaccctcccccggggattttttttggggggttttccaaggttttttggaaaaaaccctttttggccccccccga

SEQ ID NO: 523000 - DNA, 185 bp, Homo sapiens
cacgcacacactgctcggctgtaagcctgcagaagctttaaggacagcctcttcacatggaggacgggagcctactgcgagaagactacatcaatctgttcagcaccagtccattgctgcgattacccgtgaagctgcgacaagttaatcgagccctggccacacttgcacgacacctccttaat

SEQ ID NO: 523001 - DNA, 346 bp, Homo sapiens
cgggcagatcacttgaggtcaggaggttgagaccagcctgaccaacatggtgaaaccccatctctactaaaaatgcaaaaattagaaaggtgtggtggtatgcacctgtaatcccacctactaaaggaggccgaggcaggagaattgcttgaacctgggagtcggaggttgcagtgagccaagattgcgccactgaactccagcctgggtgacagaatgagactctgtctcaaaaaacaaaaacaacaaaaaatcaaagcctgtgcttcaatctgagtcttcaggcttggtttctcccagtactgtcactgggtccttaggaactttactgctcatacttaatcct

SEQ ID NO: 523002 - DNA, 203 bp, Homo sapiens
agtcgactggtactaggaatcatgggggaagtatgtagagagttgaagcttagtccgccgtcgtcggtgtactcgtcgagtacagtaccattggtggccacttgctttgatggtaagggagggctcgttgccctcgtctgttctgtccaggctgcgtagggatgggcagggcgcatgcaggcactcggatgatagagggccgg

SEQ ID NO: 523003 - DNA, 543 bp, Homo sapiens
  misc_feature (6)..(6): n is a, c, g, or t
  misc_feature (69)..(69): n is a, c, g, or t
  misc_feature (75)..(75): n is a, c, g, or t
  misc_feature (79)..(79): n is a, c, g, or t
  misc_feature (112)..(112): n is a, c, g, or t
  misc_feature (122)..(122): n is a, c, g, or t
  misc_feature (141)..(141): n is a, c, g, or t
  misc_feature (151)..(151): n is a, c, g, or t
  misc_feature (160)..(160): n is a, c, g, or t
  misc_feature (169)..(170): n is a, c, g, or t
  misc_feature (197)..(197): n is a, c, g, or t
  misc_feature (199)..(200): n is a, c, g, or t
  misc_feature (208)..(211): n is a, c, g, or t
  misc_feature (220)..(220): n is a, c, g, or t
  misc_feature (254)..(255): n is a, c, g, or t
  misc_feature (257)..(257): n is a, c, g, or t
  misc_feature (270)..(270): n is a, c, g, or t
  misc_feature (278)..(278): n is a, c, g, or t
  misc_feature (281)..(281): n is a, c, g, or t
  misc_feature (283)..(283): n is a, c, g, or t
  misc_feature (292)..(292): n is a, c, g, or t
  misc_feature (307)..(307): n is a, c, g, or t
  misc_feature (309)..(309): n is a, c, g, or t
  misc_feature (316)..(316): n is a, c, g, or t
  misc_feature (323)..(323): n is a, c, g, or t
  misc_feature (334)..(334): n is a, c, g, or t
  misc_feature (338)..(338): n is a, c, g, or t
  misc_feature (415)..(415): n is a, c, g, or t
  misc_feature (458)..(458): n is a, c, g, or t
  misc_feature (467)..(467): n is a, c, g, or t
  misc_feature (537)..(537): n is a, c, g, or t
taattngcataagatgctatttattaagaggtatatggtctgggtgttaacagttgctgaggtttggtntttttntgcngcattttctttttgctttgataacactacagancccttatggnctctgatattttgtttgtnttgttccggncccttggcngctccctcnnatctcttcattatcactatagttattngnncgtttaannnnagtgttganatctgcccttgttttgtccgctcctgtttgggtnngngtgctttgggtcngacagggnaancncagctttgngtttctttgtgctgntnggggggnaggctgncttaccttgtngccnctccctgatggttggcggtcaggtaaatgccagaacatattccttctccccactctaggtcactttatggaggtggnagctgggttagttcatgctaggtggctgtagcactgacctcangtataaaangcaaaacacttaaatactgtgatctaggtcttaattgcaagctatactgaggaattttttttttttaagntttggc

SEQ ID NO: 523004 - DNA, 392 bp, Homo sapiens
  misc_feature (55)..(55): n is a, c, g, or t
atggaattattacaagcacaagacagttttacttcaaatttgccacaaagggaangcaatttcaatattctctcagtaaaggcataaataaagtgttccaactaagaaatatctattcataaggctcatcagtagcttcagggtcagctcagctgaatgagtagccagtcctaggagttcttaatcccaggttagtaagaaaattgctcaagcatttcagcagggatgctacttacttcccagagggggctataattacatcacaaaaagtcctgtcccagaccaaatttggaacactcttcctctctctctctttttctgggtattcaatcttctgggaagtcaaacgtagctgaaaagagtgttccttcacagcttactaggagtaaaac

SEQ ID NO: 523005 - DNA, 120 bp, Homo sapiens
  misc_feature (80)..(80): n is a, c, g, or t
acggggatgaccggggataaggaataaataagcacattgaatctaagctccacagtccatttttttaaaaaatatctcangggtcagtggtttctcgtcaaccccgtgcatcttttctga

SEQ ID NO: 523006 - DNA, 193 bp, Homo sapiens
  misc_feature (157)..(157): n is a, c, g, or t
  misc_feature (171)..(171): n is a, c, g, or t
  misc_feature (176)..(176): n is a, c, g, or t
cctgtgagccgccagcatggatgacatctacaaggctgcggtagagcagctgacagaagagcagaaaaatgagttcaaggcagccttcgacatcttcgtgctgggcgctgaggatggctgcatcagcaccaaggagctgggcaaggtgatgaggatnctggccagaccccnccctnaggagcttcagagatat

SEQ ID NO: 523007 - DNA, 262 bp, Homo sapiens
  misc_feature (30)..(30): n is a, c, g, or t
acggtagatttgcccacatttactcttganttaaaagcaagaaataggcaggagtggtggctcatgtctgtaatcccagcactttgggaggctaggcgggcagatcatctgaggtcgggagttcgagaccatcctgaccaaaatggagaaacccccgtctttaaaaaaatacaaaattagccgggtttggtggcgcatgcctgtaatctcagctacttgggaggctgaagcaggagaatcacttgaacccgggaggcggagg

SEQ ID NO: 523008 - DNA, 100 bp, Homo sapiens
ataagtgtatgtgtagacttgggtctcctcctccggcggggtcgaagaaggtggtgtagaggaagaagcctgtgagtagtatagtgatgccagcagctag

SEQ ID NO: 523009 - DNA, 255 bp, Homo sapiens
  misc_feature (73)..(73): n is a, c, g, or t
  misc_feature (132)..(132): n is a, c, g, or t
  misc_feature (134)..(134): n is a, c, g, or t
  misc_feature (165)..(165): n is a, c, g, or t
  misc_feature (182)..(182): n is a, c, g, or t
  misc_feature (208)..(208): n is a, c, g, or t
  misc_feature (234)..(234): n is a, c, g, or t
cccgtcccgcctctcgtcgggcgctacccagatctgcttgagtctatggaggaaaaactccgcggggtccganttcccatggccgcagccgcctgcgcacaaaggccatggcctcttcaagcgcaccttggngngaagtcccgccgcggccccaggggccgggcnaggcaccgccccgcggnttgcttgcttgcctcctgccgcctgncctgcaaggactggcctcggggaganggcggcaggctgtggagccgc

SEQ ID NO: 523010 - DNA, 746 bp, Homo sapiens
ggagatgccaaatggtcaggcaaagcgagctttatgaagcctatcttcctgagacctttcggcgacctcagatagacccagctgttgacggattgtattcgagacaaatatgagaagaagaaatacatggaccgaagtctggacatcaatgcctttacggaaagaaaaagatgacaagtggaaaagagggagcgaagccagttccagaacaacgaaattggaacctgttgtctttgagaaggtgacaaatgccactagaacaaaagaagacccaccagctacctcggcaaacagctccccgaaatccacagcgcctgtcacggcatccgtcggggcctctgatgctcctgttggcctgctccattggcacatagtacagaccagcaatagcctacagaacgcatcagatctgtcggcctctgttccatccccttcttcttcgggtcccagcaaaggtcgaaggttccatgccaactgtcagggagtgccggctctgttcctgacaaatctgaacctgttcccgggagccagggcagccacacccgacgcaaatacggcaagaaaccagctctctacagactccacttctttcactggtatggatcccagacgcctcaaaatgcctaactcaaagcacatgtcccatcggcactcccggctcaagcatggcatattcccaaaggcataacccaagcttaccccggggataacacctcctaaccagcataactgcggacgcatgaatg

SEQ ID NO: 523011 - DNA, 144 bp, Homo sapiens
  misc_feature (115)..(115): n is a, c, g, or t
  misc_feature (139)..(139): n is a, c, g, or t
cagtaagccaattcattgagcccctggttttgagagcttgttatgttgaacactgggttaggctggaggacaggttcaaaaaaacaaaccatgtctgcccctgaggagctcacangtacagggtttctactgctgtcanttgtg

SEQ ID NO: 523012 - DNA, 132 bp, Homo sapiens
gtccatcccttcacagcccaaaaaaaaaccacaatttttactcttttctatgtaaaatatgggttttaagtcatgtatggtttatgaactaaacgttctgtactaaaaaatatttaacatagaaaaagagta

SEQ ID NO: 523013 - DNA, 102 bp, Homo sapiens
ttagaacgtaactgggattgtctccagtactgcagaatgtgagagtcagaaacatataatgcaagccaagctggatgcaatagagacccaggcctatcaact

SEQ ID NO: 523014 - DNA, 455 bp, Homo sapiens
ggtgcgggtgatctagaggatcccggtgtcatcgaggccacatgtggcattatctaaaatggatcacataacgggaagtaaaacactcctcagtaaatgtaaaagaagtaaaatcataacagtctatcagaccacagcacaatcaaattagaactcaagactaagacattcactcaaaaccacacaactacatggaaactgaacaaccggctcctgaatgactctggggtaaataacaaaattaaggcagaaatcaagaagttattggaaagtaatgagaacaaagagacaaggtaccacaatctcggggacacagctaaagtagtgttaagacagaaattcatagcactaaatgaacacatcagaaagctagaaagatttcaagttaaccacctaacatctcaatttaaaaaattagagaggttagggggcatcgataaacaccgggtaccgag

SEQ ID NO: 523015 - DNA, 165 bp, Homo sapiens
gacagccaatgtccggcgaatttctcggcatcacaggtaacacctcgacatccctgcggttccaagcctattcctcctggccatcacctaaactccctcgagggctggggcattcacaggtccctcataagtccacctccactcctcccctcctttgcccaccga

SEQ ID NO: 523016 - DNA, 120 bp, Homo sapiens
cttttacacatgaactctaaacaaccattgtctctgcagaagcatcaagatccaagcaagcaagctttagcagggaaggtcacttcaccatcaacattcatgcctcagatggctttgtga

SEQ ID NO: 523017 - DNA, 298 bp, Homo sapiens
gggttctctaccgtccagtatcactaatagtaacatggcggtacagggttggtagcctaggagcagtagaccggtatagagcctgggggttgtcataggctataccatctaggtttatggtaagtccagccaagggatgttcacacaagggatgaaatgggcctaacataacacggcatttgtcaggacataaccccatttttaagtgacacacgactctctatatgtatgctggtcctataatgggcggtacaaaaaatggaggtctatatacttccggagcgggtcagtcctaagg

SEQ ID NO: 523018 - DNA, 129 bp, Homo sapiens
tattaaatagcgatggatcaggctatccattgtagagaataatattggtaaataagataaattcaatttcttttctggaacaaaaattgaaagaagataagagaattaaaattataacaagtaaggcag

SEQ ID NO: 523019 - DNA, 122 bp, Homo sapiens
tctagaggatcccggtcaattgtctacactattcagcattggacagatatccggacagaaaatcaacaaagaaacatcagacttaatctgcactacagagatacaataagtgtttgtgatag

SEQ ID NO: 523020 - DNA, 828 bp, Homo sapiens
agaacttaaaaaggcagtcccttcctgggaaggtacttctgacttcagggacaaagcatcagtggaaccaatccagaaaagttttctcagtgtccaggccttcttatgtacaaccaaaagatggcagctggtgtttatcttttcccttcaaggccaggggttagcagctttatagataaggccagtcctgatcataaacccaatgcattgtacatagcagtccagttagcctgtcccttcctgccttaaatcctgatgcatgcttctcttccttactaatcaatgtccttgtagcttttttttcccagaagaggacactttcatctgcactgaaaacctgttcaggcaggtatcctttctcctcagtgattttcttaatggcatccgggaactcacctgctgcctcttggtcagcagaagctgcttctcctgttatcttgacagtttttaagccaaaccacttttaaaaattatcaaaccatcctttactggcattaaattctccagctttagatgcttcaccttcctttgctttaagtgtcatataatgacttgctttttctcaaatcatattagagtctacagatatgcctttcttacagcaatcctgcacccacataaaagctacattttcaatacaagattaaaaaggtattctgcaaaaatgtgcaaggttttcatgtctgctggtgtagctgtagtgatggcttcatgaatttctttcctttttgggactatggtccttacgctggattcatttatcttgaactggtgaacaatcaccagctgcagaccctcaattttatggtaccatatccaggcaattgg

SEQ ID NO: 523021 - DNA, 941 bp, Homo sapiens
  misc_feature (118)..(118): n is a, c, g, or t
  misc_feature (124)..(125): n is a, c, g, or t
  misc_feature (128)..(128): n is a, c, g, or t
  misc_feature (132)..(132): n is a, c, g, or t
  misc_feature (140)..(140): n is a, c, g, or t
  misc_feature (142)..(142): n is a, c, g, or t
  misc_feature (146)..(146): n is a, c, g, or t
  misc_feature (150)..(150): n is a, c, g, or t
  misc_feature (154)..(154): n is a, c, g, or t
  misc_feature (157)..(157): n is a, c, g, or t
  misc_feature (165)..(165): n is a, c, g, or t
  misc_feature (176)..(177): n is a, c, g, or t
  misc_feature (179)..(179): n is a, c, g, or t
  misc_feature (191)..(191): n is a, c, g, or t
  misc_feature (193)..(193): n is a, c, g, or t
  misc_feature (195)..(195): n is a, c, g, or t
  misc_feature (202)..(202): n is a, c, g, or t
  misc_feature (213)..(213): n is a, c, g, or t
  misc_feature (221)..(221): n is a, c, g, or t
  misc_feature (223)..(224): n is a, c, g, or t
  misc_feature (227)..(228): n is a, c, g, or t
  misc_feature (230)..(230): n is a, c, g, or t
  misc_feature (269)..(269): n is a, c, g, or t
  misc_feature (273)..(273): n is a, c, g, or t
  misc_feature (307)..(307): n is a, c, g, or t
  misc_feature (690)..(690): n is a, c, g, or t
cggcggatctaattttatttacaagtatacatttaacacaatgaagtaaacactgatatactgaagcctaattaggagtggggggacaatatacatcattttggggattacattattntaaacnncanactncactgaananttantgcngatnaanttcttggncataatattannanatacaatatatnantngagaatntgattgcttanaatttganannggnngngaactcatttggacagactcagagttaacataatctgangggnggggagctctgacccaaatgatatctttcaggtnaacagaagaaaaaagaagcatagtttatcttcaaggagaacgggcagtttgcttcttcaggtagaatatattcccagtgtcctcaggctttgcagcagaatcacatcaccgagcatgaagacttgccttgtgaagctgccccgtccattttttttgcctccaaaattatccttcgaaaaacatccacagcagtctgattttctttagcagaagattccaaaaaaagctgcattccaagattctgccaaagctttcccttcttcataactgatcacctgtggcggggggtaattaaagagagcactgggagctaaggtcgagaactgggggtcaaaggcctggcgggggtagcgatgaaactggagagggccctatgggaaaanaatggtgggggtccacggggggttgtcgggtgggggggaagacgttttagggatttagaggggggtctgggactaaggcagaccagggagggagggggggtgggggagggggaggtgggggggggtgggagagagaggggggagggtggagggggcggggggagggggagggggccggtgcacggtgggggagcgcgaaggggggggggaggggagggcgggggagggcgaggagggagggtggcggaagg

SEQ ID NO: 523022 - DNA, 944 bp, Homo sapiens
  misc_feature (121)..(121): n is a, c, g, or t
  misc_feature (127)..(128): n is a, c, g, or t
  misc_feature (131)..(131): n is a, c, g, or t
  misc_feature (135)..(135): n is a, c, g, or t
  misc_feature (143)..(143): n is a, c, g, or t
  misc_feature (145)..(145): n is a, c, g, or t
  misc_feature (149)..(149): n is a, c, g, or t
  misc_feature (153)..(153): n is a, c, g, or t
  misc_feature (157)..(157): n is a, c, g, or t
  misc_feature (160)..(160): n is a, c, g, or t
  misc_feature (168)..(168): n is a, c, g, or t
  misc_feature (179)..(180): n is a, c, g, or t
  misc_feature (182)..(182): n is a, c, g, or t
  misc_feature (194)..(194): n is a, c, g, or t
  misc_feature (196)..(196): n is a, c, g, or t
  misc_feature (198)..(198): n is a, c, g, or t
  misc_feature (205)..(205): n is a, c, g, or t
  misc_feature (216)..(216): n is a, c, g, or t
  misc_feature (224)..(224): n is a, c, g, or t
  misc_feature (226)..(227): n is a, c, g, or t
  misc_feature (230)..(231): n is a, c, g, or t
  misc_feature (233)..(233): n is a, c, g, or t
  misc_feature (272)..(272): n is a, c, g, or t
  misc_feature (276)..(276): n is a, c, g, or t
  misc_feature (310)..(310): n is a, c, g, or t
  misc_feature (693)..(693): n is a, c, g, or t
cggccgcatatctattctctttacaagcctacgttgcaccacaatgacatcaacgctgacgtagtgaagcctgatgcatacgatcgaaaccttatgcatcattgcgatgatggccttattntaaacnncanactncactgaananttantgcngatnaanttcttggncataatattannanatacaatatatnantngagaatntgattgcttanaatttganannggnngngaactcatttggacagactcagagttaacataatctgangggnggggagctctgacccaaatgatatctttcaggtnaacagaagaaaaaagaagcatagtttatcttcaaggagaacgggcagtttgcttcttcaggtagaatatattcccagtgtcctcaggctttgcagcagaatcacatcaccgagcatgaagacttgccttgtgaagctgccccgtccattttttttgcctccaaaattatccttcgaaaaacatccacagcagtctgattttctttagcagaagattccaaaaaaagctgcattccaagattctgccaaagctttcccttcttcataactgatcacctgtggcggggggtaattaaagagagcactgggagctaaggtcgagaactgggggtcaaaggcctggcgggggtagcgatgaaactggagagggccctatgggaaaanaatggtgggggtccacggggggttgtcgggtgggggggaagacgttttagggatttagaggggggtctgggactaaggcagaccagggagggagggggggtgggggagggggaggtgggggggggtgggagagagaggggggagggtggagggggcggggggagggggagggggccggtgcacggtgggggagcgcgaaggggggggggaggggagggcgggggagggcgaggagggagggtggcggaagg

SEQ ID NO: 523023 - DNA, 935 bp, Homo sapiens
ggcgtccgagggagcgcgcgacgggccacgccacgtcctggggcgtcaacatcttcggtggccagcttccgtccgagcgtgattgggtggtgtggggcagcctattcaggcagggtgtgcaaccaatctatatctgaggaccagaagccattgttgagggcaccagatgacttgtgagctctcccatctccatccagctgggtccagggtgccactctcatgcactcacctcgagcaggctgacatcatcaagcacgacttgggaacctggaagcaggtctggagaacctttccctgagtacatggagctgttggggccgaatgctggtggcgccctccttgtctggcccatgtggcaggatgtgggaatgtacccgcgaggctagtggccgttcagcgtcatgggcaatcccaaactacctctggcatgggttatccaagtgccatagaacatgggtcagacgcactggtacctgaggagctctttcgacgcaagaagggggctattcgcttgagggtcctcgggaaatccgagttgcagattaccattcagtggccgtcaatgtccctttgtcacgtcgcaacaccaccagttgtcaagaaggcctgaagggccccgcgcaactttgggaagccgcagacgccatggatcctctcttcaggctaaactaacagtgatggtattaccggggcacgcgtgagcgtaggccggatcgaagtgggccggacgcgaactgcccgacgttagcagcttaacaagtccccttttgggacacgacagctggcagaactttcgcagtgagggtcgctcaagcgcctaacggactgcgtgcacaccccaagtatgtactattccccggagagcccgtgaaatccaggacgcgaattgcgctcgagttgtgcgtgcctggacaagaccgtgtgggcccccaacg

SEQ ID NO: 523024 - DNA, 1319 bp, Homo sapiens
  misc_feature (1)..(1): n is a, c, g, or t
ngttatagatccttcttcatatctcgctgccttcccccctggtgaggaagatgataagtactcctgtgtggggagaggatgtcgctcaccaccccagcgagaagatgttgcgaattagtaaatttcttgatgaggagctcccctcaactctaaagattcccccaggacgaaaatgttgggggagcaaccccaggagattaaatggtgcatccaaccaggaaaataagtgggctgttaaataaggagttttggttctccgttctttgttgaaagttgcgcctccggaagttggaaattagccttgggggagattttctacgaagggaaaatgtgtttgtcacacctgtaagaacccttggggaaatgttgcccttcttcctgtgcccccacactttcgtggacagtctttggttaatatgacctcttccgcaatttttggcctgtcacccccgtatgtttccccccccctgtagtctttcgcgggaaagaatagaccacatttccccaaaggggccccccccccgctggaaactcccctcgtgaaacccctccccgaccacgttgtcgccaaaccctctttaaagccccctcgtttgttttttcccacataaataatagtattgaccctcatgtagttataagatatagaaaatggtaatataaatgtatgagccacataggccccacgaggagctttatattataagtaaaatggtaaatatggagacacaacatgagtgaacccactagcctatgtataatataaaaagtttaatgtgtgagaaatattgcgtttggggtactttcatccttggctttgccacacaaatatttctctcgctgtgtgtacacacgctatactccacacctcatcatggtttatgagagatgttgtggtgtgagacatacacacggtgataaccccacaagacgcaccaccgagataagcggagaacactcttggaatagaagcggggggcacactacctcgtatactctataggagaatatcacacctcaatattaccacataatgagattttatatttttatagaccccactatatttaataatttgggtattcttacctcaaatatatctttgtatataaagcccacttttttgtgtccacttaacctgagctcttttgttttattgtataagtaatttaacaccacccactataaagggtataaattgcttcccccaaccaccacctctttaatccaaaacctagaatcatctgccgtccttgttaaaaatgcaggtttttaggaccctctgaagttctgattaaataaatttattgccaacccca

SEQ ID NO: 523025 - DNA, 449 bp, Homo sapiens
taaagcagtcgtgagtggtaaaacctggcggggcatttggcgaaaccctgtcttacaaaaaaaatacaaaaattagccaggcatggtggtgcagcgctctgtagtcccagcctctagggaggctgaggcaggataattgcttgagcccacgaggtggatgttcgcagctgagttgagattgcttcactgcactccagcctgggtggcagagtgagactctgtctcgcaaaaaataaaatacacaagaaaataaaaaaaggccaggagtagtggctcacgcctgtcatcccggcaatttgggaggccgaggtggtggatcacttaaggtcaggcagtttgcgaccagtgaggccaacatggtgaaactccatctctgcaaaaaaatgcagaaaattagctgggcgtcgtgcctagttcctgggttgcttgcaactcaggatgcttcttga

SEQ ID NO: 523026 - DNA, 685 bp, Homo sapiens
  misc_feature (58)..(58): n is a, c, g, or t
  misc_feature (80)..(80): n is a, c, g, or t
  misc_feature (130)..(131): n is a, c, g, or t
  misc_feature (144)..(144): n is a, c, g, or t
  misc_feature (154)..(154): n is a, c, g, or t
  misc_feature (165)..(165): n is a, c, g, or t
  misc_feature (169)..(169): n is a, c, g, or t
  misc_feature (210)..(210): n is a, c, g, or t
  misc_feature (225)..(225): n is a, c, g, or t
  misc_feature (227)..(227): n is a, c, g, or t
  misc_feature (274)..(274): n is a, c, g, or t
  misc_feature (302)..(302): n is a, c, g, or t
  misc_feature (308)..(308): n is a, c, g, or t
  misc_feature (311)..(311): n is a, c, g, or t
  misc_feature (313)..(313): n is a, c, g, or t
  misc_feature (322)..(322): n is a, c, g, or t
  misc_feature (327)..(329): n is a, c, g, or t
  misc_feature (340)..(340): n is a, c, g, or t
  misc_feature (344)..(344): n is a, c, g, or t
  misc_feature (370)..(370): n is a, c, g, or t
  misc_feature (372)..(372): n is a, c, g, or t
  misc_feature (386)..(386): n is a, c, g, or t
  misc_feature (389)..(389): n is a, c, g, or t
  misc_feature (400)..(400): n is a, c, g, or t
  misc_feature (418)..(418): n is a, c, g, or t
  misc_feature (422)..(422): n is a, c, g, or t
  misc_feature (437)..(437): n is a, c, g, or t
  misc_feature (659)..(659): n is a, c, g, or t
gcttgtgaagagggaactaaaacatgagggcatctaaggggcattcatgggagaggcngctgacagcacaaacaaaaagnggatggtcagtatggatagagcaaggtgactaagagaaagagtaataaannacaaggccagagnggtttaagangtggtgtgggnaggnagatcattacagggtcttaaaaggccttataggtaattgcngaggtaaagattttnanacaaccattatcacatttctaacttcagttatcttaaaatgatggcngctgttcttgtctttgtttcccagtttnaactgngcncnctgttattntaagnnnacaaaaatttnaagnatcagatatatattctatcacccccncnggctccattttgcngcnttgtgtttggngggcattaggtaggtgtnaggnagtgggtataggggngggtcaagtaatagttatagtggtcattatatctcttaatgcactcatattcttttaacatttttaaatggccaaaacagctacttttaatttgctcagaatataaaccacaaatttttaaaaatgaagagcttccaaaataaaatacattttttcagaaaatagtattttcaaatttaaattagaataaagtacttcaaatgattcatattaatgtagganaaaatgtagaacttaataaagaaagc

SEQ ID NO: 523027 - DNA, 440 bp, Homo sapiens
gactccgacactctttccttatcatgcctcataggcccacacacattctaggctgagaccttgttagccaaagtcaaagcttctatcaccttttcttgcccccttcaagcagagtcccctcctgctcctctccgctagtccggcccctgagccctttccccagtacccacttcctgcctctctcattaacccttccgtagctgctcaccatgaccccatcagaatccagttaaaagactcttccaaatttcccaacgttcctcaataccccatctctctaacccaccaaaagggcctacagcccatcgtaaacaagctctggtcatgcagtcttcttagaccaacacactctccatataacacccctatcctccctgttaaaaagtctgatggctcataccgactcgttcacaaactccaagccatcagtcaagctgtcc

SEQ ID NO: 523028 - DNA, 1398 bp, Homo sapiens
  misc_feature (812)..(812): n is a, c, g, or t
  misc_feature (873)..(873): n is a, c, g, or t
  misc_feature (1103)..(1103): n is a, c, g, or t
atttctcctctctctacaggggggggctttcacataggtatatatccttttcgcgtcttgtttgtagagattttcctcgtgtggggggcttaacaacaaaatgcgtagcgtggggagagctcttatataaacacctgtgggtggctccaacgaccgcctttttttctcccccgcccaaacagaaagattattgtggggggagttttttagttcccacctgccgcctcctcggggggggtttttttgttcgtggctaggaagagtttttttggggggggacccacctcctcttcgcaaataattgttgggtgctccactcctcccccgccgcgtaaaagaacgcggtgtgttttctataaaaccccggggagcgtcctctaccccgcacagagagttgcgcgtttatcagcccacattgtgtgtcctcgtcgcacaaatcaggggggtgatattatatgttggaggagagaagattaattagaggaaaatatatttgtgcccggcccctcctcctcgggcccacaacatgggcgcgcaacccagctccctctacactgcgcgagctatagcggctctctctcgcggcgaacaactctcgtgagaaatatagagccccgcctcctctcgacgacgatagagagagaaaatagtggtgtctcctcctcagaagagagctcgtgagatgtgtctgctgagagattctcacgcggcaccctgctgcgagatgtgtgtggagagagacactctttgtgtgtgcctcgcgagagttgtgtgggagcaccctctgcgtgagtgttgaagagaggtttganacactctgtgtgctctccctctctgcgcgtgagttatacacgctgtgttcacacagcgcgnctgctgagagtagtgtgtttctactgggagtattatctctctcagcagagagagctctggggcacacagagaccacacactctggtgtgtgtgtgtgtgtctctgctcccggcgtgtctctctctcacaggcgtgtgtgagagataagtagtccacacacccgcctggagagagagacccacagctgtgtgtcctctcttctatatagagctgagagagatgtctcttgnggcgcacgagacacacccctgcgcgggtgtgtgatatactctcgtctgttggagagtttgggagaaccggtgtgtgcacatttatcgccccggaaaaggatattcactttttaaatttatatgtataaggtgttttttgtggaaccccacattttcgagattttttgaaagagagagatgaccacacccacaattttggttttttacctggttataggggggcaccctaggcccccccccaccccgcccttggtgtaagggaaaaaaaaaaggcctccccgaaccccaaaaaaaa

SEQ ID NO: 523029 - DNA, 317 bp, Homo sapiens
  misc_feature (116)..(116): n is a, c, g, or t
atgaggtgtggtgtggtgtggtgtggtgtgtggtgtggtgtggtgtgatgtggtgtggtgtggtatggtgtgtggtgtggtgtggtgtgtggtgtggtgtgctgtgctgatgatgntgaggtcatgagcatgggataggaaggatgttgtgctgatgatgctgaggtcctgagcatgggataggaatgatgctgtgctgatgatgctgaggtcctgagcatgggataggaaggatgttgtgctgatgatgctgaggtcctgagcatgggataggaatgatgctgtgctgatgatgctgaggtcctgagcgtcgacgc

SEQ ID NO: 523030 - DNA, 769 bp, Homo sapiens
atggcacatgcagcgcaagtaggtctacaagacgctacttcccctatcatagaagagcttatcacctttcatgatcacgccctcgataatcattttccttatctgcttcctagctcctgtatgcccttttcctaacactcacaacaaaactaatctaatactaatcatctcagtacgctcaggtaaatagaagaccgtctgaacctatcctgcccgccatcgatccgtaggtcctcatcgccctcccatccctacgcatcctttacataacagacgaggtcaatcgatcccttcccattgaccatcgaaatcatattgggtcatcggcaatgtgtactgaatcgctacgagtacaccgactacggtcggactaatcgttcaactcctacatacttcccccattatgcctagaaccaggcgacctgcgactccttgacgttgacaatcgagtagtactcccgattgaagcccccattcgtataataacttacatcacaagacgtcttgcatctgcatgagctgtcccctacattaggcttaatagatactagatgctatttcccggacgtctaaatcagaggcactttcaccgtgtacacgaccgggggtatactacgtgtcaagtgctctgaaatctgtggagcaaaccacagtttcatgcccatcgtgctagaattaattcccctaaaaatctttgaaataggggcccgtatttaccctatagcaccccatctagcccctctagagccaaaaaaacattgaatacgta

SEQ ID NO: 523031 - DNA, 423 bp, Homo sapiens
gaccaagctggcaggatactgtgtgggtatgtgtctgaatggagtgctgtgtgtgtgtgtgattccagctggctggggtacgagtgtgtgtgtatgtgtctggatagggaactagtgtgtgtgtgtgtccggacagctggggaactgtgtgtgtgtgtgtgcgctcagaaggcgagtggtgtgagtgtgtgtgtgggtgttcagtactgttatgtagtaccgtatgtatgtgtgtgaacaatatgattagattgtgtgtttgtagtgtgtagtgtaagtgtaaagggctggagaaatgtgagagatcagccccatgatctaagtcacaggtgtccactggctcatgaatcgactatattctaaccaaccactcaaatctgtctcatcgaaaagtagtctgggtccgggaggcttgggtgtgtc

SEQ ID NO: 523032 - DNA, 166 bp, Homo sapiens
tggggggccctgggcctttttcccccttttttttattttccaaatttaaattggggtttcccttgtggggaccaaaggttaagcccccccccctggtgggggggttggttttgggtgccatgtggccccccgaaactgccttttattaatggaagggccggcttga

SEQ ID NO: 523033 - DNA, 242 bp, Homo sapiens
tagtgctgggattccaggtgtgagccacagacccagacctggataacttttatcattggtctgaactttttccatagaagtaaaaggtttttaaagggctcacagtatttttgatggctccaaagctccatgttctaccacctgtgtttgggtctacagaactccacctcaaacccctggacagaaatctgtcttcagcagttggttacaaagctaataccctggtagcttagaaaatagat

SEQ ID NO: 523034 - DNA, 268 bp, Homo sapiens
  misc_feature (120)..(120): n is a, c, g, or t
cttcggcctgggtttaggtgtctctaatcgccctcacctgcacttgtgccatcgcacactcaaggcttaggggttgaggaaggagtgctggaagggcccagaaggcagagcactggtgtntgcactatcaggttcaaagcccagaaaggccaggcatggagtggctcacgcctgtaaatcccaacgctttggggtctggaggattgcttgaggccaagagtttgagaccagcctgggccaacatggtgagcccctacctctattaaaa

SEQ ID NO: 523035 - DNA, 415 bp, Homo sapiens
ctgttcatggtttgagacatctaaaacaaaatttaaaaagagaaaagcatacagatgtatttaatataggtatatacaagaacatgggaagtctatcataaggaaattaagatagtaaagaaatagttaaacctatagatattttatgcgaggtttgatgacaagtagacagggagaaattgacagggcgggaaacagtataatctaatggtaataaactagagaaaacttggcaaggcttgtttattcagattatatctactgtgacccttacatcttacagggataaggaatattccttatcctctcggtataagggagggcacctctcacatgagggtcttatgacttgtttcagggcaaggtcagaaaatccttcttaggttttatagatctgcttcaggggaagaagagt

SEQ ID NO: 523036 - DNA, 184 bp, Homo sapiens
ctttttgggggaaaatttttcgcccttgtggttggaggcccgaggccttttggaatttttgttaccctgttcaaagcccggaaggagactgccccgtttttaaagccccgcccgtcaggtccgggtttgggtttccctttttcccgcctgggtaagcttttataattaaaatggttttccggga

SEQ ID NO: 523037 - DNA, 1286 bp, Homo sapiens
gcgacggcgactacagctctccaggtcaagtggtcagcaaggaggggggtcctgtagaccggcggctggcaggatggtagtggttgcagcggtagagaaatggaaacctccacagggcacgagacatcctatctaagatgtgagaacgtgtgcatgagctaccagtacagcacaaaggcgtggcgagcgttgcactcccactggactgcccggaggcaagcacggagtggcccttctagaagtggcaacgaagtactgcacatggatgcgagtagctatcagagagtgtgcgtgggtgaagcgagagccatctgcgcagccaagtgagcacgaatggatcaacacatacccgtgcaagaatagtgcgtgactcatgcagagcgagtaggggctgctgagtcagtcatttgtagccgtgcggtctacctgtggagctcataattctactagtcgaaggcattgcgcggagaagagactaccgaatccaggcattgccttggatgcccgcgtatgtggacaccgcatatcaacggaggctatcggaacagtagtaccatgtgagcaccgtaccgatccaacgcagtgcaatgacagcaaaggtgcttaatggcacgtttcgtgtgagctaagtgaagagtacccccgaagaggcttgacgtagaagggatggtggcgcgtttgtggaaggcaggaacattgagaaactacggggaatggaattgccaatagggacgggggggccaccggggaaacaattcaaagtaggttggagggacaagaccgcccaaatagaaaggcaattcagggggaccacgggtgccgcaaggtgctaccaaatctattaaagaacccaaggttgtgggcacatagcacgaagaaaggtaccccatggggtgatcaccttgtccaagaacccggtgcacaattccttagacgataggggaccgttccattgtttgtacacaccacaaaggggaacccattccttccaaaggaaccagaaattggaaccaatttccaataagtgaaggcagattgtgatctatgggaacggggccacataaatggggacaaaaggaaaatcgaaaagttccgtaggcgaaagaaccatgagcagccccaggagaaacccaccagagaggaacttggggaaaaagacgacacacgggtggaataacagtaggatatcaaatatggcaagtaaacggaaccacgcgcgcccacgcgatcagtagcaagacaagagtggctaatacgaaatagcaccaaatggaacaccagcaata

SEQ ID NO: 523038 - DNA, 377 bp, Homo sapiens
agcatcctatcaccctaaatttattatggatgatataaaacttaactcacgaaagtaaggcaggtgcagtggctcatgcctgtaatcctagcactttgggaggtcaaggcgcgtggatcacctgaggtcaggagttcaagaccagcctagccaacatggtgaaaccctgtctctactaaaaatacaaaaattagccaggcatggtggtgcacgtctgtaatcccagctacttgggaagctgagggagaaaaagcacttgaacccaggagatggaggtttcagggagccgagattgtgccactgcactccagcccaggtaacagagcaagactctgtcttaaaaaacacaaaaacaaaaaaaaacaaaggttgaaaaa

SEQ ID NO: 523039 - DNA, 467 bp, Homo sapiens
  misc_feature (405)..(405): n is a, c, g, or t
  misc_feature (442)..(442): n is a, c, g, or t
  misc_feature (459)..(459): n is a, c, g, or t
aggtggacgggaaaatactggctggaggtctggcagtggtttcctggtagaagacacccttcaacttaaccaggtcaccagattggtaccgggctcttgtcacagttcaccttggggtgtgcattgaattctggtgcccgccaggcagacaggacaggtcacagagagggctaaggtatctcctggcgtattcctggtcagagggtgtcctgggtccaggggtccccttgggcctaagctagggaacagttgggtcacaaagaaatgtcagggagacgccagcattaaaaaaagagagatgtgtttattccatgatcagtacagaccaaatgcatattcaccgtatgaaagtcaaaccagtcagtgactccagagtttggccaacactgagcaccagcgtcgtgntgtagagtggttctcatgcacgcgtaacctcacctgngtctcattcggtaaganctcgatcc

SEQ ID NO: 523040 - DNA, 602 bp, Homo sapiens
ccccccataaaataacaccgcagggggggcgggaaacaaggcaattttttctttaaaaagcgggcacaaaaaccaaaaggccccccaaaagaaaacccagtgtttccaaacacccccggagaggagccccccccagggggggcaggaacccccccccaatatcacccccccggccaaacagggggggttcccacaccattttcccccttgggccccgggtttttttgtccaaaaacacagagtttttttttctttttaaacaaaacacccccccgtgggggaaagaaaaccccccttaatttctccccatcggggggcaaaaaccggcccctttaaaaaaagccccaccaccccaggcgcggggagcccccccctttgtaaaaaaaactcttttccccgggggtttcaaaaatttcccccggggaaaaaaaaaacccaaatttgagtgaaaaaataaaaaaggggttttttttcccccctggggttctttcggggaacaaaaaatcccccccccctggggggcaaacgggggttttttagaaacccaagccccccaaaaaagggtttttccccccggggaaaaaccaaaaaccaacaagaca

SEQ ID NO: 523041 - DNA, 131 bp, Homo sapiens
aggtctgtccgaaagaattgcaatcacagtagaacgcgtgtcttttcagtctattcgtgttgctataacagaatatcacagactggataattcataaagaaaacacatttatttctcacagttttgaaggt

SEQ ID NO: 523042 - DNA, 318 bp, Homo sapiens
gttgaactcttccctctgctgaagctcctaatggaaaaagcttttttttggctgtgacccttttgaactgaatcagaccaactggaatcccagaccgagtttgctttttgtgcctagttgaacggcaagctcggcatttgttggttacaagatccagacttggggtgagcggtccccagcccttttcatgttccgaagggtagttttgaggccctggggccgcccttttagcatgttggtttcctttagtgggggtatttttaatgaaaaaaaatttgttttttccagcatgaaaaacatttagtttcctcaaaggga

SEQ ID NO: 523043 - DNA, 112 bp, Homo sapiens
tctccacccacccctagggcatctgtgcatagaaaccaccactcttgagctggtatggagttggagggaggggtagctcacttaccgggtggggtttccagagccagaggag

SEQ ID NO: 523044 - DNA, 1935 bp, Homo sapiens
gaagctaccctgcacaccctgcacaagcaactagagcactcaggcgccatcacggacagaacccacaacgacaaaaggcacgaccacgcaccgcacgctgaaaacaagaccgcgacaaagaagccaagcaacaataaacacacaccacacacaccgccaccacaaaaccatacacaagaaaacgcacgcggaaccagagcaaccgccacagagccaaaatccacctcgccctaccaactaccacagcgcacaccgacacagaccaccacgaacaagaacatcaacccacaagcacaccaacaccagcagcgcaacagcacccacgcgacgcagcacgaccacatacaacaaattcctctaacacactcaccatccactcacccatcagccaccacctcccactaccacaacatcacattccaaaatcaccacaccatctactactttcaatactctccattcacccctcgacaccatcatccccacatcataattctaacttccatactccataacaatcctatcctcaaacctaacaccacaccctccaacccggctccgatagacacccacacacacgccgccaaccctacgaccgctaccgccgcacgacagccctcccaaccagcagcaaacgaagacacaccaccacaccacgccaagacacccaacgccgccaaagcccacatcacacacccaccaccacacaacctaacaaacatcgaccacagacgacacgtccacgacgcatccaccagcacaccataccacgcaactgggcaacactcgaaacccgacctgtcacccagcaggcacagccccaggtcagactaccaaccaacatgctccgcgacagcagcccagcgacagccacaggccagatcgctcgacccaacgatggaacgataaccctacagatcagcctatacctcagcaacagacagacaacgagccgcaccagtcagccgtacgcaacagcaaccacaccccactggccagcagacagcgagacatctagagccagcagatgaccacccacgcacacgctgagccctcacgagcacagcgaagccaacgcatagttagagccagagactaaccacaacacaaccgacgcgaccacagggagcgaataacaaaacgaacagcacgccgagtaggcgagctagcggccgcccgcgcacgcaccacacgacagcggacgatagccactaacgaactacgacgaacacagacctaacgacagccgcagagacagagacagacaccacagtccaacagagtacgccagacgtccccagcagaccaacagacggactacgaacgcaggtgcactacctcgccgcagcaagccacgaccgtcatggcaacagcaccacacacagctcacgccagcaccaacgacaacagcaagcaaccgacgcgaaaacgcccaagcgccggatcacacagacgccacactgaacagcaccgagggcgagtcagagacgaaacgacagacgcacctgatggacggtgaagagatcacagataccgagacgacaggagcgagcagacaggagacacatcaccactcacacacagaagacatcaagacttacgacgagcccgtgacctcacccactcgacgacagaacacacgcaagaccggctgtgagaccgccacgcgacgaaccgccccgaccagacacgatcgacctcaacacccagaccgcacgcatcacacgcaaaaatcacgaaaccggacgcgaaagaccgatcgcagacgaacagactcatctcgagagacaggagagcacgagcacgaatgacaaaacgagcacaccggacgcaacacaccgcagacgacagccgggcacgagaggactgaccaaacgacaggacacacacgtatcaacgtgaacaggcatcggaggcgcagaacgggacagaata

SEQ ID NO: 523045 - DNA, 923 bp, Homo sapiens
  misc_feature (124)..(124): n is a, c, g, or t
cacaagtggatcgatagctgtacatcccagcatttctgtcgaggccaaagtaagcgagagtcacttggagagtcagtgcagtttcaaaggaccaagctcttgtgtgcaaagctagtggctgtanaagcgccccatgcttcctagcttatgagatatgaccaataacaattagacttgtggtgatgggtgtgcatcagtgcctcagtctcagatccgcttagccttcacatcaggatgaagtgcccgtagagttaggtcataagatccattattgaaacgcgccttggaagagctgtgaagagtttccactggcgcaagcctgaaagatcaagttgcggctacttgcatactcgatgctcttaggtgcggactaagaagttgtagacttcccagtttcgtcaattgattaaagaagcccatatatataacaaaaaatggcttagtaattgataataaactgttaagccgagtagccaagagggccacgccaagaaaataccacgcaatgtagcaaattcccttctttctttattaagagttcagcgaaggcttacacacgctttgtgcgttggacggttgaccttggggagccatcacccaaggggtgcctccttccgtcgttaaaggaattccaagcggcgagcattaataaaaccttttccgcgcgcggttcgaaggcatttccttccttatccattgagggatattgaaaagggacaaccggcagggcgcgattcatattaaccattcccggagtttggtgtgcggaaaaaaaggaaccttttccgggatgacgtggtgacaaattggccttgttgacccctggaattgaacatggcggtggggacccattttttacaggaggtggaattgctcctaggtgtcataaatttaaccacactttgaattaatatttataagcc

SEQ ID NO: 523046 - DNA, 224 bp, Homo sapiens
gagtttttccccctcttttgccactgaaatatgatggatatgcttaaggaccactgatggcatgaaaaaaatccaatttttgatttattataaatgaatggtggccctgaacttagctaaatggggcaacttagtttctccctgctttcatattatcgaatttcctggcttataaacttttttaattacctttgaaatataaacccaatccaatatttttctga

SEQ ID NO: 523047 - DNA, 924 bp, Homo sapiens
actgcttatctcgaccagacagccccagacattatagcgtgaccggactagtgctagctagttagtcgcatttctcttctacgtctatcaagatctcccaggtaaataagggactctcagctggaactactacgacaggttgctggggatgagcagggggagaagaacaatacattagatttagaaaataaatcctgaagggatggagtaaccttcttcaagtctcaagaaaaaaaaaaaaaaaaaaaaaaaaaaaaaaaaaaaaaaaaaaaaaaaaaagagaaaaaaggggggggcgggcgagggagggcacagggggggggccaggggcacccggggaggacgagccacaaaagcgagcgacgaacaaatacaagtagacggaatataatagaaccggacgaagacaaagaggagacagataattaaaataaaacagcaaaacacagcgggcgagaaaaaaacacaacaaaccagaggagacacaagaggagcaagaacaaccacgcaaccaaagcgagggagggaagaaaccacaacacacgcgagacgacagacaacggaacaccgacacggacgacaataaagagaggaaaccccgacacagaagaaaagataaaaaaagaaaaaaaagataagaaagagcagaaaaaacgaaggagacaaaacaaacataaggccgggaaccagagtattgatggcaggaagcggactgttgtgcatacaaagacagaggtatcgagcgaacacacgagaggacacaatcagaatacagaaagacaaaaaacatagatgaaactcacgcagagagaggaggaaaacggcgaaaccagtaaaacaccacaacggcagagccacagaagcaaccaacaaagagacgaaagaagacacgcagagacaaagaaacaaaaaagagaaacacag

SEQ ID NO: 523048 - DNA, 365 bp, Homo sapiens
atataaataaaagcttccaactgtctcacttgaagaagctacagtctaaccagattataaactatagcaatggccaaccctctgaggcaggtgctgaggatacaagaaaacacatgtgctaaagatacattataacactgccaaggtaaataaaggtcagtgaaaatccatctatattattcctgtgataataagaagccctgacagaactaccccattcaaattagtcacagccaaaggacctatgcatataccaaagaaaaggatagaaagatgagagtaccttttgagaagttattcagaaaacagaaggaatttccaacaaaaattctcactttcaaaacataaatggtttttgaatcaag

SEQ ID NO: 523049 - DNA, 160 bp, Homo sapiens
tctagaggatgttatacccaccgcgctagtaactcggggtgatatccgcatctgcgtgaggccactagcgcacatggcatgcctggatggacaacatccgggagtggtgcatttccagcgcagctgtggtggggactatcgcaataccatgcctaacttt

SEQ ID NO: 523050 - DNA, 352 bp, Homo sapiens
attataccagaacaggcattatacggtaggaaaggcgcctccgttcggtggttcttgtaggtcgtgattctgactacatgccaggcggcagtgcatgtggcttccccagcacccagctcctgaagcaccaggcggtcagcagctgcccttggcaccctccagccctcagaagttgcgtaggagacacagcgcctccactgaggcacctctccgggaataacgttccccagcaccccaaatggatttccagtcaattcagaagcattttaccagtgaagccctcattattccagttcactgttaaagccagtaattctctatattaaactttccctgttcggtttatactccg

SEQ ID NO: 523051 - DNA, 359 bp, Homo sapiens
cgcggctgtgctgccaaaagtatatcgacgccgtttaggccgaacagcccctgatcggtgacgctgtgcatcacatctaatgaaccactttcctactcaccaacgcaccgaaatccttcgttgtggtgatgccaccataagtatttttaatatataaactacccgctccatcattggagatactcaggttgctcgtggactcctgcacgtatagcgtattattgcccgaatcaccgaaaataacatcataccctcccgcatcccgaaaattttcattgccatctcggcgttctagatagtcgttgctgatgcaccctgaaggttgtcactagtgtctgtaccgatgataaaagtactat

SEQ ID NO: 523052 - DNA, 229 bp, Homo sapiens
gtcgcaatctatacgaatccaggagaaattagatcaggctccgatctttccgacttctttttaagtaagcaggtggcatgacgtatcttatatattatgattagtaataagaggttaatgccaagaaacaaaacaaaaagaaaacaaagagacgatgtttggtcgtgaggctgtcagtgagctgaggctaaagaagttcggtagtgtggtccccatgacccacccaacc

SEQ ID NO: 523053 - DNA, 341 bp, Homo sapiens
aagggaatgacccttacttccaagttattccaaatctggggaaaagtgtgaatgccaaaattctgattattctcactcgggccaagttaaaatccattgataaaaccaccaacacttctacataaccactgtctaccatctgctgatatagtccagaaaccaaacctgcaaaccagtattccttaaagaaatccatagtctaaaccagaagattcgcttgaccttgggtattttttttagtagacacggggtttcttcacattggtcagtctggtctcgagctcacaacctcaggtgatccgcgcgcctcagcctcacagagtgctgggatcacaggtgcg

SEQ ID NO: 523054 - DNA, 427 bp, Homo sapiens
tataagcaaccaagagacaaaaaaaaaactgaccaaagagtttgcatgaaaagcactgcactcaggaggaaaatatcagcagcaaagtacttttgaagtgtggcctgctcagctcacgctctgccccctctgcacgcaagtaccggctgttgaggataacctctagccagcacgggcagctgctggatgaactggcgggtgtagcacaggccacagcccttcacaaagctgatctgcacggtaaagcccgtccacggctgctgcataaactcgtggtcatggggccgctgcaggctgtacgccttctcgtagtcgaaagccttgatggagaaaccggggaacaccttgtgtaccaacagcgtcctggagtccgggttgtccagtgtggcggacttgatgaagatggggtacctggtgtaacctgatt

SEQ ID NO: 523055 - DNA, 290 bp, Homo sapiens
  misc_feature (256)..(256): n is a, c, g, or t
taagatccagccgaagggaggcctgcttcgaatagtctagacacaggctcagctcaggttgatggggatattctccggctgctctgcacggctcacgagccagtccagacacgctactagtgctagggttgccgctgtgcctgctccagggagcaacagagaggcacaagcagaggccgtgtggctgaggatggagccgccccagccgactccaagccgcagaggcagacgccacctggattgtctcctgcccagntggcctctctggcctattcctaacccttttccca

SEQ ID NO: 523056 - DNA, 255 bp, Homo sapiens
ggcacgagagggcattcttggcacacagctcttcaacaagtttgcactgcccttacatccgctgatgtgtgcccaagcaagtgtaaggccagggtttgcgggaggcagggcctggcaccagtgcacatgatcatctttgttaaggatgggcatttgctggaggagtctggcccaagctggctatgaggtggttgggcttgactggacagtggccccaaagagagcccgggagtgtgtgggaagacggtgacattg

SEQ ID NO: 523057 - DNA, 235 bp, Homo sapiens
tgggagaccggagactctgtctcaaaggaaaaaaactcaggtgtgacataaggaacttctgagtaacagacatttctatgactcaggacattccaagtgtttgggaagctctatgccaggaaccggggacaaagaccagccaaattcttttcaaaattttatttatttggctgggcatagtggctcacaccggtaatcccagcactcggggaggccaagtcgggcagatcactag

SEQ ID NO: 523058 - DNA, 175 bp, Homo sapiens
ttagctctggaacagggggaggtcccccccaagagaccccaagaagaagaagaaattctctttcaagaagcctttcaaattgagcgggctgtcttcaagagaaatcggaaggagggtgggggtgattcttcttggctccttcacccaacagagggaagagcagtgagccaggggg

SEQ ID NO: 523059 - DNA, 1386 bp, Homo sapiens
atggtagctgcctccgggtttatacccgggatatcgtcgacccacgacgatacgacagcaacacctccttgttctaggccacctgtgggagcccaagccccccgcaggctgagtgccctggcgccagtggtagggggcagcttctgtggaacgctgccaggaactggatgcggagtgggccagacctccgacggccacccacaccagccccgatggcccatccagacggatctcggaactcccctcacaccatcccaagatgacgctcaatgaaacttccttttgaacaaagcagctgccatgatgccttggagcatgccactggtcctggcgggactcacgtgcctccctgactatcctgctggagaaccccgcggattcaccggccaggccctccttgccacaccatggtatatagtcactaaggtccccaacattaccctactttcactagcaaccccaaacatcaaccctaccccactaaaacgtcactcactcgccaaaaacaaaaacacacaactgagcgccaccacacccacagcgactacatcgaccacgtacggaggcaccaaggacgtcaaaagagatcaaccaagcgatctcacatgtgaccaaaaaggatgcaacccacgaactagatagggacacggcacaaacatacgcctacagcacacacagcaccgacaacgaacacaccaacacccaccccctcaccccttccccacactacccgtgcaactacacaccatctggcaccacccctatctccaacatactaacccactataaacacatctgacctgtctgcatgaccacctacccctgtgcaccccaaatataaacccataaccacatgatctcataaaacctatcctaccaccgcacacaactaatcccacttctattaacaccttccatccacaccaggcatcccatcacatcactctcttccacatcatcccatcccacgcaactagaaccattatcactgactaccttaccacccccaactcaccacaccaccatttccaacccaccaccacctcatcgacactcaacccgcaatagtcacctcaccaccacacaccccacacacaaaaatccataccagcaccacgacagattcgatcgagcgagaccgcaggcggaggctgagcgagcaagaagccaggcgaaaaagcatagacgcgagacgaagacgcgagaaaccaaaggcgcaacgagacatgaggcaacacagggcgcccgcgagcatcgaagccgagagggcgcaaccacccagacaagaagaccaggagcgacgacgggcaaacagacgaccaacgaacacacgaccgccaccgccgcggcgccaagcgccaagcaccccagccacgcaccactcgg

SEQ ID NO: 523060 - DNA, 111 bp, Homo sapiens
ccgtcgctattcatcggcactccacgtatgagggttggtgtaaaataagcgtaggtagaattagaggttaaggggggtgatggtggctatcattgtgccgtataatagcga

SEQ ID NO: 523061 - DNA, 155 bp, Homo sapiens
ctgcttagagcctcgtgttcgtgctaatctgtctctgtactggatactcgtcgtcaggtactcttccctggctgctgaatactctcgaagtgcttcagcctcagaactcctgtctgttagaataacccatacatgtttctcacattggtacgcca

SEQ ID NO: 523062 - DNA, 532 bp, Homo sapiens
accattaagtcagtcagcttttatacccggaaggatgggcagctaatctataccccattcacagaagataccgagactgtgggccagagagccctgcactcatttctgaatgctgccattatgaccccggtccttggtgtactgactaggcttgcggtggctctgggtgactactagaccaagtgtgtcaaatccctctgtctactcattcttgattatattgttgctgttctttttttcattcatttacttgggggaagtgtttaaaacctataacgttgctgtggactacattactgttgcactcctgatctggaattttggtgtggtgggaatgatttccattcactggaaaggtccacttcgactccagcaggcatatctcattatgattagtgccctcatggccctggtgtttatcaagtacctccctgaatggactgcgtggcttatcttggctgtgatgtcagtatatgatctagtggctgttttgtgtccgaaaggtccacttcgtatgctggttgaaacagct

SEQ ID NO: 523063 - DNA, 435 bp, Homo sapiens
agacacaagacggaagttttttagctgatgagttttgccctctctgaatacagaatccgtggggacgatgatgagtggagtgaagctgagaacaaagctgggccgaacgcctcgatcatcatgcttaaaagtgacaagaaaaggaaattacaggccaaacaagaacccaaacagagcaagaatgtgaagaacagagagacggagaacacaaatgatatgaaactgagtcggaagaaatagtgaagagaaactcaggcatctgtgtctgatcatgggaagatacttgcactaacgtgaactctctctggctgtactgctgcaacgagaggacacggcacacctggaagctggccgagagttaaggctctgagcctgtgggtctgggagtctaaccttgttaaaggcagagatacttcctggtattgatagcttggg

SEQ ID NO: 523064 - DNA, 402 bp, Homo sapiens
ccaaatgcacacgtgacccaccatccctgtctctgacagtgaggccacccgtgaggtgctgggcctgggttctaccctacggagatcacactgacctggcaggggatggcgaggacaaactcaggacacccgagcttgtggagacccaggccagcaggagatggaaccttccagaagtgggcagctgtggtggtcgcttctggagaagagcagagatacacgtgccatgtgccagcacgaggggttgcggaagccccattcaccctagagaatgggcagccatcttcccgagcccggccatccccatcgtggggcatcgttgctgggcttggctgtcctagggctgtcctacagctgtcctaggagcttgttggtagggcaagtaggtgaatgtgtagggag

SEQ ID NO: 523065 - DNA, 949 bp, Homo sapiens
ggactcgggctcctgcagcttctgcggggcttggagccgccgtccgtgagcacccaggccggggaccccacatccccaggccagccctgaccccggagggccctccgccgggattcctttccgaggtactgtgtgccggcccaagacggttgcagcgcttatgtcgtgtccgcccctcagtgatcagctccgggtccccctgcctcggcccaggcgcccaagcgcagtccccgggaagtgcgcgccggggccccagcaaagagtctgagacagccaactgggccaaacaatgttttagaacctactactggctgatgccaacatcatcagagatgaactgttccttcaccaagaaacacttctcgtgctgccctgatcaaccccgaagcttctcactcaaggaacacattttggccagagcagatgcacgcacgaaggggggggcatttcagcgcaaccagggacagcaggtgtgacccagagaagcatgaagagaagagaaccgacggagcactggccgccgttggataccagcaaagacagccttccaggagggtccccatcctggattgtcccccgtgaagggctgccctcaggcaagaaggcacacagaccggtggagaaggcgcttgggcccagccaacaatcctaagagggcctatacctttgtatccgcaaaatcctggaagcgaacagcccgggcacatgacaggccgcgtgactagggcagggacgcgacctgggtggccggcgcaacggaaccctaggccagcacacaacgcagagggggcaccaggacgaagcccgcaggacggagcaccacgcacccgcagcgacacgacgcacgacgacaaccagcaagcaccagcgaacacgcggcagcacactcacacaagtacacccgaggagaagacagagacagcgcgaacacggaagtacaaaggcacac

SEQ ID NO: 523066 - DNA, 495 bp, Homo sapiens
acatagactccagtacctctgatactagaaaactagataccatccaacatgtgcaagataaacattttattgatagtatggtttactgaccaatagacttacttctattctaccttcctcttctcctctccgcgcctggcatctcacctcttcccacctctccttcctccatcccttctttcctttctacttctttactttctttccttttcttactttcttttccttttccttcttatttttcactttcccttccttctcttcccctaccctcatctcttctactctgtaatgtcctcattatgtaagcaaatgattaaaccgtggagacattcaaatcacagaagtgatcaaacagccacaaggatcttgatttcctccttagagttctggagaattggcttaatctcttgcagaagactcttttctgggttggatcagccttacataattgggtgcaacgtgagttctacttcaaataagaggaccctccgg

SEQ ID NO: 523067 - DNA, 222 bp, Homo sapiens
ggcgctctgaggattcccatcaaccctaaatttattatgttctcccagaataaaacatcttcaaacagactctccctgcttctagtatacccagtcccagtctaggcaaacaggacctttcaacagaagaaaagacatttgcacaccccttggtgaagacagtatcttctcttattagcgacacataataaatttagggtcataataaatttagggttgatg

SEQ ID NO: 523068 - DNA, 551 bp, Homo sapiens
  misc_feature (305)..(305): n is a, c, g, or t
  misc_feature (318)..(318): n is a, c, g, or t
  misc_feature (486)..(486): n is a, c, g, or t
  misc_feature (502)..(502): n is a, c, g, or t
  misc_feature (510)..(510): n is a, c, g, or t
  misc_feature (513)..(513): n is a, c, g, or t
ctttgggaggctgaggcaggaggattgcttgagtccaggagttccaaatcagcctgggcaatatagggagagtccatctctaccaaaaattttttcaaaaattagctgggcatggtggtacacaggtgtgacctcagctacttgagaggatgagagacaggaggatcacttgagcctaggaggtcatggctgcagtgagccttgatcacactactgtactccagcttgggtgacagagcaagatcccatctcaaaataaaagaaaacttggctgggcacggtggcttatgcctataatcccagcnctgtgggaggccnaggcgggtagatcacttgaggtcaggagtttgaaaccagcctggccaacatggtgaaaccctgtctctactaaaaatagaaaaagctagcttggtgtggtggcacatgcctgtaatcctggctacttgggaggctgaggcaggataatagcttgaatccgggaggcanaggttgcagtgagctnatgttgcnccnctgcactccagctgggcaatggaaacactgtcttcaaa

SEQ ID NO: 523069 - DNA, 241 bp, Homo sapiens
gcaccgggggtatggacgtgaggcagatcccggcagactccccacattgaggagatagagctacttctcaatgtctgcctacaacctcgtgttgtgttaacatctgccagtcattgacagacaaccactaactgatgaatcatttggacagcacgcttctttttactttctggggctgaatatctccattggcctgtggatgcatatgagagtaagaaatttcttctactagattcttctt

SEQ ID NO: 523070 - DNA, 376 bp, Homo sapiens
cggtattgagactttgcccttctcctccccccggtgggggtggccccctcaaggaggtgagggttagtgcccccctgccaaatttggagggatactccccgtgtgcactacccccagagtttgtaccccaaatctttcccatggggctgtcttccagtgaaggggacatcccataaatagttttgggagggtggatgggttacttgccccccagaaacagccatagtcccaactccttgcgttcctttggcccctccctgccaacctagaatttgcttgaaagggttggggagggccaatattgggggattttgttagctttacccccgcaggacatacacaggagcctttgatttcattaaagggttgtgaccca

SEQ ID NO: 523071 - DNA, 243 bp, Homo sapiens
cccccccccccccccggggggacccccggggcgcgggccttttttaaaaaaaaaccctttgggccccccttaattggggggaaacccccgggggcccccaccaaggccccccccccccagggagggggtttttattttttttttcttttttcctggccccccccttttttggggcccgggggtggggggggggggtgaaaaaaaaggttttttgggggaccccctccccgttgttttttttta

SEQ ID NO: 523072 - DNA, 273 bp, Homo sapiens
aactgcttctggggatttgactcttggtggtgatgtcacagccttttcagttaccctggacttttgaatagtcagagtgaactctgcttcttgtttcccttcactgttatctaccaccacgctgtaattggcctcaacggaagcctggactaaagagatctcaaaggtcgctttgtgctttgtgagggccaattggtgagcggggagaagcactcagcacttgtcctctacggaggcaggtcacagttggcaccggtcaccacggggtcacaa

SEQ ID NO: 523073 - DNA, 187 bp, Homo sapiens
gcggtcgttagaacagaaatcaaggactgggtatagacttgtggttgcaagggggagggagtaggatggctggggtcacttgggattaacagatgcagactcttgcctttggcatggatcagcagtgagatcctactctgtagcactgggaactctgtctagtcacttatgatggagcatgataatg

SEQ ID NO: 523074 - DNA, 922 bp, Homo sapiens
ccccgccggtttttatgagggcccgggcgcggtgatcttgattttctatcgaaggcgcgttggtgctgccgtggggcgtttcttgtggggtcgacacatgtgaagaaagtgtggttcgcagaaaacgaaggtgggttgtccggttgcggtgtttctcccggctaggttttgttgaccagccgaggcgcggcgacgatgtttgtgtctcatctactgcgcgcgcgtttctgtggggggttttttacacaccaaacccgcgtgtcccgcgaacattttggtgggtgtgattgtcggccgtcgttgcgcccaccacagtgggggtggatttttatcacggcgctttgttgcgtgcgcgacaaccccgcgggtgcataaccctctcttgttgtttgtgaagcactgttgtgtgtattgctgctcacttcttgcgccgcagttcttctgttggtttcgcttttgtttcgcccgcccccggccgccctccttttgtttttgtcgccccgcgcgatggcaacaggcattagactgggtggatcccccgcctcttttgtgctgtgcgccaccccgcctctcctctccttggagggggctcgccccgctaatagcggggttgttgttctgaacaaaggggggcaatttggtagggagatagtcgcacaaaacctaatacgtgcttttataccccgcctgctttgtaggccaccaatcagcacctcacgctataacttgttgtttcttacctgcgcggcgatgtgttgtgcccacccctccctcacctcttcgttccccccatgtttttccaaagcgagtaaaaaataagaagagcagtcgttaaaaaacaccccccccccttttcccccccccttttccccccccccccccccttttccctctttccccctttttttttaaaattttttta

SEQ ID NO: 523075 - DNA, 1711 bp, Homo sapiens
atgtcgtgggttggtgcatgttcgtgtttgttgccgtctgtcttcgtcggtgggttgaccgttcctattttagcctcgttgtgtgcgtactgcctcccgtgtgtattttggttcctccccgcgcccgtatgtgttgctgggtccgtgatgtgtctactggccggtcggttaagtgtccggttgtgttctactcccactactgttgtggagggccgttttgttagagtctctctctacgagtgtttttttcggcctcggcgtctctctctccttggtggatgcccgctacaccacggggggttcccccccagccgccgctcttttctgtggtgggagcccggcgggggttcctcccgtctagtgaaaggacagctgtgtgattctcaagacggcaatttttgttgtactggcagaatgcgtccccctgcgtgttgctcctcattgtttatacctctgctgggcccaagaagatgtttgtgatgggtagtggggtcatgtcacgggtttatgttcggcgaccgccccctggtgtcgttgtttccgcggggagaaccccccgcccgacttggaattgggtgcctctgaaaagacctttttctcgtgatgactattcgcctcctcgggaataatgggaatcctcctttgctcttgatagaacgctgcccccattcggggtgaaaggtctgatggaaagcgccaacaacaccccgctgtttgtgcccaagccgccccacaccacacgtttgggagagggccccccgcgaagaggtgatgcaaccacatttgttggaaaatatattaggcgcgccaatatataatagtattcccttggtttagatgagggataatggcgacgccccactatagtaggatatttctcgcgcggattcccccagattctctctcacaaaggagcggcccacatagccggttttttctcgtccacgagcgcccaacatttgtaaaaaaggccctttgtggacccacccgcgggcccccaaacaccaacaaagatgtattggcaaaccgtgttctttctcatactcgggaatttggcccccccccacgagaggactttgcacaccagacatttgggcgctccagaagaatcctcatacagcaagagagacttgtgggggcgcaccacaccggagcgacccacggtttagaaacacgtctcccccagagagttagaacatgggttaaaacacacccacagtgtgaaacacattgtagccccaaagatctcggacagaattttctcccggttccaaattagtctccccgaataaaatgatgcccacaccccaccagcctgcggcgctttctccccttatacacatctcttacactggagcctctcgcccatctcctgggagacgccctcggttgtacatcacccgaattctctttctcgccacgacccacttgacacacttctctatagggaagaggtgttgtggacccacgagacctttgacccttgtgaaatgccatgaatgttaagggaatgtggaatatgaaataaagccaaaattgcctgcctgtgtggcctgcccacgttcaaaggagatgcccctgtaatatcgccccggcctgttgggaaggaagggaggaaagatgtaaaaacccccttaaaagtgaagggaccaccacgcccccagacccgtatgatatacccaggtaataaatgctgtttatgacttccttt

SEQ ID NO: 523076 - DNA, 135 bp, Homo sapiens
ttcatgacctacctattcaaagccttcaacgtgtgcctactatttgacctaagtatctcatttactatttttccaaagcaactactttcagggtcaaatgttttacacctctttaccctatttactgcaacattc

SEQ ID NO: 523077 - DNA, 305 bp, Homo sapiens
  misc_feature (7)..(8): n is a, c, g, or t
  misc_feature (88)..(88): n is a, c, g, or t
  misc_feature (100)..(104): n is a, c, g, or t
  misc_feature (106)..(109): n is a, c, g, or t
  misc_feature (114)..(116): n is a, c, g, or t
  misc_feature (119)..(119): n is a, c, g, or t
  misc_feature (126)..(126): n is a, c, g, or t
  misc_feature (129)..(130): n is a, c, g, or t
  misc_feature (174)..(174): n is a, c, g, or t
  misc_feature (183)..(184): n is a, c, g, or t
attatcnntaaataacaaaatctttaaaaataattttctattttgaacttttagccataatgtaagaaaataaaattaactagcagantaatcaaagagnnnnncnnnnttccnnnatnttttttnttnnaattaacatggcacttttacagttatttattattcatatcagtncacttaccnncttcatattttcaaatcaaaatacagtgtttttctccagtgaaatccttattctcatgactgatagaaaacattgccaattttgatatttccagagttaatgttaaattatttgaagaaaa

SEQ ID NO: 523078 - DNA, 1213 bp, Homo sapiens
ttttttttttttggaaactttaaaatccctcaaaaacggtttattatacaagtgagtttggagtcacgaggggcttatcggtaggatttctgggtagcgagcgcgggcaccaggcctccaaacttttgggactcgcagcgacgagggtcagctaccagcagggtccggtcatacgggatgaggatgtcttggatctccttctgggaagcctcatccacatatttctgggtaataggccaccagggcttgggaggatggactggacggatagcataaatctggggccacgtgaccaccaccctttacacgggacacggtttgtctacaccaggcaaatcggctcccttggccggaaaacgcaagaactgggctccagcagtcttggtactggtgagcggtggcggcgggctcaatcattctccagggggccggcccggttcaccttggatggaggcaccattggccggcggtattggcgagtggcgcgccacagtgtgtgtcggctggtgcttctgggcggtccggaagacctggcgccagactggcgagcggggcccttgggacggcttgggttccgagcggtgggactagaaaacctcaccgggtaccagggcgggcggcggggtcataagccgagtgacagagacgctcaggcggggtccccaggatgacccgatgtgggagaccagagcaccaggggtgtgggccagagaacccacaggaatattcaagatccttgggggacactgtgtgggccccgattgattttgcgcgaattcaatggccttcttcccctggcggggattacctttggcgtgaacagggaaagtttttgcccagttacctggctcacagggcacagggggggagatgccgggcaaaaggcgtcccggaaaggctcaagggcccgcctggtggtaggggggcaaaaaacccccggatatatgacggggggggcaaaaaacgggggggaaacacctgtaagggggggcccgcctaaaagggccgtggagaaaaaaaccgcgcgccggggggaacccccctccgggcggtggaggcggggccaccacaagaggcgggggggggcacaacccgatgtggcgcgcgggggcaacaagagagccgaagagatgactcactgcccggcatccagccacatgttatggtgctgtagtgtgagggccggctgacaacacaaggcgaagatagcagc

SEQ ID NO: 523079 - DNA, 252 bp, Homo sapiens
gcaccttagcaacattaccaataagatagcgatagaattgaactgcgcaatagatatagtaccgcaaggaaagatgaaaattataccagcataatatagcaaggctaaccctataccttctgcatatgattactagaatactttgcaaggagagcaaagctaagaccccgaaaccagacgggctactaagacagctaaagacacacccatatgtgcaatagtggagatgtaggtagggcgacaactacggct

SEQ ID NO: 523080 - DNA, 191 bp, Homo sapiens
caactgtcgactaggttggagggaaagtggttggagtggtgacgggaacgccatgttggcgagtggagtgagcagtttacaggacacgcatacaggcgccaacgtcgagagccgatatttctggtctcggggcaccaacgatccaatgtgggccaccatcgaatgatgagtgcagcgcagggagtgtcttg

SEQ ID NO: 523081 - DNA, 137 bp, Homo sapiens
ggccagtgtcataggagccccaacacattcctggacagggacagacagggtggcaaggactcaggtctaggtcccttacccagaagccacccgagcctcattaagactgtataggctctattggcccctcaccctgt

SEQ ID NO: 523082 - DNA, 686 bp, Homo sapiens
gtgtccggctcgaatatcgtcgtgcacagtggccagcaggaccgcttctacgagcgcctgtccagcccgatcaagtagcgcgtgcatctgcagggcttcttccacgacacgctgagcgagcgcgatcgcgcaccagcactggcgcgcatccgcagcttcatgcaggcgcgttttgccgaaccgctgcgcgagctgtcacggcgcgacgcgcaccgccatggcccgacattcgaggaatcggagatcctggcctggccaccggagcgcaacagcctggccgacctgcgctggcgcgtggtacgtggcggcctgcgtttcggcggaacgttgtccgaaggcatcgcgctgggcctgcagaccggtttcgattccggcagcacgctggactacatctatcgcgacgaagcgcgtggcaagggcccgctgggtcgcatggtcgaccgcaactatctggatgcgatcggctggcgtggcatccgcgtgcgtggccagcacctgcaggaactgctgcgcgacgctgcccagcgcctgcgtgggcagggcacgccggtgcacgtgctggacgtagctgctggccatggtcgctacgtgctggaagcgctggggcagggcgaacagcgcgccgatcgcatcgtgctgcgtgatttcagcgatctgaacgtgacccagggccaagcattgattga

SEQ ID NO: 523083 - DNA, 831 bp, Homo sapiens
cggggccggggccccgtccacggcgcgacgcggccccggatgccactgcctgaaagctccgcggaagccaccgcaggattccccatcccaggtccaccagagcccccgggcccccccgctgacaccggctgtcatccgccattatgtcatcgtgcagcggttaacataaccgtaccagaccagcatgacctggcctcccatccatgatgtattcccagtggaccagatggccatgccccaatggggatcgccaccgtcctggcccccgttgtgcatacccagacagtccagatgcaacgtgctcctccatagcgtctgggttcattagatcttggttggagcgtttggttgttcgtccgtatagattgcagttatcctgaggtttttgtgatgatcaatggactttaatgacaaaccaacaagcaagaaaaagacacacacacacacagcaagcactcacccccatgatgcgcatcactgagcagctgacacacaaccaatcacacccccaaccactgcagcgcggcacacgaccatccgccacgagacccacaggccactgcggcaacgcaatgcggcaaccacacagcaacgcgcacagcagagaagagaccagagccagacatcagacccaacacaacaggggaataacacaagacccaagggcgaacacgggaagccgcaacatgcagaccacggaaacacctctcacagtgacgcccattcgcgagaacggacggaaccagcacacgggacgggcagacacccaggacacacaggcgccaggaggcaaacgcagcgagaaccacacggcaagacagtaccagcaac

SEQ ID NO: 523084 - DNA, 616 bp, Homo sapiens
  misc_feature (11)..(11): n is a, c, g, or t
  misc_feature (63)..(63): n is a, c, g, or t
  misc_feature (105)..(105): n is a, c, g, or t
  misc_feature (107)..(107): n is a, c, g, or t
  misc_feature (176)..(176): n is a, c, g, or t
  misc_feature (306)..(306): n is a, c, g, or t
  misc_feature (322)..(322): n is a, c, g, or t
  misc_feature (438)..(438): n is a, c, g, or t
  misc_feature (447)..(447): n is a, c, g, or t
  misc_feature (531)..(531): n is a, c, g, or t
  misc_feature (542)..(542): n is a, c, g, or t
  misc_feature (544)..(544): n is a, c, g, or t
  misc_feature (581)..(581): n is a, c, g, or t
aattgcttganggatgaaaacctgtaagaaatgatggagaacagggaacaggccaaggggaancaggagcgggggcacagtgagccggcgggcagccggggagananaagccacaaagcacagcaggggcacagtatctggcctccctacgccaccactcagtcctttcagccccngggtgacctgagcctcagtcgccagccaccctgctcttgtgccagcgccacctccagctccctccttggtttgctgcagcaagcgtctacgggctcgccgccgcccttgccacactcggtgccacaaggnacaagcgccacacgcngaggagggcagggatgcccccttccctgcctcaccctgaggccattcttgggctgcctcatgtccctagggcccccgccctgcaagggctgcgtggctgggctgcccctcttctcnaggggctcnatgcatcccagtggtcaggggcaggccccctggctgcccagggctctgcatggcccagtcctgcaccatctctccaacctctanaaccatctctncnaccctgtctcccccaccgtcccctgcaaaaccctgcngcccccctttcccctcctcacagcagtttttctgt

SEQ ID NO: 523085 - DNA, 215 bp, Homo sapiens
ggaccctgctacgcggccccgtctcggacttggactccttagcgatggcacccagcctgtggaccacgttgatgacgaagatcttctccgcgtgacgctgggtgcccactgctctcggagctgccgatgacgaagaccacgtccagggcgccacagcgctgctcacagtcgcagctcccgctgggctccctcacgaaggacatgacgacacactc

SEQ ID NO: 523086 - DNA, 1017 bp, Homo sapiens
  misc_feature (921)..(921): n is a, c, g, or t
  misc_feature (988)..(988): n is a, c, g, or t
  misc_feature (1008)..(1008): n is a, c, g, or t
  misc_feature (1015)..(1015): n is a, c, g, or t
tttaatttacagtttcttctgggcctttcaacattatcaatgtctccctttctggcggcacgaatgaagaaattttggaatccataagagccaaaaagggagacattgataatgttaaaagccccacgggggaagaaacagaaaaagacaagaatgagactgagaatgactctaaagatgctgagaaaaacagagaagaatttgaagaccagtcccttgaaaaagacagtgacgacaaaacaccagatgatgaccctgagcaaggaaaatctgaggagccaacagaagttggggataaaggtaactctgtgtcagcaaatcttggcgacaacacaacaaatgcaacttcagaagagactagtccctctgaagggaggagccctgtggggtgtctctcagaaacccccgatagcagcaacatggcagagaagaaggtggcatctgagctcccccaggatgtgccagaagaacctaacaagacatgtgagagcagtaacactagtgctaccactacctccatccagcctaatctggaaaacagtaacagcagcagtgaactaaattcttcccagagtgaatctgctaaggcagctgatgatcctgaaaatggagaaagagaatctcatacacctgtctctattcaggaagagatagtaggtgatttcaaatcggagaagtccaacggggagctaagtgaatctcctggagctggaaaaggagcatctggctcaactcgaatcatcaccagattgcggaatccagatagcaaacttagtcagctgaagagccagcaggtggcagccgctgcacatgaagcaaataaattatttaaggagggcaaagaggtactggtagttaactctcaaggagaaatttcacggttgagcacaaaaaggagtgatcatgaaaggaatatcacantatttaaatggtcagagggagatcggtctaccacatcatacttcaccaattcattgctttgaataancaccagcacagagaagaccntgattanga

SEQ ID NO: 523087 - DNA, 201 bp, Homo sapiens
gggtagtatgctctcctgaagaatatctccacagacacatagggttactacatatgtacctccagcaatgaggaggggactgtagttctgcaacatcacggtggccgtcagatctccctccatgaacgtggccctgtaatgtgggcatcgcgactgcgcgtagcgctgccgcccctcattatcatatgccatcactcactc

SEQ ID NO: 523088 - DNA, 229 bp, Homo sapiens
actcgccctccttatggccacgcgtggtctgatacgcaatgtcacgtccgccgctgggcaacaggctggcaccggccagggacaatgcggccaacaggcgcagaggggtcagcagtttcaaagggaagctcctcaatcaggcggccgagggtcggcgtgagaggagactaaatgatctaagaattcgaaaataaataactttttcgaattagcttatgaggggaaatgg

SEQ ID NO: 523089 - DNA, 489 bp, Homo sapiens
  misc_feature (38)..(38): n is a, c, g, or t
  misc_feature (105)..(105): n is a, c, g, or t
  misc_feature (163)..(163): n is a, c, g, or t
  misc_feature (199)..(199): n is a, c, g, or t
  misc_feature (212)..(212): n is a, c, g, or t
  misc_feature (255)..(255): n is a, c, g, or t
  misc_feature (271)..(271): n is a, c, g, or t
  misc_feature (296)..(296): n is a, c, g, or t
  misc_feature (374)..(375): n is a, c, g, or t
  misc_feature (384)..(385): n is a, c, g, or t
  misc_feature (395)..(396): n is a, c, g, or t
  misc_feature (398)..(398): n is a, c, g, or t
  misc_feature (406)..(406): n is a, c, g, or t
  misc_feature (410)..(410): n is a, c, g, or t
  misc_feature (422)..(422): n is a, c, g, or t
  misc_feature (427)..(427): n is a, c, g, or t
  misc_feature (473)..(473): n is a, c, g, or t
  misc_feature (475)..(475): n is a, c, g, or t
  misc_feature (477)..(477): n is a, c, g, or t
  misc_feature (482)..(482): n is a, c, g, or t
tgaagagatagtttcatgttgagtttctcagatttttngtgtatctaagaattaactgaagagtttgttaagaatgcaggcttaaaggccaatccacagattatnatttcatacaaacaggatggtgcctaagatcctgtaaattattaaacaactgattaanaatagagaggtttctatgaagttaggcttgtccttntttcttatttganctggacaagtagaaggataataggtaggaccaagtgagcattntcagaatcaaagtagnggcaataacaagccaaggtgttttngcctagctaaagaagctcagactagaaaagacctccaggatcaagctgaagaatctggggtttagcctcttgacactnnggtttccgnncgggggggtnntnatttggtnctgncttttaagttgntgggntgccttctacgctgggaagccggcgggggggttcgggatggggtgntnanggtgngccttag

SEQ ID NO: 523090 - DNA, 755 bp, Homo sapiens
  misc_feature (659)..(659): n is a, c, g, or t
  misc_feature (726)..(726): n is a, c, g, or t
  misc_feature (746)..(746): n is a, c, g, or t
  misc_feature (753)..(753): n is a, c, g, or t
ttcaaaaacttaaacctttttatacagaaatccatattgaatatataaggcaacgctttgttagtttgctttttgagttattattatgtttgttacttgtaagtttgtagcagctcttcctgttttcaaacagatgagtttttaaacagataacccagcatgtttcaattttttgtggaataatagatgactcacagtaaagttacaacatattttcttttaagtaaaaaacttaaggaataatgatacttgctttgccattcaagggcctttttttatctgtttactttgtggatcttacacatacaccagatacgagttttggtgagataaggtggttataattatttacttattgtcagcaattgctttgtggcctattcatttgacagtaggtgatttcaaatcggagaagtccaacggggagctaagtgaatctcctggagctggaaaaggagcatctggctcaactcgaatcatcaccagattgcggaatccagatagcaaacttagtcagctgaagagccagcaggtggcagccgctgcacatgaagcaaataaattatttaaggagggcaaagaggtactggtagttaactctcaaggagaaatttcacggttgagcacaaaaaggagtgatcatgaaaggaatatcacantatttaaatggtcagagggagatcggtctaccacatcatacttcaccaattcattgctttgaataancaccagcacagagaagaccntgattanga

SEQ ID NO: 523091 - DNA, 831 bp, Homo sapiens
  misc_feature (735)..(735): n is a, c, g, or t
  misc_feature (802)..(802): n is a, c, g, or t
  misc_feature (822)..(822): n is a, c, g, or t
  misc_feature (829)..(829): n is a, c, g, or t
tttaatttacagtttcttctgggcctttcaacattatcaatgtctccctttctggcggcacgaatgaagaaattttggaatccataagagccaaaaagggagacattgataatgttaaaagccccacgggggaagaaacagaaaaagacaagaatgagactgagaatgactctaaagatgctgagaaaaacagagaagaatttgaagaccagtcccttgaaaaagacagtgacgacaaaacaccagatgatgaccctgagcaaggaaaatctgaggaagaagaacctaacaagacatgtgagagcagtaacactagtgctaccactacctccatccagcctaatctggaaaacagtaacagcagcagtgaactaaattcttcccagagtgaatctgctaaggcagctgatgatcctgaaaatggagaaagagaatctcatacacctgtctctattcaggaagagatagtaggtgatttcaaatcggagaagtccaacggggagctaagtgaatctcctggagctggaaaaggagcatctggctcaactcgaatcatcaccagattgcggaatccagatagcaaacttagtcagctgaagagccagcaggtggcagccgctgcacatgaagcaaataaattatttaaggagggcaaagaggtactggtagttaactctcaaggagaaatttcacggttgagcacaaaaaggagtgatcatgaaaggaatatcacantatttaaatggtcagagggagatcggtctaccacatcatacttcaccaattcattgctttgaataancaccagcacagagaagaccntgattanga

SEQ ID NO: 523092 - DNA, 828 bp, Homo sapiens
  misc_feature (732)..(732): n is a, c, g, or t
  misc_feature (799)..(799): n is a, c, g, or t
  misc_feature (819)..(819): n is a, c, g, or t
  misc_feature (826)..(826): n is a, c, g, or t
tttaatttacagtttcttctgggcctttcaacattatcaatgtctccctttctggcggcacgaatgaagaaattttggaatccataagagccaaaaagggagacattgataatgttaaaagccccacgggggaagaaacagaaaaagacaagaatgagactgagaatgactctaaagatgctgagaaaaacagagaagaatttgaagaccagtcccttgaaaaagacagtgacgacaaaacaccagatgatgaccctgagcaaggaaaatctgaggagccaacagaagttggggataaaggtaactctgtgtcagcaaatcttggcgacaacacaacaaatgcaacttcagaagagactagtccctctgaagggaggagccctgtggggtgtctctcagaaacccccgatagcagcaacatggcagagaagaaggtggcatctgagctcccccaggatgtgccagtaggtgatttcaaatcggagaagtccaacggggagctaagtgaatctcctggagctggaaaaggagcatctggctcaactcgaatcatcaccagattgcggaatccagatagcaaacttagtcagctgaagagccagcaggtggcagccgctgcacatgaagcaaataaattatttaaggagggcaaagaggtactggtagttaactctcaaggagaaatttcacggttgagcacaaaaaggagtgatcatgaaaggaatatcacantatttaaatggtcagagggagatcggtctaccacatcatacttcaccaattcattgctttgaataancaccagcacagagaagaccntgattanga

SEQ ID NO: 523093 - DNA, 205 bp, Homo sapiens
tgagtatagggctgtgactagtatgttgagtctgaagtaggagagagatattaatcaggagaacgtgttactagcacagagagttctcccagtaggttaatagatggggggtaagcgcgagcgttagctgagagcttgctagacagtcatcaaaacagctattatgtgggagtagagtttgaagtacttgagagacggattatgt

SEQ ID NO: 523094 - DNA, 413 bp, Homo sapiens
caatagcaactgaaatgtttacgttttgggtgattatatcaacatcaaagaaatgcaaatcaaaaccacaataagatgccatctcacaccaatcagaatggctattattacaaagtcaaaaaataacggatgttggcaaggctgcagagaaaagggaatacttatatactgtttgtgggaatgtagactggttcggccactgtggaaagcagtttggagatttctcaaagaatttaaagtggagctaccatttgacccggcaatctcatgactgggtatatacccaaaggacaataaataattttacacaaaagagacatgcacttgtatgctaatcacagcactgttcacgatagcaaagacgtggaatcaacctgggtgtccatcaatggtggattggataaggaagatgt

SEQ ID NO: 523095 - DNA, 107 bp, Homo sapiens
tcgcagtgtatacaccagtgggtgcatgcctccctgtacaagttccgtacgacacgtgagcaccgtgctagacctaccaaatatcgtacaagctggagcctggtacg

SEQ ID NO: 523096 - DNA, 999 bp, Homo sapiens
ggtcatgaagacttacaggcagagagaaaaacaagggaccaaagtagcagattctagtaaaggaccagatgaggcaaaaattaaggcactcttggaaagaacaggctacacacttgatgtgaccactggacagaggaagtatggaggaccacctccagattccgtttattcaggtcagcagccttctgttggcactgagatatttgtgggaaagatcccaagagatctatttgaggatgaacttgttccattatttgaagaaaagcctggaacctaatatatgggaatcctcggctatatgagtgtgagtccaccatcacatgggtctcataatagagaggtgatagcgctgtgtgacacttttgtgtacaaaagaagcagctcaggaggctgttaaacttgtattaattaatcattgacaattccggttcctgggaagaacccaattaatttgggtggttcttggcaattcttcagttggccaaacaattaggcttttggtggggctctattcctaagagtaaaaccaaggaacagattcttgaagaatttagcaaagtaacagagggtcttacagacgtcattttataccaccaaccggatgacaagaaaaaaaacagaggcttttgctttcttgaatatgaagatcacaaaacagctgcccaggcaaggcgtaggttaatgacgtggtaaagtcaaggtctgggggaatgttggaactgttgaatgggctgatcctatagaagatcctgatcctgaggttatggcaaaggtaaaaggtgctgttgtacgcaaacttgccaatattgttagcagaagagatttagaaaagggcatttaggtccgcttgggaaacgtggaacgagtgaagaagttacagattatgggtgcatccattttgatgagcgagatggtgtgtcaaggtatggaagaaaggaatggcaacagattggaaggaaacattttgacatggttaggcaaggcacagatcggaaaaaa

SEQ ID NO: 523097 - DNA, 187 bp, Homo sapiens
tgacatttactgtgatcggctaaagagcacgatgtggaatgaatgcgcaccacacttagtcgttgaaggagaagaaacacacaagaaatcgagatcaagagataacgtgagaagtaggagagaatgaaagccaataaagaatttcaacaggcagaaaaccaacatcgaatgcccagagagatcaaat

SEQ ID NO: 523098 - DNA, 312 bp, Homo sapiens
ctctggatgcaaggcatatgttctgagacagaaggaaccatgatttgagccaatgggataaaatcctgccagaggatacgcggtcaagagagggttcctatttagcaaatcaaagggacggatttgaatgctccaattctctgtcctgttgtgtggccttcagaagtgtttcaaacaaaaaaccaccacatagtcgtgattgtctcatataagagtatactgccctacaagtttatgatgccacgattattcactaaacctgtgtgcatatttttttcaacagccctacattacattctttgcgtcttagaa

SEQ ID NO: 523099 - DNA, 108 bp, Homo sapiens
tcatcagaagatgtggaaatgaattatctgacagagggattgagattctaatgtattgccaactgtaccagccgacagaagctgctatatcacgtttgtgttctcttg

SEQ ID NO: 523100 - DNA, 124 bp, Homo sapiens
cttcagacggcttacagctcagcaaggaacagaaagccaatataaagtaggaacgggtaagcggttcaccgctgggcgcacgggctcatgcccataatctcagcaccgtaggaggctgaggaaa

SEQ ID NO: 523101 - DNA, 107 bp, Homo sapiens
tgactcatagtgatcacaagatacggagtgcagttcatgcttgtatagcaaaaagagagatgagaatcaggaagagctctttactttcacgatcccttttactttaa

SEQ ID NO: 523102 - DNA, 446 bp, Homo sapiens
  misc_feature (2)..(3): n is a, c, g, or t
  misc_feature (14)..(14): n is a, c, g, or t
  misc_feature (357)..(357): n is a, c, g, or t
  misc_feature (408)..(408): n is a, c, g, or t
  misc_feature (420)..(420): n is a, c, g, or t
anntcggcacaggnatagtattaaatgtctctgatgaccactcttcaagcaatgtttggactctttattaaggacaaatgtgtgtacacactcttagatgatattaaaactaaggttaaaagattttaaattattttcagtagtgtgtcacttttaaatacttttgcataacctgaagagagtaaagtagttgaacattatttagatagtgatttcatagcaattggttttttattttctgaaatatagcccagagatattttattttttgcttattataagaaatcacatttcaaaatacacaattcagtttggaaaatcagtaagttagctttatttattcccaggtggttttcnggaaaatacgttttttttttttccttaggcctttcctaagggccaggagcngtccttccattnccccctaatccttttcccccctcctt

SEQ ID NO: 523103 - DNA, 256 bp, Homo sapiens
ccatctcctctgtatactccacactgacctaagaaaagaacagggtagtcagccaactctgtcactcagtagctgtgacagcccttcttcagaggcaggaaaactatggctgcgctagtatttcagctgtgctgtggaatatcaaatccctacaacggatgacgcaggtcctaactgttgacttccaattatggcagcagacctcaaaggatttgccctgggccaggatgtgaacttgtcatgtgtcttctagctc

SEQ ID NO: 523104 - DNA, 828 bp, Homo sapiens
ctctagaggatctcagaagacgacgaagggcaaaatctttgacctgattgggctgctccagaggatgactggcctcgagatgtatccctgcccgtgagcctttccccccagagggcccgcccagtgcagtcggtggtacctgagatggaggagtcgggagcacagtgctgctggaaatgctgacttttaaacccagcagaagacgaatctctgccttgtcgagctctgcagcactcttatctacataaggatgaaggtaatccggagtgagcaatggagtggcgtgccgatggaaggaagaaaagctgccgatttcccttctggagcacgtgagagggcaatctttgcctttatctctgaggctatggagggtcctccgtccatctttctacagagattacttggctgcttgtaatgacagttccgcctcccacctctccgtgttggaggcttcgtccttgctccttcccatttctctacgactagcggggtatgtgccctcttgtccctttccctacctttatgattggggtcctgtttagtacaggaaaaacaagaataaagaaaaaaagcatgtcagatgacgaaacggcgggatttgcagacaggccaggagatatggaaggaggggggggcataccataatttggccatggggaccggacatttttgggaaacagattgttttaaaacggtgtcgtcctaatatgggggtgtcttgaagaagtgcgcgcgaagggattaacaaccgtggctgggaacacaccttcttggatcgttgggggaaaaacaccttggggggggggaactttggaaacacctagaggt

SEQ ID NO: 523105 - DNA, 144 bp, Homo sapiens
tgtttgtttcgtgtccagagtgtgatgatatactactcttctcaccgtgagattttctcagccacgtgatagtacattctgaagatgctggcacctaggagacggccacagacacacactgctattgaaacttctaaaactagg

SEQ ID NO: 523106 - DNA, 385 bp, Homo sapiens
cgcagagaggctggagtgcctacgcctgcgcaatgagatcattgtcgagtttgacgagctcctactgaagcccatgttcagagccgtggagaagatcaagaccattggcaggacgtacatggcagctgcagggctcacacgtcgccttagggcacgagaaccaggagctggagcggcagcatgcccacattggtgtcatggtggaggtcagcatcgacctgatgagttagctggacgcggtctacaggcacttcttcaactgcttccggctccgcgtcggcataaaccatgggcctcggaatgctgtagtgattggggcccgcctcagagtgacatatggggaaacactgtgaatgtggccagacgaatgggcactgggcttggg

SEQ ID NO: 523107 - DNA, 2026 bp, Homo sapiens
  misc_feature (1597)..(1597): n is a, c, g, or t
  misc_feature (1627)..(1627): n is a, c, g, or t
  misc_feature (1653)..(1653): n is a, c, g, or t
  misc_feature (1657)..(1657): n is a, c, g, or t
  misc_feature (1723)..(1723): n is a, c, g, or t
  misc_feature (1734)..(1734): n is a, c, g, or t
  misc_feature (1746)..(1746): n is a, c, g, or t
  misc_feature (1757)..(1757): n is a, c, g, or t
atttccgcattgaaggggctgctccgaatggagggggaggggaggtgtttaggagaaagtaggggctgtgggtgtcgggagccggctgacgggtggacaagggggggttagcagctgggctgcgaccgttagggaggggctcaaggtgtgcatgtgtgagggaagagagagagagagaagggcgcctcagaggtgactttcagcctgcgagccttcttcccggggcgccataaacgcccccaatttcccagctgctaaaggaagaggaggtacctgtgcgtgcacgcagacgggaagggctggggaagcgggaggactgagaaaagccaagatcttagcaaagcaatgtctcaagatggtgcttctcagttccaagaagtcattcggcaagagctagaattatctgtgaagaaggaactagaaaaaatactcaccacagcatcatcacatgaatttgagcacaccaaaaaagacctggatggatttcggaagctatttcatagatttttgcaagaaaaggggccttctgtggattggggaaaaatccagagaccccctgaagattcgattcaaccctatgaaaagataaaggccaggggcttgcctgataatatatcttccgtgttgaacaaactagtggtggtgaaactcaatggtggtttgggaaccagcatgggctgcaaaggccctaaaagtctgattggtgtgaggaatgagaatacctttctggatctgactgttcagcaaattgaacatttgaataaaacctacaatacagatgttcctcttgttttaatgaactcttttaacacggatgaagataccaaaaaaatactacagaagtacaatcattgtcgtgtgaaaatctacactttcaatcaaagcaggtacccgaggattaataaagaatctttacttcctgtagcaaaggacgtgtcttactcaggggaaaatacagaagcttggtaccctccaggtcatggtgatatttacgccagtttctacaactctggattgcttgatacctttataggagaaggcaaagagtatatttttgtgtctaacatagataatctgggtgccacagtggatctgtatattcttaatcatctaatgaacccacccaatggaaaacgctgtgaatttgtcatggaagtcacaaataaaacacgtgcagatgtaaagggcgggacactcactcaatatgaaggcaaactgagactggtggaaattgctcaagtgccaaaagcacatgtagacgagttcaagtctgtatcaaagttcaaaatatttaatacaaacaacctatggatttctcttgcagcagttaaaagactgcaggagcaaaatgccattgacatggaaatcattgtgaatgcaaagactttggatggaggcctgaatgtcattcaattagaaactgcagtaggggctgccatcaaaagttttgagaattctctaggtattaatgtgccaaggagccgttttctgcctgtcaaaaccacatcagatctcttgctggtgatgtcaaacctctatagtcttaatgcaggatctctgacaatgagtgaaaagcgggaatttcctacaggtgccntggttaaattaggcagttctttacgaaggntccacgattatctaagaagatttganagtntaccagatatgcttgaattgggatcacctcacagttcaggaagatgtgaattgggacacaatggtncattaaaggangggtataacatngcaatctgggncgaatgatatccacctggagcaggaatgagacgaggatgggtctgggagctcgcatctggacactggattgaaaatctgggaccttaatagggagtccttacaggagccctaggatccaaaaggggcattatatgtagaccgcgggttaaaaagagtcgcggcattgctaaacagggacatctcgagaacaagactagagagcacggggggatcaaccatctggccacggccaaaaacgggctggcgggtgttcatcagccacacgggc

SEQ ID NO: 523108 - DNA, 359 bp, Homo sapiens
tcaatcccctgagctccccaaagtttaaaaaaaaacacccgaaaccaaaaaattcaagccctggttattacaattttacgggggttttattttacccccccccaagcctcagaggactttgagtttcccttccccatttccggggggatttaggggtcaacattttttgtaaccacagggttccccgggatttacgtcattattgggtcaactttcctcccaatttggtttatcccccaaataaaatttccctttacatccaaacatccctttgggtttgaaacccccccctgaaaatggcattttgtaaaagtgggttgactatttttggaggtccccccccattgaagagggtttta

SEQ ID NO: 523109 - DNA, 1911 bp, Homo sapiens
  misc_feature (1482)..(1482): n is a, c, g, or t
  misc_feature (1512)..(1512): n is a, c, g, or t
  misc_feature (1538)..(1538): n is a, c, g, or t
  misc_feature (1542)..(1542): n is a, c, g, or t
  misc_feature (1608)..(1608): n is a, c, g, or t
  misc_feature (1619)..(1619): n is a, c, g, or t
  misc_feature (1631)..(1631): n is a, c, g, or t
  misc_feature (1642)..(1642): n is a, c, g, or t
atttccgcattgaaggggctgctccgaatggagggggaggggaggtgtttaggagaaagtaggggctgtgggtgtcgggagccggctgacgggtggacaagggggggttagcagctgggctgcgaccgttagggaggggctcaaggtgtgcatgtgtgagggaagagagagagagagaagggcgcctcagaggtgactttcagcctgcgagccttcttcccggggcgccataaacgcccccaatttcccagctgctaaaggaagaggaagatcttagcaaagcaatgtctcaagatggtgcttctcagttccaagaagtcattcggcaagagctagaattatctgtgaagaaggaactagaaaaaatactcaccacagcatcatcacatgaatttgagcacaccaaaaaagacctggatggatttcggaagctatttcatagatttttgcaagaaaaggggccttctgtggattggggaaaaatccagagaccccctgaagattcgattcaaccctatgaaaagataaaggccaggggcttgcctgataatatatcttccgtgttgaacaaactagtggtggtgaaactcaatggtggtttgggaaccagcatgggctgcaaaggccctaaaagtctgattggtgtgaggaatgagaatacctttctggatctgactgttcagcaaattgaacatttgaataaaacctacaatacagatgttcctcttgttttaatgaactcttttaacacggatgaagataccaaaagcaggtacccgaggattaataaagaatctttacttcctgtagcaaaggacgtgtcttactcaggggaaaatacagaagcttggtaccctccaggtcatggtgatatttacgccagtttctacaactctggattgcttgatacctttataggagaaggcaaagagtatatttttgtgtctaacatagataatctgggtgccacagtggatctgtatattcttaatcatctaatgaacccacccaatggaaaacgctgtgaatttgtcatggaagtcacaaataaaacacgtgcagatgtaaagggcgggacactcactcaatatgaaggcaaactgagactggtggaaattgctcaagtgccaaaagcacatgtagacgagttcaagtctgtatcaaagttcaaaatatttaatacaaacaacctatggatttctcttgcagcagttaaaagactgcaggagcaaaatgccattgacatggaaatcattgtgaatgcaaagactttggatggaggcctgaatgtcattcaattagaaactgcagtaggggctgccatcaaaagttttgagaattctctaggtattaatgtgccaaggagccgttttctgcctgtcaaaaccacatcagatctcttgctggtgatgtcaaacctctatagtcttaatgcaggatctctgacaatgagtgaaaagcgggaatttcctacaggtgccntggttaaattaggcagttctttacgaaggntccacgattatctaagaagatttganagtntaccagatatgcttgaattgggatcacctcacagttcaggaagatgtgaattgggacacaatggtncattaaaggangggtataacatngcaatctgggncgaatgatatccacctggagcaggaatgagacgaggatgggtctgggagctcgcatctggacactggattgaaaatctgggaccttaatagggagtccttacaggagccctaggatccaaaaggggcattatatgtagaccgcgggttaaaaagagtcgcggcattgctaaacagggacatctcgagaacaagactagagagcacggggggatcaaccatctggccacggccaaaaacgggctggcgggtgttcatcagccacacgggc

SEQ ID NO: 523110 - DNA, 392 bp, Homo sapiens
gtgatctagaggatcccgttttgcggtgccttttcccgcaaatttcactagtcaataggtgttattattcttgtaattttgccagtctagtagatataaaatgttgcaggtaaccactaactggggccactggcgtgggcagtaaaggaatttaccaagacaattgtaggtaaggaaaggcagatttattagagaatgtaggaaaatacgttgcaagaatggaaagggcaggtcagcaagggaggagctggctgccaggagacaaaggcttgctggggattttataggatggtgcttgtgccggagagggttacatgcagtgctgataatgccaaggtttcagtgagctaacctgcattctcctgtcaactgaggtcataagttgagtgcag

SEQ ID NO: 523111 - DNA, 98 bp, Homo sapiens
gtttgaggaatccaatagacagaattagccaaaaaggtttacccaaaaagagccagaaagatcgagggggcaaacgagaaaaacccagtaggagaaaa

SEQ ID NO: 523112 - DNA, 1726 bp, Homo sapiens
  misc_feature (1297)..(1297): n is a, c, g, or t
  misc_feature (1327)..(1327): n is a, c, g, or t
  misc_feature (1353)..(1353): n is a, c, g, or t
  misc_feature (1357)..(1357): n is a, c, g, or t
  misc_feature (1423)..(1423): n is a, c, g, or t
  misc_feature (1434)..(1434): n is a, c, g, or t
  misc_feature (1446)..(1446): n is a, c, g, or t
  misc_feature (1457)..(1457): n is a, c, g, or t
gctgggtttagtttgcctccctgaaatcaagatcttagcaaagcaatgtctcaagatggtgcttctcagttccaagaagtcattcggcaagagctagaattatctgtgaagaaggaactagaaaaaatactcaccacagcatcatcacatgaatttgagcacaccaaaaaagacctggatggatttcggaagctatttcatagatttttgcaagaaaaggggccttctgtggattggggaaaaatccagagaccccctgaagattcgattcaaccctatgaaaagataaaggccaggggcttgcctgataatatatcttccgtgttgaacaaactagtggtggtgaaactcaatggtggtttgggaaccagcatgggctgcaaaggccctaaaagtctgattggtgtgaggaatgagaatacctttctggatctgactgttcagcaaattgaacatttgaataaaacctacaatacagatgttcctcttgttttaatgaactcttttaacacggatgaagataccaaaaaaatactacagaagtacaatcattgtcgtgtgaaaatctacactttcaatcaaagcaggtacccgaggattaataaagaatctttacttcctgtagcaaaggacgtgtcttactcaggggaaaatacagaagcttggtaccctccaggtcatggtgatatttacgccagtttctacaactctggattgcttgatacctttataggagaaggcaaagagtatatttttgtgtctaacatagataatctgggtgccacagtggatctgtatattcttaatcatctaatgaacccacccaatggaaaacgctgtgaatttgtcatggaagtcacaaataaaacacgtgcagatgtaaagggcgggacactcactcaatatgaaggcaaactgagactggtggaaattgctcaagtgccaaaagcacatgtagacgagttcaagtctgtatcaaagttcaaaatatttaatacaaacaacctatggatttctcttgcagcagttaaaagactgcaggagcaaaatgccattgacatggaaatcattgtgaatgcaaagactttggatggaggcctgaatgtcattcaattagaaactgcagtaggggctgccatcaaaagttttgagaattctctaggtattaatgtgccaaggagccgttttctgcctgtcaaaaccacatcagatctcttgctggtgatgtcaaacctctatagtcttaatgcaggatctctgacaatgagtgaaaagcgggaatttcctacaggtgccntggttaaattaggcagttctttacgaaggntccacgattatctaagaagatttganagtntaccagatatgcttgaattgggatcacctcacagttcaggaagatgtgaattgggacacaatggtncattaaaggangggtataacatngcaatctgggncgaatgatatccacctggagcaggaatgagacgaggatgggtctgggagctcgcatctggacactggattgaaaatctgggaccttaatagggagtccttacaggagccctaggatccaaaaggggcattatatgtagaccgcgggttaaaaagagtcgcggcattgctaaacagggacatctcgagaacaagactagagagcacggggggatcaaccatctggccacggccaaaaacgggctggcgggtgttcatcagccacacgggc

SEQ ID NO: 523113 - DNA, 889 bp, Homo sapiens
  misc_feature (283)..(283): n is a, c, g, or t
ttgggttgttcccgcttcctgcttggcctagactgtcagcgcggcgtccgttccggttcccccccgtccaggtgacccagcccaccggtgagcacaaccatcgattgaggaaagaagaacggacgggctcgcttgatcacaacagttttagacagcgtatttcacgctggagaaacctcaatactataatcttaaggacttggggacacaccaaaccacccgggggtacgccggagggaatcttaaaagaattgggtgttcagaatgtcaaagggatccccanacacatgggagctgaagccagagtcagacacttcccaggagaagcaagagtgctcagaagactcctacccgcatgctagtgaacgactagcagcgatgctatgccaaaggcgctgatactggaaggcttgaacacccgtatgttaataggggttaagtgaccgtactttgatttctctcggtaaattttttaaacccgtaattcttgtgaaagtgtttttaactgtttttttgaggagaaagaaccagatttatttatagacattaacttgtattaaacccgattattcaccgtaggaataggggttggaggattaagagggtttttctttaaataatagcttttaaagtgtaccaataggaaatttttttaagtgaggactctctaccccttgccgtatctaaggagctgaggtaataccagatcccaggagaattgtatagccagaaaaaaaccagtcaactaccgaacttctttaaagggattaaaaccccaagttccttattttggaattgtccaaggaccaagcggtgttttttttttaaacaggtgatcacgtttcgtgttcatactccacgtttattaaaggagagagtttgttagtga

SEQ ID NO: 523114 - DNA, 1796 bp, Homo sapiens
  misc_feature (1367)..(1367): n is a, c, g, or t
  misc_feature (1397)..(1397): n is a, c, g, or t
  misc_feature (1423)..(1423): n is a, c, g, or t
  misc_feature (1427)..(1427): n is a, c, g, or t
  misc_feature (1493)..(1493): n is a, c, g, or t
  misc_feature (1504)..(1504): n is a, c, g, or t
  misc_feature (1516)..(1516): n is a, c, g, or t
  misc_feature (1527)..(1527): n is a, c, g, or t
gctattctgctgttgggtcaccttctgcctacttgtgacattccttctgctcttccttgctccagggattgttccagggcccccagttattctaaatgaagatcttagcaaagcaatgtctcaagatggtgcttctcagttccaagaagtcattcggcaagagctagaattatctgtgaagaaggaactagaaaaaatactcaccacagcatcatcacatgaatttgagcacaccaaaaaagacctggatggatttcggaagctatttcatagatttttgcaagaaaaggggccttctgtggattggggaaaaatccagagaccccctgaagattcgattcaaccctatgaaaagataaaggccaggggcttgcctgataatatatcttccgtgttgaacaaactagtggtggtgaaactcaatggtggtttgggaaccagcatgggctgcaaaggccctaaaagtctgattggtgtgaggaatgagaatacctttctggatctgactgttcagcaaattgaacatttgaataaaacctacaatacagatgttcctcttgttttaatgaactcttttaacacggatgaagataccaaaaaaatactacagaagtacaatcattgtcgtgtgaaaatctacactttcaatcaaagcaggtacccgaggattaataaagaatctttacttcctgtagcaaaggacgtgtcttactcaggggaaaatacagaagcttggtaccctccaggtcatggtgatatttacgccagtttctacaactctggattgcttgatacctttataggagaaggcaaagagtatatttttgtgtctaacatagataatctgggtgccacagtggatctgtatattcttaatcatctaatgaacccacccaatggaaaacgctgtgaatttgtcatggaagtcacaaataaaacacgtgcagatgtaaagggcgggacactcactcaatatgaaggcaaactgagactggtggaaattgctcaagtgccaaaagcacatgtagacgagttcaagtctgtatcaaagttcaaaatatttaatacaaacaacctatggatttctcttgcagcagttaaaagactgcaggagcaaaatgccattgacatggaaatcattgtgaatgcaaagactttggatggaggcctgaatgtcattcaattagaaactgcagtaggggctgccatcaaaagttttgagaattctctaggtattaatgtgccaaggagccgttttctgcctgtcaaaaccacatcagatctcttgctggtgatgtcaaacctctatagtcttaatgcaggatctctgacaatgagtgaaaagcgggaatttcctacaggtgccntggttaaattaggcagttctttacgaaggntccacgattatctaagaagatttganagtntaccagatatgcttgaattgggatcacctcacagttcaggaagatgtgaattgggacacaatggtncattaaaggangggtataacatngcaatctgggncgaatgatatccacctggagcaggaatgagacgaggatgggtctgggagctcgcatctggacactggattgaaaatctgggaccttaatagggagtccttacaggagccctaggatccaaaaggggcattatatgtagaccgcgggttaaaaagagtcgcggcattgctaaacagggacatctcgagaacaagactagagagcacggggggatcaaccatctggccacggccaaaaacgggctggcgggtgttcatcagccacacgggc

SEQ ID NO: 523115 - DNA, 349 bp, Homo sapiens
  misc_feature (46)..(46): n is a, c, g, or t
  misc_feature (54)..(54): n is a, c, g, or t
  misc_feature (70)..(70): n is a, c, g, or t
  misc_feature (134)..(134): n is a, c, g, or t
  misc_feature (153)..(153): n is a, c, g, or t
  misc_feature (162)..(162): n is a, c, g, or t
  misc_feature (191)..(191): n is a, c, g, or t
  misc_feature (198)..(198): n is a, c, g, or t
  misc_feature (232)..(232): n is a, c, g, or t
  misc_feature (237)..(237): n is a, c, g, or t
  misc_feature (247)..(247): n is a, c, g, or t
  misc_feature (254)..(254): n is a, c, g, or t
  misc_feature (265)..(265): n is a, c, g, or t
  misc_feature (283)..(283): n is a, c, g, or t
  misc_feature (289)..(289): n is a, c, g, or t
  misc_feature (291)..(291): n is a, c, g, or t
  misc_feature (293)..(293): n is a, c, g, or t
  misc_feature (297)..(297): n is a, c, g, or t
  misc_feature (300)..(300): n is a, c, g, or t
  misc_feature (332)..(332): n is a, c, g, or t
ccagtagggataatggggaaaggaacccaaaattggttcaggttgngtttattnatacgggccccctaancaaaggttttggacctcgtgctacccctgctggggtttgactggttggttggtgagctacaacncagaccaaaaagtggcctncccaaagtnagggttaaatgccaggcctgcctctttgngtggcanaggatgggactcaaaggcttggggaggttggagngtcanagtggatttnttttttnagacctactcncccccccctggaaagganagaggncncncctnttnccccccccccgagaaataaatttgtgaggggnaccctcctccttcatga

SEQ ID NO: 523116 - DNA, 260 bp, Homo sapiens
ccgcgccttctacaataactccccccaccattgggtactgcatccagtaccggcgtctgtcacgatcttggccaaacatcactgaacgctatgagtgagacgcatcacagctgcttccttctgtactgagtctgttgtttactcagtttttcaatctgtttgtccagctcttcaacacttgagagactacttgccactcttaattcagagaccgtggtcacactttgaaagattgtttcaagtatcccagttcttccttt

SEQ ID NO: 523117 - DNA, 2020 bp, Homo sapiens
  misc_feature (1591)..(1591): n is a, c, g, or t
  misc_feature (1621)..(1621): n is a, c, g, or t
  misc_feature (1647)..(1647): n is a, c, g, or t
  misc_feature (1651)..(1651): n is a, c, g, or t
  misc_feature (1717)..(1717): n is a, c, g, or t
  misc_feature (1728)..(1728): n is a, c, g, or t
  misc_feature (1740)..(1740): n is a, c, g, or t
  misc_feature (1751)..(1751): n is a, c, g, or t
atttccgcattgaaggggctgctccgaatggagggggaggggaggtgtttaggagaaagtaggggctgtgggtgtcgggagccggctgacgggtggacaagggggggttagcagctgggctgcgaccgttagggaggggctcaaggtgtgcatgtgtgagggaagagagagagagagaagggcgcctcagaggtgactttcagcctgcgagccttcttcccggggcgccataaacgcccccaatttcccagctgctaaaggaagaggagtctgcctctgaaacttagacctgtgttgacagagagcacatgcaatattaaataagatcttagcaaagcaatgtctcaagatggtgcttctcagttccaagaagtcattcggcaagagctagaattatctgtgaagaaggaactagaaaaaatactcaccacagcatcatcacatgaatttgagcacaccaaaaaagacctggatggatttcggaagctatttcatagatttttgcaagaaaaggggccttctgtggattggggaaaaatccagagaccccctgaagattcgattcaaccctatgaaaagataaaggccaggggcttgcctgataatatatcttccgtgttgaacaaactagtggtggtgaaactcaatggtggtttgggaaccagcatgggctgcaaaggccctaaaagtctgattggtgtgaggaatgagaatacctttctggatctgactgttcagcaaattgaacatttgaataaaacctacaatacagatgttcctcttgttttaatgaactcttttaacacggatgaagataccaaaaaaatactacagaagtacaatcattgtcgtgtgaaaatctacactttcaatcaaagcaggtacccgaggattaataaagaatctttacttcctgtagcaaaggacgtgtcttactcaggggaaaatacagaagcttggtaccctccaggtcatggtgatatttacgccagtttctacaactctggattgcttgatacctttataggagaaggcaaagagtatatttttgtgtctaacatagataatctgggtgccacagtggatctgtatattcttaatcatctaatgaacccacccaatggaaaacgctgtgaatttgtcatggaagtcacaaataaaacacgtgcagatgtaaagggcgggacactcactcaatatgaaggcaaactgagactggtggaaattgctcaagtgccaaaagcacatgtagacgagttcaagtctgtatcaaagttcaaaatatttaatacaaacaacctatggatttctcttgcagcagttaaaagactgcaggagcaaaatgccattgacatggaaatcattgtgaatgcaaagactttggatggaggcctgaatgtcattcaattagaaactgcagtaggggctgccatcaaaagttttgagaattctctaggtattaatgtgccaaggagccgttttctgcctgtcaaaaccacatcagatctcttgctggtgatgtcaaacctctatagtcttaatgcaggatctctgacaatgagtgaaaagcgggaatttcctacaggtgccntggttaaattaggcagttctttacgaaggntccacgattatctaagaagatttganagtntaccagatatgcttgaattgggatcacctcacagttcaggaagatgtgaattgggacacaatggtncattaaaggangggtataacatngcaatctgggncgaatgatatccacctggagcaggaatgagacgaggatgggtctgggagctcgcatctggacactggattgaaaatctgggaccttaatagggagtccttacaggagccctaggatccaaaaggggcattatatgtagaccgcgggttaaaaagagtcgcggcattgctaaacagggacatctcgagaacaagactagagagcacggggggatcaaccatctggccacggccaaaaacgggctggcgggtgttcatcagccacacgggc

SEQ ID NO: 523118 - DNA, 627 bp, Homo sapiens
  misc_feature (4)..(4): n is a, c, g, or t
  misc_feature (7)..(7): n is a, c, g, or t
  misc_feature (30)..(30): n is a, c, g, or t
  misc_feature (126)..(126): n is a, c, g, or t
  misc_feature (163)..(163): n is a, c, g, or t
  misc_feature (176)..(176): n is a, c, g, or t
gcanttnaattgaataaaggtatttcaagnctgtgcagcttcaaatgccggttgtggttcacccgatcctatagacgcacaggacactacagctagcatggccaagaacatggagtcaggggtttntgcctgaccctggcgctccagtagtttctcagcttcntgtgtcgttttcntgatctgtccccatgttatggggttggatgtcattgtgactccggtcggcccttgttctgtctttgcattcagattccgctggctcatggctcgtactggaggtaacaggcccacggttgaataccatggatccctccggtctcccgttccatggtcacacacacctggagggcacccacacggtttgtccatctcctgtaaaaacacaagcataccctcgtccccacgtcagcaaatccaccggacctttccattgtccttcttctggggatttccataacacttttggataaacttgcctcttttcctctagcagttgccagtgtcgttctgctggggtcttgccatccgtaccaggagtcaaacaatttaaagtaaacaaggctaaatgtaattttgtttgaagtggtaattggtcccctattctccctttttgttttttcagcatgc

SEQ ID NO: 523119 - DNA, 2079 bp, Homo sapiens
  misc_feature (1650)..(1650): n is a, c, g, or t
  misc_feature (1680)..(1680): n is a, c, g, or t
  misc_feature (1706)..(1706): n is a, c, g, or t
  misc_feature (1710)..(1710): n is a, c, g, or t
  misc_feature (1776)..(1776): n is a, c, g, or t
  misc_feature (1787)..(1787): n is a, c, g, or t
  misc_feature (1799)..(1799): n is a, c, g, or t
  misc_feature (1810)..(1810): n is a, c, g, or t
gatcatcgtacaaaggccggctagccgaagcataaagtctagtctgacacacgtaagcagtggaagtcttggctaaattggaaccagaagatggcaggcagccctatgcccttctccttttaaaatgaaaacgtcgatacagggaagtagaggcaccttggaattgccaatacctctcaaggggttcttgtttagtggagaatatgaaactggagtgaaacgagtcctaactagttgacaccactgaattactgccacaggataaagggaccttgggattgagcccttttcatttgctgaataccagaaatcagttatagcttaccagctgtttgaatggcttcctggagttttcagttggtggttttatgtttttgttttaagatcttagcaaagcaatgtctcaagatggtgcttctcagttccaagaagtcattcggcaagagctagaattatctgtgaagaaggaactagaaaaaatactcaccacagcatcatcacatgaatttgagcacaccaaaaaagacctggatggatttcggaagctatttcatagatttttgcaagaaaaggggccttctgtggattggggaaaaatccagagaccccctgaagattcgattcaaccctatgaaaagataaaggccaggggcttgcctgataatatatcttccgtgttgaacaaactagtggtggtgaaactcaatggtggtttgggaaccagcatgggctgcaaaggccctaaaagtctgattggtgtgaggaatgagaatacctttctggatctgactgttcagcaaattgaacatttgaataaaacctacaatacagatgttcctcttgttttaatgaactcttttaacacggatgaagataccaaaaaaatactacagaagtacaatcattgtcgtgtgaaaatctacactttcaatcaaagcaggtacccgaggattaataaagaatctttacttcctgtagcaaaggacgtgtcttactcaggggaaaatacagaagcttggtaccctccaggtcatggtgatatttacgccagtttctacaactctggattgcttgatacctttataggagaaggcaaagagtatatttttgtgtctaacatagataatctgggtgccacagtggatctgtatattcttaatcatctaatgaacccacccaatggaaaacgctgtgaatttgtcatggaagtcacaaataaaacacgtgcagatgtaaagggcgggacactcactcaatatgaaggcaaactgagactggtggaaattgctcaagtgccaaaagcacatgtagacgagttcaagtctgtatcaaagttcaaaatatttaatacaaacaacctatggatttctcttgcagcagttaaaagactgcaggagcaaaatgccattgacatggaaatcattgtgaatgcaaagactttggatggaggcctgaatgtcattcaattagaaactgcagtaggggctgccatcaaaagttttgagaattctctaggtattaatgtgccaaggagccgttttctgcctgtcaaaaccacatcagatctcttgctggtgatgtcaaacctctatagtcttaatgcaggatctctgacaatgagtgaaaagcgggaatttcctacaggtgccntggttaaattaggcagttctttacgaaggntccacgattatctaagaagatttganagtntaccagatatgcttgaattgggatcacctcacagttcaggaagatgtgaattgggacacaatggtncattaaaggangggtataacatngcaatctgggncgaatgatatccacctggagcaggaatgagacgaggatgggtctgggagctcgcatctggacactggattgaaaatctgggaccttaatagggagtccttacaggagccctaggatccaaaaggggcattatatgtagaccgcgggttaaaaagagtcgcggcattgctaaacagggacatctcgagaacaagactagagagcacggggggatcaaccatctggccacggccaaaaacgggctggcgggtgttcatcagccacacgggc

SEQ ID NO: 523120 - DNA, 486 bp, Homo sapiens
agaaaggctgggacccccgcggttagatcccacagtctttggatgtggctgaaggcaaatacaccattgaaggaccttttgttttgaagggctttcccctttgaatttggtttgaaacaagcagcttttgtttttagcccaaggaaagacccaaacatagggaaataaaagcctttatttttgttttggaagtaattgttgaagttgggcagttgatcagggcccagttaaaagcaatgtttataaaaattgattgttaaacccaatttaccctggcatgtgtggggtagtttttaaaaggcccttcccctttgaaattttttttcccctaaaaaggttttagggatttaaaagtctagttttggatttttttgggggggttccccgtttttcaggattaccccctgaataattttctggacagggggggttgtgctaaaccctgggatgtttaattgcaccaataaaaccctttttttaaaagga

SEQ ID NO: 523121 - DNA, 1992 bp, Homo sapiens
  misc_feature (1563)..(1563): n is a, c, g, or t
  misc_feature (1593)..(1593): n is a, c, g, or t
  misc_feature (1619)..(1619): n is a, c, g, or t
  misc_feature (1623)..(1623): n is a, c, g, or t
  misc_feature (1689)..(1689): n is a, c, g, or t
  misc_feature (1700)..(1700): n is a, c, g, or t
  misc_feature (1712)..(1712): n is a, c, g, or t
  misc_feature (1723)..(1723): n is a, c, g, or t
agcggatggagaaatttaagttcgtgtggttttaccttttccgggagtctccagctggccctcatttgtgtccggagctcaggagttcccaaaccgactcagtcgcaccaagtttccgtcttttggaattggggaaggagtttctttctttcttttcttttttcttgagccagttttaatcgctttgaataaatactcccttaagtagttaaatataggaggagaaagaatacatcggttgttaaagcaggagaggaagagagacctgccctgtagcgtgactcctctagaaaaaaaaaaaaaaagccggagtattttactaagcccctaaaatgtcgagatttgtacaagatcttagcaaagcaatgtctcaagatggtgcttctcagttccaagaagtcattcggcaagagctagaattatctgtgaagaaggaactagaaaaaatactcaccacagcatcatcacatgaatttgagcacaccaaaaaagacctggatggatttcggaagctatttcatagatttttgcaagaaaaggggccttctgtggattggggaaaaatccagagaccccctgaagattcgattcaaccctatgaaaagataaaggccaggggcttgcctgataatatatcttccgtgttgaacaaactagtggtggtgaaactcaatggtggtttgggaaccagcatgggctgcaaaggccctaaaagtctgattggtgtgaggaatgagaatacctttctggatctgactgttcagcaaattgaacatttgaataaaacctacaatacagatgttcctcttgttttaatgaactcttttaacacggatgaagataccaaaagcaggtacccgaggattaataaagaatctttacttcctgtagcaaaggacgtgtcttactcaggggaaaatacagaagcttggtaccctccaggtcatggtgatatttacgccagtttctacaactctggattgcttgatacctttataggagaaggcaaagagtatatttttgtgtctaacatagataatctgggtgccacagtggatctgtatattcttaatcatctaatgaacccacccaatggaaaacgctgtgaatttgtcatggaagtcacaaataaaacacgtgcagatgtaaagggcgggacactcactcaatatgaaggcaaactgagactggtggaaattgctcaagtgccaaaagcacatgtagacgagttcaagtctgtatcaaagttcaaaatatttaatacaaacaacctatggatttctcttgcagcagttaaaagactgcaggagcaaaatgccattgacatggaaatcattgtgaatgcaaagactttggatggaggcctgaatgtcattcaattagaaactgcagtaggggctgccatcaaaagttttgagaattctctaggtattaatgtgccaaggagccgttttctgcctgtcaaaaccacatcagatctcttgctggtgatgtcaaacctctatagtcttaatgcaggatctctgacaatgagtgaaaagcgggaatttcctacaggtgccntggttaaattaggcagttctttacgaaggntccacgattatctaagaagatttganagtntaccagatatgcttgaattgggatcacctcacagttcaggaagatgtgaattgggacacaatggtncattaaaggangggtataacatngcaatctgggncgaatgatatccacctggagcaggaatgagacgaggatgggtctgggagctcgcatctggacactggattgaaaatctgggaccttaatagggagtccttacaggagccctaggatccaaaaggggcattatatgtagaccgcgggttaaaaagagtcgcggcattgctaaacagggacatctcgagaacaagactagagagcacggggggatcaaccatctggccacggccaaaaacgggctggcgggtgttcatcagccacacgggc

SEQ ID NO: 523122 - DNA, 1987 bp, Homo sapiens
  misc_feature (1558)..(1558): n is a, c, g, or t
  misc_feature (1588)..(1588): n is a, c, g, or t
  misc_feature (1614)..(1614): n is a, c, g, or t
  misc_feature (1618)..(1618): n is a, c, g, or t
  misc_feature (1684)..(1684): n is a, c, g, or t
  misc_feature (1695)..(1695): n is a, c, g, or t
  misc_feature (1707)..(1707): n is a, c, g, or t
  misc_feature (1718)..(1718): n is a, c, g, or t
agcggatggagaaatttaagttcgtgtggttttaccttttccgggagtctccagctggccctcatttgtgtccggagctcaggagttcccaaaccgactcagtcgcaccaagtttccgtcttttggaattggggaaggagtttctttctttcttttcttttttcttgagccagttttaatcgctttgaataaatactcccttaagtagttaaatataggaggagaaagaatacatcggttgttaaagcaggagaggaagagagacctgccctgtagcgtgactcctctagaaaaaaaaaaaaaaagccggagtaagatggtgcttctcagttccaagaagtcattcggcaagagctagaattatctgtgaagaaggaactagaaaaaatactcaccacagcatcatcacatgaatttgagcacaccaaaaaagacctggatggatttcggaagctatttcatagatttttgcaagaaaaggggccttctgtggattggggaaaaatccagagaccccctgaagattcgattcaaccctatgaaaagataaaggccaggggcttgcctgataatatatcttccgtgttgaacaaactagtggtggtgaaactcaatggtggtttgggaaccagcatgggctgcaaaggccctaaaagtctgattggtgtgaggaatgagaatacctttctggatctgactgttcagcaaattgaacatttgaataaaacctacaatacagatgttcctcttgttttaatgaactcttttaacacggatgaagataccaaaaaaatactacagaagtacaatcattgtcgtgtgaaaatctacactttcaatcaaagcaggtacccgaggattaataaagaatctttacttcctgtagcaaaggacgtgtcttactcaggggaaaatacagaagcttggtaccctccaggtcatggtgatatttacgccagtttctacaactctggattgcttgatacctttataggagaaggcaaagagtatatttttgtgtctaacatagataatctgggtgccacagtggatctgtatattcttaatcatctaatgaacccacccaatggaaaacgctgtgaatttgtcatggaagtcacaaataaaacacgtgcagatgtaaagggcgggacactcactcaatatgaaggcaaactgagactggtggaaattgctcaagtgccaaaagcacatgtagacgagttcaagtctgtatcaaagttcaaaatatttaatacaaacaacctatggatttctcttgcagcagttaaaagactgcaggagcaaaatgccattgacatggaaatcattgtgaatgcaaagactttggatggaggcctgaatgtcattcaattagaaactgcagtaggggctgccatcaaaagttttgagaattctctaggtattaatgtgccaaggagccgttttctgcctgtcaaaaccacatcagatctcttgctggtgatgtcaaacctctatagtcttaatgcaggatctctgacaatgagtgaaaagcgggaatttcctacaggtgccntggttaaattaggcagttctttacgaaggntccacgattatctaagaagatttganagtntaccagatatgcttgaattgggatcacctcacagttcaggaagatgtgaattgggacacaatggtncattaaaggangggtataacatngcaatctgggncgaatgatatccacctggagcaggaatgagacgaggatgggtctgggagctcgcatctggacactggattgaaaatctgggaccttaatagggagtccttacaggagccctaggatccaaaaggggcattatatgtagaccgcgggttaaaaagagtcgcggcattgctaaacagggacatctcgagaacaagactagagagcacggggggatcaaccatctggccacggccaaaaacgggctggcgggtgttcatcagccacacgggc

SEQ ID NO: 523123 - DNA, 512 bp, Homo sapiens
acatggagtagcacagctcagtctctttgggtagcagtacatgctaccaattctccaggactccttccagtgttgctactggagcctatattttaatgtattagcttgtagtagcagaaatatttctctgtgctcatgaatctacaaacatgtgagaaaacaaaacatataccctgcaggactgtgtgttttaccagcaagtagcagaaagcgcctttgtggaagcaaggaatagtgctaatatttactatgtcaacccccggcatgcaccactcattctcattacctgcctggctcttaagggtattttattttgtagcctctgcctaggaagacttggaagacggaaatctgtagatagtctgcaactatttatccacccatttctgcttacataggtcatggcagaattaccgtggcacgctactttggccagagttctgctgtctttagcccttgcatagttaatcacctgcagcaaacttaaagaatcttatccatcggtcttccca

SEQ ID NO: 523124 - DNA, 2216 bp, Homo sapiens
  misc_feature (1787)..(1787): n is a, c, g, or t
  misc_feature (1817)..(1817): n is a, c, g, or t
  misc_feature (1843)..(1843): n is a, c, g, or t
  misc_feature (1847)..(1847): n is a, c, g, or t
  misc_feature (1913)..(1913): n is a, c, g, or t
  misc_feature (1924)..(1924): n is a, c, g, or t
  misc_feature (1936)..(1936): n is a, c, g, or t
  misc_feature (1947)..(1947): n is a, c, g, or t
agcggatggagaaatttaagttcgtgtggttttaccttttccgggagtctccagctggccctcatttgtgtccggagctcaggagttcccaaaccgactcagtcgcaccaagtttccgtcttttggaattggggaaggagtttctttctttcttttcttttttcttgagccagttttaatcgctttgaataaatactcccttaagtagttaaatataggaggagaaagaatacatcggttgttaaagcaggagaggaagagagacctgccctgtagcgtgactcctctagaaaaaaaaaaaaaaagccggagtattttactaagcccctaaaatgtcgagatttgtacaagatcttagcaaagcaatgtctcaagatggtgcttctcagttccaagaagtcattcggcaagagctagaattatctgtgaagaaggaactagaaaaaatactcaccacagcatcatcacatgaatttgagcacaccgggttttgccatattgccgaggctggtctcaaactcctgagctcaaacgatcagctggcctgagcctcccaaagtgctgggattacaggcatgcaccaactacgcccagcctgtattagcttttaggatgtgaaaaagtcttgctccctccatgtcctaatggtcacaccaaaaaagacctggatggatttcggaagctatttcatagatttttgcaagaaaaggggccttctgtggattggggaaaaatccagagaccccctgaagattcgattcaaccctatgaaaagataaaggccaggggcttgcctgataatatatcttccgtgttgaacaaactagtggtggtgaaactcaatggtggtttgggaaccagcatgggctgcaaaggccctaaaagtctgattggtgtgaggaatgagaatacctttctggatctgactgttcagcaaattgaacatttgaataaaacctacaatacagatgttcctcttgttttaatgaactcttttaacacggatgaagataccaaaaaaatactacagaagtacaatcattgtcgtgtgaaaatctacactttcaatcaaagcaggtacccgaggattaataaagaatctttacttcctgtagcaaaggacgtgtcttactcaggggaaaatacagaagcttggtaccctccaggtcatggtgatatttacgccagtttctacaactctggattgcttgatacctttataggagaaggcaaagagtatatttttgtgtctaacatagataatctgggtgccacagtggatctgtatattcttaatcatctaatgaacccacccaatggaaaacgctgtgaatttgtcatggaagtcacaaataaaacacgtgcagatgtaaagggcgggacactcactcaatatgaaggcaaactgagactggtggaaattgctcaagtgccaaaagcacatgtagacgagttcaagtctgtatcaaagttcaaaatatttaatacaaacaacctatggatttctcttgcagcagttaaaagactgcaggagcaaaatgccattgacatggaaatcattgtgaatgcaaagactttggatggaggcctgaatgtcattcaattagaaactgcagtaggggctgccatcaaaagttttgagaattctctaggtattaatgtgccaaggagccgttttctgcctgtcaaaaccacatcagatctcttgctggtgatgtcaaacctctatagtcttaatgcaggatctctgacaatgagtgaaaagcgggaatttcctacaggtgccntggttaaattaggcagttctttacgaaggntccacgattatctaagaagatttganagtntaccagatatgcttgaattgggatcacctcacagttcaggaagatgtgaattgggacacaatggtncattaaaggangggtataacatngcaatctgggncgaatgatatccacctggagcaggaatgagacgaggatgggtctgggagctcgcatctggacactggattgaaaatctgggaccttaatagggagtccttacaggagccctaggatccaaaaggggcattatatgtagaccgcgggttaaaaagagtcgcggcattgctaaacagggacatctcgagaacaagactagagagcacggggggatcaaccatctggccacggccaaaaacgggctggcgggtgttcatcagccacacgggc

SEQ ID NO: 523125 - DNA, 1063 bp, Homo sapiens
agttttctagcaacaatgctgtcagcatggctgttcacgctctgtctaatggtaaagcttaatgggccgagtatggtctatgcttatccatgaagcgccatggcgtccattgcctgtaagataagactttggggtctccgacaatcgctaagaatagattaaatcgcactcgaggagagcaagaggccgtatcgggttcgtagagaggacacatttgccaagcatcggagaggtgcgtggagagtcggtccaactgcccatctcataccgatgcaggtgacgatgcatacagcggagttccgatccttcaagttatcgcgcagaaggtggccaccagaaagtatgtccggacaaggcctggccagaagggcagacattcaatacaaaatgggcagccacagcgatggggccaagaacgattgacagccaggagacaaggcaaaaagtcccaaaggattggacccagcaatctttggacttccgatgtttctaaccggctttacatgagcagcaaccacaaacaacaacagagcgacgaaacacacacagaaagagacagaccacagacacactgtctttgtgagcggccgtgccactgtgcgagcccgcatcgagggggaagacgcacgtctggcgcggacacacaccgtccacggcggggaccggcccgcggggcgcccccacaagaaaggaagcagatgaaacacccgcacattggcacaaatctacgcacggtggccaaccaaggaaggagcaagaaaaccagcgggggtgaaacagaagacccccaaatacacacggagccgaggaaactgaacattaccaccgcaccgacacgacaaaaacgaaacaacaaacacacgccaggcggctgcgaggccgaaccgagcgggacgagcacgctgatcgaggaagcaaaacagcatcgccgaagacatgagagaatgtatcaagcgaggggaaagaaaaagagactgagcagacagtacaaaacaaacacaacgaggagactacccgcagagaagaagagacgaccgcaaaacgcaaaagtaaaacgccccgg

SEQ ID NO: 523126 - DNA, 2135 bp, Homo sapiens
  misc_feature (1706)..(1706): n is a, c, g, or t
  misc_feature (1736)..(1736): n is a, c, g, or t
  misc_feature (1762)..(1762): n is a, c, g, or t
  misc_feature (1766)..(1766): n is a, c, g, or t
  misc_feature (1832)..(1832): n is a, c, g, or t
  misc_feature (1843)..(1843): n is a, c, g, or t
  misc_feature (1855)..(1855): n is a, c, g, or t
  misc_feature (1866)..(1866): n is a, c, g, or t
atttccgcattgaaggggctgctccgaatggagggggaggggaggtgtttaggagaaagtaggggctgtgggtgtcgggagccggctgacgggtggacaagggggggttagcagctgggctgcgaccgttagggaggggctcaaggtgtgcatgtgtgagggaagagagagagagagaagggcgcctcagaggtgactttcagcctgcgagccttcttcccggggcgccataaacgcccccaatttcccagctgctaaaggaagaggaagatcttagcaaagcaatgtctcaagatggtgcttctcagttccaagaagtcattcggcaagagctagaattatctgtgaagaaggaactagaaaaaatactcaccacagcatcatcacatgaatttgagcacaccgggttttgccatattgccgaggctggtctcaaactcctgagctcaaacgatcagctggcctgagcctcccaaagtgctgggattacaggcatgcaccaactacgcccagcctgtattagcttttaggatgtgaaaaagtcttgctccctccatgtcctaatggtcacaccaaaaaagacctggatggatttcggaagctatttcatagatttttgcaagaaaaggggccttctgtggattggggaaaaatccagagaccccctgaagattcgattcaaccctatgaaaagataaaggccaggggcttgcctgataatatatcttccgtgttgaacaaactagtggtggtgaaactcaatggtggtttgggaaccagcatgggctgcaaaggccctaaaagtctgattggtgtgaggaatgagaatacctttctggatctgactgttcagcaaattgaacatttgaataaaacctacaatacagatgttcctcttgttttaatgaactcttttaacacggatgaagataccaaaaaaatactacagaagtacaatcattgtcgtgtgaaaatctacactttcaatcaaagcaggtacccgaggattaataaagaatctttacttcctgtagcaaaggacgtgtcttactcaggggaaaatacagaagcttggtaccctccaggtcatggtgatatttacgccagtttctacaactctggattgcttgatacctttataggagaaggcaaagagtatatttttgtgtctaacatagataatctgggtgccacagtggatctgtatattcttaatcatctaatgaacccacccaatggaaaacgctgtgaatttgtcatggaagtcacaaataaaacacgtgcagatgtaaagggcgggacactcactcaatatgaaggcaaactgagactggtggaaattgctcaagtgccaaaagcacatgtagacgagttcaagtctgtatcaaagttcaaaatatttaatacaaacaacctatggatttctcttgcagcagttaaaagactgcaggagcaaaatgccattgacatggaaatcattgtgaatgcaaagactttggatggaggcctgaatgtcattcaattagaaactgcagtaggggctgccatcaaaagttttgagaattctctaggtattaatgtgccaaggagccgttttctgcctgtcaaaaccacatcagatctcttgctggtgatgtcaaacctctatagtcttaatgcaggatctctgacaatgagtgaaaagcgggaatttcctacaggtgccntggttaaattaggcagttctttacgaaggntccacgattatctaagaagatttganagtntaccagatatgcttgaattgggatcacctcacagttcaggaagatgtgaattgggacacaatggtncattaaaggangggtataacatngcaatctgggncgaatgatatccacctggagcaggaatgagacgaggatgggtctgggagctcgcatctggacactggattgaaaatctgggaccttaatagggagtccttacaggagccctaggatccaaaaggggcattatatgtagaccgcgggttaaaaagagtcgcggcattgctaaacagggacatctcgagaacaagactagagagcacggggggatcaaccatctggccacggccaaaaacgggctggcgggtgttcatcagccacacgggc

SEQ ID NO: 523127 - DNA, 163 bp, Homo sapiens
tgactcgtccctcctctcactctgccatactcctcacactaccgctcctctctctacccctcctgtctctcctcccctcctctctcttcctctcctcactctcttcctctcctctctctacccttcctgactcacttcccctacggggtcatacgactaaacg

SEQ ID NO: 523128 - DNA, 214 bp, Homo sapiens
tgtgtcatgcaccgtcctgatgtatatagtccatatactacaggaggctgggacaggaggatcgcttgtgctggggaggtcgaggctgcagtgagccatgatcacaccagtgactccagccctgggtgacagagtaagacccttctttttttaggcagacaagaaaagaagcgagacacacttagggtgctacaaaacatatctcgcaatagtt

SEQ ID NO: 523129 - DNA, 719 bp, Homo sapiens
tgctgcagccccggtcccagcggctaaatggacccccgatgctcggggagtggggaggccgctccggcccagctgctctgctgccctccggctccccctcccgcctccttccctgcgtccttcggctcttgcatggcccggattcatccggcttgccagcaggccccatattgcggcggcctgtttgcctccgagggccatcccccggttccggtgcgaggcaatgccgcggtaggcggcgacggtgggcagagggccaaggtcatcatgccttaggcggcgaacacaaaacactctgcccagcagtatacgcaaacagcaaagagagcgcaccacaaacgcgcatatagagcacgcaccgtcgaagtcgcaagcgataggtagaaggagtacacagccgcgaaagcgtgaaacacagaaaagcgtagtctgtatacacacacaaagaagtacaaaaacatacataaaagacaccaaagccacgatcgcgcgacaccgcttgctgacgcacccaaccacagatgcaatatgagcgaggaccgcaactgcgacagaggaggaaatcaacgcggcgaaaaaagtgcactgctgatgctgccgaccgcgcgccgagggtgccaacgaggagatccgagtagaccggcgtcgtgattagaacacgcaaggacccagacgtgcggatgacaccgggaacctgtcccgacacacattagagccca

SEQ ID NO: 523130 - DNA, 151 bp, Homo sapiens
gttttggttattacaaaacagaaaagaacaacagcaacaaaacattgtgtgaatatatgtttgtatgtgtgtatgtatatcatgaattttttttttttaaggtctgaaaaggacttgttctctccttaaaggtgtaaggaatgttaattgc

SEQ ID NO: 523131 - DNA, 434 bp, Homo sapiens
  misc_feature (2)..(2): n is a, c, g, or t
  misc_feature (32)..(32): n is a, c, g, or t
  misc_feature (56)..(56): n is a, c, g, or t
  misc_feature (60)..(60): n is a, c, g, or t
  misc_feature (92)..(92): n is a, c, g, or t
  misc_feature (101)..(101): n is a, c, g, or t
  misc_feature (117)..(117): n is a, c, g, or t
  misc_feature (119)..(120): n is a, c, g, or t
  misc_feature (125)..(125): n is a, c, g, or t
  misc_feature (159)..(159): n is a, c, g, or t
  misc_feature (392)..(392): n is a, c, g, or t
  misc_feature (405)..(405): n is a, c, g, or t
tnttgttgagatggagtcttgctctgtcaccnaggctgggataggaagcaggcccnctcngtattcgtttgctggggctgccataacaaagnctcacacanggagtgccttaaacancnncaatntcatatcttacagttctggaggccagaaggcacngatcaaggtgcgggtggggttggtttcttctgagggtcataagggagggatctgtctcaagcctctctccctgggtttatagacggccatcttctccccatgtctttacatgggtctccatttctgtgtgtgtctatgtcctaatctcttctttttttgttgttgagatgggagtcttgctctgtcacaaataaataaataaataaataaataactaaataaataaatagatnaagaatgtagggnatggggtgaagcccaacagggtcagggaa

SEQ ID NO: 523132 - DNA, 520 bp, Homo sapiens
aatttagaaatgtccactgtaggacatggaatatggtaagaaaactgaaaatcatggaaaatgagaaacatccactagacaacttgaaacacacgaaatcacagaaaagcgtgaaaatgagaaatgcacactctagaacctggaatatggcgaggacactggaaatcacggaaaatgagaaatacacactttaggacataaaatatggcgaggaaaactgaaaaaggtggaaaatttcgaattgtccactgtaggacatggatatggcaagaaaactgaaaatcatggaaaatgagaaacatccacttgacaacatgaaaaatgacgaaatcaatgaaaaacttgaaaaatgagaaatgaacactgtaggacctggaatatggcgagaaaactgaaaatcacaaaaaatgagaaatacacactttaggatgtggaatatggcgaagaaaactgaaaaaggtggaaaatttagaattgtccagtcgacgcggccgcgaatttagtagtagtaggcggccgc

SEQ ID NO: 523133 - DNA, 96 bp, Homo sapiens
atagatagatagatagatagatagatagatagatagatagccagccaagatagatagactctgtctcaaaaggaagggagggagggaaaggagaga

SEQ ID NO: 523134 - DNA, 852 bp, Homo sapiens
  misc_feature (63)..(63): n is a, c, g, or t
ggacccactccatacggaaagtctttgtaaagaacatacttgtttcagcttggaatacacgangactctcaaaatcggaagaagctttcagagctgttaaggtactacacatctgcctctggtgatgagatggtttctctcaaggactactcgcaccatgaatgataggagaaccatgaaacatactctattatactcacaaggtagagaccataggacctaggtaggctaacttcagcgtttgtgtggaactgtctctcgggaaacatcggctgtacgatagtgactctattatgattagtagcccatttgatagagtacctgtcgtccagacagcatgaaggaatttggagagggaaagactttcactgtcagttcaccaaagtaaggcctgggactttccagaggatgaagaagagaaaaagatgcttgaagagaaaaaaacaaagtttgagaacctctgcaaaatcctgaaagacatattggataaaaaagttgaaaaggtggttgagtcaaaccgattggtgacatgtccatgcttgtttgccaccagcacatatggctgcgcagcaaacatggagagaatcatgaaagctcaagccctaagagaccactttaacattggggtacatggcaacagaaaaacacctggaaattaaccctgaccattcattacttgaaacctttatgcaaaggcaagagctgataaaaccacaggtctggaaagatccggaatctggattaagaacctcgctcctgtttccgcttccggttgtaaataccaaaaatgccgacatatcatagatgccaacttgtttgggtataagaacatacccactggtatagtcctgt

SEQ ID NO: 523135 - DNA, 86 bp, Homo sapiens
tgcggaccctctcaacatgcactctcaaaatcaacacacctaccccaacccaattctcatcgcttcacagtcatccagtaaagtac

SEQ ID NO: 523136 - DNA, 781 bp, Homo sapiens
  misc_feature (364)..(364): n is a, c, g, or t
tttttaaaaaccccaaacattatattggcttgactaatcgtggacattcttaaaaaaaacgggatgctgcaacagctgccccctggggttaaggggtggtgcccttcacgaaactccattgccgtgaagtctcggcggctaataaaaaattttaagggtgccttcattttcagaccaagtctccggggggtattttcggtcttaatagccttgggcacactccagtataatactttactcattgccgctgggcagggataccccacattttgccacagggtcagactctcattgaaggtggtagcgcctataagacgccccagcgggcgggccacacactgtgtgtggcgtgttcttaaattgngcgagaccgtctatccacaacagcagataagactgttccctctatacagtctatatctcacgcttatctggcggcgcctgggtgagacgccgccctgtttggagagggctaggacgctttccgggcgccctggagaaaagggggtgtcccccagtgccgccccggggattgagagcgcaagacccctggtggtcttggcggcgagcactgtggcgcattggggggcggccatagaaccacaaagaccttctgggatatgacgcgtgccccgattcaaagcaccaggtggactcctggagggttgacctattgcgtgttgcaacgagtgcccttggcaggggggagccttgcccccagagagacaaacataacaggcacgaatatgaaccccccgccaaaatagaccgcgccacacat

SEQ ID NO: 523137 - DNA, 1168 bp, Homo sapiens
cccataactgctacgcacgaggcctgcggttttacatcggcactgaggacctgcatggcccttgtggtacagcatgcagcctggatgcttggagctgtggagcgtgctgcgtgcgggaaatccgcaaggagctgaagctgaatggagggtgctatgagaacctgcgtgctgtgtgccaccactgaccttgtgtgcctgcatgcctgtgtgcccctgtagatgctgctgctgctgtgtgtgctcctctgctgcctgcctcgacctgctgcaccatgcagctgcatgtgatgctgcactgcccactgtggtgcttccctgaccctgtgctggccacccactgatggcccctcagtcccctgtgtgctgtggtgtgccccagcctgcctctgtgcctaccaagcctgagccgctgtggctggtgcctgtgacgaatgcccagtttgtgccagtttgatggcctgacacggtgttgacacgccacgtgggcgtgctgtgcatggacaccattgagtccaggaaccttatcatgccaacttgtgcaggacaactcaaaggtggacctgggcaatggcttggcttgcttgcacaaggcaccaaggccacgaattgttctgccacgtgaccacagtaaggaacgccaacgatctggaccattcaatacctgcaacttgcgaagctcccgccctgggtgccgctttgcacagcggcctggtggtcaacgctttggaagaaccctatgggcaatggcgcccggcgtattcgaacaacacccagaatgtggcgcacgttcccttggaccatttggggcgcgacttttgttggcgacggcatggctggacatatacggaaacgcaaggccttgctgtggccacgcagcttttcacccgcatgattgggaaggccaccgccgggatgggcccatgaaggtgcgattgaccacaaagtgaaaacccggtttacgtttggtcggccacatttgccttccatggtcctgactttgtgcccagatgtgtgaccgccccgttggaagcacggccaaacgctgacatggacacatgatgcaatgtgcaccccaacgctgaaagcaacgcttttggaaccaatgaacattcccaagagcagagcaaaagggcctgcgtggctggcattagactagtgtgtgcggaaa

SEQ ID NO: 523138 - DNA, 460 bp, Homo sapiens
  misc_feature (1)..(2): n is a, c, g, or t
  misc_feature (4)..(5): n is a, c, g, or t
  misc_feature (8)..(8): n is a, c, g, or t
  misc_feature (14)..(14): n is a, c, g, or t
  misc_feature (42)..(42): n is a, c, g, or t
  misc_feature (44)..(45): n is a, c, g, or t
  misc_feature (351)..(351): n is a, c, g, or t
  misc_feature (360)..(360): n is a, c, g, or t
  misc_feature (411)..(411): n is a, c, g, or t
nntnnctnagactnccgattagctgggactacaggcgcccgncnncccgcccggctaattttttgtatttttagtagagacggggtttcaccctgttagccaggatggtctcgatctcctgacctcatgatccacctgcctcggcctcccaaagtgctgggattacaggcgtgagccaccgcgcccggccactctcagtagaaatattactgatgttagcataagttttttgttttaaaaaataagatgtcctattacttaaaccaatcccaaaaggtattagcatgtataagaaaaagttctggccaggtgtgatggctcatccctgtaatcccagcactttgctgctgntattttggnaaactgaagaaattattaaagaaagaaccgttggcattattaaaatctagncaattttattactaattgctatggaactctaggggagtccctcatcata

SEQ ID NO: 523139 - DNA, 408 bp, Homo sapiens
cggtgagttgataactgatctcgggattgtaactggctcgtgagttgtacatgcctgggactctgttactgggtcccctgattcttagtgtacctcggttcagataggcatcccccgacataagaaggcagagaccctccttcgtgacgagcacaaaatgctatgacaggtaatagcagagagaaacatcagtcacccaactctgtatagccaagtccagtcacccattcacaagagtccaaaatccttcaaatctctagggatcagaagacaaccgtgctgcccagaatgagctgagacacaaggacaaacccttgtgacatgacacatggatagaggaggctgtggttgtccctccttattcctgctggattagcagccacggctcttgtactgggccagaaagga

SEQ ID NO: 523140 - DNA, 928 bp, Homo sapiens
gtgcctccgggaagatggcggcgtgcagagcggcgcaggtgagagtgtatggtagtgagccgaaactgagcaagaaatagtgatcatcattagttccacggttgctctgcacatgttgactctatctgctgttaggcttgttgtcggggtccctgagcaaatgctccatgggcatatgtggggatcacagggtacacgtgcgagctgggatcaacattgcatccgtttcacacgtcgtcgctcacaagtgatcaatgtcagtatatgtctgatcgaccaggaaagtgcagactgatatgaagacgccatgagataggactgagaatgagaagtaagcacgagtaagcgaggtgcaaagcagcaaagagcgtcagtgaggaaacgagctacagtccaaggcgcactgcttgctgccactcaaggcaggactactgatacatggtgtgggtcctgatgatgaggagcggtggatctcaaaagtcattactagcaaagattcgcgcagtcaagctattcagtcagctgaaggtcagatggggaagatccatacccacacaagttccatgtatacattctctacgtcactgacttcagtctcgaaagaatatagtcacctgtcagcctggggatctagcctgactgatcatcaccgttacaggtggcaggctaggatccatgtccagaatagagcttctggggggaaagctcatcttctatgatcttcgaggagagggggtgaacgttgcaacgttcatgagcccaagttgcccgaaccattgattacattcagtaagaaagaatttatttcatagttaattagacagcctgcgtcgggagagacataagttggagttccaggcggatcctggtaaaccgaagacaagggtgagctgagcctcttccgtatgagatcacctggtgtctcctg

SEQ ID NO: 523141 - DNA, 968 bp, Homo sapiens
tggggaaaaattttgggtttgaaaaaacccccttaaaggggttcacccaaaaatttgggagggtttaaaaatttagaaatttttttaaaaattgggaaaaaaatttgggattattcaaaaagaacttagtggttaaaaatttggagaatatgctttcataaaatatccgtacatatctagaagtaaggaggcctctccttcaaaagaatcgggttggatagggggacgtgggtgggcaactaagttgaattataaattgtgggcccttcggctaacatctcacatttattggaagtctatcagaggatacgactctattgtgggattatattatccaaatagtatcacaccaggcttatcagtattaaaacataaagggctccatccaaaagagagctctcaacaacttgccttacgtcggatatatccattacagaaaatcccacaagttgtttcaccacacacagcgaaatcatcaccactggcacattaccacaagcggcgtaaagctgggcagacggctaatcatctactcataaccccaacaaccttagcacacaggggacaaccccaattcccaacccagccagacatactccggaaaacagcacaaacagatgcatgcctcctataggagggacaccaaataagcaaatcctgagcgaactggtcctgcgcaccacaggacttggactacctcacggaccaccagggtccaacaaggagggggccctcacaaaaaaagagaaccccatacaacaagccttcatacttattgttcgcccaccacacacacatgtccgcaatctcacacgcagcgaagccctacacacactacacaagcgtcccgcacaactcgcacagaacaactccgcgcacgctctaagggcccacgcgaccaccaccaccagagccgggataaaccagagcgagccatcacacctccgacactacaagaagtgccccac

SEQ ID NO: 523142 - DNA, 253 bp, Homo sapiens
ctgataagacataggagatctgcttattgatcggcttgtgcctgtctgctctgcgaggacaggaaattttgtctgtttttgttcatgcaatatccctagcacctcaacagtgcctggcacatagtaggtgctcaagaaatatttgggttcctttctttctttttatttgtttagtttgttttttgagacagggtctcaccttgtgacctaggctggagtcagtggcaggatcatggctcactacagccttgac

SEQ ID NO: 523143 - DNA, 1599 bp, Homo sapiens
aaaagcacagtgactgtcagcagattcctttactatttgtctcgctgcgcgcagcgctagcgcaacttgctctctcaactgcacttctctaaacagctgctttctgcacaacttgcgccactggcctgcgccctaactacgacacctgcacactcacccccgcgcagctgccctctactcctctacacacacttgacacgcacttctagcgcgcacgcccctgcccaaacctttacaccaagctcctcaactccacgcgctgcaattctccttctctctccatacccacgctaaaacctgcctcctcgcacccaacacttaaccatgcgggcctttaaacactttggactgagcgcaccaccgcggggattcccaacggcaaagtctcatctaacaaacggcgcttgcccttctctcaacacggggcttaggcccccaattcaattgggaccccgcaccttaaccattggcctctactagcgctcccattatatctccaattaacccattggtcctcttcatccaacaattactccccccccctttaacacacccttcatcccctcacaaccaaatatactccgtcaattcccaaaacgaacttcttcaacacaaaaactccttttaacaacacacccatttacactatcacccaaccattcccccagatcctaaactttcccaacaccctgtgcctaaccctccccacccccttgcacaaacttcaaacttcctctcggcacccttcccatcacacttcctaacccccctcttaacgattgccctttacaccaccgacggggagcaagcatgggcccacactttcatagggccccccatataaagcccgggcaaccaccaacgggcccctaaataaagcgtcttacccgcaacgcttacactttggcggacccaccccgaagaaatcgtggggccaaactataacggcatttgatctccctttcccaaactttggcttttaaaaaactttttataacggggattctatctcttctggggccccctttccccaaaactcccccgaataccagattttaacagctccttataacccccaagggcgacaacttttgggaaaaacccccccccccgggcgcttttcctcgataagcaccaaccccgggaatttgagcggacccccacttgattgtccacccctcaccatttgccgacgagcaacaaacggggcagtcacccaccgcccattgccccccacttttgcccacacaaccacaaacagcgcccctcaacacgggcccatccggccgacgactcaggcttggcaaacaccaacccgcgcaaaaccccacctaacccaccaccgacttccccaacacgccacacaaccgcaacacccccctacaccagggggacaacccgaccacaaatacgacgcccactcccctcaacaacttacacaacccccccccacccaacccatacgacacatctgccctaccaccaacatccttcccacttaaccgcccccctaaacttctagcacccactcacaccatctccacacaccacccacaacacccgcccccactttaccaccatcaccgacacctacggccc

SEQ ID NO: 523144 - DNA, 1124 bp, Homo sapiens
  misc_feature (284)..(284): n is a, c, g, or t
  misc_feature (330)..(330): n is a, c, g, or t
  misc_feature (419)..(419): n is a, c, g, or t
  misc_feature (478)..(478): n is a, c, g, or t
  misc_feature (482)..(482): n is a, c, g, or t
  misc_feature (488)..(489): n is a, c, g, or t
  misc_feature (505)..(505): n is a, c, g, or t
  misc_feature (526)..(526): n is a, c, g, or t
  misc_feature (528)..(528): n is a, c, g, or t
  misc_feature (530)..(530): n is a, c, g, or t
  misc_feature (532)..(532): n is a, c, g, or t
  misc_feature (540)..(540): n is a, c, g, or t
  misc_feature (543)..(543): n is a, c, g, or t
  misc_feature (557)..(557): n is a, c, g, or t
  misc_feature (567)..(567): n is a, c, g, or t
  misc_feature (572)..(572): n is a, c, g, or t
  misc_feature (576)..(577): n is a, c, g, or t
  misc_feature (585)..(586): n is a, c, g, or t
agcggatatatacagtccatccgggttctttgagatgctgtttggcgactcgtcgccattcccggagcaggtcggcctcggcccaggggcgagtatccgttgctgtgtcggagacactagtccccgacaccgagacagccagccctctcccctgcctcgcggcgggagagcgtgtccggccggccggccggcggggctcgcgcaacctccctcgcctccccttcccccgcagcctccggccccgccaggcccggcccggactccgcgagccccggcctcctcgntcctcggtcgccgctgccgccgggcttaacagccccgtccgccgcnttctcttcctagtttgagaagccaaggaaggaaacagggaaaaaatgtcgccatgaaggccgagaaccgctgccgccgccgacccccgnacggccctgaacgccatgaggcctgggtccccgccagcgcccgctcgcgctccgactgncgtncgacgnncgaggacccacgatgnatgccgctgagctcccccaangncngncgacaccngcntccgacatggacangaaccagggntccancagnntcctccgnnctctacgggcagcagaaaagggcaacagcacgaccccgctccgcctcaggcggggcagccggcgacgtctaaaacccacgacgcgatggcacgaacccagggcaccaagcgtcaacaacgaacccgtgaaccatcctagccaaaaatgacagtagcaccaccagcaccccgcggcaccagacccacgcaaaagccagacattgaccccagcaagcaccccgccaagaggacgccggcgcacaaccatagcacacaacgcaaggcgggagcacgcacggaggacagaccgcacaggacgagaaccacaccaagcaacagcaccgcgcacacacgagacaaagaaaagagagacaccgccagcccaccggaccaacagacggaagacacagcaacacaaccgcgccaaacaagccagacaacaaagacgcagcaggaacacaccaacaaagggccacgcagcgacaggacacagcaaccaggacaagcgagggcaggcgagcgagcgccagaacgaacaacctgcatgtaagccagaaaa

SEQ ID NO: 523145 - DNA, 112 bp, Homo sapiens
ggacctcctcctgtctaagctctaaaggctctctctgtggtgacattcccagtctccaacctgggccacgccggtgactcgctcatccaatcgcccaccagcgtttccatga

SEQ ID NO: 523146 - DNA, 503 bp, Homo sapiens
ggtgatggtgttctagaggatccctcaataggtgcgcacggcaggtaaggagagtagtgggtctggcttaggggtatagcctcctcagggagtcacccagcagcagtcacctggtaggtccagagagtgagatggtatcacggaactggcattgacctcagttcatgggtcctcatgctgtggggtggaacatgtagctgggcagggcccgggcctcccgaggtgcccatgtcccactgacccaaggacaagatggccagtggagaaaggtgcagattaagatgttggtttgggtaacagccgaatgatgctcgctggaaggaaagccgccctattccttcagcgcttcgactccatcgacaccactggccctgcgtgttggcctcactttttcacccatcagtgctctacctccccttcccccatgttttagaattccttttccttaggactcctgagtcccagacagaaggtcctgggggagatggtttcctggactgggg

SEQ ID NO: 523147 - DNA, 299 bp, Homo sapiens
agatccgctgtactatcatacaataatttctacaactcatctcatacttatcttagaatatccatccttttctaattgtatttctgtattacgttagatttctcttcaaactaatgtaacccaaaatacactgtaacagtatactagctgtcttctgttatgctagatgttcaaagatgtttgcaaaatatgtaaacagtgcctgacgacttctcattataaaaaaaaattggggaagacggattataggctcacacctacaatcccagcactttgggaggccgaggcgggcggatcac

SEQ ID NO: 523148 - DNA, 1992 bp, Homo sapiens
  misc_feature (1563)..(1563): n is a, c, g, or t
  misc_feature (1593)..(1593): n is a, c, g, or t
  misc_feature (1619)..(1619): n is a, c, g, or t
  misc_feature (1623)..(1623): n is a, c, g, or t
  misc_feature (1689)..(1689): n is a, c, g, or t
  misc_feature (1700)..(1700): n is a, c, g, or t
  misc_feature (1712)..(1712): n is a, c, g, or t
  misc_feature (1723)..(1723): n is a, c, g, or t
agcggatggagaaatttaagttcgtgtggttttaccttttccgggagtctccagctggccctcatttgtgtccggagctcaggagttcccaaaccgactcagtcgcaccaagtttccgtcttttggaattggggaaggagtttctttctttcttttcttttttcttgagccagttttaatcgctttgaataaatactcccttaagtagttaaatataggaggagaaagaatacatcggttgttaaagcaggagaggaagagagacctgccctgtagcgtgactcctctagaaaaaaaaaaaaaaagccggagtattttactaagcccctaaaatgtcgagatttgtacaagatcttagcaaagcaatgtctcaagatggtgcttctcagttccaagaagtcattcggcaagagctagaattatctgtgaagaaggaactagaaaaaatactcaccacagcatcatcacatgaatttgagcacaccaaaaaagacctggatggatttcggaagctatttcatagatttttgcaagaaaaggggccttctgtggattggggaaaaatccagagaccccctgaagattcgattcaaccctatgtagtggtggtgaaactcaatggtggtttgggaaccagcatgggctgcaaaggccctaaaagtctgattggtgtgaggaatgagaatacctttctggatctgactgttcagcaaattgaacatttgaataaaacctacaatacagatgttcctcttgttttaatgaactcttttaacacggatgaagataccaaaaaaatactacagaagtacaatcattgtcgtgtgaaaatctacactttcaatcaaagcaggtacccgaggattaataaagaatctttacttcctgtagcaaaggacgtgtcttactcaggggaaaatacagaagcttggtaccctccaggtcatggtgatatttacgccagtttctacaactctggattgcttgatacctttataggagaaggcaaagagtatatttttgtgtctaacatagataatctgggtgccacagtggatctgtatattcttaatcatctaatgaacccacccaatggaaaacgctgtgaatttgtcatggaagtcacaaataaaacacgtgcagatgtaaagggcgggacactcactcaatatgaaggcaaactgagactggtggaaattgctcaagtgccaaaagcacatgtagacgagttcaagtctgtatcaaagttcaaaatatttaatacaaacaacctatggatttctcttgcagcagttaaaagactgcaggagcaaaatgccattgacatggaaatcattgtgaatgcaaagactttggatggaggcctgaatgtcattcaattagaaactgcagtaggggctgccatcaaaagttttgagaattctctaggtattaatgtgccaaggagccgttttctgcctgtcaaaaccacatcagatctcttgctggtgatgtcaaacctctatagtcttaatgcaggatctctgacaatgagtgaaaagcgggaatttcctacaggtgccntggttaaattaggcagttctttacgaaggntccacgattatctaagaagatttganagtntaccagatatgcttgaattgggatcacctcacagttcaggaagatgtgaattgggacacaatggtncattaaaggangggtataacatngcaatctgggncgaatgatatccacctggagcaggaatgagacgaggatgggtctgggagctcgcatctggacactggattgaaaatctgggaccttaatagggagtccttacaggagccctaggatccaaaaggggcattatatgtagaccgcgggttaaaaagagtcgcggcattgctaaacagggacatctcgagaacaagactagagagcacggggggatcaaccatctggccacggccaaaaacgggctggcgggtgttcatcagccacacgggc

SEQ ID NO: 523149 - DNA, 117 bp, Homo sapiens
tcgatgctaatactggagaagatgtggggcaatagaggatcatctagtgctgggaagaatgaaaaaagataaagccacttcgggctggcacggtggctcacgcctataatcccagca

SEQ ID NO: 523150 - DNA, 2106 bp, Homo sapiens
  misc_feature (1677)..(1677): n is a, c, g, or t
  misc_feature (1707)..(1707): n is a, c, g, or t
  misc_feature (1733)..(1733): n is a, c, g, or t
  misc_feature (1737)..(1737): n is a, c, g, or t
  misc_feature (1803)..(1803): n is a, c, g, or t
  misc_feature (1814)..(1814): n is a, c, g, or t
  misc_feature (1826)..(1826): n is a, c, g, or t
  misc_feature (1837)..(1837): n is a, c, g, or t
agcggatggagaaatttaagttcgtgtggttttaccttttccgggagtctccagctggccctcatttgtgtccggagctcaggagttcccaaaccgactcagtcgcaccaagtttccgtcttttggaattggggaaggagtttctttctttcttttcttttttcttgagccagttttaatcgctttgaataaatactcccttaagtagttaaatataggaggagaaagaatacatcggttgttaaagcaggagaggaagagagacctgccctgtagcgtgactcctctagaaaaaaaaaaaaaaagccggagtattttactaagcccctaaaatgtcgagatttgtacaggtacctgtgcgtgcacgcagacgggaagggctggggaagcgggaggactgagaaaagccaagatcttagcaaagcaatgtctcaagatggtgcttctcagttccaagaagtcattcggcaagagctagaattatctgtgaagaaggaactagaaaaaatactcaccaaagatcatcacttgaattggagcacaccaaaaaagacctggatggatttcggaagctatttcatagatttttgcaagaaaaggggccttctgtggattggggaaaaatccagagaccccctgaagattcgattcaaccctatgaaaagataaaggccaggggcttgcctgataatatatcttccgtgttgaacaaactagtggtggtgaaactcaatggtggtttgggaaccagcatgggctgcaaaggccctaaaagtctgattggtgtgaggaatgagaatacctttctggatctgactgttcagcaaattgaacatttgaataaaacctacaatacagatgttcctcttgttttaatgaactcttttaacacggatgaagataccaaaaaaatactacagaagtacaatcattgtcgtgtgaaaatctacactttcaatcaaagcaggtacccgaggattaataaagaatctttacttcctgtagcaaaggacgtgtcttactcaggggaaaatacagaagcttggtaccctccaggtcatggtgatatttacgccagtttctacaactctggattgcttgatacctttataggagaaggcaaagagtatatttttgtgtctaacatagataatctgggtgccacagtggatctgtatattcttaatcatctaatgaacccacccaatggaaaacgctgtgaatttgtcatggaagtcacaaataaaacacgtgcagatgtaaagggcgggacactcactcaatatgaaggcaaactgagactggtggaaattgctcaagtgccaaaagcacatgtagacgagttcaagtctgtatcaaagttcaaaatatttaatacaaacaacctatggatttctcttgcagcagttaaaagactgcaggagcaaaatgccattgacatggaaatcattgtgaatgcaaagactttggatggaggcctgaatgtcattcaattagaaactgcagtaggggctgccatcaaaagttttgagaattctctaggtattaatgtgccaaggagccgttttctgcctgtcaaaaccacatcagatctcttgctggtgatgtcaaacctctatagtcttaatgcaggatctctgacaatgagtgaaaagcgggaatttcctacaggtgccntggttaaattaggcagttctttacgaaggntccacgattatctaagaagatttganagtntaccagatatgcttgaattgggatcacctcacagttcaggaagatgtgaattgggacacaatggtncattaaaggangggtataacatngcaatctgggncgaatgatatccacctggagcaggaatgagacgaggatgggtctgggagctcgcatctggacactggattgaaaatctgggaccttaatagggagtccttacaggagccctaggatccaaaaggggcattatatgtagaccgcgggttaaaaagagtcgcggcattgctaaacagggacatctcgagaacaagactagagagcacggggggatcaaccatctggccacggccaaaaacgggctggcgggtgttcatcagccacacgggc

SEQ ID NO: 523151 - DNA, 214 bp, Homo sapiens
  misc_feature (12)..(12): n is a, c, g, or t
  misc_feature (40)..(40): n is a, c, g, or t
aacatggctganttgagattacactgccatgatacattgnctgacagcacttcacattttccctgagttggggacagaaatcacactgcccaaatacattatctgatggctcctcatgtttcccaaaagttaggaaaggaggttctatatacatacatgcacaagtgcatacacacacacacacatacacacacacacagtgctagatgagatg

SEQ ID NO: 523152 - DNA, 1992 bp, Homo sapiens
  misc_feature (1563)..(1563): n is a, c, g, or t
  misc_feature (1593)..(1593): n is a, c, g, or t
  misc_feature (1619)..(1619): n is a, c, g, or t
  misc_feature (1623)..(1623): n is a, c, g, or t
  misc_feature (1689)..(1689): n is a, c, g, or t
  misc_feature (1700)..(1700): n is a, c, g, or t
  misc_feature (1712)..(1712): n is a, c, g, or t
  misc_feature (1723)..(1723): n is a, c, g, or t
agcggatggagaaatttaagttcgtgtggttttaccttttccgggagtctccagctggccctcatttgtgtccggagctcaggagttcccaaaccgactcagtcgcaccaagtttccgtcttttggaattggggaaggagtttctttctttcttttcttttttcttgagccagttttaatcgctttgaataaatactcccttaagtagttaaatataggaggagaaagaatacatcggttgttaaagcaggagaggaagagagacctgccctgtagcgtgactcctctagaaaaaaaaaaaaaaagccggagtattttactaagcccctaaaatgtcgagatttgtacaagatcttagcaaagcaatgtctcaagatggtgcttctcagttccaagaagtcattcggcaagagctagaattatctgtgaagaaggaactagaaaaaatactcaccacagcatcatcacatgaatttgagcacaccaaaaaagacctggatggatttcggaagctatttcatagatttttgcaagaaaaggggccttctgtggattggggaaaaatccagagaccccctgaagattcgattcaaccctatgaaaagataaaggccaggggcttgcctgataatatatcttccgtgttgaacaaactagtggtggtgaaactcaatggtggtttgggaaccagcatgggctgcaaaggccctcaaattgaacatttgaataaaacctacaatacagatgttcctcttgttttaatgaactcttttaacacggatgaagataccaaaaaaatactacagaagtacaatcattgtcgtgtgaaaatctacactttcaatcaaagcaggtacccgaggattaataaagaatctttacttcctgtagcaaaggacgtgtcttactcaggggaaaatacagaagcttggtaccctccaggtcatggtgatatttacgccagtttctacaactctggattgcttgatacctttataggagaaggcaaagagtatatttttgtgtctaacatagataatctgggtgccacagtggatctgtatattcttaatcatctaatgaacccacccaatggaaaacgctgtgaatttgtcatggaagtcacaaataaaacacgtgcagatgtaaagggcgggacactcactcaatatgaaggcaaactgagactggtggaaattgctcaagtgccaaaagcacatgtagacgagttcaagtctgtatcaaagttcaaaatatttaatacaaacaacctatggatttctcttgcagcagttaaaagactgcaggagcaaaatgccattgacatggaaatcattgtgaatgcaaagactttggatggaggcctgaatgtcattcaattagaaactgcagtaggggctgccatcaaaagttttgagaattctctaggtattaatgtgccaaggagccgttttctgcctgtcaaaaccacatcagatctcttgctggtgatgtcaaacctctatagtcttaatgcaggatctctgacaatgagtgaaaagcgggaatttcctacaggtgccntggttaaattaggcagttctttacgaaggntccacgattatctaagaagatttganagtntaccagatatgcttgaattgggatcacctcacagttcaggaagatgtgaattgggacacaatggtncattaaaggangggtataacatngcaatctgggncgaatgatatccacctggagcaggaatgagacgaggatgggtctgggagctcgcatctggacactggattgaaaatctgggaccttaatagggagtccttacaggagccctaggatccaaaaggggcattatatgtagaccgcgggttaaaaagagtcgcggcattgctaaacagggacatctcgagaacaagactagagagcacggggggatcaaccatctggccacggccaaaaacgggctggcgggtgttcatcagccacacgggc

SEQ ID NO: 523153 - DNA, 116 bp, Homo sapiens
tctgaggatccccactgcgattcggttcttaaacaccaaaagaacaatcaagattagaaaatatagacaaactatattgatacgatggggtcaaatatttaatgtcacatttgtgt

SEQ ID NO: 523154 - DNA, 287 bp, Homo sapiens
gcccccggactatatagagctaaacagttgctaatttcatccatgcaaacaaaattgttcattcctgtctgatttgggttttaaggaaccatgctgcatcatcagagaaaccaggcaattctattctgaagcccagggtaagaaatggtggggatttctgagttacagattgtgcaggtgttaacactatctgccactatcaagggaacaatctatcttggtacaactttggtcttccactagtgacctgtatccagagtagcaagatcagggcctgcgtgaccgat

SEQ ID NO: 523155 - DNA, 1736 bp, Homo sapiens
  misc_feature (1307)..(1307): n is a, c, g, or t
  misc_feature (1337)..(1337): n is a, c, g, or t
  misc_feature (1363)..(1363): n is a, c, g, or t
  misc_feature (1367)..(1367): n is a, c, g, or t
  misc_feature (1433)..(1433): n is a, c, g, or t
  misc_feature (1444)..(1444): n is a, c, g, or t
  misc_feature (1456)..(1456): n is a, c, g, or t
  misc_feature (1467)..(1467): n is a, c, g, or t
atttccgcattgaaggggctgctccgaatggagggggaggggaggtgtttaggagaaagtaggggctgtgggtgtcgggagccggctgacgggtggacaagggggggttagcagctgggctgcgaccgttagggaggggctcaaggtgtgcatgtgtgagggaagagagagagagagaagggcgcctcagaggtgactttcagcctgcgagccttcttcccggggcgccataaacgcccccaatttcccagctgctaaaggaagaggcaggcatggcactccatatgaacaaaagataaaggccaggggcttgcctgataatatatcttccgtgttgaacaaactagtggtggtgaaactcaatggtggtttgggaaccagcatgggctgcaaaggccctaaaagtctgattggtgtgaggaatgagaatacctttctggatctgactgttcagcaaattgaacatttgaataaaacctacaatacagatgttcctcttgttttaatgaactcttttaacacggatgaagataccaaaaaaatactacagaagtacaatcattgtcgtgtgaaaatctacactttcaatcaaagcaggtacccgaggattaataaagaatctttacttcctgtagcaaaggacgtgtcttactcaggggaaaatacagaagcttggtaccctccaggtcatggtgatatttacgccagtttctacaactctggattgcttgatacctttataggagaaggcaaagagtatatttttgtgtctaacatagataatctgggtgccacagtggatctgtatattcttaatcatctaatgaacccacccaatggaaaacgctgtgaatttgtcatggaagtcacaaataaaacacgtgcagatgtaaagggcgggacactcactcaatatgaaggcaaactgagactggtggaaattgctcaagtgccaaaagcacatgtagacgagttcaagtctgtatcaaagttcaaaatatttaatacaaacaacctatggatttctcttgcagcagttaaaagactgcaggagcaaaatgccattgacatggaaatcattgtgaatgcaaagactttggatggaggcctgaatgtcattcaattagaaactgcagtaggggctgccatcaaaagttttgagaattctctaggtattaatgtgccaaggagccgttttctgcctgtcaaaaccacatcagatctcttgctggtgatgtcaaacctctatagtcttaatgcaggatctctgacaatgagtgaaaagcgggaatttcctacaggtgccntggttaaattaggcagttctttacgaaggntccacgattatctaagaagatttganagtntaccagatatgcttgaattgggatcacctcacagttcaggaagatgtgaattgggacacaatggtncattaaaggangggtataacatngcaatctgggncgaatgatatccacctggagcaggaatgagacgaggatgggtctgggagctcgcatctggacactggattgaaaatctgggaccttaatagggagtccttacaggagccctaggatccaaaaggggcattatatgtagaccgcgggttaaaaagagtcgcggcattgctaaacagggacatctcgagaacaagactagagagcacggggggatcaaccatctggccacggccaaaaacgggctggcgggtgttcatcagccacacgggc

SEQ ID NO: 523156 - DNA, 933 bp, Homo sapiens
  misc_feature (161)..(161): n is a, c, g, or t
  misc_feature (350)..(350): n is a, c, g, or t
agcgggtggcagggctagcagggcgcgcaggagtcccggcgggattgacgggcgcagggtggctgcccgcgggtaggcggcggtcatgaacgttctccgaggtatgcaagtctcttcgcagcttactcggtcaagtgctccccggatccggacaagtaccntggcgttactctgtgttccaggatccgtgtataagaagtgtcctgggatgtagaactaacctcttgcatgattcgcttgcaggatgttagcactgtgtcgctatgactcaagataccagtcagcatcagatgtggatctgcggcgagaactctgcttctatgcatccatgtgacaccaagaggttagcnaagtcggaagggctaggttgcgagggtactggcgtctgggttaaacgccaggcgcctggaagtggcgatcttgcgaatagatgagtacgaaggtgctctagtccggaggctaggtgtgcctgcgtgcctgtagcccaggatacgggcgccaccaattcgtcatatagtcacaggaattgccattgctgctggataaccagacgtggtcctttgtgcatcacaatattgctgggtccttacagtgcaaatatgcgcgaaaaggcttgtccgtggcagggggatactcacccgtattgaccaggggggacgagacgagttacagtggggcagctgggtatgaaacggggtcagaatctggcacaagaattaaggttgaggcaatctttcggtctgcaagttggaatttgggcagcttactcgtggcggacatttttgggaatactggaatacctcaagggaatcctcagagggggatatgaaagtgggggcacgtgaaacgggctggtgtggcttggacaggttgtgtgtgacacactagtttgggaagatacaagaattctggttgtgacttcaattggatagg

SEQ ID NO: 523157 - DNA, 123 bp, Homo sapiens
gtgcatacccagcagtccagtgcaatgtctcctccatagctctgggttcttagatcttggtggacgtttgttttctccttagttgcatttcctggcgtttgtgatgatcaatggactttaatg

SEQ ID NO: 523158 - DNA, 1974 bp, Homo sapiens
  misc_feature (1545)..(1545): n is a, c, g, or t
  misc_feature (1575)..(1575): n is a, c, g, or t
  misc_feature (1601)..(1601): n is a, c, g, or t
  misc_feature (1605)..(1605): n is a, c, g, or t
  misc_feature (1671)..(1671): n is a, c, g, or t
  misc_feature (1682)..(1682): n is a, c, g, or t
  misc_feature (1694)..(1694): n is a, c, g, or t
  misc_feature (1705)..(1705): n is a, c, g, or t
agcggatggagaaatttaagttcgtgtggttttaccttttccgggagtctccagctggccctcatttgtgtccggagctcaggagttcccaaaccgactcagtcgcaccaagtttccgtcttttggaattggggaaggagtttctttctttcttttcttttttcttgagccagttttaatcgctttgaataaatactcccttaagtagttaaatataggaggagaaagaatacatcggttgttaaagcaggagaggaagagagacctgccctgtagcgtgactcctctagaaaaaaaaaaaaaaagccggagtattttactaagcccctaaaatgtcgagatttgtacagatggtgcttctcagttccaagaagtcattcggcaagagctagaattatctgtgaagaaggaactagaaaaaatactcaccacagcatcatcacatgaatttgagcacaccaaaaaagacctggatggatttcggaagctatttcatagatttttgcaagaaaaggggccttctgtggattggggaaaaatccagagaccccctgaagattcgattcaaccctatgaaaagataaaggccaggggcttgcctgataatatatcttccgtgttgaacaaactagtggtggtgaaactcaatggtggtttgggaaccagcatgggctgcaaaggccctaaaagtctgattggtgtgaggaatgagaatacctttctggatctgactgttcagcaaattgaacatttgaataaaacctacaatacagatgttcctcttgttttaatgaactcttttaacacggatgaagataccaaaaaaatactacagaagtacaatcattgtcgtgtgatctttacttcctgtagcaaaggacgtgtcttactcaggggaaaatacagaagcttggtaccctccaggtcatggtgatatttacgccagtttctacaactctggattgcttgatacctttataggagaaggcaaagagtatatttttgtgtctaacatagataatctgggtgccacagtggatctgtatattcttaatcatctaatgaacccacccaatggaaaacgctgtgaatttgtcatggaagtcacaaataaaacacgtgcagatgtaaagggcgggacactcactcaatatgaaggcaaactgagactggtggaaattgctcaagtgccaaaagcacatgtagacgagttcaagtctgtatcaaagttcaaaatatttaatacaaacaacctatggatttctcttgcagcagttaaaagactgcaggagcaaaatgccattgacatggaaatcattgtgaatgcaaagactttggatggaggcctgaatgtcattcaattagaaactgcagtaggggctgccatcaaaagttttgagaattctctaggtattaatgtgccaaggagccgttttctgcctgtcaaaaccacatcagatctcttgctggtgatgtcaaacctctatagtcttaatgcaggatctctgacaatgagtgaaaagcgggaatttcctacaggtgccntggttaaattaggcagttctttacgaaggntccacgattatctaagaagatttganagtntaccagatatgcttgaattgggatcacctcacagttcaggaagatgtgaattgggacacaatggtncattaaaggangggtataacatngcaatctgggncgaatgatatccacctggagcaggaatgagacgaggatgggtctgggagctcgcatctggacactggattgaaaatctgggaccttaatagggagtccttacaggagccctaggatccaaaaggggcattatatgtagaccgcgggttaaaaagagtcgcggcattgctaaacagggacatctcgagaacaagactagagagcacggggggatcaaccatctggccacggccaaaaacgggctggcgggtgttcatcagccacacgggc

SEQ ID NO: 523159 - DNA, 692 bp, Homo sapiens
  misc_feature (10)..(10): n is a, c, g, or t
  misc_feature (15)..(15): n is a, c, g, or t
  misc_feature (40)..(40): n is a, c, g, or t
  misc_feature (54)..(54): n is a, c, g, or t
  misc_feature (63)..(63): n is a, c, g, or t
  misc_feature (178)..(178): n is a, c, g, or t
  misc_feature (190)..(190): n is a, c, g, or t
  misc_feature (195)..(195): n is a, c, g, or t
  misc_feature (211)..(211): n is a, c, g, or t
  misc_feature (219)..(219): n is a, c, g, or t
  misc_feature (248)..(248): n is a, c, g, or t
  misc_feature (263)..(263): n is a, c, g, or t
  misc_feature (285)..(285): n is a, c, g, or t
  misc_feature (317)..(317): n is a, c, g, or t
  misc_feature (323)..(323): n is a, c, g, or t
  misc_feature (387)..(387): n is a, c, g, or t
  misc_feature (405)..(405): n is a, c, g, or t
  misc_feature (409)..(409): n is a, c, g, or t
  misc_feature (415)..(415): n is a, c, g, or t
  misc_feature (447)..(447): n is a, c, g, or t
  misc_feature (464)..(465): n is a, c, g, or t
  misc_feature (494)..(494): n is a, c, g, or t
  misc_feature (498)..(498): n is a, c, g, or t
  misc_feature (543)..(543): n is a, c, g, or t
  misc_feature (566)..(566): n is a, c, g, or t
  misc_feature (572)..(572): n is a, c, g, or t
  misc_feature (595)..(595): n is a, c, g, or t
  misc_feature (612)..(612): n is a, c, g, or t
  misc_feature (615)..(615): n is a, c, g, or t
  misc_feature (618)..(618): n is a, c, g, or t
  misc_feature (621)..(621): n is a, c, g, or t
  misc_feature (624)..(624): n is a, c, g, or t
  misc_feature (627)..(627): n is a, c, g, or t
  misc_feature (635)..(635): n is a, c, g, or t
  misc_feature (637)..(637): n is a, c, g, or t
  misc_feature (640)..(640): n is a, c, g, or t
  misc_feature (665)..(665): n is a, c, g, or t
  misc_feature (692)..(692): n is a, c, g, or t
tgcaagaggnaagtnaaagattcaatttgattcttctagnggggggaaaaaggngtggaaagnggggcttcattttgcagtaatcatctgtccgaattcttcatagtggacttgtccgtctccatcaatatctgcttctctgaccatttcatctacttcttcatctgtgagtttttcncctaagtttgtnatgangggacggagtcctgcngccctganataaccattgccatccttgtgaaagactnggaatgcctcagggntttcttcttcactatctgtttntttcatttttctagccatcaaagtaaaaaatncggggnagtcaatggggccattcccatcagcatccacttcattgagcaaatccggcaattcagcttctgngggcgttctgacccagtnaccncagganagtcccaagtccctttgtggtgagggggccancgccatctttatcaaanngggagagggcttccttgaattcagcaatntgtncttcggtcagctgaacagccatggggcgagccaagggaggaagancagagggagcgagggtggctgcnccagcncgggggctgcgacggcgggggtncctccgatgctgccgcngcngcngcngcngcnaaggcgcncngtncctaatgccgccgccgccgcctgcnccgccgccttatttcgagttagggcan

SEQ ID NO: 523160 - DNA, 1027 bp, Homo sapiens
agcggatggagaaatttaagttcgtgtggttttaccttttccgggagtctccagctggccctcatttgtgtccggagctcaggagttcccaaaccgactcagtcgcaccaagtttccgtcttttggaattggggaaggagtttctttctttcttttcttttttcttgagccagttttaatcgctttgaataaatactcccttaagtagttaaatataggaggagaaagaatacatcggttgttaaagcaggagaggaagagagacctgccctgtagcgtgactcctctagaaaaaaaaaaaaaaagccggagtattttactaagcccctaaaatgtcgagatttgtacaagatcttagcaaagcaatgtctcaagatggtgcttctcagttccaagaagtcattcggcaagagctagaattatctgtgaagaaggaactagaaaaaatactacaccaaaaaagacctggatggatttcggaagctatttcatagatttttgcaagaaaaggggccttctgtggattggggaaaaatccagagaccccctgaagattcgattcaaccctatgaaaagataaaggccaggggcttgcctgataatatatcttccgtgttgaacaaactagtggtggtgaaactcaatggtggtttgggaaccagcatgggctgcaaaggccctaaaagtctgattggtgtgaggaatgagaatacctttctggatctgactgttcagcaaattgaacatttgaataaaacctacaatacagatgttcctcttgttttaatgaactcttttaacacggatgaagataccaaaaaaatacttccgagggccatcatttgcgtgggaaaaatacacttttaataaaggagggccccggggatataaagaattctactttctgtagcaaagacgtgcttactaagggagaatcacgaagctggtcccttcaggcatggggataattagccaggtctacaaccttgggtggtggaaccttttagagaagcggggattttgggtc

SEQ ID NO: 523161 - DNA, 375 bp, Homo sapiens
taccatgactcaagcgatcttccacctggcctcaaagtgctgagatgacaggcatgagccactgtgcctggccccattttaaccatttttaagaacacattccattgacattaagtacattcacattgttgctcaataatcaacgtcatacatttccagaactattttcatcttcccatactgaaactctggacccaagcataatatttttaaggttcatccatgttgtatcatgtatcactactttattcctttttatagctgagtaagattgccttgtttgggtatattgccattttgttcgtcagttgatggacatgagttgtttccacttttagttattatgagcattcatgtacaaggattggtttgaac

SEQ ID NO: 523162 - DNA, 214 bp, Homo sapiens
cttttcgcactttggtgatctcattctcatgggcacgcagctctctgaagagtttgggcattttttctggcaagtctccttcagctggattcttgagacagataagacgtcgttccaaccttcaccaataggtgtacaatgctccaaggactaactgttgctacatttgatctgttagaccagcaagtcagatgcgttgcacaggatcattcag

SEQ ID NO: 523163 - DNA, 682 bp, Homo sapiens
aatacgacgatacgcgacgccgcatatctgcgctcgaagggcgatgagaatccagatctcaaatatgcacccatgcgcatatccgccgagcacacacgctctacaccggctgcggtgtatgccatgcgctctaaccattccttccttggcagcaagggaatcggcggcaacgaaatcgcgaactgaatcgcgggcattggctgggcccaacggtgaagctggtgcaacgcctggtctgacttttcattccaatcctttgaggtggcttcaagcttttcggcttggttgcgcacgtgttccttctggggtttataacgcttgagctcgtcggcgtagagcttggcgtgaacccccggaatatgggtcgccaggttcgcaagggtctgtcggctgtgatatggcctcggagtaggtccacaggttggcggcttcggtcttgaagaaggcggcgttggttttgtgcataggcgcttcgctttcgggggagacgcgctggagctgagcatgtggccgacagtggccatgataggggtcataacggcgatacggctggcgagattatctccgctgtggtgggcatgttcgcggggcgtgtttgacatgtttttcgcggggggctgtggactttgaagggtttgacatgggagcgtgtatggggattagggttgatacttacccccgg

SEQ ID NO: 523164 - DNA, 1572 bp, Homo sapiens
gtgaaatctttcagtaaagttgtccaaacctttaatactcttctagtttggcatttaaatgttatttcattgtcccttttatgaaaatttactctgtttctacataatgtatttatatattttttgtataatcactatctttgtatttacaaaaaaatgcacttgagactgatgtggaggcactcactattttctgcctttctagggcgggacactcactcaatatgaaggcaaactgagactggtggaaattgctcaagtgccaaaagcacatgtagacgagttcaagtctgtatcaaagttcaaaatatttaatacaaacaacctatggatttctcttgcagcagttaaaagactgcaggagcaaaatgccattgacatggaaatcattgtgaatgcaaagactttggatggaggcctgaatgtcattcaattagaaactgcatggtacgtgtggcttgccattcatcgaggtttgtgacgacattcttctcatggtattagatgttgccagacggtaggccgctttctcttgtcgcttgctctggagaccctgcgattcacgatttctcttttgccttggtgttgagtggttcgtgttgccttcgtactacgtgcttatcttgccctttgacttcttcttgatcaactcgtactttgcatctgtcgctgctggatatctttctcttgatcttgttgcgctccttgccgtcttctcccgtctatgccgccttgttctcctgtgttcttctgggatctgtgtcctcgtcttgccatttctctcttcccaggcacagcgatccgtcgaccatgtttcctcctctctcgcatcgttcgccttctgccacctgccgggccttcctccctcctccactcacgccctccccccacgcgccaccacctgctcgccacccctccctcgcccacgccccaccctcggttctcctctcatccgcgcccacccccgcgcccctcctcccctcctgtctgcccacaatcccctgcgctccaccccgccaccctctgccccacctcccccccccctgcgccacgcccccccctccctgaccccccccccccccccacctctgctcgcctcccctcgccccaccccccctcctccgcgcctctctcgcgcacccccccttgcccccttcgcccccctccctgctgccgccccctccccccccctccctgccgccccctcccctccgccctctcccccctgcaccccctggctcctccccccgccactcccctcctctccctcccgcccgcgcccccccctcccccacccccccccctctcccccctcccgccccccccccccttccccctcccctccccccccctcactcccatacccagtatcctcgtcctctccacctctcccctctccccactacctccccccaccttacccgcctcctccccctcctcacccctccacctcaccctcaccccccacaccacctccctccactcccccccccctcacccccccactctctcccccccctccaccctctctctcctcctcctctccctctccctccatccctcctctccttc

SEQ ID NO: 523165 - DNA, 701 bp, Homo sapiens
  misc_feature (36)..(36): n is a, c, g, or t
ccccaatggatcccccaaatatccccccaaatggantcactcaacaatgaaatctttcgctagaatcatcgcctcaaaaaaaccagagaatggaactctcaaagtcgcgctacttaagtcagcaaagatctccacctctaaagcgtccacccctttatcctgattaacttgagcaattggttcgcctttatattgaatctccgcagtcagccttttatagcgattatcactaaagcccagaacttcaaaatccgaattactttcaagtttcatggtttcgccttagggtccaaaaacccagaaaatgagccatcattattgtagcgcagacctcttccatcgggagcccggacctctagcccaccgcgactcaaatttgagaatgttgaatttgaattcttgagaacgtcatcaataataccgagtgcagttgcattttgcttttcaattccacctgtgagttttgggaacgttccagtagctcgctggccagaagcatgctttgtgagcgccctagcagcctctgtcagaccttccttattgataggatttgaagctgcggaagatagatcatcgaaagtgcggccgccgaaattttgcagggcggaaggcaatccttttgcacctcccatcacaagccgaactaatatgccgccagcccatgcactgtgagtcaccggccataaatagcccaagcttga

SEQ ID NO: 523166 - DNA, 292 bp, Homo sapiens
gtatttgtacatgataaacgactgcttctttagagttacagacaaatagtttactatatcaagatcacgatatgttagatactgttgtcaattacagaggttttcgatgaggctttctggaatgatttagtttccctgtaagggagcctgtctattggaatagacaggttcacttctcccagtctttcaagttgcagtgcttattatatctgattccactggctgagctgattgtgaatgtcctaaccctgttgattgtgtctggccactcatgggcaaagaacagattatc

SEQ ID NO: 523167 - DNA, 159 bp, Homo sapiens
gtggatcctcatatgtcgacctgctggcttgttggcttgagcatggggctgcgtcataacaccggtcggtgactgagagaccccccgcagcttccgaccggagccccgcgcagcttctgattgaccggagccacccacagcttccaaccgcatcacccg

SEQ ID NO: 523168 - DNA, 489 bp, Homo sapiens
ttgaaaccctccggcatccatgattctagtatactcttctctgactgctgtttgtctgatgtgattgcgttcacggatgacagatcgagcaggtgctttgattgggatcacgattctgattactcacgagtggtcttcttgctcacttgtccctaggccagaggacacagggcacccacacaggaaaaggattaccaggacagagttccatggagttttggcttataccacaaaaggagtttaaggcagtttaattcaaggatgcgaaaactacttctatgacattaacattgactttcaaaaattaactcagcctttaaaatgtccccaataccaacaattcaccaaagtattcaagatgacagccattgtcagggccagttgaccagtcacaaaagcgatccaacatgacaccgttatagcaggtgctatgcagagcctccctatgcagttaacacagattgacggatgctatttgcaggccaccag

SEQ ID NO: 523169 - DNA, 748 bp, Homo sapiens
  misc_feature (1)..(1): n is a, c, g, or t
  misc_feature (87)..(87): n is a, c, g, or t
  misc_feature (102)..(102): n is a, c, g, or t
  misc_feature (106)..(106): n is a, c, g, or t
  misc_feature (116)..(117): n is a, c, g, or t
  misc_feature (128)..(128): n is a, c, g, or t
  misc_feature (134)..(134): n is a, c, g, or t
  misc_feature (153)..(153): n is a, c, g, or t
  misc_feature (156)..(156): n is a, c, g, or t
  misc_feature (158)..(159): n is a, c, g, or t
  misc_feature (168)..(168): n is a, c, g, or t
  misc_feature (210)..(210): n is a, c, g, or t
  misc_feature (236)..(236): n is a, c, g, or t
  misc_feature (248)..(248): n is a, c, g, or t
  misc_feature (316)..(316): n is a, c, g, or t
  misc_feature (319)..(319): n is a, c, g, or t
  misc_feature (374)..(374): n is a, c, g, or t
  misc_feature (406)..(406): n is a, c, g, or t
  misc_feature (426)..(426): n is a, c, g, or t
  misc_feature (438)..(438): n is a, c, g, or t
  misc_feature (470)..(470): n is a, c, g, or t
  misc_feature (477)..(477): n is a, c, g, or t
  misc_feature (479)..(479): n is a, c, g, or t
  misc_feature (483)..(483): n is a, c, g, or t
  misc_feature (486)..(487): n is a, c, g, or t
  misc_feature (499)..(499): n is a, c, g, or t
  misc_feature (509)..(509): n is a, c, g, or t
  misc_feature (512)..(512): n is a, c, g, or t
  misc_feature (553)..(553): n is a, c, g, or t
  misc_feature (574)..(574): n is a, c, g, or t
  misc_feature (582)..(582): n is a, c, g, or t
  misc_feature (595)..(595): n is a, c, g, or t
  misc_feature (609)..(609): n is a, c, g, or t
  misc_feature (611)..(611): n is a, c, g, or t
  misc_feature (633)..(633): n is a, c, g, or t
  misc_feature (636)..(636): n is a, c, g, or t
  misc_feature (645)..(645): n is a, c, g, or t
  misc_feature (668)..(668): n is a, c, g, or t
  misc_feature (726)..(726): n is a, c, g, or t
ngggttgtacaataggataaccagattcatgtccatgcctggaggttagtctggggggtcggcgggatggacacacatacagacacntagatctggcatctnatancagggcatanngtctcatgtangggcantctgggtacaggtagtcangangnncttcctagngaagtcctcacagggggtggcctgtactttgccttctgccanatgggccctttcctggcatccacctncgtggttttcantgcttccctgagacaatccacgtggaccagtgtgctctacccagtgcctggtacctcatcatcacccnatnaatgcacattcttgtcctaagtgctatctacggactatctagatcttggttccanctctgattggtgtcatcggtcatgacactccnaggtcatggcccctatcaancgcagagctccnaagagccctagtgtaccttcacttgcactgtnaaggcanancttngtnncatccttcctcntgttctggcnatntctgcactgccttcctctcactgctcagtggccccatgganacccacttcccttccagttgnatgtgggnatccacttctcanatatgcagccctgnangaagagaccctacagctcttanggncaacactanccagcactgtaagcacgagcagnaaccagcctcagcccgtagcccagggaccccctttctttcactagtaaaaaatttctntggttggggaacagcttcatgt

SEQ ID NO: 523170 - DNA, 531 bp, Homo sapiens
ggcacagaagggccaaggagctgcggtcctcgagcagcaggaggtgagctcctcagcccacgcgctgcatccagatcagatcacccctctcccttccctgcccaccaggactctgatagcccgcttgtgcaggcacagcccattttgcctaagatgtctagagtagccaaatatcgccggcaggtgagtgaagaccccgatcgatcgtagcagcctgctggtaggaccctgtctctcgcgatggagatggaggagctggtaggaatggagctggacgtggtcgtgtagccctagagcgtgcgtatgatgtctcccgtggaggctgtcggtcagatggagaaaccatacggatgaaacagtccacgggtgtgtacaaccgggaggccatgctcaacttctgtgaaacaggagaccagagaaacttatgcacgagggagatgtccactggatgtgagtgagcacaggccctgggaggggcaggagggagacaggggagggctgggagaccccgtggccttcatgatctcggca

SEQ ID NO: 523171 - DNA, 439 bp, Homo sapiens
gaagttcaagtatagtcaaaaatatcctcgaaaaatctcttgtaaaaaaatgtaccaaagctatgtctcaaaacaaaaatcactgatacttcaggtaaaggctaaatgcttccttgtactatggggccatagcatataaacaatacttatacatttacagcatagcaagatgcccactcactaagaggcacgtaggaatagaaactgagaagagctcattcatgtttcccatctcacaaacataccaggactaactcacttagcagaatgaggtgctaaatcacccacactgcaacatttcattctttctacctgaagtcacatttatccattatccattatcccctagtatgcccctcctctgaattagtttgctcagtgccaagtcaatcttttacattactgtctcccattcctgtctcccctcatttgctcttgc

SEQ ID NO: 523172 - DNA, 154 bp, Homo sapiens
agggggtgagaaattgactaacatgcagtttactcagaaatataaagctatgaaaaatttcttataaggtaagtagtatcaaataatgttatgcatatcaggatttttggtaaagtattcattaaaatagtatatacttggaatccccggtcga

SEQ ID NO: 523173 - DNA, 331 bp, Homo sapiens
gctcggtaccccagtttacacagctgctgctagttaagtgatttttttttttatttgaccaaaaaaaaaaagggcccaagaaagaaaaaaatgaaaaatttgaaaaattggagagcatgaagattttcatgctttggaactcaaaatattgaaaatactctcaagcctgtatccctgccccacgggggagcaatgactttcaaagcactgtgttttaaacattctagtttttagaggggaaaccagttgaaacgtgtttaaaaattagattgtgcctttatttattggcagggcttttctttccctcccatttctcccgtgcatctccttt

SEQ ID NO: 523174 - DNA, 255 bp, Homo sapiens
ctccttctcactaaggacacacacatttttctcattaaaatgtgcatggccacatcgggtactagcaagatcatggctcatggcagccttgacctcccaggcgaagtgattgtcctaccttagccttcccagtaactggcactatatgcgcacgtacccacacgaggctaattttaaaaatatgtattttttagagacaggatttcactctgttgcccaggctggaatgcagtggcacaatcatggctcactgca

SEQ ID NO: 523175 - DNA, 1027 bp, Homo sapiens
ggaccactgtggtgtccgagaagtcaggcacgtagctcagcggcggcgggcggttgcgttgtgcctctgagcgggtctcctggtccttctgccaatcatgccgatgttcatcgtaaacaccaatgtgcccggcggctcggtgcggagagggggtcctcttcggaggctcaacccaagcagctggcggcaggccaccgcggaaaagccccccccagtaccatccgcggtgagacggttggtccccgggacccaagctcaatgggcctccgggggagctacaaggcaagagccggggcacagctccgggaagacctgggaacagaggaattcgggacaaaaatccggggggacggcgaagaaaaccgggttcacttacgaggaaagtggtttgcatgtgtagagaccctttggtttggaccgacagcgcctgtggagcaattcaaagcgcggagcgggggttctcacttgtccaacgtattaacgagacgttggacagcgcggccaattggtgcgggctggcacccagtttccagacttgtggctaaagaacaccaggaggggaaccccaacggtatggtgtcggggtgggcgtcccaccagtggaaaacccggacggacacgatggggtactcaagggacggccaagaccacaacccattcggggtggcggcagacacacaccggggttagcaggcatacaacagcacggactagcgaagagagaaacaatgttgtgtgggagggcacagcccacgaagacaacgatattaaaaacacaactctagtgtggtgacgagtgcgccacgtgaggtatatgcaacctgtgacggcagtatgcaacgacagaaacgtagggccatgacatcgggggtgtgcctccacccaataaacacgccgaggcacgagtttttcgaccacctcagtggcctcgaggcacacgcggatacacgagggcaagcgagtattgtcgccagcgagtgaagagcaagaagcgagcaacagcagaacagcagcactaaagacagcg

SEQ ID NO: 523176 - DNA, 137 bp, Homo sapiens
cgacagacaggttcagctgtgcgacactcacccacacggtatgcatatttttacacacacatgcataccatttagtaggaccccatgtacaagcatctgagtgctttacaaattcaaatgtatttaatcaccccatc

SEQ ID NO: 523177 - DNA, 878 bp, Homo sapiens
  misc_feature (1)..(1): n is a, c, g, or t
ngtctttcctccgttccttctttccttccttccttcctttctttccttcttttcagtgagtgccctgcggcccgcccccccctcacgtccgtccgtgtcggttgttgtgttctgcaactatcaactgtgtggtggttcttcgtcgtcatgggtgttaggtttattctgtctgctcctttcttgttgggtgcgctggcgttgtagtggtggggcaacacccctctccatccgtgatgtattttttgttgtcgcgcccaccccccgcaccgacttttctctcgccgtgcgcgcctgctgcttttattttggtgtgttggttctgtcgtgtcggtttcgtgtgttgtgaatattattccctcctcttgtctcctccgggggcccacaccttttggcaccaatgggtgtgtctctgttctgtctctccccacgcgccgtgtggtctctctattttgtgttcgctctgctggtcttgcgtgaccagcccctgctccttctggttctttttttctcatccacgtcgcgcgcgcgtcgtgctgccgcggctaggtagtagtaccaccacgcctcctcttctcgtctctctctctcttgtcttcttgctgggagattttattgtgttgttccgttggcgccgccttctcgacaccgtgtcgtgccgttatttagggccccccccgtgttgcccccccccccaccccccccctctgccgcggtggcgcccccctttaagggccttagcccggaagtctgttgctctctctctctctcaccctacgggtggtttctccccccgagagttcccccccccccccccaccccccttttcccctttttttcccccccctatttgggaaccccaaaaaatttttttccccaca

SEQ ID NO: 523178 - DNA, 400 bp, Homo sapiens
ctggaacttagtacccttaggcctctttgggcagtatgtaagaactttttgtgggctcccccagagaaaccaaaggaagcctgcccccttggagccctgaactcttttttggggccctgaatccccggaaccctcaatgaggttttcaagatgaaaagactgctgccagctaccagcctgggtgggcctgtcctgtccaccctcattgccccaactcccatggtgttttgtgaagataaaagctggggtcttttttttttttttaagtctccccagacatgggggatttcccccaatttaaggtcctggccctttgggaatttggttttatgtggacagtttggcagagaaaaacaaaggttttggatgaatacagaatgtggttttcgccagaattgga

SEQ ID NO: 523179 - DNA, 855 bp, Homo sapiens
  misc_feature (2)..(2): n is a, c, g, or t
  misc_feature (171)..(171): n is a, c, g, or t
  misc_feature (180)..(180): n is a, c, g, or t
  misc_feature (182)..(182): n is a, c, g, or t
  misc_feature (267)..(267): n is a, c, g, or t
  misc_feature (272)..(274): n is a, c, g, or t
  misc_feature (285)..(285): n is a, c, g, or t
  misc_feature (299)..(299): n is a, c, g, or t
  misc_feature (330)..(330): n is a, c, g, or t
  misc_feature (332)..(332): n is a, c, g, or t
  misc_feature (343)..(343): n is a, c, g, or t
  misc_feature (370)..(370): n is a, c, g, or t
  misc_feature (372)..(372): n is a, c, g, or t
  misc_feature (445)..(445): n is a, c, g, or t
  misc_feature (465)..(465): n is a, c, g, or t
  misc_feature (480)..(480): n is a, c, g, or t
  misc_feature (541)..(541): n is a, c, g, or t
  misc_feature (579)..(579): n is a, c, g, or t
  misc_feature (595)..(595): n is a, c, g, or t
tnccttatggagaagtaccccaccctctatgaagacagaatcactctctgccattcattctgcctgatgctaacaacacgcagctgatttagggagtgtcccagcctagctggatcaagggaaattccaggcgccctggggcaggccctggccccagtgccaagcctcagngttagccgncnttgggaaagttgccaaccacttggtagaccactaggttctctgttttcccttccctttccttttcaaatcccacagtttcctgtnggggnnnagctgtttttngccttgtccaggtnccagatcccagctaggggcgcactgcttggntnactccaagaanacctgggcaccagtttttttccaattntnaggactgtggcataaatttttaaatgagttatattgtaaccagttttctccagctgccaagtggaagttggtngggctggtctccctgctgtngcccagcccttgttnggggttggtctctcactgcagccagtcaggttgttcctgggttctggggagggtaagctgncccttgccgtgttctgttccgttttttttttcctaacncgctgcttccgtgttntgagagatgggtaaatgggagatggatggagcagactgaagagacagcagatgactcagtggtggaagaaggggggaagatgctgggctggctagctaatgttcccccctttcagcgatttacaggaaatggagcccagcttggtcatgaagttggtttgcttccactgtgcgatgcactcctcagaaattttgaagtcagcctgcaacttctcgaagactttcttcttgggcttgagctcctcatctggttggcctttt

SEQ ID NO: 523180 - DNA, 290 bp, Homo sapiens
  misc_feature (226)..(226): n is a, c, g, or t
  misc_feature (242)..(242): n is a, c, g, or t
atagataggtaattatcactttattcttttacctgttttctaaatgtaacagaaggaacacatactacttttagtcgcatgaggaatttcataaaaaaattacataaatagatggatttacaaaatatgctaagaaacaaatataaaacaccactctttagcttggtaatattttttaaagtgacaaatataggatcctttctcctgaacatctctagacccccanaaccacagtcacattncagacaatacagaactacactggcatactacactacactgatatcagc

SEQ ID NO: 523181 - DNA, 1094 bp, Homo sapiens
gggagagagagagagaactagtctcgaggtatattgttttttttttagggctataaaagtcctaaggtagcagcaaaggatggtttatagaaaaaatatacttttaaaaaaaatagctgaaaaaatctaaagagataaggtataaaaagtttaaaaaatatatcttaagaacaaaatacgtgcccaaaacagtgtaaaacgtgaatggtaaaaattcacctatctaagaggtaaagagggaggttgatgcagcgtgcggctcacgcgtcctctacgggtgggggcacacaaagaagacacgaggggcccagggcgtggtggggacgtcagaagcacaagaaagccttccagaaacagcctcgtgccgggccctccacaggggggaggtgaggtgggacgggccaagggcgtgcagccccacgggataaggggacgtggtccgtgggaattatcctcaaaactcagcagaacagggcagcaaggcgtgggccgacagggcggaaggcgcaccctcgcgggggaacccagggccacaacggtgctcaaggcgatcaaaaggcgggctgttgaagcacctcagggcctccggccacaggacatccaccaggactctccacacacgtgggtccagaatcagcccagagccggacatggacgcatggagcatagggccaggaggatggccggagccaaacagccctcagaggcccctatcgcagggaccccgagccttgagaacccccacataaactgccgagacaaagaactggtggcacacgggccgaaggcaagggggctgaccaaggtctagagaacacagtcataccatgaagaaagagagaaaaagacacccaagcggttacaaactcaccggaccccacgagataggtagaaagcatcccctcggtgtgcaccgaggcgcaacaactaccccaagaggcagtccatgaaagatcctagagacgccagagcaaaagacgacgggcaacagcgccgaaacagcccctggggtgggcgccacccaaaaagggagcaagatgagccctattagcgcacagcgacagcgcaaacccagaaacacaacgcgaaggcct

SEQ ID NO: 523182 - DNA, 349 bp, Homo sapiens
  misc_feature (283)..(283): n is a, c, g, or t
  misc_feature (304)..(304): n is a, c, g, or t
  misc_feature (338)..(338): n is a, c, g, or t
ctgaagtgggagaatcactaagtcaggagattgagaccttcctggccagtatggtgaaaccccatctctactaaaaatacaaaaattagctgggcatggtggcatgcacctgttgacctagccattcaggaggctgaggcaggagaatcgcttgaacccaggaggcggaggttgcggtgagctgagatcgcaccactgcattccagcctgatgacagagcgagacttcatctcaaaaaaaaacaaaattaacacaatgtgtggaaaatataaaattagttagnaagatatgtcctagaaatttnacccttttgaagagttaatgggtaagttggggantgttttaaatt

SEQ ID NO: 523183 - DNA, 761 bp, Homo sapiens
ggccgggcccggcggacgcttgttgttgtccggccggggtgaggcggaggtcgctcgctcgctcgctcggctcgctgactcgccggagcgctctgtggcgtgtcggcgtgcaggtcggtcgcgagagcgggctctgtggaagggggcgatggctatgtcgcggtggcagccctggattggccggcagggccgggagtaacgggacgtcgcctgcggagcttcttcccccggatacatgtgcggcccgagcggagtgccgcggctgcctgcctccgatcttgaagagcccgcgctgcgctggagccctgaccccgacttgcgcaccggaacctgacgcggagcgaccagcccagcctagaccctggcctggcgcggcctgatctaacccagccaggcaggcaatacttagccccttctggagcacggagctccttccccaatagacatgaagctattggagaactcgagcttttgaagccatcaacctcgacagctgactgtggagaccggagatgcccaacatcattggcaggattgagaagctactcattgttcagcatggcaggagacgacaaaacacagtgtccaagcaagttctgccaggtagggccagacccgagttgctggagggcactattacatcaaggcccgatgacgttcaggacgttgagccccaggcagacttcagcaaataagtccaagggcgggtgagtggatgaagggcccccgtcaagtgaacaaggtgcagcccgggaaggaaa

SEQ ID NO: 523184 - DNA, 419 bp, Homo sapiens
ccttccctgttttattaagttcaaacctgtctcaaataatatggggttcaaacctctgtctatcaatatggggggggtaaatgttaccctgaactaaattctggacacaaatttcaattgctgacacacgcatgggctcatgctaacaatcccaacactatgttaggccaatgcaatgtaagatcacctatggaactgaattcgagactaatcttgcccacatgctgcgctatctctacttaattgccgttcaggcacaacaattgcctacacctgtaacctcttgactaccccaagatgatacgtctactgtactccagcttagacgacacacctacacttctcctgtggccaccattctctgctttttccgagtggccttattccgcctttgccccatgtctctatactcggccccc

SEQ ID NO: 523185 - DNA, 220 bp, Homo sapiens
aagagggacccaatatgaaagaaactcagacggattccatttctagatatgagaccagttctacatcagctggtgatcgatatgattcctctgctgtgtcgctctggatcatacacttacttagaagaaagaaaaccttacagcagccggctctaaaaggatgactcaactgactttaaaaagctttatgaacaaattctagctgaaaatgaaaagctga

SEQ ID NO: 523186 - DNA, 339 bp, Homo sapiens
  misc_feature (40)..(40): n is a, c, g, or t
tatttccttcattctaaagttgttccctggccgggagcgnttgctttcgcctgtaatcccaacactttgggaggccaggacagatcacttgaggtcaggagttcgagaccagcccagccaacatggcgaaaccatgtctctactaaaaatacaaaaattatggtgacgcctgcctgtagtcccagctactcgggaggctgaggcaggaggatcgcttgaacccaggaagtggagactgcagtgagccgatatcgcaccacagcgctccagcctggtcgacagagtgagactccatctcaagaaaaaataaaaataaagttgttctctgaagaaaaaaaa

SEQ ID NO: 523187 - DNA, 731 bp, Homo sapiens
ttctccaaggttatgtgtcaacgtctgcggtgtttgagggcgccttcgtgctggtctgtacgacgagctcagggaaggtaatctaagggccgcggcctcctccatacacacaacacacaccaggcgaaccaagagaaccatgtaaaatcctcaagcgtgcgtaccatcaaccttcgagaaattccagttgtctttttcccagtccgtatcctgctctgtagtatggccggtggaaggctctagcataacaggggctgctattggtgatctcgaacccatcgagcagcctgattcccgtgtcttgatcactgggtgtgggcaggggaaccgtggcgtcctgctgtggtggccccgatggtgtgagaccactccagtactgatacctatacgtccagatgcttgtaggaagctacactccgtgttctaaagtatttatttaacaagaaaagaatcacgtttcccatttgtacttcgagcggctagccgcctgttttggcagcaggccgagttactggtcgactatgtttctactgtggggcctccctgggttggaactaccaactaaatcatgatgagcgcaggagtgtcctccatgacgctgggccgcaacaagcgatgaaagaaaacaaggacctggcggtgctatcatcagcttggcgtatgagcacatatggtatccaaatatggggacaccgggcaacatgaaggataggaaagcgcaattattggct

SEQ ID NO: 523188 - DNA, 432 bp, Homo sapiens
acctcggttggtgcagacctcctgcagcaaatgcaaaataaatttcagcccatgtctgcccagatcattgggagaattgatgatatgagtagtcccattgatgatctggaaaaaaatatcccggccctcattacccaggctggggtggaaaaactggaaagtgaaaacaaaatccctgccccccaaaaaagttgaaggttgctaataatttatcctggaatctggcctttttccaagccaaaagaagatcgaatggctttttgcacctaacccctatgggtagccaggttttatattataaaggatgccttcttatcccctaggaaaaagttagtttgtaaagggatttccccccagttttttgaacatgggattttcccatcttggcccttgggcagttgggctattcattattaacccctaaacctttta

SEQ ID NO: 523189 - DNA, 445 bp, Homo sapiens
ccactactatactaacaaagaactcgctattcttagttttgataatgagctattcatgtacaattcttgcaaacatgtcatgtgtactgtccccattaggagattacgtgcaacgttgtgagtttgtttgaaacaggtgctgtttgccatatcaccaccgcagtcattacaagtctcctgctcttactcgctccacactgggaactcctctatgaatcgatcactgcattgcttcctggcattgagtaactgtgccccttcaccaaccccgtctttcatcctctatccctgtcggttaatacaaaatgctgcctaactctccccatcaaatacctaagttggtggacaatattaatgatgcctactctatgctgggcagtgccagggaataaaggggaatatgaacaggagtggcccagccccttaagggtttacagtgaaggtg

SEQ ID NO: 523190 - DNA, 81 bp, Homo sapiens
  misc_feature (41)..(41): n is a, c, g, or t
aatgaactgtctccctgtgccttaaaaaaaaaagtgtttcnccaacttttaatgatcttaaaaagaaactttaagaaccca

SEQ ID NO: 523191 - DNA, 827 bp, Homo sapiens
agcggggttaccttaagtagtccgccaggggaacggcccgtggcgtaagagaaactgtgggtacactcccacacactggtgggatagacagaaattacgcgggtgcccactcgctgtgagagggggtgacaacaccgtcgcccaaagagcatgtgggcacttccatgagggtgagcggcctgaccgcgagggaagccactctctggctatggggggagacatatgttaggcgagggcacagaaagaaacacaaagactagggaggggcaagagatccgtgcaggatgggaacacaaggggctaattccaggttagaggccccccagttaataatacgagggatgcttagcttgctgttagagccccgcataggtacgagatataacgcgagagacagattcgctcgcgactactatgcttactatagaagtgtcgagtgagatctaatctaatgcgtggtgctctcgctttacacccgatcgttctttaaagagtgtaggaggctccctgtctctcatagtgcactttttttttctggtagccaaagactcctcctcttatgtggccacaatgctataaattggcgcgcaaggtgatgtaacatcagcaacactcgttatgtgggtgtcgaaacaggacgcgcctatgagagttattgggtacgagtgtagtaatctttactcgcggattgtgtgtttaagtctttgggacacaccacctttatgacggtcgatggaacagtattacaggacaatattcctccgaggttaaaagtaagattattattattgcaaaaaagtttttgtttctccccccaacaaagacgc

SEQ ID NO: 523192 - DNA, 837 bp, Homo sapiens
  misc_feature (837)..(837): n is a, c, g, or t
gcaatgaacaccactgaacccctgcagaactgacgcatgcacatggcgtgggtgatgctggctgtgatgtgtgcatgccaccatagctcagtggtgatgatggtgcatgcaccatgatgaccccaatgcctagtggtctcatccagccagccctgtgtgccccacagctgcagggtggaagtgaagtgggcgctggagcatcaggaggcccggcagcaggcactggtgacgcgtgtgtgagtggccatctcacctgtgggccccatcctgtgagcagagcagaacccctgatcgctgggcctgcctgagcctcacccccgtgtcttcagtggcaaccctggtgccgcgcagctgcagggagcccgagaggaggccagggcacgccgggcagcgactggccacacaggctgtggtgaggctctgccctgactgcttgcgagacctgcagggtgggcgcgccccacgacaagctcagacggaggtccactctcagggcacagcgctggacgggctgcttccacacccaggtgctgtgacaagctgccaaggacagctccgaccacgccacgaggctggaacacgcccggcactgcacgctgccgctccagacccactggaagcgatgacggtacgctacctacgggatgcaaccaccagcgccccgggcacagcacacggggcaagcccaagagcagggacccaacacatgaagagcccaacgcgacgcccaaaagccacggcccacggcaccgtccgtaggactagccactcgagggacaaccccaaagggaaccagacgcacgagcgacagagctggatggacgtagaaaggagaan

SEQ ID NO: 523193 - DNA, 276 bp, Homo sapiens
gttgctcggtgcttcaggatccccctggtgctcggtctggagcaggtcttgttctgtccccaggtgggagtgcagtggcgccatcatggctcattgctgctgtatctcctgggcttaagcgatcctcccacctcatttttaaatttttttggtaaagatgaggtctgattgtgttgcccagggtggtctcgggcttctgggttcaagcagtcctcccgcctcgacctcccgagtagctgggattacaggactaagccatcgcgcctagccctcgag

SEQ ID NO: 523194 - DNA, 298 bp, Homo sapiens
ttggacccccttacacctagaagttgtggtttataatgcaagtgccaacagacatgtttttatagcagttcttccataatactttgagagatgtaattcacattaacctgaatgagcttttcctggttataacatgtttctccctacagcattcattttgaaaatgggaacattatattactctgtgcttcgatgttgacggcgcagcagaaaagacgagaagggagggtaattccagaaactccttgctctttcctgatgggaggtatcactatttcccacaacttctaaggttaag

SEQ ID NO: 523195 - DNA, 284 bp, Homo sapiens
ctacttgggattacctttgactaatgtcctctttgtagaacggacagataaagtgggagttaacattggtcaagccctttcgtatgagtctttattctattatagagaattcctgacaaacaatttaacgaaatggacatgcaagccagaggcaacaaaccaaaaatgaaatgcttctagctctcaaggcaacatttcttaggtgcaagcaaataaatgtattttctaatgcctatattctggggtcagagtgttgcacggggcatccttctatgagtcgaccg

SEQ ID NO: 523196 - DNA, 423 bp, Homo sapiens
caacgatggtcctcagctgctcaggagatcaaggtacaaaaatcagttgaacccaggaagtgcaagttgcagtgagatgagattgcgccactgcactcctgcctgggtgacagagtgagaccctgtctcaagaaaaaagaaaaaaaaaccacccaaatgtctttcatgatatgttagccagaggcagaggataccaaaggatgcctgaaatccctcctgttcaggccaggcgtggtggctcacgcctgtaataccaacactttgggagagcgaggcgggcagatcacctgaggtcagaagttcgagaccatcctagccaacatggtgaaaacccatatatactaaaaatacaaaaattagctgggcgtggtggtatgtgactgtaatcccagatactcaggaggctgaggccggagaattgct

SEQ ID NO: 523197 - DNA, 126 bp, Homo sapiens
cttaatatggccagtgagtggacgaggcggagaactagggggtctagggcactcatcttctacctctacagtattccagaatcaggttcaaagtccaaggctgagggcaggtgctgttgctgcatg

SEQ ID NO: 523198 - DNA, 841 bp, Homo sapiens
  misc_feature (703)..(703): n is a, c, g, or t
  misc_feature (731)..(731): n is a, c, g, or t
  misc_feature (774)..(774): n is a, c, g, or t
  misc_feature (812)..(812): n is a, c, g, or t
  misc_feature (835)..(835): n is a, c, g, or t
catcgagtcggccttgttggcctactggaacccgcttgggtccccttccacactgtggaagctttgttctttcactctttgcaataaatcttgctactgttcactctttgggtccacactgcttttatgagctataacactcaccgcaaaggtctgcagcttcactcctgaagccagcgagaccacaagcccactgggaggaacgaacaactccaggcgcgcaatgaacaactccaggcgcgccgccttaagagctgtaacactcaccgcgaaggtctgcagtttcactcctaagccagcgagaccacgaacccaccagaaggaagaaactccaaacacatctgaacattagaaggaacaaactccagatgcgccaccttaagagctgtaacactcaccgcgagggtccacggcttcattcttgaagtcagtgagagaccaagaacccaccaattccggacacattttggcgaccatgaagggactttcgcctattgccaagcggtgagacaatcgctgagcagtgagaccatcacctattgccgagcggtgagaccattgcctatcgccaagcaaatcgaggccatcaagctacagatggtcttacaaatggaaccccaaatgagttcaactaacaacttctaccgaggacccctggactgaccagctggcacttccctggcctagagagttccctctgaangacactacaactgcaaagccccttcttnggccctattcagcaggaagtactagagcagtcatcgggcaaanttccaacagcagttggggtgtcctggtgattgaggggngacagatgctgcagtcttacagncttact

SEQ ID NO: 523199 - DNA, 81 bp, Homo sapiens
tggctagggcagggttcagaaaggaactttatgtagtagtgtttaacagcacaacaaggggggaaataatcccaattctag

SEQ ID NO: 523200 - DNA, 1079 bp, Homo sapiens
gcaactgactagttcccgctaataatcggtgcccccgatatggcgtttccccgcataaacaacataagcttctgactcttacctccctcgtctcctacatccgtgctcgcatctgctatagtggaggccggagcaggaacaggttgaacagtctaccctcccttagcagggaactactcccaccctggagcctccgtagaccgtaaccagtcttctccttacaccatagcaggtgatctccgtctagtcttaggggccatcaagttgtcatcacaacaagttatcaagtataaaagccacccatgaccataagccacaagtaccaaagcgaccccgtcgttcgtcttgatccgtccgtaaatcacagacagatcctacgttctccgtagtctctcccagatcctagactgctggcgatcagctatactactaagcagaccgacaaacctcaacaccacccttcattcgaccccgccggaggaggagagcccagtgtctgtaccaagcaccatattctgagtttttcggtcacccatgaagatttatattcttcatcctaccaggcttcggacataatctcccatatggtaacttactactccggaaaccaagaaccatttggatacataggtatggtctgagctatgatatcaatcggatacctagggacacatcaggaggaacacagcatactatgagaggcaggcaatagacgtagaacacagaagcatatgcaacctacggatgacccaaaacatcgcaatcacaacagggacaaggaatacgctgacccgaccacgcagggacgcaacacgcacggacctgcgcacacgcatgacccccaaggaacaccaacataacacgaagtgcctacagggcaggatagaaaacatacctagaactcagaaagcgacggaaaacgagaacacacacacaatggcccaaagcgacacaatgacaaaaaaggaaacagaaaccaaaagacaacaaaaaagccacaaaaacagcaccacgagaaaagaccacacacagacgacgcacaacgagaacgaaaagcggcataacaaaaggagacacag

SEQ ID NO: 523201 - DNA, 844 bp, Homo sapiens
ttcggacgaggaaagggctatctgctccttcgcaaatatccacaacaatgtcatgctctggagagccccgcgcgaactcttttttggtcgactcgctcatcagctcgtggcagagtgcgaggcaggctggcggtgtgtggtggctgcgtgtggtggctgtgctgtgctgtgtgtgctgtgttactactgcccacgtgctgtgtgagtctaccttgcctgccctgcctgcctgaccttgccactactgtgtgcttgcatgatgcttgcgtgtgctctttccccactgcttgggctgtgcaatgctgcagattgatgtgcagctgtctgcctgtgtgcatgctgtgttggcgtgttgtgctgtggggtgtactatgtgtccctgtgtgtgctggcactgtgctactgtgtgcccttctgctccattatgactcttgttgtgcttatggactgctggcccctggtgttctatgccctgtgctgtgcagctggcaatgcaaactctgtgggtgcttgtgccctgtttcccccgctgcatgccccctgtggtgctgctgggtttcgagtctccctgccctgcgctagcctcctggctctgtgccgatgctggccctggaatggatgctggagccctcgattctgcctgccgccccccactgcttgtgctttgcgtgcaagcaggcgggggtgctcgacagggcgacgaggagggcgcacagcgtcgtacctcgtgccggcggagtgagctcttccccggccccctttcctgagatgcagcaaagcctcgccggaagaatgattccctgggcaattccacaggttgaaacgcagcaactggctcacggca

SEQ ID NO: 523202 - DNA, 952 bp, Homo sapiens
aaatgtaaacggtgactgggatatttcgcttatcttaaagaattactattcttaaggtatcatcatggtagcgtgactacttagtagaaataagaagttgtggcccgtcgattgtgggtctgacgcgtgtaatcgcctcgcagagatcgttagaaaggtcgagatgcggtagatcaccgcgaggttagggattccaagaccagcctggtgcaacagtgtgtgaaaccccatctctacgaagaatatatcaaaaagattagccagggatgggtggatcacgcggtgtgatctcacgtcaccttgggaggctgagacacgagattcacgtttgagcccaggatggtctgacggttgcaggtcgaaggccaggagaccgagccagtttgctactcaacaagtcgcaatggctcgcatggaaggagttgcagaatctctgctgtcacagaggtgaataactccacgccacgaaaactcgtgcttgtttctcgccaaggaaaatgtctgggcgaagtttccggaatggcagtgagggttcttggaacctgccctacccccgggtatgtctctatacaacggggggggccacgtagattatgcgctcaaagactggggtggccattggagcccggaggagttctgtgacccccagaggaaacgtacagtgcgctgcactcacatgctattccaggacgggggggcgcaatattcctgagaaaggtgagctaagaacagcgggggcaggggctgaccgtgcggcaaatggcatctgtcacgggcacgcgcagaaccggggtgcggaagggggggccccagctggacaacaagtccagagacccaggcagagtaggggaatccggtacccctggaggaataagcccgacaatggagccggaaaacgagaagatggcgcccagaaactgagcgcaggagggcaaacaaaccgggggggacg

SEQ ID NO: 523203 - DNA, 576 bp, Homo sapiens
  misc_feature (8)..(8): n is a, c, g, or t
  misc_feature (110)..(110): n is a, c, g, or t
  misc_feature (129)..(130): n is a, c, g, or t
  misc_feature (194)..(194): n is a, c, g, or t
  misc_feature (255)..(255): n is a, c, g, or t
  misc_feature (262)..(262): n is a, c, g, or t
  misc_feature (272)..(272): n is a, c, g, or t
  misc_feature (274)..(274): n is a, c, g, or t
  misc_feature (284)..(284): n is a, c, g, or t
  misc_feature (289)..(289): n is a, c, g, or t
  misc_feature (316)..(316): n is a, c, g, or t
  misc_feature (327)..(327): n is a, c, g, or t
  misc_feature (334)..(334): n is a, c, g, or t
  misc_feature (340)..(341): n is a, c, g, or t
  misc_feature (357)..(357): n is a, c, g, or t
  misc_feature (370)..(370): n is a, c, g, or t
  misc_feature (394)..(394): n is a, c, g, or t
  misc_feature (398)..(398): n is a, c, g, or t
  misc_feature (414)..(414): n is a, c, g, or t
  misc_feature (446)..(446): n is a, c, g, or t
  misc_feature (459)..(459): n is a, c, g, or t
  misc_feature (527)..(527): n is a, c, g, or t
  misc_feature (545)..(545): n is a, c, g, or t
  misc_feature (563)..(563): n is a, c, g, or t
  misc_feature (567)..(568): n is a, c, g, or t
cttcaagnttaggaacaaccaacatgcctatccaggtgctgaagggcctgaccatcactcattaagaacagaggaggctgcctgttactcatggtgttgcatccctccanaaactctgctgtttcctgnntaggtgtggctgcagcatggctaggaaagcgctgccacccacccacctgggccaaagctggttntgctcctgctgcagggaaactgagctggctatctcggcgcttcgggcaagaactgcaacangctctcntgggtcctgnangtgtaaagcngggcncctgccttgtgcctcagctctcgaaanctgctgctgcngggtganctgatnnaacctgataaggtgcnatcttcagctacnaatgcaaggccctgagggcaaaancagnaaggcactgcccaacnggctgctgatggactggtgccagctgggagtnctcccggcacttngaggccactgagccacccttccagcaccagcccaccatggacaggggtatccagcttcctcctcaacntcgtcctctgcccctganccagtgaagcacaagganatgnntgttacac

SEQ ID NO: 523204 - DNA, 975 bp, Homo sapiens
taggctataaaacaaaaaaaggttgctgttttctatttttaaataaacccacaaaaaaccacagcacaacagcatgtgcaattttcccccagttatgtgggcaacaggtcacaagcaacacccaaatcaaaagcccacgagcagcttctatctttcacgcatcacactccagtgcatatgtgaaagagacatgcattgccattccacactgcaacatcacctccattgcaatcattcatcactcactcactggatcacaacatgcagcacagcaccagtagttcacatgtgtttaggctttagggtcactaggttggttatcacaacatgcgacatattattatatatatcaaaaatctcacacgccatgtatacaatatacatggtagtatactacacaaagatgagtccaggatgcaatcacacatagcacacacgccaaatccgtccacatatatcaagcagcgtcatgggcatcgcatagcaccaggcacacagcgcgcaaatcagcacagctttcaatagcatgcttactagttatagaaaggccccagccaagccaccacatcacaattaactaggcatgcacacatcgcacaattaggttacacatatgaagggcattaagtcaaaaccatcatggagaggagacagttagctcacatgtcaaaatacaggacatgcaacggtcctagactgataagaccttattcactcattggctaacagacaagccaccagggtagagtgaccagttcctcctaatccaaaacatacatgcgaaccatgcattacataaactgtggatgaggagcaatatagaacatcaatgggactccaaaggaaccatgatattgtaaatatactggtcaccattaaactactcactcagcatgcctaaattaacccagaacgaagagacaataccaaagacaacagggtaacaaaagcacaaaaaaatgcgagatcagaaac

SEQ ID NO: 523205 - DNA, 236 bp, Homo sapiens
ccgcacagggtgcggaaattcccccttttggcaggacatatatggctggcgtgatcttggctcactgcaaactccacctcccgggtttaagcgattcccccgccccagcctttcgagtagccgggactacaggcatgcgccaccatgcccggccaattttgtattttcagtagagacaaggcttccccatgttggtcaggctggtcttgaactcccgacctcaggtgatctgcccg

SEQ ID NO: 523206 - DNA, 191 bp, Homo sapiens
tagtgggctgttgcagtgagcctgagatcatgccactgactccagacctgggcggcagagaaaaactgtacgacctgtagtcccacctactcaggagaggttgaggcatgagaattgcttgaacccaggaagtggacggttgcagcgagccaggatcgtgccattgccttgacaaacggggtaccgagctc

SEQ ID NO: 523207 - DNA, 486 bp, Homo sapiens
  misc_feature (3)..(3): n is a, c, g, or t
  misc_feature (32)..(32): n is a, c, g, or t
  misc_feature (74)..(74): n is a, c, g, or t
  misc_feature (126)..(126): n is a, c, g, or t
  misc_feature (209)..(209): n is a, c, g, or t
ggnccttatgaaaactgtgccttccatgaaanaaaaccagaaatcccaaaattccaaaactgttgggaagtgancccaagtggaacaaaacccctcccatgagtgccactttccttcccaagaaanccccagatttaccccatagaggtcctgggattaccctggaatataatatgaaaaacattttttaggctgggtgtggggctcanacctgtaatcccagcactttgggaggctgaggcgggcggatcacctgaggttgggagctcgagaccagcctgaccaatgtgaagaaaccccgtctctactaaaaaaaatacaaaattagcctggtgtggtggcgcatgcctgtaatcccggctactcgggaggcggaggcgggggaatcacttgaacccgggaggcgggttgcggtgagacgagatcacgccattgcactccagcctgggcaaaaagagctaaaaactccatctcaaaaaaaaaaaa

SEQ ID NO: 523208 - DNA, 608 bp, Homo sapiens
aaaagcgttgcaggtcgcccccggcccgttggtctgcaggccccccgccccaagagaaacgggtggtgagccccccagacacggtcccaagcgcggcgtagcacaaggaaaggttgcgcacccgaatctgtctcaggaggtattgatacccatacgagggttctgcgcaggtgccgttctttaggcctagacaatacataccgaagcagttggcgggtgaaaatcctaagagcgccctccttggcgatagcgctcaccataaaaggctttagttcttggcaccacactgaagatcatattttccccctcatagacttcgcctactttgtcccatcctctacacgcatcgttcttaggttttttcacgcaaccaccttatgtccccactatgtttatatatcgctaacagccgcttccagccacacgattaaattacatcactattttttcctacccacctgccattgttcacacactgtcaaggcgattctaaggccctcactaacaacaatagtgttaatatcctcggaacccccctacaagttcccaccacattgtttttcaccaagagccccaacaaccccctagaaataaaaacccacatgcag

SEQ ID NO: 523209 - DNA, 105 bp, Homo sapiens
gctcttgaacgacgccagcattgagcttcttcttccaccaccaccgtgagctttcctcctttgactgcattcagctctaggtcagaccagagctatccatgtaca

SEQ ID NO: 523210 - DNA, 427 bp, Homo sapiens
gatcacttgagcacgggagttcaagaccagcttggccaactggtgaaaccttgtctctataaaaaattaaagtttaaaaaattacccaggtgtggtgtcgtgcacctgtagtcccagctactactgaggctgaggtgggaggattgctcgagcccaggactttgaggctacagtgagctatgatcacatcactacactccagccggggtgacagagcaagaccttgtcccaaaaaataagattgagtggtgggaaccatgtggtctcagggtacgttatggtaatcggcatcacagtgtgtgttcttgagccaggttcactctaaagcagttttaatttgataattgggttcccagaaattcaagcaaagaacagcatccagagttagccttgtcagccctttccaataaagaacatggaaatctta

SEQ ID NO: 523211 - DNA, 245 bp, Homo sapiens
ggtcctcgatgagctgaaccttgtccatgagccgacctgtagatgcagattgagaacctcaaggaggagtttggccataccgaagaagaaccacgaggaggagatgaacggcaggtgaggccaggtcggtggtgagatcaaatgtggagatggactctgcccacaggacgtggacctgagcgggcatcctcaacgagactgcgtgaccagtatgagaagatggcagagaagaaccgcaaggatga

SEQ ID NO: 523212 - DNA, 1126 bp, Homo sapiens
  misc_feature (450)..(450): n is a, c, g, or t
ggtgtatgcccaagcatgggtgcattactcagtagatgcaggagctatggagaaagactgagtcgtgatgtcatgcgctctcattctgagggtctcagttgcgtggcagttaccgtcaagctcttctgctcgtctcacaagggctcaccgcccctagcgcggactgataatgcgcagctcagactgggcttacatagggccaaaggacaacatgggtttaacagttccttatagtacgagactatcgttggttcagcgcagtgagtgtgacgaaaacagcctctagtaatcacgtaaagggatgcacatctttacaggcgaacgtcctgtccatcatggctcgtaaagccacgactgatcagatatggcttccgatacgctggcagtctccgatgtgacatagcgcagcgagatgcctacgccactgggggggctctgatatatctctgnacacttcttactcggtgtctgcgatagacacgattgccaaatacaaatatgtctagacgcgtttatctctgctatctgatcccattatccatgcatgacttatctaagacagagaatccattgatgccccaaggggatcaaccaactccaagatccgctcagtccagaagtggcatgcattgcagtgcgaggtcgacatactgccatgcgctcaagaaaagaaggccgattgtgctcctatggcaaagggcccatgaagtttctaaccagactaatgggtggctcatcgctcgggccagcttggtatgacatgcggcaattaaatcatctcatggtctcagcgtatatcgtctatcataacgtcacgctcccggtcgcattcatacttcatctctccaatgtatgacaggtcctgtcgcttaaggcgttttggtccgttctagctagctgcagaagttggttgatgcccgtataatcagaagggggaactgtctgggcgggtttggacacgtcccggggggagtttgggtcctattagaggattcaggtagggagcctataaccggtgaattgcgaaaaatggggtcgggcccgggttaattcccgtcgaaaaaccctgttttttccggtcctaccaccggatccgggttccaaaaaaggaaggccaaggttttgg

SEQ ID NO: 523213 - DNA, 314 bp, Homo sapiens
cctttcccccttttgggggaaacttaacagagcgtggaaggggggcattttttgtcaataatgccctaacctcccaccctgatttccccgaattttagggaaggttagggattgggaagggggatggaaagctccaggggccagtgtgttttagctggagtcctgcggccaccctttttcatggaaagacatgaatcaacttttttttttgtttcatcttttaagtggacgggcttgcctgttggggcatgtgttcataaactcaaccctttaatcatggtttcatgagccttaaaaaccaaagggaaaaagga

SEQ ID NO: 523214 - DNA, 514 bp, Homo sapiens
  misc_feature (28)..(28): n is a, c, g, or t
  misc_feature (52)..(52): n is a, c, g, or t
ctggctctgaacttaggaggcagaggtngtagtgagctgagatcacaccatngcacttcaacctgggtggacagagtgagactctgtctcaaaaaaaaaaaaaaaattggaaaactttttatttttatgcaaaccatctccaactttggagagaaacattagggtaacattaaaatataacttggaaaggattggggccagacatggtgggctcatgccggtaatccagcacttggggaggccgaggcgggcggatcacagggtcaggagatcgaaaccatccgggctaacagggtgaaaccccgtctctactaaaaatctaaaaaattagccaggccggggggcgggcgccggtagtcccagttattcgggaggcggagacaggagaaggatgtgaacccgggagggggagctggcagtgagccgagatcgcgccacggcactccacccggggcgacaaagagagactcggtctcaaaaaaaaaaaagggagaaaaaggaaccaaaggtttta

SEQ ID NO: 523215 - DNA, 184 bp, Homo sapiens
tatagatcgagctcggtaccgaattcgacagttgtgcaggcgcaccgacagctgactcctacaagaatggttcctcaacttggccggcctttcttgggtttctctgaaccccttgccgcacctagtatgatggaaatgctcaaaaatagactgtagtgatggcgcacaagcttgttcgagattc

SEQ ID NO: 523216 - DNA, 485 bp, Homo sapiens
  misc_feature (74)..(74): n is a, c, g, or t
  misc_feature (182)..(182): n is a, c, g, or t
  misc_feature (199)..(199): n is a, c, g, or t
  misc_feature (251)..(251): n is a, c, g, or t
gacctgtgctagggagtaaggtggatctcagtcagtgcactccgcaccggttcaggcaattctcatgcatcagnctcccgagtagttggaattataggcatgtggcacacaaccagtgattttgcatttttagtagagacaggttttcaccatgttggcgaggctggtatccaactcttganctcaggtgatccactcngcccttagctcccaaagtgctggaattacaggcgttagccaccatgcctggnctattctggtctctttaactctctcctctttatttctcttctctctctgtacacttttcctgggtggtctcatccattccttggctttttcataccatttattcgttaatgattcccacatttatttatgcacttggagagctcacaggaatctcagaaactgatgaggtacaattctgaaccctcagtctcttccctttaaacctttctttttctctactttaatttttctaa

SEQ ID NO: 523217 - DNA, 198 bp, Homo sapiens
ctgaagcactgggtattaaatcagcagaagcctgggtgtggtgtgctacctgttaatcccggcactttgtgaagctgacgtgagcggatcacctgtagactcaggacttcaagaccagcctgggcaacactgggaaacctcgtctctactaaaaatacaaaaattagccaggcatagtggcgtgcacctgtaatccca

SEQ ID NO: 523218 - DNA, 253 bp, Homo sapiens
gcagagaaacacagaaacgactcagcaggcgacagcgaacaccaagacgacacaagagagcgcagacagcgaagaagacaaaacaacatacacatgagacaggagcggcagaaactgaacacagacaaagacacaagagcaagaagaagagcagaagaaagaaaacgacgccaaaaccagaaaaggcaaaagaacgaaagaagcgagaacagacacaacaacaaaacgcctcacagaacgacggacaaaaaaa

SEQ ID NO: 523219 - DNA, 312 bp, Homo sapiens
gcgtgtttcactctgtggccacttccctctggatgaagccctcagccatggtctcctcttcacgaggttataaggaaagataattcagatggaaatcttttttacccagcctgctggaaatgcaatgattgttgctacaaggattgaaggcaatgggctggaaacacgcacccagctcagaccctgccttcagtcggtgccggaatccttccttgaccccagcctcaccgtgagacaccgggcccttcactcagaaagggctccgtcagtcagcaccttggcgggcactatccccgccgtcccaaagcacag

SEQ ID NO: 523220 - DNA, 355 bp, Homo sapiens
  misc_feature (335)..(335): n is a, c, g, or t
  misc_feature (337)..(337): n is a, c, g, or t
atattagagagcaatcaaatcacacagcatgtgggtgattttataactgagctagaagacaatgattaaaagctaattcaaaattattatgtgcttggaaattcaaagagcccttataagacataaacatatgaacgaatccaaagtgaatcaggattgcctatcatctcaaagacgagatcataacatggcaataaaatgtctccctctggcctgagaattcctctttgtggcacaaggttgtgtgatctcaaatcaccgctaacccacctagacattttaacatccgaaaccgagtgatgacgttcttatctatatcatcatactgcctgcgngngtggactttaaattctga

SEQ ID NO: 523221 - DNA, 187 bp, Homo sapiens
tccagattccagtagaagccaaatgctttttcttttacagctaggtgcctgtaatcccagttacttgggaggctgaggcgggagaattgcttgaacccaggaggcggaggttgcagtgagccgagcttgctccattgcactccagcctgggcgacaagagtgagactccatctcaaaaggaaaaaaa

SEQ ID NO: 523222 - DNA, 207 bp, Homo sapiens
ttttttttgagatagagtcttgctctgtcacctgggttggagcgcgaggcgaatcatggctcactgaagcctcaatgtctggacccacaggatcctcccacctcagcctccgaacagctgggactacaggtgcagccccatcatgcccagctgatttttgtatttttggcagaggtgggatttcgccatgttgcccagtcaggtctc

SEQ ID NO: 523223 - DNA, 681 bp, Homo sapiens
ggtcaaagatgggctcgtgatcacagagtagcatgtgcagcgggtggaagtacaaagcattggatgcatggataaattgaccggtgtgtatgtcctcgatccatccaccggtccccacaagtggagagagtgtctcccacctcatcatcttacctgaggaacagacttaagtatgccctgagacggagatgaagtaaagaagatttgcatgcagcggttcattacagctcgatggcaacggtccgaactgatataacctaccctgctggattcatggatgtcatacagcattgacaagacgggagagactttccgtctgatctatgacaccaacgggtcgctttgctgtacatcgtattacacctgagagaggccacagtacaacgttgtgcaaccgtgacgaacagatctttgtgggcacaaaaggaactccctcatactggtgactcatgatgcccgaaccatcacgataacccgatcaccctcatcaaggtgaatgatacccattcaagactcgattcagagactggcaacgattacgtgactttcatcaaagttcgacactggtacacctgtgtatggtgactgagaggtgctaacctcaggacagcaattggtgtgatcaccaaccagacagacagcgacacctggcatcattaacgaagtggtacacgttgcacg

SEQ ID NO: 523224 - DNA, 180 bp, Homo sapiens
caccagaaaagatgtcttgagacaatttctagccctgttttcccacctggtgtaatgatggatactgtttaatgtgagcaacacgtgctgctcccattttcagtgttcctagatttttatctgcctccttattttcagaggaactggcctaacatctcatgagtgtggggataacatggg

SEQ ID NO: 523225 - DNA, 464 bp, Homo sapiens
  misc_feature (26)..(26): n is a, c, g, or t
tccctctcccccccttctctctctcnccgagggggggggtcccagggagggagggggggtcccccgatcagcatgtggctcctggcgctgtgtctggtggggctggcgggggctcaacgcgggggagggggtcccggcggcggcgccccgggcggccccggcctgggcctcggcagcctcggcgaggagcgcttcccggtggtgaacacggcctacgggcgagtgcgcggtgtgcggcgcgagctcaacaacgagatcctgggccccgtcgtgcagttcttgggcgtgccctacgccacgccgcccctgggcgcccgccgcttccagccgcctgaggcgcccgcctcgtggcccggcgtgcgcaacgccaccaccctgccgcccgcctgcccgcagaacctgcacggggcgctgcccgccatcatgctgcctgtgtggttcaccgacaacttggaggcggccgc

SEQ ID NO: 523226 - DNA, 350 bp, Homo sapiens
tccggcgcggtatctctgctttgacagctgagttaggcttgtggtcgccaatggtgtacaactgctgttcgcggtaggcgcctggggctgatgaattaggttcgattggtagcaaaagagatggcgtcaagcccatggctaattggattctggagaacgctgcatagagctcgtctataccattacccttgctgttgaggctactgaatgctcgatcctgctgaatgttgaaatggccgatggcttggattgaaggaggtactgatgctgtgaatgccgggaaaagattgaccgaaatgagataagaagagcccggtgattacacccagtcttgggggtcgaggcccaat

SEQ ID NO: 523227 - DNA, 1094 bp, Homo sapiens
ggcggcgctctgtgagtacgacatggtgcgcgactctgcggtgcgctgtctgctgtaggggccgacgtctgcggactttgctgtcgggcagtccggcgcgtggctggccgtgccagggaggaagaaccatagttcatgatgatcctctgtgaggaaccgaacagcccagtttgggcccgcaaggcgatagacccagcgctggatgcttgcgatggcgaggacggactgttcagcacagcagaccagcgatgacaaggaggaacccctgtacatcgagttatcagcaggcagcgagagagcggtgcgagggattccgagcttccaaacgatgagattccagtggccgagtcacaaagtaaggctgtttggaacattggcttgcgcgcggttcccattgctgactcaaggaaaatagaggacggtagtcttatactgcgtgaggccttgaatcttcctacattgccgaagttgcaatgcactttgcgcaaagaaaacgtgcagtacacaatacctggtagtcttgacgagccataggtcagcttgtccacggaagatgggaagaattccactttggcaggatccaaagtggcacggagtaaaagggcaacacagtctagcctattccaaaggtactatcctagggttactctgcgcgatttaatcgacctagcgaaaacggaggcatgtgattgatcccgaatcgctttgggtgggcatcgggaatttaggcgcgaaggaatttccgcgagggattccaacaaagcgcgcccttttctctttgggaaataggcctcctttgtcaacggaaaaccccaagggcctttgaaggcgcccccaaggctacgtccacacgaagttccaatcggggtcccaaggttttttgggcaccgttggggtgctttttccttaccgttacaagttcgtttttccatttggcgttggggccgttgaccctacgcacgttggggacacggtggttcttacttttccccccggccttcgcgtgcagcccccccctggggggggaacgcccttggggtggttaacccaacggttgggagcctttcaagaattgggcttccttgggaagctcg

SEQ ID NO: 523228 - DNA, 348 bp, Homo sapiens
  misc_feature (23)..(23): n is a, c, g, or t
  misc_feature (85)..(85): n is a, c, g, or t
  misc_feature (93)..(93): n is a, c, g, or t
  misc_feature (96)..(96): n is a, c, g, or t
  misc_feature (113)..(113): n is a, c, g, or t
  misc_feature (117)..(117): n is a, c, g, or t
  misc_feature (146)..(146): n is a, c, g, or t
  misc_feature (216)..(216): n is a, c, g, or t
  misc_feature (228)..(228): n is a, c, g, or t
  misc_feature (235)..(235): n is a, c, g, or t
  misc_feature (244)..(244): n is a, c, g, or t
  misc_feature (248)..(248): n is a, c, g, or t
  misc_feature (261)..(261): n is a, c, g, or t
  misc_feature (265)..(265): n is a, c, g, or t
  misc_feature (276)..(276): n is a, c, g, or t
  misc_feature (287)..(287): n is a, c, g, or t
  misc_feature (337)..(337): n is a, c, g, or t
gtgagctttgaacatgctaatcngcctggcaccaccccattttagagactgtcacttggaggccctgaatgcccctcccattccncacatgcnggnggccccagggggcgggntggnttagagttaaggggtcagcggggaatcgngttactctttggcatctggcattttaaacaccattcaccacgtccattctgcgcagggtccttcccttcnggggggcctgcntcttccntggacattntttnagctgggtgtggngtgngttcagctgtntactctttganagaaattgtaaaaactgaccaaattccccaccagtaccaaggtttaagtncacaagcaact

SEQ ID NO: 523229 - DNA, 527 bp, Homo sapiens
agataatttaaaaattagctgggattacaggcatacaccaccacacccagctcatttttgtatttttagtagagatggggtttcgccatgttggccaggctggtcccgaactcctgggcttaagtgatctgcccaattcggcctcctaaagtgctgggattacagacgtgaaccactgtacatggcctgttaggcctattctttttcgtggccatcttaccttgggccagagttagtactcgtgggataactccacatccatatgatagtgttggctgtgggaatgggtctgttcattgtgacctccagagtgggcacaatcagggtccaactttgtatgttatgtatattttaagttcatgtgaattgaccctgggagttcaaaggagctgtgccagtttcagcaacgtttggtgactcagtcacagacattaaaatagatcttacaagatgcagttcctccaaaacatatttttataagcatttaaaaataaacctaggagtctaggagtgatttgctcttaaca

SEQ ID NO: 523230 - DNA, 145 bp, Homo sapiens
cacggatcccagactgtcgacaggttgggaggattacaacggaagtgtgtcgagttgtctatatatcttcttttcttcattagacagagggtcgtactctgttacccatattgaaacctagtgggacaatcgtggttcactggag

SEQ ID NO: 523231 - DNA, 171 bp, Homo sapiens
  misc_feature (27)..(27): n is a, c, g, or t
  misc_feature (152)..(152): n is a, c, g, or t
gcgcctaccatcccggaagcctgagcngcctgcgggaaaggactggctcgccgtcatatttgtgacccaggcaggatggagaagatcactaagctgctttggtaatagtttccgggaattcgggagtcaagaataaagcacttcgacctaanaatagagatccagagtcta

SEQ ID NO: 523232 - DNA, 237 bp, Homo sapiens
  misc_feature (42)..(42): n is a, c, g, or t
  misc_feature (137)..(137): n is a, c, g, or t
  misc_feature (155)..(155): n is a, c, g, or t
  misc_feature (208)..(208): n is a, c, g, or t
  misc_feature (221)..(221): n is a, c, g, or t
aaggactgaaagagacagttgatttgcactcctagagctaanagacttggcaccactttgttcaactgtaaaaatagcaatttgccctactcgctcagagtgggacagtagtgacagagctgggattccatgcgcanttgaatgctgccttcagncatgagacatagggtttggaggcccttagaatgggtagatggtgttatgtccnttctggcatagcntcactggtgctttgga

SEQ ID NO: 523233 - DNA, 396 bp, Homo sapiens
  misc_feature (396)..(396): n is a, c, g, or t
aatctagctcggtgactctcgatgaagggccatatgctgggctctccgattgatcctgtgaggattaatttgcatctcacagaaatcccttgagcaatggatataatgtttcctgggaaggtgccttgagttccattatgtgcaagctacatgattgtcacatttttcttagctttccctgggaagacttttcttgactcacagtccaggttcttctgcgctacacaaagggagtgagttggggtctttagatctcttcttattggttagctcttgctttattattctgtctggtgagtgtaagggattctgctagggaccgggtgcctgactacccagtctttgtcttgtatcctctcccctcttcataccctcctgtttttgtttgtttttccn

SEQ ID NO: 523234 - DNA, 228 bp, Homo sapiens
gtgcgattcttgatattcctagctactggaaagactgaggcagaaggattgcttgagcccgggaagtcaaggctgcagtgaactatgatcgtcccactgcactccaccctgagtgacagaatgagaccctgtctcttagagaaacaaaacaaaacaaaaatcactgaaattaccactgtcacccaaccttcagcaaccaccaccctaagcagtcagcagccatcaatg

SEQ ID NO: 523235 - DNA, 493 bp, Homo sapiens
gagacgagaaggtgtaatagacatcccaaacaaatctcaaagtacgcacaaacggaatgatccagacatttccatagtgtccttattatcacattcagcttataaaaataatgccaagtgcagtgaaaagttacaggatgttccatccactgggtgatgttggatgggagagtttcttccagataccggatcatgtgacacattgtggcactttcctactagactggcagtccagattggcgctttttccatgcaaaaatggtaaaccagggcaaggtctcacgttcctgcaagacgaatcacacattagagacatgcgcagacgtctgcatttactcttctagtatacattgacactttccatgagctcaacacagtggtcctacaatcttactgcttggcaacgtctctactcccagctgtctccaagagcatccagacagtggtgtggacagcaggcatctcgcaccggtttatgttgacccatctttat

SEQ ID NO: 523236 - DNA, 401 bp, Homo sapiens
cccggccgccccgttttaaaagtgaaaagcccctccgcccggcagccgccccgtttgggaagtgaggagggtttccgcccggcagctgccctgtcagggagggaggtgggggagcagcccccgcccggccaaccgccccgtccgggaggtgaggggcccctccgcccggcagccccgattgggaagtgaggagcccctttgcccagcagccaccccgtttgggaggtgtaccccacagctcatttagaacgggccatgatgacgatggcggttttgtcgaataaaaagggggaaatgtggggaaaaaataaagaaatcaaattgttgctgggtttgtgtaaagggaagtaaacgtaggagactccattttgttttgtactaagaatgatcaataaatacta

SEQ ID NO: 523237 - DNA, 267 bp, Homo sapiens
ttgcacttatgaattgttatcagttcaaatagttttggttggagtatttaggatctccaaatataagatcatattatctgatcagctggggcctcacattcacagcgatagagctactccagcctgggtataagagctactccgaggcatgggcaattaaaagctatccaccgctgggcaattaagagctggccttcagcgcccggcaagatgatggctgacgaggcccggggcagtgcaggccagttcttattgcccaggctgcat

SEQ ID NO: 523238 - DNA, 401 bp, Homo sapiens
ggcggccgggaagaggtgctcctcacttcctagatgggatggcggccaggcagagacgctcctcactttccagactcggcagccaggcagaggggctcctaacatcccagacgatgggcggccaggcagagacgctcctcacttcctagacggggtggcggccgggcagaggctgcactctgggcactttgggaggccaaggcaggcagctgggaggtggaggttgtagcgagccgagatcacgccactgcactccagcctgggcaccattgagcactgagtgaaccagacactgtctgcaatcccagcacctctggaggccgaggctggcggaccactcgcggttaggagctggaggccagcccggccaacacagcgaaaccccgtctccaccaaaaaaa

SEQ ID NO: 523239 - DNA, 239 bp, Homo sapiens
  misc_feature (21)..(21): n is a, c, g, or t
  misc_feature (49)..(49): n is a, c, g, or t
  misc_feature (102)..(102): n is a, c, g, or t
tctctgacccagagggaaatnaatagaaagtagtgtgtgcttgtagganggagcatttggttgggggttggattgcatggcatgcaagataagggttcccantggccagtggcatttcaccctcatgttccccagtggaatttaagtgagaaatattctggcatttttcgtttgtttgtttaatatttctgaggaatctgtttattctgcacagattgcttttgttctttattttaaaa

SEQ ID NO: 523240 - DNA, 1001 bp, Homo sapiens
  misc_feature (1000)..(1000): n is a, c, g, or t
aatcctttgccacggtgtgcttcgtcgtgcgtctccccttcccgcacccacgcccattcccacttttctagcccatcctctttctccattttcctcttgatatacgataacgatgagcctgtaacattcaagttgtacccacttagtttatagatatatatattggggggggagactgaccctattgctggttatcagaaatcagttgcattgatctgtatccaatggtatgatgtctttcgtaaacagccggtcaccattcgatcgaatcgactttgcgaagacctctgtggagttcgcgatacagaccttgtggtgctaccatcttaattcccttgcagagccgcggatattctcatccatccggctagcgaatgtcccatgctactttagacgacttataagggagtatatatcttccagtggagctagagacttgagtagcgtctttggggaactacagtggctaggagcgttcgtacgaaataccaagagttaacaacgatcataataaagagttcgtcataccaaaaacaaagaaagaagatcaagagattttaacgtgtggattatatagtataggaaggggggtaataaggctagagagagtgaagaagtcattgggaattttatcccctcgttaatgaagtctcctttttattgtgaaaaaaaaggaaaatgcggtaaaatattcagaatattcaacaaagcctgttcaacgaagggccgaggggcagaaaaccagagaagggaaggccatattctggcacacttgcaagtagttggcaactacatttattgcacgcgggggatatgtgtgaaaacatccaaggggctgtacaataaggtaacaagaacgtcattccaagcgaacggtgaggtattatgaacacgtacaaaccgatacattactagatagaggattcgcgcaaaggattataacacacgaacatgaacatttcatactcaaaggagatggaaggcatcacccccttcattna

SEQ ID NO: 523241 - DNA, 241 bp, Homo sapiens
  misc_feature (64)..(64): n is a, c, g, or t
  misc_feature (148)..(148): n is a, c, g, or t
  misc_feature (175)..(175): n is a, c, g, or t
cgactcggagactgaggagatctggcagaacagagtactgaaatcgatcagagagaatcgcctngcagagcacgcacgcagaatagcgagctgctacaggcctaagagacgacgaggtcgagaacagctcactcagattgatgcacancttctaccattgagttccagagagaangcctgtagaactcacacaccaacactgatgtgttgaggaacatgtgctttgcagcacaagcgatga

SEQ ID NO: 523242 - DNA, 697 bp, Homo sapiens
ctattaactgcaaagttgtacgaccgtgagacccagattggacgaaaattctgttcgcttcatgtcagtggcccccacaatccttaggccttaacacgccgcagtactaatcattgcctattctcccccctctagtggatcccccacctccggatatctcatcgacaaccgacttatcaccaccccacacaatgactaaatcaaacttaacctcataccaatgatagccatacacaccacttaaggacggacctgatctcttatactagtatccttaatcattgttattgccacaactaacctcctcggactcctgcctcactcatttacaccaaccacccaactatctataaacctagccatggccatccccttatgagcgggcgcagtgattataggctttcgctctaagatttaagtatgccgctagcccacttcttagccacaaggcacaccgtacaccccttatccccataatagtgtattgatcagaaatccatcagcctagctcattcagagtccaatagccctggccgtacgcctaaccgctaacattactgcaggccacctactcatgcacactaatctggaagcgccaccctagcaatatcaacccattaaccttccctctacacttatcatctttcacaattctaattaatactgagctatcctagaaatccctgtcgccttaatc

SEQ ID NO: 523243 - DNA, 100 bp, Homo sapiens
cctacgtatccatgggggggggttgtatgattatgggcgtgattagtagtagttactggttgaacatggattagtggtgtatatattgtaattgagattg

SEQ ID NO: 523244 - DNA, 888 bp, Homo sapiens
  misc_feature (569)..(569): n is a, c, g, or t
aggcaggagcattaagttagggcccaagccaggtggaaaaacgattcgtttgagaggctttcctcgggcccccccggcccactaagagggtttgtttctagacagtgtttcaccccctttgcaagaagaggcgttggaacccctttctacagtcctcggcagaccacgctttcgagtacatgtgtgtaaacaaagagtcggctcgcgccaccacgtgcgtgacgtgtttgtttgcttccgtctcccgtgccccacaagcaagaagtgtatctctgaataagctctcgatcctatgtcggtcctcccgcaccgtatggcgaaggagtttactcccaaggcacgttggttgccatgcctttctcctatggccacgccagtggcggaatattctttgccccccccgcacacacgctgacactcctcgcgcgtgcgattgcactcacacatgccgcaaacagtggacgcacacgcaagggggaggcggaatgtatgaggttgtatgcagtaacaccgcaccgaattaatttcgtggccaggcttgcgtggatctcgcacaccaagaatgacanaaatagagatttgcggtgtttcaatacaacccgctgccgtgctctgttgtcccagcatcacaggggctttatcttattactgatgacgcgataagacgcttgtatgcggagcacggccacggagatattttgtgtcgcgccacgataaacagtagatcagtcggctcctcagtgttgtttgattgtattatgtgccggaaacaagagatacttccgctcgaggagatgtactgggcatacgtccgaacctagagctccgctaggatcaccgtcttcttattccaataaaccctcttgggattattcctaacaatataca

SEQ ID NO: 523245 - DNA, 473 bp, Homo sapiens
ggggggcctgcaaatgttgcgggttattcagcgccagtccccgcgttttccccggggtgcattaccctggaggtccaccggaggtttttggacctggaaaagggggggtacaagcacaaagacattccggccccctcctgcccccccgtggaggcccccccaacctaggcccccccgggaccgggcagggttttcagtttttgtccaaaacaaccgggaggagcctgggggcccccccccccggggggccctttttaaaagtgggctttcccctgtggccctcccggcctgtaaaaaatctgttaaaaagttaaatggacttggggcctcttaccccgccccctcaaccgtgggcccgggggcgggggggccggcccaccccaaaacggggtccaaaaaaaaaattttttttttttttttttccccagcgcttttttttgcctttaaaaaatgggaaataaaattttttccca

SEQ ID NO: 523246 - DNA, 1048 bp, Homo sapiens
  misc_feature (312)..(312): n is a, c, g, or t
  misc_feature (336)..(336): n is a, c, g, or t
  misc_feature (494)..(494): n is a, c, g, or t
  misc_feature (497)..(497): n is a, c, g, or t
  misc_feature (507)..(507): n is a, c, g, or t
  misc_feature (591)..(591): n is a, c, g, or t
  misc_feature (618)..(618): n is a, c, g, or t
  misc_feature (621)..(621): n is a, c, g, or t
  misc_feature (623)..(623): n is a, c, g, or t
  misc_feature (630)..(630): n is a, c, g, or t
  misc_feature (636)..(636): n is a, c, g, or t
  misc_feature (646)..(646): n is a, c, g, or t
  misc_feature (649)..(649): n is a, c, g, or t
  misc_feature (662)..(662): n is a, c, g, or t
  misc_feature (665)..(665): n is a, c, g, or t
  misc_feature (677)..(677): n is a, c, g, or t
  misc_feature (717)..(717): n is a, c, g, or t
  misc_feature (723)..(723): n is a, c, g, or t
  misc_feature (961)..(961): n is a, c, g, or t
tgctagaaaccaagtttgagtgactgcacagttgtatcattgtcagacagaaggtagctataaagctaccctgtgagtcatatcagagaaagagttcagaggaagattagtaaatatgtatcaataagaataaagatttggtttgttctaatatcttaacatatcctccccgttttaggaggaagaacgtgcaagaagtgaggagctagagcgaatactggaagagaataacgaaaaatggcagaagcacaagccaaactggtcgaagaaagtatgagaatgttgaagaacaaagaaagattcatgaggaanggatgaaactagaacaagaacganagtcaacaaaagaagaaaaaaaattatcctgggcaaggggaagtccaggccaaaactgtccttctcattaaaaacccaggattaaattgcaaactctgaactttttacaaagaaaaatggaaaaacttgtatggtagcttcatgttgaagtggtttgnttngtttgttttnttaatttgtaaaatctggaaagtagcttgttctaataggggctatgtctgaatcctttttttttttttttttcccttccattangtcaaatctttatcagatcatggtggnatncnaaggagngacgtnttttccaccngtngggattctatatnagnggtctgaggaanagcagatcactttgtaaacactatggatggtctgataagngctttnactgaccccattgacttcagagttatactctgttggctactttcataatgctggtttggctggacctttgggttctctcttctattattttttctacacaaacaggaaaaagttggtgattgctttgcggaatttcccaggttttactggacctttgtggtgttttggttaacccagtgtccttgtgatactgtggctcttgatgtccctgatacgggtaaggaaccagttggtcaantctgataccaggtttatatacaggtcaagatatggcgcctgggacatagggtgtaaattcatggacaaattcaaaccaagtttcccc

SEQ ID NO: 523247 - DNA, 988 bp, Homo sapiens
gctcgtgctctgctgaccggcgctctgcggtggcgtgctctgctggtcgtgatggaacatctagatctacgagctgatcattgacaatggtctgcgcatgtgtgatgctgatgaagctgggagacatagcgcttccccgagccgtgttaccttccatcgtcggcggcctcagaaaccaggcgtcctgttgtgcatgagcgcagatggagtcctacgtgggctgactgaggcacaataggcacagcagtgtggtcctgagcctgaagtaccccattgagcatggcatcgtcgactcaactgggacgactagtggagaagatctggcaccacatcttctacaacgagctgctcgtggcccggaggagcacccagtgctagctgatcgaaggccccctgaatgcccacatgggctagacagtagagaagatgactcagcattatggtttgagaccgttcaaacaccgccggccacatgtatcgtgggccaatccaggcccgtgctgtccctctatcgcctcctggtgcgcaccactggatattgtcattggaactctggatgacggggtcacccatcacggtgcccatctaatgatgggctacgctctcccccagccatcctgagtctgaaactggttggcgggactgagcgagtacctcatgaagatccttactgagcgaggtaacaagctttcgacacacgggcggcggaagtcgtgcgcgctcagagaagctgtgctggtcgcctggacttcgatcgggatgcccgcgattctccctcttgggaaacgctgaggttgcatggcaggctcacctgggatgaccggcggtcgggcggtccgcctctctggtgagcttcgggccgagcctatcctgaggggtgggtccaagctgcccggtgttcgacccatccggtgcggagagcgccgtctcaaatccccgtggtgggggcgccgtatgccccttctttcttgtttcgttgttccgagcc

SEQ ID NO: 523248 - DNA, 307 bp, Homo sapiens
caagcgtgtatgcggaagaagtcgtcgtaggccccgggcatgattacgctgtagctcccgcttccatgcgacattcatagacttgttctgaaaatgcagtcgttctcgtacagggaacagagcttgctccgaaggtagtcatggacctggtaggtctctatgggtcttgcctccatgttcaggtcccagaccttgactgttaggtagtcccgggtgagcatgtagcggccgctgtggctgaacttcacgtcggacacggaggagatgatttccgagaagaatgagcggttactggggtcctcaggct

SEQ ID NO: 523249 - DNA, 135 bp, Homo sapiens
ttcgcttttcacctcacacgtgcctcaatactgcccaggagcccacgggacagctggggcagccctcctcccatcatggtgtgccctgtgcggcttcacctcagtcccccacactttccctgcgctccttctggt

SEQ ID NO: 523250 - DNA, 913 bp, Homo sapiens
cacgcagcgacgaatgagtatccggatcccgatccagatctcgtgctgaagtaaattgtctcttctttcaacattgagtgatgccgctgcggttcctatcccacatggaatcttcctctggtatagttgtgatccaggccgcgacacgatcttccaagcaccttgggttgttaacagccgacttgagtgagggatcaaagcctgctcagtggagcgatgctctattcactcgttaagaaaagtattcggctgagcaatctttgctatgctaagagaggggagtataatgtagcagatgagatactcgtaattctaccaactgggaagactcccgtgtgttacatagtgccatgtaccttgaggctcggagataccttggaccctcatggtgcttgctgagtttctattccctattccaggcttccttactctcctgtgcgttctaatagctgaactttcgttgccagactccttccctgagagttggtagtcctactgtataaaccgctgttctggcgcttacatttgtgaggcaacgtttctgtcatcgagggggtgtgcccgacgggtcccactttactagcccttgttgaccttgggggtttcccgtccttgtttttttgaccccgggggccggacctagggctatatgactgctagggccataggttaggaagacttgtagcgtagaaaattgccgagagaacttcgtgagcacttggcggagttaataattctgagccagaaatcgtggttgaggcattagtggggccataggttgctaagcgtcccttgaaacgttgtcctgaagacaggggttattgtcctgttaacaagaagccgtcatagaaagtggtatatctcttgaacccttaacaagacgtaaatttcgcgggagtggcccattaaaaat

SEQ ID NO: 523251 - DNA, 401 bp, Homo sapiens
  misc_feature (46)..(46): n is a, c, g, or t
  misc_feature (60)..(60): n is a, c, g, or t
  misc_feature (114)..(114): n is a, c, g, or t
  misc_feature (331)..(331): n is a, c, g, or t
  misc_feature (345)..(345): n is a, c, g, or t
  misc_feature (349)..(349): n is a, c, g, or t
  misc_feature (374)..(374): n is a, c, g, or t
tgggggaacgaccaattgtggtgacctttacctgtctacctcaaangccaggccgttggngcctctcaacgtcaccgggcccttcgagattcctggaaaccaggacccttcggngcttcttggaccggggtccggactcatgtcccaagggctgccgtttctaggggccccttcctgtaatgagtgccccgctggtggggcaacgatactacctcttgttatacgtggatttctcagagtctgggacttctataattaaaagctggtttggtctgttggttttttttaacagcttttggcccctgacgtttggtgttggtgtgtgttgagngcatccccctgagnatanatgctctggccataagacgtgacancttttaggttttgaaacactaagcatg

SEQ ID NO: 523252 - DNA, 246 bp, Homo sapiens
tgtacctgggcatgaaaagtctgcttcatctaggtcctatactaaggagcttaaacttacactaataatatatacttaattaagttttacttttacaaagttgaattcaattgtatccagtaagagaataatattttgacatttctgtcatagttatattcttccatttccaccccagggtctgtctctgtctctttcttcttcctcctccccttttttttctctgtctctccccatccccccggt

SEQ ID NO: 523253 - DNA, 150 bp, Homo sapiens
cgctccgccagaagcaccgagcagcgagccggggcccgccgtccctcctcctccatgaggcccgagtgaggcgcggcggatatagccgatccgcggggcctttccccccgcgtcctatcgcgagcgcagctggcgagcggccactggagg

SEQ ID NO: 523254 - DNA, 113 bp, Homo sapiens
gactaggaggcaggcactgcagggctgatagaagctgataggcttagggtctggaccaatggcgtgctgcctgccgtgcagagcttttcctgcttaccctacgtgtgcgttgg

SEQ ID NO: 523255 - DNA, 869 bp, Homo sapiens
  misc_feature (21)..(21): n is a, c, g, or t
  misc_feature (89)..(89): n is a, c, g, or t
  misc_feature (95)..(95): n is a, c, g, or t
  misc_feature (184)..(184): n is a, c, g, or t
  misc_feature (249)..(249): n is a, c, g, or t
gaatccccagacagctcgtcngcccacctgtaccgtggcatcttccctgtgtgtgcaaggacccagtccaggaggctgggctgaggacnggaccncccggtgaactttgccatgaatgttggcaaggcccgaggcttcttcaagaagggagatgtggtcatgtgctgaccggatggcccctggntccggcttcaccaacaccagcgtgttggtccttggccggtgatggaccccagagcccctcctccngcccctgtcccacccccttcccccagcccatccattaggccagcaacgcttgtagaactcactctgggcttgtaacgtggcactggtaggttgggacaccagggaagaagatcaacgcctcattgaaacatggctgtgtttgcagcctgctttagtgggacagcccagagcctggctgcccatcatgtggccccacccaatcaagggaagaaggaggaatgctggactggaggcccctggagccagatggcaagagggtgacagcttcctttcctgtgtgtactctgtccagttcctttagaaaaaatggatgcccagaggactcccaaccctggcttggggtcaagaaacagccagcaagagttaggggccttagggcactgggctgttgttccattgaagccgactctggccctggcccttacttgcttttctagctctttaggcctctccagtttgcacctgtccccaccctccactcagctgtcctgcagcaaacactccaccctccaccttccattttcccccactactgcagcacctccaggcctgttgctatagagcctacctgtatgtcaataaacaacagctgaagccccaataataataagaaaaaaggg

SEQ ID NO: 523256 - DNA, 631 bp, Homo sapiens
  misc_feature (21)..(21): n is a, c, g, or t
  misc_feature (89)..(89): n is a, c, g, or t
  misc_feature (95)..(95): n is a, c, g, or t
  misc_feature (184)..(184): n is a, c, g, or t
  misc_feature (249)..(249): n is a, c, g, or t
gaatccccagacagctcgtcngcccacctgtaccgtggcatcttccctgtgtgtgcaaggacccagtccaggaggctgggctgaggacnggaccncccggtgaactttgccatgaatgttggcaaggcccgaggcttcttcaagaagggagatgtggtcatgtgctgaccggatggcccctggntccggcttcaccaacaccagcgtgttggtccttggccggtgatggaccccagagcccctcctccngcccctgtcccacccccttcccccagcccatccattaggccagcaacgcttgtagaactcactctgggcttgtaacgtggcactggtaggttgggacaccagggaagaagatcaacgcctcattgaaacatggctgtgtttgcagcctgctttagtgggacagcccagagcctggctgcccatcatgtggccccacccaatcaagggaagaaggaggaatgctggactggaggcccctggagccagatggcaagagggtgacagcttcctttcctgtgtgtactctgtccagttcctttagaaaaaatggatgcccagaatccacaactcacccaggagcccaccccgcaccctccttaaagtgctcccagggcctggcctg

SEQ ID NO: 523257 - DNA, 330 bp, Homo sapiens
agctagaagggaggcggtatccacctgcagccctgttagtggtggtgtctcactcttgctatctctctttgtcccggatgaggctaatcaataccctgtggcaactgatgggctacttggaaaacatagtagtagacctgagatgcttggtcaagtgccgttgtgatggagttcatcagtgagccgttgctaatgcagggcagtaaaagtataacagcaaagaaccgatgggtgaatctggagattagtggggacttagggcaagcaggtgtgaggctatggacaaatgtcagaacagtcctgatatactttttgccgggatacctgtgg

SEQ ID NO: 523258 - DNA, 398 bp, Homo sapiens
  misc_feature (312)..(312): n is a, c, g, or t
  misc_feature (379)..(379): n is a, c, g, or t
cccgtcagatcagcctttaccctggaagctgatttctgtttcgtggggcgtttttgtatgtgagacgaagtcttgctctgtcacccaggctggagtgcaatggcacaatctcggctcactgcaaccttcgcctcctgggttcaagcgattctcctacctcaggctccagagtagctgggattacaggtgtccatcaccacacctggctgatttttgtatttttaacacagacaggtttcaccatgtgggccaggctggtcttgaactcctgacctcaggcaatccactcgcctcggcctcctaaagtgctgngattacaggcgtgagccactgcgcctggcaggtggctggatcttgagtaaggcctccctgtgtcagntctgaggactccccaaatc

SEQ ID NO: 523259 - DNA, 194 bp, Homo sapiens
ggtactgtcatgagtgtattagatacacgatactttaaaactgtgtggaaaaaactaacttataatttggtatcacacacccgggatatgtgttctgtttctaagcgacatgtgtgagagattatagtaaaatgagagcgaacaaataaaacttaatttaatcttagcagatacatacttatgggaaatttgaa

SEQ ID NO: 523260 - DNA, 125 bp, Homo sapiens
aaaaagggctgaaaggctgctggggctgccccctcgctattcccgcataagcatttgcccccaacccctttgaccttcatttgatgggcatttttatacagaaaacaataaagatttccctctca

SEQ ID NO: 523261 - DNA, 169 bp, Homo sapiens
ccccccccccccggggggggggggggtttgggggagggcccccttttttttttggcccccagggggccctttttgggggggaaacctttttttttgggggggggggccccccccccggggggggttttggggggggggcccccccccccccccctttttttttttggga

SEQ ID NO: 523262 - DNA, 1011 bp, Homo sapiens
catgtgggctctggagtataccaggaactgaagtaaggtacatggacatttatgcataccctatcattccatcaggcattggagaaatgtactgggctgactaagaacattcgaaccaatgcctggatggaatgatagtggtatgcataaaatgttcaggtgtgtctcatggagatagtaccaggcaactcgaacgataacgagtaacatggaaggtttatgatatatcagtaactgagaatgaggcaaattcacctatcgacactgtatgcaacattacatgagacagatgcgggaagacgaccaggagcatcactggctaacagtgccacttgtatcgtataatacccttcagcatattcctacagatattaaggcatacatcctcacctgagaaccagcaggaagaatttacatacaacatgacaccaagttgagaacaagaacttcacctattaatcattcgaaatggaaactttcgatgtgaaaccactctgactgaaagacaaagtttgatcggggacaaaacagggcaggaagtggctgtcaatgagggaacttacatgggattgtcacaatagataagtcctcggcgacatcacacacgagaaaggacgaaacaggaatacattcccaaaatagacagagctggtgacgacaactcaatcgactaggctaggagagcaggcaaagacaaactcgaacgtcagtaacatgggaaaacgcgagtcaccatcaagcagaaacagcgcctggaccacaactacaacataaatgggagacagaaacgacccgtggccgagaccaatcgacgaataccggcacgcatcaatggacacaggccaaccaccagcaagcagcaacacccccaacaaaaccccgcacagacaacatgaaagcaacagccacacgactcccacgacacacacaatcacccccagtacccaggcacgaacaccaccccacagcaacacaacatcgaaccgccgcaccaaacacagaacgaacccg

SEQ ID NO: 523263 - DNA, 194 bp, Homo sapiens
  misc_feature (168)..(168): n is a, c, g, or t
ctgctgaagcgcctggccgatctgatcgagcgggaccggacctacctggcaggtattatgccggctgggctgataagtaccacgggagaaccatcccgattgacggagacttcttcagcatacacacgcacatgacacctgtggggcgtgtgcgggcagcatcattcncgctggaatttcccgactcctgtatg

SEQ ID NO: 523264 - DNA, 903 bp, Homo sapiens
tcatgaataccttcagtgtggtgcttcacccaaagtgtctgacaccgtggtcgagccctacaatgccagcctctccgtccatcagttggtagagaatactgatgagacctattgcattgacaacgaggtcctctatgatatctgcttccgaactctgaagcctgatcacaccaacctacggggatctgaaccaccttgtctcagccatcatgagtggtgtcaccacctgacctccgattgtccctggaccagactcaaatgctgacactccgccaagttggccagtcaacatggtccccttcccaggtcatccattctcttctatgcctggacttctgcccctctcacacagcacgtgtgcaatgccagacagctatcggagctctcacaggtgccggaactcacccagactaggtcttcgatgccaagtaacatgatggatgccctgtgacccccgctcacgggtcgaatacctcaccgtggctgctgttcttccgtggtcggatgtccatgaaggacgtcgatgagcagatgcttaacgtgcagaacaagaacagcacctacttcgtggaatggatccccaacaatgtctagagagccgtctgtgagatcccaactcgtggctccagatggcagtcatccttcatcggcatagcagcagccatccaggagctcttcaagcgcatctcggagaagtacactgccatgttccgtcgggaaggacttcctccactggtacacaggcgaggcctggatgacatgagtcaccgcgctgtagcaccttgatcgccctcgctctgctatccgcagccggatgcccgggaaacgcggatcggagagcaaaagaggcaagaagccccagtcaaccaagtacagcctttcccccaatgggcgcaacggtga

SEQ ID NO: 523265 - DNA, 627 bp, Homo sapiens
ctaggaaatgcatataagggctgatcacctggtgtttggagccctctcagaggtcatagacctctagagagagaaactgagatacataacagggcggaaacaactcactggtgacacactgtggagtcctgtctacaagcagcacacatcaatccaccacacaaaaaccctaggctacagctcagttccttctcttaagaaaaaaaaagtgtgaaacaaataacctaagaatgaggagaaaacaagaagaatgaccctcttgcgagcactctgtaggttttatggcacctctacttgccagagttaatgtaaaatggaagtaatatcgtcttcgtgcacatttacgttaaagaaaaagagccctaaagtagacctgcaaactatagagttcctaagttcccctttttctctattttattttctgcctgctttaaatctgctgttatttttctattatgataaaaaaaaatcacagtttggatccaataggttttttgtttgcaagccagtgaatttgtatttatctcatggttaaagttctgtaaaagctataggatatgtgtgtgtgtgtgtgtgtgtgtgtagtgagaaggaagtaacagaggtgaaggtgctggcacttgtaaa

SEQ ID NO: 523266 - DNA, 1120 bp, Homo sapiens
  misc_feature (173)..(174): n is a, c, g, or t
  misc_feature (302)..(302): n is a, c, g, or t
  misc_feature (493)..(493): n is a, c, g, or t
  misc_feature (571)..(572): n is a, c, g, or t
  misc_feature (642)..(642): n is a, c, g, or t
  misc_feature (674)..(674): n is a, c, g, or t
  misc_feature (881)..(881): n is a, c, g, or t
tcaccttccctgtcttctggcatagcctagcacactggtctttttggaagtccactctaccatgccaactgaccctcagtcccaagaggtgggtgtgtgcagtgccctttgcattctgtgtcactgctcggggaatggggagggcctggttgtgccccagttacagaaagcannctccagtaagttctctgcctagcctcatcaccatggtaacacatggtgggattcagaaggtcagaatatgctgatgatccagctttgttaatgctcagcaggttaaagaaaaaagtgtatttaccttnaaaccaactccctgttccaagaaaaaagctcctctgattcatttagaaaatgccatgtcttggtttggcaacggagtgttctgtcggatctgaaacacttgggctagccatcttcctggtgtcaggggcagcatgggctaccctggggggcgggtgggggcacatctatttagaaacagaagctggcccangctgaagtcaactgctgttccagcacaaagcagcgacaggaagtgacaggaggcaaaaagtggtgggagctgagctcnnggccaggtggaagcagtgatgaatcccaacagtatcacagtggcagggggcaggggaggagatgtgggangaaaagccagtgagtatctgggcatgggggantagcggggtgggggcggtagtggggcagacagtgaaagctaggctgtcagaggaggactaggaggtccatctctgagggcagaaggcgaagagccccttggaggctgacacctacactgagaaagtcctcaggctgtgtgagtgcagcatcaggattgattttatttgggggacatgtccacaatacaacaggctctgcaaagtccngggccttactttcagcatgctccaagccttcccacagaaactagaggctaacgggtgcatgtgtgagtgaccaaggccttgccttctgcattcctgactcctggtgggtacaggagcaggcagaccccagtggaaccatttgcagaagagggcttccctaggttagctgcccttcataagggccccatttcatttcagagtcgctgcgtggaaacagcccgaatggtggtggaaattat

SEQ ID NO: 523267 - DNA, 93 bp, Homo sapiens
gacagtccagtctttattagcattgggtccctggtcccaccacccattcccctccacgtaccatcccttcccaccccttctgtcgtcttctcg

SEQ ID NO: 523268 - DNA, 721 bp, Homo sapiens
tggtcttcaaagtcaagacagtgtttgttatgcacgttcgtcgcgtatactctgttggggacagcaaacttgacccaccaatggacgcatgtgtgttgactgctcaggtgattatcctgaaccatccattcctactcactgccggatatgcccatgggtcggattgccacacgattaacattgcatgcaagtttgctgagctcatggataagattgaacgacgttctggacctatgctgaaagaaggccttaaactcttgacgcctagtgaagctgccattggtcttctgggtcctggctagctcaagtgcgttgagagctcatcagactatgcacctttgtgtcctttcgttagtcactatatgcgacacacagttgcgcctggaggcatcaacccaaggcacacgatggcatgtgtactactgactgcaccaagtctgtccagacagctcatactgcttaatgaacattatccgtaatacgtgtcactccactcttaatcagagtgcaagatcgcataaggaactgtggtatcaattgaccagtcacgtatagttgttaatgactggttaatgatatcaatgcattcggcctttagattgatacgacaatcgatttggaccactttgtgttacttattgcagtagagactttacttatgagctatatccgccttgttattgcatttgccacatagttggccatattcctggaccatact

SEQ ID NO: 523269 - DNA, 563 bp, Homo sapiens
gcgacactcttgagtgatgtaaacaatgctatttaacgagtgctttatctactttactgaaatacggaaatacttatgtacacgatttaaatgtgcacaagacttgggcttttttcttctagactatgtacatcattcagcacacaattcaaaagctagcagaaggcaagaaataactaaaatcagagcagaactgaaggaaatagagacacaaaaaacccttcaaaaaattaatgaatccaggagctggttttttgaaaggatcaacaaaattgatagaccgctagcaagactaagaaagaaaaaaagagagaagaatcaaatagacacaataaaaaatgataaaggggatatcaccaccgatcccacagaaatacaaactaccatcagagaatactacaaacacctctacgcaaattaactagaaaatctagaagaaatggataaattcctcgacacatacactctcccaagagtaaaccaggaagtagttgaatctctgaatagaccaataacaggagctgaaattgtgcggatcatcaatagtttacacaccagagtgt

SEQ ID NO: 523270 - DNA, 270 bp, Homo sapiens
atttataataaaaaatgttggggggggttgatgaattcctgttaaaagctgtttttgtgtgttacatgtaaccgacaggggtaaaaatttgtttccagtttttgtttaaccacccatgcctttaagtttaagtgaagtccccaaaaaggaaataggggtatggatatgtgattttgagattaaagttagttttaaaatgtaaataaaatgtcccccggttccccacatagggtgtaagagacaggaaaaaataataataatttaaaaaag

SEQ ID NO: 523271 - DNA, 410 bp, Homo sapiens
tgtgctgagagggacagggaagtgtaggagaggaagggacacaaccttcaaccactagctgatgaaatcactggaagggaaggtgtggggggcatgttcggcagggtgatacacacagtgcataaatgtgcctccccagacgctcctcagaggtggaggggacagaggctgcagcctggggcatggtggggctccagctcgtctcctcacccagggaccccacaggaatgggcactgcctgagactgccaggtgggaagaacctcagtgacttctcagaccttcttcttcttcagtctcagggcttgaagccagctgggcgacgatccttctgaccctgaggatttctctggcctgggaggtaacgtgaggggcttccccagtcctgggaccttgtcggatctcgaacgc

SEQ ID NO: 523272 - DNA, 828 bp, Homo sapiens
  misc_feature (665)..(665): n is a, c, g, or t
gggagaaataggccccaggcatcatgatataaagaagtcttatatgccgagctctgattaactctcaggatatgaagataatgaatttgtgcctagatacgccatatagtgacagacaagcgcttgactaggtaaatgcttggccacagaatcacttgcaagacttagaatagcagaaggcagttctgttatactatactttgtcccatccggtggtagacttccagagatgtaagtctttgctgcgcaatgtgattaaccctgctttacgaagtcaccatattataataggaaaaacactgcctaggaggcaagagatctgaattccagttctgatgctgccactgtgtaaggaagtagttttataaaccatgggcaaatcatctgagctttctcatctgtaaagttagggagaggaattaattagttgatctgtaaaataatcagttcaaaacgttatggctaaatctgtagaatgtatgcccaattgctaaacggatgttgtgcccagaattttatctagtgactacctcaacatacaggccaagcgttacctacaccaacacccaagccattaatttgaggtgccatgagaataggtgaaccacagctaacaccatttaggttttgtgtctttttcaggcttgcctctacttaaatatatntagatgagagagttctcttagacttctttcttgtaaggaagggttatttggggaagtgtggaaaaaagattagggcagggtacccttagtttatataagggtacacaagaatgcgaacatcttccttttttctttaatctctgaagtcgtgtttggaattctt

SEQ ID NO: 523273 - DNA, 319 bp, Homo sapiens
tacccaccggggctgctcatcgccttcagtgcctgcaccacagtgctggtggctgtgcactgtttgcgccatgtcagcactgcatctgccaacatcgagcggtgacaacgtgacaatctcaactcggtcaaggagtcccccatgacgcatgaccgcacatgagctgcctgggcttctccaccgtcatcggcacgctgctcttcctagctgaggtggtgctgctctgctgggtcaagttcttgcccctcaagaagcagccaggccagccaaggccaccagcaagccccccgccagtgggcacagccaacgtcagcaccag

SEQ ID NO: 523274 - DNA, 467 bp, Homo sapiens
aagcgcacgatgggctcccctgccacgtgtgatctgtagaagaacgccgacgctacaagcttgacaagcagcagacattccgggtcaacctctttacggatttgacaagtataaacgatcagtgacgagtgggatatcccagagaaacagcctttcaaagacctggggaacttacgtttactggcttgaagaggcagaatgccgagattcacgtccagtgtgatttttgacgagtggagaccgcacttccatattctggaatgccgtaaaagaaccctgtctcaattgaagaaagagcgagatggccagaggacgtatgttgcgttggtctcctaaagggcacctacctggctaacctttcatcaaagaggcatggtcctaatagggggggaacagaaattcaagcaaattcagagattcagccacccaagggggtacagcttaattgagttctcaccttgtgaaag

SEQ ID NO: 523275 - DNA, 344 bp, Homo sapiens
  misc_feature (323)..(323): n is a, c, g, or t
ccttgcctacatttttaaaaacctagagctgggcatgatggccccagcctgtagtcccagtgattcgggagactgaggtgggaggattgctagaagccgggagttcgagaccagcctgggtagcatagctagaccacatctcttaaaataaaatagttaatttagccaggcatgatgatatatgcctgtggtcccggctgcttggagggctgaggtgtggggatctttgagcccgggaggtcgaggctacagtgggctgtggtctcaccactgtactccagcctgggtgacggagcgagacccagactcaaaaaataaaaatnaaaaccctgaatatcttcctt

SEQ ID NO: 523276 - DNA, 112 bp, Homo sapiens
agcatcaggaggcaatgcagcatcaggcagggcatgcagccatcaggcagggcatgcagccatcaggcagggcatgcagcatccaggcaggggcatccctctagaagtcgca

SEQ ID NO: 523277 - DNA, 854 bp, Homo sapiens
ccgccaaaacggtcgacacaagatttaataactaagaaggctggcgcacattttttattttttttcaaaatagttgactccatacatttgctggatcttgagcaatcttcaggtattccatcatagaatcctcccttaacattcctctatgttcttcatgccagttctgtattctttcttcccactgttcttttgttagttatgagttgttccaatacacgctggggtaggagtctatcattagccaagtagcctggcttatgaatctctttattgtaaactccatacttggcttggacagcataggaagccaaaagaactgcagttttctggaggacaatatatctcatcatttaagatggcttctttaacttgcaagaagaagaccctctgggctatttattgaattaattccccagaaaacattttaaagaaagaattcacctctaaaactgcactgtaaaggatcctctttcaaaaccaaacggatgattacccctccattcaagtcaaacccatgaagtaacaacctctgctgtctacaaacctgcgccccaaaaaaccccaccttaatcacccccactgtctcaaccaacctgtgaaaaaaataacctcccactaatattggactaaactagcacccaccatccaacaatcactcgaacccaccaaaagacgataggagtacagaaaactcattcgacaggtgataccctatcaaacaattcaacaccccaaaaaatatgacctaccgttatgatacgccggatattctcccaaaaacctcacactgagaattaaacatatcatacaaaaactaaacccaccattacatatcgcacacgactacctcg

SEQ ID NO: 523278 - DNA, 177 bp, Homo sapiens
tgatacttttggtctcctgatgccctaattcctaaactgttggcaaatagcaacctctatggggtggggggtttggagggtacagtggctgggagctggctgacgcaatgaggcccaagtcactcgggaagatcacgatgccaagcgcccgcgtactgcggtaccgcggcatcgaca

SEQ ID NO: 523279 - DNA, 941 bp, Homo sapiens
gtgtttctctgtatgcttagaaaattttacacacaaggaatgttctgaaaaagtgagaattttagagtgcttgggtggttttatttggtcagtgctgatgtgttaggtgtttagggaaataatgcttcaggaccttttgacaacacagcttcatgaatgactgggggatatttatgtttgtgctgagaaaagggagggagtgggcaggttggagtggggacctttccattgaaagcagtgcagtcagctgtttcgtagatgactgggggatatttatgtttgtgctgagcaaaagggacgggagtgggcaggttggagctggggacctttccattgaaaacgcagtgcagtcagctgttctcgtagatgcatttttctcttatgcttgtaacatgctcttgtgtccataacttgactgaacatgtcaagctccacggaatgcaaggcatctatcaggtgaccagaagtagaaccttgttcgatctctcgacctgcgccacgaactaatgtccaagtagtgggggtacaatgacacatcaagatctcactggtgaattttccactgcttaggtcatgtacatccaacctctttttctcacgtgcatgttcactctgtctataaacgttatcgcgtctcgggcgcactgcccccgcaggtacaacaggccaacagcgacggacttgcactcacccacgtggttgaccccaacttacgtaccattcaccttattacccattgccttgagaaacgggctaatcataatgacctatccccaacagacaaacacacccaccacgagccgcaacacacacgccaacacaacacgcaacaaagccaccacgccagcgcgacagaacacacacggaaccacgcaacagccccaccacacccacgaacaacccgggcccacccctcgcacacaccacccacaccagacagc

SEQ ID NO: 523280 - DNA, 122 bp, Homo sapiens
catctcaaacttaagctaccctgaagtggcagtatgattagtacacagtaagaaattatttatgtttgatacagactctcaccctttcgcccacactggagttcagaggtccaatcttccgg

SEQ ID NO: 523281 - DNA, 1062 bp, Homo sapiens
tgtggggaaaagagagatcagattgttactgtctatgtagaaaggaagacataagaaactccattttgatctgtactaagaaaaattgttctgctttgagatgctattaacctgtaactttagccccaactctgtgctcacagaaacatgtgctgtattgaatcaaagattaatgcatttagggccgtgcaggatgtgctttgttaacaatgtgtttgcaggcagtatgcttggtaaaagtcatccccatcctccattcttgattaaccagggacacagtgcactgcagaaagccgcagggacctctgcccaggaaagcctgggaattgtccaaggtttccccccactgagacagcctgagatatggcctcgtgggaaaggaaagatcttaccatcccccagcccgacaccagtaaagggtctgtgctgaggagtagtgaaagagggaggcctctttgcagttgagataagaggaaggcatctgtctcctgctcgtccctgggaatggaatgtctcagtgtaaagccgaccattcccattcgttctattctaagataggagaaaaccgccctgtggctggaggcaagatatgctggcagcaatactgctctgttactctttgctacactgagatgtttgtgtaaagtgaaacataaatctggcctacgtgcacatctgggcacagtacctttccttgaacttattcatgatacagattcctttgctcacatgttttcctgctgaccctctccccacctgttgccctgctacactcccctcgctaagatagtagaaatagtgatcaataaatactgagggaactcagagaccagtgccggcgcgggtcctccatatgctgagcgccggtcccctgggcccactgttctttctctatactttgtctctgtgtcttatttcttttctcaaaaaaatttttcttttttaactgcaataacgtcagtctgttacccattcactgcgcgattccattccggccataacctacagtgcatccttgcgatcagagtattgaggagactctctctggaaatatgttgccca

SEQ ID NO: 523282 - DNA, 577 bp, Homo sapiens
  misc_feature (103)..(103): n is a, c, g, or t
  misc_feature (112)..(112): n is a, c, g, or t
  misc_feature (129)..(130): n is a, c, g, or t
cacctcctgctcctccccgggaaatggaatgtctcggtgtaaaacccgattgtacattctatctactgagataccagacaactgccttatggctggaggtganacatgctgncggcaataccgctcttnnctgcactgagatgtttgtgtaaagtgaaacataaatctggcctacgtgcacatctgggcacagtacctttccttgaacttattcatgatacagattcctttgctcacatgttttcctgctgaccctctccccaccattaccctatagtcctgccacatccccctcactgaaatagtagaaatagtgatcaataaatactgagggaactcagagaccagtgccggcgcgggtcctccatatgctgagcgccggtcccctgggcccactgttctttctctatactttgtctctgtgtcttatttcttttctcaaaaaaatttttcttttttaactgcaataacgtcagtctgttacccattcactgcgcgattccattccggccataacctacagtgcatccttgcgatcagagtattgaggagactctctctggaaatatgttgccca

SEQ ID NO: 523283 - DNA, 1069 bp, Homo sapiens
tgtggggaaaagagagatcagattgttactgtctatgtagaaaggaagacataagaaactccattttgatctgtactaagaaaaattgttctgctttgagatgctattaacctgtaactttagccccaactctgtgctcacagaaacatgtgctgtattgaatcaaagattaatgcatttagggccgtgcaggatgtgctttgttaacaatgtgtttgcaggcagtatgcttggtaaaagtcatccccatcctccattcttgattaaccagggacacagtgcactgcagaaagccgcagggacctctgcccaggaaagcctgggaattgtccaaggtttccccccactgagacagcctgagatatggcctcgtgggaaaggaaagatcttaccatcccccagcccgacaccagtaaagggtctgtgctgaggagtagtgaaagagggaggcctctttgcagttgagataagaggaaggcatctgtctcctgctcgtccctgggaatggaatgtctcagtgtaaagccgaccattcccattcgttctattctaagataggagaaaaccgccctgtggctggaggcaagatatgctggcagcaatactgctctgttactctttgctacactgagatgtttgtgtaaagtgaaacataaatctggcctacgtgcacatctgggcacagtacctttccttgaacttattcatgatacagattcctttgctcacatgttttcctgctgaccctctccccaccattaccctatagtcctgccacatccccctcactgaaatagtagaaatagtgatcaataaatactgagggaactcagagaccagtgccggcgcgggtcctccatatgctgagcgccggtcccctgggcccactgttctttctctatactttgtctctgtgtcttatttcttttctcaaaaaaatttttcttttttaactgcaataacgtcagtctgttacccattcactgcgcgattccattccggccataacctacagtgcatccttgcgatcagagtattgaggagactctctctggaaatatgttgccca

SEQ ID NO: 523284 - DNA, 443 bp, Homo sapiens
gttagtccaattcagtctctctcctctacagaaggtctctagtgaccctatgtcgcacatggccaaggtctcatctcacatgccaggtctcaggtaaggtgtcagatgcccggtagatgcatgcagaagtagcatcaccccaggggtaccgcaggacctcgctgctgcctcttctttcagcagcaaccacattacaattgggatgttatgggaaaagcatttccattggcctggtagagaacatggccccaagaatgtgtgtccttagaactcggagctggagtccatccactgtccgggctctgttgctcctgactcttcatctggaggcaggaagtatctccgggcagagggagaggagctataaagtcaccagtcaaatggtgaacagacaccaaattgggtgattttaccggcctacaagggccaggttatcccacaat

SEQ ID NO: 523285 - DNA, 399 bp, Homo sapiens
caatttgctgaatcgaggaaaaacaccaggtctgggggccaattggtgctgacttctcaaagctggatcaaaaggaggacacctgggtctgggggtagggaacctaaggccaattaacacgaacttcctaaaactaaaccagaaggggaaatcccatctccccacgccgagcagcaaaggatcaaatctccctacagccctcccgcttccagcacatctcagatggaaagagagagtgccctgattggccaagcatgggccaccccttcctctgcatagggcaccaattcacctcagcctttaattagccaggaaccaaatccttcatccagacaagaggtaacttataggagcctcaaaaggggtacttaaaacccggaaaactggctccttcccccg

SEQ ID NO: 523286 - DNA, 904 bp, Homo sapiens
tctgtacctatctatctggctggcggaacagctggccggcagtctcagcctctccgagacgcaggtgcaggtgtggttccagaaccggaggacaaagtacaaacggcagaagctggaggaggaagggcctagagtaccgagcagaagaacgaagggctacccatacacatcaaccggtaggcgcatatagccacgaagcaggccaatggggacggacatcgatgtacacctccaatgactagggtgggcaaccacaaacccacgagggcagagtagctagctatagctagctaggccaggcccctagcgtaggagcccaagctagggactactaggctcactaccctggccaggctatatggggagcgcctaggagtacatggccccacagggcttgaagcccggggccgccatattgacagagtggacaagcaattgtggctaggctagagtgcctgtggaccactataggccttactacctacggagagccctagccttgccttaggtgcgtgtgccctgtcctgccaccagcaagcctaacccaagctagctacttaccgtgtaactaccaatactacccttattagagtatatagaggattgccatatatctaagtatatataaaaattgtcataattttcccaagggcgacccaaaggtaggtaacggtatgtaaggtaagaattaccgcccaagttttgttccccccccttattcccgtcttaaatttgcgcggcagattaacattaacgaccacaaggtacgtaccttacctaccttatgaacaatttcggacacatcaaaccacacagacacaataacgaccgagaagagcgcagaaaagctctactacgcgcgacatgaacagcagcgcgagaaaccacaagtaaaacacacaca

SEQ ID NO: 523287 - DNA, 125 bp, Homo sapiens
taatagtaatagttttgaaaggttaaatgccagcttctaacatctttcaaaataaactctgattatgttagagtaaaaaaagtcagtcccaaaaggttacctacgtgtatgattccatttacata

SEQ ID NO: 523288 - DNA, 236 bp, Homo sapiens
tactgactgagctgggaagaactgtcttcatgggctagaaattggatgctgccggcgactgcacaaccagctgcatggaactcaaggtgcaacatcctgtgtattcttgccgggtccgccctgtcctgccgggggagcccactccacccctgtgctcctcctgtttccctctggccctggttgggcctctgatcctccaacccgcttagcctctcccggtctgacgagcggcgtgg

SEQ ID NO: 523289 - DNA, 449 bp, Homo sapiens
cttgcattttaaaatgaaaaagggagactaaaattacatttattatttcctatatgccaaagatctggctaggtgctttagtatattgggttattaaatattaaataaatttaaataatattaaatattcttaataacaatgtgaaacaaattattatctctgtttgatagatgagaaaaccgaagctcagaaaagttaggagagatgtttcaaagctacatagctagtaactatttgagacttgaatccaatctcttggacccaagatagcaaatgaattttatcttaaggattaactttagtcagttgatggagattgtctgcagcagtggagagaagggttctgaggctgtgtctgggctttctgggaaagaacatctcattcagccagtgacatttgttacaggagcgaggagaggagaccgcactccagccattttatttttcc

SEQ ID NO: 523290 - DNA, 237 bp, Homo sapiens
aaaagctatggaaggaaaatggataacagatcagttgagatggaaaataatcccctgcaagatgaggattgacagttaaaacaaacaatatgtaaaggagatgaggaaatggagacaaattccgaaggccttctcaaaaccaaggaaaagaatcagaagcttcacagtcgagcacaacggcaccaagagaaaaggagagattcagaggcataatcgcaaactttggtaccctgtagg

SEQ ID NO: 523291 - DNA, 252 bp, Homo sapiens
aaacgcaccgttcttgggtgggcccccacttggtccccggatgccccccccacttggacaaaggccaccttattgcccaccccagttgtggcgggaggtgcagagcaaagggctttagggagcagtgactgcggtcccccctttagttttttgggtgtagaccaccccccctcccattgggccccccccaacacggtgtcctgccccccagggcctggttccaggaaaacacgcttgccttccttcccggca

SEQ ID NO: 523292 - DNA, 354 bp, Homo sapiens
gtctacagcttcctgaggtcaggagttggagacatgcctggccaacatggtggaactccatctctactaaaaatacaaaaattagccgggcgtggtggcaggcgcctgtaatcccagctgcttgtggaggctgaggcaggagaatcgcttgaacccaggaggcggaggttgcagtgagctgaggtcgcgccattgtactccagcctgggtggcgacaagagcaagactttgtctcaaaaacaaaacaaaacaaaaaaataattctaacccttgggtcgggcttgggttaggtgcggtggctcacacctgtaatcccaacactttgggaggccgaggtgggtggatcacttgatg

SEQ ID NO: 523293 - DNA, 752 bp, Homo sapiens
cgaggagccaagggtggtagactgggggtgtggggacgctggagactgggaaggtcgcgggaaccatgtaagagaagtgcctcagcgactctggaccctgtcacacgagccctggatgttcgaaccgagcactgaatcatctgccagctctactcgttgagatacatgtagaagttctaggtcatgggagcatggctggcgttaggatgtgagcgtcctgaaaaatctggccttgtcatggttgtagacagacttcatgttatagatagtggacactatagatgtttccgaatctaaataggcagtttttatttaggcgctaaagatattggaagacctaaggctgaaggtgcgggcagaatttctaaatgacagagttcctaatttgcaagtgtagattccagcatttcaacgaacgattcagagatattgaacgacacgtttcgtatcgacaagtttcatattattgtatgtggactggactctatcatcgccagaagatggactaaagtgggcatgctgatagtcgtcttctaaattatgaagatggtgtcgttagatccaagctccattgtcccttcgactagatgggcgggacagaaggttgtaacaggaaatgcccgggtgattctgccgtggaatgactgcttgtatcgaatgcacgctggaacttgatccagcacaggttaattttcccatgtgcaccattgcatctatgcccaggcgtaccagaagcactgtactcgagtatg

SEQ ID NO: 523294 - DNA, 890 bp, Homo sapiens
  misc_feature (34)..(34): n is a, c, g, or t
  misc_feature (36)..(36): n is a, c, g, or t
  misc_feature (43)..(43): n is a, c, g, or t
  misc_feature (62)..(63): n is a, c, g, or t
  misc_feature (78)..(78): n is a, c, g, or t
  misc_feature (85)..(86): n is a, c, g, or t
  misc_feature (90)..(90): n is a, c, g, or t
  misc_feature (108)..(108): n is a, c, g, or t
  misc_feature (112)..(112): n is a, c, g, or t
  misc_feature (117)..(117): n is a, c, g, or t
  misc_feature (163)..(163): n is a, c, g, or t
  misc_feature (194)..(194): n is a, c, g, or t
  misc_feature (200)..(200): n is a, c, g, or t
  misc_feature (207)..(207): n is a, c, g, or t
  misc_feature (221)..(221): n is a, c, g, or t
  misc_feature (224)..(224): n is a, c, g, or t
  misc_feature (230)..(230): n is a, c, g, or t
  misc_feature (239)..(239): n is a, c, g, or t
  misc_feature (250)..(250): n is a, c, g, or t
  misc_feature (257)..(257): n is a, c, g, or t
  misc_feature (278)..(278): n is a, c, g, or t
  misc_feature (282)..(282): n is a, c, g, or t
  misc_feature (564)..(564): n is a, c, g, or t
  misc_feature (567)..(567): n is a, c, g, or t
  misc_feature (585)..(585): n is a, c, g, or t
  misc_feature (598)..(598): n is a, c, g, or t
ttccggccgcagagctccaccgctgaggccaacnangccatanctttattctgtgttattannttccatattatacangataggnntttnaaaaaacatataattttntaanacaanactcattacatgattgtattattttctatgacatatttaaagagtntaataacatgtataagtaaaaacaaatttangagaanagtcaanatatttcatgtatnccngggggntgatactancattgaggaanctaatancctaaaattatatccaaggcntggncacatctttttcccaaaacgtctgaatgatcagggcaacttcttatgggtcccttaggctggcagtcttggccttctcttctgggagctctggggtaatagtttggtctacagcagaagtgaaaacattgggtgtgctgggttttgggtgaattgagggcatgaaaactcctgcactggcatgtctaaagttgatcgcttctttttggaaatatggggggctcttctcctgtggacatcacagcaatttcaggagctgtgcctagttgggataaggaactanttnctgtgtcctcctgaatancagggtctgctanttggggaatggtccaattgaccatagatgggatctgctcctatactggggctggctgggtggggaggggaccttggacctgggggtgaggtggtcccaggggggaccttggaactggagggatggaaccttgggcttgtctggggcttttgaagggaatcctaggggctacctgactgggctgggtgggcgaggggggttaacgcgaaggagcactgggcgtgctggcgtctggcaaagggctttctgggaaggggccagtgggagcagcccaactgggtgacctaaaaaga

SEQ ID NO: 523295 - DNA, 472 bp, Homo sapiens
caccccgctggcattctttgatcattgccactgaaatcatatcacgcactactcccagctttccttcttcgatcgccagcactgctactgcatcccagagtactcccatcttcccttcttcgatcaccaccattgagaccacagcccacaagtacttccagcgatgaatatctacgattactacaaccggggccacctcacacagtacgtcccagcttcacttctttaagtcgaccatcactgcgttcacatcccacagatacataccagcttcacttcttcaatcaccaccactgagaccacctcacccagtactcccagcatcacttcttcgatcgcaaccactgagatcatctcacatagtactcccagctacacttcttcaatcacaaccactgagaccatatcacatagtactcccagacttgacttcttcactcacaaccagtgagaccatatcacacagtactag

SEQ ID NO: 523296 - DNA, 531 bp, Homo sapiens
gaacaaagatttctaatgaacataaggactatgctaatggatttaaattataactgtgtgtgagagaaagatgacttcaaatagattcaaggtatgattaacacaaagcagtactctgaaccacaccctctttcaaaaatgcacagatacaacatcaactaaagaatggagaaaagaggaataagtgaatacgctgatttttggaggcttgtatagtttattgtagttaagcattaacttcagctcactactttgtggtagaataatacatttggcagggtgaaactagataagaatgttatctttagaaaactagatacaagtgattcaaatgccattatcctatgaaatgtggtcgttggatgcaacttttgagatgactgcacgtagagaggaatctgtttaataaatgggaatcagtacccaaatctatgatcagcaagattttctgtgctaaggtacttaaaacatttgggtgggggagggcaagttcaaaactacatgagatactgttgcatcaaatgtttcagg

SEQ ID NO: 523297 - DNA, 249 bp, Homo sapiens
  misc_feature (215)..(215): n is a, c, g, or t
acggacccacagtagggaggaagccagcggtgagggagtgagggctctgtgggatacggctcttcggaaggtgcgggaagtaggcttagaagcccttgtgggagctcagctccagcatgcagataggacgagtttcctatctcagagagcatgacaggaacagacagaagggcaagctaaggcaagaaaagttcagggacagagcccacgtgggncgcctcattcaagtgcccagtatctacggacggt

SEQ ID NO: 523298 - DNA, 922 bp, Homo sapiens
agcggagagtccagccgctggtgcgcggagcggttcaccgtcttcagagcggttcggcccatgcctttcgcccaggctgccctatgtgcccgctgcgcgcgtgcgtgagcgcgccgtgacgccggcctggtggccgctgcaaggtgggaggatgatgaggccgcctcagcgaggatcccttttcacgccagaaattactcagatgctgaacagctctcaaagtggtattggatgacgctgaccgtgaccagtcggacgtgggaacggggaatcaaggaatgaaagcaatgtccagttccacatggtcccccgtgggaaactcgtcggaacttcgaggaaatgcgcaagaggcgggcctgtgagtctgacacgaaacgatcagacaagtttttgggagcaccacgaaatatttgggggccacccgagaactcgtaaaagagagcgaatattccacggagacatccacatgggaacaacttaccagagagacggcaaggggatagagcgtgaacgcgccccagtcggttccctgagattcagttgagaaccaggttggggtcccccaagaatttgtgccgaacgcgtggaatttacccctgcggaggcggttcaattgcccccataggcttccaaaccaaaaggattcaaaaccgggggagccttggcactaggggccccttccttctttgaagcttggttcgtccttgggagcgccaattagtgcaagggttccttggatttgctaaacctattgcgggaaaaaggttgccctactaaaaaactacttggggggccctaatttattacggggaaggccttcccgttcctggggttccaatgccatttttaacgcccttccttgtgagagcccccggacataattcattgggacgatgtgtatatcgacccctaattgtcgcgg

SEQ ID NO: 523299 - DNA, 495 bp, Homo sapiens
tcgggtgtcttacaagacatcccatatttcatttaataaacaaatggcagccaggtgtggtggctcatgcctgtaatctcagcactttggaaggccgaggcaggcagatcatgaggctcaggggtcatgagatcaggagttcaagaccagcctggccaacctggcgaaaccccgtctttactaaaaatacaaaaatcagctgggcatggtggtgtgcgcctgtaatcccagctactcaggaggctgaggcatgagaatcgcttgagcccgggaggcagaggttgcagtgagccaagattgtgcccctaaactgcagcctgggtaatacagggagactgtgtctcaaagaaacgaaaaaaggaaatggttcaaatgatcaattgtggtaaggtatattaggccacaatttttaaaaagaaatgaggtattgatacttcattgacaatttagatgaatccggaaaacataaggacaccggaaataagggggtaccga

SEQ ID NO: 523300 - DNA, 360 bp, Homo sapiens
  misc_feature (81)..(81): n is a, c, g, or t
  misc_feature (97)..(97): n is a, c, g, or t
  misc_feature (146)..(146): n is a, c, g, or t
  misc_feature (159)..(159): n is a, c, g, or t
  misc_feature (168)..(168): n is a, c, g, or t
  misc_feature (273)..(273): n is a, c, g, or t
attcaccaggtggtttttcccgctgtatcttcagagaacaatgactgatgtgagatgtgaagttttcattgactggagcanctcgagacagagaagntggtacaagtacaatcatgattgcagcacggataatgtgttaccccggnttgggcccttggngggttgggntttaaggggggcggcatggtcagctgaaaacacttattgaatatgaaaggtttcccccccccaaagcaggcccttgggcctgagcagtgtggcagaatccaaggnctttcaaaaataccagctcaagactgtcggtgatgtggtcaggggaaaaaaggaaaagctggcccaattggcccccaccgaattctt

SEQ ID NO: 523301 - DNA, 866 bp, Homo sapiens
agaagatggcgaccgtgtgggatgaagctgagcaagatggcatggggaggaggtgctcaagatgtccacggaagagattgtccagcgcacaacggctgttagacagcgagatcaagatcatgaagagtgaagtattgcgagtcacccatgaactccaagccatgaaagacaaaatcaaagagaacagtgagaaaatcaaagtgaacaaaaccctgccgtaccttgtctccaatgtcatcgagttgctggacgttgaccccaatgaccaggaggaggatggtgccaacattgacctggactctcagaggaagggcaagtgtgcggtgatcaaaacttctacccgacagacatacttcctgccagtgattgggttggtggatgcagaaaagctgaagccaggagacctggtgggtgtgaacaaagactcctatctgatcctggagaccctgcccactgaatatgactctcgggtgaaggccatggaggtggacgagcggccacggagcaatacagtgacatcgggggcctggacaagcagatccaggagctggtggaagccattgtcttgcctatgaaccacaaagagaagttggagaacttggggtatccaagccccccacaaggagtgctgatgtattgggccggcttgaaacagggaagactctgcttgcccgaagactgtgcttgtcagaacaagggcaacttcttgaagctggcagggccctcaggttggtcccggatgttattgggaaaggcgccaagctggtcgggaagctcttggccggccaggggaaggccatctatttttcctaccattggtgccgtggtccaagctcgacagggaaaggcgcaaccgagtgaagccc

SEQ ID NO: 523302 - DNA, 222 bp, Homo sapiens
gctttgcagcgtagccgagtcggtcagcgcggaggacctcagcagccatgtacgaagacccatagtgaagacgggactgacttcatacagaaccagcagctgcacgcgacatggctgacacattactggagcacatgtaacgactggacattgattcaacaaccatcacagaccggaacactggcatcatctgtacccttgaaccagcttaccgatcagtgg

SEQ ID NO: 523303 - DNA, 343 bp, Homo sapiens
cgcggatcacatctacacacgtaatgaggcatcactgccatcaattcttcagtatccccccaatctctccaatcaaacagacctccaaacaatacactgtgaaattccaccatgcctggggtggctcccaaggcacgcttacaccccagaaaacaacacagctggagcacaagtaacaaatgtaccacgttgcaatgactcacgggcagtccccaggtacagaggaccaacatctccagaaccaaaaaccctcacaccaggtgcacttctccaaaacagaccatttaccaaaacgctcatgtgcagtcacagagtgacaactagatatcataaacaacaaaga

SEQ ID NO: 523304 - DNA, 216 bp, Homo sapiens
tcgatcgagccgcccctttggatcttattaaaatcccaaaatactgctcctcctttataatagggtcaacactttactacttccttttaaaaatgtttttttttattgtggtaaatacatgtaacatacattttaccattttaataatgttttaagtgtacagtgaagtggcattaagtacagtaaaaaaaaacatttttaataaggatcccctag

SEQ ID NO: 523305 - DNA, 272 bp, Homo sapiens
cttaaggatccattgatagcgataggcgacttacttcacagcacagccgagggtacctcatgtagcagagcggagacagtctcactcacccaggagggaggctgagagtgctcaggcagcggagcgctcattgccatggtgatgacctggcgtcaggcagtcgtagctcttctccaagggagaagctggaagcagccgtggccatctcttgctcgaagtccagggcgacgtagcacagtttcttccttaatgtcacgcacgatttcccgctc

SEQ ID NO: 523306 - DNA, 475 bp, Homo sapiens
  misc_feature (388)..(388): n is a, c, g, or t
  misc_feature (463)..(463): n is a, c, g, or t
  misc_feature (468)..(468): n is a, c, g, or t
gtccaagggattattatataagttaagcctttgaatgctacctgtgttttgtttttctttttaactttgagaccgataaaggtagagggtttttgtttgcttcaaagtaagtaaaaaatgcactgaaactcgagacatacttggaataaaggtaatttggaagtatcttcatctctcctattaaactcagagtaaggctgggtgcagtggctcacgcctgtaatcccagcactttgtgaggctaaggtgggcggatcacctgaggccaggagctcaagaccagcctgggcaatatggtgagaccctgtctctattaaaaatgcattagcagagtgcgatggcacacacctgtagtcccagctgaggcagtagaatcacttgaacctgngaggcagaggctgcagtgagctgagatcgtgccactgcactccagcctgggcgacagagtgagactccgtctcanaacanaccacct

SEQ ID NO: 523307 - DNA, 693 bp, Homo sapiens
gcaggagccgggcccttgctgcccaggccacccgcagcagagaccatcgtggcttcctttgctttgggcttgaatggccagagccctcggggagcaaggacctgggggcttaagtgcagccgtgaggaagcgcactgtcccgggaaaggtaaataaagtgctccctaatggctggggaggttgctaagaggcggtcggggcccagtccctgcagaggcagcctgttttcttctccggccagcctctcaggctttctgcatcgacgtgcctttgcgattcactgggccccgttcttgtttgtttagtgattcctgtaataggttctgctaaagacattcatttgtttagggacagggctgggggatgacagcatgacttggtttctagcatccatctgctgtggccaggagtccctaatggtcttgtctcctggcgtaggtgcaaagctccggggtcggcgcctgccgcctctcggcttttagggccaggccatctggattaggcggtttccctcttaagctcggtaaactccacagactgtgacagatcccctttccagctgtcacaccacctggctgcatgctgccaccaggggagggtggtcgaattcggatctggtcagtagatcaagtgccagcatcctggcaggggtcttccggccaagccaggcagggtcactttctttgcagttgg

SEQ ID NO: 523308 - DNA, 268 bp, Homo sapiens
tggcccgaggtaaaacccttatgggttttaaaggacttggcataaaaaaaaaaattggcaaaggccccttagggggttggggaagacaataaggaactgtttgccttgggccctaaactgggataaaaaaggcattttcaaggtttatacgttgtccaactgtaagttccttttaggagcagacctaacaaaaattttaggtcagaaccctcccctgtttaaacaaacaaaaactttccctgttaataaaaggattcctttgctttta

SEQ ID NO: 523309 - DNA, 855 bp, Homo sapiens
aacctacagaatggaataaaatatttgcaaactatccatctgacaaaggtaatatccagcatctataaggaacttaaacgaatttacaagaaaaaaatgatcccattaaaaagtgagaaaaggacatgaatagatacttttcaaaagaagacgtaaatgggagctaaataatgaaaacacatggacacaaaggggagaacaacagacactggggcctacttgaagatggaagatgggagtagggaaaggatcagaaaaaataactgtttggtactaggcttagtatgtgggtgatgaaataatctgtacaacaaacccccatgacgtgagtttaactgtatcaaaaaccttcacatatacccctgaacctaaaaaaaaaaaaaaaaaaagggttaaaaaagggctctgtgaaggttctggagttggaaaaagggtcttgacccaagaccagtatgggttataccagggaatgagggagacagtgacagataaggctggattcaggtgtagactatagtaaaagtttttattcggtatatcatgggaaaaatggtgcttccactgaagcatcatgtatctcttgggcgttcataatcagggaaatacgtgtacgtatgtggttccagtgtacggggctaaatccttacctttccatattgtcctagctaaaggagggattggcatacttcgtacacgggaaaaaaaaggtgggcacaaatattggaacctataaccgcgcgggtcaaatgtgtggaataaataacactttggtagtcttccatttcccaggctccatgaaattactcccaaccccgtttaatccctgactaccacttaacacttgggggcaatatt

SEQ ID NO: 523310 - DNA, 516 bp, Homo sapiens
gcagccaccttctccaagacagtgtatgtcctagaagagaaaccttctaggccagcagttgatagtttcccttaaatgtgagccttgcacttccaccaagtctaatggattgcttgtgtttgaggccacagcagctcctttgataagtaccatatcctctgtactacacacagctaaattaatattgtttcatttaaccaaaccccccccccaaaaaaaaggttggctatctctcttaatattgcaggaggacctacctatgcaggagaaattttgccatttccttaagctagtggtatagaggctggtgctgggaggaagtcccacctctgaggatgggcagctctgtccagtggcatcattgatgtcccttgttttctcagttctgagaagcacagtacagtggtactgctttcagcactgaggcttattcctagaataggggaaagcccaaacctgacgtaaggttacaagttctaggggtctggcagtaaaccctgcagagagttttggttc

SEQ ID NO: 523311 - DNA, 138 bp, Homo sapiens
cccgacctatattatgtagcgatgaaagtggtatgctttagactataccgggatagcatctagtatataagcctaatgtggggacagctcatgagtgcaagacgtcttgtgatgtaattattatacaaatagggggga

SEQ ID NO: 523312 - DNA, 345 bp, Homo sapiens
  misc_feature (229)..(229): n is a, c, g, or t
  misc_feature (233)..(233): n is a, c, g, or t
  misc_feature (239)..(239): n is a, c, g, or t
  misc_feature (254)..(254): n is a, c, g, or t
  misc_feature (256)..(256): n is a, c, g, or t
  misc_feature (258)..(258): n is a, c, g, or t
  misc_feature (261)..(261): n is a, c, g, or t
ccattttgcacaagtttttgtttttctgaaatacttaattgtgcaggttgtaaaaaagattagtgcattttcattttaaggatgctttgctccttaaattgttcgacagaaatgactttttagggaaagtagtttttttggagctactaacttgtatttattattgtacatgcataaccagggtgggtgagtggcactatatgcttgtgacggaaaaacccaagccttntaancttatngagaatcggtcttcntnanttnttgaacttttcctataggtttaacttttactgcatagaattaacactaggaacagtgtcatgaaatctgggttgaaggagaata

SEQ ID NO: 523313 - DNA, 382 bp, Homo sapiens
  misc_feature (8)..(8): n is a, c, g, or t
ggcggcgntggttcccgcgcgctccgggtctctgaggctgagggtactgcggggctgactagaacagagacaatgtttcgagcagcggcgcctgggcagctccggcgggcggcctcattgctccgttttcagagtaccttggtaatagctgagcatgcaaatgattccctagcacccattactctaaatactatcactgcagctggacgtcttggaggtgaagtgtcctgcttagtagctggaaccaagtgtgacaaggtggtacaggatctatgtaaagtagctggcgtacaaacggttctggtggctcagcatgatgcatacaaaggccttcttccagaggaactcacaccattgattttggaaactcagaagcagttca

SEQ ID NO: 523314 - DNA, 760 bp, Homo sapiens
gcttctctttgacaacttgcatctctcctacatggaagtaaggttttattcctgtcaatgttgtctttgtgtgtgacagattaggattaaattatggtttgacttttcctagcagcgtgatcatgggcaagtggcttatttttttttttttttggaaacagagtctccttctgttgcccaggctggagtgcgtggccccttgggccattgattccggcctcccggcccagtgatctctcgtgctgcagtttctcaagtagcgggcttcaccaccacaccgggcataatttggggtttttatagtaacgacgagtttcaccattgtggcgcaaagtgggtctcaaataccgggcctcaagtgatctgcccatttaagcctcccaaagtgtgggaatacaggcgtgagccattggccggggttttttaaacgcttgagatcctttcacataggaaatggcatgctaccgcgggttggacagctaatccttccagaaaactctggcatactctgtccgaccgggggacgtaaaattttccccctacaaaggggttgcataaacaaagtatggcgcttacggtttgtgcaacgggttgcccagttgcttgcgcaggcctactctaagtaaataggacgctttcagtgcgaaaaaagacgcacgtcaaagagcagcatccagcaacacaaaacaaggcgcggcgcgctcgtatatatcgcgcagaccacgagactacaccacggtgagaagcgcccccgagagaa

SEQ ID NO: 523315 - DNA, 177 bp, Homo sapiens
gagagttggcaggagagagactgtgcaggcagaagtgacagtgactgcccattccaacagcaggggccagttcctagcacctgttcacctcatctcctgaggctataggaggcctgagggaagaaactgcaggaggggaaagagcactctgagatgcacccctgccaggatgggtat

SEQ ID NO: 523316 - DNA, 101 bp, Homo sapiens
tttgcacccacagctcaccaacaccatgacaccttccacaacacacttcagcctctaacaatactcctctactacatcaataactcctcctacattttcac

SEQ ID NO: 523317 - DNA, 242 bp, Homo sapiens
gctccctgaaaacttctggtcatgagtgaggttaattaaccagaagctcatgtagttccagagctgagctctcgtgtggcaccgcaatcacgtttttgaaacatgaatttggggaactcattctataatagattataaacgccttgagcttggggatcgtgaaataatgatgaatcctccatggtatctgagtcccagaagcaggcaatcctgcatggtatttgaaacattctgtgctctta

SEQ ID NO: 523318 - DNA, 385 bp, Homo sapiens
agaaaggtcatgtcgagactttctatgtgaatgcgtgacgatccatatatgcaatccatgatgtgcaagggacgcccatgtttcgatatcaggtcactgaaaggcaacatcttgttccactggctgtgctcgatgagtaggataactctgtgcgatacatcatccttataggcgaccttagacccgtcggcacagcatgattatcaactgtgggataatgactgtgtacacgcagactttatccagatgcatctatttacatgcctttagtactggaacatctagcgagttctctcgactaaacctcatgcatgtagtcgtctgattcattatactccattttgagggatttctttcgagtctgctgtcttacagatagcttgtt

SEQ ID NO: 523319 - DNA, 479 bp, Homo sapiens
gcagatatactcatggttgtttttttatttctccccagtgtcaacaacgcacccatttgtggacagcaatcttctctaccagttcagaaggatgccatgactggcatggcttgtgcggtaaccagctccagcaaacctcacgttcctgtgttaaaccttgatgtctcctgtaaggtgcatgccgtgataggggtgctgatggatgacagggatcccctggtcacagtgatgaattttgaacaggcccccaggagacctatgcagatatgggggggttggacaaccaaattcaggaaatcaaggtatgatggatgggtaaccatctctgggttccagtttgggttactgtggtcccatttaggatacttggcaggtgtaagggatgtcggcttatttattaatcaaaccaatagctgagtcagagcttgccagtggtggtatttaggaataggttaatactgagttaggtgatagaaata

SEQ ID NO: 523320 - DNA, 1407 bp, Homo sapiens
atgagtgagttgggggccacacatacataaatagggcctttttattggggcccgccttgtgttttcctgtggtggaaataatatttgggcaatattgaggtgtcccattggcccccctattttcaatgggcctccacacctcatcgcttgtagtcgtaaggttgagaccacaagcagggttgctgttataaccgccgccctgtgtgttttctttgggcgcactttttgccaactgagggcaacaacatagtgtccccccggagggggggaaaatttgttgttggttccgccaaagccttctatggcgaaatattctttttctagattagagaaaagttcctcggggtgtgcacacacctctgagggaaataatcggcaacagccccttgggggagagacgccacaacattgtgtgtgagaaagaagataataccccgctgcaacacctttctcaacggccgccccaacacgctgtgcttcttaatagggggaaacaccacaacattgggggaagaaaggaaatagataaaatgggggagcttttggagataccaccacaagggggtaatattctcttttttgtttataataagggcgtgtattgttcctataaaattaggttagaagacgttcccaacacaggaaaagggggaaaaattgggttctacaacagatgtttgttgtgtttcaacatggaagagattttgttggacaacaataggggggcgcaccccctcttgggggagatatatatcacatcagcgtagaaaataaggggagagcccacacatgtagaaagaagatattcccacatgctcacacaaaaatctctttatacgtctgtacaacgcgcgctttgggggctctgtggagagagagcccacacaattataaagagaaattgtagaacacacatccccttatatgtaaaaatatacctttgtatataggcgcacacactgggccacgcaattttgcgcacaacatatggtataaaatgtgctggggtgaaaaatgcccgtgtgtgtggggtataaaggcacacacatggggtgtccacaaaattctaagaaagaaatgccacagtttcacaaaaaacacatagaccaagaacttcggagagtttgttaaggggctcgagaggagaaccacattcacaaggtaagaacacacacaagaaaaaattgtcttggggtgaaaaagtgtgttgctgattgtcaaccaccaactggcgttaataaataatataataaagaacctgtcttatataagactggctttagaaccgtaggtgtttttaaaaaaatatattatattatattttggccctctttggggaaatgggtgggtagaatttataaaaatcccttcctgagtaatcacaacgataccaaaatgttactgcca

SEQ ID NO: 523321 - DNA, 569 bp, Homo sapiens
  misc_feature (257)..(264): n is a, c, g, or t
  misc_feature (267)..(269): n is a, c, g, or t
  misc_feature (276)..(276): n is a, c, g, or t
tatgtaccctcctcccctctcctactgtcattcttatacctgtgatctctgcgtttctcttctacactgctgccagaggcctttttgccaaaagcactgctgattgtcactcttttactttcctggttcccctttgacttcacacacttgacgtttacattttgtcacagttggtcccccttgccttcacatacctgatgtttaaattttgtcacggttagtctccaaacttctcaactttgccagctttctccaannnnnnnnttnnnaaaaaanaccccatcagtagagacattgctgttcctgcccatcccagtgccagctactccttcctggaagccttcctggatttcacgcatcccatcctctggccagaaatggcctccgaactgtgcagctcctgcagcaccatttgtatcatagcatatctgttatgtgtcgttgctttctgtgtcttggtttctgcctgctgcccacttccctagactggagcctactggggcatggtattttattcatttctgacctccaattccctaagtggagattaaatgttagaaacctgaaaa

SEQ ID NO: 523322 - DNA, 250 bp, Homo sapiens
cccttgtttagtatagtttagctttgtctttcgtttattcgctataggttaatcactgctgtttccctgtgcggggtgtggctaggcttagtcgttttgagctgctttgctgcgtgcttgatgcttgttccttttgatcgtggtgatttagagggtgagctcacgtgtaatgtggatgcttgcatgtttaatctttctaagatctaatagaatggctatgagctaagctatagcccaccgtggactagtt

SEQ ID NO: 523323 - DNA, 314 bp, Homo sapiens
ggtcacatgcttgcggatgaactgggacacctggagatcggtgcagttgatcagcggagtccgacctggggggctagatgccagcccttgttcttggaggacccccggatcggcggaccgctagaccagtgtgaggcggaacccgtcgccataggtgaccttgaggaagagcggagagccgcagcacttgagcttcccatgggagatgatggcaatgcggtccccaagcaggtcagactcatccatgtggtgggtggacagaaggatctgtgcgggctggcttgtacttcaggatgaaggtcccagcttgcgcc

SEQ ID NO: 523324 - DNA, 838 bp, Homo sapiens
ggctttgctctgctctcctgaatcttgaggcttgtctcggcccagtctgaagacgcaggaagttgatcaatccctgaggctgctgagagacggtggcgcgatgggacagtcgccaggatggctgagcgtgaagatgcagcgggtgtccgggcgtgctctcctggacgctgagcagagtcctgtggctctccggcctctctgagaccgggagctgcccggaagccccggatcatggacagagaaagcgcttagaggtttatgatttgattagaactatccgggacccagaaaagcccaatacctttagaagaacgtggaagttggttctcggacaagttgttgtgggaagttcaggagaactaaatgaagaagacatatctggtattatatccaggtttcacgccaacagtacctcattgctcttggcgacctcttattgggctgtggcttaagaagtaacacttcagcgatgtctacccatttaaacataagttgacaatcttacatttctgaaggaacccacttcaacagaagaagacatcaataagcagataatgacaaagagcgagtgacagattgtaatggggaaaaacccccaaattaacgtgaaattggtggaacaagtgtgtcctttgaacctgaatggatagctgtttaagagaacactggcgtgtaaagtggtgggtaaaatttggtaaaacctcattgattatgccagaaatcatgttaatacatagggattgtacctcgaagatttaagacatactacaaagaataataaaagaaaacaatgtcaagtacaccagtgacataataaaggaaattccatagaaaaaat

SEQ ID NO: 523325 - DNA, 121 bp, Homo sapiens
cgactagccgacagccggtggtggtatgcagcgggcagctgccagagacaggaggcgcaaactccccaggtcaggatgttgcttcagcccggaagtcttgcaccctggcagcaccaatcgc

SEQ ID NO: 523326 - DNA, 339 bp, Homo sapiens
aggaggagtggagtggagcagaagagtagaagaggagagctccgagatggatgatgatggactatgagctgatgcctgaagcgagtgtgtcagtgagatgctggacctggagaagcagttctctgtgagctaaatggagaatgttgttcagtggaaatgactgagtcagctgctgtgttgcgtgccttgtgaggaatgttggtgtggcttgagagcagccccgtgtaatacactggatgccccattggtatggggcttgccgctggatgccttcacgcattctgcattacaggttggcagtggaatctacaactggtgcttcttgtcttggattgtgat

SEQ ID NO: 523327 - DNA, 202 bp, Homo sapiens
gggggtttggggacccccccccccccccggggcccttggggggccgccgggggtggggggtttaaaaaccgaaacatttttttttggccccccccccccccctttggccccggggtttttccggtttttcccccctgggcgggcctttcccggggttgggggttggggggtcccccacccccctttccccctttttttgtta

SEQ ID NO: 523328 - DNA, 926 bp, Homo sapiens
gagcggggtcgtgaggtgatggcggcggccccggcccggggaggcggaggctggagtgcggaggcggacggcggctgctccggctccggctccagcgcctcgcggggctactatatcaacgacaggtcctgtcgactaggcccgcatctcctggcaggttgctaggagccgagaatccatatggcagaaggtccagagaagcttctttggcatgtgtccgagtggcattatccatggggatcttcccaggtatagatgaaagacggagagcaatgcgggtgatttgccagttggagcatttttcatgactcgacattctgactctatcagcacatcaagagaatatgtagctggctatccgatatatcacgttaccttcggagctttcctccaagaagagttcattcccatataagcgtgtactcagcgcgtccgaccacggaagaaaaggcaaacgacgacctcctgggacaaaacgggcccaggcaacggggttgacaccccatcaccgcgggttttagccatcgaaggaaggcgttacacaggtatatctcattgccattagagggatcacaagacatcccttgacgtagcttccttgaacttcgagtgggcccctttcattactgtgagaactcccaggtttgacttatactttataagtggggataggtaggaaggaaaattttaattaacagaaaagcagggttagccccactcttcaggccaggcagggctagacaaaggggcaaattgagttacccctaccacatttatgcacgggacatttcggtttgcagcccaacagtaggccgacttaatgcgcacagacgaaacatacacaaacaggtgaaatccccaaacagtgcgaaaactttaccgcacagtatcatcgaccgacagagtgagtatagttcgccacggtg

SEQ ID NO: 523329 - DNA, 188 bp, Homo sapiens
accctctctagcctggagtaactaaacgagcagatttaatctgagtgtccagctggaacagctcaagcaaggcgaaaatcagtactatctgcggttcaccacgtgttgcttcccacactttctgactctgctatgttcgcttcgcgtgtgtcatcttactgtggtcggtagaatgcactttgacttct

SEQ ID NO: 523330 - DNA, 418 bp, Homo sapiens
  misc_feature (13)..(14): n is a, c, g, or t
  misc_feature (37)..(37): n is a, c, g, or t
  misc_feature (48)..(48): n is a, c, g, or t
  misc_feature (86)..(86): n is a, c, g, or t
  misc_feature (115)..(115): n is a, c, g, or t
  misc_feature (189)..(189): n is a, c, g, or t
  misc_feature (200)..(200): n is a, c, g, or t
  misc_feature (275)..(275): n is a, c, g, or t
  misc_feature (299)..(299): n is a, c, g, or t
  misc_feature (357)..(357): n is a, c, g, or t
atgaaatagtatnntacatatgtaagctgcaaaatcntagcacatgtngtaactatcacattttattaactgtcttgtacttttanagaaagattatgatcatatttctttcttnaaaagtacaaagacagttaatatgatcataatctttagttttatttaaatcaaggatcatggatttattttganatactttctantaattataattttttccttgtaagcatatgtgcctaaattctcattgagggctttctgtactgtgtaaatagcanagaaaatgtctatataggaatgtntaaaaaatattttctgttgcatgtaactgaaaagatacatctaatatgcaattaaatngaataaaatagtacttagtgaattaaaaagttaacgtatgaaagaacacagaaaaaaaaag

SEQ ID NO: 523331 - DNA, 569 bp, Homo sapiens
ggcgcacatttacaattaaaagtaagtaagaaaaaaaaagtaccatttcacacgcactaggatagctatttttctttctttctttctttcttttttttattggaggtgcagtctcactctgtcgccaggctggagtgcagtgccataatcctggctcactgcaacctctgcctcccaggttcaagtgactctcctgcctcagcctcccaagcagccggaactacaggcgcgctccagcacacccgagttaatttccgtattttaacaagaaaatgtttaccacgttggccagaatggcctcgatttcttgacctcgtgatctgcccgcctcggcctcccaaagtgctgggataacaggcatgagctaccgtgcccggcctaggattgctgttttcctaaaaaaggaggtcaggcgtggtggtgctcacacctgtaatcccaatgctttggaaggccaaggtgaaagaatcaattgaggccaggagttcaagaccaggctgggcaacatagcaagattccagctctacatacatacatacatacatacatacatacttacatacatacat

SEQ ID NO: 523332 - DNA, 545 bp, Homo sapiens
ggtcacgaactcctgatcttgtatctgctggccttggctcccaaagtgctggaattacaaggcacctgcccccataaccggactaatatttgtattttcagtggagatggagttttgctatgttggccagcctggatctcaaactcctcacctcaagcgatctgcccaacctcccaaagtgctaggattacaggcatgagccactgcgcccagcaaggatgtcctctattttagacaaacatctagctaagtgcactataccttctattaaatcaatattttagatatagaatacatttcataccaacgtccagcacatattttttgtcaagtcaaggttccaaagatatgattcaaaacacattctgctgcctatgtcatctccaaataaatcctaccagccagtatttctagaatcgtacctttaacaagttactataagaaactctagtccaaatatacatttatttcctgagcaaaaaggcacatcagctagatcttcagctgtcagacaacatacagcttcaaaagtacttgcttcggtc

SEQ ID NO: 523333 - DNA, 433 bp, Homo sapiens
  misc_feature (43)..(43): n is a, c, g, or t
  misc_feature (159)..(159): n is a, c, g, or t
  misc_feature (369)..(369): n is a, c, g, or t
ggcacgagtcactctgttgcccaggctggagtgcagtggtgtnacctcggctcactgcagcctccacctcctgggttcaagcaattctcctgcctcagcccccgagtagcctgggactacaggcgtgcactgtcactcctagctaatttgtgtattttnagtagagatggggtttcaccatgttggcccggctggtctcgaactcctgacctcaggtgatccgccaaccttggcctcccaaagtgctgaaattacaggcatgagccactgagcccggcgagaattttgggatttttgtccataagcagcagataggtgcttgagatctttggaactaaagaatgtccacaattaggaacttggacatgnttttttttttttttttttttgggacggagttgttggctctgggagtggcaatgggcgggaatct

SEQ ID NO: 523334 - DNA, 747 bp, Homo sapiens
tttgcatggatcattgtaaacagcagattctttattcctgatgtctattaacatagaatgtttactgataagtactttaaattgcttcatgagcacttaatccatcttagtgtctatgtgtgggggcagacatttaccgcaggcacacagtttgtgcccctttcttcaagtctctgttggtaattccatctgtttagtggatggttggcaggattagtaggttctaacggttccaggggggttcaagcctgaacccaaaggtaagccagaagaaacgtccttttttcccccaattggaggtggctaaattagaatttaaggaattaaaataactccaccaatggtttaaggtggttattgcctttttaaaaaggccccaaaacaaacaaaatgggaaaccattacattgttccaactccctgtggaagggctggaagtcttgggggtccagggagggagggtttaaaaaggtttaccgggcattcttcctttcaaggctttgcttggtaacttggcacaacaccaggatggggttttaaagagtgggctgaaccccccacacgccatttacatcagtttcataaacacttttcttcctccctgtaacttaaccttttttcccttttatgaagttgagaggctttatgaaataagtttgcattgcacatccgtgcagaaatctttctgactttgaaatttttaggacgtcagctgtcagatacgaaaggtagatatcaggtaagaatc

SEQ ID NO: 523335 - DNA, 872 bp, Homo sapiens
tggagttccacattaacgggaactttattggcttaaaacctaaacttggtcagttggaaaagaaatccacggttgaccggtagacggatctggtggattaaatcctagggttttttttttttggggatcctgggaaaaattttttccaaaaaagcgggatccttttatctttttggaaggagggcaaattagtaaacttctcacgaagttttggtgggcagcccgcgggcttttttttcttttttttatatagccctcccataaagaagtgtggtacgtcgggaattaaaggggactcagcggggcctcgcgagttctcttgagaaaaaattaaccgagggtggatgtgaccattaaaaaaaaaggccaaatacccttccaatattaggggtgcggggataccccctgatgggccccccccctcccataagaggggttaatacacagtgtggaggtttccttcttaacggtcaagcgggttcacagaaattccattttatatatctcctcctatagcgcgtggccctcaagcgcgggggggagaggtttaacacggcctcagtgaattttttttacaaacacgtgtgggaatcatgtgggtgcctcctattagacacaaatattaccctcattattcagagatagtgcacattggtgtatttctcaaaaatagccgcgggtgacaccacagcgagggaccaaatccttttgggggaacctacaaactccttgctccatggcttctcgggggatcacacttttccacccttggggcattttcttaacagcaaaagcgccgagtttcccactgggtgtcccctcccatatttcctttgggcttcaaccggcggtggaacccccttcctttaaaa

SEQ ID NO: 523336 - DNA, 774 bp, Homo sapiens
aaaaccccttctctgtaaaaaatagaaaaattggccgggcatggtggtgcttgcctgtagacccagctacttggtgggaggtgggaagattgttcgagccaggaacttgaggctggagtgcagtggtgtgatctcagctcactgcaaccctgactcctgggcatcgaatgatcctcccacctcaggcacccaatgtagctgggattgccgggtgacagcaccaccaatgccccggctaatttctagtgttttcacgatagagatggcgagttcagacaaagattggccaaggaatggtctcgcggctcctgcgactcaccctgatccacctgcctcagacctcctaaggtgctggcataacacggctagacccaatgtgccaaggacatagcggagatactaccgaagaaacactatacagaccctcgatggagggacacacacacaaatagaagggcaaaggcacatactaacacatcacagacggccaccgcccaccacgcaccagcacagaaccaccgcatgaccccacaacacacgaagcagacccaaacaccaccaagacaagcacccgaacaggcagacaaagcaccaccagcacaaaaacaaagcgagcaaaggcaaaagacacgacacacacaccaaaacaacaaccagcaaagacacaacacaacacacacacgcaagccaagcacaaaaccaacacacgaacacgaagcacaaaccaggaaaaccaaaccaaacaaaagaaacacaaaaaaaaggaacacaacc

SEQ ID NO: 523337 - DNA, 403 bp, Homo sapiens
atatgactgatgtccttgttagttgggacacagacccaacaggtagaagatggacacctacaagccaaggagagaggcctcagaagaaaccaaccctaggactcaaaggaagaacaacagacacactggggcctacttgagggtggagggtaggaagagggagaggatcggaaaaaataactattgagtaactaggcttagtacatgggtgatgaaataatgtgtgcaacaaacccccgtgataggagtttacctatgtagcaaacctgcacgcatacccctaaatctaaaataaaatttttaaaaaaaaaattaaaagaaaccaaccctgtcaacaccttgatcttggacttgcagcctcaagaactgtaagaaaatacatttttgttgtttaagccaaaaa

SEQ ID NO: 523338 - DNA, 208 bp, Homo sapiens
ctcatcagctcggtaccgctctcgtgagactgcggtgacacgggggatcttaaccactgggccaccaggtcaactctataaattactttctgtcacagaaacatatgcaacttttaaaagactttctggttgtatttcagaaatcagggacgtcattgtagtgtcagttacactgaggtagcaaattatcctttaacgggtcctttag

SEQ ID NO: 523339 - DNA, 721 bp, Homo sapiens
acagcagtgtgccaacccggaagaaggcgtgcggcaggtcgttgaggcaaggccgatgcttttatccatgatgcgccctacaacctgatcgcgatgagtcggccacagaacagtacatgttggcacttgagcaacccttcacctttgagcccttggcgttcggcctgaaaaaaggcgattacgacagcctcaattggatcaaccattttctcaaccagatcgcccaggacggcacctacggtcgccttatgacaagtggtacaggatacggcctggatagccgagatcgactgatcgtcataactgcttacacatcaatccctgatcgagaggccgcgctgaagcgtctgcgcctgtgtttggccgggtcgctgtcagggttttccgacacacgccgataacatttaccggtgaaacctttgtggcggacaacgagtgggttaggatcgcaccccgaaatggcgcagccctcttgtgcgccaaccttataagaatcgttcaggggtcttgatgatgaaaaagtatctttcgatgctgatgctcggcgtcaccgcgctggtcgctgccactgcggcccaggacggcgccattgatgaggcggtcaagcgcggcacgttgaaagtatggcatggaccccaccctacatgccgatcgaaatgaccgacacgcgcgttgaaatcatcggtttcgaagtcgacatcctcaaggctatggccaagtc

SEQ ID NO: 523340 - DNA, 209 bp, Homo sapiens
aatcacactgcagcattatttatctaggtaatctatcctgccctttggttttttacgatacagagggcttgcgttagtgttgacccgaggctggtttcaaggccatagctttaagagatcctctcacgcacagaatttccaaatgtgctggagcttgcagagtgtgacttcatggtcaccctagactttggctgccgtttgcttacagt

SEQ ID NO: 523341 - DNA, 231 bp, Homo sapiens
agctatctggtacttaagatccactacagcagctatcagagtaggattaggaggtgcatcaccacaggagctaggaagtgacagctgttcacaccaggaaggtgtcctcagcagcagcagacatctcagctctcctctgtgccaggccttgactaactctcatctgcatctgagctaagcaggaagcagttaaagaaggccccaaacatgaagcagggacaaggagacgga

SEQ ID NO: 523342 - DNA, 213 bp, Homo sapiens
ctctctctctctctctctctctctgtctctctctctctctctctctctctctctctctctcacatagccttctctctctcaaactctatcacgacgtggcgcattctcactcacgctttacgaaacgcggacgggaaagggggggcaacgaacccaatacgccctctgggagaagagaacaatgcacaggcggaccggtcacaccgaggagag

SEQ ID NO: 523343 - DNA, 371 bp, Homo sapiens
aaaaagaaagcaacgagtatccccagttagctatgtagtaattttatttgatgacagcaccatcttctctttgcctgcgcctgggcctgggggtgtgttgcttacgtgatgcccacgtgccacagagttattgcccgaagtgccagtgggctgtgcaggggatgggctcttccttccagatggtctgcagcctctgggaccacgcagccaccatcccctttctttcttcttcggatgcaatttcaggagcaaagctgatctgaggggcaaggactttaaatccacagaagtgtaatgtgccatgctggagtggccacaggaagtatcgagaatctccattaacttctgtcttcgcgtacatctcggccgtg

SEQ ID NO: 523344 - DNA, 332 bp, Homo sapiens
tagatatgtgtgtgtgtgcatgagagagagagattgagaatgactgatttgggagggattttgtgaaggtttatatatcaaagcagaaagaccaagaatttagagattaatacatgccaagtggtaaccaagaaacttctgtgggatcccacctccaacccctccctctctgtcagattttaaccaaatcagtgtgatgtgatctgcttgcatatatgagtgaaagaaaaaggaaatttaaaaagttcttgatataaagcctggaggaaacaatacgaaaatccagcctctatttcagcaatatctgccggactattggtcctacaggtatg

SEQ ID NO: 523345 - DNA, 107 bp, Homo sapiens
cagcactctgctttattgtccagcattccacatagatagacgcaggacagcaggcagggtggtgggctaagaggcagcctgcgggccttgatgctgctgggcaaacc

SEQ ID NO: 523346 - DNA, 306 bp, Homo sapiens
cttcctccccttccgcagtctcctgggtgcctcatccttttcctgtctccatagttttgccttttccagaatgtcatagagttggaatcacatagcacgcagcctgttcagactggcctctttcactcagtgctacacacttaagtttcctccacatctcttcatggtcgatagctcacttctctttcgtgctgagcactattccactgtctggaggcacgcagttgatttatcccttcatctgctcaaggacgtctggtggttgccacattttgacagttttgaatggagatgctataagtatcc

SEQ ID NO: 523347 - DNA, 323 bp, Homo sapiens
ggacgggagatgtctggagcaaagataacagcagcatctcgaccagcctcggcctaaaaggaaatctttatcaatcaggtagggtccacagataattctttaaaaaaaaaaccccaccctccaagagaagcacaacggtcaagagtctggtacacacaacttcagcttggcatcacgagtctggtatcccaagaaaaatcaggggggtacaatgggtgggtcaacactatgatactttcaaaataaactcttttttaatttttttttttttttttttttttttttttttttttttttttttttaattattttttttttttttt

SEQ ID NO: 523348 - DNA, 167 bp, Homo sapiens
gtcctgactctataggtagaacataagtagtaatctaatacattttgaggccaggtggtagagtggaaagactgggagctgtcaggaaaccaaggcttgagatctccactactgttatgtaccagctgagggcaaatcagaggaaccattcccaacatcctttaaaa

SEQ ID NO: 523349 - DNA, 281 bp, Homo sapiens
gacaccattgaaagttgtgttacatcaccacttcctagggaccagccgcctgcctagctaacacagcatgcgtgacattctatccaccttagtgcatttaagatatagcacagggacacggaattgtgtacgggtactcatcacaaacacactatcattcccttctctatcctctgtgtaaaaaccagcgtctgggccactgttaccagaggtgagtttatacatttacaaaatgcttaaaatcttcgggaagcaagaggaatcttaacagaagggcccat

SEQ ID NO: 523350 - DNA, 623 bp, Homo sapiens
  misc_feature (9)..(9): n is a, c, g, or t
  misc_feature (61)..(62): n is a, c, g, or t
  misc_feature (127)..(127): n is a, c, g, or t
  misc_feature (137)..(137): n is a, c, g, or t
agcggagtngctgacagccgcggcgccgcgagcttctcctctcctcacgaccagagagcanncattatggcgaaccttggctgctggatgctggttctctttgtggccacatggagtgacctgggcncatctgacangaagcgcccgaagcctggaggatggaacactggcggcgcagacgatacccggggcacggcagccctggaggcaaccgatacccaccatcagggcggtggtggctggcgggcagtcatcatggatggtggcctgcgggcacgcctcatgcgctggtgcgctgcgggcagccccatggctggtgcgcatggggacagcctcatggtggatggcctggggctcacacgagcgctggcaacccacgagatcagatgcaacaagacccgagctaagaccaaaaaaccaacaatgacagcacatgcgctagaacgacctgacacacaagccaagaggacacgaaagagagcgggcaggaccacagcgcaggtaccgctagcctcgggacaagtgcccactgaaccacaagcacaaacaaaacataacaggcagatgactcactcacggaccgacatactatcgagagaaaacaatgcaccgacaacccaaac

SEQ ID NO: 523351 - DNA, 513 bp, Homo sapiens
tgaggttgttgttggggaccattttgaaggttccccggttccgccaatttttggccaaacccttattaattccggttagggttggggttggaggatttccctttgaggatttttttcttgttttagttgccttggttacccccaaaaggttgttgttggttttttgcttttttccggggattcccccccaccccttttccttttttccccttttttgagaatttgtccaggccgcccgccattcttctttttgtatttaattggagttatttttttttttgaacccccttttcccaccttgaccttcttgaacccacttagttttttttgaattccattttttccattaatccgttttacccctttaagttttgagggccgccaccttgaaagggcctttccattttgttggggaaggggaggggtttgcctttttaatttattttttttcttcttttttaccaggaaggtttttttttttccttttttaattttggttcctttcttttttta

SEQ ID NO: 523352 - DNA, 153 bp, Homo sapiens
ctcgctgggggcgaacgggcaatgtggaaggcagagaagggagagagacatcaccatctatatttgatcccttttgggttttgtaacagcagaatacactgtgtctgatgacaaaattgaaaatcagaatcatgccggaagccgtggtaagat

SEQ ID NO: 523353 - DNA, 165 bp, Homo sapiens
aaacccttcctcaggacagagtggcctttatactaaattccacaatatacctggttttagtacagcctgaatccggggctgggcagcagaagttaaaaaggttgtagtccctgcaaacagagtgttacaaggacatacacactacagatgtctccccggatacag

SEQ ID NO: 523354 - DNA, 269 bp, Homo sapiens
gtcattcaagttacaacacgttactgaggacaacagtgtagccgggtttgacaaaatttttttattgtcttcatcattgtgtgtattctgagttctttcacatagttctttttttggtgttggttacttagaataagaataatctcaaaagtatggtcagtgttcatagttggttttttttttggtaaaaaacccatttcagatttttacctcctaaatgattagaatcagattaaaatagtttggtttcgagtgaaaaatgctgtcag

SEQ ID NO: 523355 - DNA, 779 bp, Homo sapiens
cagggctgcaggtctgggtgggtctcccaggagaggaatactgagatgggagatcgggtgtctggagtgttgcctgatgcgagtctctctctcctgagccggtcctcttgatgcaacgctctaaagggagaagtcaggccctgcctctccaggtatagacggcctgctaggccccagttcttcctccttccccctttcccaggaaaggccagccccagtccatggccttcttgggcctctgggcacagagccaatgttcgtcattgcaggctctcagcaaagctgggtcatagctttccccacagctacagcctggggcctgggcagggctcccagaccatgataccggctcccatctgaccagtggggcatgattctctcaggctttctgccccgaggtcgcttcgtcgttctctcagggtctggacttggtacagtgggccttttcaccagtggagctgccttcccagggagaaggatgccgttgctgccaggtcagggtcccgtggcattagacttctcccgatcccccagagacgctggtgcacaggtctaggcaccgagcacaggtggcttgggaaattctgcagctgaatgatgtttcaaatacaagcacaaagatagtgtcgaaagagaaaacaagaagacaaggagagctcacttaatgggcaacttggacccccaaataggacagtggacctacctatgaagtcagggaaggtgggggggtgaagaaagaaagtgacacgcccggggggcctggctgtcccggtggcccg

SEQ ID NO: 523356 - DNA, 92 bp, Homo sapiens
  misc_feature (36)..(36): n is a, c, g, or t
  misc_feature (40)..(40): n is a, c, g, or t
atgtcatcttgagcgtcttcatttattttgactgtnattnatcttggagtggaggcattgtttttagaaaaacatgtcatgtaggttgtcta

SEQ ID NO: 523357 - DNA, 307 bp, Homo sapiens
  misc_feature (48)..(48): n is a, c, g, or t
  misc_feature (53)..(53): n is a, c, g, or t
  misc_feature (66)..(67): n is a, c, g, or t
  misc_feature (82)..(82): n is a, c, g, or t
  misc_feature (87)..(87): n is a, c, g, or t
  misc_feature (92)..(92): n is a, c, g, or t
  misc_feature (106)..(106): n is a, c, g, or t
  misc_feature (126)..(126): n is a, c, g, or t
  misc_feature (131)..(131): n is a, c, g, or t
  misc_feature (145)..(145): n is a, c, g, or t
  misc_feature (160)..(160): n is a, c, g, or t
  misc_feature (183)..(183): n is a, c, g, or t
  misc_feature (199)..(199): n is a, c, g, or t
  misc_feature (243)..(243): n is a, c, g, or t
  misc_feature (248)..(248): n is a, c, g, or t
ccccggaactgcttcggatgatgatgatgggcactaggacacacaganctgcncggctgatgatgnngggcactaggacacncaganctgcncggctgatgatgangggcactaggacactcaganctgcncggctgatgatgangggcactaggacacncagagctgctcggctgacgatgntgggcactaggacacncagagctgctcggctgacgatgatgggcactaggacacacaganctgcncggctgacgatgatgggcactaggacactcagagctgctcgcatccgaagcagttgccg

SEQ ID NO: 523358 - DNA, 124 bp, Homo sapiens
ttcgactggctcgtcggctggtcgtcgacttctttctctggtgtgtgatgctcaccctcacggcggtttgatcttggtccactttctggctgttttcttcgttcttttttcacagtaacacaac

SEQ ID NO: 523359 - DNA, 118 bp, Homo sapiens
tcgatctacaggatctcgtatcctgagctgaacgggaagctcactggcatggccttccgtgtcccactgccaacgtgttagtggtggacctgacctgccgtctagtacaacctgccgg

SEQ ID NO: 523360 - DNA, 150 bp, Homo sapiens
agcctgactaactacaatggcacggtggacagtagagcagaatccattgacaagaagatttttcgattggtgaatgagctagtgaagtataaggttcatatcaagagatgagagaggccccgcaaagaatatggccaagcagaaagcctg

SEQ ID NO: 523361 - DNA, 571 bp, Homo sapiens
tagctcggtaccctatcaggctttggagctgggtgtgtatcaagctgctgaaaggttgggagcttggtttggagggtccactaggtgaggtagatgctgggcgtgaagaatctgctgtgaggcagatgttgggactgtagaggccgacgggaggcagaggctgggcctggaggggccaccaagatgcaggagctgggcctggagaggctgcaaagaaacatgagctgggcctggtgaggtcgacttgagaaagttcagggcctggagagaaggctgggaggcaggagctgggtctaaagaggccattgtaacgatggagctgtgcctgtggaggctgttgtggggcagtaggctcatctgcggagactgccgtgacgtagggtatgggcctaaataggccattgtgagtcatgagcttggtctgtagaggctgattggagaaagttctgggcctggagaggctgccgggaggtaggagcataatgtagaatcagtgggcgtcttaagcttgttttcctgcaactggatggtcccacctgtagtctcagccacgtgggaggttgagatggga

SEQ ID NO: 523362 - DNA, 709 bp, Homo sapiens
  misc_feature (336)..(336): n is a, c, g, or t
gccaatcttggtaagaccatccaagtcattccctggttcatcgtgtatccataatgaaaaggtgtataaccatcatcaagcttcatggtcatatcccaaagtgagttgacaagatcgatcatcaagcaaggcagtacagtaacatacaaactaacccaactcaatcaaacgcacagttggtagattgtcatattctgcaccagactctaaacaatccgctcagatcacatttcatctggtcgcatggactcaatttatcaattcatctgatcatgcacagtttagcatagatgcgaaacgtagcaaactgatgatacatacatgtgatttcactanaagcaggcttcttccagtgatacccatctcgaccctcttcagcatcctaaaagtaacttgtgatggcgcacaagaatctcgtcgcatgaatgcacagaaaggataggttagggtaatggaaatgatcacatatggacagtgactggttaccatggcaacacttcacgcatatatgatatagatatatataatatataatgtagatatatatctagacatatatgttcacatgtatatcacgcatccactcacacatactcgcacgcgctttggatcagcgtcatttccaggttcagcaaatagaggatcataatttctgtggcgtagcgtttatgcaggtactcgctggaggtctaagatccttataatgctg

SEQ ID NO: 523363 - DNA, 208 bp, Homo sapiens
tactttcctctctttattagtccttgaaagtggaatctgggtgacgttttaaaaagcagaagaaaaaggaaccgcgtgattgtcctggtggccgaacagaggtttcacagaagaccctcaatcctcctcttcccagaaagggagcaaaaaataagggtagagttggggccagcgcttacccagcttcctttctcccactttactaagt

SEQ ID NO: 523364 - DNA, 291 bp, Homo sapiens
  misc_feature (24)..(24): n is a, c, g, or t
gcagtgatcgagctctgtaccatncattgcggtgagcatcatacctaaaaaaaaaaaaaaaaaaaagaaaaaaagaaagggcttttagtgatttttttttagggtagcaagtgtaattttaataaattggctttatttgattctaataaatcccctcaaagctgaattcgaatcctgattttgatggaaaattttttttacttaagggaagagggatagattaattgacacgattagggaaaagacttctggtataaggccggggtttttcaaatgatttttggaatagta

SEQ ID NO: 523365 - DNA, 373 bp, Homo sapiens
ggccaaggtgggcacatcacgaggtcaggagatcgagactatactggctaacatggtgaaaccccgtctgtacttttttttaaaaaaaattagctgggcatggtggcgggcacctgtagtcccagctactggggaggctgaggcaggagaatggcgtgaacccgggaggtggagcttgcagtgagctgagattgtgccactacactccagcctgggcgagagagtaagactccgtctctcaaaaaaaaaaaaagaggttatttaggtctgggcctggtggctcaccacacctgtaatcacagcattttgggaggccggggtgggcagatcacttgaggtcagaggttcaggcattcagcctgtgcaacatggt

SEQ ID NO: 523366 - DNA, 171 bp, Homo sapiens
ctctagagtccccttgctttgggccggcggattgttgctgctgttcacaagttggtgttgtgcgcgttgcactgggcgcaggccaggttttggttgacatctgcagctgggctgtggacctccgcttgaggtgtgtgcggtgaggactgctagtgcctctacggttttggg

SEQ ID NO: 523367 - DNA, 781 bp, Homo sapiens
ctccaggatgacaaagaaaagagggaacaatggtcgtgccaataaagggccgcggccacgtgcggacctatgtcgctgcaactaacgtgtgcccgattgcgtgcccccaagggacaaggccattacagaaattgcgtcatgtcgaaacatacgtggtaggccagtagcgagctcaggtgacatttctcgaaagcgagacgtctgtcgatgcctatgtgcttcccaagctgtcatgtgaagctacattactgtgtggagtcgtgcatagttcagcaggcatccatgtagtcgggtaactcagactctcgtgaagggccccgcaatgggaccgaacttgccccatgccgtgattttaggacctcttgcggaggtgctttgccccaggtcacgccactagaagctcgcagtgtcacggagggtagaggttcggttagaagactgaacgacggggcttgattgctctggatgaaagaaatctaagatctgagagatttggtaccgagaatgtaaaaactcctgtcgaaaaattgcacccactgatttgctttggcgggtgagggccgccttcccgtggggccatttggtgcagcctttcggcgttgtccgcggacctgtgtcctgtcaatgggattgttaccgtcgtgtggccaacgggtgtgtcgctggaacaagcactccggtgacccaaccaggtggtagggagtctgtgcctcaattgaatcagggtgcgtgggtgcctgcacgcagtgtgggcccattatgcgcgggttttcccgggcat

SEQ ID NO: 523368 - DNA, 150 bp, Homo sapiens
ggcggacattcagactgagcgtgcctaccaaaagcagccgaccatctttcaaaacaagaagagggtccttcttggagaaacttgcaaggagaagcttccgcggtactacaagaacattcggttcttgggcttcaaggcaacccagggggg

SEQ ID NO: 523369 - DNA, 156 bp, Homo sapiens
ctgaggtacctagagatcccctgctccgccctttctggtggcaatagctatgggtctttcctgattttatggaattttaggggatattttgagctttgggttctcagtagtgaattgagacttgtagcgtgactattatcatgtttggagtatggt

SEQ ID NO: 523370 - DNA, 202 bp, Homo sapiens
aggtatatgtctctagaatttgttgcgagtagatagcctacattatggcccttaagctcaaaatacttaattgtatataatccaagaatagagcttattttcacttaatcaacgtatacttcttatctgcttgacagtctatattccaatttgccagttgacctaacattgtcctttggagcgcaaatgttacctctggtaa

SEQ ID NO: 523371 - DNA, 153 bp, Homo sapiens
tcttaccttggaaaaccccttgccgtggtgattgcacgtactcccctgccctcaatcaacgatgttttgcctatactggacaagagcgtgccctgatgcagcgtgtgggtaagattccacaacccccgacccggcacccgctgcttcgcgcct

SEQ ID NO: 523372 - DNA, 1356 bp, Homo sapiens
  misc_feature (490)..(490): n is a, c, g, or t
  misc_feature (601)..(601): n is a, c, g, or t
  misc_feature (709)..(709): n is a, c, g, or t
  misc_feature (765)..(765): n is a, c, g, or t
  misc_feature (1339)..(1339): n is a, c, g, or t
tgagacagtcttgctctgtcgcctaggctggagtgcaatggcacgatctcagcctctgcctcctggcttcaagcgattcttgtgcaccagcctcccaagtagctggaattaaaggcacgcaccacaatgcctggctaattttgtatttttagtagagacggggtttcaccgtgttggccaggctggtttcgaactcctgatgtcaagtgatccacctgccttggcctcgtaaaatgttggaattacaggaatgagccacagtgcccagcggggaagcaaaatctaagtttaaaaattgactactttacctgtaagttataataaagtgcttttaggcaaggaagtatatgctacaaaaattgataaatcacatgttttggaaatgactgtaaaatatggaaatttcaaatttgttaatatttattatttcaatattcaaactttgttttaaagctactcaccctgtaatggatcttaaagcattccccanaaataacatgctttgcgtggaatggactactccaagggaatctgtaaagaaatatatacttgagtggtgtgtgtatcagataaagcacccttgatcacagacttgcaacangaagatggtaccgtgcatcgcacctatttaagaggtatacctggctagaaacatctaaatggaaatctttttctaactctttagggagctttttctttggcttatagnggttcggcccgttgaacgacttccaattatcaatagctcacttacttactagaagngggacctttaagcaggcatccttaacccttttggaataccggctctttattaaccagagtggggtaaaactcttttcttttttggaccccaatagtgattaatcgccaggggaaaactctctaacctattgggtttggcgaacttaagagtccactctctgcgcggcgaaacttaggcgtctgggccctaatcttactgtggtgtctcttaacctctcggaacttccgggttacacacctccaattgggcgcctcctgtacccctatcctcttccttacacatccaggtacacatgcgacactccactcccacctcccaccgcgcgttagcgcctctcacgcgtttaagtgtcacccctttgcataacaattacacaacacaacctgtgcaccctgcccaccatcttatcatcgccacttctccggccccatactcattcaccctctctactggcgcgtcacaactctggcctttcaccgcgcgctaccggtgcccaccatctctcgcagctcaccaccctgccccacgtttcatccacgcctccgccgctctcacctctcctcacggctcatnctccttttctccgtcct

SEQ ID NO: 523373 - DNA, 203 bp, Homo sapiens
gcaagttctcccaggagaaagccattttcagttcgagcgccaagatcgtgagcccaatgggagagccggacgagttcgagtccgcaatctcccaggctctcctggagctggagatgaactcggacctcaaggctaagctcaggagctgaatataccgccacctaaggaaattaagtggtagtgtcggaaagctatcataatct

SEQ ID NO: 523374 - DNA, 144 bp, Homo sapiens
cctgtattagattgccacacggctcacatctgcgatgcaagtccagcagtacttggccatatgactacttatagaatcgctggtaggcatccggactagaaggaacccacttagacaagaatcttgacgaaagggagggctggc

SEQ ID NO: 523375 - DNA, 684 bp, Homo sapiens
ggcggagcgcggtggcagatggcagtgcaaatatccaagaagaggaagtctgtcgctgactggcatcttcaaagctgaactgagatgagctttcttactcgcggagctggctgaacgatggctactctggagtccgaggtgcgagttacaccaaccgaggacagaaatcattatcttagccgaccagaactacaggaatgttctgtgctgagaagggctcggcgcgattccgggaaactgacttgcatgtatgttcatgacacgtagggttggtggcatttctcagcaggcgcacgcttgtacgaagctattagtgctcgaaagagtgtgtgcgcatctacgtaggctcgtggtggtgctccatttgcaccgaggtcgaagcgtttctcgtagacgattaactaaacatgccgtagagaaggcgactatgcctgtgccggagcggccgtgactaatgggtgctgcgtggcgtggttgcatgcatgtgcaggagtaggtgagccatagaggcctgctgaaggtactgtggctgtcatggtgacatacctaccgaaggatcgagagggctacaattccgatgaaggtcttgtggacctggcctgagtgactccaatacgtgcgagcactcctgcttaacgtactatcggttgacacatgattgtgcgccacgctgtagtctcagaa

SEQ ID NO: 523376 - DNA, 721 bp, Homo sapiens
aagaaaccaaacaattaaggcataagtaacgaggctggtgttttgatctggcagtaggcagcgctggaagcctagcagtatctgagctctcacagtgccggaactcacccagcaggtcttcgatgccaatgaacatgatggctgcctgtgacccccgccacgggcgatacctcacctgtggctgctgtcttacctgtggtctggatgtccatgaagtgaggtcgatgagcagatgctataactgtgcagaacaagaacagcagctactattgtggaatggatccccaacaatgtcaagacagccgtctgtgacatccacacctcgtggcctcaagatggcagtacaccttcattggcaatatgcacagccatccagtgatctacttcaagcagcatctcgtgagcagttcactgccatgttcctgcctggaatggccattcctccactggtacacagtgcgagggcatggacgtacatggagttcaccgaggctgacgagcaaacatgaacgacctcgatctctgagctatcagccagtaccatggatgccaccgccagacgagtgaggcaggactctacgcgtgagcgaggccgaacgacggagtgctaagagccagtagccaccaataacctcaggtcttctcaaataccctaccacgatcttactcacatgccccttatctctcctcagaaaatgagtagctgcttcatctggtaaag

SEQ ID NO: 523377 - DNA, 144 bp, Homo sapiens
ggaaccaaccacacagcagggtgtgctcaaggccacggattgagccgtgaccctggcgcccagaggggacccagacgatgatggtcacaggctgagccctggtggcagtgtgatcagtgagatccggtaaaaggccttccagca

SEQ ID NO: 523378 - DNA, 616 bp, Homo sapiens
gtcattcattcattttcattcgtccaggatagtgctcctttgtcctccaggccaattaggtatcccaggttgtgggattctgtggcataggatctcgtgctctggtaggtgccgaatggggcaacacagcagtatccgtgctcatagcatgctgggtcgcccatgctcttcactcggcacttgctgtgctaggaattgtcatgtctgaaacggatccactccgttataccgccgcacaggtgccagtctttcagacaggcccagcaagaatttcgctgctggatgtacttctccaaccctgcaggtcgcgaacacgcagactgccaatgcagccgctggggctgctgaaaatgccttccgggccccgtgacccctgactgggatgccctggacctgctacttcgagggagcgtgatcttagctaccagtccgtgaaggtgctccttgggagcttggagagatatcactaagctgatggctctctccgtagtgctcccaatcctatggccatgatctgctgaacctgaccaggcgtgtggggagttcactgtgacgtagtccccccatcaggccacactgctgccacctctaataaccccacggagcttccctctgc

SEQ ID NO: 523379 - DNA, 908 bp, Homo sapiens
  misc_feature (38)..(38): n is a, c, g, or t
gaaggaagcactaaatatggaaagaaaagatcatcacnctgctactacaaaaacacactgaagtacacagtccaatgatgctaaaaagcaagcacatatgtaagtctgcaaaataaccagctgacagcatgacgacaggataaaatccacacataccattactaaccttaaatgtaaatgggctaaatgctcccattgaaagacacggggcaagctgggtaaagaaccaagaaccactggagtatgccgtcttcaagcaacccatctcacgtgcagtgccatacataggctcaaaataaaggaatggagaacacatatttcaagcaacatggaaaacagacaaaaggtgtagcacatcccagatatactgacaacaacagactctaccaataacagataccacaaagagacaggacatgaacaaagagtggtcctgaccttatgactaaatctcatcatcgctagataccaacctgggctatcggaatggcccaaacaataggataattagctgaggttgaaggacgcttctacaccttcacagaatccctgatctacgaaaataggatgagatgtaaggtagactaggcagtacaatccttcacagacagtaaactcactaccaaaacagaaggcaaatcaccggaaccatagaccaaggacaccagaacgcaaaactgagaccacagctacaacaggaaagtcatgaagaaaccacacaaaaaggcacaaagacaccagcgaccaatccagaacgacgaatacaaagagaaatacataagcacaaagatccacaagcgaaccccacaaagaaatacaatcaagaagaaaaaaacaaaaaaaggaaagaacaccaacaagacacacacaaagagacagcagcgacacaaaaaaaccacagccaaaca

SEQ ID NO: 523380 - DNA, 1602 bp, Homo sapiens
  misc_feature (1)..(1): n is a, c, g, or t
  misc_feature (173)..(173): n is a, c, g, or t
ntgggcgagcggttcgtgcgggtctcttgttgtcttcgttgtgctctatttctcctttcgtaccttcctgtcgtgttcggtgctgctgttcttgtctttgccttcttgtctgtgttcttgcgtatgtgttcgctttgtcttgttgtgtccttccgtctccgtctttgttttcnttcggttgatcttctgtctcctcctcctgtgttctctccgcttcttgttcgttcgttgcgttcctcctcgtactgttcgctgcttcgggcgccccttgttgtgtctctctctcgttcttcgtcacctttctcggttccctcttgctctgtctctgtccgtctctggtgtggcggtgcgtttccttggctgtgggtggtggttgttgtgttgtgtgcgtttgctttgtctcctgggtgtttgtgcgttgtgtgtgagttgcgccgtttggcgctagtgtgcctttgtgtttttctcgatgtctgcggtgtgttcagtgtctatcgcttcttttgtctgtggtttggtgtgttgttgtttcttgttgcggcgctggtgggtgactgctgtgcgcccgtcgttatgggctgtgtcgtgtacgtcgtcgtgttcttgtggtgcatgcgtgcttgggtggactcggcctctatctctgtcctgggggccgtgtgtctgtggccctggttgtctcccgtttcttctgtcgtctttgtgcggttggtgcgcctgtggtctgggttggttgtgtttgatttttttgcctggtgtacgcgcgtgtggtttgtgtgtcgggtgctgggtggcggtggggtgttcgtgctttcttgctggtgttgcgtcgctgtcggtggcctcggctgttggtgcccctcgcctcgcggaagtctccccaagagacttgtgcttgtgtcgttcctctcttaatttgggcgcccccccgggacacataatgtcctggagaacctccctcggggggaaaaaaaaccactgtctctgtgtgttagacacctctccacagagaaaaagtgcataagagatataatcgtgtaatggcgccacgctaattgttctaagcacgagaaaaaattttgtgttgtttttaaaagagggaaggctttgggccacgcagccccttctggccactgtgggccgcggctggaggaaagctggttttttattctttataattgtaaaaattgttgctttctgctcttgtggtttgtctggaattcttttctttataatggcttcgctcgccttctttggactatagcccgggaagaagagggcgaggaagcgccgggtgcctctccgggcccctgttatggctgtggcccaggccgccctgggggaatctctgccccgttttctcggaaggcccctcacaggggcccactccagtgtggagattcccagccggctccaccacccccttcccctgaggcacactcggaggtggaaaggcgcgcccgaactcgcttgtaaagttttgtttgctgtatgcttggttttcgcttgaggttcttttttcacatttgctatcgaaactgtagagaaaaagagaaaaaatacccacccaaataaatctgttcagatcccagtcccccccca

SEQ ID NO: 523381 - DNA, 406 bp, Homo sapiens
  misc_feature (30)..(30): n is a, c, g, or t
  misc_feature (70)..(70): n is a, c, g, or t
  misc_feature (74)..(74): n is a, c, g, or t
  misc_feature (88)..(88): n is a, c, g, or t
  misc_feature (94)..(94): n is a, c, g, or t
  misc_feature (107)..(108): n is a, c, g, or t
  misc_feature (185)..(185): n is a, c, g, or t
  misc_feature (195)..(195): n is a, c, g, or t
  misc_feature (197)..(197): n is a, c, g, or t
  misc_feature (202)..(202): n is a, c, g, or t
  misc_feature (204)..(204): n is a, c, g, or t
  misc_feature (206)..(206): n is a, c, g, or t
  misc_feature (240)..(241): n is a, c, g, or t
  misc_feature (243)..(243): n is a, c, g, or t
  misc_feature (257)..(257): n is a, c, g, or t
  misc_feature (270)..(270): n is a, c, g, or t
  misc_feature (309)..(309): n is a, c, g, or t
  misc_feature (354)..(354): n is a, c, g, or t
  misc_feature (384)..(384): n is a, c, g, or t
ggagtcaaaagcgttcatacatctggggtngggggaaaaaaagggggaagggggggcacgaaggctcatntttnaaaataaaacattnttaaanagttttttggcgnngtttttaaaaattttgcatttcatatttttcacgaaagcaatgctatcacctcccctgtgtggacttgggtgaggantgggccattntnctttntntnaagtggggtggcttttaggttggcaagggtcttnntnttacaacgcatctnttttttggaatgnctattaaaaaaacaacaatgtgctttctatgtcctcggncactttgtgtactttggggggtgctcgctccaaccgactgctgtnaccttcaccgttccagttttttaatcctgngtcaagccaaaaaaaaaaaaaa

SEQ ID NO: 523382 - DNA, 450 bp, Homo sapiens
  misc_feature (71)..(71): n is a, c, g, or t
  misc_feature (437)..(437): n is a, c, g, or t
gggacaggctcctccatgccgtctttccttcttttgaaaatcctatcaatggctgggcgcggtggctcacncctgtaatcccagcacttgggagaccgaggcaggtggatcacctgaggtcaggagttcgagaccagcctggccaacgtggtgaaaccctgtctctactaaaaatacaaaaattagctgggcgtggtggcgtgcacctgtaatcccagctactcaggaggctgagacaggacacttgcttgaacccgggaggtggaggttgcaatgagccaagattgtgccactgtattccaacttgggtgacagagcacgactctgtctcaaaaaaagaaaagaaaataatatcaagcaaatcaaaatatcacccacgtcaggttccaggagtccttcgttccctccctcatcctgtcaccctctcagccggtctncatggatccttga

SEQ ID NO: 523383 - DNA, 1741 bp, Homo sapiens
  misc_feature (71)..(71): n is a, c, g, or t
gggacaggctcctccatgccgtctttccttcttttgaaaatcctatcaatggctgggcgcggtggctcacncctgtaatcccagcacttgggagaccgaggcaggtggatcacctgaggtcaggagttcgagaccagcctggccaacgtggtgaaaccctgtctctactaaaaatacaaaaattagctgggcgtggtggcgtgcacctgtaatcccagctactcaggaggctgagacaggacacttgcttgaacccgggaggtggaggttgcaatgagccaagattgtgccactgtattccaacttgggtgacagagcacgactctgtctcaaaaaaagaaaagaaaataatatcaagcaaatcaaaatatcacccacgtcaggttccaggagtccttcgttccctccctcatcctgtcaccctcccggcctggcacctccagtttacagagacccccttccccctggagccagcctgacccctgggacagtgctgccgcgggggtcaggcaggtggtgagtggtcagggatgtttgtcccacttgacagatgggaactctgaggcccagagtggcacaaggacctaccagagaccctgcagctgtgactggaggcttccacctttctcctgcccagcctggggctctggacctgggagaacacatcaggatgcccggggtggcagtaggtagctcccatgccttgaggcacttggctgctccctccaccccctgacagcctcattggggcctgcactcccctcggtgcctttgaggcttcgcctagccctgtcctggtccttttaccctgaccccagtgctgagaaaatctggatccagagctggacatgtcctttctggatgctcccacccctgtctctgaggagcatgagtgacagagggaggaacttgtccgaggccagagaggatggtctgcagctggctcctggtgcacccccactgcccacggcctggcccccatttagggtgtgttctcttggaagcccgtaggaatgtgttcttgagcagccgacaagccaagggcctgggctcagcctggggcaagtgggtccctcctgggctctggccctgtggtccagcccatgtgcctctaaccatgcctggacgctctgagtctccgggccaccgtgaatgccccaccctcagcctggccccatccccttaccttccccaagtcccagaacacacctgagtccataggcccggcagcctctgcaaggaacctggttaacttatgttgttatatagcgtcgaaatgtctatagtgtctttaaattattgtgacctacactgggtaccggagagggggatggctgcggcccccatccctcatcccccatcccatcccatccctcatctcatccctcatcccatcccccatcccatccctgaccccatcccccatcccatccctcatccctattccccatacccaccccccatcccatcccccatctcccgaaccaggctcctcctgcttcaacagacccttggggcccctgatgccaccgagacactcgcactgtcccttggctgccgggcaccccactgagcccctgcccaccccaaagtctgccagcaacaggccctttgcctgggtgagacgggggtcagggtggcccagatgggggtgatggcgaccaaggtgctgcgtccccacccttctgacggcagcctcccctggaggggagtgctcggcccaataaaagctggaatcgga

SEQ ID NO: 523384 - DNA, 958 bp, Homo sapiens
ggagtacatagggacgtcatgtccgtgccgccgtgtcttttccgtgctacctgcagagggggtccatacggcgtagttctggatgcccggtcgtaacttaaagggaaagcttctcacaatgtccggagcccgttgaatgtgctgccatagtgaaggaggaggatgtccatgtaatgttccgtttgcacgcaggaacccactttaggtgtgcaccaatcttgactctccgagatggacctagtgacatctataaagaggaaacagtgatggcatctatatcataaatctcatgaggacctgggagaagctactgctggcaggtcgctgcagttgttcgccattgagaaccctgctgtggtcagtgtcatcactcctccagggaatacctggcgagagggcatgtgcttgtaacgttggttgttaggcaacctggaagcgattcaaattgctggacgcttgcaggtcctgaaacgctgtcagtacgcgcagatccaggcaagcgttccgggatccatcggttgcttatgtgggtatactgagcccaaggggctgtgcacagacctctcaggaggcctctctagtgtatgactacctagcaaatgacgcttgagatacccaccaggattctccgtcccggcgactaggtgggacaggtgccaacccgagtgcggaaaacagggagggcactcaggaagtcggagtgcgaggatgctggctcgagaagtccgagcatagtggccattccgtgacgccaggcgggtctgcctgattggacacacgagttcctgtaggttgccaagagaccgccgcgttggaagacgccaggggaaacaggggcagccgccggcggaaacagcaccccgggaaggtcagagcaggcccggtgcagaaaagaagcagcgcggggaggccccaaaaaagcggccctttctcgcgggagataccaaacacccggagg

SEQ ID NO: 523385 - DNA, 275 bp, Homo sapiens
caataaattgttggtcattgatttctgctgcagcttgggcaaagagtatgtttcctccgccatcaatcagtccaagtcaatgggctttggtatccaatcaaagtcaaagcattcaaaaccttttgattagtgaaagtgaaacgggcagcaacaatcgtccaccaaagttgaatcatatgaatgactttccatcatggaagaaccgctttcacacgtatgttcaagggcaaagcaccgatctttggacgtgtttcatcaatgaccaacaatttatt

SEQ ID NO: 523386 - DNA, 203 bp, Homo sapiens
ccggaggagtcaccagtaggcacatagtgagacactatgtccacaaatatttttaataattagccaggtgtggtgacatacacctgcggactcagctgctcgggaagttgaggtgggaggatcatttgagcctggaagggttgagactgcagtgagccatgatcataccaccacatcccagcctgggagacagaacagagacc

SEQ ID NO: 523387 - DNA, 212 bp, Homo sapiens
ttcaacaagcatagcagtcattagggcagaagcaggaatgcagcttcccaagcttaggttagtgatgtgaaatgctccgtggtcccgtggccctagctccttcgcctgtgcccgaccgcctgcataaggcagttgtgggttttcttccccaattcttttccaagtaggttttggtttagcctactccccaagaccctggcagaagcaggaag

SEQ ID NO: 523388 - DNA, 750 bp, Homo sapiens
  misc_feature (274)..(276): n is a, c, g, or t
  misc_feature (281)..(281): n is a, c, g, or t
taacctgtagttctctaattccccccatccttaccaccctcgttaaccctaacaaaaaaaacttatacccctcatttattaaaatccatttgttgcattcactctttattatcagtctcttccccacatacaatattcatgtttcctagatcaagaagtcattatctctgaactgacactgagccactaatccaaacaatccagactctccctaagcttcataactagcactacttctccattaatattcaatccctgtagcattgttcgttannnggtcntcatagaattctcactgtgatatataaactcagacccaaacattaatcagttcttcaaatatctactcattttcctaattaccatactaatcttagttaccgctaacaacctattccaactgttcatcggctgagaggcgtagaattatatcttcttgctcatcagttgatgatactgcccgacgtcagatgccattacacagtccgtccattcaagcaatcctattcgaaccgtatcggcgatatcggtttcatccgtcggcttagcatgatttatcctagactccaatctcagtgagaccacgaaaaaaatagccttcttaactgctaatctcgaagcctcatacccactatagaggcttcctactagcagatagcaggctaatctagtccatttatggtcttccacccctgatgtcgcttagcgtaagaaatggccacccccagtctttaagaaggaaaaaatagg

SEQ ID NO: 523389 - DNA, 404 bp, Homo sapiens
tttttttgctgtgttgacatctgcactggcaccattaaagtaatggtgaacaaaaatgctggtggtggcgccaaactgtatttgcaatatcgaacaaattgttaccaaattccaatatcaatttgtacatcactgagcttttcatacagttgtcaaactctgttggtttatcttgtaccatcaatgaatccattttacttccatgattttgcaccttcatgcgactgcaattcaagtctttgaacttcacactgaccatacaatgacattaagtgaaaaaagccagtttcacttaagaatgtttctgatgggccagtcacagtggctcatgcttgtaatcccagcactctgggaggctgaggcaggcagatcacttgaggtcaggagtttgagactagcctggc

SEQ ID NO: 523390 - DNA, 104 bp, Homo sapiens
gagtgagctggtaccggccctttgtgtggcactttgggtggctcgttgtgttggctcgtctggctaattgcatcctccacctcctccacgcgccacacgaagag

SEQ ID NO: 523391 - DNA, 333 bp, Homo sapiens
cgaaccaatgagcatcaagcaagatgaactcaaagacactcacatcaagacacattataatcaaacttttgaaagattaagagggaatcttgaaagcatcaagaagagtgactcttcacatacaagggatcctcactaagattatcagcaagtttctcatcaaaaatttttggaggccagaaaacagtgggccaatatatttgaaatactaaaagaaaaataatgtcaaccaagaatcctatattaagaaaaacagtatttcaaaagtgagagaaaaattaagacatcccatgtaaacagaagctgaacgagttcgctcattgggttccgatg

SEQ ID NO: 523392 - DNA, 294 bp, Homo sapiens
gccctctagggtcctgagtgcggccgtcatgttgtcgcccttttttgggcgctgagctgacggacctggaggactttatcgggccgtctcaggagcgccccaagcctgtcaaagtggaaaaaagggcggggagtggcgtcgccaagattcgcattgaagatgacgggagctacttccaaattaaccaagacggcggcacccggagcgtggagaaggccaagttctcgctaaacgactgcctggcgtgcagcggctgcatcacctccgcagagaccgttcttatcacccagcagg

SEQ ID NO: 523393 - DNA, 406 bp, Homo sapiens
ctagtcggaggttctgctgctgctgggccacgacctgatgacactgtagtcagacctggcactggttcatctgcctcaagcgcatcagccttgccgagaaccgcctgacgcaccttgcccgctggacacaggctgaccctctcgcggacttgcacctgcaagacaccagttatagccttctgctggaccccgccttgggtggccctgagaccagcctgcggcacctatatctgctggggaatccactcaggtggtggaccattggctggctgagagacctgctgcaccatgggcgcgacgacgtgaactccacccatgacctgaactgacggttcaaggtccactaggagcagcacctgagccacgtgcgttacgagcactgcaagaaggggatgctgaaccaccc

SEQ ID NO: 523394 - DNA, 337 bp, Homo sapiens
cacaagtcaaatccaaagtctcatctgagacgaggcaagcccatctcatgcctatgagcctacaaaattgaaagcaagttagtttacttctctagatatgtggggctactagtgcattgggttaaatatacctgttcaaacatggtagaaagtgggcaaatcaaaggggctacagcaggccccatgcaagtccgaaatccaatagagctgttgttacaccttacagttccaaaatgatctcctttgactccatgtctgaaatgatagcctttggacctgtaggattcatgtggcttgtacacatatttaacaacttcattgtgcctcgcattatatc

SEQ ID NO: 523395 - DNA, 243 bp, Homo sapiens
  misc_feature (19)..(19): n is a, c, g, or t
  misc_feature (85)..(85): n is a, c, g, or t
  misc_feature (213)..(213): n is a, c, g, or t
  misc_feature (239)..(239): n is a, c, g, or t
gtcgaaccgggtgatcatntgcatgccgaagtcctgcgcctcggccgaggccatgtcactgctgtgcgcgctgacatacggcgcngacatcaggatgccgaggtgcggcgtccgggtcaccgcgtcgagcgtgtagagcacaccttccgtcatcgcgtcggccggattgtggatcccgcgcacgtgctcgctgagctggtccagaaatccgtngactgaggcgatggcggctgcccgcntcag

SEQ ID NO: 523396 - DNA, 604 bp, Homo sapiens
  misc_feature (10)..(10): n is a, c, g, or t
  misc_feature (25)..(25): n is a, c, g, or t
  misc_feature (63)..(63): n is a, c, g, or t
  misc_feature (65)..(65): n is a, c, g, or t
  misc_feature (115)..(115): n is a, c, g, or t
  misc_feature (121)..(121): n is a, c, g, or t
  misc_feature (131)..(131): n is a, c, g, or t
  misc_feature (140)..(140): n is a, c, g, or t
  misc_feature (151)..(151): n is a, c, g, or t
  misc_feature (224)..(224): n is a, c, g, or t
  misc_feature (273)..(273): n is a, c, g, or t
  misc_feature (275)..(275): n is a, c, g, or t
  misc_feature (286)..(286): n is a, c, g, or t
  misc_feature (293)..(293): n is a, c, g, or t
  misc_feature (295)..(295): n is a, c, g, or t
  misc_feature (297)..(298): n is a, c, g, or t
  misc_feature (318)..(318): n is a, c, g, or t
  misc_feature (323)..(324): n is a, c, g, or t
  misc_feature (334)..(334): n is a, c, g, or t
  misc_feature (344)..(344): n is a, c, g, or t
  misc_feature (346)..(346): n is a, c, g, or t
  misc_feature (349)..(349): n is a, c, g, or t
  misc_feature (362)..(362): n is a, c, g, or t
  misc_feature (366)..(366): n is a, c, g, or t
  misc_feature (371)..(371): n is a, c, g, or t
  misc_feature (376)..(376): n is a, c, g, or t
  misc_feature (378)..(378): n is a, c, g, or t
  misc_feature (388)..(388): n is a, c, g, or t
  misc_feature (391)..(391): n is a, c, g, or t
  misc_feature (397)..(397): n is a, c, g, or t
  misc_feature (400)..(400): n is a, c, g, or t
  misc_feature (406)..(408): n is a, c, g, or t
  misc_feature (411)..(411): n is a, c, g, or t
  misc_feature (420)..(420): n is a, c, g, or t
  misc_feature (440)..(440): n is a, c, g, or t
  misc_feature (448)..(448): n is a, c, g, or t
  misc_feature (453)..(453): n is a, c, g, or t
  misc_feature (459)..(459): n is a, c, g, or t
  misc_feature (461)..(461): n is a, c, g, or t
  misc_feature (470)..(470): n is a, c, g, or t
  misc_feature (474)..(474): n is a, c, g, or t
  misc_feature (477)..(477): n is a, c, g, or t
  misc_feature (487)..(487): n is a, c, g, or t
  misc_feature (490)..(490): n is a, c, g, or t
  misc_feature (507)..(508): n is a, c, g, or t
  misc_feature (512)..(512): n is a, c, g, or t
  misc_feature (518)..(518): n is a, c, g, or t
  misc_feature (523)..(523): n is a, c, g, or t
  misc_feature (526)..(526): n is a, c, g, or t
  misc_feature (532)..(532): n is a, c, g, or t
  misc_feature (536)..(536): n is a, c, g, or t
  misc_feature (541)..(541): n is a, c, g, or t
  misc_feature (543)..(543): n is a, c, g, or t
  misc_feature (546)..(546): n is a, c, g, or t
  misc_feature (553)..(553): n is a, c, g, or t
  misc_feature (558)..(558): n is a, c, g, or t
  misc_feature (564)..(564): n is a, c, g, or t
gggattcatncaccatttattggancaaaaagggggtagggacaggagctttaggactggccngngggtgttctaaaggccacctggggttggaagacaatggtctggacacttnactggnggcaggctgngttccaagntccacaaatanctcaagaagttaaccagttccgttccagcctttttgatcagggggggcagctgctcctttgacttttcaaagnaagacttggcctcggcctgaagctttgggcttttgaccttctccatcangnccttgccatantcaggcncngnntggaagtactgaaaaaccangcttnncacacatggntcctttgccngnttncgaaccaaagctncttnaaggntgcananggggaggagnacncaattnttncgagcnnnttnatgttgganacagggggagggcggcctanccagcgtntttgncttggngnctggccccngccnaangggccaaatnccnggtaccaacacaagggnncgcntcccanaaaanaanaaaaancttngccananttnggacctnggcgnaatcanggcaatactgttttcctggtgaaaatatgggtccgccccc

SEQ ID NO: 523397 - DNA, 411 bp, Homo sapiens
gctgagaatctctccccgagattgctctctcttcctagtgccaactcctcagtgctcatcggagagccctcatcatttgggtgcctaccatctgtttaatagacatcgtggaagtcttggtttctgcaatttctagagtgaaattcaggacaaagcaatctctttgcaaatattcagcatgcagcttctcttcttcagggaagtgatgaagtgatgtgtctgccaacgtgtatagttagttgaaaatgatcagacagaaggctttgtgacacagcccctgatgtcagagcaacctctgaaaactcataataacatcgatggcataagctctttttggaatgttcaggaccacaactgaggacaatactaattcttcaggatgagtttaatatagcagatttctatatctca

SEQ ID NO: 523398 - DNA, 322 bp, Homo sapiens
taccatacttcattatccatctgtacttaacttagtctgcttatccattaacactggtaccgtattaatcatagttgttttaaattcctggtctgattattaccaggattcctgccatatttgactctgattctagatgcttgctcagtctcttcacactgtgtttctctccttccatatcacttgtagttctttgtagaaaggtggacatgataccatagggtaacaaaggaaatccgggtcaactaagcgctctcgtaatgtagcagcagccaatgtgtgtctaggggtgtagagagagatgtacatgtcagtcctcatg

SEQ ID NO: 523399 - DNA, 146 bp, Homo sapiens
  misc_feature (89)..(89): n is a, c, g, or t
ggtgctctagaggatcctcccccttccaagtgtttctccttttttcaaaattcattgttttggcccaggccatggtcagcttcaagccntgtcaattcccacaccactttggtgtggctgcaggccaggcaggcatcgcattgcag

SEQ ID NO: 523400 - DNA, 122 bp, Homo sapiens
tggtttccgcaaatgccattggatcctcagacatagcacatacagtatgtgtctgaagctgctgttcctctggtactgatcaggatgaccatggcacctcctcatcatcgtacacgaatgtt

SEQ ID NO: 523401 - DNA, 328 bp, Homo sapiens
aatcagacacagatgatttattttcatacctaaagcactttataatattctctgtgaaatataaaaacatatctgtgatcctaacatttttatactatcatcattttagaaaataaaaggcctgcgttatatactagagaacaactgcgagaggaaggaaggtcctgaaagaggttcatttgggatctacctaccccaaccccaagacataaagaccgattaaggcgctaagaggctaggatgtggctatggctttcaataacccagtcagtgcatacagataacccatgggatatattcaagccactctttgagccattgatggtca

SEQ ID NO: 523402 - DNA, 1013 bp, Homo sapiens
ttcattgcttttgtctctttttatcttcttgtcctgtattccctgattctaactcttgtgtctcagtccgtttgctctcttttatgtgctttgctctgtttattgttcccttttatctgtgtttgtttcgtgaatgttctttcctggattgcttatttgtggtttcttccacccagtacccttggtgtccggtgtcggtgtcttttctcgctctgttgttccaatgagtctctgtgaagctgatcctcacccccgtccatttctctttcagtcctcggttgttccggcactttgagctttcctcctcccatgatccttgtgctccttgccccttgtatcttgggctgccctgctctggctgcttgtcttgggacgcgtgctttgtattctggaacgcattgttgccgtgctcgttcatggctgggcttctgatcatcgcgcggctctggtgagtctttgcagcattatcccttgcgtgcaaagctcgctggccctctggcggatggtatgttgctcctaccttcaagtcattcttctgtgatgacttttagctgtcggcgcctgtgaaaccagatccaagcaaacatttctgataattgtgtggtgattttctcaacatacatcctgttcttactgtacaatggcaattaaagcttttccatgtactatgtaatgttcaactataaagtggtggaactggacctgcttgcaatatggaaaccagttccatagaccgctctctacaataatgactggtgaaagaactgttccaagcatatttgtccccggtacttgtattggaggtgccacttgacactcataggcttcacaagaaggaaaattgctcccactagttcatcagtgttatttagaaaaatacagtaagaggaaagaatcttcagtgatgtttatactaataagttctgctcccacagtgtcagcttatatcaagtggtaatgcccgataatgtcttttaaatgttgagtatgttctttaaccccgggtggtcttc

SEQ ID NO: 523403 - DNA, 323 bp, Homo sapiens
  misc_feature (49)..(49): n is a, c, g, or t
  misc_feature (68)..(68): n is a, c, g, or t
gcagcttaaagcgagagatcaacacatcgcggaatcctccgagatagtntgaagtacgaaacaaacancggggcggcgcacgagcttgaaagggggacggggcattttccttatctccttggtttgattaaggagtgccattcaccgttgcgacacgaatgggtggcacaccgtacaggggtcgcaaaccggaaaccaaggaacccggccaggccgaagcctgccctgcacggtgcgccatagaaaagcagcagctagcacttgaagtgctgactgtgcgatatggcacgtaccgcgccttggtttcgatgcgtccgtagcgg

SEQ ID NO: 523404 - DNA, 1320 bp, Homo sapiens
aaaaaagggggggtgggggggacccttttctttctagttggtcttaaagggaaaattataattttatacttttttttttgggtctctgtggcgccggaaatttttatattggagagattattctctcttcacttggttcttcccactttggacccgggtaaaaggcctcattagcgggctcagctcttgtgaatggagagggaggggaagaagaccccccgtggggtgttcttctctctttgtgaacagaggaaactccggcggtgctgtggagaggggctgtgcccctcccttcagtgtggcgtgtgtcgcgggtgctcggttctctctcttctccggtgacacgcatctctgtggggtgaattattccagagagaggtatacatttatgtggcaaaagccactctccagaggcgcggtctctctgtgaaatgtgtgtgaaaaggcaatattacacccacccagaggccaagaaatctccgcgggtgccccttgcgtggctcccccacaaggtgcgcggcgccccagagtgttcctctctctctctccgggagagtgctccccccaaaggggaagtgtgccaccgaggtctctctcgggacactttaccccagagaacgagggcggacagctccctgtggggggttctctttctcaaaaaaacatctcgggtgagagagagagaaaagccgtgtctctctcaccgggggggcaaaatgatgaggggggggactcccccccgcgggggcgcgacatgtggcagcggggcccaagaggtctcctcttatctaaaagtgtctgacacacgtgtgagatttgtctccccatgtgacaaaccaaggcggtttttgcggcccgcctctggtggggcccagcccccctgtttctcggcgcccacgaggggcaggcgcgtgtgacaatatacgcgggggcgccatggggcgtgctcaacacttgtggcttacggggcgtgggatatctccttcgccctcttttcccccctcttctgaacacgccgggggaacaagtgggggaccccctttaacacggtggagcttgatccttgggcccccctttctcccaaaagcgacgactacacttgtggacacaccacaaaccgcagccaccggcccgacaactcaagccacaaaaacgagggggggggcgctcgagccggacactatagagaagacactatcgaccagaagacgagggggggggcccagcaaaggtgtcttctaggccataacaccccacagagcagctctgtgtggcagcaaacaagaagggtgggcccccccaaatgaaaggcgagaagca

SEQ ID NO: 523405 - DNA, 247 bp, Homo sapiens
tacccattcgtgtcgcaacggtgaatggcactccttatctccttggtttgattaaggagtgccattcaccgttgcgacacgaatgggtggcacaccgtacaggggtcgcaaaccggaaaccaaggaacccggccaggccgaagcctgccctgcacggtgcgccatagaaaagcagcagctagcacttgaagtgctgactgtgcgatatggcacgtaccgcgccttggtttcgatgcgtccgtagcgg

SEQ ID NO: 523406 - DNA, 453 bp, Homo sapiens
tcagtggctgatgaattaaaatatataattgatattttatggtatttcaaaattgctatacctcctttatatcagaaaatttataataaataagcatatatgtacatatgtatgtgtatgtacatgcatgtaatatgtgtgtgtttgtgtacacaaaatatctataaacacacacacatcttttttctcaagaagctggtggataaccactcaccagcatactattctatatgggccttgattttggcatcatgtatgtaaagagaatacataaagagaacacttgggtttgcatagcagctttgctaattgctgaagatggcatttgaacccaggctattcccagaactcacactctgagtgaagccccatgtggctgatgtactatctccatcctgaacaccctcaatctgctgcctttcaaagtgtgttgttaatggataaagagtgtta

SEQ ID NO: 523407 - DNA, 547 bp, Homo sapiens
  misc_feature (39)..(39): n is a, c, g, or t
  misc_feature (49)..(49): n is a, c, g, or t
  misc_feature (79)..(79): n is a, c, g, or t
  misc_feature (82)..(82): n is a, c, g, or t
  misc_feature (110)..(110): n is a, c, g, or t
  misc_feature (159)..(159): n is a, c, g, or t
  misc_feature (175)..(175): n is a, c, g, or t
  misc_feature (181)..(181): n is a, c, g, or t
  misc_feature (238)..(238): n is a, c, g, or t
  misc_feature (265)..(265): n is a, c, g, or t
  misc_feature (276)..(276): n is a, c, g, or t
  misc_feature (392)..(392): n is a, c, g, or t
  misc_feature (436)..(436): n is a, c, g, or t
  misc_feature (454)..(454): n is a, c, g, or t
  misc_feature (541)..(541): n is a, c, g, or t
gggcccccagggggggtttccaggaaaaaaatttgcctncagggggggnggggatgggaagcaccaccagcccgggggnagngcagccttttgggggggggaaaccagtntccccaccatcagccaccaaaaaacttttgtgcctggagatgtgttttngacctgttccgccccntttccntggagggagcaccttttggacagacagaaccatttgaggctcacctttgggttttgngacaagaagggacgtgttgggtttttnttccctaacantatattttggctgcacacatgtctttaacccaggagcccaggggtagacaaaggaggactaaggtaatcaatttgcacctttttttatttttattttttttctttttttcttcagnggagacttccttccctttatcttttttcattcttcccggtcttntgccctgatctgtgtaantcttatcttgggtacttgagcagacggtatattccagaggtgggaggtgggaggggaagggagaaatccaaaacaaagtgttcttgntctgac

SEQ ID NO: 523408 - DNA, 263 bp, Homo sapiens
  misc_feature (44)..(44): n is a, c, g, or t
  misc_feature (184)..(184): n is a, c, g, or t
  misc_feature (212)..(212): n is a, c, g, or t
aaaacaatgataaaaggtcacctttactgagcacacactatctnggtccatccctacatcagccctttatttcaccagtggggaagctgggacacagagtagttacgtgggatgcccaaggtgggaccactcctatgaagtttcaacaccctaatgtgagatcctccatgacctagcccctctntttctccagcctcatttcctggattctntcgcttgccctgcaggcttcaaccacacaaacttcttgaaagtaccttaaa

SEQ ID NO: 523409 - DNA, 402 bp, Homo sapiens
gagagagagagagagagagagagtgcgtgagactcatcttacgccattgtctcttctcacttctatgctctagccatatcacctgtctctatacctcaatccgagcctcacttattgctgctacctttgactgtagtgcttctcccatatggtcttctcacacctgcctgcatctctgcacgtctttgctgacactacctcttcacagaggctctctctggttgcgcttactcataacgtacatcccactgctccaccgtcattcccatgctcattaccctggttcatgttacccccaagcgttgacggctgtctgacatcatatgctcatttgtatgctcgcccactgatgcgacggatctttacttgctcggctaccatgctactaccactgcctgtacc

SEQ ID NO: 523410 - DNA, 343 bp, Homo sapiens
gctcggtaccccaacgatcagagctggggtgaccttctgtgtccgcatggtcctaatctaattcttttcaagtcttcaataaagatctaggagtgtgattccagagataactttttcaggcaacaaaaccttcaaaatgtccttctcagaaacgagttttctccaggtcctcaggaatgctctaaactctcaccattacagcatctctcaagttatttttgttattttttttgtttggttttttttttttgttgaggtgcgttgtgaaacgagacggagtcttgctctatcgttcaggctgtactgcaggggtgcaacctcggctcctgtgaactgtaaactg

SEQ ID NO: 523411 - DNA, 149 bp, Homo sapiens
ttggaagtatgggtcaaactaaatgtgaccagcacgtgtaacctggtcttcgtccctgtattgtctgtcagtcgttgatagcactcagaggactgtccaatgtctttctcgagaaccatgtggaaacttgagcattcagtttcttggta

SEQ ID NO: 523412 - DNA, 96 bp, Homo sapiens
gggttaaaaaaaaaaatgagtttttttcccccccaaattggaaggaaccccttcccaacaagggagggttgttttaaagcccccgattaaggccga

SEQ ID NO: 523413 - DNA, 757 bp, Homo sapiens
  misc_feature (42)..(42): n is a, c, g, or t
  misc_feature (45)..(45): n is a, c, g, or t
  misc_feature (47)..(48): n is a, c, g, or t
  misc_feature (55)..(55): n is a, c, g, or t
  misc_feature (59)..(59): n is a, c, g, or t
  misc_feature (62)..(62): n is a, c, g, or t
  misc_feature (75)..(75): n is a, c, g, or t
  misc_feature (83)..(83): n is a, c, g, or t
  misc_feature (95)..(95): n is a, c, g, or t
ataagagagcactctagccagccactactgcgcacccacctnctncnncttagtncagncgnctcttagagtagnaaccgccngaaaggagtcgnaagaggtctcacgaggctgtcatcaccgccatgcccaagaataaaggtaaaggaggtaaaaacaggcgcaggggtaaaaatgagaatgaatctgaaaaaagagagtgggtgtttaaagaggatggacaagagtatgctcaggtaatcaaaatgtggggaaatggacgatggaagcatatgtgtatgatggtgtaaacgaggttatgccatatcaggagggaacttgagacaccaaggttggataaatacatcagacattatatgggtggtctacgggactatcaggataaacaaagctgatgtaattttaacgtacaattgcaggatgaaagctaagaagcctgaaggcatatggacaagcttccagaacatgctaaaatcaatgcaacaggacaattgtggtcctggagatggatgatgaaataccagattgagacgaattatggagaatgatgatgaagaaccattgatgatcatctaaaatgcaaccaaggtgatataacaatgacaagtttctcctgagcgatggaactacagatggagatttgggcatcaataaccaagaagagaaattcataaggggtgtagtcctggaaacaaaatggtaattcataggttaagaaattaatatatcagagcgaggcatgaattactagttaagt

SEQ ID NO: 523414 - DNA, 850 bp, Homo sapiens
tggtttacacgggttcatctaaggaaataccgacggcaaatcctgtttctctgccaaagcaggcatgtcttccccggttcaattcttagtgagctctgcgcatctgggaatttatacacgcctactaagttacaactcggaaggaatttcaatggttaatcaactcatgtggccgtcttgacgatgcgagacccagtccattttgcacagatatcgacgttgcctaaggtctgtccgccctggtagttgcccattgctgatattgtgtcatcttctcacctcgatgggggatttgcatgataagaccttcaggcctccattattaccataggaatctgcatgagtgagtttattgggactcatccgaggtcactatgaggcaaagcaaggtgggttcctgccagggggagtggagtcatacacagctacaatgaccccccatggacctgtatgctggaccgtgctttgagaaggccagcaaggtcaacgcttaggcacactgacgaggattgccgatggcaccatggcatttactgtgttgaatacatctttaagtctgagctggtcacaaagtggggactcataggcctccagttgtttggatgagaactatcacaacgtgctgggagccactcaagagccagcttcacatcctcaaactccaggaacccagcagaacctcaattgagacctggaacagttgataccataatcaagagtagatttgtgaagatttcttcagaatctcatgctatctggtagctattggaggagaggggcttggttcaaatgatagacttcacttttcacagtcaagtaagctcagaacatactccggaggcattagcaa

SEQ ID NO: 523415 - DNA, 158 bp, Homo sapiens
cagtgcacgagagatggaggatagcttgtgagccaggagttagagagtcagcctggtgcaacatagcaagaaccctgctctctactaacacgatttcaaaattagtcatgcagagtggtgcacgcctgtagtcccagctacatgggaggctgaggtgg

SEQ ID NO: 523416 - DNA, 585 bp, Homo sapiens
  misc_feature (1)..(1): n is a, c, g, or t
  misc_feature (92)..(92): n is a, c, g, or t
  misc_feature (109)..(109): n is a, c, g, or t
  misc_feature (126)..(126): n is a, c, g, or t
  misc_feature (152)..(152): n is a, c, g, or t
  misc_feature (161)..(161): n is a, c, g, or t
  misc_feature (185)..(185): n is a, c, g, or t
  misc_feature (211)..(211): n is a, c, g, or t
  misc_feature (232)..(232): n is a, c, g, or t
  misc_feature (235)..(235): n is a, c, g, or t
  misc_feature (243)..(244): n is a, c, g, or t
  misc_feature (264)..(264): n is a, c, g, or t
  misc_feature (267)..(267): n is a, c, g, or t
  misc_feature (284)..(284): n is a, c, g, or t
  misc_feature (301)..(301): n is a, c, g, or t
  misc_feature (304)..(304): n is a, c, g, or t
  misc_feature (351)..(351): n is a, c, g, or t
  misc_feature (356)..(356): n is a, c, g, or t
  misc_feature (360)..(360): n is a, c, g, or t
  misc_feature (376)..(376): n is a, c, g, or t
  misc_feature (381)..(381): n is a, c, g, or t
  misc_feature (387)..(387): n is a, c, g, or t
  misc_feature (390)..(390): n is a, c, g, or t
  misc_feature (405)..(405): n is a, c, g, or t
  misc_feature (407)..(407): n is a, c, g, or t
  misc_feature (410)..(410): n is a, c, g, or t
  misc_feature (413)..(413): n is a, c, g, or t
  misc_feature (416)..(416): n is a, c, g, or t
  misc_feature (421)..(421): n is a, c, g, or t
  misc_feature (426)..(426): n is a, c, g, or t
  misc_feature (435)..(435): n is a, c, g, or t
  misc_feature (443)..(443): n is a, c, g, or t
  misc_feature (461)..(461): n is a, c, g, or t
  misc_feature (470)..(470): n is a, c, g, or t
  misc_feature (492)..(492): n is a, c, g, or t
  misc_feature (505)..(505): n is a, c, g, or t
  misc_feature (515)..(515): n is a, c, g, or t
  misc_feature (523)..(523): n is a, c, g, or t
  misc_feature (580)..(580): n is a, c, g, or t
ncaaggattgcatatacatggtggtcccgtaagattacaatggagcagccagacacggtggttgcacctgtaatcccagcactttgggaggntgtggcgggcagattangacatcaggagttcganaccagcctggccaatatggtgacacncctctctangaaaactacaaaaattagcctggngtggtggcgcgcctgtagtcccagcngctcgggaggctgaggcagangantcgcttgnnctcaggaggtggcggttgcngtnagccgagatcatgccantgcactccagcctgggnganacagtgagactccatctattgtgaacagtgctgcaacaaacacaggngtgcngatnttgcttcggtacattnttttntttttnttnttggttttttttttntnttngtnttnttgtnttttnttgtagctncatttttngtttttttgtggtacctntatactgtnctctcatagtggttgttatttntttcattctcaanagcagtggtnccaatgtngaggggtcccttttctccacatcctctcaagcatttgttattgcctgtctgaaagtnttctc

SEQ ID NO: 523417 - DNA, 677 bp, Homo sapiens
  misc_feature (324)..(324): n is a, c, g, or t
  misc_feature (359)..(359): n is a, c, g, or t
  misc_feature (366)..(366): n is a, c, g, or t
  misc_feature (433)..(433): n is a, c, g, or t
  misc_feature (463)..(464): n is a, c, g, or t
ctcaaattagataaatggctttctactgaacagagatagaaagatgagcatctttcatcagactttccagtactcagatgatcaggacgagtcaaccggctcacttcttatagataactagatcaggtcattgctaactgtaattgtttgcaccaggagccacaaaggagctaaactagcctttctaagtatcctaagttttactatctaaccagcacttctgatttttttttcccttaaaactctaaagtacaggtgtcgtatgtctgccgcatctgaaaggctgccccggaaatcagagcctatctagcgggaatgtctggncagtcacccccatcctgcgcgcagatagcaaaggnctgctgncaggtgtcagacacacggtaccgcaacagcagtcccgaggtctgagattctcaatgtcagcaggtgnctggagagtatcaccagagccactcagganncagccatgcggaagctaaaattgttagtgggttttgggccagcacagtgtatgggaacactttttttgttgttgaggggggcctatgaagtctccctctgttgcccagtctggagtgcagtggcgcaatcttggctcaccgcaacctccacctcttgggttcaagcgattctcctgcctcagcgtccctagtagctgagattacaggcgtgcg

SEQ ID NO: 523418 - DNA, 136 bp, Homo sapiens
cctatatgtaggtaggataaatataaatagtattcagattgtgatgtaggcttaaatatttagaggctgaccatggcagtggaccaccaccaccaaaagggaccacagagttttgcgagattaagaggtttgggga

SEQ ID NO: 523419 - DNA, 187 bp, Homo sapiens
ggagctcggcccatgttagatatggcactactcatgcacgtatttggaagcgcagccaagcaatatcaaccattaagcttccctctacacttattatcttcacaagttctgattctactgactatcctagagaatcgctgtcggccttaatgccaagacctagcgttattcacgactttctagataa

SEQ ID NO: 523420 - DNA, 84 bp, Homo sapiens
aaaaacctggaaggggaaaggaagggaagggggggggggttttttttttttgttgctgtaaaaaaagatttttggccctttcca

SEQ ID NO: 523421 - DNA, 100 bp, Homo sapiens
atagacgactctgcaacatcttcctcatttttcacaggtatgtaacgcaccacgaagttcggttaacatcaatgggatgagggggtaacacgaccggtgt

SEQ ID NO: 523422 - DNA, 201 bp, Homo sapiens
  misc_feature (101)..(101): n is a, c, g, or t
  misc_feature (131)..(131): n is a, c, g, or t
tcgatagggcaaatgcagttataagaggcttgtgaagtacattcaatttagtttgctcagcgaacaaccctggtccacactcagtgttaccattaatttantataagtattgacactacattatgattccncatatgcaagtaagatagggtcataaacacggtttcgtgaacaagacacagctgaactcacgagtgagca

SEQ ID NO: 523423 - DNA, 229 bp, Homo sapiens
attttgacaccttttagaactgtataaaagtgtgttgtgttggagcagccaacccatgagtgctgcattttggaaatttagttttatctttaggtccacaccatcatggtggattcatttaaaccatctaaaaaatgacacactggtgtaggatggataattttgtgatctttattttccccttgtaatcattttaagcatctaaataaattgctgtattgtgcctaaa

SEQ ID NO: 523424 - DNA, 215 bp, Homo sapiens
tccgcctcttggcctcttccgcttctacagtctgctgtttcctcctgtgctcctcgatctgctgctcccgctcccggtagcgcctgtcgcgctcctcttgctcctgccgctcctgctccatccgctcctgttcgaacctgagcctctcatccagggccttcttccgctcctcctccttccgaagatcttcttccttcttggccttgctcccaaca

SEQ ID NO: 523425 - DNA, 132 bp, Homo sapiens
aaagattagctgaaagacttttcgaatggaccctatgggactcctctttttcactgtgagatctacagtgaacccaaaagaatgatctagagtatgttgaagaaaatggaagtggggtggcatcgataaaca

SEQ ID NO: 523426 - DNA, 239 bp, Homo sapiens
ggcgacctaaggaccccatctgtctcaggatggggttgtcaagttgtacgaatcaggctactttatgagataccaagtgaattagaagacgacgagagggtaaactgattattatgctcggaacgcttgggtgatacagataaaaataaatacaaaacaccccaaatacagggatgatagttccgtggtgacaaaacagagatatcatttgtcagattgcttatgccgtaatagagggg

SEQ ID NO: 523427 - DNA, 945 bp, Homo sapiens
  misc_feature (153)..(153): n is a, c, g, or t
  misc_feature (438)..(438): n is a, c, g, or t
tgggctcaaatgcccactgccagtccccgcatccgcaggcttgcagcatctctcttgtgtcctggcggaagatgggagggatgtgatgactggagaaggctacagtgcttgtgttgcaaatgacgacgtaagacatgaatgtggtggccaaanagaaaataaaaaaagagataaaaatcaaaagaaagaaagagagagacataatagaatagagaatatcatagaagagggcgcggtcgcgacacgcattactctctttgcgtcgttgtgtggagcccaaagcttcttctcggccaacgaagaatctttgttaagttcttggagagaaagggggcgctaacttgcataattagagggaggagacgtaatgttatatatataggaagggccagctggggagacgcgtggaagggcaagctgttcatattagagataganacgacattgtaagatagagttcgtgaaagagaaacacaagcgctgcgaagacgaatgggggaggcacaattctattgtgggataaagagagaggaaacccaatatcttagtctaattggagggtgggcgtggagaaacatacatattatagagtggcgaaacacacaatatctgttatctatcaaatgaaagaaaagatatatcaagagaaagcgctatattggaaggaggggaatagatattatactagacacagataatgtttacagaggcgagtgtaaatagaagtgtgtgtgattgaaacaaaagacacgcggggtctacaattgtgtgtcactgtaaggagggacgcaatgaatagagaaaaaatggttatggagtggaatcactagtgagggagatgaatatgtagtatttgtagatggagcgagagaaactatatatgtatatgccacgacgcggaggggaggggaatattgatgtaatataaaacaagattagaaaggg

SEQ ID NO: 523428 - DNA, 211 bp, Homo sapiens
  misc_feature (79)..(79): n is a, c, g, or t
  misc_feature (117)..(117): n is a, c, g, or t
  misc_feature (132)..(132): n is a, c, g, or t
  misc_feature (154)..(154): n is a, c, g, or t
  misc_feature (164)..(164): n is a, c, g, or t
cccttcaatagcatccttaagatttaaaaaaaaaaaaaaaaaaaaaaaaggcaaaaaaagtgatggcaagccgtaagtncttctttgtcatcgccgtgcaatctttctaacattccnatctccatctcaccngtttcttgtttgacaaccttcnacaaagcaanaattaatctttcttttaaacttgtttcatttatgatcaatgtagaga

SEQ ID NO: 523429 - DNA, 368 bp, Homo sapiens
  misc_feature (8)..(8): n is a, c, g, or t
  misc_feature (29)..(29): n is a, c, g, or t
cctgtctnagcctcggaaagtgctcagcnacccacgcccggccaatcttataacattccattttatgcgttttaatcctttaaaaaaatctccctggccgggcgtggtggcttatgcctgtaatcctagcactttgggagcccgagacgggtggatcacctgaggtcaggagttcgagatcggcctgaccaacatggtgaagccccatctcaactgaaaatacaaaaattagcccgggcggtggcacacatccgtagtcccagctgcagaggctgagataggagaattgcttgagcccaggaggcggaggttgcagtgagccaagatcacaccattgcactccagcctgggtgacagagcgagattct

SEQ ID NO: 523430 - DNA, 153 bp, Homo sapiens
tattcaatagcagaatcgtgttagttctgatagagcctcttttcagactgatgtcttattcttcttagtgcttcaaactagatccttattatattacatcttcaacttcttgatctaaatcaatattacaaactggtgttctcttaagaaaaa

SEQ ID NO: 523431 - DNA, 1065 bp, Homo sapiens
  misc_feature (274)..(274): n is a, c, g, or t
gtggcgaaacgaggaggagataacgcggtcgttggtgctcgggatgtctccctagctctgctaaagccctaaggccatcacacagtggaccttccagcatcgcgcactcgggggcacagatccgtgggagcgggggctgtggctctctctctcgtcctgacgtaggcaatcctgctgaccgtcacggtgacgcgcctccgagcgagactgagccctggtacgaccaatctgaacatccaatcaacggacctcgctactgttcaatgaacgaagncacctggggctccgtgatgagatgcgagaatcgtcgtgccttgacgagcattcgagcaacgagatgatggggagctacgcgtgagcgagctatacgcacgggcgacgaagcatccagtaccgaacctaggcgccggcgtaggcatgccgacagtgaggcccaagggaggccccttgtcctagtcctgtgccatgtaggacggtcagaggctggagggtgatagcaacgttgggtggaacggatcaggccgtgccctgcgcgctcactcacacacgtgaaccaacgccaggagcagacgtcggggagtatcgggccttaggcatggatgctctcgctctttccctagcattggtactaatgctttgcatgatccgccgaatgtggcattcattgcctacgtgtcatccgcggttcaggtgttcatggcagtactgatgcatgacgtgatcgaagcctccggtaccggcgcttggacagtagctgctcatggccgtcgagccctacgaaaccattgccttcaaggtgccgagcagcagagatcgacaaggcggagggcgagtcctggacacactggaaccggggagaccaaggcaggtcttcctccagttccactttacagatgggaaaaaggcccagagtgtgaaacaaggagataacatgaagggacccctaggaggaaacgggggtcaacgagcgcggggaaaagcggcgagccacgggccacaaccgcgtggagcaggggagagcagggcgacagccacagggagcaggcaggaagaagcacaggaagg

SEQ ID NO: 523432 - DNA, 538 bp, Homo sapiens
gggagcagaggttgcagctgagccaagatcgagccactgcattccgacctgggcgacagagtgagactccatctcaaaaaaaaaaaaaaaaaaagctttggtttttaggcagaatgaaaatatttggattaaaaatttggcaagctggccaagtgccatggctcatgcctataatcccagcacttggggaggtcgaggcaggaggattgcttgagcccaggagtttgcaggttacagtgagctacgatcccaccactgtaatcactccaacctgtgtgacacagtgagaccctgtttcaagagagaaaggaaagaagaaagacagaaggggaaaagaaggaaggaagggagggaggaagggactgagagagagaaagagaaaaaaaaggggagagagacagagagagagagagagagagagatctcaaagctaccaaatcagtggggagacagtactgaaataacaggtttgagaataagatccgtgaaattcgagtcagaatgaccagcggccttgtggtaggacaagactatctgt

SEQ ID NO: 523433 - DNA, 605 bp, Homo sapiens
acggaagtaccgcctcctcccgtctgacgcccctcaggtgaccctgcatcgctccagccgccgtcggccatgtctgggccaggcaatcaaacgcgcctgccggcgacggtggtgctcagggcccccggaaaagaagctgagtcgtgaggagcaagaccaccacgactcttatcgagcccattcgtcttggaggcatctcttccacggcaggagatggacctggaaggtactacagtttccatgaacaagtaaactggctagagcggctggaacaacggcagcgcttgtgaagatgaactcctgagaacgaattgagaagttggagaagcggcagtgccactagatgatgccacactcctcatcgtcaatcgctactgggcccagcatggatgataacctgtggaatgccctttctccgactgccatgagatgccatggtggatgcttgtcttcagctgccatggggcacctggtgacccagtgaggggccaagcttgtgatgggactcctctcccagagccggggacatcagagctgagagaccccattgctgatgcagctgcggcccctctcagtgagccggcttggcttctgtggtggcactg

SEQ ID NO: 523434 - DNA, 324 bp, Homo sapiens
gctgaatttgaccttggttgcgtcgccgaatagggcagcggcaacagcacggcatacgtcagcgtcgatcccgaggatcttgccgctggcgttcggcaccgagaagcctggcagaccgtcgctcacgccacactgcacaaagcctttcttctgcacggcatccagcgtggcgccagcctgggcgaaaacactgacaccccaataacggcagccgcggtcacgatggccagggtggatttcaataccttcattcaaacctccagttttgctcttgttgtgtcggagctagaaccccaccgcacccttattaggcgacatcgaccc

SEQ ID NO: 523435 - DNA, 188 bp, Homo sapiens
tctactatatgatgcgtagttttttggagtgcactggaggtgcatggaatggcgagtcgtggaatgtaatggagtggagtggagcgtagggtagtggagtggagtggaatggaaaggaatggagtgttgtggaatggggtgtagtggactttagaggaatggaatggtgaaatgaaatgtgagttaag

SEQ ID NO: 523436 - DNA, 2173 bp, Homo sapiens
  misc_feature (2165)..(2165): n is a, c, g, or t
gtcttgttggtgcctcttgaggtagtttggtgtgagtagagagactgcgtgttcttgttggcgtcctgctgggctagttacaggtgtgttggttcgccccccccacgcgtgtgctcttccgcggaggagatagcttcagggatgcgtgtgggtgtcgctctccacgggggggtgcatttcctgttgggccggatacacccctggtgtcgtgttggattatttcgtcctttgttttaatgggagttagtgtctttcttcttccgctgcgtgctgttgtacgcttgtgggttgttgctgtgagtgtggtcctcttgtcgcccccttgccttccggccctggtttgggttgggtttgtggtgggtcgcgcacgacaagcataggtctatcgacgttgtggtgggctggtcggagttggatgtgagtgtggtggaccgcgttcgcgctctaggtgttggcggtggacgttgtcttgtgccttcgcttttgtcgggtgtgagagattgtgtcttcgttgcttctcctccccgctgtcgtgttcatagattggtgtgtgttggctccccacacctgcgaggaggtggtgtggttcgctgccgccgctggggtggtgcccggcctgcctcgctcccctgctttttgtgtggttgtttgccgccttcgtgttggttcggcacctagcgaacgttgagtgttttgtttttttgttgttgttgttatggaggacggcatatgaaggagggtgctggtggtggtgatggtcgtcttctgggtgggtggcggtgcctccccgcgcctgcctcctcactgcgtcagttgtcttttctttgtggaggtgagtattgtacgtctgttcttggtaagtagtagtgttgttgttggtgagtaggtgatgtggtgagtttgcgatttgtcggccgcccgcctcgcgcggcctcgacatgagtgtggcgtaacgacacactgctccaagcagcaggtggtggtgtcttgccccacactgccacttcagcagctgtgcacgccgcgtctcttgttgtttctcctctcgcgcacgccccccctctgtttcgtgtgttggtgcgcgccccccgcggcgttggtgcttgctgcagtaagtggggggcggcggtttggtgttattgttagagtggtagttgtgggaggaattatccggcggatgaagcaggctgccgcacaccatccccgcggctgtggggattgcgccgcctgtgtgtagatgatatatccgcccccccgtcgtgtgtgctctttctccgcgcaagtatatactgtgctgggtagtgtgtgtggtgacacacaacagcagtagtgtgagaggagagagcctacacacactgtgtggtgtgtgttgtgtactacacacacacacaaacatagtgtgttggtgtcacccgcgtgcagtgagagaggtgaggggggtgtgtctctctccgcagcagtagagtagtagagatgatattgtctctctccacagagaggttttgtgacacacctctccttcatgtgtgattgatgagagggacgcgcgtcatgagatgagggcgtatgatgagagagtgtgtatagataacactctctcgacgcctctctgcgcacacacaggcgacacacacagaggtgtgtgtgtgtgtgtatatatagaaaaaacacacacggtgtgtgtaatgtttgctctaccacaaccacctgcgagagacgacactgctgttgtcgagatgagagagagatttcttatataaacacccctgttatatattcgttgtgttgtgtgtgtggggtggtagacacacacacagtgagggagagagagatatgttgagatggtgcggctccgcctcgcactcagagagagaagagagtagtgtgtgaataaataagagatgtgtcacgactgaatgaagtgtgtcccatcgcacctctggagcgtcttgcatccggcccccgggtgtgttataaatacacacactgtggtgttctctgtcgtcactcacactcatcacaccgctgtgggtatggaaatcatgtgtgtatatatatataaacatatataataatacaataaatatagaatataagaatataaataaataccttccgaagggcaagtttaacggtcggggccggagatagagtatgtatcctcntcccccct

SEQ ID NO: 523437 - DNA, 92 bp, Homo sapiens
ttgctgtgagattgcccctattttgtgcttttctgtttgcagtgggcccggccttgttttaacccggaataaaggtgattgtttgttttgca

SEQ ID NO: 523438 - DNA, 683 bp, Homo sapiens
  misc_feature (472)..(472): n is a, c, g, or t
gggaacggtcgtatatttccccggtggcctgggtgcacgcgcccgccgtgcatgggatgctcccggtcgcccccggttccgcggctccatctgtgatgcggcgaggagggcagtcgagctgtccgcaaacaacgggcctttagttttcaggtggcgaaactgactggtctggttagagcgcgtccaagccaagccgcagtgctgtttggactattaaatttctccttctgagtgagtagcaatcgagatggaaccattcgcacaacagctccagctggcagcatcacttaccgccaatttatccaacttgtgccaaggctctgaaatgccaacaacgtcgaggcctgcacttgatgtcaagggcggcacctcacctgcgaaggaggatgccaaccacgagatgagctccgcggcctactccaaccttgcggtgaaagatcgcaaagcacaggccattctgcactaccctggngtagcctcatatggaaccaaggccagtggggcttccactaagatctcgggatctccaataggctcttctacaaccacccctgtcactaaacccccatactttaacctggacccccgccccttactttgttggctaggatgcccctgcagaaacattatgcaggctcaggggatgggtggtgccacttcagggccccgggtaggcagcccct

SEQ ID NO: 523439 - DNA, 144 bp, Homo sapiens
ggaccctcattatggccaaagttgtggagctggcaggtggatgtgttgttagcagttgcaactgggctgctgtggactggtgtcgattcctcactacggcccaaggttgtggagctggcagaaaagtgggttgttggagtcgag

SEQ ID NO: 523440 - DNA, 345 bp, Homo sapiens
accctcccactacccgctcccctccccgacaagactgccccataggaaaaacaccccaatctctgcccccagtttctcctctcttcattcccagttccagggccagcttgttcaactcactctcttgcctccatttcttcagggtcatggacaagagacccaccaggagcaagatgaagcatcaagtcacagggcatgatgtatgggggagtggggtgaggcagatgacacacctaaaccctgagcaatgagaagggaacttgggtctccagctggggcaggctggtgggagtggagcacacctgttacgtcgacgcggccgcgaatttagtagtagtagtaggc

SEQ ID NO: 523441 - DNA, 180 bp, Homo sapiens
gacgttatctctgtggggcagaggctgcagaggctgtggccacacaggagacccgggctcaggtggatgaaggaaggagcttctctccctctacaaccgttgtggctccctccttcctcacctccctgggaagcgctgacccagctctttgttcctggacctacaccccacagagagagt

SEQ ID NO: 523442 - DNA, 127 bp, Homo sapiens
tgttaatatctggtggtactggatttgaggcggattacgggatcgcctggggatctcctacagcccagtacccgccacgtaccggagtcaatgtagactctaggaggaagggggaattagatagtgg

SEQ ID NO: 523443 - DNA, 466 bp, Homo sapiens
  misc_feature (17)..(17): n is a, c, g, or t
  misc_feature (65)..(65): n is a, c, g, or t
  misc_feature (79)..(79): n is a, c, g, or t
  misc_feature (141)..(141): n is a, c, g, or t
  misc_feature (193)..(193): n is a, c, g, or t
  misc_feature (273)..(273): n is a, c, g, or t
aagggtaaatcctgtgntttaaaattttcctggaggtaaactgcccaaaaagtgttttccccaanaggaagctgcaccnattttaaaattggcccacccaaatgagggaataaagtattcttttttcctcccacatccctnaaaacttccttattttgttttccttttaataatcatcccctggctaggccgncagttgtcacgccctgtaatcccggcactttgagaggcccagggcgggcaggtcacgaggtcaggagatcaagacccatncctggctaacatggtaaaacccatctctactaaaaatacaaaaacttagctgggcatggcggcacccacctgtagtcccagctactcgggaggctgaggcaggagaatcacttgaacctgggaggtggaggttgcaatgagccaggatcacaccactgcactccggcctgggtgacagagcgagactccattt

SEQ ID NO: 523444 - DNA, 799 bp, Homo sapiens
  misc_feature (1)..(1): n is a, c, g, or t
nggctttctagccacccgccttttgttttaaacccagaaggagatggcccctttcttgtgggccgcctaaacaacaacaccttcttttagctgaaaagaaaaaacggttgagtccaggaatcccttttaaatcctcgagtgtgccctgtaaagcataaaccctttcgaagctaaaatccctgtgaatgtgggacctccataagggtgaagactgtttgaccataaacaacatgacaatgctaaagcctttcggccgtaaaacgtccccctcgtcaggggcggtgtaccaacttaaccccttgataagttgggtgtccagtctggctatcctcacgaaaaaacaagctcagtcctgtcttagggtccccacgggtaaaagtccccctttaaactaggttgttccctcaggtgtcactgaggtggtcgataagttctatgcctttgaggctatcactgggacggtgtttgtaaaagtaaacaggtttgaggcctccgtttatggaaaagtgccgtatgtaccctctcatgcaataaaaccttaaaaggcctatgcattgggatttgcatgtttctcctgtgtaagttgaggcatctgagtccaggtccccccaatatcatctgcagccagctacacagggatttgtgtgtcatctagaagacaggcctccaagcttcaggagcctattggtgcccagccttttctggctctggagttagtaatttaacactcgcctcttgctgatcatgggacggtttttctagataaagcaaaagactcgctcaataaaactgtcttgtg

SEQ ID NO: 523445 - DNA, 1555 bp, Homo sapiens
atggcgcagaagcagaaaaacgaactggaagaaatgccatgaacactgcaagaaacatatactgcttacctcattgacaacaaggctcagcttgaacataccgactggtcagagctgctcctaacagacatcactatggcggccgatatagctgaagtttgagcttgctcgagaagctacctatttacgctcaactcataccacatacttgttgtagccacctctgaccagacaaaactgggcagaatttagtataggcactaaactactactggctgcacaacataggataccagcatataatgctgcgcagagtccgcaccggcaatctgcgcctttctaggacaaaaccgtatatactcctctgcacggggacatcgggcctatcgaccaactaccccaaatcctatggcctacacacgaccacaccaaatccttacataactccatgacatcccacacacccaccccagcgcacacgcgctacaacactgcgaaacgggcaagaacctgactgaaccttgcacacaacctgggcgcctaccacgacagccctgcacacggcccaggaaccttcccacggcgccctcaccacacggccgccctcacacccttggcaccacccaccttcccacggaacgctggacaacacagaggcccccatggtacccaaaacgcaggcactatcagcgccgttgcaccccgtgtcaaagcccagcataaactatgcgtgcacctgcaaacccgttggccacggcaccgtggcgtccacctcgcttcaaacgaagtacaattcaccatacacaccgaccgtctcccccggacgcgcgctaagacaacacactaacggaccaaggcaggtaccgagcaccccctacccaaaacttgcgcgccggcctaacatacctttcgacagcggcgacaaccacattggcggcgcacgaaacacgcacgtaggcagaccacccgcacacagactacaaccaaaaccgctggcgaaacaacagagcgaacggcctaaggacccaacccataaccgacacaaaccaccagccgaaacaacaatggccgcgactgcgcaccactgggacaccccacggtgcaacgcaaaagacaggcaagtggcacaccacaacttcaccactaactaggcggacacatgccacgaaccacacagcccacccacaccgacaccagcaacaatgcggacccaggaaaccagaatcacgacacagcgcgcaccacaagcgaacacccggacacacagacacacacccgcacatcaccacacctccgaccacgcgccacctcagcaatacggcacacacacaaaccacatacggactacgaaccacacaacgacacacaatctcggaaccacagaccgcaccacatcggccaagacgccacacaagcgaaagtgttcaccaagccaaaagagacacgaagcacagcgtatcaccggcaacgcatacgagacgcaacggcgacagacaaggcgcagaaaccacaaccgcacacacataccagcgacacacagacatagacacaaaag

SEQ ID NO: 523446 - DNA, 1069 bp, Homo sapiens
  misc_feature (203)..(203): n is a, c, g, or t
  misc_feature (216)..(216): n is a, c, g, or t
  misc_feature (593)..(593): n is a, c, g, or t
gctgaggcaacggcattgatcgccaaactacgaggatagcgtcgatagcagatctgaagacctgggcgcaatagatataggtgaccggcgacgggaagaagatgacagaatgatatgccaaggcataagtatatgcgaaggacatataccacacataataccctgtcggtgcagtacagtgcaagttgacacctaggaaacantaacgtgttgcantcggtacgaagccaatcagcatagaatctcccgtaaagcatgactgagcgtagctaagaagagcgtagaaagaagctacaaccacgggtcagtggtaggcgaaaagactagtttgggtagatgaatctggagtaggctacgcacgaggcggatgcaaagaactctagcgcgaaaggcacgtgacgagggaataagtcctgtggtatggtcgcgaacgtagtaggcaagactccgtttagctttgcaaagcttacatgtacaaatgtttgtggacgccgaacaagtagaaacgacctcgtatcgatcaccctcgtatatgtaaaccacattgtggcaaagcgtgagatataatcagttcggcgacatacgccagtgcnacactccaggcgtgcaatcccttgggaaccaactttggagcgagacaagagaataccccttacgtagaggaaagccagcaagtacacaagatatattgtcaaacaaaccctcgagatatagctggagggaacgttagagcaaagcaccaggcctgagcacaaaagtttttgaggcgcaaacaaaagtctgggttctcccaaatattgggagttcaaaatccccatccacgaagcttatccaccgatcaaagtcaaagatgtggcacccaagtgtaggcaaattatgatccacccgtggataggcgatcgctaatctaactgggacgccagaccccctggggacaccccaaaatgcataagtcaaagaaccctggaccaagaaaaaggaagaccataacagagttataggttagatacaatgttaagcgcaagttgaagacccagaaggtgcttgacaatcccggggcacgtagcag

SEQ ID NO: 523447 - DNA, 473 bp, Homo sapiens
cccatttcctcaccaggggcttaaagccatggggccccgagaccctttctttaggtgccaagccctggaaggaacctttaaaacagggattacgcagaggaaactccagttcccccagtcctgccatggtgctacccttacggacagggatggaaacagggcagccaagtttgccaggacctgaatagcgggcccaagaatggccttcctcttaagtcatgccaaagccttcctgcccaattggaaacagttgctggcaggtgaacacgacctgcgtggacctcctggcagttgccatggttgttgtaccccaacccatcccccttagggagacatgggctcagtcccattgcttgtgccacagccacaaagatgccatgggtctctagcctgatatccgtggcttggcagggtcagcacccctgggggatccaagccatggtcagaggaaagtgttggcaggctcgcacagc

SEQ ID NO: 523448 - DNA, 297 bp, Homo sapiens
  misc_feature (3)..(3): n is a, c, g, or t
ggnattggcatctactccaacgctgatcgtaaccctggggattggcttcgctgcattactctcctctcttcgctctctctctgctagtcctgtcaaactcctctacgaatatcagcaggggttctcctcctttccacaacctcccatccttccactttccagtcctctcttcccatatatatcatagatggacctggtttgtgggtcactaatacacttcataatgcctggtgaacaaggttaaacagtcgttccgcctgtgacgttgagctctgggtctctgtcgtcgttggctgt

SEQ ID NO: 523449 - DNA, 619 bp, Homo sapiens
tacgaacgtcgaggtcggtacccgcattggagcaacactcatggcctctagccttgaaaggggccgccattatggggtcgtttgttcgttgtgtagaccaactatgctgagatgccgacacccagtagggcgaggcaatcggcccatagaagaggtagtatagatgagctctttgctccctccctcccactaacttcaaagatttgctctccatctccttaggcaaagttccttggccttttgtcttatttgggtgaccccctcgaaggtatcaccagtccatttgcatccaatcgtgcatcttgacggagagcggtctcatatgctatggtggtcaacgtgaactagtatttatgtgtagagaacagtggctgtttgtcaggaaaggtgtgccaaaacaaagagtacggccggccctggaaatgcatcagcaaaatccatttccccggtgcactcattctgagcttccttccttcatttctgtcattactgctgagaactggactgtgcccagtatgactttcccttccttgccctcttcttgctgccagggtctgcaggttagccaccgtcccggcccagtctgagacctgggattatcacagaatgggggtggcag

SEQ ID NO: 523450 - DNA, 1626 bp, Homo sapiens
tggtggaaaaaggacgctttattggggaagcaaatcttggctgcccagggaccaaacaggccacccaaggggcatcttaccacttcgtacctccaaaagaaccacgaggaagtgtttggctaattaaaacactcgaggtgggaaacgagggaattccctctgtgggcaactcccccaaccctcatcccttttcgagggaatgtgaagaaatctcccgaaccatttctccgtggagtcaccagccagtggtgtctcaaatataacagaatatacacgccccctctcgagcggcgtgtgcctatctcgcgtggttctctatatataaagaacaccattttttctttatagacatattttgtgtgacagttcttctcattgtgtggtatactgttctcattctctctcacagtgtatctctcttttcagagcgcgcccactcagagacacaccaggctatctctgtgtgtcacacagacagtgtggcctgtgtgagagtgtgtcacgagacaccacccacagaacagagagaggtccactcttctatagcgccccagtgacactcgagagactcgacgtacagagtgggtgtctcacaatctctactatcacgcacaagagagcatcatctcccagtgcgtgtgtgcgcgtgaccctctgtagaaaaaagaaatcgccggccatatctatctcgagactctatattcaacaatctccaagggacaagagggggagcaaacactcaaaaaatctataatcctgtgggtaccaacgtagcggggcccctgtgggtcaccgatggtacatcacagggtggccgactgggccactccccaaaagacggattctctacattaactacccggggatgttgagggggggagccccaagttgtaatataaacacctattacacccaaccattattcttttccccccctttaagaaacatatcaaagaatgtcgcaaactcccaaaaagcgggtcgatgtcaccaagacccaagagacttcccaaaccaatggttggtgtcccccgcataggcaaactattcctacccatcctacaacgcaaaccacaacgacatttcgtggagagtccaattcattcctttcagtagagcgcccccacattggggggtggtacgaaatatttacatatccacaaagtaatacaaccgccgagattgcaggccacggggaggctcaatggtttatcatataagacaaaaacctccggggaaacaaaattcccgcgcggcaaacgcaaagatgttgggggagccccacaaacaacccttaagaaggaacaacacccagtgaaaacacacaaggttcaagaacaggcaacaacgaccgaaactgctacacagaaaaaaaggggctgaacagcattcgggatacacacaccggctagggaggacacacgaaggagagtttaaccatgtggccccggggtgaacccacaagagaaaaatgacgccgccgtaggagaggcgtcaacacccacattcgcaaaaataacaggaggagcaggcgctaaagatacacacaccgaagattcacgaaatcccgcaatcgagggagtcaaccaccccaaatatatgatgagatcaacgggaggcgacgaa

SEQ ID NO: 523451 - DNA, 764 bp, Homo sapiens
tcaggggagacacttctttaattataggaagggaggtcttccctacgggcgccggctcctgccaaaggtcggggtgacagcaggatcaaaagcacggtctctcacacacagggggagtgtggaggagtggctctcccgcagccctctttagaaaagcccgaggagttctcctcttatatttcagagagaagaagggcattctcttatacaagaacattcatcccatatacagttcgctcactctccaacctacgagggctcgagggaagacgacctctgggatatcacaataggatattattattttatcgctttataactctcattattttataagaaatctcagcctcttctccacacctataagaattagaacacaataagaaattaacaaataattgtgggtccgtgtaaagctaatagtatagaaacgtttcacaagagtgtctataaaaacatattctctccaataacagagtggacacaagaggggctttgtgggtgatccttgtgtggggccaacagacaagaaccccaaaaactcagcggcgtgaagaagaaaagtagcgcccatgtggcgcgtgtgatgagtccggggaagtgtgagtgacgtggaaggcaacatctcatgtgggcatacagaagcgggtgtgctaaagagaacaagagatcacatttcctcccactttcagccgggaaagtccaagctcttcctctgggctaaagaaatctaaccttcgggatctccagagagccttaggcgg

SEQ ID NO: 523452 - DNA, 217 bp, Homo sapiens
ccaagtggggcccctggaaattaatttttactccttggggcccccctttttttgggggttgccctgctccgtttttccccaaaaagccctggttttttcaaggccccccccgttttcctgagtgccctgggaaatttgggtataggtcaggcttggccccctttttccccggaaagtattaatggttcccagtccaataaaaggccctccagtggga

SEQ ID NO: 523453 - DNA, 799 bp, Homo sapiens
tgagactggtccaccatatgctctgtggtaaatttctccccaaaattttgtattactcatttggcttaaacccactaacacccgtggttgtgcatattcccggacgcgtctttttggacacaataggtggtcgggcatcttcatatgtttaccccccgcacaagttgtccttttcttcagcccttctttccatccattgctttcaatggggaacacttttcccatttcataaccctcctaaatgatagtgtttcccaatagagacatggtgacgcccccccccgttcacaagtcgttgtgaatcccgtctcccttaatacatcttcaactgctacaagtttctgtataacacacaaattttttataccacgcatcagagagccaatgctccccatatttcaccccgatactcccccccgagctaaaagtctatttgtactcctacacaccaacaggcgccttaatcactctttctaaataaggggccactggttgcgcttcacaaggcataacagcactggcacccctcacccctccgtggatgaataaattattgcatgaaccttggcaacctatttaccttctttccacacgaagcatgcttccaattcttaccaactattacaagacaagttcttaattcgtcttacagttgttcaataaacgagccgctcatgtcaatagccacctgcagcatctctgcgcaaacatgacagactcatagatgcttttcgtcgtacaaagcatccgtctcatgaccacaaccccaatcgaaaaacaattctacaaccacaaaaca

SEQ ID NO: 523454 - DNA, 288 bp, Homo sapiens
agcgacgtgttcatgaaaagctcactgctgcccagcgggttcttaaggagtcagtgtctatgtatcatccattactctgggaatctactgtgaatcctgtctgttttttctggagccgttcacatagagtagaatgtgggatttaccgtgaacgtttccttcctcccccgtatctggcggctgtcacttcgccaccgtgctagaatactgttgtgttgtaagatgactaattttaaaagaacctgccctgaaaagttcttagaaacgcaatgaaagggagtctcctcc

SEQ ID NO: 523455 - DNA, 145 bp, Homo sapiens
agttctattatcttctccttcgttccttctccttcttttcttcttccttctccttcctctcctcctccttcgttctttttctttcttccttcttccgtctccttctggtaggtatactaaggacgggtaggtctgatgaaggacg

SEQ ID NO: 523456 - DNA, 324 bp, Homo sapiens
gcgtcgacgtcattataacgatgatgaaaatggtgtttctttttaagctataggtttattcttgttttattttttattaaacagatgattttcgctctgtttctcagactggggtgcagtggcatgattatagttcactgtaacgatgaactcctgggctcaagtgttcctcacaccctagcctcccaagtagctgggactacaggtgtgtgccaccacacctgggtaattttttattgtttgtggagatgaggtcttgttctattgcccaggctggtctcgaacttctggccttaaatgatcctcgtagacacccacctacaa

SEQ ID NO: 523457 - DNA, 343 bp, Homo sapiens
cacatggctgctacagtcctctattaagcaatgtgccacagcaggggtgcctgacccctgggccatggacatgtactggtctgtggcctgttaggaactgggccacaaagcaggaggtgaatggtgggtaacaattgaagcttcgtctgtatttctggctgctccccattgcttgcattgctgcctgagctctgcctcctgtcaaatcagcagcatcattagattcttacaggagcatgaaccctgttgtgaattgcacacacgagggatccaggttgcatattccttatgagaatctaattcctgatgatttgggggggaacagtttcatcccaagaccatt

SEQ ID NO: 523458 - DNA, 972 bp, Homo sapiens
ggaagtaatgaaacgtgaatgtgtgagccccaccacaccacagtgagcctgggcctgccaatggtggctgttaccatgctatgcatgcatgcatgcatgcatgcatgcatgcatccccatgtgctgagaaatgtccccaccaccaatgtccacatctctgtgcacggaatgacaatgacggaccaaggaccatgccatgatggcagcatgccttgagtccatgctcatgatgtcccagccagatggcagcctcctgctgccatgctccctgcgggaacctgtggctagacgatgcaaactgaacgatggacgatgcgccatgaggtagcgaccgcatggactgtggcctgcaaacgtccgggtggagcagcggctacttctctctggagcaagaccaaacaggcacttgaaggctgaagaacagcatgctgcccccgtcgcatctcccctcccacccccagcaccccgccaaacacacggacgatcaccaggctgactctgaccagctccgacgcgacctcggacatcgacaagcgcacagacacactggcagaccaatgcccgatgcgcgacctcaccatccagccaccacacgcccacgccccgccagcgcaccaaagacgcgacggtacccttaacgcacacccggcccgaccctgctcgaaatccccccaccacggcctggcccgacctcacaccacctactcacggacaccgccccagccggccccacaaccctgcctccgaccttcgcccgcaaccaacagcctgcaccatcactaccccccacccccctccttcctcaccccccccgacttgcgctcggtcgaacctgaactcgccccgccttcctcccactgtccccacaactctcccacgtcagacaaccaccgccccccacatcacccacaagccctcccccgtccaccctctgcgcctaacaccatctgagtccgccggacattgcacccg

SEQ ID NO: 523459 - DNA, 850 bp, Homo sapiens
  misc_feature (444)..(444): n is a, c, g, or t
agcggagggggccgcgtagcggacatggcgggctcccggctcccgcggcagctcttcctccagggcgtggcggccgtcttcatgtttgctttcgcttccctctacaacgcaaatcccaggcctgtatggccccgagggcatcctacctgtcaaggaggacgctgctggtcctcagggacaatggggcgctggcagcagctgtgggagaccccgacgctgctgtgggaagcgccgagactggaggctggacactggtccagaggacctgagatgactgcatgacgccgtgactgagggtgcacatagatgagcctctagggacgcccgtgcttgcatggagacccagcgtgacagaccagaccctgtcagtcatacattgcgtgcgtttcggagcacagacgctacacgtagtacagcgctgccgagggtggggccagggatgtnaccattgtgattgtccgatgtgggagctctcctggcttgctagatgactgggacttccatggcgcgtggctgggtggagtccgcagcttgaaggccaagccttccctagccggcaaggcaggccccaccaagggcgagtgcagtgcgagggagcccatgtcccaacggatagaccatccccgttctgagctggtgcagatggctgcttgttccagcactcgatgtacgccgtcaggcgtggtcaagctgaccagccagctgacctgcagtggtgggggctcagctgacctcaactctaccactactgagacccagttgcctagccacgcccgccgtctggttctgacaacagctgccggtctggctgcacaagctcagcagtggtggacaccttcctaattgagag

SEQ ID NO: 523460 - DNA, 203 bp, Homo sapiens
  misc_feature (79)..(79): n is a, c, g, or t
  misc_feature (163)..(163): n is a, c, g, or t
  misc_feature (201)..(202): n is a, c, g, or t
cgaggatccaaataccatgggagtcaagcatgcctcgatagccacagatttacaagaattacctacagtttgcttcttngaatcgacatgcaaatctgcttaaggattctcacattcaggacagagaacaaattttttaatgaatccatccaacaggtcttgnagtttattcgcctcatgagatccattgataatggaacnnt

SEQ ID NO: 523461 - DNA, 248 bp, Homo sapiens
gggaaaacccggacgatcatcgcagaaaataaaactgagttaagggcacattactgacatgtatagagtcagccaatcagcaacagactgctgatagttctgtccccaccttcacccccacctcccctgtggcttatagaaactctaacttatcctccaagactctgctcaggaatcacctctagaaagctctccttgccctccagccttccaagttgaattagggtggagacaagggtagagccgag

SEQ ID NO: 523462 - DNA, 152 bp, Homo sapiens
tgaggggggtggtactgtatggatgctatgattcattctgctttaaacaattgcaaggaatgaagtgcatcgacttgtcagtggttcttgcgggtatatacataggtgtgaaagtcatgggcatgttcagtaattttgttttaagcttatga

SEQ ID NO: 523463 - DNA, 883 bp, Homo sapiens
cgtgacagtttgcgcagtgtttgctatggtgaaataggttgtgtatagtctcgttagctctattgtgtgtttgttgtgtccgtgtgaattgttatggtagtacttgctctgtacgtctgtggtggtgatcttgtgtgtttgtttgctcgtgttctatatgatagtggttggcgtcgctagtcgacgatgcctcggggacggtcgtggggcacgccgtccgccttcgggtgttaccgccccgctgggtgtttatcgcgccctctattggctgttttttttccccccaccccattgtccgccccccgaatcccttgtgcgaagaaacggctcccccaattttcttttgaacaaacaccaaaaccaagtttttaccagtgccccgggtcccccaccaaaaaattccggcgttttctgcccccttctccctggcggccctacattagcttccattagcgcacaccttatttccgcaacattccggaaattacgcggttccccctttgaagcccataaccctcctgtgctgcagtaaacaggtaatattttaaatgtattctcttctctggaaaaatccacaacaagtgcgcgttaaaattacccacagggaggtcaacacctttcaataatctctatacgctagtgccacaaacatagttttgttcttttatttaaaatatgattatataaaacgtttctcctctcttttgtgttcccaaataaacagccattggtgtgaatacttccacgatccaggaagaaaacctttgcaataaatatcagtttttagaccccaaaaaaagataattgcaccctccctccccccctcaacaaacaatggggaaaaaaaaaccccccaaaattgggtaatcccccccacaaaaaa

SEQ ID NO: 523464 - DNA, 422 bp, Homo sapiens
tgcattataaataaaattgaatacgttcccacactctacaagggggacgacatttacgtccagagaaccataaataactcgaaacaccctgaccaccttcgtcctgtggaccttgacgccgtttcatcctcttctttacccctcctgagcccaccccctcctgcagggccgaccctacttcagaccaccacccagcattcaaatcctccactgacgtaggaggtcgtagagttgaggcagacagatgacacactctgaagccgcctggtaatccttactctaggcactctaggaaggtagaagaacttcagcggaaatcccaccgacgctccatctcccaacccccaaccacccgacagtgcctcgctgatagctgtagcggatcatacaagacacttgtgtttattttaactaaatgacag

SEQ ID NO: 523465 - DNA, 227 bp, Homo sapiens
agaagcgccgaaggttctcctctaggatatatactatggactctgagaacttgatcatagagataaacctctactcatatatcatctaccaggaacatcactctcagtttgtccacctcctgagagagccacactttctcctggatccaataggaggccataggctggcagttggagtccagctggcctgccagggcctcctggagcactttggtctctgtctccgc

SEQ ID NO: 523466 - DNA, 507 bp, Homo sapiens
  misc_feature (393)..(393): n is a, c, g, or t
  misc_feature (419)..(419): n is a, c, g, or t
ttgtcccagctggtctcgaacccctgggctcaagcaatccacccatcgtggcctcctgcagtgctggggttataggcatgagccaccttggcctgcataattcttttttttttttttttttgagatggagtttcgctcttgtcgctcaggctggagtgcaatggtgcgatctcggctcaccgcaacctccacctcctggattcaagcaattctcctgcctcagcctcccaagtagctgggattacaggtgtgcaccaccatgcctagctaattttgtatttttagtagagacggggtttctccatgttggtcaggctggtctcgaactcctgacctcaagtgatctgtccacctcggcctcccagagtgctgggattacaggcgtgagcaacntgtttcccagcaggaatttctttttnatagtattggataaagtttggtgtttttacagaggagaagcaatgggtcttagctctttctctattatgttatcatcctccctttttt

SEQ ID NO: 523467 - DNA, 412 bp, Homo sapiens
tacaaatatacctaattgatattttaaacttttgtttgtgtgtgtgtgtgtgtgtgtgtgtgtgtgtgtgtgtgtgtgtttttcttgagacggagtctcgctctttcgcccaggctggagtccgtggcacaatctcggctcactgcaacctccgcctcccgagttcaagcaattctcctgtagtcccagcactttgggaggcgaggcgacaggattgctggagcccaagagtttgaaaccagcctgggcaatatagcgagaccctgtctccacaaaagaaaaatttttttaattagcctggaggcgtggtgcgcacctgtagtcccagctgcttgggagtctggaggatcacttgagcagggagtttgaggccacagtgagctatgatcgcgccactgcactccatccagcc

SEQ ID NO: 523468 - DNA, 343 bp, Homo sapiens
  misc_feature (311)..(311): n is a, c, g, or t
gtactataactgatctatttgaagaacaaaattgttaattggaagattaaagagaatatttcacggggataaaaggacaaggaaatagcaaatataaaagaaaaattgacagctatcaaatacagaaataaaggtattgacatccagaagataggaatctaagaagggagataattttttttaagtggagaataaatacttaaagggataaaagggatagttttctagaattaaagcgagagagaaaagagagaggtgagaaatttcagattaaaaggagttcagagtcaagagagaagaaagaaacacancatacgttaaagttaaagtacaacctgccggt

SEQ ID NO: 523469 - DNA, 279 bp, Homo sapiens
acggttagtatccgtcgctctagtggtggtgcaccgggcacacagtaggcactcaataaatatgtatggataaaaaaaaaaaaaaaagggtaggaaaaaaaaaaggaaaggaaattaaaattaacaccccttgggataaaatgggggaggcttctcagaaggatatacgggtgagaagcaaccagggggcacacacagggttaacaggtttagggttttaaaaacccaggtaccacacaaagtgtataaacgcccgggcaaggcaagtcaccaacggga

SEQ ID NO: 523470 - DNA, 116 bp, Homo sapiens
gatgcttacctaccacggacgtctccaccagaaaaccatcgccaacgtccgtgcgactcagcttgtgaacttacaatacctgtgtttaaaaagctgctttacatggactgtctgtc

SEQ ID NO: 523471 - DNA, 639 bp, Homo sapiens
aatctaagggtaaatggattacctaaaaaaaaaaaaaaaaaaaaaaaaaaaaaaaaaaaaaaaaaaaaaaaaaaaaaaaaaaaaaccttggggccggcctgggccaggcggcctttggattggggcaggttttggctggcggccgaatttggggctcattggcccatttccccttatggggggcggaataccatttaatggcccgaggtttaacacggccgggctgggaaaaccctgggggttccccacttaatcggcttggcggaaaatccccttttccccggcgggggaatttgcaaaggggccggaccggatggcctttccaaccagttggcaaccctgaagggcaatggaaattggaaggcgttaatatttggttaaattcggggtaaaactttggttaatcaagctaatttttaacccaatggcccgaatcgggtaaattcctttataatccaagggattagccggggatggggtggagggttgtccaggttggaaccaggaaccccttattaaggaacgggggctcaaacggcaaggggccttttgggggcccggttccggaaggcccttaattggaaccccttaggggggcccccctttaagagtttgcccggaaaggcccggtaaccgtct

SEQ ID NO: 523472 - DNA, 1326 bp, Homo sapiens
gatttgcccgtactcagctcgtgtatgtggtttgcggacctggatcaacgtcattcaggcagcagcttccagaagctcttgggaagataatcaagccaaacacttgtaattcgattgggggttgcaaggaattatttctttgctatctctagcaagcccctggaggactcctcaagagctcttcgtcagcactgtgtgccctccgttgagttacgcacagatctatcgtaggattcgatcgttgactctggcggctcgggttcctagaatagcgccctggtaggttcccgaggcgtcttagcgaatgaagctaatacaggaggttcccaaggcatcagcttccttgcctatgtggacagtgcttcttgatagctccttattcgcagtcttgcagatgcggtgacaacgcacggaatacaagcgtcacaaaggcaaggcaactagatttcaagcccagctggctctacgaaagggcaaacctcttcaagctggacaaggcgagctgcacttaaagcgtaatctaatgcataaagcccggtgctcacgtacctgtttacttacacatcgtcctgtgtgtaaatgcatacgcattcgggaacggtatgaagggccttgcaaataccagaggtcttggaataccacagagcccaagtataaattacaacctaattcacacgacccgaacttgcgcggttcggaatgcccccagtagcgctaggacgatcgcaagtcgctaaatggatcgaagattaacagtcccagcgtcatgtccaagcctgtgggagccctttagaattgttcttgcacgttaataccttggtgcgcaagaagttccccgtaatgaactcagacaatagggtcagtggggacctttacttacaatgacccatagaggttcgaaggacttcaggaaaaacggctgtctaccatgcaaaggcttccttctgtccattgaaggatactggcttggcttggacatgtccacgagagggaacacccccaggggtcattaatgccacgagaaggcaacggcgtcacttttacatggcaactttctttggcgaagagtcaaaccccccgtgaagagagttcacgcaagtacccgtctaaaaactccagttaagcacgaggggacagtgtggcggagacttgttcccatgtggcgtcgtcgacaatagaggtggggactgcaacacatggttgacactcatccttgccgggccatacattcaggagagaaaaacccggatcttgggaagatcacccagtgtagaaggtatggctgtggtacccgggacgagctcctaactgacaccaagtgtcaaa

SEQ ID NO: 523473 - DNA, 239 bp, Homo sapiens
aatgagacacaacattattttttaacattttgaaacgagattgcaatggttaagagcctgaacgaattcctatcctggctctatcatttgctagttgggggatgtgggcgaattaccttacccctttgagtctcactccctcatctgttacagtgagaataataataatcctagaatctgccgcatggctgtgattgagaacatgcgtgtcaaacacagcacattgctggctgtacatt

SEQ ID NO: 523474 - DNA, 144 bp, Homo sapiens
agttgggtggtttggtggggaagaagggttgattttttttttttaatagagccagggtcttactatgttgcccgggctggtattgacctccgggcctcaaacgatactcctacctatctccccttttatactaatattttttta

SEQ ID NO: 523475 - DNA, 375 bp, Homo sapiens
gtgatgggcgacgtgtggcacgtgctgaagacacactgttcttcctcgagggatattcaacatggcgcctatttcccagacctcagcccgagtgtcagccactgtacagttcggaaacagaactgtataggagaagagcggagagataagggccagtaaagggctgtgtgcccagcctatggcccatgtactttctcccaggccacaaatacgcttacctgactggacaatgaaaggtggacttgcagcactagaatggcactgtggaaaaatgaccagggacctctctgccactctctgtgcttgcttaagctctagtaacatctctttgaagcttcaatcccctggactagggacccctaacctcaaatccca

SEQ ID NO: 523476 - DNA, 231 bp, Homo sapiens
cggttgatccagaaaataaccaagagacagaaacggtgcgctacagaagccgctgacaccatggaggtgtgttattggcaagaaaagagacgtgacggtgcactgaagctctagaggaattaatcacaatagacaagagaaagaatggagaacgtgaaacaagaagatattgtgagaaagccaggatggtcagaaagatggcaaaagaaagagggaaccgtcgatcgaggg

SEQ ID NO: 523477 - DNA, 309 bp, Homo sapiens
gagggttcagctgtctcttacttttaaccagtgacacagcaagacgagaagaccctatggagctttaatttattaatgcaaacagtacctaacaaacccacaggtcctaaactaccaaacctgcattaaaaatttcggttggggcgactcggagcagacccaaccctcgagcagtacatgctaagacttcaccagtcaaagcgacctactatactcaattgaccaatacttgccacggacagttacctaggtatacagcgcatcatttcagagtccatatcacatgggttacgcctcgatgtggatcag

SEQ ID NO: 523478 - DNA, 169 bp, Homo sapiens
  misc_feature (61)..(61): n is a, c, g, or t
  misc_feature (85)..(85): n is a, c, g, or t
  misc_feature (163)..(163): n is a, c, g, or t
agacttgatgttgctctgctcagaactcgaattaatgaagatatgcccacattgtgtgganccctgaaacatcaaaggctggcancccgctgacctgccagccccttgcttcccaccgcacgcggtggccagccctattcaatcccgaccttttcccctgtanccgcaa

SEQ ID NO: 523479 - DNA, 126 bp, Homo sapiens
catgttggtggtgatcttgttgaagtgttgggtgatcctgatcatggtgggatgtatctgtcttctgggcagcatctccctgtgtgtgatccatcagccagtggagacatgggaccatggcagcac

SEQ ID NO: 523480 - DNA, 138 bp, Homo sapiens
aaaacatgccacctcaaggctgggcgcggtggctcacacctgtaatcccagagtgctgcaattaacaggcatgagcactgcacctgtcctaaaaaaaaacacaaaaaattttttttaaagagagggtcttgttctgtc

SEQ ID NO: 523481 - DNA, 217 bp, Homo sapiens
agtgctgatggtacgcacccgtcttcctgtacaagcctttcctcagcatcacaggtacaccaccccgtcttcttgtcaccggagcttcctcagtatccacaggtcacgccaccccgtcttcctgtcaccgacacttcctcagcatccacaggtgacacaacccgtcttcctgtcacggacacttcctcagcacccacaggtcaggccacccctcttc

SEQ ID NO: 523482 - DNA, 405 bp, Homo sapiens
gctcgaacgaccagctatctgagtagctgggactacaggcgcgtgcccctatacctggccaaattttttttgtgtgtatttcttttagtagagtcagggttttactatgttggccaggctggtatcaaactcctgatctcaagtgatccgctggcctcggcgtcccaaagtgctgggattacgggcctgagccacagcgcccagcccattttggattttggattttcagattacggatgctcagtctgtagttggaatcaatgcagtctgtagccttttcagactggtttctttcatttagtaatacacatgtaagtttcctctgtgtcttttaatgacttgatagtttatttctttttggtgttgaataatattctattgtctagatgtaccacaatttattta

SEQ ID NO: 523483 - DNA, 317 bp, Homo sapiens
tcagtgaatgtctggcacattgcaatcctcaaacatgtggttatcttggtggtatgggcataatcagtgacttgtactttcagcaatagcattggagcaagttttatcagcaagcaatatttccagttaataaggttctcaaaaatcatgtagggattaacacttgctgattgtaaagattgaacctcaagttcccgtgtagccctttagataagtggctatagtgggtatttagttatagaatgctagcacgtgctgtggtgcgtgggcaatatttcggaattttattaaaattaaaaagttgaacgtgcacagtc

SEQ ID NO: 523484 - DNA, 278 bp, Homo sapiens
  misc_feature (249)..(249): n is a, c, g, or t
atcaaagattcaacacgagaacacaaccggctaagagacgaggtttcatcatgttgcccaggttgaccttgaacttctgagcatcaagtggtccttatgtcttgaacttccaaagtgctgagaatacaggcatgaactaccccaactgggatatgtcataggtttgagagtttgaattctaaccttgggacttttggtaacttatttataatattctaggaatatacttttattaggatgagtagaaanttcatttagacagagattattataaattt

SEQ ID NO: 523485 - DNA, 651 bp, Homo sapiens
cgccttaattgaaatgtgtttggaggcggggatcagcagaggatgtcatgacagtgctcacgccactaacagagaaggattatgaggggtagaagagggtgccgcgggccttacaggcccataagatggcctggcctttccttgaaccagtagaccctaatgatgcaccagattattatggtgttattaaggaacctatggaccttgccaccatggaagaaagagtacaaagacgataatatgaaaagctgacggcaggggtggcagatcatgaccaaaatttttgctcaactgtcgttactacaatccaagtgactccccattttaccagtgtgcagaagttctcgaatcattcttcgtacagaaatggcacaggcttcaaagctagcaggtctcataacaacaaactgcagtctcacagcttcttcaccgttcagcgtgttaacctaacataaaacacagcaagaatctggtagtctgaactattttaaattaaggagccagatgtttgcagtcaggctatcctgacaagacttgacctaaacttcgttttcattggtcatcccagtccaattatatgctaggccaatttttgtccaacgaacaagcaaaacgcaaagcaacgacaccattatctgatcaagatcagat

SEQ ID NO: 523486 - DNA, 256 bp, Homo sapiens
cccagcttcgcctggacaccgtcaccatgcgggctgtgcggagacacctggtcccccagcactcagcccctggccgaggtgccgcctgctagtggctgagcgacgatggctactggactgactatgatgcctgcgtctgcgactatctggagcagcaggtggccagtgacaaccagctcgcgcgcttgtccctcctggggtacatctacactgtcaactacaccacccacactgcagaccaacaagactaccagcg

SEQ ID NO: 523487 - DNA, 419 bp, Homo sapiens
tgcatagctttcagtccacgttaaataaaaggtaacggggactaggtttctccgtttgccgagactcctcaggcacattcactatacatagtaagtatattggtgagtggagccatactagtattttcacgctagtagcctctgtgccatgtatatgagaggagagagtaggcactgtatacgtcttcaaaggaaaaagcagtcacagttgctagggatttccacatacactacttgtgcctaaggcttactctcgaatgagaggatgcctagtaaagcatagcctgttctataccccaagttgtccagagtacctcataaagcccttcaaactacaatttcgccaaccttccatttttggtgggaacccatattcacacctcctccaccagacgctgctacagtgtaagggaaagctt

SEQ ID NO: 523488 - DNA, 279 bp, Homo sapiens
gaatccccgcgaccagaacaggcagcaataaatacaatagcccttccacacattttcacaggtggaccctgaggtatctgctgcccttactgctgaacttcagagagagccgacagcagcgtatgatcaaagacaaaggctggacgagcacagcactcaccagcagtcagccagctcatctgagccaaacaattctttacttcatctaaaggcagcactgaaaggagtgaaaacagaagacgttctagcaagggataacaaagcagaggagaacgctga

SEQ ID NO: 523489 - DNA, 689 bp, Homo sapiens
ttgtgtaagcacacggtctcgttctcccccacgccgggtaggttttccttaccgtttgaatggtgtgtttgggccagatagttcaagtttctctgggcggctcctgggcatagatcaattttgacaggtccgcccgcgcggagtcaacacatcctggcgtttatccatcctctccacgcgcggtggtagtcttccacgcggtggaatgttccgcgcgttgcctctcacgctagttggcctggtagacgccccttctgtgcgccccgctgttgctcgttctctgtcctcctgtacagcccactgcttattgggggtcgctccaccctctgttcggaattgcgtgcccacggtgagtatccagcgttcgtcttgtgccgcgcgtggcacgcgcccactttgtctccgctcaccccccggtgtgatagagtagaacgcctctgggtgtctcacccgccatccgcctcccccagcagattttgagtcgccccgctttgtcttgttagcttcgcacacattgtttgtcacgcacacaggaatgtttcccgccccccgggagtctgagaaggtattgtctgtggaggtcgatggtctgagacgagttgttcatgcgtctaatgggcggcgccccattgtgtctccacgcttgattagaaaatgctcctctcgcccacccccgatcatgtcagaga

SEQ ID NO: 523490 - DNA, 146 bp, Homo sapiens
tgatagtgtaatatcttgtatggtgacagatggtaactagacttgtggtgatcattttgaaatgtatagaaatatcaaaccactatgttgtgtaacaagaaactaacatagacattgtagggtccatatatagcttcaaacgacaa

SEQ ID NO: 523491 - DNA, 164 bp, Homo sapiens
  misc_feature (81)..(81): n is a, c, g, or t
gcgaccacactactactactcttcttctccttctccttctagaaccgtgtgggatactcgccttggcatcacccaggtttngcccatccgtcaacccaacacccactctcatcacacactccaccacacacaggcaacactgtcagctgcacaccccaccagca

SEQ ID NO: 523492 - DNA, 168 bp, Homo sapiens
cttgaggatcccctatacaccgtacagcacgcagcagcagcagcagcagcagcagcagcagcagcacgagtaactctgacttaggaatagagaccgccagagagcaatgtgatcaatgaacggaacatctggagtgtgcgtgcttcttcagagggacgggtggtatag

SEQ ID NO: 523493 - DNA, 349 bp, Homo sapiens
ggccttaattctcccaattctgtgaagggtgagagaagtaaggaagctgcagaagaacagttggaagctaggaaaggttggcgtgtgaggtttaaggaaagacaccatctctatagcctaaaagtgcaatgtgaaaccacaagtgctgacacagaagctgcagcaagttatccagatatctagctaaataattggtgaagatgactacacgaaaccacagattttccatgtagttgaacttaggacttccttagaaaggagaagtcattgcctggctctaaagcttccaagggcagattgactctctcagtagtggctatgcagttggtgactttaagttgaagccatt

SEQ ID NO: 523494 - DNA, 1068 bp, Homo sapiens
ctgctggtgaaaagcttctccgagagtggaatcatactatgaaacttattaattcatacgatgagtggatagcccagatggaaccagatgggactgttgctgacatcagttggagatacgatctatggggtcgagacgcgaattcttctacacgaaccacgagagaaaaatgttgggagctacgtgaactgctgtatattcatggattgagtacattgccgagctaggagaactatcatcagtatatttattggcatgcttgatctctgctacaggcatgcctagaaaatttattcgctgaaatttattacgtgaatgccacaaggcacgggctaatgtttgatatttgttctcctggaaactcgcttacataccgtgaaaatcggaagcgtgctatcatggccttggcggagtttcgatagagagaaaattgacttaaggtccacgcgcgctgggagcccaatttccctataaactttcaagaaatctgtgcttggagcaacccaggtaggccatcttgatttttagcacagggaacagtttccacagtttagacccgaatgaagaagttcttaagatagaaattcttaggtgagcaaagcccatgggtggtttccgctaagaagggcttaactgtcgcttaccccagaatgggaccaattggcattgtgtttcagtgcggccaggaaccacgtttcgtagttttttccttattttgggccgaagggcttttcccaacttattccggttttcggggcgaattccagacgggtcaataggggggaaatccccacaggtgtgtggcaaccgcagacacttggaaacagtacccttatccttctcccctgtaagaggggagactcagattggaaaccccctcttaattgcgttagcttaaccctctagacagcggaaaagggatttcctcctcaatttgtgaataagccaaaagcgtttcccactttgtcggggcgttcttataccacatgttgacatgaaaacgcgcgtgtttaacccggagcttgcggctttaacacaagttgtttcccccccttaaagagctcttta

SEQ ID NO: 523495 - DNA, 3788 bp, Homo sapiens
gcggccgctcggcggccgggggtcccttcggtggggccgcggctccccgcccgccgcccccgcgcgtccattcgctttgtgtcccgcgcgcggccgggccccccgcgcactctcagccctgcgccccgcggcccggcgggcggctcccggcgcggccccagcagcccgcgccggcattgtgtggacgcgcccggccgcgagcgcgcgcgcgggccctgccgagcgcccccggccccgtccgctccggccgcggcgcccgcgcccgccgcccccgccgccctcgccgcgcggcccccggcccggcccggcccgacccgggcagcgcagcggcggggcgagcggcggcgcggcaacatggcgacggtgcccgtgtactgcgtctgccggctgccctacgacgttacccgctttatgatcgagtgcgatgcctgcaaggactggttccacggcagctgtgttggggtggaagaggaagaggcaccagacatcgacatttaccactgcccgaactgcgagaaaacccatggcaagtccacactcaagaaaaagcggacttggcacaaacacggccctgggccaacaccggacgtgaaaccagtgcagaatggcagtcagctgttcatcaaggagctgcggagccgaaccttccccagtgctgaagacgtggtgtcccgtgtgccaggtagccagctcaccgtgggctacatggaggagcatggcttcactgagcccatccttgtccccaagaaagatggcctgggcttagctgtccctgccccaacattctacgtgagtgacgtcgagaactacgtggggccggaacggagtgtggatgtgacagatgtcaccaagcagaaggactgcaagatgaagctgaaggagtttgtggactattactacagcaccaaccgcaagcgggtcctcaacgtcaccaacctcgagttctctgacacccgaatgtccagcttcgtggagccacctgacattgtaaagaaactgtcatgggtagaaaactactggccagatgatgcattgctggccaagcccaaagtgaccaagtactgcctaatctgcgtgaaggacagttacaccgacttccacatcgactctgggggcgcctctgcctggtaccacgtgctcaagggggagaagaccttctatctcatcaggccggcctcggccaacatctccctgtatgagcgctggcggtctgcctctaaccacagcgagatgttctttgctgaccaggtcgacaaatgctacaagtgcatcgtcaagcagggccagaccctcttcatcccctcaggctggatctacgccacactcacccctgtggactgcctggccttcgcgggacatttcctccacagcctgagtgtggagatgcagatgagagcatacgaggtggaaaggaggttgaaacttggcagcctgactcagtttcccaactttgaaactgcgtgctggtacatgggaaagcacctattggaggcgttcaaaggttctcacaagtctgggaagcagctgcccccacatctagtccaaggagctaaaattctcaatggtgctttccgatcgtggacgaagaagcaggctttggcagagcatgaggacgagctcccggagcacttcaaaccttcacagctaatcaaggacctggccaaagagatccggctcagtgagaatgcctccaaagccgtccgaccggaagtgaatactgtcgcctcgtcagatgaggtgtgtgacggggaccgggagaaggaggagcccccgtctcccattgaggccaccccgcctcaatccctcctggagaaagtgtccaaaaaaaagactcccaaaactgtgaagatgcccaagccatccaaaatccccaagcccccgaagccccctaagcccccaaggccccccaaaacgctgaagctcaaagatggaggcaagaagaaagggaagaagtcccgggagtcagcctcacccaccatccccaacctggacctgctcgaagcccacaccaaggaggcactgaccaagatggagccgcccaagaagggcaaggccacaaagagtgtcctgagtgtgcccaacaaagatgtggttcacatgcagaatgatgtggagaggctggaaattcgagagcaaacaaagagcaagtcagaagccaagtggaaatacaagaacagcaaacctgactcgttactgaagatggaggaggagcagaggctggagaagtcgcccctggctgggaacaaggacaagttttccttttctttctccaacagaaaactcctgggctccaaggccctcaggcccccgagcagccctggtgtgttcggcgccttgcagagcttcaaggaggacaaggccaagcccgtgcgcgatgagtatgagtacgtatcagatgatggggagctgaagatagacgagtttcccatcaggaggaagaagagcgcccccaaaagggacttgtccttcttgttagacaagaaggaggctctcctcatgcccacctcgaagccaaagctggattctgcggtgtacaagagcgatgactcctctgacgagggctctctgcacatcgacacggacaccaagccaggcagaaatgccaaagtgaagaaggagagtgggagctccgcggccggcatcctggacctgctgcaggccagcgaggaggttggcgcactcgagtacaaccccaacagccagccccctgcctcccccagcacacaggaagccattcagggaatgctctccatggccaatctgcaggcctctgactcttgcctgcagaccacatggggcacggggcaggccaagggtggctcactggcagcccatggtgcccggaagattggtggtggcaacaaaggcacaggcaagcgcctgctgaagaggactgccaagaacagtgtggatctggaggactacgaggagcaggatcacctggatgcctgcttcaaggactcagactatgtttacccctcactggagtctgacgaagataaccccgtcttcaagtcccggtcaaagaagaggaaaggctcagacgatgctccgtacagccccacagccagggtcggtccatcggtgccaagacaagacaggcctgtgcgtgaggggaccagagtggcctccattgagacggggctggcagctgctgcagccaagctgtcccagcaggaggagcagaaaaacaggaagaagaagaacaccaaaaggaagccggctcctaacactgcctccccctccatctccacctctgcctccgcctccacgggtaccacctccgcctccaccacgccagcctctaccaccccggcctccaccacaccggcctccaccaccccggcctccaccagcacggccagcagccaggcctcgcaggagggcagctcgccagagcccccgcctgagtcgcatagcagcagcctggcggaccatgagtacacagccgctggcaccttcaccggggcccaggctggccgtacctcccagcccatggcccctggggtctttctcacacagaggcggccttccgcatcgtctccaaacaaacaccgctgccaaaggaaaacgtacgaaaaagggcatggcgaccgccaagcagaggcttgggaaaattttgaaaattcatcggaacgggaaactactcctctaagatttggaaagccaggatccttctgatatgctaaggacccccggagccccgctacatcagcccctcccaggacggtggctgtgccgcctggcccggggagggcttgcttcattccgaccaattttccaatcaa

SEQ ID NO: 523496 - DNA, 162 bp, Homo sapiens
aacctgtggtaccctccaggagagtggagtaaggcactaggagggcgtcaacccccaagcagaacacgagtataagtgagtgcgcaagagggtacaggaagaaattttgcgagctgcccacagcaacaacacaacaaccgaacaaacaagcaccacaacacc

SEQ ID NO: 523497 - DNA, 5556 bp, Homo sapiens
gcggccgctcggcggccgggggtcccttcggtggggccgcggctccccgcccgccgcccccgcgcgtccattcgctttgtgtcccgcgcgcggccgggccccccgcgcactctcagccctgcgccccgcggcccggcgggcggctcccggcgcggccccagcagcccgcgccggcattgtgtggacgcgcccggccgcgagcgcgcgcgcgggccctgccgagcgcccccggccccgtccgctccggccgcggcgcccgcgcccgccgcccccgccgccctcgccgcgcggcccccggcccggcccggcccgacccgggcagcgcagcggcggggcgagcggcggcgcggcaacatggcgacggtgcccgtgtactgcgtctgccggctgccctacgacgttacccgctttatgatcgagtgcgatgcctgcaaggactggttccacggcagctgtgttggggtggaagaggaagaggcaccagacatcgacatttaccactgcccgaactgcgagaaaacccatggcaagtccacactcaagaaaaagcggacttggcacaaacacggccctgggccaacaccggacgtgaaaccagtgcagaatggcagtcagctgttcatcaaggagctgcggagccgaaccttccccagtgctgaagacgtggtgtcccgtgtgccaggtagccagctcaccgtgggctacatggaggagcatggcttcactgagcccatccttgtccccaagaaagatggcctgggcttagctgtccctgccccaacattctacgtgagtgacgtcgagaactacgtggggccggaacggagtgtggatgtgacagatgtcaccaagcagaaggactgcaagatgaagctgaaggagtttgtggactattactacagcaccaaccgcaagcgggtcctcaacgtcaccaacctcgagttctctgacacccgaatgtccagcttcgtggagccacctgacattgtaaagaaactgtcatgggtagaaaactactggccagatgatgcattgctggccaagcccaaagtgaccaagtactgcctaatctgcgtgaaggacagttacaccgacttccacatcgactctgggggcgcctctgcctggtaccacgtgctcaagggggagaagaccttctatctcatcaggccggcctcggccaacatctccctgtatgagcgctggcggtctgcctctaaccacagcgagatgttctttgctgaccaggtcgacaaatgctacaagtgcatcgtcaagcagggccagaccctcttcatcccctcaggctggatctacgccacactcacccctgtggactgcctggccttcgcgggacatttcctccacagcctgagtgtggagatgcagatgagagcatacgaggtggaaaggaggttgaaacttggcagcctgactcagtttcccaactttgaaactgcgtgctggtacatgggaaagcacctattggaggcgttcaaaggttctcacaagtctgggaagcagctgcccccacatctagtccaaggagctaaaattctcaatggtgctttccgatcgtggacgaagaagcaggctttggcagagcatgaggacgagctcccggagcacttcaaaccttcacagctaatcaaggacctggccaaagagatccggctcagtgagaatgcctccaaagccgtccgaccggaagtgaatactgtcgcctcgtcagatgaggtgtgtgacggggaccgggagaaggaggagcccccgtctcccattgaggccaccccgcctcaatccctcctggagaaagtgtccaaaaaaaagactcccaaaactgtgaagatgcccaagccatccaaaatccccaagcccccgaagccccctaagcccccaaggccccccaaaacgctgaagctcaaagatggaggcaagaagaaagggaagaagtcccgggagtcagcctcacccaccatccccaacctggacctgctcgaagcccacaccaaggaggcactgaccaagatggagccgcccaagaagggcaaggccacaaagagtgtcctgagtgtgcccaacaaagatgtggttcacatgcagaatgatgtggagaggctggaaattcgagagcaaacaaagagcaagtcagaagccaagtggaaatacaagaacagcaaacctgactcgttactgaagatggaggaggagcagaggctggagaagtcgcccctggctgggaacaaggacaagttttccttttctttctccaacagaaaactcctgggctccaaggccctcaggcccccgagcagccctggtgtgttcggcgccttgcagagcttcaaggaggacaaggccaagcccgtgcgcgatgagtatgagtacgtatcagatgatggggagctgaagatagacgagtttcccatcaggaggaagaagagcgcccccaaaagggacttgtccttcttgttagacaagaaggaggctctcctcatgcccacctcgaagccaaagctggattctgcggtgtacaagagcgatgactcctctgacgagggctctctgcacatcgacacggacaccaagccaggcagaaatgccaaagtgaagaaggagagtgggagctccgcggccggcatcctggacctgctgcaggccagcgaggaggttggcgcactcgagtacaaccccaacagccagccccctgcctcccccagcacacaggaagccattcagggaatgctctccatggccaatctgcaggcctctgactcttgcctgcagaccacatggggcacggggcaggccaagggtggctcactggcagcccatggtgcccggaagattggtggtggcaacaaaggcacaggcaagcgcctgctgaagaggactgccaagaacagtgtggatctggaggactacgaggagcaggatcacctggatgcctgcttcaaggactcagactatgtttacccctcactggagtctgacgaagataaccccgtcttcaagtcccggtcaaagaagaggaaaggctcagacgatgctccgtacagcccacagcaagggtcggcccatcggtgccaagacaggacaggcctgtgcgtgagggtacacgggtggcttccatcgagaccgggctggcggctgctgcagctaagttgtcccagcaggaggagcagaaaagcaagaaaaaaaagagtgccaagaggaagctgactcctaacaccacctccccttccacctccacctccatctctgccggcaccacctccgcctccaccacgccagcctctaccaccccggcctccaccacaccggcctccaccaccccggcctccaccagcacggccagcagccaggcctcgcaggagggcagctcgccagagcccccgcctgagtcgcatagcagcagcctggcggaccatgagtacacagccgctggcaccttcaccggggcccaggctggccgtacctcccagcccatggcccctggggtctttctcacacagaggcggccttccgcatcgtctccaaacaaacaccgctgccaaaggaaaacgtacgaaaaagggcatggcgaccgccaagcagaggcttgggaaaattttgaaaattcatcggaacgggaaactactcctctaagatttggaaagccaggatccttctgctccgtcaggacccccggagccccgcgaaaacatctggctcccaggagggtgccgagctggctcaaccagggagggccttgcctcttcccggtggcattcttcccaacaagcgtctgtgccttcagcgggcaagcgagcccagcgtggcccctcaatttgaaaatggacgtcttttctcaagttgctaagagtgatctgtcccagaaaagcggccctgcaagtttgaggaccgcttattccactttaaggacagccttcaggccccctgagcgtgggtgtgattgcagggcctctgcagctctgctgagagcatgagtccttcaaggaagacagagtgagccagtgctcaccagccccagagtcagagctggccacaggctggcagcctccaggggcttaaaaaaaaaggcaaagaacacagaaagaggaggagcaagtgggatgtttatgtccccccttctcttcctgagtgattctcagccaagtccagacagtgctcggcgggtgaggaagggtctgccccgagctttctggttggcaggtggcagcaggatggtgggtgttcagcctgaatgcccaggagcatttctggggggcagctaagactggcagctgggttggtgtgttagcgggcaggggagccattgtggggtccccaggaaagggcaagggctcagccacatcttggggtctgggaggcccaggctaagccatgtggcagggaccgtcttgccctgctggccacactctggagaagcacttctcagccaaggcacccctgccctgggactggcagggcaggggcaggggcagggacagtggacaggcggcccgaggacttacggtcggcacttctctgttctcccgtgtcagcgtgtggtgtcgcctgcatgggtcgtacctggatggtgtgtccaccatcgacacggaggggctggatttgtttctcaggcaatcctgtattttaattttagatgtatttcctgaagcatatttttcatagaatgtagcgtgtaaatagctttttaaataacttcttttttataagagtaaaagtatctttaggaatttctttctatagagttcttcattaacatttatacgagttttttgctgagtcagatggacagttgggttctgatgctttttccttctcctttccttttattattattatttttttcttttaagaactaaggtattgcctgaaaaacaagtgatgtctgtgcagccttacactctgtctttacagaagcaaatagtacacaaaagatctatttcagacacattttgaagatgaatcttcaactttaataccagctctttgttttccttgtatgatgaggggattgggggatacagttattttactagcaccttgtgaagtgtttccgtgttttgtgatgctgtaatttattaatgtttgtagctttttatatttgtacatttcttatgagctttgtttatatacccattacctggatgtttttgtccactgggagaggcagcttggtggaggccttatccactcccacttgtcctgtttggagggacgcagtccctagggcccgagactgggtgggagagggggagtctcacggggccccaggcttattcagaactggtgtttttaaagtttcctttaccctgcccttgttgaacatttatataatctaacctggacatcaagctgttctctctctctcttttttttaattttattattattattttggcaacatgtacatttctaacaaagtttatcgtggctattaaagtgttttatttcccaattcatattactcttgtatcgagtccatgaggtctaaggcaacttagatcaaagttttaaaaaagtaaaaatatttcaggttttgtacag

SEQ ID NO: 523498 - DNA, 2580 bp, Homo sapiens
agcggggggtgggggcaggtagccccaaaccaggaggggtggacaggctgtggcctacagcttgagggggctggcccttcttttccacagcaagggtcggcccatcggtgccaagacaggacaggcctgtgcgtgagggtacacgggtggcttccatcgagaccgggctggcggctgctgcagctaagttgtcccagcaggaggagcagaaaagcaagaaaaaaaagagtgccaagaggaagctgactcctaacaccacctccccttccacctccacctccatctctgccggcaccacctccgcctccaccacgccagcctctaccaccccggcctccaccacaccggcctccaccaccccggcctccaccagcacggccagcagccaggcctcgcaggagggcagctcgccagagcccccgcctgagtcgcatagcagcagcctggcggaccatgagtacacagccgctggcaccttcaccggggcccaggctggccgtacctcccagcccatggcccctggggtctttctcacacagaggcggccttccgcatcgtctccaaacaaacaccgctgccaaaggaaaacgtacgaaaaagggcatggcgaccgccaagcagaggcttgggaaaattttgaaaattcatcggaacgggaaactactcctctaagatttggaaagccaggatccttctgctccgtcaggacccccggagccccgcgaaaacatctggctcccaggagggtgccgagctggctcaaccagggagggccttgcctcttcccggtggcattcttcccaacaagcgtctgtgccttcagcgggcaagcgagcccagcgtggcccctcaatttgaaaatggacgtcttttctcaagttgctaagagtgatctgtcccagaaaagcggccctgcaagtttgaggaccgcttattccactttaaggacagccttcaggccccctgagcgtgggtgtgattgcagggcctctgcagctctgctgagagcatgagtccttcaaggaagacagagtgagccagtgctcaccagccccagagtcagagctggccacaggctggcagcctccaggggcttaaaaaaaaaggcaaagaacacagaaagaggaggagcaagtgggatgtttatgtccccccttctcttcctgagtgattctcagccaagtccagacagtgctcggcgggtgaggaagggtctgccccgagctttctggttggcaggtggcagcaggatggtgggtgttcagcctgaatgcccaggagcatttctggggggcagctaagactggcagctgggttggtgtgttagcgggcaggggagccattgtggggtccccaggaaagggcaagggctcagccacatcttggggtctgggaggcccaggctaagccatgtggcagggaccgtcttgccctgctggccacactctggagaagcacttctcagccaaggcacccctgccctgggactggcagggcaggggcaggggcagggacagtggacaggcggcccgaggacttacggtcggcacttctctgttctcccgtgtcagcgtgtggtgtcgcctgcatgggtcgtacctggatggtgtgtccaccatcgacacggaggggctggatttgtttctcaggcaatcctgtattttaattttagatgtatttcctgaagcatatttttcatagaatgtagcgtgtaaatagctttttaaataacttcttttttataagagtaaaagtatctttaggaatttctttctatagagttcttcattaacatttatacgagttttttgctgagtcagatggacagttgggttctgatgctttttccttctcctttccttttattattattatttttttcttttaagaactaaggtattgcctgaaaaacaagtgatgtctgtgcagccttacactctgtctttacagaagcaaatagtacacaaaagatctatttcagacacattttgaagatgaatcttcaactttaataccagctctttgttttccttgtatgatgaggggattgggggatacagttattttactagcaccttgtgaagtgtttccgtgttttgtgatgctgtaatttattaatgtttgtagctttttatatttgtacatttcttatgagctttgtttatatacccattacctggatgtttttgtccactgggagaggcagcttggtggaggccttatccactcccacttgtcctgtttggagggacgcagtccctagggcccgagactgggtgggagagggggagtctcacggggccccaggcttattcagaactggtgtttttaaagtttcctttaccctgcccttgttgaacatttatataatctaacctggacatcaagctgttctctctctctcttttttttaattttattattattattttggcaacatgtacatttctaacaaagtttatcgtggctattaaagtgttttatttcccaattcatattactcttgtatcgagtccatgaggtctaaggcaacttagatcaaagttttaaaaaagtaaaaatatttcaggttttgtacag

SEQ ID NO: 523499 - DNA, 276 bp, Homo sapiens
  misc_feature (33)..(33): n is a, c, g, or t
  misc_feature (200)..(200): n is a, c, g, or t
  misc_feature (207)..(207): n is a, c, g, or t
  misc_feature (238)..(238): n is a, c, g, or t
ataaggtattaaacaactattcttgtacttganttaaaaaaaaatcaagctgggtgcaattgctcatggctgtaatcccaacactttgctagggttaagtgagaggttcagcccagaagttcagtaccagcctgggcaatatagtgagaccccttctctacaaaaaaaatgaagaaattagctgggtatggttgcatgtnctgtggncccagctcctcgggaggctgaggctggaggntcacttgggcccagaaggtcaaggctacagtgaacctt

SEQ ID NO: 523500 - DNA, 255 bp, Homo sapiens
ctctagagtatcccctaagtgtgctggcaccagggtggaatgtacacgcaactctggagtaggctaaatttattaatgttggcccactatacagaagattctgtgattcagcgattgtatgtcaaagtttttacaaacgggctccaaggcgttggtttgatcggattacttgagttcgttggtctggttgcttgcttgacttgcttcgcttttctggttttttttgttgcttgcattgctttttgtgttacttgg

SEQ ID NO: 523501 - DNA, 411 bp, Homo sapiens
  misc_feature (78)..(78): n is a, c, g, or t
tggctttcagtcgcgtgttgctcttcgcatttcctaaagttcctgatgctatgattctggtttttgtggtgttttgcngcttgtgtgtgattgattattggtttgtttgtttgaactaagtgggactataaatgtagatagatgtgttttagtaccaagatgttcttttttcattatcagtctttcagatgtctattttcttgctgaatagcagaggactttatttccacctccctataaagtgtgagcactgtgtttcagcgagctgcattgcgtacttttgctgaaaacttctctgtaaacacaattgccttgttgagtttcattgtaaactgacctcgccatgcgatgcactgttgatagcttcctgatgtgtggtggataagagtgataaaataaagcttacaaaga

SEQ ID NO: 523502 - DNA, 405 bp, Homo sapiens
cagaccaaaaaaagcccaggagggcaagtttagacacacttttacagttaagactagacatgccccctataagtagataggcaccaccgattatacgccttatagacacaaggcttcgaaaggcaaaacattatactaaagacatacaaccgccaacattgtcctttacaactaagctgtggtattattagtttagattaataaaaattcctatctctaagtaatcaaatacagcaaaatttaaaacctattctgccaaaccataaacagttcaaaggtctgaaaccgtacttatgctttggtgaatgtatggttaaaatacatcactgtttcactccacgagaagtattaatcagagcactcaatacaccggcaaaaaaaaaagttcctttttaaatgaaagcg

SEQ ID NO: 523503 - DNA, 146 bp, Homo sapiens
tcctcttttcagtccagtccctccccttcactcactgcaagaccaccactgtggtgacttttctgcatctcacatgtagctttggaatccatggagtatgtactctcatgtctctgaaattcatccatgttgttgcctacttccgt

SEQ ID NO: 523504 - DNA, 233 bp, Homo sapiens
  misc_feature (36)..(36): n is a, c, g, or t
  misc_feature (65)..(65): n is a, c, g, or t
  misc_feature (113)..(113): n is a, c, g, or t
  misc_feature (126)..(126): n is a, c, g, or t
  misc_feature (173)..(173): n is a, c, g, or t
ccgggatgccaagggcatcagccaggagcagatgantgatttccgggcctccttcaaccactttnaccgggatcactccggcacactgggtcccgaggagttcaaagcctgcntcatcagcttggnttatgatattggcaacgacccccagggagaagcagaatttgcccgcntcatgagcattgtggaccccaaccgactgggggtagtgacattccaggccttcattgact

SEQ ID NO: 523505 - DNA, 969 bp, Homo sapiens
  misc_feature (734)..(734): n is a, c, g, or t
  misc_feature (826)..(826): n is a, c, g, or t
  misc_feature (867)..(867): n is a, c, g, or t
gtattgccaggtcctggtgaatccacatgctcgatcaattagtggcccttctactaggagtaatgtgaaatagatgatcatccctgttatcgttggcaggttgggctctagtcactcactaagcctagttcgatagccgagctacagtgatagagcatgagaatacgtgtgcgactccacacagtgtacgaaggtcatgatattggaatgacagtgttctatggcctcgagtggacattgagatgcactcggcgcttataagcattcgaagaacgcatgagctcaaacatattcatggatatgtcagtaagtctcctctttgctttggatgttatcatcgtacatactctgagtaatagaggctaatagatagtgctttagctggcgcagacattagttatctggtccagttctacgatacagcgacgtactagtatatgcgtctcgtgctcacagtgtggatctcttcttaatagctcgaaggatgaatctcgtttgatctctcagatagatgcaccgtctgatcgactgctgtggcgtgacgtggtattggggggtttcctacagagcagtctgactgtcctagcatagtggagctaaccatgagcggcagtagtgggcagatatccttaaatacagtgtcgaagtgttctatattatcaatggagtagtttggtatgcgataattgctgtttcactacaatctgtaaatttggcagtgcatctggtaaagncctttacatgcctaaagtataggggcaggactattgtgagtcagaactcactagtcatcgagtgtgttcgtaagcaactccgaatgatattntgcacgcacacaaatgctggtatactgtggagaaccgctangttgcacccagaattgtagctttgcagtcgagtcatcccagtttttatagaccttgtacaacaaaggctaagtcaagcatagtccttagggtaacggcaagg

SEQ ID NO: 523506 - DNA, 457 bp, Homo sapiens
ggtctcagctcctgagtggctgggactgcaggcgcgtgccacatgcccggctggttttgcagttttagtggaggcggggtttcgccatgtggcaggatggtctctatctctgacctcgtgatccaacccccttggcctcccaaagtgctgggattacaggtgtgagccactgcgcccggcccaggactttcatagttcgaaaaaagtcaatgcctagcttgaaaggacaggctgactctcttgtcaggggctagtgcagctggtgactttaagttgaagccagtgctcatttacaattcctgaaatcttagggcccttaccagctatgctaaatctactctgcctgtgctctgtaaacggacaataaggcctggatgatggcatatctatttacagcatgctttactgaatactttaagctcactgttgcgacctactgctcagaacaaaatattcc

SEQ ID NO: 523507 - DNA, 617 bp, Homo sapiens
  misc_feature (53)..(53): n is a, c, g, or t
  misc_feature (82)..(84): n is a, c, g, or t
  misc_feature (86)..(86): n is a, c, g, or t
  misc_feature (90)..(91): n is a, c, g, or t
  misc_feature (93)..(93): n is a, c, g, or t
  misc_feature (96)..(96): n is a, c, g, or t
  misc_feature (114)..(115): n is a, c, g, or t
  misc_feature (121)..(121): n is a, c, g, or t
  misc_feature (142)..(142): n is a, c, g, or t
  misc_feature (151)..(151): n is a, c, g, or t
  misc_feature (210)..(210): n is a, c, g, or t
  misc_feature (257)..(258): n is a, c, g, or t
  misc_feature (340)..(340): n is a, c, g, or t
  misc_feature (463)..(463): n is a, c, g, or t
  misc_feature (473)..(473): n is a, c, g, or t
  misc_feature (475)..(475): n is a, c, g, or t
  misc_feature (497)..(497): n is a, c, g, or t
  misc_feature (590)..(590): n is a, c, g, or t
ttatattgggtactcgctctgtcttgagagggctaggtcacggtgcagcctcngataattcttgtagggctgtagtcctatnnnanaaanntntancggggtgatgcccaaatnntactgnttggctgctgggtactacttngacctgcanggcagaatttgtgagaggagctgcagcccaaactcaagaatgggggtagggggaagaanagccagcaacatccttcctccagcttctccaactttccaactgctcnnccacagcccggatttctgttcctctctttcctccaggcctgcaccctcgagcttccagtagggtcaagcctctactgagctnggggaataaaaggggggccatccagtttcagggaggtaccacagcagggagggccggccggttcctgcccacaaacacagcaatcatgaagccctcgaagcatggtctcctcaggagggtgantttcccccancncactggaaaagaggcaagagtngctctggcctcagatgcacgttccaggctcccagggtgacagggtacggctagggggaggaggctcagtccgcccctgaagcctcctcctctnctgcctcaggactcagggagacgcaga

SEQ ID NO: 523508 - DNA, 300 bp, Homo sapiens
ggcaggagactgtggtgtcggtggacgaggtttccagccccagtacccccgagtgccccgagacatcccagccgtgcccttctccgggccagaagataaagaaatcctagcccggtagctaggtcagccgccccaactgacatccgcgcaggactaggataactaatctctgagcttgcggtcatgcctgcaaacgggccgggagctgggggcaaagtagtccgggcgctgaaggctcagtgcccaggatgctggggagtcctgcaccccagaggccgagggccgcctgaggagccatgt

SEQ ID NO: 523509 - DNA, 242 bp, Homo sapiens
cagtgggaagatagtcagtacgatgtgcggtatgatcgtagacaaaggtcaggagccaggccagtgaagccacggcgggaggacaccaacaggaagtcgagggtccaacaccaaggtcagcacgtccagcaacaggcccaacccattcactacgcaggtacactgcctccatgacagggctatggaagttagtccaaagggaagtctggctcctcggttggggggttgccgaagcttgatca

SEQ ID NO: 523510 - DNA, 312 bp, Homo sapiens
gttagactcagtcaggggtgagtttgaatctgcctcctgcaacctcaataatatggtatccatgccaacggaatgtggtctactcccttttctacaaagttcccccttaattggcagtatggtacagttaattggtttccagaaatgctgggttagaatatatgctctgttacttggcacgtatgtaccacggacaatacacttgagttctaaggactctgttactctcattcataagtgacaagagctgacacgctgatcaaggaacaaaccttccaactctaatgttcttctaactaactccctaaagga

SEQ ID NO: 523511 - DNA, 168 bp, Homo sapiens
atccagaggaggtgatggtagcatctctaacaacgtccttccctagttctcgaggccaccatgtaggaagtcttttcctcgatgcagatcatttgggcggagcgatggagtccttagtctcagtcttgaccgatgatgatggagcagaataagtgtttcactcgttcc

SEQ ID NO: 523512 - DNA, 433 bp, Homo sapiens
  misc_feature (166)..(166): n is a, c, g, or t
  misc_feature (174)..(174): n is a, c, g, or t
  misc_feature (194)..(194): n is a, c, g, or t
ctgcaaaatttagggggcaagatcatgaagacttatattcaaataggatatgctctccctcttggaaagtctttttcaggtgctgtttcaatgatacagacttgttttggtcttagcccctgtgggccatagtctatctctgagtctacgtgaacatactgtatgncattttgncaatatattacaggatacanctacccactgtgtatttcaaatggctgtagcctggagaaataaaattatcagaggtggctcaatcttaatgagcttagattttttttttcaaaggtgtgttatggccgggtgcagtggctcacacctgtaatcccaacattttgggaggctgaagcaggtgtattgcttgaccccaggattttgagaccagcctgggtaacatggcaaaaccttatctctacaaaaaataaaagaaaat

SEQ ID NO: 523513 - DNA, 854 bp, Homo sapiens
ccatcaccgcctgtgtcgctccgggagctgccgacggacggagcgcccccggccgcgacggtgcgccggctcgcggagcatgccgttctcaacagaagaagcactgaaggcgtgcgctaccgggcgaggacgagtcccgcactgagcggccaagcaatggccaagggtgctgacccccgatgctgtacgcggagctgtgctgccaaaagcacgccgagcggcttcacgctggacgacgtcatccagacaggcgtggacaacccgggccaccgtacaatcatgaccgtgggctgcgtggcgggcgacgaggagtcctacgaagtgtcaaaggatctcttcgacccccagtcactcgaggaccgggcaccgggggcgtaccaagcccagacgatagacgacagcaagaccgacacgtcaaacccgacaaccctgcagggacggccgacagaaccatggaacgcccaaaataacggtgctgaagcttcgcagggtgcgcacgggccgcagcaaatccagtggattctgactcccccaccccgcacatgccagccgcgggagagcgccgaacgccaaatcgaaagaaagcctcggacggagcgacaagacccatgtaccaacgcacatgggacagcgaagaccaggcgcgcccgaatacctaccgcagctcaaagaagcatgactggcaaagcggatacaaccgaacaacactacaatacagcatgaacaaccttaccctcatacgaaaaagccacgaggtcgccccgagatggcaggacttaggacaattggaccatgactgagacccgtagtccccaaggatagaggacacgaagacaagaagacacccaaggcaa

SEQ ID NO: 523514 - DNA, 153 bp, Homo sapiens
ggtatcagtactgtatcattataatttatatgcaggctccagcgcattctgtgtccacgagaagcggcgaatggcatggctttatttgtttttttatggtttggtttgggtttttttttttttttttgggttcccaagctcaatttcgaactc

SEQ ID NO: 523515 - DNA, 1304 bp, Homo sapiens
  misc_feature (803)..(803): n is a, c, g, or t
gggagctcagattccgcggctagaggtgacctgactctctgaggactcatgatctgcagattgtagaaattgtccccgcagcttattcaattcatgtcgtgaaccaatcagagtcctgtgtgactggagcagcgtgggtcaacatatgcctattcactgcatgtacagatattgagaaaatgggatcatgatctgtttgggtaacaggatcatgcctataagttcattgatgacatgatatgggactagtgcaaccccatcatgatgtggctgtcactggacatggtgtacctaactgggacactgcagaagaactagatgacccattacccatctccatgagaagaatagtccatcgcacacaggatacaatgaagaacgttagccttacaaagtactctgagatgatgagacagattcttgattgggacatccagtgaccaatgaagggaaaggctatgggatgacgaaacaggatttagatgacaagtcatactgtgaacaagtcttcaaaatcccagggatgcaagcacttgagaataaattacgccaaagagagtcaagaacagaggaaaacgctagatggagtaatccaagccagatagacaaactgccgtgacgatgattccaaagataccagagatcccataccattccccaaaggaagaagcatcaagatagcattagaatcgaaaagggaatccacaaagccagacagctaaaaggctcaacattggcaccttcacacatgggtgtgaacttgactaaatggaagtaagagcaatgtcataacacatgaaggnaaacccaataacatcgagatcagtaatccagaatgtcaaccaatgccacaggtgaacatggcaaagggaaacagggcacagctcgggaggtttcattagttaagtgtcattgtaaaaaaatataaaagaatgtcatcacagaggaaaaaaaaattggtggccgaactgtagttcaaaacaagataaagacgaacatggatacgtacaatggaagtgaaaaatatatactcaatgagacagtgatagtgctgaaaaaaaagacaacatattgttatccagctttagggcaaccactgagggaaggagataaccacaaaggtgaagagaatgatagtaaacaaggaaggaaacaatagtaagtgagaatcactgagttagtagagaaggaaagagtaaacaatgatatgaatatagaaaactaaaagagagtagagaatgaacataaaaaatctagagaacgagctagaaggagtgaataaatcaaaatgttagtaacatact

SEQ ID NO: 523516 - DNA, 101 bp, Homo sapiens
gcatacttcctgtctctcacaggtgtgcttgtgtgcaggtgtatgttttatccttgttgaaagccttttgtatcttctatatgaacatgtgggacgtgtag

SEQ ID NO: 523517 - DNA, 519 bp, Homo sapiens
  misc_feature (279)..(279): n is a, c, g, or t
gggcagatagcgaagacctagtgctggtactgagagacttctgggattctttccttgctagtctaagcaccgagggatggtgctcctaaggacgggaaaggtgacatgtcctgctctgctttcgtctctagacgcttcgtagctggtggtgagattctctcgactgttgacggccccagtctactcgcagccaggccaactgccgttctttggtaaggtattaagagtgaccgttgaggcgtggagatgggcgcacaggggggcgacgaacgggttcangatactggtccgagggtgcggaggccaagaagacagtcagagatcacgtcctcaatggcattagtaaggtgtagcgcatttgaagtataccatgtaagtatggacgaaaaagtcgcttagaactagtagtcgaccgatcgacatagcgggaatagcagacatactaacagtggtaagtaagacgttctactggtcatacgaagcttgatgatacagacaaatcacatacaacacagaggg

SEQ ID NO: 523518 - DNA, 218 bp, Homo sapiens
gcctggaaggtgcggcacctggcgtaccaccaaccgcggcttatgcccgttcagggcgtagtggactttcgggaaagtcgcgacccctattgttattttctaatcatcaattggttcggtatgagcaataccctgtaatgttcaatattttgaggagatttagttttaccttccggtgccctattccttttgcggatttgcttctgtttggtcccccc

SEQ ID NO: 523519 - DNA, 1207 bp, Homo sapiens
taaaaccccgggtaatccaggtttattataaaaaaagtgccacatttactctttatggaatgtgcgagcgccagcacgggccccttttctctccaagcacaggggcacgcaggcaaggggcacgaaggcaaggggcctcgtccccgggccaggagtgcaggggaagccgggcctccatataccatttcaccatacagccagaacccctccttcggggccgggggcctcaggctcgtgttcaaacttccgtggctcacagaaagccataattggagggggtggggccgtggagcaccttcggccttcagaaactctcaacaggggaacggtggtgacaaagggttcaataggacaaagtgctcaggctcaaatgtttcaacttgggtggcctccaaaggcctttcccgggacaaaagccctcggtgtccgggacaaaggggaagttcctccatatatggggacgggaagggatacatttaaccagtatggccatggggacacacggtgcccaatttcttgtggtgaccgcctatggagttcccaagatgtggtgcccaggagatggctcaaaaagatgtgggcagggggaaagggggcgaaaaatggttttcccaagaaggaaaatgcccccgggtgtcacggaaaacgcgggggaaaaaagcccccaaagtctcaagtctagggtgagctaacacagaatgggtggcccctaccaggcaagcatttccaaaaaacaagcgggcataaaagaggtctccaaggaccctcgggaaaaaactcccccagaaagagtctcaagaaaaagggagtaaccaccgggtgccccaaaagtgggggacggggagataaatctccacaagagaggcacacagataggaagaggggagaacccaccaggggcggtagaccacaagaggaaaacacacgaaaaattctctctcccagagggagtagcggaaccccagggaaggaaaagggggggccgcaaaccccgggacaccaaaaaaaggggtccaaaacccggggaaaagcccttcatagaaaaagcacccccgcgctgccggcgcagaaacaaccatggggaaaaaaagctgcgagaaaaaacaacacacaacaaaagagtaaataatgcagaaacagaccacctagcacagagcagcgacaacaagacgaacgcagggcgcccaaccgagagcaacagccacat

SEQ ID NO: 523520 - DNA, 460 bp, Homo sapiens
  misc_feature (444)..(444): n is a, c, g, or t
atgtatattcccaagtcatttcagcactgcttttagttcatatgaattctcaggagttgaaatacatatggacaacatcttttaaaacatgattacatacacagtatttacaacaaacacatttcattggacctaagtgcaatttaatattattcatatattaatcaaatattagtgcatatgtgaggtcattataaagtacgtggattttaaatcatacattacaaaagtgaacacaatatctatgttcaaactaaaagagtcaataccaagttttaaacacttgcacaaggtaaagaaaaagaatgaagatgcaagaaatgctatattgttatgagatacaatttatcaatataaaagtcatatatatgaaacttagaataacagttgtctcaaattaggaggaaacacagagtgggtactacacttccatagaacttagcnaaggcatagaaaatgg

SEQ ID NO: 523521 - DNA, 81 bp, Homo sapiens
actgaagacagtgccacttactactgtgcctttgggcccccccacttttactgggggatggtcgggacagcacaactcttc

SEQ ID NO: 523522 - DNA, 245 bp, Homo sapiens
gccacaccagactttcgaccccccaaccctctgaggaagatgggggcaagaagatcacgctccccgcctgttcccccgccgcttttctcctctcttctctcttcgctctcagctccccctgtcccctcagctccagacgtaggggaggggttgccacagactccctgcttgaagcctgcccttgcctaagatgctggtaatggccatggtacccccttccgggcatctactctggttttcggcca

SEQ ID NO: 523523 - DNA, 152 bp, Homo sapiens
  misc_feature (113)..(113): n is a, c, g, or t
cggaaacgtctaagtatagtggtgcttccaggtgcatactctactgcagtaagcatcaatgaccagtatactacgcatccatgagcagtataatagccctcaggcagagagtnggagtgcagtacgcatcttcaagtatacaggccagtgcc

SEQ ID NO: 523524 - DNA, 258 bp, Homo sapiens
gagaaaaacggaagagcatctttcactggctaacacacgactaaaggggaagtgaggaaacaggaagaacgtatggtgagggctgcggtagactcccctggagccaagcctatccagctaacaatgagctccctggggctggtcacagctggcgtcatgactgctgacacttgaaagtttttattgtttgtgttttgtgtttatgtggcgtcctccacagcatataggttacatacacgtcataggggcaaagggcat

SEQ ID NO: 523525 - DNA, 182 bp, Homo sapiens
ctcggtaccctcgtgaaagcacacccatttccaccgtatttggatcaagcataggcatcgtcacatgttcgactgactcgttgaccggaaccgactcttcatccttataagacgtacctggaacgttttggctgtattcgtactcatcctttcttcggcgaccgcttttttaaacaagctca

SEQ ID NO: 523526 - DNA, 944 bp, Homo sapiens
cttctgcccgcgcggttgggttgtttctaccttttcgccacagttgccttctctcgggggccctctggtgtgttacccgcgtttacttttcgcacctaacccctttgtgaaaggtgataatgttatacctggccctaaacgggtcaccccttgccgttgcccccattaagggtccccgtctggaccacgctgtgctacccctgccccttttcgctcgcggtgtaccccccctcccggggcgaccagggtttcccccctcccccttttgtttgtcccccggggacggatttcatggttgtgcggttccgggcaccctgtggtgaccggtcgcccttcattcctccccggccatggggggtaccccccgtccattatcaccaaccggggcctttaccacacgggttgagtaccaaccgcggctgtttagcaccttgcctggtctcataccaccccccccgggtccctccctcccccggcacggtattccagtcctccacctcgacttcatgctagtctgtccggcaagtccccttctaccctgtattgctcgtcgacgagtgcttcaccaccacacagggcgtgaagcctaaaggagttttcgtcttggagccgccaagaagagttgttgtgtgtcaagtcgaacacccacgcctcgcgttctctggcagctcccaataataggcccaccatcacctccggcagccacatattatagacatgaattttatccccccagaaggatcttgggagctctcgtagatataacaaacaaggccaccctacaatagcacatttcatcacccactcctctcctctcatagacaaagagagcgctaactcattcgccgtccacctttaaccgggtactgccacgaacgaccaccgctgtttaattcccccttctgtccctaccacaggcggcggatttcctccgcgacaaaaca

SEQ ID NO: 523527 - DNA, 175 bp, Homo sapiens
gatctgtgagtgagccgaacatgtatgtacctatcttttgtcttatttgagggcgtgcgtgagtgctggattggcgatagcttcgatttggtcggttgcttcttgtggatagattagccagtaaaaagtgtaattgcccttgaccagggcctcgacggcgagagatagctgcgac

SEQ ID NO: 523528 - DNA, 494 bp, Homo sapiens
  misc_feature (364)..(364): n is a, c, g, or t
cacgagggggattagctcccgatgtggtttgccaagtttcccaatcacacagtcgtgatcgccggttcgatttcgccgaataagcccgtaattccgtgccaaattgtaggacgatttcccgggatacattttccttgaaaacaatagtcctgttccgaagcggcggaagcggagaaggagaccggcttcgcgtagcgccaaaatctcttcacttcgcagtgctgcgttcaaacggagatatcgcgcttcggatcgatcggatcagttgcggcggttttcgatggaaaagcgaatgaggtcggatgtgcgcggtaaatcgagcttttccttgatgcgcccgcacgagttggcaaccgttttgtangcgatgccgatcgcatcggcgatgccttgcaggctcttgccttcgcccagcatacgcaggatctcgatctcgcggttggtgagcttgcgcaaagggtcctcggcgcgcacgctgctcattaccagctcgc

SEQ ID NO: 523529 - DNA, 411 bp, Homo sapiens
tagtatgtataaagcatggaattatgggctatggagcttataaaataaacacacacagttcctgccctgaagatgcttaaaactgaaggattatttatttgcatttatgaatcccacaaatgtttcataaaccataaaaattcctattttatttctgaaatgatattctatatcagactattctagattatttagatttaccagtccaatggattcaaatattgcttttagaaattcaatgccctcattttcactgtttttattctaatggatcaaaataactataagtcaaaatgtatgtgacacttctattgcatagtttttgatttgtgaaggagtacaagataactgtatttcttacagtctgaaaggaagtatagaggcacatcaaaggacaggactgagaagggc

SEQ ID NO: 523530 - DNA, 901 bp, Homo sapiens
ttttggtggacacaccaccgttacttcttgctgccaccgtgggccgcaaatccgctgtctattgtttcccgcccccctcttttgggggccgtctgtgcccaagggaatttccttccgtgtttcccccccgggggttgccctgagtgtgttccccctggagtccccgagtagtttctacttgccaccttagctgttgccccccctcccattggcgcgcaccacaggtggccaaattctctcgctgtctgtatgacccttccccggacgttccccctcgatgttcccccccacattcgctctcctacggtgtgaatataatctctcgctcaagtgttaacaacaggcgttaggtcgtagggcatcttataacaccacccaataagcgcggggctctcaatacgttgcacactcatactcgctttgccgcccccacgttccacacatgtggttgtggccctgcctttcgctgattcttcctcggggttggagtaagaaacctggatgctcacacacgcacttttcatctgcggcgccacacattttttgaggaacctattgaggcattcgacatacgcacgagaataattctggccaaccacggcggatcatatccccgggaatgtctacaaactcgtcggtgccctcatgctcataggcggtgctcccatgagaggacgcactgtcactccttgcccactgataagaaatcagtcgtgaggttgttaggttccataaggaggagacctcgaatatatcataccatctgcttgcatcagtcgttggataattcgggtgtcctgacatgatcttctcaaaaccaaagtgggcacattcctttcttgcgttttcttatgttttttttgttttgcaaacaaaagcaaacattttccccaacaaaaca

SEQ ID NO: 523531 - DNA, 468 bp, Homo sapiens
  misc_feature (158)..(158): n is a, c, g, or t
  misc_feature (362)..(362): n is a, c, g, or t
tagaggatctatttggcggcgccttttccactggtctataagaaacgtgacataaggactacgtctggattcgattctgactccccagcacccaattaaatggcagcaatgtcattcttttttttgggaaacaaggtctgctctgttgcccaggctgnagtgcagtggtatgatctcggctcactgcagactccacctaccaggttctagtgattctcctgcctcagcctcctgagtggctgggattgcgggcgcctaccaccacactggctaattttggtattttgggtggagatggagtttcaccatgttggtcaggctggtctcaaactcctgacctcaggagatctgcctgcctcggnctcccaaaatgtggggattataggcgtgagccactgcgcctgtccatggatcctttcaaagtctttaaatctctcccacatccgggcttcatcctcccctgcctgt

SEQ ID NO: 523532 - DNA, 144 bp, Homo sapiens
tatactgtcacgatagtaaggacatacttctggtggagcactgtgcggaaacttgcggatacactcggtgagctgcatgccttgaaaggcatggcctgtctcctcacttgagtgcaatgtccatcgaccaaaagccctgttctg

SEQ ID NO: 523533 - DNA, 617 bp, Homo sapiens
caagtaaatgtaaaagctggggtcgacccccaggctccctttaaagggtaataataagcctttcaccatacttggtgttcacaactgggacatattctgcgtgttcactctaagggtatctgataataacatatgtcctgaaacagtgtgttgcatatgacagtctggacaaagtcctctaatacatgaaagtcctgagggtggtctgtataaagagccaagtacggctggacacgttcctgagctagtctggccgttagttctccactcatagtgacatacgtgagcgtgctattcatgttttatacttcgtgaaccagcacatgtgcataacccagggtggcatgtccacagagtggaccctcactcgatggtgtaacccatgtcagtccaaagcaggacctttgcgcaaagtagtcggtcgggtccagttttggaataaaaccagtttcagagaggttcctctccctggcatttttgtgatgcatgtcatcatccaattcgttttctaggaggcaagcaccagcaggattctcaccaaatgctcttgctgtgaaggcatcggatatgaatatagaaagcttcattttccgcgcaaactgtttttgcgagttcct

SEQ ID NO: 523534 - DNA, 473 bp, Homo sapiens
  misc_feature (10)..(10): n is a, c, g, or t
  misc_feature (73)..(73): n is a, c, g, or t
  misc_feature (108)..(108): n is a, c, g, or t
  misc_feature (119)..(119): n is a, c, g, or t
  misc_feature (134)..(135): n is a, c, g, or t
  misc_feature (149)..(149): n is a, c, g, or t
  misc_feature (156)..(156): n is a, c, g, or t
  misc_feature (162)..(162): n is a, c, g, or t
  misc_feature (194)..(194): n is a, c, g, or t
  misc_feature (198)..(198): n is a, c, g, or t
  misc_feature (214)..(214): n is a, c, g, or t
  misc_feature (244)..(244): n is a, c, g, or t
  misc_feature (247)..(247): n is a, c, g, or t
  misc_feature (256)..(256): n is a, c, g, or t
  misc_feature (273)..(273): n is a, c, g, or t
  misc_feature (300)..(300): n is a, c, g, or t
  misc_feature (312)..(312): n is a, c, g, or t
  misc_feature (327)..(327): n is a, c, g, or t
  misc_feature (342)..(342): n is a, c, g, or t
  misc_feature (344)..(346): n is a, c, g, or t
  misc_feature (348)..(348): n is a, c, g, or t
  misc_feature (370)..(370): n is a, c, g, or t
  misc_feature (380)..(380): n is a, c, g, or t
  misc_feature (390)..(390): n is a, c, g, or t
  misc_feature (405)..(405): n is a, c, g, or t
  misc_feature (412)..(412): n is a, c, g, or t
  misc_feature (456)..(456): n is a, c, g, or t
aaaggtagtnattttctttaaattcatcctatccacttttgaccacttccccatgtacagattatcctttagncatacaaattcactctccacttccacatacatttnccccacttgangggacttttacaagnngggaacaatacagntgggtgntaaagnaatttaaactatttgtaaatgaaataaaaagnaagnagggataatacatagnggaaaaggtaccaaattgggggaatattgntgntaatctagntttttatttaacaaagnacctactaatgggctggggaggggggnaggagggaaggnggtagatgggaattncttcctatggttaanannnangcaactggttcagaatggatgncagtcttagnaataaaaggntcatttaatattttnactgggnttacaggggtggggactactggttacattattttaatggaaggntttataaaaacatctgg

SEQ ID NO: 523535 - DNA, 392 bp, Homo sapiens
  misc_feature (291)..(291): n is a, c, g, or t
  misc_feature (326)..(326): n is a, c, g, or t
  misc_feature (340)..(340): n is a, c, g, or t
  misc_feature (359)..(359): n is a, c, g, or t
  misc_feature (387)..(387): n is a, c, g, or t
gaattcggcacgagccaaacaccaagggccattgaaatggcttctaaaagggctctgggcagcagaatcacccggacatttgtttaccttacagatttcatggccccacctactaaatcaagctctcctcaaacagtagggtccaggaatatgaatttcaacaagtgcaggtgtatgccacaggtcccaagttgagaaacctggtcctaaccccacccgtcactagagagtgacggcagggttaatagggcgggaacattaaggaaaacttttaattgacagggaccaggngccaatcaggaagcagaggtgcgggtcgggcgtantgaatacgcgaggngaagagagggctccttccncccactttcacttgggggagacaacttngggtt

SEQ ID NO: 523536 - DNA, 217 bp, Homo sapiens
  misc_feature (40)..(40): n is a, c, g, or t
aggcagtactcattctccttcttagaccggcactacgtgngctcagcagctgcttttgcaggacaccagagcatggaccattccaaggcagtcctggtggtgcctatgggactgtcagcccccacctcactatggggccacacagccagcttatagtcctagtcagcagctcagagctccttcgggatccctgcagtgcatactatctcagccacgc

SEQ ID NO: 523537 - DNA, 290 bp, Homo sapiens
gtctaggctacatcccggacacggaatgggcaatcattcatgacaaacgacactaagagcaatcacaacaaaagcaaaaattgataaatgagatctaattaaactgaagagcttctgcacagcaaaagaaactcaacagagtaaaaaggcaacctaaagaatgggagaaaatatttacaaactatgcatctgataaaggtctaatatccagcatctataaggaacttaaatttacaagagaaaaacaacaaccccattaaagagtaggcaaaggacatgaacacttttct

SEQ ID NO: 523538 - DNA, 391 bp, Homo sapiens
gatctgcagctcctaaacctcgggtcagtccagcctagcctcagtgctcccgtgcgctgctagtcctctatcagcgctcgggccagctgatgctcggtctctcacgcccccgtttcttatcctttccttctcttttctttttatttttagaccgcgatcttgctgtgttgcccacgccaggtactgcagcgatgccgtcatagctttctccttgttgataagactcctgggctcacgcgatcccctttgtctcaaccttctgagtagcagggattctcaggtgcacaccaccatgcctggataatttatattttcagagatggtgggggtcttgctatgttgcccaggctggtctcaaactcctgagcttaagcagtcctcccacctcagc

SEQ ID NO: 523539 - DNA, 636 bp, Homo sapiens
  misc_feature (375)..(375): n is a, c, g, or t
  misc_feature (622)..(622): n is a, c, g, or t
cgctcgatctctataggcaaatggattgctgataatcagccaaggctgattcagtgtgaaaatgaggtaggtaaactgttgattatcacagaaatcccagaattaatactggaagaccccagtgatgccaatgagaacctcattctgcaagaaacatctgagatcgagtcgctgcctgcagatgggagcccagggctaaaatcagcgctatctacaagccgaaatttacgcatcaactgtgacacaggagagaagccagtggttaccttcaaagcattaagacacgagaagtgaacagagaccaaggaagaagttcttcttcaagagaggttgtaactcaaacctcaactcaagcaagtaactcccagttcatcnccattcatcacccttgagcctttccttctcttctcagtaggccagggtttccgcccccacatatggtatccccccgcttgtggcatttctatggctcaggttacaccttcccagctggtgcttctgtcccaggaacctttcttaagctacaagttactcttcagcaggaaacaggtgcaagctgggcagtcccacattctttacagtcagaacggccctttggaccaggccaatgaccagggacctnactacaggccttcc

SEQ ID NO: 523540 - DNA, 696 bp, Homo sapiens
tgcgggctatgtactatggctcggtgttaaattctgacgaggcggcttcctagtgtgtcggcggctgatttagaagtgaggttcaggctacggggaggattcttggcttcccctgtccgtgttccatctagccacacatgtgagccatggaatgtgtgcagagcccagcatgccccacttgaagagtgagtgaggatgtgaagatggatgcactctgtgcatgatgcctctgtgccccgcactcgctccaatcctgaatgtggtgctgatgtgacctgtgtgcagtagtgtgtgcacatgtgccagctgtgtggcatgcctgcagctgagggtgaggtgtgagtgccgccatgtgcttgatgattgggatgcctcaatcacttcatggatgcctgtgccctaatgtccttggcagtgtgccccctgccagcccctgagtgtccaaaagttctgtgacaccaatggggtcaaacttgtcccatgaggaaaggttgatatatctatgcctggacctagtcaggaggaaatagtcactagccaagagctaggagtacagttcaacaggctccaaaaaccaacgccctcaatgtctcccagaagatgattgagatgtacgtagcggacaaaacacaagatcgacaaaagccacgagtttgcacttggtggtggttgaacgatagacactggtctaggctg

SEQ ID NO: 523541 - DNA, 260 bp, Homo sapiens
aaaaaaaattttttaaattctaaggggggagaatttttaaattgggatttttggggaaaatttttaaccccttttgggaaacaaaaaaccaaaagggccttttgtttttccttgggcccaaaaaaaactcccgttttttaaagtaccctttccccaattttggggtggcaaaaattcctgagggcttaccctaaaaaaggggtggttttttaaaaaggggaaaagggaaaaaaatattttttaaaaacaggtttgcttcc

SEQ ID NO: 523542 - DNA, 101 bp, Homo sapiens
aattctcatcacttttcagtctcgttatttccagaggtctggcaatggcttctgttctcatttccctcaactctacttccatgaggtagagagcctggcaa

SEQ ID NO: 523543 - DNA, 1152 bp, Homo sapiens
ttggctcactgcaacctccgcctcccatgttcaggctgaggcaggagaatggcgtgaacccgggaggcggagtttgcagtgagccgagatcgtgccactgtactccagcctgggcgacagagcgagactccgtctcaaaaaaaaaaaaaagaaaataaagaaaagggatgaggagttcctggcatttttatttgtccccttttctccctctctagctctattaagacaaagcttttcagatttcacttaaacattaaccatagtttagaaattataattatcaccctatgacagaaggtaccctttcttggtacataattcaagctattaggaatttcttctgcattcactgggtttcatgaatgcaagtggtgtttgctaggtgcattctaaatttgacaaacatgagtgttgtcttggcctgcagacttaaaatagccacctgattataaaagaagtacaggtcttaagtgtatgtccaaatatggaacttgaatgatatggcaaaattagaaatgcaattttagaagtaattacactgttgtgtaaatggccacctcttttgaagtctttgctacattgcttataaaacactgagttgaacatgagaaagccttttgtccaaatatggaacttgaatgatatggcaaaattagaaatgcaattttagaagtaattacactgttgtgtaaatggccacctcttttgaagtctttgctacattgcttataaaacactgagttgaacatgagaaagccttttgtctgcagctgtacttttcaactggacatgaaccatgtacttttatggcacgtagatattcacatcaaatttctgatttgcagaccgattttatttttagttaacaaataagcttatcaaatgtggcttttgaactaaagcgcttttaattaaggagttataacagcatgttattttgagtagctgttactaaaatctgttgtgatggaacaatttggagtgagcatctgatatcagagataaagagagaagcatgcagtgagcatctggaagttcttgtaaaaaaaaaaacaaattaaacattctcatttgaatgcatttaaaatttttttaaattgccaattcctaagctttttctttgttagttgtagtttgctttctcgactgtat

SEQ ID NO: 523544 - DNA, 160 bp, Homo sapiens
gctgtggtggagtagagtaaatagcagttctatcggacaacctaacataaccgggctatgaactatgtatatatcctactactaccggattcctactactcgaagttaaactccagcaccacgacctactactatctgctattgacacttctaaaatagg

SEQ ID NO: 523545 - DNA, 90 bp, Homo sapiens
gtggacacagccacatattactgtgcgcacataaggccctcgactacggtgacgacgtccgctgaatacttccagcactggggccagggc

SEQ ID NO: 523546 - DNA, 99 bp, Homo sapiens
ccctgccccttttttaggggcaatttaattaaaaaagggatgtccgctatatccaaaattacagctattggcaaataaacgagatggataaaaaaaaaa

SEQ ID NO: 523547 - DNA, 191 bp, Homo sapiens
  misc_feature (39)..(39): n is a, c, g, or t
tagcttacccttactgtatcactctcagagtctgtgctngtcagagtcagatgacttcctatctctatgtttctttttcttcttctccttctttctttttctagaaggattccttgtagggtcaggcttctcattctcctagctgttcttacaccatctttccttttccaatgaatcttctttttttcatt

SEQ ID NO: 523548 - DNA, 185 bp, Homo sapiens
cccccccctggggggggtcccccaaatgggggttgggtttgggggtttcccccccggggcaacaccctgcccctggtttttgggggcttttcttttggggggaattggggtttttttccccccaaaaaggtgttggggggggttggggggttttttttccccccccccccgggggtttggtatta

SEQ ID NO: 523549 - DNA, 140 bp, Homo sapiens
ctacccgcacgagaactgacgctggaccttcggtccgctgccggaatcatggagatcaagcgccgcggcagtcggtcatcggctacccggcgctggtcgaccgtggcgcgcattgcgacctggacgtgttcgacgacccg

SEQ ID NO: 523550 - DNA, 465 bp, Homo sapiens
  misc_feature (5)..(5): n is a, c, g, or t
  misc_feature (22)..(22): n is a, c, g, or t
  misc_feature (166)..(166): n is a, c, g, or t
  misc_feature (193)..(193): n is a, c, g, or t
  misc_feature (201)..(201): n is a, c, g, or t
  misc_feature (245)..(245): n is a, c, g, or t
  misc_feature (461)..(462): n is a, c, g, or t
  misc_feature (464)..(464): n is a, c, g, or t
aaaanggcaaagttatttgtcncccattttaagggaagagaccacccctcaaaattgtctttatgccccaatttctgccccccaaagaaagaagaagtaaaaactaaaaggcagaaatgaaatcccacaggcagaacaagcccagcgctgtgccctgggccctggnagttaaaagatcgaccctggcctaacnggttatgntatctatagattccagacattgtatggaaaagcattgtaaaaanccctgtcctgttctgtttcattctgattaccagtgcatgcagcccccactcacgtaccccctgcttgctcaattgatcatgaccccctcatgcagacccccttagagttgtgagcccttaaaagggacaggaattgctcactcagggagctcagctcttgagacaggagacttgccgatgctcccagccaaataaaccccttccttctttttaatnntnt

SEQ ID NO: 523551 - DNA, 866 bp, Homo sapiens
agcggagctgcgatgtgacgccgcgcgccccggggtcctcggcgcctgcgccctctacctataaagcagacgccgcgccgcgctgcgacgctgtagtggcttcgtcttcggtttttctacttccttcgctaacgcctcccggctctcgtcagcctcccgccggtctgtctccttaacaccgaacaccatgccttcaagttaagttgcagagttctgatggacgagatatctgaagtcgaagtggaaattgccgaacaatctgtgactattaagaccatgttggaacgatcgggaatggactgatgacacggagatgatgacccagtttcctctagcaaatgtgaatgcagcactattaacacaaggtcattcagtggtgctacccatcacaaggatgagcctcctcctcctgaagatgatgagaacaaagataagctgaaccgatgatatccctgtttgggaccaagaattcctgaaagttgaccactggacacacttctttgaactcattctggctgcaaactactttagacatcacaagggttgcttgatgttaccatgcaagactgtggcccactatgatccatggggcacgacactcctgcacgccgcattcggccagatcttttcaacttcagttcgcgactcatatggactccttttgtccgctttgtgacgcaaacgcaacggcaaggccctcgcagacgtggttaccggccgcaactgttgtcatactcccctcgctgagcttcgttgacacgcagcccaccgccgtgctacactggctcggacgtccctggacacactctggctcatccccctgtgtgtgtgcggagtgtgggttccctcatctatctaactattgt

SEQ ID NO: 523552 - DNA, 113 bp, Homo sapiens
acgacaagggcgcaccctatttatgtgagggacggatcggagaattgtgtagtgcgaataggaagatatcattactggcgctatgatgtggggacggggtgtttaaggggttg

SEQ ID NO: 523553 - DNA, 1129 bp, Homo sapiens
ggtggcggtgcagtgaggccgggcagggtgtgcggagtggacctgacggacgcacgggctggtgctggcctggtgagccatggagctgctggccctgggtgccctgtgtgggctgctgtggcctggtggtgggcttcccactgtgcacgaacaatgggagaacctgtggttggcgagtgttccccctggcggctcgggtttggacctgcagcatgcgggcactgggaccccttgggacactccatacacggggagcctagcatgagtctggtggcagggctaagcctagggagggcggggctgcctacaatccaccaacgttgaagcactacgacctccacacgtaaacacggacaaccagctaccccacttgcacagcggaccaagaggccaagcgaacggggaccagaaaaagggaagaagcaagagaacagaacaacacagagaagacaagagacacaaggggacgcatgacgaaacgcggcaggaccagcaggacaaataaaagatcgagagacacgcaacgagaacagaacaacagcaagccacaccaaagcaagaaacacgcaaagaagaacaagcagctcgaggaagcaccggaccaaccgtgaagaactccgcaaaacacagaccacagacacacccacatgaaccacaagaaagtcgagaaccggtcagcaatagtcacagctgcgcagcaggctagccaggtggcaaccggcaaaccgagcaaatgactaacaacgccagaccaacctgtgcaggactgcatcacacactgggacaagtaacaacagaagcgaggctcgcgccagttggcagagaacacacaatagagaacacagcggaacgcgcgccacccgggacgcagaagcaccgggacacccccagaccaaaacagtagaggacggggagcaccaccagacgacaagccaacagacccaccgcacccagaacgaacacggggccaggcagacagaccgcgagcgcagaggaactaaagcgcaagaacgcacagcagacgcagcagcaggaaggcgcacaccacgagacgacagcaaggcagacgcgagcacgcgaacaacgaaccacccaaccacgccgactacgaggaaggacggaacagcgc

SEQ ID NO: 523554 - DNA, 380 bp, Homo sapiens
taaaatagccgagcacattatgcatattctcccttaccaccccccaattcacttacaattttcttttggtcactctccctagtaaggcctcactctaatacaaaattttccatcctagccataaacacgatacaacaacaacaacaaagtcaggttctgtacattcaaataaagtaatgtctttcccaaacatcccatctgttcttcaaaactctccctaggttgccacactccgctctgagccagctggcactttccaacagctgggtaaaatcattactcattgtccagatgtatcagtcagataggattcctctttaactctttgccctctccaacctccatcaaagcaatgaagtggccccgtcggcctaaatttt

SEQ ID NO: 523555 - DNA, 911 bp, Homo sapiens
  misc_feature (127)..(127): n is a, c, g, or t
tgcgcgccggctgagcaaccctatgctgggtaatcgggttcctccgagccgcgtagaactggttccggggctggtgaggaatggagccggtaggctgctggggagtgcgggtcctccgtaacccggnagacttcgttgttgagtaacctggcggaggggggtgagcgtgtgctcactttcttgcccgcaaggggttggtgagggggggcctgaatgtaccgcattttaccacatacgggtttcttagatggctgattcagaaactttcattaggttctgaaaagaagtgttggtgcccaataagagagcaagggaaaaggactagtttgtggaacacacagcattgtgcccttggaagaaggctatcccccaaaaaaagggccaggtgtcctgtggaattggtgaccccaggaattgtgtacggtggcctccaagttggacatccagggtacgcactcgccccttcaggacactaggaatctgggaggaaatctggttggcttttatttattcccctcaaattggagagggaattaaaaaattacaacgctttcattttaataggggcttccaaagattttaagccttagaaggactttcaactcagctgagggtagggcctttagataaccctgaacgtgcgtggtggtccgtgtctggagtataatagctgaaaggggggagccagtattttctggcgccagtagtcacggctttcagtgttttgacattcatccttgggggggggccgtggacaccctggctcattggcttgtggaagaccctctggttttgtgccccgggtgggtggccgcctttgaccgcgacagggcgtggtcccagggaggcgtaaaacgtgtgggaggcgccaagcgtcacacacccggcgtgggcgggagacacccgagggg

SEQ ID NO: 523556 - DNA, 1040 bp, Homo sapiens
  misc_feature (1)..(1): n is a, c, g, or t
  misc_feature (553)..(553): n is a, c, g, or t
  misc_feature (558)..(558): n is a, c, g, or t
ntaacacggagtgctgggcaggtgttatatctaccgaatacggcaatgatgctaatctagtaggtgtgataggatgtttcttatgcaaactagattcgttaaaccaacaacagaggaatattcagaaacagaatgttgcgacccctgcctgctgtccaactcacttaggagacgtctataccacacctctattctaataacccgagggcaccgtcatcaatcctacctcaatgactatactccattataccagatgccttggaagcgactgaatactttctgtctgtctcgtaacatctgaatattgccacataacatctaacagctttatttatcaagagataccttagttctgagggtctgttttttttttcagtgtcatcattcatataaacctttattcttttttttttgaactgctgatattttatcactgtatcactatctggcagaaacctagaaggtcttttaaaacttcatacacattacactgatataaaatatagcatatagaataataactgctcatcaatagcatttgacgtcaggatcnccccnaattaagactcacattttctgatacatgtgaaacaaacatacttctctgttaaatggactgcttaatacttttacacaaagatcttcataaagtgtgagagaccatttaagtataataataatctgggttgctgccatttttcttcctctttttatcacaaaaggcaatctgtgcaatcctgtataatgaaggttagatcttttcttcttttcttcaaaatatttttttctggttctttgaccttcccttaagcaattgctcagtgctcagtgaactgagtttaaaaatgctcatcaccttctttttccaatcttgaaggatctggaagagacagcatcagcaaaattggtccctacagagctctgaaggggagtccgccccaagcatctttttctgcttctgagagttaccagttacccttggccttctttggattataaatgcgtaagtgcgagctctggtcgacgcggccgcgaattta

SEQ ID NO: 523557 - DNA, 205 bp, Homo sapiens
  misc_feature (199)..(199): n is a, c, g, or t
ccaacggcccgttgcaattcttgcacaatgaacaacaagagcctttccttgtgtgggtgaaccaggaggatcaccttccgggtcatctccatggagaagggggggccacatgaaggaggtttttcgccgcttgtgtctagggctgtagaagattgaggagatctttaagaaagctggacaacccttatgtggaaccagnccctgg

SEQ ID NO: 523558 - DNA, 115 bp, Homo sapiens
ctgacttgaggatcctcgtacgagcgctcgtacgacgcctctaacaccctccgtaacgagcgcctactgacgcctccgtaacgagcgccacgtcttcgtaacagcgcctccgtaa

SEQ ID NO: 523559 - DNA, 726 bp, Homo sapiens
gggatgttaaatatggctataaatcttaatgttgattgtcatcacatgtctgctgcaatggtaaaaaaaaaaaaaaaaaaaaaaaaaaaaaaaaaaaaaaaaaaaaaaaacaaaaaaaccaccaaaacccaaacaactataaactcaaccaaccttatccatgcccccaaaatccaccctcactggcccaatcccccctatagcgacccgtatcacaatacactgcccgtcttttaacaacagcccccctggaaaacccctgccttcccccacctaaacccccttaaaacacatccccttttccccacctgccctaatcccaaaaagccccccaccaatcgccctccccaacacttccccaccctaaatggcaaatgaaaattagacccctaaatattctgcaaaaatccctctaaaatttccgtaaaatcacctcatttttaacccaattcccccaaatcgccaaaaccccttataacccaaaagactaccaccaaataggttcaatttttctcccactttgcaccaaaacccccctattaaaaaaccggcccttcaacttaaagcgcccaaaaaccctcttattagccgaatgccccctctctaacccctcccccataattttttgcgcctcatgtcccccaaagcccctaaactaccccctaaagacccccccctttttaaaccttccccgatataacccctctaaccttctcaacgcgcgct

SEQ ID NO: 523560 - DNA, 330 bp, Homo sapiens
cgcctcatcaggatttattttaattaagactcacattttctgatacatgtgaaacaaacatacttctctgttaaatggactgcttaatacttttacacaaagatcttcataaagtgtgagagaccatttaagtataataataatctgggttgctgccatttttcttcctctttttatcacaaaaggcaatctgtgcaatcctgtttgcacctgtataatgaaggttagatcttttcttcttttcttcaaatatttttttctgttctttgaccaggtttggctgcagatgacctcatgttctttctctgatttctcattgttccacaagag

SEQ ID NO: 523561 - DNA, 330 bp, Homo sapiens
cgggcgcatcccggatctattttaattaagactcacattttctgatacatgtgaaacaaacatacttctctgttaaatggactgcttaatacttttacacaaagatcttcataaagtgtgagagaccatttaagtataataataatctgggttgctgccatttttcttcctctttttatcacaaaaggcaatctgtgcaatcctgtttgcacctgtataatgaaggttagatcttttcttcttttcttcaaatatttttttctgtgtttgcacaccacgagagcagagaaatttgctttcgggttataagggggtgggtaggggtttggt

SEQ ID NO: 523562 - DNA, 930 bp, Homo sapiens
  misc_feature (482)..(482): n is a, c, g, or t
  misc_feature (848)..(848): n is a, c, g, or t
ggtcttctgcggtttctgatggagccacgctcctagaccaagaatgtcggccgcccaggtcctgaatgaagggctggctctactacgatgccgggcagacgcttccatggtagagtgcagtacctgtagccgggtggcttgtagtcggacgccacagtaacatcaatccgcggagccgacgtggttccctaggtatcggaggtcacctctgcagacgggcggtgacggtgtggtgaacgcccgtaatcgttcaacagaagctgtgcgatgatcatgtgggtctcgcactactatccagagaatatccgtcatcacatgacccacttaagaaaccaaaggacatctaaagcaaatctccattataagggacagcgtctggcatccagtagccgaatggtttgtggagtgcagcggcaacggtgagctgacgagttctgctttgggagtgactgctcgcgcaagttcacctacactacagggtnccattactttatcaagcccggccttactaggactctttagtcgggcttcgcagtgccagtccgtatccgcataggcgtccttctgacatccgaggtttctggcgcgagcttggtcggttcgccgttggcctgcgttatcaccgagcagccgcgactatgtgttttgaaactggccgatcgggtttcacgagatttcatcaccatggatcatttcatcctttctatacgcttccgcttactcagttcctcctggttgcctaccagtgacgctgcccagtgttacgcccatcgcgggtgttccctgcgcgtccttccggctgagggtggcccccgttggaggtctgggccagctggagctggagtganttgctgtggtcccgcacccccctgctcgtgcatagcgggccctacgtcctcggtttcccgaatcgaagggttgcgtgtggtc

SEQ ID NO: 523563 - DNA, 867 bp, Homo sapiens
  misc_feature (1)..(1): n is a, c, g, or t
  misc_feature (553)..(553): n is a, c, g, or t
  misc_feature (558)..(558): n is a, c, g, or t
ntaacacggagtgctgggcaggtgttatatctaccgaatacggcaatgatgctaatctagtaggtgtgataggatgtttcttatgcaaactagattcgttaaaccaacaacagaggaatattcagaaacagaatgttgcgacccctgcctgctgtccaactcacttaggagacgtctataccacacctctattctaataacccgagggcaccgtcatcaatcctacctcaatgactatactccattataccagatgccttggaagcgactgaatactttctgtctgtctcgtaacatctgaatattgccacataacatctaacagctttatttatcaagagataccttagttctgagggtctgttttttttttcagtgtcatcattcatataaacctttattcttttttttttgaactgctgatattttatcactgtatcactatctggcagaaacctagaaggtcttttaaaacttcatacacattacactgatataaaatatagcatatagaataataactgctcatcaatagcatttgacgtcaggatcnccccnaattaagactcacattttctgatacatgtgaaacaaacatacttctctgttaaatggactgcttaatacttttacacaaagatcttcataaagtgtgagagaccatttaagtataataataatctgggttgctgccatttttcttcctctttttatcacaaaaggcaatctgtgcaatcctgtttgcacctgtataatgaaggttagatcttttcttcttttcttcaaatatttttttctgttctttgaccaggtttggctgcagatgacctcatgttctttctctgatttctcattgttccacaagag

SEQ ID NO: 523564 - DNA, 797 bp, Homo sapiens
  misc_feature (797)..(797): n is a, c, g, or t
taaaaaaacaaaaccttaattataatatagcgcaaaaaaaggccaggactgatgcagggaatccctgggaaatactcagtccctatcacttttaaaacctgatttgggatctctcgtgtctatgtatgtctttagtgagagcacaatactgtggcagaacgctgtgccaaatgttataggtaaggaatatagaaatgaatgtttggtgggtgaagggtgtctccagtgtgactattttataaccccatttttcacaaaatctccatcacttttaagtataggaaggatagcttggccggggaaaaacagtttcaacacaccgtgctcagagtagcagttctccctcaaaaaagcagtggttcagcctgcactggactggtactggcttgccaaaaggaggaagcatgcacagatacttatttctcccatagattggtgggagtatacgcagggatgtggggactaacaagatcaactcatcttattccccccgaaagacaagaagtctagagcatcctggtcacgccacaggtgttgggacacaccaaatgtggaaccaggaccctacgacgatacagatggaaaaccctacgtggtaactacccacgggggtaccacaggcgacattacctcaccggagtctcagaacggccacaccctgagaagataacggatagggagattaaaccagagggaacgagcaacacagacccaacacagaaatctccagggcatcaaaatagagacggagatataacaacgagttaacaacgaggcggggcagcgtataagaccan

SEQ ID NO: 523565 - DNA, 268 bp, Homo sapiens
aggcatgccccaattgcacatgggcaacgactacaggtgcactctcgtaactctgtccagggatagactggtgacaacggccccgtacagtctttctgctcatgccataaccacaactatcgagtgatactctaaatactaccagacaagctttcgagtctcggtactgatcgacgtgtacaatcgacaggagcttcactgtcttcttcagattcaagattggtagcagactgtttcttgaatgggccagaaccacaaatatcggggg

SEQ ID NO: 523566 - DNA, 487 bp, Homo sapiens
gagccatgatggtgccacttcaccctggcaacagagaaagaccctgtctcaataaaaaagaagagaaaaactgagtgagaactctcctcctctcataatcatagtatccacgttaggaagatgcttctggagagtaaccttaaacgtactgttgtgtgcattcttccttcaaaacctgtgctttttttctccgttttggtaacggtgagaaagggaaaaaccttcaccgtagaaatactgtcttgagattaagatacaaataaaacatgttaaacctccatctaagagactatggcaacttattaacaccagaaaaatgtaccttggttatggtctttccaaatatccagagccaaaccctgtttcagccttggttaataatacagagatcagacaatgtgaagcacaaatgtgctgcttctccccctcctggttcccattgtcagagatggcagaagaaagcacagtgagctggttcaccaagtcc

SEQ ID NO: 523567 - DNA, 738 bp, Homo sapiens
cctgtccagcgtgtctctcccctgtccccacatgtcttctaagctgttggagccggccggcgctcacttgtcttcaggaagctcggagcctttggtggagccggggagaggaagggtgggtgcaagagtgaaaggcgagagtgggactgcaagcgatcctgggtctggctcctggcctggagcaagatggctgagtgtgcgagctggaaggctgccggcagattcttcagagtgaggtccctccagatcactcagaacttcatcattccaaaaaaggagatccatcacatgtatccagacatgggcaaatggaatgcgttctcaggcatacgcttgactacatcggattcatccttaccctcaactgaaggtgtgaaggggaatgaagctgaccttcgagtacagagtctccgaggcgcatagagaaactaggtcgcgtcttctcgacacgctggacaggttggatttgattgcagactcctccatgtgtgaccagcccctctcggttatgcggaataagtgcatacagggacctgggtatggcaaactatgcatgaggaagcagaacaagtctggaggccacaaatgggtcgctacccatctggcaggcttggtgtgcctgcgtgtgggtgaaaaactaaaaggtgtcatttggggaactcattgcgcattaggctacggcacagggcttgaggcaccttagcttggtacctctgctgttctgaaaatgcggtcacg

SEQ ID NO: 523568 - DNA, 193 bp, Homo sapiens
catgctggctaattcttgatgtagtaagatggggtttaccatgtggaccaggctggtctcaaacttctggcctcaagtgatccacctgccttagcctcccaaagtgttgggattagaggcgtgagccaccgtgctcgacccctcctgaaagaaatcccaggcaggatcgagcacggtggctcacgcctctaat

SEQ ID NO: 523569 - DNA, 725 bp, Homo sapiens
taagggagcaaaaggctttatggataaatatgcaaatttgtctgtccacagggacctgctgtggaggccatgaccaggctgaaacctcccactgccggggttacagccaggaaatggccctgtgcaaaccctgccacaaagcccagccgtccaccacccgcctcatctctgccaatggtgcggggggcagggagaggcagaggcccgcctcaggcttcccaagcccgggggctcacggggggttccctcccttccaagggagtggcactgtgcccaggggagagccaggggatgggggcagagagagggaagacagaggctgcttgagaccctgagacagaaaaccagaggggagcacagagggcagcaccagatgacagatcggggctccaggggcctctcgggtgggccctgggggctcgaacaggcttcgggagacaggcacgagtaggagggccctgtccgcctttcttcctgacaaggttcgaaaggcccgtgtgtgagtgaactgctcccgaggtaaccgggaaacggggtggcgctgaagtcgccctgcaaaggcagagttccttcacaggtacaccacacaagacaacaccgagggggagggcccctggaagaaaatgacccgactgggaaggcacgccacagggctagggggctaagtagcccagggaggggactcacccacagagtcagagggcccaaagactgaacaaaagaaa

SEQ ID NO: 523570 - DNA, 329 bp, Homo sapiens
gcacgagggagatctggttcttggttttgtggtagattggatatatagagtatgagagaaagggaacagtcactgtctgtatgtaccattgcttactaaagtcctttacccagcacctctgtgtctaaatctggtctctcccggaaagctctcctcaggttttactttcagctacaactctgccttcctattaataaagatcattgctatctgtatcttttgtatattttccatggatatgttctgtcttaactagaatgcaattcttaaaagtagagaccatgtttcccccaaactccctcacacgttaaaaagttgctggtgcattt

SEQ ID NO: 523571 - DNA, 148 bp, Homo sapiens
gcttctccatgtatcggcgtgtaactggctgtcttttggcataattgtaacacgttatggcatggatatgcacacaggttggtgtcttcaaaaaggccaaccagataggcctcacttgcctcctgcaaaaccccgatagctgccccct

SEQ ID NO: 523572 - DNA, 108 bp, Homo sapiens
  misc_feature (68)..(68): n is a, c, g, or t
gtgatctagaggacctgatatgcgtctcacatgttcatctttttttctctttaaaaaaaaaatgtgtngtttttttggagagggggtctggctgtgtaacccagacta

SEQ ID NO: 523573 - DNA, 820 bp, Homo sapiens
ctatgcaagctgtacagcggatattcatggtgtactgtatggtctgagtgaatactggcgccacatcgatcttgtctctactttgggcgcatgtctatcatttggatatcaaacagcagggataaatctatttttgttaacagagatgtatatctcattgacattcgtttttattagtactctggtatagttagctgagatctgtgtaactctatggttcagttactatcatatttatgtagtgtggatatcctgggttcatggttaaatatctgagagaatggatgcacagtctgaattgtgcatacatccatattcctagagactattgagggtattgtgggtgtatactcgtaagtgggtgaaatttagatttttattaatagatatattatgtatgcaatgagggtgtactttattttagtgtgctattagtcactatttgaatgaatcattgcaaagattatatcgtgtttaaatgaagtagcttgtgatacactatagactcatggcactcttcaaaaaaagtgtcttattaattttgtattatggccccctccattgttgtgcctttggagagtgtgaactgacttaccccaatgtcatacctccagggatacaggcatttcaaacatgggtcctctacgtctaccgttcctatcaaatgattttacctcatggtgttggaccgggtgaaccccgcactgcttaaggacaccggctaatcctcttacttatggcttccggtgctgatgtgcgctggatctgcaccaagcacgcgagcgaggtcattcgccaccaccgggttcgaggaccaggg

SEQ ID NO: 523574 - DNA, 403 bp, Homo sapiens
  misc_feature (316)..(316): n is a, c, g, or t
cgcagtctgcggcgcttggctgctgggcacatttcctgcacaacaacaaagagccatctatcgagccagaatccccagagacagagtaagggtagaacagagcggacatgagcaactctgtgcaggacctggtaggacgtaggaacccataggaagagggctgcactgcactcagtgcccagccttaactctgaccagcctcgttggctcagggaccgtacctttcctcctcctggactgatcactgagggcgtctggctctctatattccttctagccatcacgaatccacgctgtcctcccagtcttgtatccnttgctcgaatgtttaaggaacccctggccattttagttcttcaaattttcagacaggagcactgctgtccatccactgcagctccgg

SEQ ID NO: 523575 - DNA, 1140 bp, Homo sapiens
gccacttctctgggacacatgccttctgttttctccagcatgcgcttgcttccagttcctgttcagggccagccctgcaaccctgctcctggttctcgtgcctgcagtggggggccaacaaagctcaggacaacactcggaagatcataataaagaatttggacattcccaaagtcagtacgtccaaatgacgaagtcacgggcagtggtgggaggttcaaaacagaattggaaaggacttgcatgggggtataaaaatatacctcattagcagcatccttctacaaggggtgcattttacttataagtataatggcctgctattgtgaggacaatccaaaaaactttttctactggggactttatacacccaaaggaatttggtgcaatttggcagccgtccgtggatggtaatcgcgggaataaggcatctggcctggaatgatgcttgcttgtaatctcaatcaaaaaacaaccgggtttatactatgtgaacatcctacgggtagaaataagtggacgccctgtttgtgttgggccacacccaaggttgatttcctctaaagaaactggggtggaattctgggtgtggctctataaaataacttttttaaacatgcttctacaacaaaaacacacacaccaacaaacatttgtggggcccggcctcgagaagtttaaaccctcggtgggcgggcccatgagtatagactggccaagtgtcaagagaccgggctagagggggggtcccaaaaaaagcggggagccgcgggcaaccagggtcgggcttgcaaagccgtacacacccgtatcgcgccggacaagctagcaccacaagcgccaaccagagcgagtagcaccaccagaagcgacaagcagacaccagcaaccacgcaccaagtacagaaacgcggcacgaaaagacaggaaagcagaaagagagaaggcaacaaacagccagcgagaagcgaagacacacgcacgaaagaggaaagaaacgaaagcagaacaaaacacagaagagacggcagaacagaaaagaggagcaacaggaaagggacgacagcgagggcagcgaacgagcagaagaaagaaagcgagggcagaaaaagagggaggcaaaagagagaaaaagcaaac

SEQ ID NO: 523576 - DNA, 521 bp, Homo sapiens
ttttttttgagacaggttctcactgttgcccaggctggagtgcattgatgtgatcttagcttacaacagccttgacctcccgggttcaagcaatgctcccgcctcaacctcccaagtagctgagattacaggcgcacaccaccacgcccggctaatttttggtatttttttagtagagacagggtttcgccatgtgggtataggctggtctcgaactcctgacctcgtgatccgcccgcctcggcctcccagggtgctgggatatacaggcatgagccaccatgcctggccccacataaagtttctgagcacttgaaatgtggctagtgtgactgagaaactgaattttcaatttggtttgagactgggcacaggggctcacgcctgtaatcctgacactttgggaggccgaggcaggaggattgcttgaatccaggagtgcgaggccaccctgggcaacatggtgaaatcctgcctctaaaaaaaaaacaaagtaacgagcccagcgaggttatgcatac

SEQ ID NO: 523577 - DNA, 447 bp, Homo sapiens
  misc_feature (26)..(26): n is a, c, g, or t
  misc_feature (35)..(35): n is a, c, g, or t
  misc_feature (44)..(44): n is a, c, g, or t
  misc_feature (193)..(193): n is a, c, g, or t
  misc_feature (329)..(329): n is a, c, g, or t
  misc_feature (337)..(337): n is a, c, g, or t
  misc_feature (342)..(342): n is a, c, g, or t
  misc_feature (394)..(394): n is a, c, g, or t
  misc_feature (403)..(403): n is a, c, g, or t
  misc_feature (435)..(435): n is a, c, g, or t
  misc_feature (440)..(440): n is a, c, g, or t
gagcacacatttaggaccagctgcantctggagtnggtaggctnaggaccactgtcctgcttgaccaggaggtgcacagagccgtagccaaccttgtctgtccaaccctgcctgcagtctcagccatgtggtacaccccattcctcctaccagagctcatgtgcctctgtctacactttctggtggccctggntcttcacagaaattgacattgcgattttcagttcttgtttgcctcttacttgattttaggcttcctgaggacaatttgtgtctaagtcacaatgacacttaacacttggaagatgagggattaaatgttggaaggncaaatganccaantggtgtatgggccaagtgtggtggctcatatcggtaatctccagcatttggnaggccaagncaggaggaccattttaagctcaggatttgggnccacnggggaat

SEQ ID NO: 523578 - DNA, 549 bp, Homo sapiens
atccaaacatcttttcaaatgtgcaattcatcctgaaagcctcggaaattataggtaaaagagaactccgttctgaatccatttttagacctgtggaagataagaaaagatatgagaacacagattctgatatgggaggatatgaaattaaccacctgctctggcactgtgttgctgcttggtcttgtgttcagaataacagtcctcagttgaataacgtgcttgaacatctcgtcttccataagacacagcttcaaaagaaatgctggttgggattcagtactggctttactggtccttgggggaggctgccaaattaaacatgggcctgcttggaaagcttttaatgggacgtagtgagagattttgtttcaagcattatgtctgttcaaaatcaggaagaaagttgcaaggtagatgatttttcctgggcctggaatgtagtctacatatatacagtaattcttgcagaaatctgcttgtatgcagccacttctgatttgcgaaaaactgctttaattggtttctgtcactgtaaaagttcacaaa

SEQ ID NO: 523579 - DNA, 575 bp, Homo sapiens
  misc_feature (561)..(561): n is a, c, g, or t
agcgatatggtctgcatgcgaacttggtatcctgtatccatcccagtcgttctataacccagctaacatattcgttgaacaccgagagggtgagaacagacacctggtcaggaatgcggaccacgggccaattcaggctcgcccatggcgtcatgactaccggcgtagtcaaggatctactcgtgtataggccaatgctgaggcaaaagaagacattttagattcatctgcagattccgagatagccttgcagaaggccctggcagttaagaacgagcccaagatccaagcaaaggcaggcgaaggggccaagggacaggcggagaccggctcggcgatacgcgaagcctcatagagacagagagatccgttgcgagctgcgtggcatgcgtacgtgagtacagggagcatgaggtcagaaagatgacaagaatggccacaggagcaagcggcacgcgtgcgagcgagaataaaggaggcaccttcaagagccgaatgcagaagggacggcaggaggatgaaggctgagagcaggccacgagaggaccgtcatggaacganagctccttcagaaa

SEQ ID NO: 523580 - DNA, 954 bp, Homo sapiens
  misc_feature (36)..(36): n is a, c, g, or t
  misc_feature (51)..(51): n is a, c, g, or t
  misc_feature (87)..(87): n is a, c, g, or t
  misc_feature (117)..(117): n is a, c, g, or t
  misc_feature (217)..(217): n is a, c, g, or t
  misc_feature (257)..(257): n is a, c, g, or t
  misc_feature (311)..(311): n is a, c, g, or t
  misc_feature (335)..(335): n is a, c, g, or t
  misc_feature (338)..(338): n is a, c, g, or t
  misc_feature (347)..(347): n is a, c, g, or t
  misc_feature (349)..(349): n is a, c, g, or t
  misc_feature (357)..(357): n is a, c, g, or t
  misc_feature (407)..(407): n is a, c, g, or t
  misc_feature (410)..(410): n is a, c, g, or t
  misc_feature (413)..(414): n is a, c, g, or t
  misc_feature (422)..(422): n is a, c, g, or t
  misc_feature (453)..(457): n is a, c, g, or t
  misc_feature (459)..(460): n is a, c, g, or t
  misc_feature (464)..(467): n is a, c, g, or t
  misc_feature (473)..(473): n is a, c, g, or t
  misc_feature (502)..(502): n is a, c, g, or t
  misc_feature (505)..(505): n is a, c, g, or t
  misc_feature (509)..(509): n is a, c, g, or t
  misc_feature (521)..(521): n is a, c, g, or t
  misc_feature (531)..(531): n is a, c, g, or t
  misc_feature (537)..(537): n is a, c, g, or t
  misc_feature (552)..(552): n is a, c, g, or t
  misc_feature (557)..(557): n is a, c, g, or t
  misc_feature (564)..(564): n is a, c, g, or t
  misc_feature (567)..(568): n is a, c, g, or t
  misc_feature (583)..(583): n is a, c, g, or t
  misc_feature (589)..(589): n is a, c, g, or t
  misc_feature (594)..(594): n is a, c, g, or t
  misc_feature (597)..(597): n is a, c, g, or t
  misc_feature (599)..(601): n is a, c, g, or t
  misc_feature (609)..(609): n is a, c, g, or t
  misc_feature (612)..(612): n is a, c, g, or t
  misc_feature (626)..(626): n is a, c, g, or t
  misc_feature (630)..(632): n is a, c, g, or t
  misc_feature (636)..(636): n is a, c, g, or t
  misc_feature (642)..(643): n is a, c, g, or t
  misc_feature (646)..(646): n is a, c, g, or t
  misc_feature (650)..(652): n is a, c, g, or t
  misc_feature (656)..(656): n is a, c, g, or t
  misc_feature (665)..(665): n is a, c, g, or t
  misc_feature (671)..(671): n is a, c, g, or t
  misc_feature (676)..(676): n is a, c, g, or t
  misc_feature (678)..(679): n is a, c, g, or t
  misc_feature (688)..(689): n is a, c, g, or t
  misc_feature (691)..(691): n is a, c, g, or t
  misc_feature (695)..(695): n is a, c, g, or t
  misc_feature (699)..(699): n is a, c, g, or t
  misc_feature (706)..(706): n is a, c, g, or t
  misc_feature (708)..(708): n is a, c, g, or t
  misc_feature (713)..(714): n is a, c, g, or t
  misc_feature (717)..(717): n is a, c, g, or t
  misc_feature (719)..(719): n is a, c, g, or t
  misc_feature (721)..(722): n is a, c, g, or t
  misc_feature (730)..(730): n is a, c, g, or t
  misc_feature (744)..(744): n is a, c, g, or t
  misc_feature (754)..(754): n is a, c, g, or t
  misc_feature (759)..(759): n is a, c, g, or t
  misc_feature (781)..(781): n is a, c, g, or t
  misc_feature (786)..(786): n is a, c, g, or t
  misc_feature (805)..(805): n is a, c, g, or t
  misc_feature (813)..(813): n is a, c, g, or t
  misc_feature (823)..(823): n is a, c, g, or t
  misc_feature (830)..(830): n is a, c, g, or t
  misc_feature (836)..(836): n is a, c, g, or t
  misc_feature (874)..(874): n is a, c, g, or t
  misc_feature (883)..(883): n is a, c, g, or t
  misc_feature (888)..(888): n is a, c, g, or t
  misc_feature (930)..(930): n is a, c, g, or t
tccagtttgaagctactatcgtgggcgtttagagtnatacaaatgacactnacaaaaaataaaagaccaagacacccagagtgagangcatgtcggggacgggggaggctggcagcnggggggccccggcggctcaccccagggctcccggaggggcgacgcctggcttcatccacccgggaggcccagggagcaccaatcacagcaggggctctgncccaggtgtcggcagcccaggcccagggctggggctggangggaaggacggaaagagggggctgagatgcaccccctggggagggtgctgagangccccccgccagatcactcgctantanagccaggantncctgggangcctccagaaataatatttaattaaaaaaaataatgatttggtaattttntgnttnnagtaaggntagggtgaaaggaaagagaaaggaggaagannnnnannaaannnntaaaanaaagaaaaaaaaaaattggaagaaagtgnagngggnagaaaatgtggncgtaaagaantgaagntaaagggaagggagntacgntgagatntgnnaagtgggagaggggntgtttncaganaanannnaaaaaaanaanaaaagggtgagtgntagnnnaagngagagnntanattnnnaagnaggggtttngggganagtgnannagggagggnnantganaggnttggganangtgannagntntnntggggggntgggaggaggtggntgggagaggnaaaanattaaagttaaaataaaagaanagggntaaaagaaaaaaaaagtanattaggangattaaaganaaataangatcanagaagtatgaggttagaagaaaaaggtgaagaataganatgtggagnaaaanagggaaggggatatgaaataatataagggaagggaggagagntgaatagagggagtaggaaaaggg

SEQ ID NO: 523581 - DNA, 851 bp, Homo sapiens
  misc_feature (36)..(36): n is a, c, g, or t
  misc_feature (51)..(51): n is a, c, g, or t
  misc_feature (87)..(87): n is a, c, g, or t
  misc_feature (117)..(117): n is a, c, g, or t
  misc_feature (217)..(217): n is a, c, g, or t
  misc_feature (257)..(257): n is a, c, g, or t
  misc_feature (286)..(286): n is a, c, g, or t
  misc_feature (295)..(298): n is a, c, g, or t
  misc_feature (300)..(302): n is a, c, g, or t
  misc_feature (304)..(304): n is a, c, g, or t
  misc_feature (307)..(307): n is a, c, g, or t
  misc_feature (309)..(309): n is a, c, g, or t
  misc_feature (312)..(312): n is a, c, g, or t
  misc_feature (319)..(319): n is a, c, g, or t
  misc_feature (323)..(323): n is a, c, g, or t
  misc_feature (331)..(331): n is a, c, g, or t
  misc_feature (333)..(333): n is a, c, g, or t
  misc_feature (340)..(340): n is a, c, g, or t
  misc_feature (344)..(345): n is a, c, g, or t
  misc_feature (349)..(349): n is a, c, g, or t
  misc_feature (353)..(355): n is a, c, g, or t
  misc_feature (358)..(358): n is a, c, g, or t
  misc_feature (407)..(407): n is a, c, g, or t
  misc_feature (410)..(410): n is a, c, g, or t
  misc_feature (413)..(414): n is a, c, g, or t
  misc_feature (422)..(422): n is a, c, g, or t
  misc_feature (453)..(457): n is a, c, g, or t
  misc_feature (459)..(460): n is a, c, g, or t
  misc_feature (464)..(467): n is a, c, g, or t
  misc_feature (473)..(473): n is a, c, g, or t
  misc_feature (502)..(502): n is a, c, g, or t
  misc_feature (505)..(505): n is a, c, g, or t
  misc_feature (509)..(509): n is a, c, g, or t
  misc_feature (521)..(521): n is a, c, g, or t
  misc_feature (531)..(531): n is a, c, g, or t
  misc_feature (537)..(537): n is a, c, g, or t
  misc_feature (552)..(552): n is a, c, g, or t
  misc_feature (557)..(557): n is a, c, g, or t
  misc_feature (564)..(564): n is a, c, g, or t
  misc_feature (567)..(568): n is a, c, g, or t
  misc_feature (583)..(583): n is a, c, g, or t
  misc_feature (589)..(589): n is a, c, g, or t
  misc_feature (594)..(594): n is a, c, g, or t
  misc_feature (597)..(597): n is a, c, g, or t
  misc_feature (599)..(601): n is a, c, g, or t
  misc_feature (609)..(609): n is a, c, g, or t
  misc_feature (612)..(612): n is a, c, g, or t
  misc_feature (626)..(626): n is a, c, g, or t
  misc_feature (630)..(632): n is a, c, g, or t
  misc_feature (636)..(636): n is a, c, g, or t
  misc_feature (642)..(643): n is a, c, g, or t
  misc_feature (646)..(646): n is a, c, g, or t
  misc_feature (650)..(652): n is a, c, g, or t
  misc_feature (656)..(656): n is a, c, g, or t
  misc_feature (665)..(665): n is a, c, g, or t
  misc_feature (671)..(671): n is a, c, g, or t
  misc_feature (676)..(676): n is a, c, g, or t
  misc_feature (678)..(679): n is a, c, g, or t
  misc_feature (688)..(689): n is a, c, g, or t
  misc_feature (691)..(691): n is a, c, g, or t
  misc_feature (695)..(695): n is a, c, g, or t
  misc_feature (699)..(699): n is a, c, g, or t
  misc_feature (706)..(706): n is a, c, g, or t
  misc_feature (708)..(708): n is a, c, g, or t
  misc_feature (713)..(714): n is a, c, g, or t
  misc_feature (717)..(717): n is a, c, g, or t
  misc_feature (719)..(719): n is a, c, g, or t
  misc_feature (721)..(722): n is a, c, g, or t
  misc_feature (730)..(730): n is a, c, g, or t
  misc_feature (744)..(744): n is a, c, g, or t
  misc_feature (754)..(754): n is a, c, g, or t
  misc_feature (759)..(759): n is a, c, g, or t
  misc_feature (768)..(768): n is a, c, g, or t
  misc_feature (845)..(845): n is a, c, g, or t
tccagtttgaagctactatcgtgggcgtttagagtnatacaaatgacactnacaaaaaataaaagaccaagacacccagagtgagangcatgtcggggacgggggaggctggcagcnggggggccccggcggctcaccccagggctcccggaggggcgacgcctggcttcatccacccgggaggcccagggagcaccaatcacagcaggggctctgncccaggtgtcggcagcccaggcccagggctggggctggangggaaggacggaaagagggggctgagaanaaaaaaatnnnnannntnagnanaanaaaaaanaaanaaaaatananaataaanaaannattnaatnnnaanaataaagaaataatatttaattaaaaaaaataatgatttggtaattttntgnttnnagtaaggntagggtgaaaggaaagagaaaggaggaagannnnnannaaannnntaaaanaaagaaaaaaaaaaattggaagaaagtgnagngggnagaaaatgtggncgtaaagaantgaagntaaagggaagggagntacgntgagatntgnnaagtgggagaggggntgtttncaganaanannnaaaaaaanaanaaaagggtgagtgntagnnnaagngagagnntanattnnnaagnaggggtttngggganagtgnannagggagggnnantganaggnttggganangtgannagntntnntggggggntgggaggaggtggntgggagaggnaaaanattggagtnagagtagagggggaggggtgggaggggggaaggggtgggttagggggttggagagaaataagagtgagaggggtgtnagttga

SEQ ID NO: 523582 - DNA, 231 bp, Homo sapiens
gaggtgatttgtccctcaccgatattgtctttctgcagataactagccagacccatccctttatttcagcccatccctttatttcctgtaagaaatgtttttagttaatctataatctatagaaatattgcttatcactggcgtgctgtcattaaatatgtgggtaaatctctgttcaaggctctcagctctgaaggccgtgagacccctgatttcccactccacacccta

SEQ ID NO: 523583 - DNA, 245 bp, Homo sapiens
ttgaggatgtctcagagcagaacgtgagactgttgttcgcacgctccttcctccctttcgcgaagcgtctgctctgactgacatgggcgactggcttcctctgtgtggcagcatgagctctttcgttaggcaaaatcgagaggtcccccagccctgttcctggtcctgacgtagctagcatagttcctggaactggggaatcacgtggggctgctgcacttctctccgtcttttccccaccacag

SEQ ID NO: 523584 - DNA, 158 bp, Homo sapiens
  misc_feature (5)..(5): n is a, c, g, or t
cttanaggcaggacactgtgcatgtggcgtgttgccccgatgtgtgtgatcattctgaccttgctcaccccactggcttaaacaataccattccagctggagtcagcctttactgccttgacgaggcatgtcacttacgttccccaaacacagaggcg

SEQ ID NO: 523585 - DNA, 334 bp, Homo sapiens
  misc_feature (74)..(74): n is a, c, g, or t
  misc_feature (275)..(275): n is a, c, g, or t
gtgcccgggtgcctagagtcaggtcctaccttagcgccaggctgtatgtgggggcaggaagtgggaggcccacngtcttgtcccttgcctctgagtcccaggagaagccctacccttttgctgctggaggccgcccatcgaggacctgacaggcgagaggtcaggatgaaggggctgagcgtggagccagggaggctggaggctccgttcaggaaacctcacctggggcaagggaggggccttcccagatggacagaggtcacagtgcccagtgnccccgcctgcacgttcccatgccgctctccctacacccccacagagaaactcgggccga

SEQ ID NO: 523586 - DNA, 891 bp, Homo sapiens
gactgtgtgcggtctacaacaatgtgttggttctgttgatacacatcgtgatcgtgtgcgcaaaaataacacgtagctgtgcccatatgtgttagcgaggataatgtcgatcataacactgcgtcgtgtttaacaaattctctccttggggagaaaggaatcgtcggtcttatgttacttcccatatgccgtatatgtcctggacacaagctctttgtgcacaccgtaaaagaacattgttgttgaggtgtttttgagagcccaggaccaagaaaaggtgtaaaggtagtcgcctgtccgacttgtttctgaacacccgttattcattcctggacaaccattttcgtttaaatttaaaaaagtacgccacttcccatggtaagttatgttcctcctccccctgccccaaaaaattttttttaatactggctttgtgacccgccccgaggtaagattcccaaaccccctaactcagcttgcttcttgcacactgaggataatttttcccccccacacttgatctccctggccctatacactccacaccccaaacttaaccctctgtgtggggtttgtgattttgatagccccaaatagttctcgtgctcggttgccaaaattggatatttagatcggtttttatataactgcacccacgaagagtgtgctctcccccttataattgtgtccttttttattgttgcactgtttgctctttgtttatcacgcaccgaattttttgcccacgtaatatgatatgttttcgctgatgttttgtttatattgggcacaaacatattcttcacttaaagaagtttttggagaaaactcactcacaaatcgatgaaaacatttttttcaaaaacccattgggattatttcttaaaaaaa

SEQ ID NO: 523587 - DNA, 251 bp, Homo sapiens
agacccctctctttgaggtcatcatttgtgcaatctctatggacagaaagggagttccactctcacacacaaacaacgctgatccataccttctatgatctgaagatacagaaaaacaaacacaaacataaaggcgtgtctgatgtgactcattcggagcctgaccactgtgggacctagatctggtgggtgcgttctgccacaagtttgaattcgaactgcaggatgtgcaccgcgcgtactagaatgtc

SEQ ID NO: 523588 - DNA, 502 bp, Homo sapiens
tatgacggtgtggaagtagacctgtaagtagtgggggggggcgatattcgagtcatgaccatttcgtaaataagaggcgagtaattggtcgttgaatgattcttactattgaataaccttcctggatttgtatagttttgcaccaataaaactgtgtactactgtttgttggtttaagagtagcagattgaaatataagaagccagattagactctaaaattgtggccattggaatctcatttataaatggaccttttaagtatattaattcctcttcagaattgagctggacacatttggcattcttagtttgtcatataaccaggtttatccttagtctaactgcaagggatagaacctgccccaggtcacaatcattctgtccaatccagccaaggttccctccacatatgaagatggaccatggcaggatacaactgattgtgtggcaccatgtattagcagtgggaatatgtatcacatatgatgcagcctttcata

SEQ ID NO: 523589 - DNA, 507 bp, Homo sapiens
  misc_feature (62)..(62): n is a, c, g, or t
  misc_feature (145)..(145): n is a, c, g, or t
  misc_feature (354)..(355): n is a, c, g, or t
  misc_feature (362)..(362): n is a, c, g, or t
  misc_feature (388)..(388): n is a, c, g, or t
ccacctcagcctcccaagtagttgtgactacaggcataagccaccacacccagctaattttngtattttttgtagagaagggattttgccgtgtcgcccaggctggtcttgaactcccagactcaagcaatccacctgcctcagnctcccaaagtgctggggattacagccataccgggtgtcagagcatgttgtgagcacctctacctgggtgtccccctaggctacagctgctctcaaggtcacttcctctcacacagacaggcagtgaaactcatgctgaggactcatcttctgtacacacttttaagaacttctacttccaaagatacaatgaagttaataaatgaagcnnagcaganttctagactaggcttcacatagggtngcttgcagcatttagatgcatttctctagacaccacacctattttccaactgtaatattctgtatagaatgcaaatgttcagactttgcttttcaaaaacgttgtatggttcacagctg

SEQ ID NO: 523590 - DNA, 170 bp, Homo sapiens
tggcatagtccacagatgccagcatatctggtcccttaggaagcaggtgtaatggagagtgaagcttgctcaagatctgggttgagtatgtgtcaccgcatcaggaaatggcatccgtttaagggaaaggtttagatctgtcagtaggggataccgagactcgaatttcg

SEQ ID NO: 523591 - DNA, 479 bp, Homo sapiens
acccccggattggtgtacctgcatccttatttgaacgcggtcacagcgagcgccatcaccaacgcccagtcctgttcaagccattgcacaatgccggcacggaactggcttgaaaacgtcctggtcactgattgtggcacggtgcacgctgcatcacggtgctgaagctgcccgactgtcgcccagatgccttacgccgatgcggggccgcatcgcggtaacgggtaataatgacttgtgggttgatggtagattattgggctgttactttgtcagttcagcgttttaatctgacgcaggcttatgcagaggagaatgttttcatgtaacttatactaacattagttcttctatagggtgatagatttggtccaattgggtgtgaggagtccagtcatatgtctgggatttatcaggtagtgggtgttgagcttgaacggcctttctaaattggaggctgctttaaacgccgaatcggg

SEQ ID NO: 523592 - DNA, 552 bp, Homo sapiens
gagtcagcctgttatagttattgaacaaagtgaaaaagagactctcatgtcaaaaactggcaaattggcagactgtcctttatatacatgcagcgtgcaagctaaagtcagtaataacccatagaaaccaaagaacaggcaggctctatgatcactgccctcttgtctcatcatcgcgatgacaaggaccatttcactggtcatcaacgtttttgtttttcgtccatcaaaatcagcatgccttaacaacactggagaaggtgtggggtgaagggtcattaagggcacgcagtagccataatgccacaccctttgtgccagccactgcgcttctggaaacctaccccacagcggtcaaccaaaagacagcaaaggcttctggcactaagctggtcacaaacgcattactaattattgtgcacatgtggaacctaccatctaagcctcctttctaaggcgaaaattcccactactacatcttgccacccttctttaacttacacactttaggaaaaggatgatttttcagaaactagcactgctcattcaaag

SEQ ID NO: 523593 - DNA, 930 bp, Homo sapiens
  misc_feature (1)..(1): n is a, c, g, or t
ntggtcgctagtgttccctcgtggggttctggttgtgtgttttgctgctgctctgtggttgctctcttgttgttgtcgcgtcgcctatcattttgtgcgtgttctcattccgcgtacgccctgggggccggctcgcggctcccggctccccgccggggtctttaccgaccataatagggctactgctcagccggtgagacggcccccgatcttggtgccgagccgtgccctgttttttgtccctcccggttacaaatgtcccagatgtccggggttcggcaaagtcccctgggttctgcccatctcccccccgtcttgcgagtgtcaagggaactcccttgtaacaaagagcgagaatgtgaaaccacggggtcagaaaccggtgcacagagctggaatcacagcacccgtggggagagaccgcacggacgccgccgcatcatcccgaggtcaggatgtccgcccgaccaatcctgtgatctaaagttgtagacaagccccaagcctatcgtggagacgaacaacccccagccaggccatgggggtgcaggcgcccactgggacccccagtctttgcttccagagagtatgcagcccccctgcctcggttataaatgaggcgtgagtcggagcgaccgccctgagaacaaagggcgggaaaacgggcccctccacccctagccggcagattgtcgataaactgtatccaaacatgggggataaaccagcgagccagggggtgctccaaaggcccgaccccacacatggtgaccgccgcgcggacgcgatcacatgcccacacaaacaggggagatcaaaggacaataggtcccaccaaacacggaggtcacttccaccctatcatgtgaggcactgtccccccccaaagcctccgctccgtccccaccttcaaaaaatgtccacatgaca

SEQ ID NO: 523594 - DNA, 369 bp, Homo sapiens
agcacgaggggacgttgacccttcatcaacgcggagtgcgcgcttgaaactctgcaagttcaaataatgtgtgcgccccttcaagctggcgccacgaacttcaaacggcagaatatccttcaatgttgtattaattgtttcggtcacttgctgttgcaacgtaattgttggaacagcgacgaccacttgcttgcgctgctcatcagctaggtatgcgtatggcagtaaataagctaacgtcttgcccatccccgttggcgcttccgcaacaaaggctgtctcccctggtgtttctgacagttcagcctcagtgtaatgcgtgtaaatggcattcatcaacttagcttgctgttcacggtatgccaacgt

SEQ ID NO: 523595 - DNA, 225 bp, Homo sapiens
  misc_feature (201)..(201): n is a, c, g, or t
caggcgtgtaccgatctggtggttcccagcaagggatctattggctttggaagagaccgcttgagatagctccctagtaggatacgacacctggagtctggcttgctccgagcactcttcacctcgtcacccttgtgctgtcgagaacaatgttgagtgtaacgcgagatcactaaagcagctgcagcgcccggttctggngtgactgcgaaatgcaccgttctt

SEQ ID NO: 523596 - DNA, 914 bp, Homo sapiens
caattaaaactagaaatagcactctggtttcttttgatgaaaagagtgagctggtcaatgcaacattgggaaacggcagatgtaggtgagaagttaagtatttaatagtatcaaattgttcaaacatgctcagtataataactggattttaatggtgacctaaaaatggtattaaatattttcaactttcaaatgtggttttctttaagcaggagactgctattttagttgtgttaaatgatgaggagttttttttttttaaaatatggcgggaaaccttgtttggaacaatgaagcttatattaatggtggctctcaatagttcaacaaaattccagggagataggtaggtcatatatgatggcgagagccaaaatagcaaaacaaacattttaagtgtgtttcactaaccatttggtgtgtttccctaacacacttaaggttaatatacctaatatttatatgcatatctgaatttattacaaacaaccacagaaatctcctgcctgatatagttatggacgtgatctctaaatctggcgcatacaagtccttgcgggcatccacgggcccaattgatacgggatttggagccccagggcttggcccggccccctagcgtagagaacaacccaagatagacccgtgaagacagacgccactgcggcccctaatccccagcccaacggacacatccgtactcattttcactattctgacaccacacccttgtacactgcgcaacgaacaatcacaggtcctcaacatacccagacaccaaccatcggccgcaccccaacggccactacccagcaccgcgcaccgagaaagtcctcagcaaagacgacaaagcacgcgcgcaagaaacacacactgaccgacggacacgagaccaacacacttaccgacgccag

SEQ ID NO: 523597 - DNA, 133 bp, Homo sapiens
tcctcctcatcctcctcactgtcatcatcctcctcttcatcactgtcttccttcttggcattcttgccatcctaggcacgggggccaggaatggcaagaatgcccagacggaagacagtgatcacggggatcc

SEQ ID NO: 523598 - DNA, 423 bp, Homo sapiens
ttgtctagctcttcattgtatccgagctagtaggcaggtatctgtcatcccaggcataatggaggcaaggcaggaggatcactatgagctcgggagtttgagaccagcctgggcaacaaaacaagaccccgtctctaattaaaaaaaaaaaaaaaaggagggatgcggtggatcacgcctgtaaccccagcccttggggaaggccaaggtgagtggatcacgaggtcaggagatcaagaccatcctggataacacagtgacaccccgtatctactaaaaatacaaaaaatttagccgggcgtggtgacaggcgcgtgtagtcccagaaactcaggaggctgaggcaggaaaatgacgtgaacctgggcaggcaaaagctatgcagtgagctgagaacgagcaattgccctccagacggggcga

SEQ ID NO: 523599 - DNA, 176 bp, Homo sapiens
ctcagcgctcggtcccgggtgctgtttgcgtggccgtgcttctggcgttgcacactgtgtacgactgtcggggactcctctcgacgtcgacctgtccggactgacatgcttgggacctggcgcgtctgtttacaccccgtcgtgacctgggcctcccagcacccgtctctcctcgg

SEQ ID NO: 523600 - DNA, 193 bp, Homo sapiens
tcctgcttgatattgctgcggtggacttgtagggctggtcgctgcgccaatctccttaactccagctgtgatgtcttctggactgtctgcctatacgtagaaggtcctggagcttgttattatttcaaagaggttgtccctcattaagagatcaccagacttgagcagaaatatcaagggggtaccgagctcg

SEQ ID NO: 523601 - DNA, 156 bp, Homo sapiens
ggagtgttggggaacagcactcctcgtcagcaggccagactgccgggcgctgctgcttttcatgaggtcgatgcaggctgcaggtcgaggccaaagtcgatgaggtttctatcgatgccctcgagctggtactcctcctgctccaggatgaacatg

SEQ ID NO: 523602 - DNA, 589 bp, Homo sapiens
taataatcagggatctaaatataaaacatccttattacatttaaattatttcacaaaccacggctcctggttgacaagtaaaatatgaatattataaaaagctcaattcttcaaaggtatcagagttttaagtaaaaggcaggaaaagtcattattcggggccttatacatcttaacagaataaatatcacacttttctatagaaaatggcggaggaatatttttataatctaatgggtcagtatactcaggaactcattctccattcattacggcatgcataaagtaaaactggaagctcaccagggtcatcctctggaaacagctcacctttaactccaattttctctggagaatctagtggtacatcggtgtggattttagattctacttttggagctaaaattccatttttcggttgggcaaggcaaaccaaccaatctctgacaaggacctcgcttatcttttcacatgaaagagcaagttcacgggggcgaattccatctaaaagttcaataagctgtgtgatgctttcagaaaggtgaaaaatttacatttctactaaaataataacattatatttatttaa

SEQ ID NO: 523603 - DNA, 255 bp, Homo sapiens
atgtgatgccacacggcaacatgcatgtcagcacgatagcagccgaggacgatctcagcacctccttccccccaaccagggacaccagctcaacaacaatcaccacatcccagatatcctcatcattcagcctcttcatcttcactttcttgtctgccattctctcccactagatgctcacgctctatagagggcaagcagcattttgcttgtaacgtaccactgctagtagcatcgggtgttgtggccccacct

SEQ ID NO: 523604 - DNA, 205 bp, Homo sapiens
  misc_feature (140)..(140): n is a, c, g, or t
tctacagaaaaacagcagtagtactccagagtgaggtgtgagcgagatgagtgaaataccctaaaagaagaacatagcgagaagcccctggaggttcctcaggagaaatggaatgcaagacccatctatctctttctccnaaccctagtacaaagaaatctttttcccaggaggcagttgatgagtagcgatctttaagagaccg

SEQ ID NO: 523605 - DNA, 133 bp, Homo sapiens
tacttcctgggaggtggggcggggactacggaaaaggttcaaccaggctgtggcaaagggccccagtcccagccttggctgggaaggaggggcgacagcttaaggtcgactaaaaccaagtctgttttcctta

SEQ ID NO: 523606 - DNA, 469 bp, Homo sapiens
  misc_feature (191)..(191): n is a, c, g, or t
tcctggataccgcataggtattggagaaccactagcctaagagggaaagacttcaacacataaccttcaaagaaagctttccctgagggtatttcctaaataactttcaaaagttaaaaataaggatgggggagggccagtggggatcactttaacctattactcttaccctagctttttttttttgaaanagtctcaagctggagtgcaatggcgccatcataactcactgtagcctccatctccctgggttcaagcagtcctcctacttcagcctcccaagtagggactacaggcgtccaccaccacacctgattttttgaatttttagtagagacgaggtctcactatgttactaggctggtcttgaacccctgagctcaagtgatctcctgccttgggctcccaaagtactgggattatatgcataagccacagcgcccagcctgtcgctttcttttctttcttc

SEQ ID NO: 523607 - DNA, 224 bp, Homo sapiens
ttatcgatcttgactggaatactcctgtgcgatcttatacaacacaacaccgaaataatgtccaaattaatatatgcttaaaatgcagcaataaagctctccatttatgttcaaatattatgacagactcactccagagctcatgtgtctaaaagaaaaacaaaaagattaaaacaaaattatatatgcactctatatacctctgattatagaatgaaacttac

SEQ ID NO: 523608 - DNA, 228 bp, Homo sapiens
cttatcttcacgctataaaattgttcatctcaagcacagcatccatcttatggccttcatgcattgtaaatcttctcagtgaggctatcaaactcccactcatgcaaaacaacaggcatacacttaacctgacttgctccagtatgtcctttctgtttgtcaaacattgcacatttggctctttgtggcacaaaacaggcacaaacacacaccacaaccaacacaaca

SEQ ID NO: 523609 - DNA, 171 bp, Homo sapiens
aggcacaggtgccttggtcagagagtctacaaacactgatgattctcgtggaggctgtggttgctgacgaagacgggggcctgtgactttggccttgaaggggctgcccccaatgtggtagggccgcgtacttatggagataggtagctgccaggtgccatgggggtatag

SEQ ID NO: 523610 - DNA, 1835 bp, Homo sapiens
gctgtagtctcccgctgccgctgtccactgcgcgcttcgctctccgccgcccgaggcccgcgctgctcgccatgtccctgttgccaccgcacaccgctgggtcgcctcgtgtgctgggcaccatgggagatgtgtgtgctgcctggcatgtgactgctgccctgccagcgcctgctggctgtgctgcagcctttcttggagctgctgtgcacacctgaactgtgacacgtgcacttcagtgtacatgtgactgtgcagtcctgagaccatcctgggcgtgctgggcgctctggtgctggtgctggtgtgctgactgcagagttgaaaatttgccatcaaggccaacccttgggatgtgcaaaatcactaaagcctgacagtgtcctggtcccatgctggagacgtcattgaagaggctgcatgtgtccccaagtggatctcttctactacacacacctgaccacggcacccctggctggaagacgatgctgcatgcctgccagctggctgaaccaggagggcaagttcgtggcagcttgggcctctccagatatgctagctgggaagtggccgagatctgtaccctctgcaacagcatggcttgcatctgccactgtgtaccatgtcatgtaccaacgtccacaacccggcatgtgtaaaccgacgcccttccctggctccagccatcttgacctgaggttctatgccgtaaaacccttggctggggccgcgtgctggcaccgcccacctcagccagcactgaatcgcctctggcaccctaggcataacttttagcaccacgcaaacccggagcaccattcagcatctgtatacaccctccatttgtaccgacacggataggccacaagatgcacacatatcacagacaccgacggcaaagcagtgatttgaagcgagaagaaaagaaacaggaccaaacaagacgcaaaaaaaaacagaaacaatcaacaaaaaaaacgccacaatgaacacaacaacaaacagaacagaccaaaaccaccaaaaactaagaaacacgacaacagcgtgaaaccacaacactacacacacaacacaataacacctcatactcaccaacacgaaaaacaaaattaactcatacttatactaatccaatcaccaaatacccaactaataatccattctattattaactatttacttataataatcatattactattatctgatccattttagcccattaaccctcaaacgacctattctatatcatacctataacacactaactcacaccaaccacaccacgatcctaccatcactctgccaccatctatcatcgtctccctgcacgatgccactaggtaatgtgtatcgttttgtttctctgctgttatcactatatactttgtctttgtacgtaggtcgtgggtagggcgttcaggtcctcggcagtcgcccgacttgtcataggcatggcacggaaaatgtgagtggtggcgagtaagagtgggacgcgcgtactcgcggccgcttaactacctaatataaacactcatctaaatgtacatacgaagacacacactactccagcaacgatacaacaccacacccatctcagcacacacacagaagcctacactaccttgaaacacgtacaacacacaccgctacttccaccaccacacacataatcatcacctcacattcatcacaaatcatgatatccatactcctgacatcagacctactcaaatataccaacctccagcacttcttgcatccactctaaagacaactcactctacctctatcaccatacgacactacatcaaaccaacacttactatcaa

SEQ ID NO: 523611 - DNA, 101 bp, Homo sapiens
accaaatgacttgacggaggaggacgggccgggagaagttgattcaggagcttgtgaccctcattgagcagcgcaacgctatcatcaactgtgtcattggg

SEQ ID NO: 523612 - DNA, 549 bp, Homo sapiens
gatgcgggaagccggactctgggcgtcatgtactacaaagtttacgtggtcttcatcgcaatgacatgttcgagtcatggacgcatcgggcttcgtgagtgcctatagcccgcagggattaaagcctgcggttatccacagaagcaccacctatcatattggccacaccaactaaactgagctccgattccacaggtgtatgattatgctgggcaaaaacaaagttccaggtctacaaaagtttttccagaaagctgatggtgtgcccgtctacctgaaatcgaggcctcgctgaccaaatgctgttatcggatcaccatggcgctgactgtgggagggaccatctactgactggtcgccctctactatggcttcagctagtcctcaaaaataccaacagtgcacgcgtcagtgcctgtcagaggacgtggtatggttatcggcgataaacccgttgaagtcccttatacatcggtaagttaacattgctctctcatacactggcgatggcttcacaatttggccagaaccataggacgcatctccgga

SEQ ID NO: 523613 - DNA, 815 bp, Homo sapiens
  misc_feature (815)..(815): n is a, c, g, or t
gctggaatgctttttgtttttttctttcacttatataagggataatttttctttttctttttttctgagacagagtctcgctctgttgcccaggctggagtgcaggggcactgatctcggttcacggcacgctccgcctcccgggttcacgccattctccggcctcagcttcccgagtagctggggactacaggggtgcccgccaccacgcccggctaacttcttggtgttttatagtagaagacgggggtttcacctgtgttgggccaggatggtctcgatctcctgaccttgtgatctgcccgactcgagctcccaaagtgctggcgaattacagggctgtagaagccacacgcagcccgggagggcagaaacaccgaaatatggtacataacactctatacattcggggacataaaattctcaaaaagaccccctgtgacactcgtctccacgacgactctgaaggtgccgatgtgttacaacttggacaagaacccggtaccctcataagggggccaaaactcccaaatagcatatacataggcgacacaggtgacttccactatggtaccacaccgcacaaaactgacccccgactgctgtgtggaacgacccacctgggaccaacagatcccttcacaagaccccctcaacaacatggggctagactcggccaacgaccgctgtctcatcttacaacacggaattcccatacaaccaccacgcagggggactaaatcaccacaatttcccactccacaagttgacacccgaaacgggccctaccccggcgccacaccatccccaggggn

SEQ ID NO: 523614 - DNA, 162 bp, Homo sapiens
ttcagccttttcagggtggaagaaaatacctttttttttccccttctttttactctcactggctgaaaagctctcaagggttggaaggggggttgggaatcctgcatcaccaactcacggacgggtactgaggcctgagacaggccaagagcgacggacagg

SEQ ID NO: 523615 - DNA, 462 bp, Homo sapiens
ttcattagatcatgccttctcagtatggacgagcctagtgtgttggtatttgccacttgatgcacgttccctatagccttcattagatcatgccttctcagtatggaagagcctagtgtgttggtatttgctatcttgatgcacgttccccattgccttcattagatcatgccttctcagtatggaagagcctagtgtgttggtatttgcacaaacatttgacttagtcacatgaacggtatctgttatatcaaccaaatacaatggattaagaatgacaacgttacctggcctctgctcgagctcaacttctgctgaaatgcagagaaaaaccacacatcctatttgatgacacaacatatctgatatctcattagatccacatcatatttctatttattgagtcacacagatcacataacaatgtacattaccgtcgacgcggccgcgaatttagtagta

SEQ ID NO: 523616 - DNA, 654 bp, Homo sapiens
  misc_feature (109)..(109): n is a, c, g, or t
  misc_feature (111)..(111): n is a, c, g, or t
  misc_feature (113)..(113): n is a, c, g, or t
  misc_feature (623)..(623): n is a, c, g, or t
taccacactctatagatagtctgaagggattattagtgccagccagccagctgctgtgtagtcagtgctctttctttgtagccagagatgtatgacttgggaggctccngngnacagcatcactctatttgcaagtttgcttgtaatgtctgagacttgcttcaggaaatgtaatgtcaaaatataatacatcctttcccaggaaccatcattgacataaaatagcaggttgagcaggttggcaatgtagtatttgtgggaaattgaggaaagaatggttaactgtccactggaggttgagaaagtctcaaagaagtgagaattgaattgagttgcagggaggcgagaattgagttgtagggaggcaggcataggaatgtgccttctaggtactaggatcaggcaacaaaggcatattcaagactgtctagtcctctgccacaccttgcctccactaactttccctgaaggggcgctgtctgctactgtcgcggacacaaaggctgactatggcctggaaacttgagtacagagacaagagcgcttttctgtacacagctaggtttctgcttgctacccaggaaccggggataatcactagtgaattccgccgcctgcaggtnaccatatgggaggtcccacgcgttggatgca

SEQ ID NO: 523617 - DNA, 293 bp, Homo sapiens
ctgctacctgcgttacgtgattgacccttaccaactggccgaatttgaggcctatgccaaagtctggatcccgctggtagagaagttcggcggccagcatcatggctacttcctgccctcggaaggtgccaacaatatcgccctggccatgtttaccttccccagcctcgcggcctatgaagactatcgcgagcgctcaaaaaccgatgccgagtgcattgccgcgtttaaactggctgaagataatcgctgtatcctgagttacgagcgcagttttttcaggcctgttttcg

SEQ ID NO: 523618 - DNA, 1788 bp, Homo sapiens
  misc_feature (274)..(274): n is a, c, g, or t
  misc_feature (324)..(324): n is a, c, g, or t
  misc_feature (1786)..(1787): n is a, c, g, or t
ggaggtggggacccggtcgggataggctgcagtggaaggaacgggggatggtgagtcggagcaccgtcggtgtggccaggagaagcagttcctggccgggcggctggctgtaggtatatcttcatctataatccgcgactgtctgggccgcggggatagagagagggtagtgcgtgaatccgtagtaggttgcatggaacagtgatagattggagaaaccagttagttgaatgtatcaaagaatggatggaagtgtcgtatggaaggaaggttnatataagctcagtgtgctcgcaagacggtgggctgactagctattgtcantataaaatgtcttcgaggggagatctcgtgtaaattagctgggccgagtcactttggcgttggggtcctagtgtcccatggtaccaagtagttggcgcttgggctcttcggtgtcgggctggtggggggagaaccgtaggctgcgattctaagtctctgggggcccgactcgaagttgcctcggtgtgaacttgcacacaagcaccttcgcattgaacccccctatttgtttagccttttctttacccattgcttacttctaaaacccttaggtttacgccatattagcctccgttggagcataattccgaagttatttctaccaccttttgggtactctaacttggattgcgccgctctagaaagcaatgggtaatttttgtctggtggcatccaattgcggcgaggatgcgttttcaaccaagggcaaggtagattccacattcatacggcttaaatttgcgaatggggcctttgggccttggtaacttcccaagaaatttggttccttacttttcctttttcgtggcccccagtttttgttttgtgggcaacgcgcgccttgtttgtggacccagccagggttacgttaacgattatgttctttcctttgggcaacgttcggtttggaattggtgccgcataaagttgtaagcgtgtggggtatttggtgtcatgacccgaatttgttggtgctactcggcgcggcgtcacattaatttcgatgtttgcacccccgattcccagttggaaacacccccgcggagggtgtagcccttggttggggaggtacatatataggacgaatttatgaggggaggcggggtgcgattcataatataagaatatcccacttgctcgtgggtgggaccacctatgtgtgttttagcgcggtgtctaaacacgcggggctttaatggtgtggttataacaagaggtggtgtctcgctaacaatgagatggggaggagcggtactatgtatatagagagggactatagcgactttgtagaagaggagaggtgttatatacaaaacgcgtgtttgtgtatatgtgtggacaacaagtgtgtattggtagcgggaatacttatgtgtgggagagagaaccaattatctcttggtgtgggggaggggaaacaatagtggggcgaagaaaccctcaaggaggagatgtattaataggcgctctagggagagaaactaaacgtaataagagcggactatcagtggctggtaaacagagagcagactatttagtgtgctagtgagaacatgtgttactagcaatttattgaaatagcatagcgtcgagctagtacggatgtactatactacgaggcgtagtagtgtatgagtgtagttggtagtactagtaatacgacgagtaataatgagctgtagagatagttagactgcgaactaaatgagtaagatggataggtaactaagtctatatacgnng

SEQ ID NO: 523619 - DNA, 109 bp, Homo sapiens
tccacccacttagacttgtaactagggtctttaactgaccaaaaagcgagaaaaccgaaattaccgagcatcctgtacaatgtgaaaaccgtattctaagccgtaccta

SEQ ID NO: 523620 - DNA, 503 bp, Homo sapiens
atataatcgaagccttcatggataatttcaagtgttaggcccgagggacagtgggcatgaccatctttctcccattattaaatggttggtggggggatgccagatcactcatgagtactcaaagtcagacactcttggtccttcttggtcattctagcagttggccgagtagaccttttgatacatgggttcttaatgttactatcatgttgtgaggttgggttgtaggcgttagcgtgtcgagctttgcatttacagactgtcttcgaccatatttgttcccttgccacaacagatatattcagcagtcgtcatctcgtagtgacagctgttgattgttagattggtaaagacccttgatcttgactcaaatgtgtacttcttgtcattgtcaccgggtttgattttctgaactgatttataccatgttacatgaggctctgggtggacagtgatagttactccaaagcggacattatcatctacataagctggcttattat

SEQ ID NO: 523621 - DNA, 841 bp, Homo sapiens
cctccaggaatgttcttcgtttgggggaaactggaagatgaacggtcggaagcatagtctgggggagctcatcggtactctgaacgcggccgaggtgccggccgacaccgaggtggtttgttgctccccctatctgcctattatcgaacttcgtcgccggtcagaaccgcttagatcccaagcgattgcctgtgaggctgctgcgaagatactgctactaaaatgtgactatactgggtgcttattacatggtggtagtatcatgtccctgcgtcatgcatcaaatgcatctgctggtagtccatcgtggggtgcgtcctagggcgtcactcagcagtagaacggcattgttctttatcgcgggtagtctagaagtgaggcatgtatttgtggcgaggaacatgtgagtcccaatgcgtccttgcgctagacgggacctcgagacgttaactctgcacctgacacttcgtggtgatgaatgtctacgcctgaaaacgggtaacgcttggacgatcacctgcatgaaaggttttgtctcttacggagccagacgaacggtcatcgcatgactaacgtgagatggatctggtagcctatggctcgatcgctggccctattgcagtcctgttgtgtggccagttggtccatggcaagactgctacagcccaacaggcccaggaagtcacgagaagctccgagtgatggctgaagtccaacgtctctgatgctggtggctcatgagcaccgtgtcctttattggaggctctgtgaactggggcaacctggaaggagctggccagacagactgatgttggatggttccctgtggttggtgctacca

SEQ ID NO: 523622 - DNA, 1211 bp, Homo sapiens
  misc_feature (573)..(573): n is a, c, g, or t
gcaggatgggggcacctgcagcgcgggcgtggagctcttctatgacgtggctgtcgcgcactaagtcctgggtggggttcggagatcctgtgccggtatcaggaatatctggcaagcatcagagcctgctaggtgtgctggcggtgccaggcctcaataagcatggggatcactcgtagaatgatcagtcggagaatcgagagccatactcgaggttctagcttacccgcgacgaatagggacatatagcgatggctaagaatgacgttacagtctcctgtagacagcgatactccagacttacaccaagtaccaccttttgcgccaatggtactgtgcttgctcgtgatgtatgggcattgtacaaaacgtgagaggtattagtcgtggcacatggcgatattcactcaaccgtgcgcatgatatcgtgtgtgatgtcaatctacagtagtacctgtgcgtggaaagaaatggcgtcaccgggagctatgtgcgacttgtcgccgtaccatgacgtctacagagggatagtgaaatggatacattacagccgaaagccgtacacgaaagcanattctcatgggggcaggcctgcctgacagaaagggcctggtatatctgtcatgacagacaccaatggccccacgtgggacctgcgtgtgagatagaggactccggctagacccgtcgctagaaggagtgaatgaaaccccacggctctaaacgggaagcatccgactggcaagcgtcgagcgctcgccaagactaacggggaagcccttgggggagctggacccacatacaaacgattgggcgccagtggtgagcgaatgagggacaagacagcccaactatgggttgaatatgtcggcatcttggacccgggactgggtgcacggcgtagactagcgacggcgaccgtgacttcgtgaggaagacgagagttgagagtagggagccccgttaatgaacgcatactcaatgcccgggtgaaaattggtccaagactttttcacacggaatgttggcccccgccgaagtggaaaggccagatacctcgtatccgagtatagacaacagaaaagcagagggtcgaagtcactggctttaaaagcccttgtggcattccagagcaataaagggtcacctggggaacttgggaactttcattctaatcctgataagaaggtaataggaccgtggtgggcccg

SEQ ID NO: 523623 - DNA, 140 bp, Homo sapiens
cgttggtaacgggcggaccggaggtgaagttctgccactcgacgttgtaggtggcgccggcatacttgccgtccttcggcagatacttgtcgaggagcttcagctccttgatgacgacaccggtgatcaccgtgtttgtg

SEQ ID NO: 523624 - DNA, 659 bp, Homo sapiens
tcctcctgtggcagaaaccatttgagacatgactttacttgatgtctgaagcgttattatggggtactttgttagggaggaatgcctttcgcaagtaatgtatccattccgctgattgatgggtagggctagcggatggagcccacggctccctttgcacacacgagcagctacttctaagccatatcgactgttttgcagaggattggtgtgtgctgcctcaggaggggagggctggtaggagggggggagaggtctctgtcctactgctctccagagggcatttcccctatgcgcccttctccacacagggcccaagccacacatcatcaccacttgcctccaaagtacccaaggagggtaactcgttggagtgagcagtgccccctgtaggggagagcctgttaaatttgcgggggcttccaaagagtgtggggggaaagccccaaaagatattggggggtttcgagtacaccctttgtgggggggcgccctttgaccccaatttgggcgccaattaccgccaaaaaatggttcccagcggaaagttattatgccccccctctttggtggattgtgagcccccccactaaaaggcaaaagagaaaccagaacgggcgatacggggctcaacccgcaaaaaaaagggttacgcggga

SEQ ID NO: 523625 - DNA, 344 bp, Homo sapiens
agcagaggctgcttttattttcacagatgtcttcgaccccacataagcaaggacactgtatgttacagaagaagaccttgataatgaaataagccaactaatagactctcagccattcagcagcatatcagatgacttatttggcccatccgagtctgtgtagcagacaggtctatttaaactttcaaatgaacagggtaaagttgcatctaaagtaccacagatacaaccatgtttaaatcctcgtatgcactctggcctgcttctccagttacttgcttgtgtaagaacaaaaatgagaaaggttgttttccagtaaaaacatgaccagcttaaaaaaaaaa

SEQ ID NO: 523626 - DNA, 109 bp, Homo sapiens
gaactgggtgatgctgtgttgccatctgcagcagtgaagaggctgcagacagtcacatagcctgggcccaccccgtgggcctgcagcagtgttgagtggtgcacactgt

SEQ ID NO: 523627 - DNA, 413 bp, Homo sapiens
  misc_feature (1)..(1): n is a, c, g, or t
  misc_feature (326)..(326): n is a, c, g, or t
natttcttcatttttcaatggtaaaatacacgtaacataaaattcaccattttaaccttttactaataagtgtacagttcagtgatattaagtacatttgcattgttgtgcaaccatcactaccaccaacctccagaactcttttttgtcttgcaaaatcaaaactctgtccccgttaaacactaactgcctgttctccttccctcagcccctgacacctaccattctattgtccgtctctatgcatatgactcctctaagaaactcaaacaagtgcaatcatttgttcttttgtgactgtcttttttttttttttttgagacagngtcttgttctgtcgcctaggctgggagtgcagtggtgcggatctcagctcattggcaacttggcactccggggcttcaggtggattt

SEQ ID NO: 523628 - DNA, 109 bp, Homo sapiens
tacctggtcctgtgcagaagatcctcgaatgcgcaggctgaagcgcaaaagaagaaatgatgaggcagagtgtccaatgtaaacctgctagcttgttgcacctgtggag

SEQ ID NO: 523629 - DNA, 608 bp, Homo sapiens
  misc_feature (214)..(214): n is a, c, g, or t
tctcacaggtgcgaagtcccacgaactgttcgtccatcatgggatcaaggccaatatgaataatgactaaggctgagatcatttaaggctgatgttacgtccggatcaaagttaattgatcaacaagtgctgtcatctcaatgacaatatctgaatatctgtcattatattgcactcggtagttatcagtgcatgtagcctataaatagccacngcaggtcagcttgactaaatcattcagtgtcatgtaggcatgtaacatgcatggctcagcaagttccgcgctgacatacgagtcatattcaggtcatagctcaactgctgtgtcatagcgattccgtgatccacgaagtaatgtatctcgaacaatgctagcagccatgtatatgcatttctggtgcatctattatgaaggctatgcggcaggtcaatatggtcgtacagatcttgagactacggtagtctcagacataacgcggtatcatgaatagcacgacttgatataacaaaatcgatccggtggattctgtcttctgatctgcctgtacaactgcactctctatgacactgttgcagtttcacaagcagtaggctatgtacagatcaat

SEQ ID NO: 523630 - DNA, 436 bp, Homo sapiens
gacgcgcgctcccgggcacccaatcgcgttgagctttgccgcgacgagtgcgaggtgctggagagcgacctgtgccgccaggagtacaccatcgcccgctccaacccgctcatcctcatgcggcttcagctgcccaagtgtgagcgctgcccatgcctgagagccccgacgctgccaactgcatgcgcattggcactccagccgagaggctgggccgctaccatcagtgctataacggctcaggcatggattacagaggaacggcaagcaccaccaagtcaggccaccagtgccaccgtggccctgcagcacccccacagccaccacctgtccagcacagacttccctgagcttggagggggcacgcctactgccggaaccccggagccaaattgaaggccccttgtttttacgcaggattaaaacgtacgcatgg

SEQ ID NO: 523631 - DNA, 958 bp, Homo sapiens
  misc_feature (102)..(102): n is a, c, g, or t
gctatcagttcgcactgggtttggcgccaggacagaggtgtcgagaaacgtatccctaatagctatcatgggaatgggataagcagtcatatcaccattgtnatgtctatggggacgcgttagattgcggggtacaggtcacaacgcaattgactggtgcgtatctagatctatgaaattgctgaagtggttcatgacaaactgataccatatgaaaagaattatttggtacgcgagggttgatggtcgatagcgaaaaaggggtgttcccttgaacaaaggtaatgcgttggatgcatgcggataagagtggtaaaatgctagaggggaagtaacgtaggtaatcgtacgatattgagttatctacttatgtgtacaagttgtgaagactcagggaagtaacatattgtgagttattcaatgtgaatgacgcacgtggaaaacaagtgaaacttataatacgaaggcaacagtggattatcagggtgaatgtctcaagagtcggaagtggtggctgtacgagactagtgagacatgtctgaggggatagtgaaggaggttgggaaaaggtggatatctccaatgtaaatggggaaggacccctgatgtaggcgtggccactgtggtggctctgacagcgactggggatggttgggaacaacgctaaattagtaagaggtatagttggaaccattgggactgaccgcgtgcactgtcacaacaactccatctggtcaagcacagaagctttgaatggaaaccttgttggaaggatgcgccatgggcgttaactttggaaaactagttagagtaactacactcgatcaacgctaacgggttcgttgcacaatgactgggtggaaaggggaggcccccctggggtgcgcatgtgacataatagtccgggggcacagggtggaaggcccgcaagggaggcctaccggggaccactttgaaa

SEQ ID NO: 523632 - DNA, 277 bp, Homo sapiens
tttttcccctaaacccccccccccccttttttaaaggggggggagaacgggttcccaaccgttttttttccatggcccctttaggtttggggggaaaagcggggtttttttaacccaggcttgggaaaccccccaaagggaaagggaaatttttttgggcccccttgggttttttttttgggggggggcggttttaggtttttgttttttaaaaccgggcctttttttggggacccccttgccccaaattttggccccgatttttgggcccccttta

SEQ ID NO: 523633 - DNA, 268 bp, Homo sapiens
gcacagacgtattcctctagcacacgcagctggatcccagcccagcctttgccacagtctcttctagctgtagcatctccacagcaagcacgaagacatggggggatccatcttcactgccactggccacgagatgccgtccctcacgtaaggacaaggtgtgcagtctgaggataccacagctgtgggcctggagagacagagagggggtgccaagccgttagtgaagcccaggatccactgcaggctccaggacagtttagtcatg

SEQ ID NO: 523634 - DNA, 192 bp, Homo sapiens
atctgtgtcttatatggatcttcacttggaagaaagtttatcgtccttctcagaaggagattagacacaacatacggtaaagccaaaagcaggagcttatagatttgcatgaaatggaaggcgttcttcagaacttcttcataacccacgtgacatcagcacttccttttcccactggtattttctacactt

SEQ ID NO: 523635 - DNA, 257 bp, Homo sapiens
ggtttgagggctggaatttaattaacctcgccttcaaggtgtacaataatagaaaaaagttgcaattccttgcctccactgtgagacaaaccccagccacatcttcggcacacaagaaatttcaaaagcctgaaccgcagcagccaggcgtttctccagaaaccttcttccacaggagctttctacacatgtccagaatctcgccactcgggcacgggattgtccccagccccgggatttctcctaagacgcgtgcc

SEQ ID NO: 523636 - DNA, 703 bp, Homo sapiens
tgtatttaacatctttaagagcatgatcataaagagctatttttgacaccccccccccccatttttttaacttttagagttaataagggtttaatatctcttctgtccatatggttcttcaaaggaatgaggtgtttaggtggctggaaaacgcatttgtaggaagttagattgcgaatttagacaaggtgcggttattcactttgacgatatgtctcatttccgaacgaatgccttgtggaacccaggtgtgggttctactcagtgccatcagatagactggagtcttctctcgtaaggtcaccaattactatagtaatttcggatctctgaatttcactttaaattattggcagtttataacagacctctagaagttcttaacacactcgtgctcaccatttattcactttggacggctatttcacagagtgaatctactgggctgattttaacacttctcattcaattgcccccattaccttctcagcggaccagcaagactgcttcgggggcaccacggctaaactgtggcttcacacctcagactggcacttgtgcttacccctttcgtctaaaatctttgtgtctaacattacacatctaaaccaacacattattcaaacactgctggtggttctcccccttccaggggctcggcttcaaaacgttctcagccgtgctaccccttcaagggttatta

SEQ ID NO: 523637 - DNA, 159 bp, Homo sapiens
caaacatagtatggaagcaaactttaattttatataacgtatgctatggagagctaagacaatttaaggactacttgttttctatttttttttcttaataaaatggaatccactgtgttagaatacctcttgataccatgtagcttcatagttggttgc

SEQ ID NO: 523638 - DNA, 194 bp, Homo sapiens
caatagatgcttatgacaacttttgacaagatctcgcttgctcaacgtttggaaaacaagaactcaatgaggtcaagagaaatttctgcttatctcttcaaaggcaacaatcgctggaaacagagtgtagagctgtgcaagaaagacagcctttacaaggatgcaatgcagtatgcttctgaatctaaagatac

SEQ ID NO: 523639 - DNA, 109 bp, Homo sapiens
agtgtcttcaagagcatgaagcataaagccaaggcaattcaatagggtactatcctcaaaatttatgtcttcctttggctatgggcacagggtaagaaaatgcatggca

SEQ ID NO: 523640 - DNA, 252 bp, Homo sapiens
tggggtttcaaaagtaaatcagttggttttatatataaaaaacttataaaaaaatataatgtgagtgggtgtgttttcttatacattattatttgtgtgtgaataccattatatatttttcatcgtgattaaaactctcctataaaaaccaaagttaatagtttggcaataggatatacttataattgtgggtgacaaatctttataccgcgcggcgctgtgttttcccaaaaaacattcacctttatagcc

SEQ ID NO: 523641 - DNA, 479 bp, Homo sapiens
  misc_feature (45)..(45): n is a, c, g, or t
ctacttatgaattttagaatagctttttctaattctgaattaaanaaagtccaggaagttagtaatttaaatcagtatgttcatttcactctagtgaaactactatatgttgtaaattagttaaaaatggatgttcagaaaagaattgaaatcaggacaaaaaattacagatgctagtgaggttgtagagaaaaaggaatgcttatacgctgttagtgggagtgtaaattggtccacccattgtggaagagagggtagagagtcctcaaatatttaaagatatttgacccagtaatcccattactaggtatatacccgaaggaatataaattgttctattataaacacatactcacgtgtatgttcattgctgcactattcacaatagcgaagacatgaaatcaacctaaatgttcatcagtgatagactggataaagacaatgtggtatatgtacaccatggaatactatgcagccgt

SEQ ID NO: 523642 - DNA, 537 bp, Homo sapiens
gcgtgtgttgaaatggcaccacccaagtgagagccgtcgtattcctgggtagaggaatgaacaatacatcgcaggttgtgactggcttattcctagcgcttcatctaatatggaacccgcaatactgagtttcaatgcgaagaactccctttccttggtctctgggaacaagtcactgctgaatctatgtgattcgctcttcatttctcatattccatatgaattctcatgattcagtaatgtgtgatgatatgtctagatttcttgtgctgccatattgcccatctcagaatgattgggcaagctgagaacatcattagaccacatagattactctatcattgtaatgaaaaatattcattacaagcaaatgagagcctagtatatttcaatcagtgtttgccttgccatgtactgagatacggatgacgagaaataggtcgaatgtctctgcactccgttgcttctgggatgactcccatggttattacatattcccacgttgataacatattttcacatttattaacgtgtccg

SEQ ID NO: 523643 - DNA, 185 bp, Homo sapiens
atccgactctaagatgtaggctttattattttttcattcgcagagaaggaaactcagggtcatttaatgatttgtcacacaactaactatacagcaggttagtattacagaagaaatctaggattctctcctactaagactcctgatatattgggagtgagtacttacagcatcattgtacacat

SEQ ID NO: 523644 - DNA, 1618 bp, Homo sapiens
  misc_feature (1287)..(1287): n is a, c, g, or t
  misc_feature (1369)..(1369): n is a, c, g, or t
caggacccatgtactatgatgttgctgctaccgaccacgggtcttctatatgagtaggaatgcttgtcctgtcctcgttcttctgtcccccccgacgagttgttgggggatagaatatatctatgctcttggcccgtcagccacacacatgtttcctccgggcaatatttttcgtcccacacaccactgtgtcacacataatgtattatatggggcctcttgggtgcagccaaaagacaacaacgaagcgcgtgtttcttcccctacaaatttagtatagggcgactaaattgttttatctctctcgcccacaatgaggtttttaaacaccgttgtggttgtcctcgttggagatgcacaccaagaacccacaggagattttttattaaaaatgaggttcttgataaacaaagaaatattccttctcctcaattatttatgtggggaaagttttgaagagttcctccccacaacgcgccccaacagaccgttttcctttattaatggagaggatttcatataatatgagaaagtggcgcgcgcccacactaataaatggtggggggatgaggaacaccttttccacaggtttgcgtctccccacatgttaattgtaagtgtgtcgcccccccttgttttatgttccccccaccccacagggtgtgccttttatatgtattatgcccccccctccccttattataccccctcggtggcgccccacatttgtccccacggtaataaccccccactttatgaaagaagaccttttcacagggcccacagtttttctcgtggagattttctctgggaagagagcctcctcgccccctcgtggtgactaaagaaatatacagaaataatagctaagatatacatttctggggagacaccttcggagagagaacacacatacgcccacgacagacccacgcccacggaatacacgagaggagtggcccacggagagcccacagagacaaaaagtggaggaacaaatagaaagctcgagagagacacacaccccttatatgggaataaacaacatttgggtcgcacacacacaatatagcccccccgcgagagcccccactatagctcgtcggcgcgttagagatataatgagcactctttgaagagggggagcacacagcgcacgagctgtataaatatacctctataatgtacagggggttataacaccgtcgagaccacgctcctgttgattacacacggtgacacacaggcgcacacacacctgcacatgaaatgttggggaggagaccncacacatgagagatccaccttggtccctcctgccctatatgtttctcctgtgtgcacacacaggtctacacacgatgtctcncctcccttatggagaatcttgtcccccttcccacccctttaccattaaacaaaggggaaccacttgaatacttttcaaagggaatatataaccgttttgggtttaatagtttccagtataataccattttccataccctgtaaatttatatttcgtgtaaaagaagatttactgctatccccggatgttcggacttggtgcccctgatgcatttggaaatccaataaacgtattactggaaattcccca

SEQ ID NO: 523645 - DNA, 477 bp, Homo sapiens
cgctctgtcgcccaggctggagtgcagtggcgggatctcggctcactgcaagctccgcctcccgggttcacgccattctcccgcctcagcctcccaagtagctgggactacaggcgcccgccactacgcccggctaattttttgtatttttagtagagacggggtttcaccattttagccgggatggtctcgatctcctgacctcgtgatccgcccgcctgggcctcccaaagtgctgggattacaggcgtgagccaccgcgcccggccggcttgagcaaattttaatcatgcttctcctctccttacagacctctgaacctaaacttggttcaaccccaagtctaagcacgcactaaggtacagaacttgccccattaacagctcattccaacaactaccacacaaagagaaacatttctggttgaaccaccccaatcatgctgtctgccaatccccacctagatgtccaggttct

SEQ ID NO: 523646 - DNA, 396 bp, Homo sapiens
ttacaacccacgatcacaaggtcaagtcccacgataggccttctgcaagttgaggagcaaggaagccagtggtggatcagtccaagtcccaaagcctcaaaagtagggaagccgacagtgcagccttcagtctgtggccaaaggcccgagagcccctggcaaatcactggtgtaagtctaagagtccaaaagctggagaacttggagtctgatgttcaagggcaggaagcatccagcacaggagaaagatgaaggctggggaagactcagcaagtcaagtccttccatgttcttctgcctgctttattctagccatgctggcagctgatttttggaggagtggtttgtctgcagttgcacacatctgtgatcgtggggttgtaagggtaccgagct

SEQ ID NO: 523647 - DNA, 311 bp, Homo sapiens
gagacaagatctcactctgttgcccaggctggagtgcagtggcacgatcctttagcctcgatctgctggactcaacgatcctcccacctcagcctctcaagtagctgggaccacaggcatgcgctactgtgctgggctgattttttaattttttagagatgttatcccactatgttgcttaagttggtcttgaattcctggactcaagtgttcctactgcctcagcctcccaaagtgttggaattacagatgtaagccaccgtgcccagctctgatttacgtgtatttctgtccccttctgtcgtcttctc

SEQ ID NO: 523648 - DNA, 437 bp, Homo sapiens
aaagatggccatggcttattaaccaaagtcaggcactgggcactggggaaccatgggaggcacggccaccatttcctgtgctatcatctgagccccacctggcacacctgtggggcgtttcacggcaatacctgttcactgaacaagtgaaccagtgagaatgctggctcttgttttttttttttttttggagacagagtctcactctcgcccaggctggagttgtgtggtgcaatctcggggacctcactgcaacctctgccacccaggtttcaagcaatttctctgtgcctcagcctctccttggagttccctggaatttcgggcgcctgccaccgcacccggcttaattttggttttttcagtagagattggttcatatttttggccaggctgttctgaacctcgtacctcgttgttaccttgcctttggcctc

SEQ ID NO: 523649 - DNA, 1417 bp, Homo sapiens
gtcgttcctcctatttgttgcatgttttcttttctttctgtgctgcctgcttgttttcttcacgcgtcgggagttttcctccgcggtgttttttcgtttttgtcgtctacgtgctgttgttggcggcagcagcgctggtgtttgtctgttccctgtctgttcctgcttttgtgtgcaagaggggagagccctcttcgcttctctctgctttgttttggtggtgagccgccccgtttgtgtctcttggctccacgtgctttgtttgttgggggggaaacaacttatagtcgtctcgttctcttccctgtggggtgattgttggcctcctgctgttattttgggggcttggtgcgttgttgtgtgggaaggtatgtttttggtgggttgtgcgcccgggccgtagtggtttgtcgctgcgatcgtggtgggtgtgttactgctgtgcccgctgggttgtttttgtttgtgaagccccttttgattgtgccgcgcgtgccggtggtggatgtgttttctgccggcgttgtttttcttgttcacccccctccgtgccaggggttgttgtgtttcgctgctgttttgtagtagtggcccccccgcgctgttgtgtttttgtatatttgctcccgccccccgtcggggggggcgctggtgtgagagggttccgcgcgtttctctcctcccccccccgcccgtgtgttgccgcgccgctgtctgtggcaggcggcgcgccccgcctcgctgtgtgtcgctcgcacctctgtgtgtgtctctcggacacaggggtagttggcgcggcgcgggtgttttttgttctctactccgcacctattagccgccgctcgcttgttctctcctccccctcgttttttgtttgttataaagagagagtgttgtggtgggttctgtctctcctctcctctcttctttagagtcgccgcgcctcttttattttccccccccccgctgtagagagagagaggcgctctctctctctctcccccctcccgctcgccgtctctcctccccgcctcttattctcttttgtttctctctctcttgctcggtgtgcgctctcccctctctcggcggttgtgtgtggggtgttttttatatattcgctgggtgtgtgtgtgtgtaaatatatatatcttctttttacctcttgtgtgtgttctctctctatagatttgagaagagaaaacactctctctctcttcttgtggtgtgtgtgtgtccccctccctctctccccccctccccccgccccgcgcgcgtggtgtgttaaatgcccgcgcgcgcgggggtgtgtgttaaaatttttctgccccccccgactgattttttgtgtggtgccccccccctcttttttataaaaaaaagataattatatatattgtgttgtttattatgagga

SEQ ID NO: 523650 - DNA, 194 bp, Homo sapiens
  misc_feature (189)..(189): n is a, c, g, or t
tgctcggtaccggtgttcctttgtctctactaaaaatacaaaaaggtgcagtggtgggcacctgtaatcctagctactcgggaggctatgacacaagaatctgcttgaactcagtgaggctggagtttacatgtgatgccaaaattgtaccacctgcactccaccatggacagcagatgtgaaactctngcctc

SEQ ID NO: 523651 - DNA, 128 bp, Homo sapiens
aacgatggtctcagctggaaagctgggggaaggtaccagttatttacccttccataaaaacttgggaggtctttagtgaggtataccccttcaggcagggctaggagagagattgacacaatacagag

SEQ ID NO: 523652 - DNA, 1016 bp, Homo sapiens
acgcccgctctacgtgctcgttctcttcgcgaccgttgcgcgcgagccccgtgttcccacggcgggcagcagcggacggcggcggctgtgtgaacgcggagggggcggaggggatgcccgcggcggcggaagaagttaccgggaaatggctggaggcacggtgtctgacgccgctcggggttgttgttcactcaggccgcaagaagcttgatatgacgcctatggtgacccccccagaaaacttcctcgagatcggatgtgagcaacccgaaaacgggtgggtgtgtcggccgggggccgtttcaccactttacgaaatcgggggtcccgggacaaattcttcctatttcagggcctgaaaggaaatcttacttgtagagaggagggattacgggtggacttttggaatttgcgcttgccgaccggttgaccttttacgcaaagaggacggcagtaagcaacggctcgtatgtttcccccgcgtctccccctgtggggaaaagggcggtttagaggcgtacaggctttccttttgtaggcagcgacgacattgaactgggcaacactatttctgaagtgacccacttcttatttgggcggcaagatggaaaacccagggcgctggcgagccaagtttataataacaagccaggggtcgcttggatccatccctccgtgggcacagaaccgcacgcggtttgtctctccacttggtttttacccgggattgcactctttcatttgattaaaacggctattaacctccacttcttaaaaattaagacagttgccttgaaaatttttggccaaggcacgtcgtgccaacaacagcggttgctttattacgttgacttgcaacaggaccgcatgtgaaagaacgttctaacgtttaaagcattgctgcacagaaaaccgtgttattacgatgcgttgggtatactaacactccatattccccgtttggatttgttatgcgcggtgcacagcagtatcttggttaagaaaaccctacttcg

SEQ ID NO: 523653 - DNA, 294 bp, Homo sapiens
actagcctactcattaagctggcaccacagccgtggccatgtgtcagaagaaaaaaaaactggatttcaaacggggtgtcctaaatccattttattcccacccctgttgtttctttatcaagggacaacaaaataggtagtaaagattcagctgttttttaaaagacaaactgaaaggtgtactgagtccaggaagccctgacatgatgctacagcagagcagtgtgtgccattctgggttggactgctctaatgcatctcaaaggggactcaatcttacttgggcttatcgag

SEQ ID NO: 523654 - DNA, 851 bp, Homo sapiens
ctaatttttttttctaggatactattaactgcaattcttaatttaattcttattttgtttattcctataatataaaagtactatctaaccttgtatgttgatcttgtggcattgatgaacttctatattagctcaagtaggtttcactttatttattactttattttatttccattttattattatttcttctctttgagaccagagtctcactctgtcacccaggctggagtgcagtggccggatctcggctcactacaagctctgcctcctgggttcacgccattctcctgcctcaacctcccgagtagctgggactacagtgcgcctgccattgtgcccggttaattctctcggtcacttcccacgtagcagacagggtttcacccatatttacgccaggcatggtctcgatctcctgaccttgtcatctgcccgcctcgacctcccaaagtgctcggcgcttacaggcgtgagtcaccatgcccagcctcaagtagcgttccaactgaatttcttatactttcacaaataccacattatggcaatacacgcactattccaccttcttctcctaatctgcgcgcattgtcctcgattctttctagttgtaacttttctggctcataccttccagtacaactggtgactacgtgctatacagtacggaaattctcgtccctgtttcccacaacttgcagaataaaagcccccttaatcattccaccagttaagttatttaaagccttcaggtgtgcagttttataatcttgggtacatgagccctaacctctaaagctcaagtaatcctcctacttaatgtcttagaattggtaccttgcttgccacag

SEQ ID NO: 523655 - DNA, 213 bp, Homo sapiens
  misc_feature (40)..(40): n is a, c, g, or t
taggcggacccgcggtatgtttacggtgtctcatgctcanattattcacagattcaggttgagataatgcaggtatattgagatgttcacacagattctggtcttgcataaaatcatctttatcaacctagacactcagaagttcaatatttgaaattgtattggcatgtcacatctctaaggatcacattgctccgtaagacataaccgcgg

SEQ ID NO: 523656 - DNA, 1046 bp, Homo sapiens
gcgggtggaggaggagcagcagaggagtgccagtcctggcccagtgtaatgccatgctccgagaacagctggaccaggcaggctcggacaaccaggctctgagtgaggacatacgaaaggtgaccaagtgactggacacgctgccgcaaggagctggagcaccgggaggcggtgtggaggcgcgaggaggagtccttcaacgcctacttcagctaacgagtcacagtccgcctgctctctcctctggaggcaggtggtggggttccagtgctggctggtcagtcgaggtgaagatgttcacgtgagtagggaccttgcgtgcgagcttgggaggggagcttggacccaggtacgatcacgagcgtgtccagtgaggctgggcctgggactgagcaatagtggtctactggcctggccataaagagccggaggccagaggcagccctggacgaaacaggccctgctgcagagtcccagtctggaggagacagcctgcggtgacaaggtgctccgcgagaaggacctgtggcgcaggcagcagaatgcaaagcgacctggacaagggctgacctcagtgccagagtgaccagagctgggccctggcagttgaacgcgtcttgagaagcagaatctggagaaggatcacggtcaaaaaggacctcactgagaagctttgaggccctgggaatccctgtggctacagtgagcaggtggcccttgtagacacgaggacgcgagaagcgggtcatggcagacccttaatggatcttggcacaggccggtctggcaggaagtcttaagagcggggtccagctttatcgggctctgagcgcgaccgggaatgtctaaaggcagccctggggggctctcggacacgaaaccagtccaaccgtagagcattgactggcgagtacggaccacggaaggtctacacggctgtcagctacaggaagcaagtcactcgcgtcaacgcaagcctccagcattcggataaggagagctggacgcacacttcagataaacgcaaagaccagaacacgcagacc

SEQ ID NO: 523657 - DNA, 967 bp, Homo sapiens
ataagaggctgtgtaatatgctaatctgtgtttcaccatccggatgattctcatagtgctcgaacagccatgaatgagggctaatgacaggcgctagagatcaactagcgactagacgcgtacgtcaccgtctcgtgcacattcttcatacatttctaagtctgaactctctaagatcgtgaactagacgtattagctgaggggtcataatgtatgcgcatcagcatactgtgagctgacaccaacacccctagaacatttcagggcaggggtgtcttcagaattgtagcgcgagtttctgaatctagcaaatcctccttttacccgtcgaagtgtgtcgaatgcccgtgactctaccagcgcccataaatgatctctagaaggactgttagtaccaggtctgtttttcaactttgaagctataagagacccgtgatatggtaatatgagtggtgcatagcagaggtctcggaaccaaaatattttctgtgcactttaacgtttcagtgttaaaaatgtttcgtaacacgcttgcaacttcccttatggcattaatcttgttgagggagagagacagaatcctggactctccaaagtatttaactgaaagtatggggccctggccctgacgcggcccatgtcccacaaggtgctggctcagtggggtgctttggtgtgctggatgatatgttgatctgtatgggtaaggaccaatgacaggcaagcaaaaaatggtttaagcttggtgttaacttttcttagtgttaattatagttaagcaattcaaaaatgctccaagaatgtgaaggaccttttgtccagctttcgaaatacacaaaggcgttttgcccgacagaatgtgggaggttaactgagacatttgttgatgcgagagggacttaatgtcggagatttaaggccggaatgagaacgggggattggctgttacaatgggaacggtttggaa

SEQ ID NO: 523658 - DNA, 152 bp, Homo sapiens
actggatcaacgccggccctctttatctcgcaaaggagtgcttgtggagatctggatcttttctccagcaattgggggaaagaaggctttttctctgaattcgcttagtgtaaccagcggagttggatgcagtcagcggcgttggatgcagt

SEQ ID NO: 523659 - DNA, 849 bp, Homo sapiens
  misc_feature (90)..(90): n is a, c, g, or t
  misc_feature (92)..(92): n is a, c, g, or t
  misc_feature (104)..(104): n is a, c, g, or t
  misc_feature (106)..(106): n is a, c, g, or t
  misc_feature (110)..(110): n is a, c, g, or t
  misc_feature (126)..(126): n is a, c, g, or t
  misc_feature (139)..(139): n is a, c, g, or t
  misc_feature (142)..(142): n is a, c, g, or t
  misc_feature (144)..(144): n is a, c, g, or t
  misc_feature (151)..(151): n is a, c, g, or t
  misc_feature (161)..(161): n is a, c, g, or t
  misc_feature (170)..(170): n is a, c, g, or t
  misc_feature (178)..(178): n is a, c, g, or t
  misc_feature (191)..(191): n is a, c, g, or t
  misc_feature (209)..(209): n is a, c, g, or t
  misc_feature (223)..(223): n is a, c, g, or t
  misc_feature (233)..(233): n is a, c, g, or t
  misc_feature (236)..(237): n is a, c, g, or t
  misc_feature (239)..(239): n is a, c, g, or t
  misc_feature (241)..(241): n is a, c, g, or t
  misc_feature (251)..(251): n is a, c, g, or t
  misc_feature (260)..(260): n is a, c, g, or t
  misc_feature (275)..(275): n is a, c, g, or t
  misc_feature (280)..(280): n is a, c, g, or t
  misc_feature (302)..(302): n is a, c, g, or t
  misc_feature (331)..(331): n is a, c, g, or t
  misc_feature (346)..(346): n is a, c, g, or t
  misc_feature (353)..(354): n is a, c, g, or t
  misc_feature (374)..(374): n is a, c, g, or t
  misc_feature (380)..(380): n is a, c, g, or t
  misc_feature (399)..(399): n is a, c, g, or t
  misc_feature (440)..(440): n is a, c, g, or t
  misc_feature (452)..(452): n is a, c, g, or t
  misc_feature (454)..(454): n is a, c, g, or t
  misc_feature (810)..(810): n is a, c, g, or t
attaaaacattttcacccactctttgagtactttgactacgagtccagaaagagcatgagttgttatgtgcttagtaatgttctggattntnacacagaaattntntctnaagaccaggtggattncataatgaatttngtntncacgttnattcaagatnagccagatnaacctgtngaagaccctgttncagaagatttttctgatnagcagagccttttnggccgcttcnttnntntnctgcgctctnaggaccctnaccagcagtactttnttttnaacacagcacgaaaacattttngagctggtggaaatcagcggattcgcttnacactgccacctttngtttttnntgcttaccagctggcttttngttttnaagagaattcttaagtggntgacaaatgggaaaagaaatgccagaagattttttcttttncccaccagactntnagtgctttgttcaaagcagagctggcagaattgccctttagactttttcttcaaggagcactagctgctggggaaattggttttgaaaatcatgagacagtcgcatatgaattcatgtcccaggcattttctctgtatgaagatgaaatcagcgattccaaagcacagctagctgccatcaccttgatcattggcacttttgaaaggatgaagtgcttcagtgaagagaatcatgaacctctgaggactcagtgtgcccttgctgcatccaaacttctaaagaaacctgatcagggccgagctgtgagcacctgtgcacatctcttctggtctggcagaaacacggacaaaaatgngggaggagcttcacggaggcaagagggtaatggagtgcc

SEQ ID NO: 523660 - DNA, 225 bp, Homo sapiens
ggtccggttacgtggctgagcacaggagtttgagattagcctgggcacatggcaaaaccctgtctctacaaaaaaataaataaataaattagccaggcatggtggcacgtgcctgtaatcccagctacttgggaggctgagacaggagaatcacttaaacacaggaggtggaggttgtaatgagccaagaagccacggtcaacccacaagccacggtcagcccac

SEQ ID NO: 523661 - DNA, 998 bp, Homo sapiens
agcagatttataatctgataaaactgaactaatgtgttcttgcaacagaaagcaggacattgcgcgcaaactcctgctgtaaatccttggacttgtgcttggtgtgtatgctcggaattactgaaagataactctatcatctccacataactccataggtgcagcgtcactaatacccagaccgatacgacgcacaagagcagaagagtgcgcacacaagccgccacggagtgaagaacatgaaagaatacgccgagcaacgaataacaccaccagaagacacaagacactcgcgcacaccataagcgagaccacccgacagcgaaactccaaaccacaagaaccatgactactcagaccagccagcgaacaacacataccaaacccggagatctaagctcaaccaaacacaaacgactgcaccccaaccaggtaaaacacgcccggcatccccaaccctacaacgccggcgaacgccacgcacaccatacgacgcatcactcccaccgaaccacaaaaaaagaagaccctgcaaaccaccacaccagcagaaaaccccgccaccacccacccaacaacagagccaagccaccacacaccccacacacaccaccactcacgaccaagcacagaagcccaccactccccagacagcaacagaccacaaaacagacaacaggacaccacgaacaaacaccgcgcaacacacgacaggccatgcaacacgtccccacccacacaccagcacggtcgacccacgcacaccgacccaccacacaacacacaacacagagacaccaacccagcccaacaaacacagaacaacgacaacacaacacccccgacacagccaccacacccccccccaacgccccacacagcgaccaagacacagacaccacaccacaacaacacacggagaacgcacacgcgcatcagaacagacccacgcacacaaccccagccaaccgccctaccacagcgaaccgaaacacaaa

SEQ ID NO: 523662 - DNA, 103 bp, Homo sapiens
aagcttaatagtgaagatacctctttacggactccacctatgatctccctaaagcccatgtcgaatcccccatcgctgggtcaatagtacttgtgggtaccga

SEQ ID NO: 523663 - DNA, 124 bp, Homo sapiens
actatcttctttcttaacctcttgatgcgtttctcctgatacagctgaagctggacctcacttaccctgggctctttaaccagggcatcccggttggcattgcgcaagttctggtgtgtgtcat

SEQ ID NO: 523664 - DNA, 223 bp, Homo sapiens
atacatctacgtaaagtatcattataaataggcagtacaggaatacattaaaagccaacagaatgctgagttgtatgattttcttaacaggtacaatttacttttcagcaccctgtacagccatggaaagagtaactaccataatccaaccaaaaagactacaaagctctatattggctaggggaaggggtgtcaaatcatgcaatgagtgtaggtagatccg

SEQ ID NO: 523665 - DNA, 939 bp, Homo sapiens
  misc_feature (785)..(785): n is a, c, g, or t
aaacgttatcttggaaatcatcattctcagtaaactatcgcaagaagaaaaaaccaaacacctatgagtgagaacaggctacttatccttgatttttctaggcaacccaacctacggcctttcatctcatctcatccttcaccccatcagtgagaaaaggaaatttttgtttgtagaagaaatgtgctgttttattctgtagcacatcagtacctgtgctaatttgagaatcataactagcgtagatccaacccagaaacaaaccccaagttcacaaaacttaaaaaggaataggcaaattctagttgaaactgtttcagacctcagctcactatcagcccagaacatattatgtgcctcatcgatttaaatgttaccgttaggattggtggacactgtaagtctagagaatagctaattgaataagacttgaacatctaattgaatttcttgaacaaaatgtatactcagaacagaaaatatttcagaaatctatgacttcataatgtcactggctctgaaacattaacacactacttttccagttttatttggctatatttatttgacaattggatctcttttatagaatgtgtactgtgctataacttaacaactaaaacaacatttatttgttttttccagactgggaatgtcagaattgtgtcattgtagctagcatatatcaagatacttttcagctattgcttcaaatgctctatttttccctacatgccctttagtagaactgtttccagtgcttttcctataaccaataattattngcattatggttatttttatccccgttcgctcttaccgtcccccaaatagaaacttctcaagggcaaagttgggataatgtggttctctctgccagacgttatgcctggacacataagaaatctctcagtgcatgtgaatgttagtgaaaggatg

SEQ ID NO: 523666 - DNA, 124 bp, Homo sapiens
tggggggatgctgagattcgccattgcactccatgccgtggcaacaatgagcaaaactcagtctcaaaaaaaaatgtaactgatggccgggcgcggtggctcaatgcctgcaatccaactattt

SEQ ID NO: 523667 - DNA, 249 bp, Homo sapiens
  misc_feature (4)..(4): n is a, c, g, or t
gtanttagaaatcccttgagctggtttctcaaatcatgaaaataataaatataactagctgttagagaaatgaatgagcctacagatgataggattgttcatgtgggtgtatggatcggggtagtccgagtaacgtcggggcattccgggataggccgaggaaagtgttggtggggaagaaaaggttagaatttaacgcccggattaatattgatagttgaaaattggactttttgggcggtagggttt

SEQ ID NO: 523668 - DNA, 292 bp, Homo sapiens
  misc_feature (32)..(33): n is a, c, g, or t
  misc_feature (61)..(62): n is a, c, g, or t
  misc_feature (155)..(155): n is a, c, g, or t
aagtgtgggctgggcttggtggctcacacccnntgaatccccaggctttgggaggacgagnncagtggattacctgaagtcaggagttcaagaccagccagaccaaactggcaaaacccccccattactaaaatacaaaaattagctggacacgngtggtgcatgcctatgatcccagctactcagtagactgaggcaggaggatcgcttgaacccatgaggtggaggttgcagtgagccgagattgcaccactacactccagcctgggcaacaagagcgaaactctgtctc

SEQ ID NO: 523669 - DNA, 721 bp, Homo sapiens
taaaatcagttgggatccctttcttttccagcatggccattttggaaaaatacagtaattcttctgtatccattggcacctctgattctgctctacgggctttcccgggcacggggatggaacttcacccatactctctgttcttcctataagtacacgagtgaaataaacagtgagaagaagattcaatcgtaactggtgtcaacagtatggtgaagtgatcattctctggtaaaactggtaaataaactatcatcttgggagatatcttaaggtgtcaacgtcggcaacttgaagaacatatattttcaacccgggggtcaggtacattccttaaaactaattactgtccttctataataaatatttcttaacccaaaaaaaaaaaaaaaacaaaaaaaacaatctgggggggccgggcccaaaagagtctttaaccctcctgcggcgcgggccccagagtgtaactgaaactggcacacgtggtcccaaggaccctggcaaggcatgggttggttcccccaataaaagccgggcgccggcgctgtgcaaacccaaggggccgcgctcaggctatacagcggccgggacaataatcccgcgggaggaaagaacacaacgacaacagccgcacaacaggagtagaacaaccagcgtaccacgcagcagaagacacagcacaatacgatgatcgatcgaccaactgagccgatatgtcacg

SEQ ID NO: 523670 - DNA, 377 bp, Homo sapiens
  misc_feature (29)..(29): n is a, c, g, or t
aatgtggccaaggctggcttggtggatgncttttaaaaaaagtttaatgcgctgaaggttcccgggcccaaggataaattttctgccccgggggatgccgaaaaaaaaaaaaatgtgaaattttgtgctgagtgggggtttttttcaaaggcccggattgtagaattttagaaaaagatggggaagatgaagaactttattccctttggtcagatgccccttgggggcttgaatgaagctttccccgaaacccaatttgccaaaaaaaagtttcccttttggcctcccccccccattgggaatttttaaaattgggtcccgggggaagctttggcccttgtttttccccttttgggcctttaaaataatttttttta

SEQ ID NO: 523671 - DNA, 233 bp, Homo sapiens
accgctatgcggcattaagggcacattatcatagaagaggtcacaggatttaaaaagacaggcggaaaaaaatctcatattaggcaaccagtattatctcatcccaggcaaacccaggtagtatctgctcagcctgccgctaacagattctcacaatcaccaacgtgtgctaagggactgtccccaaaggtcagattcggtgctacccaggtaggcatctattatcaaggtcg

SEQ ID NO: 523672 - DNA, 189 bp, Homo sapiens
gagatctctggtgatgatgtggaccagtggtgttcaaggtagtgttgactttgaggattgggggggtagtagtgagtcaagttgggtgataatgggatgttggctcagaggtcagtacaggataggcctgtgggtgtgttcaatggaaggaaaatggaagggagtgtattccattctgctgaagggaag

SEQ ID NO: 523673 - DNA, 187 bp, Homo sapiens
gcaagtatttctgtgggtgctgggacttcccgtccgcggcgtggaggttgcagaggaaagtggtcgcttattggtcagaggagcagcctgctcaccctctccaggttggggctgtgtacctcggtgaggaggagctctacatgacccgatggccaggacaggccagcagagaggccactccgtctgg

SEQ ID NO: 523674 - DNA, 370 bp, Homo sapiens
ctccagagcaggcttaaccatgcagcgactgcgcccatcaccagctgtacagatcctgctcacactccccaaccacccacacacagagaaacaacctgttcaccactcctgggtgcatgatcgagggtgaagcatccaccagcacttcaaggggtccatagtatctgtccttttgctgcctcaaagtccccaaagccttagagcacaagcgtcagtcgatggttgccaatcatccaatgcacactatcactgggacaacaatgcagatcttctgggttttgatggaacttgctagtggggacatgcaactgatgcattatataccctgtgagcacacttgtatctttgaccttccatttgcccctgcccc

SEQ ID NO: 523675 - DNA, 888 bp, Homo sapiens
gagggtctcgccgccagtggaaggagcacgcccacggtgagacatggccgaggagcatggtcttagagaggtgtgatactggagctggagaccaatggccgagacaccacacggccgacctgtgccgggagaagctggtggtgcgactggggccagcccttctggctgaccctgcatttgagggccgcatttacgaggccagtgtcgaccagtctcacgcttcagtgtcgtgaccggtccagcccctagccaggaggccgggaccaaggcaccgtctatccactaagagatgctgtggagggaggcgtgacctggacagccaccgtggtggaccagccaagatgcacacctcatcgcctgccagttcaccaccccggcccaacgcccccattcaggcctgtactcggcctcaaccacaggacggcctccactgcgcctacccaggggaatccagccattgtgacatgggcacactctcaatcttcgctccttcaacgccatggttgcaccagcgcgaagtgactgtgtaccctggtatttccggcaaccaaggcagacccgcaacgagatatgtactcaacccccagacacgcgctatatacctccacaggggctccggcacacacgtttcaatcgagagaacccgcttaccctttggcgaaattaagaggtggccaggatctcggagaccaactggggcctcatttgccacactcgtgctatggcatccctttccttagcactggtcgcaagacccaccagtttccttgatccatacggcccggaacaggtgcacctgcattcccgtgcgcagctcgccccgtctatactcaggcaccatggtgtttgtcgcggggacgggccaccctggaggcgatgaccagggat

SEQ ID NO: 523676 - DNA, 926 bp, Homo sapiens
tttggaaaaaaaaattctcactttgtcacccattctggagtgcaggggtgtgatctcggctcactggggcctcttgcctcccgggttcaagccattctctgtgcctcaagcctgctgaagttggctgggcactgcgaggcgcccgcaaccacaccggggctgatttcggtgttattaagcccagaagaacggggtaacgcctcgatcgtcgaggcgggtctcaaactcctgaacctcatgtatctgcgctgcctcgagctcccaaagtgcgggtattcacaggcgaggtctagaattactttgaactcatccagttcaggaaatctaggtgacgtttttaaaaaacgcagtttgggaatagcataaaaaatataacttccaggatgtcaggtgtgatgcagaggacaccagaggttatctagatatggctacgagacaacgtctctcccaaagatgacggagtatggtattcctaataacagctctatggccgggtggggttaccctaagttagctttacagtctccagtgtgatatgttcccccgaacacaaaattagtttgtcgggggatctcgtcagttcaggactggttattactcagttccaaaatggttacctttttttaagagcttcactggttctctgtactttgtcacttcttttttctccagttgacataaaacctacgcggtgatgaaagcgtcaggtggtttatcacaaaaatggcttcctacccacccaaagtgctctgcgttgtgaatccctcttatggggccgtgtgcccctctcccagccaccttggagggcggatactcgaaaaaattgctgtgagcgcgcgacaaacgagtatgacagctgcggggtacctacactgagcgtgtgatgcgtgagacgagtctgagcccaaaaaaaagctgcgccatgg

SEQ ID NO: 523677 - DNA, 243 bp, Homo sapiens
tgctgggattacaggcacacgccagcacaccaggctaatattcatattttaagtaaacatggggtttcaccatgttggccaggctggtctcaaactcctgacctcaggtgatccaccccccttgacctcccaaagtgctgggattacaggcgtgagccactgtgcccagccagtgtggctctctattggttaccctgtggtatcctgtattctcagctcatctccctggtgggtcctgatccc

SEQ ID NO: 523678 - DNA, 348 bp, Homo sapiens
  misc_feature (341)..(341): n is a, c, g, or t
ttcattaggcaaatttatgcgtagaactaagatactatcttggataatcagctatcaccatgctctgtaggtttgtcgcctctatctatacatttctttcccactattatgatacatagacgggtgtgctcttctacctgttcttaggttgctcgtctggtttcgggggtcttagctatggctctccttgcctgagttaaactagttaattcataatgcataaagtatagggcgttagtccttgctatattatgcttggatataatttttcatcttacccttgcgacagtatatctattgcgccaggcttcaatatctatcgcctatactttatttgcctnacttaat

SEQ ID NO: 523679 - DNA, 100 bp, Homo sapiens
taatttctccccaacatacttatttcattaactgtggagaaattaagacacctacagctgttgacccacttctatctgcaccatgtttcttctctgacat

SEQ ID NO: 523680 - DNA, 218 bp, Homo sapiens
  misc_feature (174)..(175): n is a, c, g, or t
cctcagcctcccgagtggctgggattacaggcatgtaccagcacacttagctaattttttgtatttttagtagagacagggtttcaccgtgtttggccaggctggtctcgaactcctgatctcaggtgatccacctgcctcagccttccaaagtactgggattacaggcgtgcnncccacttgacctgaaccctgataggctttactttgaattgcaa

SEQ ID NO: 523681 - DNA, 206 bp, Homo sapiens
ggcaatctgaccagatagctgaatacagctgctaagttagagagtgctctctcaggcgggctggtcgcggagctggtctgtctctccgcagcttccctgtaagtaagtaaccggtggggtgggtggggtctctcggtcggagcattcctcccccgtcccttcgaggggaaggcgtctgtccaaacacgtccaagctgtccccaggc

SEQ ID NO: 523682 - DNA, 215 bp, Homo sapiens
ctcggtacctcgaatagggagtatgtgaagtagatagagaccgacggattactccggttctgaactcagatcacgtatggactttaatcgttgaacaaacgaacctttaatagcggctgcaccactcgggcatgtccgtgatccaacatcgagagtcgtaaagccctattgttgatatggtactctagcaataggattgcgctgtgtatccctag

SEQ ID NO: 523683 - DNA, 276 bp, Homo sapiens
atatccacaagggactcacagccagcaggtaaactctcccttccctaacgcagaccaaacccgggaaaatcacagacagccttttaacagctcctctttctcggcccccttcttctgggaaggcagtcaggaggtttaagctcttcgggagctcctccttcttccggtcactcatctgtctctcatcagccgggcgatcggggtcatctctgatgcggggaagtcctcccctgggtctaagatcttccccatgatcttcaggtatggctcagcgct

SEQ ID NO: 523684 - DNA, 220 bp, Homo sapiens
  misc_feature (55)..(55): n is a, c, g, or t
  misc_feature (69)..(69): n is a, c, g, or t
gaaatccaaaaaaaatgacacaagaagtgaagggagaaatattcatggaaatagntagcttaaagaaanaaacaatcaaaagttcaggaaactttagacacacttttagaaatgtgaaatgctctcaaaagtctcagtgatagatttgaacaaatagaagaaagaaattcagagctcaaaagcaagatcttcaaattaactctgtccaacaaagacaaag

SEQ ID NO: 523685 - DNA, 686 bp, Homo sapiens
gagttgttcctgaaaagctggattagctagtccccacggggaaaaccttcctgctgctctccatcactcagtatacgacatggaccgaacaatatctgactttggactccggacgccctcagtacatctggcgtggtacatgattgtcttcccgcgatggggacgagggttcatctgactcgtggcatggtggtaatgagcgatgagtagatcctggagaagtgtcgtgccattctacttagtcatggcacattggatacgtagagatgggatacctaaggaaggtcccgagccgttggaccgatgtgatagtgacccatttcgtatgatcgttctttgctgcgagactatagcagacacaagtctcgcctctcatcgctagagttgcatgtgtgtgccttgaacacccagactatgagcacttcgtgattgtcccgtctgtcataacaccgctggtacatttgcatggccctagatcagttgctgcttaggagtgctgggtgagactcctatggacgtgtccattgaccacgagtgtcgacaggggttacgtgtgtgacgccttgatgccgtgtgcaccttcgtcatgataagcacctacgataaatgttcagtccgtgaaccttcccgttatacagcctggcacactgggccttgggtggaagaaccatgatgtgagaggacag

SEQ ID NO: 523686 - DNA, 302 bp, Homo sapiens
  misc_feature (40)..(40): n is a, c, g, or t
gtccgggcgacgtgagaaaaattggcagatgttctacatnagcgggcgtcattcatttttgcattatatgcaaaagcgtttcttatgaatacccgcttctctgccgacggcgcggcggctactctggctgcgggttgatgacgggcttcggcgccgtcccatcccggccgcatagagagaaaacgcataaacctcgcggcgcttagcaccaaatagcagatatttttcccaggccgcgtgagccgcctgcggagttgattgtcgctccaacaccagattaaccgttcaatttgataaccggt

SEQ ID NO: 523687 - DNA, 143 bp, Homo sapiens
gcggccgcctactactactactactgctcgaattcaagcttctaacgatgtacggggacatgacccacttgcactgtgagtgtttgtcctcgcacaactgggacaccatgcatttcaataaaaacatctctgcggtaaaaaaa

SEQ ID NO: 523688 - DNA, 777 bp, Homo sapiens
agcggagtatctctcttgtggtgcctggaactggacatcccgcttatgtaggcagcttacgggcaagctccctgcctcatgctatgagacttgtgtttgtggggacactagcttgtgtattcagggaaggggaaagagtgtcaccaagggcagaggtgtccaggccggatccagggtgcctccgactgttagggatgctaggctgctagtgtggtgctgccccatagccacagggtcccactctgatctgtctctttcaggactttgcagcgtgtacttggtttagctccttctagccagcaggagctgacatggacccgaaattcctcgggtgccgtgcctggagctgccagctagctccgccttcgggagcggcaaacaattcttcgaggacattctacagcacagagacagagtttgtcgttgcctctgtcccatctgcacctcgagtcagcagagaccccgccataggtagtatctcatccatggcaagtgactgtggacacagtggagcaagtagaacttattagaccttggggacccggatgcagcagatgtgttcttgccttgggaagatcctccgacgacccccagtcgtctggggtggacaacattgggaggagctgagcctgcggtgcctacatcagacaggaacacatctaggaactcctcctccatcctcctcgaacgtctccaacaaagtgcatagcccagatccaagtgatgatggagcagatacgcccttggacacagcaggaatgaagagggaggacaggg

SEQ ID NO: 523689 - DNA, 313 bp, Homo sapiens
  misc_feature (133)..(133): n is a, c, g, or t
gactcctggtcgctatcggcgaggttatttcgcttgttaaagtgtttaccgagtgcagggcatattggggaattacctgggtggggcggaacggtcagcgttaccagtagtgtgattacgggggcaatttatnaatttcattcggatccacggtgcgccctcaactagtacccgctgagaattgccgggactttagaaacctggggccagaaaaattttccacaaagttggggaaaattggtttttgccacaagtgtggagaaaattccccctttgggggcccccaaggggggggaaaccccttttttttttt

SEQ ID NO: 523690 - DNA, 427 bp, Homo sapiens
  misc_feature (423)..(423): n is a, c, g, or t
atcacctgaaccttgggaggtcgaggctgcagtgagccacccaacctggatggcagagtgagaccctgttttaaaataagaaagaaaaattaaaaaataaaaatctagctggtcatggtggccagcgcctgtggtcctatcaggaggctgaggctggaggattgcttaagtacgggaggtcaaggctgtagtgagccatgattgcaccactgcactccagccgaactgacagagtgagaccctatctcaaaacaaaaaaataatctattgtcatcccttgatatccacggtgtattggttccaggatccctctcacatagcaaacagtatatatatatctgcagatgctgaagtcccttatataaaatggcacatttgcatgaatgtatattgttatatataataaatttttttattgtcatnttcc

SEQ ID NO: 523691 - DNA, 267 bp, Homo sapiens
  misc_feature (166)..(166): n is a, c, g, or t
  misc_feature (214)..(214): n is a, c, g, or t
cctcaagatgaatttccagtgtgaaagcatcatgaaagtgtcaaagaatgatgcattaaagccaatctggtgggagtaaaaataatgtgccttggaaaactgtgtcagataattcagaaagtggcttaagtgaagacaaagacccgatgacatggctgcatatgantaatttaaataaattttttcataaaatttgagagccaagaatgagcantatatctcatttttacataatatgtgattgagtacataatttgtaatacatat

SEQ ID NO: 523692 - DNA, 349 bp, Homo sapiens
catcggaccgggtgtttcttgagggtgctgcgggagggaagacttggggcgtcctgtaattagcacttccaggactgttttggtggctgaaattaggggtgacagtggccttgttatggtggatttcttcttgagggataagaacaagggtctttgttaatgaaggaagtctctgattgaggggttggaatctaagggcttcagggtgaccatggggtcacgacatcttgagaggactgatgttaaatggggaacaatgacatgaatgtctgttactcttttgcttcgggggggagacctatgtttatttcaagaggacttaaggggcagtgtttgttaatggggaggt

SEQ ID NO: 523693 - DNA, 980 bp, Homo sapiens
ccattttcatgtcccgttcgtcgccctgtcctggcggttccgccctccttgacatcgtgcattgcaccttgtgatttctggcctgagtaacccgtccgagtggcgttcgtgcctcgtcccgtgccggtgtggcttcaatgcctctttcttccagtggattcgtctcaggcgtacctctctttggatcagagcttgtgtgtttttgtttcttgggttcttggatgtctatgcctctacgcgtatgcgtcggttctcctttcctatctgtttgccccgtcatcttgcacccgtctttctccctctggccatggttctgtttcgcttttgggtccatttttttgtctctccgtttgagtcgtgattaccctctcaggtgtaggatcccttgggtgcgagtaagatagtcgttgcctttttgtccactttgcgcatctcgtttctatgtaacgttagccccgtcgattatgcaacgtgatcccatgtctcgcatgacgtttcatgttactccctcctttcttctcacttagtcatttttgattggcttatattatggagcgtgtcatctacaggatcatgctttggcatattacatattcaatgtctatgaatcagtacaaccgatgtttgtttgagcgtagaagatatcctaccatataattcgttgcccaaatttgggactattgagagagataggggatgctattaattacaccagcatcctaaacggcattaaaacctagacctgtcccaggccgatgcctggaaatatgttctttctagttgtgggtaccctgatctagcttggtttgtaattgtgcattatctgactgcatatgtttctgtatgtgtagatgtgggctcctttgttaagtggggctcatggatccgaaggctctgaggaagtgtggcttgctagtctgttacgttaacatgcttttctaaaattggcttcacgtgtaattcatttactcctgttaccc

SEQ ID NO: 523694 - DNA, 464 bp, Homo sapiens
  misc_feature (333)..(333): n is a, c, g, or t
tgtggtgatctagaggatcctttgggtgctttctattgagtagaagctcacaacagaacaaggcagaccctccctctagttttctagatacagagcccctgcagaacgtgaggcctcaatgctgattttcgctggatctcatcacagtgtgaacagggtaaaaagcagtgaagctctctacttgtgcctcgttgtgagcagtgggtcgtcttccacgggctgtccctgaatcctgggctttgagggacaaagagcttgctggaaatagtgatcaccctcgtgatgacaccaggtcaacaggcagctgtgggctcacttaagatgtaagccggncgggcgcggtggatcacgcctgtgatcccagcactttgggaggaccaggccggcggatcacgaggtcaggagatcgagagcatcctgggtaacacggtgaaaccccgtctctactaaaaaatacgaaaaag

SEQ ID NO: 523695 - DNA, 660 bp, Homo sapiens
gttatagcatcaccacacttcttggtactaattgctgtcttagcttggctgctataacaaaataccataaactgggtggcttagacaacaaatatatttctcacagttctggaggcagggaagtccaagataaaggtgctagacaattaagttcctgatgaggttccaaggtgctagctgattcttcttcatggtttgcagatgaatgccttcttgctatatgttcacatggtggagggagaaaccatctctcccttatttcttattgtaaaggtactaatcccatttatgaaggttccagcttcaaatgccatcacactggagattagattttcaacatgtgaatttaatgggggacaccagcattcagtccctagtgctctgatagagtattcattaatgtcatgtatttgttaacatcttgtaagttatttgggctttgatgccttaaaagaagaccctggccaggcatgctggcctcatacctgtaatcctagcactatgagaggctgaggtgggcagattagttgaggtcaggagttcaagaccagactggccaacatggtgaaaccccattctactaaacatacaaaaattaggcaggcatggtggcgcatgcctgtaatccaagctaccccggcaggctgagggcatgagaga

SEQ ID NO: 523696 - DNA, 288 bp, Homo sapiens
cttatccataaggtgtgtccagggcgcagattattgaaagccaggagtctgagatcagcctgggcaacatggtgaaaccccatctgtactaaaaatacaaaaattagccaggtgtgatggcgtacatctgtaatttcagccactcgggaggctgagacaggagaatagcttgaacccagtaggtggagatttcagtgagccgagatcgtgccactgcactccagcctgggtgacagagcgagactccatctcaaaaaaataataaagatgtgggcacacattatggag

SEQ ID NO: 523697 - DNA, 481 bp, Homo sapiens
  misc_feature (356)..(356): n is a, c, g, or t
  misc_feature (414)..(414): n is a, c, g, or t
  misc_feature (456)..(456): n is a, c, g, or t
  misc_feature (472)..(472): n is a, c, g, or t
cttgggtgaactcggcgaatgggtgattcgcgatgttgcttccacacctctcattccgggcattcgcaggtccatgaggaccacatcggcctggggagcctgcctcacggctccgtcgccgtcactggcctcaccgaccacctcaaggtcatcagcggcctcaaggatctggcgcacagccctgcgtacgagcgtgtcgtcgtcgacgagtaagacgcgaacgggcagcatggccacatcctatgatgtctatcgtttgcgatccgtcgcggcaccactgtggtctattggaaacgggcggggatgattatcactgcacgggatgtccacatggacgtggaacagattgtcatcangaccgtagtgaaggctgccccaagtagctcgacacgctcggtgatccccctaagcccncgggaatgggcactcggcccaccagtccatccaccgatgtanccgttcgtcgtcctcnggtaatgca

SEQ ID NO: 523698 - DNA, 150 bp, Homo sapiens
  misc_feature (135)..(135): n is a, c, g, or t
ggaccaacaggaaaagcgagatgacaaattggatgaactcataagcttcagaatatctaagcaaaagtagaattcctgcctttaggaagagtaactttctttggaaaagcatcagaaatggcaaaagtcacaccnattatccgaaatatg

SEQ ID NO: 523699 - DNA, 166 bp, Homo sapiens
cgattgatagatgttgtcacagtagattcgctggaggaaggatgtgagctataactgagaggaacctagcaggcctaccagagtcatctggacttatgcaactttctacccccagatggggcagatctcctgaatcatgaggctatgcctcaccaataagcagcca

SEQ ID NO: 523700 - DNA, 1192 bp, Homo sapiens
gagatgatgttctcttttatgatgagtcaccaccaccaagaccaaaactgagtgctttagcatgaagcctaaaaagttagctgctatcaccaaagttaagggcaaaaggccaggttcttacaaaaacaaaccctaaacagcattaagaagaaacaaaaggaccctcaggactatcctggaggtgaaggaacgtgtagaaacaaaacacgcatgtttcttcgtcaagctgagcgatgaattgtgagcctgtccagtgaccacaaaggatgagaacaatctatgcctactctggaatctcgaggaattctcagataaagtcctaaaatgcggtgtcaatcacatcacacgagcagtcctgtagcatgaggcccgtagcgctgtacgaattgcaaggaatctgctcactcttagaggccccactgggttgaaacatataacgacactacaatgtgggtaacgataactagatgactaacacgatcacgaggacagtcgacacgtttgcccgttggtccggttggaccagtcgcacaaagaactctttgccgtccttaataacccgcgacgtgttcaaaagcctagactcggggaggacccttgtcggtctcaggttggaaagcaacgccatgcagcgttaccccaacttggtgcattgtatgaggagtgtctgcacacgaaggtcacgcttttcaaaattgttcacgcctggtcgagcgaaaaatcaaggcacaggccatttcctcccctattgggaacccatgaactttcccctggagagccaaaatgggcaccttggctagtgttaaacttggtttgggccccttccttaaccaacaagtagccggcacatctgggggaaccggcgaaatcgccttcaatacagcgaggcacccacaatggacacttggggggttcccgcaaaaacgcaagttagggggaacgagtcaaaggaaacaaccccgtccatggtgtcttacactctacaataggaatggggtacaggcagagcgtacacccacacttgatctgtagaagcaatatttatcgctctaggaagcaacgccatgatcgcgtctgtttcacgccaactttacatgcccccccctgacataccagcttctctcgaggcacgaaccaaattcttgtcgccccaacatgcaggtaacccctttgcccttggtgggccttctca

SEQ ID NO: 523701 - DNA, 296 bp, Homo sapiens
aggttggagtgcagtggcgtgattatagctcacgtgtagctttgaactcctgggctcatgtatcctcccttctcatgcctcccaaatagctaggatctattagcatgcccagttaagttcttgtaaaaattttcttagtagagatcaggtcttgctttgtcgcccatgctgatcttgaactcctaggctcacgcagtcctcccagctcagccttcgtgctgggattacagcgtgtgagtcaccaagcctggctttatataccatttttacaaacggtactattttgaagagtaatg

SEQ ID NO: 523702 - DNA, 239 bp, Homo sapiens
aaaggggaaaactcttgagctgtaagagtgaaggaaatcctgttggctgctgcaacatggatggaatcagaggccattatgtcaagagaaagaagccaggcacagaaggactaatatcgcacgttctcactcctaggtaagtgctaaacacttagggggaaaaatagataacagagcccgagaagggtgagagagacggagggaggaggatgcagagaggtgggttaaaggctgcacac

SEQ ID NO: 523703 - DNA, 944 bp, Homo sapiens
  misc_feature (167)..(167): n is a, c, g, or t
agagatgtgtgccacacttcatagatctaaccttacattgcagcacttctcctcaggctggacgggataggggaaggagcgtcagttttacacgatacaataagccttttcatggacagatagactatatttactgcctactacaccaacgtaccagctgagtgcangcgtcagtgtgcacggacgtctaccttgccacggaatgtgttcccacagtttattgacaacgtagcaatattacttccagaatggtaggcatagtatatctatattaagagaaacaaagcagcacctatattactacactagtaaataccaggcattactctcaactagtgtaatgacaaagtgttccgactatcctagcctataacttcgacccatgtgtagtgtcaattcagtcattaatctcgaacttctagcaggcaccaggaacaccccagggtatcaatactcctacaataaagctatggaagggtgggttggtccacgaggggcatcttccaaagtcgacttgtgtcatcctaaagttagacctttgttgcttaacgtggacgaaatcgccgtctaaccacgagcgtccactctaagtatttccatggaagagtgacttctacacggtaacgccattacgtaacaataagcgatccataagtagaagcaatattccgataattcattaaccacatccaccatcatcaccaaaaagggccacatccggcgttctacactcagataatcgtgccttaagcttcagcactcacggaagatatctatataagaacaccgaaccataattgcagtgctccggggacaggactcctcgcaatgtttccccaccttaacaaccttaacatgtgccgaaccaagatcatattttacacccggacagttaccccgttgcctctcacgttagggtcgtgactcagtgctggcttgaggct

SEQ ID NO: 523704 - DNA, 526 bp, Homo sapiens
  misc_feature (29)..(29): n is a, c, g, or t
acgttgaaagaatgtcgatgtcgggtaantgagtgttcgcgaatttgcgcgaagcgattacgtggcgctaatacgaacgctacgtgaaacttcgtgaaatgacgtcgtgaagaaattgaaagtatgactgcgttcgagtggatgttgggaagtttcgcatgtgaccagttagagtgtaaatcgtcatttactacatatttgaacgtatgttgttcatctagaggcgagacgcacgggattggactaagggcaagtaaaacggaagaagatggtgtatacaaatgtgattgtgaaggctgtgacgcgtatatatgcaacgcgcggtgaatcgtgcgtcgcgacacatttttaataaggataatgagaaacgataagggtgatttgattggtccaagaagattaagaccgaggccaggaaaatatgtcaagcaaggcaaaccaagaaaaatcaaagtctaaacatcgggggaccaaggacagcagatgtggaaaggaaggaataaaaatgcccaagaccaaaaaaaaa

SEQ ID NO: 523705 - DNA, 172 bp, Homo sapiens
  misc_feature (80)..(80): n is a, c, g, or t
  misc_feature (156)..(156): n is a, c, g, or t
ccccaaggcgaaccccacggaaagccccacgagcgcacacccgacccgacccgcccgcaaccggaaacccgacccgccanacacccacgggaaagcgggcggcaaccacaaagcacacgccggaaggcaaccaaaaccggcggaaggccgacagancaaagccgggcagggc

SEQ ID NO: 523706 - DNA, 91 bp, Homo sapiens
aagaacccagcttgatattgtttgaatctgtgacagtacacactttggtgaaatttcaggagccatagccattgaaatggatgaggggacc

SEQ ID NO: 523707 - DNA, 325 bp, Homo sapiens
gatcgctaccgtcaggacctccagttgagcaggacactagggcgtctccaagcagagtaccaagccctggcctccctggagctccaagaaggcgaagatgatggctacttccgggaactgctggcctccatcaacagcttgatgaaggaactaagatgaggctgccatgccgagaccaggactggacggatgctgctagtgagagctttggtgggctcttcaggggacatcaactacgaggaggacttaacctgctggggcatgagtgtcacctgggcagagcttgctaggtcattaaacagagacatgatgacaaaaaaaaaaa

SEQ ID NO: 523708 - DNA, 199 bp, Homo sapiens
agaggatcttcagaggcaccaaggaggtgtgagcatagatgctgtgtcacttctgcattggggagtgtgatggttaatattgagtgtcaacttgattgaattgaaggacgcaatgtatcgtcactgggtgtgtctgtgagggtgttgccaaaggagattaacatttgcgtcggtggactgggagaagcagacccaccct

SEQ ID NO: 523709 - DNA, 498 bp, Homo sapiens
gacgacagcataacagcatcaacaaaaaggtcctcacaaaaaccccatctaaaggacatcaaagaccgaagctagataaactcatgaaaatgagaaagaatcaactaaaaaacacagaacactcacaaacccagagtgcctcttctcctccaaatgatcgcaacacctctccagcaagggcatagaactgggctgaggctgaaatggatgaactgacagaagtaggcttcagaagatgggcaataacaaacttcactgggctaacggagcatgttctaacccaatgcaaataagctaaggaccatgataaaacattgcaggagctgttaaccagaatgaccagtttagaaaggaacataaaggacctgatggagctgaaaaacacaacctgagaatttgcaacaagtataaatagctgaaaggaagaatttcagagcttgaagactatcttgctgaaataagacaggcagacaagatcaggtcgttgttacacattct

SEQ ID NO: 523710 - DNA, 148 bp, Homo sapiens
  misc_feature (93)..(94): n is a, c, g, or t
  misc_feature (121)..(122): n is a, c, g, or t
acctcgaggtgtctgtcctcccggagcaggacccatacctccaggcgagcatctgaacccatgtgagcagcacacactgcccccagtgcgagnncatctgacctgaactggatgcagcacnnccacaatcccagtgctgagcatcttg

SEQ ID NO: 523711 - DNA, 931 bp, Homo sapiens
  misc_feature (22)..(22): n is a, c, g, or t
  misc_feature (143)..(143): n is a, c, g, or t
  misc_feature (176)..(176): n is a, c, g, or t
  misc_feature (179)..(179): n is a, c, g, or t
  misc_feature (187)..(188): n is a, c, g, or t
  misc_feature (190)..(190): n is a, c, g, or t
  misc_feature (196)..(198): n is a, c, g, or t
  misc_feature (275)..(275): n is a, c, g, or t
  misc_feature (282)..(282): n is a, c, g, or t
  misc_feature (301)..(301): n is a, c, g, or t
  misc_feature (314)..(314): n is a, c, g, or t
  misc_feature (323)..(323): n is a, c, g, or t
  misc_feature (391)..(391): n is a, c, g, or t
  misc_feature (395)..(395): n is a, c, g, or t
  misc_feature (437)..(437): n is a, c, g, or t
  misc_feature (464)..(464): n is a, c, g, or t
  misc_feature (479)..(479): n is a, c, g, or t
  misc_feature (482)..(482): n is a, c, g, or t
  misc_feature (489)..(489): n is a, c, g, or t
  misc_feature (525)..(525): n is a, c, g, or t
  misc_feature (527)..(527): n is a, c, g, or t
  misc_feature (540)..(540): n is a, c, g, or t
  misc_feature (571)..(571): n is a, c, g, or t
  misc_feature (573)..(573): n is a, c, g, or t
  misc_feature (587)..(587): n is a, c, g, or t
  misc_feature (614)..(614): n is a, c, g, or t
  misc_feature (665)..(665): n is a, c, g, or t
  misc_feature (672)..(672): n is a, c, g, or t
  misc_feature (675)..(675): n is a, c, g, or t
  misc_feature (677)..(677): n is a, c, g, or t
  misc_feature (696)..(696): n is a, c, g, or t
  misc_feature (699)..(700): n is a, c, g, or t
  misc_feature (712)..(712): n is a, c, g, or t
  misc_feature (720)..(720): n is a, c, g, or t
  misc_feature (726)..(726): n is a, c, g, or t
  misc_feature (737)..(737): n is a, c, g, or t
  misc_feature (742)..(742): n is a, c, g, or t
  misc_feature (746)..(746): n is a, c, g, or t
  misc_feature (754)..(754): n is a, c, g, or t
  misc_feature (764)..(764): n is a, c, g, or t
  misc_feature (770)..(770): n is a, c, g, or t
  misc_feature (790)..(790): n is a, c, g, or t
  misc_feature (854)..(854): n is a, c, g, or t
  misc_feature (861)..(861): n is a, c, g, or t
  misc_feature (864)..(864): n is a, c, g, or t
  misc_feature (898)..(898): n is a, c, g, or t
ctcccagctctacaaacagggngggtaatatagctccttttggataaaagtagaagcctcacattcacctttaatgttatttcactttttccaaaatcaatttcctggcaccacacaaaaaagaacactggtaaatgtataanctgaaatgaaggaaacacatgctcacgagtgtntcnctgccgtnntngttttnnngccatatacatggctctccagctctcgtggggggccagggggttctgtgtgctcttcaaagcctttacccattgggnctctgtncatctttccagcctggggngccaatatttgcnccacaaggnccaggcaggagggcctccagcacgcgcagcctgaccacactgtgagcagctcacttggcaagggtgangggngggggtggcgtcctcctgatgtggcttccttccagcctttancacccctggggggctcctccaaggagnaggtggttagatgtnttnttgtgcncacacatacggcagggtggaggaggatgaaccggancncagcccatgcttntgcccccaccctggcaccccaaggttttttntnaggcaacaaggagnacacaaagtgagcccctgtacacaggngggtgggatatgttcatcttccacagggaggccagtgctggggatgagganaaaggcntangnccagtcccagctctgaaantgnnttggtgagtcanccatcagncctaangcttcctggangaganaagnagataggntgttccaganaggagntgtgtcactaagggccaggncaccccatctctgggtcacgcttggccacggcttcatttttggcttcagtttgtttactgaaangaaggcngangggccctgtgagacagaggacactgactcaggtnggtgagtggccctcactgtatagagtacatggc

SEQ ID NO: 523712 - DNA, 390 bp, Homo sapiens
  misc_feature (217)..(217): n is a, c, g, or t
  misc_feature (280)..(280): n is a, c, g, or t
  misc_feature (337)..(337): n is a, c, g, or t
  misc_feature (371)..(371): n is a, c, g, or t
ttaaaaaatcaggccgagcacggtggctcatgcctgtaattctagcattctgggaggccaaggtctcttcaccaatccttccatatcagtgtgcgcccccatacctactccttcaccctatttctcctccccccatctattcacctcactaagagacataacctcaaactgtcctatatgctctgttacttcctcccttaaagacagcataaaaggnaagaatgcacagattaagaaaaggacggggatattttcaaggggcttcatttttaataacctnacttttaaagatcctggtaaaattcttaacaaccagggggtgtcccaactgttcatngccctcggctccaccactcacagcatttatagtncacaatattttagggcttt

SEQ ID NO: 523713 - DNA, 423 bp, Homo sapiens
cacggacgacgagtcctggagagagagtcataagctgagttctggagatgaggtttgtctggctcgaagatctagagacaacgggtcgtatgcgctgaggtctggagaaaggggcatctgaccgagggctggggaaaggtttgtctgactgagttctgcagagaggttcgtctggctgaggtctacagagagggttgtatggctgaggtctggagaaagggttgtatggctgaggtctggagaaatgggcatctgaccgagggctgggtaaaggtttctctgaatgagttctggagagagagtcgtgtcggtgaagagccgagagaaggtttgtctggctgagttctggagagagggtcacctggctgaggtctggagagatgactgtctgccagacttcatgttctgaggaaggggaccttt

SEQ ID NO: 523714 - DNA, 244 bp, Homo sapiens
cattggtccgagagaaattaggcatagccgccgcagtactgatcatgtctatttccccctctgattgatccccacctccaaattatgtcatcaacaatccgacttatcaccatccagtaatgactaatctaactaacctcaaaacaaatgataaccatacacaatactacagggcgaggctcatctcttttcctattatccttgatcattttgagtgccacaactgattactctcggaccagtg

SEQ ID NO: 523715 - DNA, 121 bp, Homo sapiens
  misc_feature (8)..(8): n is a, c, g, or t
  misc_feature (46)..(46): n is a, c, g, or t
  misc_feature (100)..(100): n is a, c, g, or t
ctcatttnatgtggaaaattgaggcactgagaggttaagtaaattncccacggtcacacagtaatttaatttacaacagtaataacacattagatgagancacagtaggacacaattttaa

SEQ ID NO: 523716 - DNA, 710 bp, Homo sapiens
  misc_feature (18)..(18): n is a, c, g, or t
  misc_feature (65)..(66): n is a, c, g, or t
  misc_feature (71)..(71): n is a, c, g, or t
  misc_feature (78)..(78): n is a, c, g, or t
  misc_feature (122)..(123): n is a, c, g, or t
  misc_feature (132)..(132): n is a, c, g, or t
  misc_feature (135)..(135): n is a, c, g, or t
  misc_feature (140)..(140): n is a, c, g, or t
  misc_feature (143)..(143): n is a, c, g, or t
  misc_feature (150)..(150): n is a, c, g, or t
  misc_feature (164)..(164): n is a, c, g, or t
  misc_feature (179)..(179): n is a, c, g, or t
  misc_feature (199)..(199): n is a, c, g, or t
  misc_feature (203)..(203): n is a, c, g, or t
  misc_feature (221)..(221): n is a, c, g, or t
  misc_feature (226)..(226): n is a, c, g, or t
  misc_feature (228)..(228): n is a, c, g, or t
  misc_feature (272)..(272): n is a, c, g, or t
  misc_feature (274)..(274): n is a, c, g, or t
  misc_feature (276)..(277): n is a, c, g, or t
  misc_feature (390)..(390): n is a, c, g, or t
  misc_feature (430)..(430): n is a, c, g, or t
  misc_feature (512)..(512): n is a, c, g, or t
  misc_feature (621)..(621): n is a, c, g, or t
  misc_feature (647)..(647): n is a, c, g, or t
  misc_feature (678)..(678): n is a, c, g, or t
gaagtgaagctttgcaantccattgtccaataggaaaaataatatatctctctgtacagataaannccttnaaaaaantaaatctcttttgaaacggtcttttaaacgtctccagcctgttnngctcccccnaangggtnttnctgtccntccccaattgtgantctggtgaatgggantatcctcataggggttctcntcanggaataccaccgggtttnccaangngcccaaataatgccattatcataaccattaggagtagatgcttntnannaagtgccacctgggtaataaaccccattgagagggccagcgtgacacttgttcatccaccaaccagatccatcctgttcagcacagttgccttcaaacttatcattgtcattntcccaggtactgaactgcatgccattatgggatgtgaaanacttgtcactaggatcatcgccaaaatcaaagccatcaaaggcatctccagcatccccaccagcgaagtaggcatatgttangcggtacttgtcagcttcaggtcccaccttgaacatggcatagtctgcagtactggttctgccattccagtcttccagttccactcttaatgcatatgggatggcagantgtgtgcttatcaaatgaatcttctnatttcccagccaaaattctgttgtgccagtnggagacagatgtccaaatccttctttatattg

SEQ ID NO: 523717 - DNA, 880 bp, Homo sapiens
tggattggttttcaaatttttattttttggaacaaaaattaaaaacaagtgattttaaactaataaacacgagtggtatattattctagaaccacgtggttttttttaaaagaatttattaaatttagaactccttatagtccgtgtgggtgagtgctttctatcaacatttatattattctctttaccatttttatctcatctcactctccaaggcttggcataagccaaaaagaattctcctcggttaacagggtgaagtttacatttagggaaattacctccactatagcacactgtgaacaaaacctacagaagcgtggctccatagtttaattatttctacaaagaacaacaagaaagttcgtgctccgagcccatttgtgggtttgggtgtggtataccagtgtggtccattagcgtgagactcaggagagagaagcctaagtttaattacaacaagaattatacccttctgggacggggtgcaagaggatgtggcatttcaaccaaaactttcatttaagaacgagaaccaacagagttcacaaaccgttgggtgagcccaagagctctcaaactcgggggtaaataggtgattctaaaaaccaaaacagtgttaggtggggtctcacaaccgagaacgtggtttttccactgtggtgccaaatttttcccctcgagggaatttaatttccccaattccacaggaaagagaagcgggaattagtgctttcccaaagccctgtggtccaattaaagaaaaatgtgcccttacaaagcaaaatcccatcaattaggggttaagaacaaaaaaacaaaaaggaaacgaacacgaggggttgaaacgcgattggtgcgccaaaagaaaaggcggcgg

SEQ ID NO: 523718 - DNA, 430 bp, Homo sapiens
tggataatgtagttggtactggtgtacatgcagtcctggacccataagttattgtttagtcaataggagactcaggcagtggaggctagtgcaggagaaggaatcgatatcatggctgagttgggaggtaacaatgtcagctggggtgtgtacaggcggagtgtgcagtgtgtgtgaggatggggagcactggaataggaatcgccagtcctagttcctagcctaggtctgccactcactgctgtggtgagtcaggcaggcgatttgctctctgtgggcctcagttactcatgtaggggggggacaataggaccaggtgatctctagggtgatcgtttcttagtctgtaccaagtggacttaagagaatctggatctcctgggggagatcccaaaaggggaagccagtacgcccccagcgaggggtaccg

SEQ ID NO: 523719 - DNA, 653 bp, Homo sapiens
cgcccttatttttttttttggccggtctcagtctttaatcggggcaggggcctcacgcacgcgcgcacgtacacacactcaggcttcagaatctgtgttgaaagctgcgatatcgacactctgcacgtgctcctcaaactgggtgatctcctcctccagcaagtctggtccccacctggtcgtcctccaccacacactgaatctggtagcttcctggatacctgtagcccagtgggcaccacgcttgtgaatgccccccagaccagccctgtccagctgggatatgatgcgcacacagtgcctccagctgagccatgtccgtctcatcatcccaaggcttgacatccagcaggatggaggacttggtgccaccagtgcaggcttctgggccttacttctccgcgtactgccgaaggccgctcctcccgcagctgtgccgcctccttgtcctcctcctcatggtcacgggccaaacaggtcaaggtcatcatccatcgtacatcctctgcgggatgaggcggagcactctgggctggggggctaccacttggcgcaggggaagatacgtgctgggcatgtggtggccgatggcccggtaggccaggagagcacttctccagacacgtacagccagagacctccaagcttggaga

SEQ ID NO: 523720 - DNA, 203 bp, Homo sapiens
ggctgagtgaagagtatgcaatgagcgatttgtaggtctgtatagtcgtaggcagatggagcttgtcataattatgccctcctcagggatagtaccacaggcacaggggtcaggctcatgtgtttggtcagggggttgaggacatgagtgtgcaggcgtcattatacgcatagccgccctgagttatagagatgatactgcgg

SEQ ID NO: 523721 - DNA, 123 bp, Homo sapiens
ccgagcggttcaacggaactttctacacttaagtgtcacatggtccaatctaactccttctcagtgtcagtttaacctatattagatgtcgataataagtggctcacgcctgtaatcccagcc

SEQ ID NO: 523722 - DNA, 661 bp, Homo sapiens
tccattgtcttgtgggcagtgtttgtgtaggtcagtctttgggtcctcttatctttggctccggtggatgtgttttgcgtttccatgtatcatctacgggtcttgacgtgacctcttgggtccctttggtcctcttgggcgctctcctattctttgtcctctctgcatgtacacatgtcgtgtgcttcttgcacaccctgctgtgcttttccccgttggcgtccccttccagggttcccaagagtgcatgacttgatcttccccagcttaacctgtgggattttgttcgcccttggccaaacgacggttgcttgtcaatggcatggaaagagcatatgtggcacgagtcttcacgattggacagggagaatttaagcggttcacgtgggcgtccgacgcgggtctgggaacatcgtgtcccgatccgctcacatcccactcctcaactccttaggacgcataacctaccttgtcttttttgtgtcaaatggtgtcggtattccaggtagagtcagctctttgacataatagaatacttgaaaaattaattgtatgatgtatgagaagacagacgtctcctagttttgtatcattgttgtatgactgccatgagttccaccagtaagccactctagttttggtctctgtgacatttaaatac

SEQ ID NO: 523723 - DNA, 917 bp, Homo sapiens
ctctttgtagagaggagctagaatcactcctggagagttaaaagtaactgatatttaatttcagatcttcagtattggtcagcgatgagaaaggtgcttgagctttattgtactgggtagtaacgacctggctcttcgtagatcctgtgtgtaatgctggtagtgtactgtgaagtacttccatgggttcggtagtgcggtagaacagcaaagtccgtgtgtacttcgctaggtgtgcgatcctataagaagcgggatgtatgaggcagagaaatgatggtaaggaaagtgcaggattaagcggaatgtatggtttcgaaacttaattatatgttgatgcagtgactttagcatggtctccattttgctagaagtctgctgtggtcctgcttgtgatgacggggagatcaataggacagaagctagtctaggagaccgatgatgctaagttctgcttatgtgttcccagtgtaacctagtcgttatcccagctattcaaacgcagcttcctatcttgtagagattggccataatttacgtggtgtccagtactgattaataaaacagcatctgggttcaggtaaaaagaatcatgtcagcggcattaaaacttgggagcgccgcatgcagtacacgagtaaattgtagaccctctcgcgaggtgcgtgcccctccggcagacagcgggacttaccgaccaggaggatgccgccgcacaatgctgggtgtgcccaaaaaaaaccgggggccgggttgcgacacacacggggctcggctcgtgcgatccaaacagacgggtggttaaccgcgggcggaggacaacgacagccataggggcaccccacacacacggacacagcacgcgggcaacaaccagaaaacacggtcacgagagcgctagctcagctgcgatcggg

SEQ ID NO: 523724 - DNA, 2826 bp, Homo sapiens
gccaccgggacccctaccaggaccccttccagaacggctcctggtgccctgaccgccaaacccccgcttgcccccaagccgggaaccacagtggcctcaggagtgactgcacggagtgcatcaggacaagtgacaggtgggcatggagctgccgcagcaacatcagcatcagcaggacaggctcctgaggacccctcaggccctggcacaggcccctctgggacttgtgaggctccggtagctgtcgtgaccgtgaccccagctccggagcctgctgaaaactctcaagacctgggctccacgtccagcctgggacctggcatctctgggcctcgagggcaggccccggacacgctgagttacttggactccgtgagcctcatgtctgggaccttggagtccttggcggatgatgtgagctccatgggctcagattcagagataaacgggctggccctgcgcaagacggacaagtatggcttccttgggggcagccagtactcgggcagcctagagagctccattcccgtggacgtggctcggcagcgggagctcaaatggctggacatgttcagtaactgggataagtggctgtcacggcgattccagaaggtgaagctgcgctgccggaaggggatcccctcctctctcagagccaaggcctggcagtacctgtctaatagcaaggaacttctggagcagaacccaggaaagtttgaggagctggaacgggctcctggggaccccaagtggctggatgtgattgagaaggacctgcaccgccagttccctttccacgagatgtttgctgctcgaggggggcatgggcaacaggacctgtaccgaatcctgaaggcctacaccatctaccggcctgacgagggttactgccaggcccaggcccccgtggctgcggtcctgctcatgcacatgcctgcggagcaagccttttggtgcctggtgcagatctgcgacaagtacctcccaggttactacagtgcagggctggaggccattcagctggacggggagatcttttttgcactcctgcgccgggcctccccgctggcgcatcgccacctgcggcggcagcgcattgaccctgtgctctacatgacggagtggttcatgtgcatcttcgcccgcaccctgccctgggcgtcggtgctgcgtgtctgggacatgtttttctgtgaaggcgttaagatcatcttccgggtggccctggtcctgctgcgccacacgctgggctcagtggagaagctgcgctcctgccaaggcatgtatgagaccatggagcagctgcgtaacctgccccagcagtgcatgcaggaagacttcctggtgcatgaggtgaccaatctgccggtgacagaagcactgattgagcgggagaatgcagcccagctcaagaagtggcgggaaacgcggggggagctgcagtatcggccctcacggcgactgcatgggtcccgggccatccacgaggagcgccggcggcaacagccacccctgggcccctcctccagcctcctcagcctccctggcctcaagagccgaggctcccgggcagctggaggggccccgtccccgccgccccccgtccgcagagccagtgctgggcctgccccagggcctgtggtcactgctgagggactgcatccatcccttccctcacccactggcaatagcacccccttgggttccagcaaggagacccggaagcaggagaaggagcggcagaaacaggagaaggagcggcagaaacaggagaaggagcgggagaaggagcggcagaagcaggagaaagagcgagagaagcaggaaaaggagcgagagaagcaggagaaggagcggcagaagcaggagaagaaggctcaaggccggaagctttcgctgcgtcgaaaggcagatgggcccccaggcccccatgatggtggggacaggccctcagccgaggcccggcaggacgcttacttctgacctctgccctggggctggactgcatggcccccctctttccctcagccaagaacaggcctggcccaaggtgccaccccctagcaccttgtcaggctgtcccttgctggggaaagtggcttggttccccatctcctcgccagctgctgatccctacacgggcaggacagatgggcagctgcaaatgagtctggagcctctcatctcccatgaggctcagctggggtctctgtcgctcctgccccagttccctctgggtcccctcctaggtgctgtcctgaatggcccgttgtcatcccaggggtgactcctggtgatgggagtcagcagtttcagattcttacactccatagctccccttaccatgaggtggagctggcttccttttccctgtcttcagccctccctgtctcccccacttcctggccagggctctcattctggacctgtgttgtaattgtgtacagaggatggcgttggcctggggtgggggtgctcgctttgtcttctgtcctttggttctccttccataatgctcctgtacccagtttatttaaggggacatgcactggaataggaaatgtcccccatctcccttcctgcaccctgctgtgctccctccaaacccaccttgctctgtgttctcaggcccccctgcttttgtctcaccaggacccatacctttcaccttgttcccttccacccctccagttagtccctatctgggtaagggtcttcccttgagctccagggggtggaacccaatgtttacattctcttctgtctctgcccccaccccatgcagcgctttgaggaattggaaaagaacctgctgttgtacctgga

SEQ ID NO: 523725 - DNA, 611 bp, Homo sapiens
  misc_feature (150)..(150): n is a, c, g, or t
  misc_feature (155)..(155): n is a, c, g, or t
tcccccagttcgcggcgcaccagtaaggcagcatccagtaagcggcagcggtccgcctgctggggtgtatgttgtgttggcctggggtgggggtgctcgctttgtcttctgtcctttggttctccttccataatgctcctgtacccagtncttcngacccaggctcagagagattcttacactccatagctccccttaccatgaggtggagctggcttccttttccctgtcttcagccctccctgtctcccccacttcctggccagggctctcattctggacctgtgttgtaattgtgtacagaggatggcgttggcctggggtgggggtgctcgctttgtcttctgtcctttggttctccttcctgcaccctgctgtgctccctccaaacccaccttgctctgtgttctcaggcccccctgcttttgtctcaccaggacccatacctttcaccttgttcccttccacccctccagttagtccctatctgggtaagggtcttcccttgagctccagggggtggaacccaatgtttacattctcttctgtctctgcccccaccccatgcagcgctttgaggaattggaaaagaacctgctgttgtacctgga

SEQ ID NO: 523726 - DNA, 980 bp, Homo sapiens
  misc_feature (852)..(852): n is a, c, g, or t
  misc_feature (873)..(873): n is a, c, g, or t
  misc_feature (936)..(936): n is a, c, g, or t
  misc_feature (968)..(968): n is a, c, g, or t
  misc_feature (973)..(973): n is a, c, g, or t
gccaccgggacccctaccaggaccccttccagaacggctcctggtgccctgaccgccaaacccccgcttgcccccaagccgggaaccacagtggcctcaggagtgactgcacggagtgcatcaggacaagtgacaggtgggcatggagctgccgcagcaacatcagcatcagcaggacaggctcctgaggacccctcaggccctggcacaggcccctctgggacttgtgaggctccggtagctgtcgtgaccgtgaccccagctccggagcctgctgaaaactctcaagacctgggctccacgtccagcctgggacctggcatctctgggcctcgagggcaggccccggacacgctgagttacttggactccgtgagcctcatgtctgggaccttggagtccttggcggatgatgtgagctccatgggctcagattcagagataaacgggctggccctgcgcaagacggacaagtatggcttccttgggggcagccagtactcgggcagcctagagagctccattcccgtggacgtggctcggcagcgggagctcaaatggctggacatgttcagtaactgggataagtggctgtcacggcgattccagaaggtgaagctgcgctgccggaaggggatcccctcctctctcagagccaaggcctggcagtacctgtctaatagcaaggaacttctggagcagaacccaggaaagtttgaggagctggaacgggctcctggggaccccaagtggctggatgtgattgagaaggacctgcaccgccagttccctttccacgagatgtttgctgctcgaggggggcatgggcaacaaggaacctgtacccgaatncttgaaggccttacaccattntacccgggccttgaccaaaggggttacctggccaaggcccaaggcccccccgtgggctttgcnggtccctggcttaatgccacattgcccttgcnggaancaaggcc

SEQ ID NO: 523727 - DNA, 352 bp, Homo sapiens
gcacaatctattgaatccagtacgacgaactcgcagtgaatcatcactgcaccactgctctctaccctgcgcatcagcccgaaactctgtctcatacaagaagcgaaccgtccatcacagactcgatgccataatccgggactcctatcgaccatgactgaaggaacgttggccctgagtttcatgggactacaacgaatgctcactatactatcatcacgaaggagatccaatctatctaactgtctgcgatcgtctttgaccagcctctacatagcttgctcacaaggctaatcaccagtaacatagttcctggcagataactacacatgggtttacctacatgtaggct

SEQ ID NO: 523728 - DNA, 826 bp, Homo sapiens
  misc_feature (575)..(575): n is a, c, g, or t
  misc_feature (671)..(671): n is a, c, g, or t
gccaccgggacccctaccaggaccccttccagaacggctcctggtgccctgaccgccaaacccccgcttgcccccaagccgggaaccacagtggcctcaggagtgactgcacggagtgcatcaggacaagtgacaggtgggcatggagctgccgcagcaacatcagcatcagcaggacaggctcctgaggacccctcaggccctggcacaggcccctctgggacttgtgaggctccggtagctgtcgtgaccgtgaccccagctccggagcctgctgaaaactctcaagacctgggctccacgtccagcctgggacctggcatctctgggcctcgagggcaggccccggacacgctgagttacttggactccgtgagcctcatgtctgggaccttggagtccttggcggatgatgtgagctccatgggctcagattcagagataaacgggctggccctgcgcaagacggacaagtatggcttccttgggggcagccagtactcgggcagcctgtgagtaccagtgggcacccagcgggaccgcctcggggaagcaaaggttgggggagggcgaancgaaaacgatacactttgcccagactctggcagcccagcctcctctgaggatccacggggtgatcagcgcgagctgccgtgtcttgagcatcctgnggtgcctgtgacattggcatgttagtggagtttcagaccaggggtcaagaggtctgggtttaagccttgcctttgatgggttgtgtgcccttgagctagtggcttccccatttccgtgcctcagttttttcctctataaagtggattgaatgaga

SEQ ID NO: 523729 - DNA, 120 bp, Homo sapiens
  misc_feature (100)..(100): n is a, c, g, or t
gactgaggatcccgtgagctcctggtttaatcatcttatgtatgtttgggcagctatcgtcattgaaattgcttcttgatttctattctggatagttcantgttagtatgcagaaatgct

SEQ ID NO: 523730 - DNA, 172 bp, Homo sapiens
ctcggtaccgcttctgcttctgctcagacttggatttccttttcttctgcctgggtccccttcgccggatgtgcttcctgcttctgcctcagggcttgggtccaaatactcaactgccactcggccttcaatagagcttaatacataaccctacttgcttcctgcttctgcc

SEQ ID NO: 523731 - DNA, 129 bp, Homo sapiens
taatagggttggctcatcgcatgcaggcgggcccccatgaaagggtcaggcctttgatgctggtattagtgaacgttgcaccccggaaactctccgggagaagtcgggaatccccataggcaacgacag

SEQ ID NO: 523732 - DNA, 3475 bp, Homo sapiens
gccaccgggacccctaccaggaccccttccagaacggctcctggtgccctgaccgccaaacccccgcttgcccccaagccgggaaccacagtggcctcaggagtgactgcacggagtgcatcaggacaagtgacaggtgggcatggagctgccgcagcaacatcagcatcagcaggacaggctcctgaggacccctcaggccctggcacaggcccctctgggacttgtgaggctccggtagctgtcgtgaccgtgaccccagctccggagcctgctgaaaactctcaagacctgggctccacgtccagcctgggacctggcatctctgggcctcgagggcaggccccggacacgctgagttacttggactccgtgagcctcatgtctgggaccttggagtccttggcggatgatgtgagctccatgggctcagattcagagataaacgggctggccctgcgcaagacggacaagtatggcttccttgggggcagccagtactcgggcagcctagagagctccattcccgtggacgtggctcggcagcgggagctcaaatggctggacatgttcagtaactgggataagtggctgtcacggcgattccagaaggtgaagctgcgctgccggaaggggatcccctcctctctcagagccaaggcctggcagtacctgtctaatagcaaggaacttctggagcagaacccaggaaagtttgaggagctggaacgggctcctggggaccccaagtggctggatgtgattgagaaggacctgcaccgccagttccctttccacgagatgtttgctgctcgaggggggcatgggcaacaggacctgtaccgaatcctgaaggcctacaccatctaccggcctgacgagggttactgccaggcccaggcccccgtggctgcggtcctgctcatgcacatgcctgcggaggtcagcgcctggtctgggccgggaggggcagggggatctcacctacagtggtgatgggggagctccctgctccctgcttctcaggccccacccctcctccttgttcttgctcttctcagcaagccttttggtgcctggtgcagatctgcgacaagtacctcccaggttactacagtgcagggctggtgagtgtctggaggctgggtgcatccggggctgtggcgtttcctccaggctgcaggcaggtccttgccttgccccaccctggccttcccggcttctgcccacagggccggccagttctcccctgatgggggcacagctgacttggccctcttctcatggcttgtcccacctgcaggaggccattcagctggacggggagatcttttttgcactcctgcgccgggcctccccgctggcgcatcgccacctgcggcggcagcgcattgaccctgtgctctacatgacggagtggttcatgtgcatcttcgcccgcaccctgccctgggcgtcggtgctgcgtgtctgggacatgtttttctgtgaaggtacttctgtggccctccaggccatgaggggctggggtttctgtggtggctaccaggggttctgtcatatttctggtggtccatggacaaaaggtacttgttgggtggaggtttcaccataagcagctgggggctggagaaacaggcctgattttagttctgccaccaacccagagcctgctctccctgccaagatcctgagactgatagcagctcatgtactttcacagggcctcagtttcctcatctgagattggcagtagatggggatgggggctgtgagtctatcctgatcaggacaggctgagatcttgggtctgaccaccccatgctctctactctccacccctgcaggcgttaagatcatcttccgggtggccctggtcctgctgcgccacacgctgggctcagtggagaagctgcgctcctgccaaggcatgtatgagaccatggagcagctgcgtaacctgccccagcagtgcatgcaggaagacttcctggtgcatgaggtgaccaatctgccggtgacagaagcactgattgagcgggagaatgcagcccagctcaagaagtggcgggaaacgcggggggagctgcagtatcggccctcacggcgactgcatgggtcccgggccatccacgaggagcgccggcggcaacagccacccctgggcccctcctccagcctcctcagcctccctggcctcaagagccgaggctcccgggcagctggaggggccccgtccccgccgccccccgtccgcagagccagtgctgggcctgccccagggcctgtggtcactgctgagggactgcatccatcccttccctcacccactggcaatagcacccccttgggttccagcaaggagacccggaagcaggagaaggagcggcagaaacaggagaaggagcggcagaaacaggagaaggagcgggagaaggagcggcagaagcaggagaaagagcgagagaagcaggaaaaggagcgagagaagcaggagaaggagcggcagaagcaggagaagaaggctcaaggccggaagctttcgctgcgtcgaaaggcagatgggcccccaggcccccatgatggtggggacaggccctcagccgaggcccggcaggacgcttacttctgacctctgccctggggctggactgcatggcccccctctttccctcagccaagaacaggcctggcccaaggtgccaccccctagcaccttgtcaggctgtcccttgctggggaaagtggcttggttccccatctcctcgccagctgctgatccctacacgggcaggacagatgggcagctgcaaatgagtctggagcctctcatctcccatgaggctcagctggggtctctgtcgctcctgccccagttccctctgggtcccctcctaggtgctgtcctgaatggcccgttgtcatcccaggggtgactcctggtgatgggagtcagcagtttcagattcttacactccatagctccccttaccatgaggtggagctggcttccttttccctgtcttcagccctccctgtctcccccacttcctggccagggctctcattctggacctgtgttgtaattgtgtacagaggatggcgttggcctggggtgggggtgctcgctttgtcttctgtcctttggttctccttccataatgctcctgtacccagtttatttaaggggacatgcactggaataggaaatgtcccccatctcccttcctgcaccctgctgtgctccctccaaacccaccttgctctgtgttctcaggcccccctgcttttgtctcaccaggacccatacctttcaccttgttcccttccacccctccagttagtccctatctgggtaagggtcttcccttgagctccagggggtggaacccaatgtttacattctcttctgtctctgcccccaccccatgcagcgctttgaggaattggaaaagaacctgctgttgtacctgga

SEQ ID NO: 523733 - DNA, 331 bp, Homo sapiens
atggcagcatcttgagcacatgcagcagcagcacatccaacccatgcaagcatggcaaagcaactggtccttgacgcaaaatcaaagaccaaccctggaactgtctttccatcagatttcttgttaactgaggtaataaatcccgatcgtcaacaagaaaaagggggaggggtgacaggaccgcaacagtctcctcaacgcatgcatcataagcatggccaaatcatgcctcatcaaccacagcatgttccattgctagggacgccagtggctccacgccaatgtaatccccaggcactttggagcagagccccaagatcttgcatccacc

SEQ ID NO: 523734 - DNA, 3296 bp, Homo sapiens
tcggagtttgggtgtgtttgggaggagggagaggagcaggcaggaatggaattcaggatgcatgcgctgattaggcttgtgagtaaggggctcttttctgatgtggggctgagtgaatagaagtcctggacacggcagtggggcaccctcaagaacagcagatctagggtacagattttattcttttggatgcagagacaggagaaagggctgaggcacagctggcttccaagccttccccaagaaccatgaaatccagtgagaccgataaggcaggccctgccctggggagctactgctttggggtgacaaagacatttagtgctagaggagggctgatgctgcagctgtggaaagcttcctggagaaaatgacctggaaggtttctgggatgtggctgaggaaggagggcgagggtgcagcctgtgctgggatggccaggagcatgtggagtatgtagccaaaggcggagccccggggcctggagtgctctgctgtgggctgagcctttagctgaagctcgctcagcaggactgggcaggtggatggaggagcctggtgataaactctgggacgaatctggaactgggtttggggacagagctctcagcccgtgactgccctcacagtcttccccaacccccacaggcaacaggacctgtaccgaatcctgaaggcctacaccatctaccggcctgacgagggttactgccaggcccaggcccccgtggctgcggtcctgctcatgcacatgcctgcggaggtcagcgcctggtctgggccgggaggggcagggggatctcacctacagtggtgatgggggagctccctgctccctgcttctcaggccccacccctcctccttgttcttgctcttctcagcaagccttttggtgcctggtgcagatctgcgacaagtacctcccaggttactacagtgcagggctggtgagtgtctggaggctgggtgcatccggggctgtggcgtttcctccaggctgcaggcaggtccttgccttgccccaccctggccttcccggcttctgcccacagggccggccagttctcccctgatgggggcacagctgacttggccctcttctcatggcttgtcccacctgcaggaggccattcagctggacggggagatcttttttgcactcctgcgccgggcctccccgctggcgcatcgccacctgcggcggcagcgcattgaccctgtgctctacatgacggagtggttcatgtgcatcttcgcccgcaccctgccctgggcgtcggtgctgcgtgtctgggacatgtttttctgtgaaggtacttctgtggccctccaggccatgaggggctggggtttctgtggtggctaccaggggttctgtcatatttctggtggtccatggacaaaaggtacttgttgggtggaggtttcaccataagcagctgggggctggagaaacaggcctgattttagttctgccaccaacccagagcctgctctccctgccaagatcctgagactgatagcagctcatgtactttcacagggcctcagtttcctcatctgagattggcagtagatggggatgggggctgtgagtctatcctgatcaggacaggctgagatcttgggtctgaccaccccatgctctctactctccacccctgcaggcgttaagatcatcttccgggtggccctggtcctgctgcgccacacgctgggctcagtggagaagctgcgctcctgccaaggcatgtatgagaccatggagcagctgcgtaacctgccccagcagtgcatgcaggaagacttcctggtgcatgaggtgaccaatctgccggtgacagaagcactgattgagcgggagaatgcagcccagctcaagaagtggcgggaaacgcggggggagctgcagtatcggccctcacggcgactgcatgggtcccgggccatccacgaggagcgccggcggcaacagccacccctgggcccctcctccagcctcctcagcctccctggcctcaagagccgaggctcccgggcagctggaggggccccgtccccgccgccccccgtccgcagagccagtgctgggcctgccccagggcctgtggtcactgctgagggactgcatccatcccttccctcacccactggcaatagcacccccttgggttccagcaaggagacccggaagcaggagaaggagcggcagaaacaggagaaggagcggcagaaacaggagaaggagcgggagaaggagcggcagaagcaggagaaagagcgagagaagcaggaaaaggagcgagagaagcaggagaaggagcggcagaagcaggagaagaaggctcaaggccggaagctttcgctgcgtcgaaaggcagatgggcccccaggcccccatgatggtggggacaggccctcagccgaggcccggcaggacgcttacttctgacctctgccctggggctggactgcatggcccccctctttccctcagccaagaacaggcctggcccaaggtgccaccccctagcaccttgtcaggctgtcccttgctggggaaagtggcttggttccccatctcctcgccagctgctgatccctacacgggcaggacagatgggcagctgcaaatgagtctggagcctctcatctcccatgaggctcagctggggtctctgtcgctcctgccccagttccctctgggtcccctcctaggtgctgtcctgaatggcccgttgtcatcccaggggtgactcctggtgatgggagtcagcagtttcagattcttacactccatagctccccttaccatgaggtggagctggcttccttttccctgtcttcagccctccctgtctcccccacttcctggccagggctctcattctggacctgtgttgtaattgtgtacagaggatggcgttggcctggggtgggggtgctcgctttgtcttctgtcctttggttctccttccataatgctcctgtacccagtttatttaaggggacatgcactggaataggaaatgtcccccatctcccttcctgcaccctgctgtgctccctccaaacccaccttgctctgtgttctcaggcccccctgcttttgtctcaccaggacccatacctttcaccttgttcccttccacccctccagttagtccctatctgggtaagggtcttcccttgagctccagggggtggaacccaatgtttacattctcttctgtctctgcccccaccccatgcagcgctttgaggaattggaaaagaacctgctgttgtacctgga

SEQ ID NO: 523735 - DNA, 3311 bp, Homo sapiens
aattaagtgattgcccaaagtcgacacaatgaataaatggtagaagctaggacgtggatccagatctaatgcaaaatgtggctttaaaatactccatactctctccccagattgggatgtgtcagaagtgagatttaaatatgacctctgaatagagatccatcaggaaaggaagccctttcagtgtgccttgggatgcccaagtggccagacatcctgatgtttggcagctcacagactatccagtttctcgtttgagcttggggaggtggcttgcctcagttccccctgcaatgcaggttttacactattgctactgaccccttccgtgctcccccgaccctgcagagagagctccattcccgtggacgtggctcggcagcgggagctcaaatggctggacatgttcagtaactgggataagtggctgtcacggcgattccagaaggtgaagctgcgctgccggaaggggatcccctcctctctcagagccaaggcctggcagtacctgtctaatagcaaggaacttctggagcagaacccaggaaagtttgaggagctggaacgggctcctggggaccccaagtggctggatgtgattgagaaggacctgcaccgccagttccctttccacgagatgtttgctgctcgaggggggcatgggcaacaggacctgtaccgaatcctgaaggcctacaccatctaccggcctgacgagggttactgccaggcccaggcccccgtggctgcggtcctgctcatgcacatgcctgcggaggtcagcgcctggtctgggccgggaggggcagggggatctcacctacagtggtgatgggggagctccctgctccctgcttctcaggccccacccctcctccttgttcttgctcttctcagcaagccttttggtgcctggtgcagatctgcgacaagtacctcccaggttactacagtgcagggctggtgagtgtctggaggctgggtgcatccggggctgtggcgtttcctccaggctgcaggcaggtccttgccttgccccaccctggccttcccggcttctgcccacagggccggccagttctcccctgatgggggcacagctgacttggccctcttctcatggcttgtcccacctgcaggaggccattcagctggacggggagatcttttttgcactcctgcgccgggcctccccgctggcgcatcgccacctgcggcggcagcgcattgaccctgtgctctacatgacggagtggttcatgtgcatcttcgcccgcaccctgccctgggcgtcggtgctgcgtgtctgggacatgtttttctgtgaaggtacttctgtggccctccaggccatgaggggctggggtttctgtggtggctaccaggggttctgtcatatttctggtggtccatggacaaaaggtacttgttgggtggaggtttcaccataagcagctgggggctggagaaacaggcctgattttagttctgccaccaacccagagcctgctctccctgccaagatcctgagactgatagcagctcatgtactttcacagggcctcagtttcctcatctgagattggcagtagatggggatgggggctgtgagtctatcctgatcaggacaggctgagatcttgggtctgaccaccccatgctctctactctccacccctgcaggcgttaagatcatcttccgggtggccctggtcctgctgcgccacacgctgggctcagtggagaagctgcgctcctgccaaggcatgtatgagaccatggagcagctgcgtaacctgccccagcagtgcatgcaggaagacttcctggtgcatgaggtgaccaatctgccggtgacagaagcactgattgagcgggagaatgcagcccagctcaagaagtggcgggaaacgcggggggagctgcagtatcggccctcacggcgactgcatgggtcccgggccatccacgaggagcgccggcggcaacagccacccctgggcccctcctccagcctcctcagcctccctggcctcaagagccgaggctcccgggcagctggaggggccccgtccccgccgccccccgtccgcagagccagtgctgggcctgccccagggcctgtggtcactgctgagggactgcatccatcccttccctcacccactggcaatagcacccccttgggttccagcaaggagacccggaagcaggagaaggagcggcagaaacaggagaaggagcggcagaaacaggagaaggagcgggagaaggagcggcagaagcaggagaaagagcgagagaagcaggaaaaggagcgagagaagcaggagaaggagcggcagaagcaggagaagaaggctcaaggccggaagctttcgctgcgtcgaaaggcagatgggcccccaggcccccatgatggtggggacaggccctcagccgaggcccggcaggacgcttacttctgacctctgccctggggctggactgcatggcccccctctttccctcagccaagaacaggcctggcccaaggtgccaccccctagcaccttgtcaggctgtcccttgctggggaaagtggcttggttccccatctcctcgccagctgctgatccctacacgggcaggacagatgggcagctgcaaatgagtctggagcctctcatctcccatgaggctcagctggggtctctgtcgctcctgccccagttccctctgggtcccctcctaggtgctgtcctgaatggcccgttgtcatcccaggggtgactcctggtgatgggagtcagcagtttcagattcttacactccatagctccccttaccatgaggtggagctggcttccttttccctgtcttcagccctccctgtctcccccacttcctggccagggctctcattctggacctgtgttgtaattgtgtacagaggatggcgttggcctggggtgggggtgctcgctttgtcttctgtcctttggttctccttccataatgctcctgtacccagtttatttaaggggacatgcactggaataggaaatgtcccccatctcccttcctgcaccctgctgtgctccctccaaacccaccttgctctgtgttctcaggcccccctgcttttgtctcaccaggacccatacctttcaccttgttcccttccacccctccagttagtccctatctgggtaagggtcttcccttgagctccagggggtggaacccaatgtttacattctcttctgtctctgcccccaccccatgcagcgctttgaggaattggaaaagaacctgctgttgtacctgga

SEQ ID NO: 523736 - DNA, 218 bp, Homo sapiens
catgctaggatactgcaacacggtatcactttcatgtcaccaagatttaagatctgcttaacatttccgcaagttcattagtatctccaggctcaagatattcctgtatgattggtagttaaagtcttctcaaactgccctgttcatccaaaggcaaaactacagtttcataaacacagttctcctgatcatcatcatagttaggatctttcacatcc

SEQ ID NO: 523737 - DNA, 2637 bp, Homo sapiens
gccaccgggacccctaccaggaccccttccagaacggctcctggtgccctgaccgccaaacccccgcttgcccccaagccgggaaccacagtggcctcaggagtgactgcacggagtgcatcaggacaagtgacaggtgggcatggagctgccgcagcaacatcagcatcagcaggacaggctcctgaggacccctcaggccctggcacaggcccctctgggacttgtgaggctccggtagctgtcgtgaccgtgaccccagctccggagcctgctgaaaactctcaagacctgggctccacgtccagcctgggacctggcatctctgggcctcgagggcaggccccggacacgctgagttacttggactccgtgagcctcatgtctgggaccttggagtccttggcggatgatgtgagctccatgggctcagattcagagataaacgggctggccctgcgcaagacggacaagtatggcttccttgggggcagccagtactcgggcagcctagagagctccattcccgtggacgtggctcggcagcgggagctcaaatggctggacatgttcagtaactgggataagtggctgtcacggcgattccagaaggtgaagctgcgctgccggaaggggatcccctcctctctcagagccaaggcctggcagtacctgtctaatagcaaggaacttctggagcagaacccaggaaagtttgaggagctggaacgggctcctggggaccccaagtggctggatgtgattgagaaggacctgcaccgccagttccctttccacgagatgtttgctgctcgaggggggcatgggcaacaggacctgtaccgaatcctgaaggcctacaccatctaccggcctgacgagggttactgccaggcccaggcccccgtggctgcggtcctgctcatgcacatgcctgcggagcaagccttttggtgcctggtgcagatctgcgacaagtacctcccaggttactacagtgcagggctaggcgttaagatcatcttccgggtggccctggtcctgctgcgccacacgctgggctcagtggagaagctgcgctcctgccaaggcatgtatgagaccatggagcagctgcgtaacctgccccagcagtgcatgcaggaagacttcctggtgcatgaggtgaccaatctgccggtgacagaagcactgattgagcgggagaatgcagcccagctcaagaagtggcgggaaacgcggggggagctgcagtatcggccctcacggcgactgcatgggtcccgggccatccacgaggagcgccggcggcaacagccacccctgggcccctcctccagcctcctcagcctccctggcctcaagagccgaggctcccgggcagctggaggggccccgtccccgccgccccccgtccgcagagccagtgctgggcctgccccagggcctgtggtcactgctgagggactgcatccatcccttccctcacccactggcaatagcacccccttgggttccagcaaggagacccggaagcaggagaaggagcggcagaaacaggagaaggagcggcagaaacaggagaaggagcgggagaaggagcggcagaagcaggagaaagagcgagagaagcaggaaaaggagcgagagaagcaggagaaggagcggcagaagcaggagaagaaggctcaaggccggaagctttcgctgcgtcgaaaggcagatgggcccccaggcccccatgatggtggggacaggccctcagccgaggcccggcaggacgcttacttctgacctctgccctggggctggactgcatggcccccctctttccctcagccaagaacaggcctggcccaaggtgccaccccctagcaccttgtcaggctgtcccttgctggggaaagtggcttggttccccatctcctcgccagctgctgatccctacacgggcaggacagatgggcagctgcaaatgagtctggagcctctcatctcccatgaggctcagctggggtctctgtcgctcctgccccagttccctctgggtcccctcctaggtgctgtcctgaatggcccgttgtcatcccaggggtgactcctggtgatgggagtcagcagtttcagattcttacactccatagctccccttaccatgaggtggagctggcttccttttccctgtcttcagccctccctgtctcccccacttcctggccagggctctcattctggacctgtgttgtaattgtgtacagaggatggcgttggcctggggtgggggtgctcgctttgtcttctgtcctttggttctccttccataatgctcctgtacccagtttatttaaggggacatgcactggaataggaaatgtcccccatctcccttcctgcaccctgctgtgctccctccaaacccaccttgctctgtgttctcaggcccccctgcttttgtctcaccaggacccatacctttcaccttgttcccttccacccctccagttagtccctatctgggtaagggtcttcccttgagctccagggggtggaacccaatgtttacattctcttctgtctctgcccccaccccatgcagcgctttgaggaattggaaaagaacctgctgttgtacctgga

SEQ ID NO: 523738 - DNA, 1257 bp, Homo sapiens
tgatgcccagttggatggctgtccagttgaggactacacaggtctgggagaacacatgtgtctctgtgtatgcgtccgtgtctgtcagaccgtctccctcacaccgggctgcctagcagggggtgctgagcagtctgatgctgacacctgaaagactccacttgatatagcgcctcctcccctgcgttctctctccactcccgggagtggagagagaaggagcggcagaagcaggagaaagagcgagagaagcaggaaaaggagcgagagaagcaggagaaggagcggcagaagcaggagaagaaggctcaaggccggaagctttcgctgcgtcgaaaggcagatgggcccccaggcccccatgatggtggggacaggccctcagccgaggcccggcaggacgcttacttctgacctctgccctggggctggactgcatggcccccctctttccctcagccaagaacaggcctggcccaaggtgccaccccctagcaccttgtcaggctgtcccttgctggggaaagtggcttggttccccatctcctcgccagctgctgatccctacacgggcaggacagatgggcagctgcaaatgagtctggagcctctcatctcccatgaggctcagctggggtctctgtcgctcctgccccagttccctctgggtcccctcctaggtgctgtcctgaatggcccgttgtcatcccaggggtgactcctggtgatgggagtcagcagtttcagattcttacactccatagctccccttaccatgaggtggagctggcttccttttccctgtcttcagccctccctgtctcccccacttcctggccagggctctcattctggacctgtgttgtaattgtgtacagaggatggcgttggcctggggtgggggtgctcgctttgtcttctgtcctttggttctccttccataatgctcctgtacccagtttatttaaggggacatgcactggaataggaaatgtcccccatctcccttcctgcaccctgctgtgctccctccaaacccaccttgctctgtgttctcaggcccccctgcttttgtctcaccaggacccatacctttcaccttgttcccttccacccctccagttagtccctatctgggtaagggtcttcccttgagctccagggggtggaacccaatgtttacattctcttctgtctctgcccccaccccatgcagcgctttgaggaattggaaaagaacctgctgttgtacctgga

SEQ ID NO: 523739 - DNA, 710 bp, Homo sapiens
ggtcgagctcgtaccatatggtggacgaggtatggttgctttgtttttttggaaagtgctaacaaagcccataatctctaaagggactgggtgtaatgactgaaatataaacagcataaagtatataaaaattacacttctaaatgggatagtcaaaactttttaaacagatgtcagcaattctgtaacctgggcaatcattacttacaagtatactttatatgctggccagacaattaagataattcagtcttagtgtagccatttctttactatctatgtgtaaattaccacagtgacgggtgaaagctccaaaactctaaagctagacccaaaacagctcataagctactctgagacaaataccacaaacagcaggtgcccagaatttctagtgatgtctcggtctattgaaagacctatacagttaatggaactgttccttagcccttctcagagggctgattttacccagattaaatccaattccaatatggttttttcctttatatcagcccagaatttagagttatggattggctttggtcagtaacagagttagcagggtgagtcagcagcctctgaacccctcaggtaggaagacggtcgagggtacttaaaaaagctttattactagaagatgaatgagataccttacaaaataatatattcagttaatactgaaacagggcccattttatcttagatat

SEQ ID NO: 523740 - DNA, 2755 bp, Homo sapiens
gccaccgggacccctaccaggaccccttccagaacggctcctggtgccctgaccgccaaacccccgcttgcccccaagccgggaaccacagtggcctcaggagtgactgcacggagtgcatcaggacaagtgacaggtgggcatggagctgccgcagcaacatcagcatcagcaggacaggctcctgaggacccctcaggccctggcacaggcccctctgggacttgtgaggctccggtagctgtcgtgaccgtgaccccagctccggagcctgctgaaaactctcaagacctgggctccacgtccagcctgggacctggcatctctgggcctcgagggcaggccccggacacgctgagttacttggactccgtgagcctcatgtctgggaccttggagtccttggcggatgatgtgagctccatgggctcagattcagagataaacgggctggccctgcgcaagacggacaagtatggcttccttgggggcagccagtactcgggcagcctagagagctccattcccgtggacgtggctcggcagcgggagctcaaatggctggacatgttcagtaactgggataagtggctgtcacggcgattccagaaggtgaagctgcgctgccggaaggggatcccctcctctctcagagccaaggcctggcagtacctgtctaatagcaaggaacttctggagcagaacccaggaaagtttgaggagctggaacgggctcctggggaccccaagtggctggatgtgattgagaaggacctgcaccgccagttccctttccacgagatgtttgctgctcgaggggggcatgggcaacaggacctgtaccgaatcctgaaggcctacaccatctaccggcctgacgagggttactgccaggcccaggcccccgtggctgcggtcctgctcatgcacatgcctgcggagcaagccttttggtgcctggtgcagatctgcgacaagtacctcccaggttactacagtgcagggctggaggccattcagctggacggggagatcttttttgcactcctgcgccgggcctccccgctggcgcatcgccacctgcggcggcagcgcattgaccctgtgctctacatgacggagtggttcatgtgcatcttcgcccgcaccctgccctgggcgtcggtgctgcgtgtctgggacatgtttttctgtgaaggcgttaagatcatcttccgggtggccctggtcctgctgcgccacacgctgggctcagtggagaagctgcgctcctgccaaggcatgtatgagaccatggagcagctgcgtaacctgccccagcagtgcatgcaggaagacttcctggtgcatgaggtgaccaatctgccggtgacagaagcactgattgagcgggagaatgcagcccagctcaagaagtggcgggaaacgcggggggagctgcagtatcggccctcacggcgactgcatgggtcccgggccatccacgaggagcgccggcggcaacagccacccctgggcccctcctccagcctcctcagcctccctggcctcaagagccgaggctcccgggcagctggaggggccccgtccccgccgccccccgtccgcagagccagtgctgggcctgccccagggcctgtggtcactgctgagggactgcatccatcccttccctcacccactggcaatagcacccccttgggttccagcaaggagacccggaagcaggagaaggagcggcagaaacaggagaaggagcggcagaaacaggagaaggagcgggagaaggagcggcagaagcaggagaaagagcgagagaagcaggaaaaggagcgagagaagcaggagaaggagcggcagaagcaggagaagaaggctcaaggccggaagctttcgctgcgtcgaaaggcagatgggcccccaggcccccatgatggtggggacaggccctcagccgaggcccggcaggacgcttacttctgacctctgccctggggctggactgcatggcccccctctttccctcagccaagaacaggcctggcccaaggtgccaccccctagcaccttgtcaggctgtcccttgctggggaaagtggcttggttccccatctcctcgccagctgctgatccctacacgggcaggacagatgggcagctgcaaatgagtctggagcctctcatctcccatgaggctcagctggggtctctgtcgctcctgccccagttccctctgggtcccctcctaggtgctgtcctgaatggcccgttgtcatcccaggggtgactcctggtgatgggagtcagcagtttcagattcttacactccatagctccccttaccatgaggtggagctggcttccttttccctgtcttcagccctccctgtctcccccacttcctggccagggctctcattctggacctgtgttgtaattgtgtacagaggatggcgttggcctggggtgggggtgctcgctttgtcttctgtcctttggttctccttcctgcaccctgctgtgctccctccaaacccaccttgctctgtgttctcaggcccccctgcttttgtctcaccaggacccatacctttcaccttgttcccttccacccctccagttagtccctatctgggtaagggtcttcccttgagctccagggggtggaacccaatgtttacattctcttctgtctctgcccccaccccatgcagcgctttgaggaattggaaaagaacctgctgttgtacctgga

SEQ ID NO: 523741 - DNA, 1265 bp, Homo sapiens
  misc_feature (131)..(131): n is a, c, g, or t
  misc_feature (300)..(300): n is a, c, g, or t
  misc_feature (733)..(733): n is a, c, g, or t
gcagaacacaggagggtgtaatatcggacgccttctaatatgatcgcccgggtgtgtcaaggagatcaacagcccaaattccgtgtaattacgtgggtgccatgaagaatgcgactatctccttggtgttntgaggtgccgccggcaactttacagcacggcatcgactggagacagtacaattgaattctttacttcacaattcacatacaagaaatgctcggtggctggatcactgggacagtcgtagtaggaccatgaggctcgatggatacatctacaagagaccaatcttttggncctatagcttgacactggcgaatgattcagttcttggagtcggtggagacgatggtgtcacgaccatccacgattgtgctgaatgtgccatatgcctcatgcgagaactggtggtccgatcttacgactgtctcttacagtcagagcatctaggctcgcagggagattgtggaactggcttcttggatcgtcgacgtggtgcgcctgactcaagtagcggaagagcttggtcgtccatgaggggcctagaggatcgctgggttgggtagttgctagcgagacaccctgttcagaagggtactagtagcgtggatcagcactttcccactttgaggatgcttttcgctcgcgcattggcgtttgttggagtcgtagtacacaaccatttttggcacccaaggaaatgtaatttggacttgaccttatacgattnggcaacttgcattggaaatggataaccggaacgggacgttgaatgcggcgtccttgacagcgatgcgcgctaggttggacaatgggtgcctttaacccaccgcggcctgcatttcatacttattgactttagactcttgtggcaaagaacccaccaaggtcgcgcgcttatcccacccttagctctctttatgggatacagaggcctaatccggtcttcattacgaaattaaaggactgggcttgattcgtagaaaacggttccctttctatagacgaagtatacatagggacacaaatacagagacaccctctcgtaggtcgacgcatcctctaagtgacatcggggggtggcgcgagaggaggcaaaggaaggggcgggtcctttggcacccagttgcgccccccaatgtgtgaccgaatatacgcctatggattgtcccccttgaagcaccccgagaatcttctcctttgggctcacgcaatcgcttgtggccataggaatcggtcgccgggagttcgtcccgcataat

SEQ ID NO: 523742 - DNA, 894 bp, Homo sapiens
ggatgactttcccactgagctctacctccctgttgctgcggatgcgacgatgcatagggtggtctgggattgccttcccgcgcgctggttgcctgaataagtcccctgttgcggcctgcatggatgctcgtatcgcgagccacacgtgtccatatgtgaaaaaggacgcttcggaggtggccacatcaaggatagagctcttcgggactgtgaaggatgacctctctatttagctggagtaccagaagacacctgtcagtccatgtgcggcacctgcccgcggtgacctcggctgagagagagctccagcagatccgcgattagacgatggtgaatgatcatgagatcagtgtggaaagcaagcaccagaccctgcagggcctcgctttccccctgcagcctgaggcccagcggtgcactccagcagctcaagcagaagatggtcaactacatccagatgaagctggacctagagcgggaaaccattgagctggtgcacacagagcccacggattgtggcccagatgccctcccgggtgccccgagatgctgcccgctagccacttttttcctctacaagcacacccatgagggcgaccccttgagtctgtagtgttcatctactccatgccggggtacaagtgcagcatcaaggagcgaatgctctactccattctgcaagaagccgctcctcggactccgtggagcaggaatttccatctggagatcggccagaaacacttggaggattggccgatggggcagaactgacgggctaaagatccctcttacgacgaaggtgcacccaaggcaaacggccttcaagcaggccttcggccaaggccaaaggggcgcaggggggcaagcggtgccataagcgctcatcccgggtcc

SEQ ID NO: 523743 - DNA, 211 bp, Homo sapiens
  misc_feature (192)..(192): n is a, c, g, or t
ggaaccccaccctgcttatagaggccccgcttaaccccaaggccaaccgggataagatgactcagatcatgtttgagacctttaatgtccctgctatgtacgtggccatccaggcagatgctattccctgttatgccttctggcccgtacccacaggccattgttcctggactctggggatggtgttactcnacaatgttccccatctatg

SEQ ID NO: 523744 - DNA, 548 bp, Homo sapiens
ggatcctgcatgggccgtgggatgtgaggcggtcggccgcacacaaatcgcttttggcccgtgggtaccaggcagctgtggcctccgcctgccttggggtcgctctgtccagggtaggagacaatccaggcagcctggcacgaattgggaatctaggaaaacctcgcggtgtccaccgtgtaagggcacaagtcctggggcagcttttgccggaaactacctctggactccttgcctcagtgaggaaaccgtcctgggcccactcccagtcccagaaacagttgtctcttgggcccaaagcaggaaacgttcaacctccatccaggattgtctgtttgcctgccactatacaaactgttcaacacagctgcctgtctcacatatagaactaattacacaattaatataagccttgatctgagacaaagatcattaggtttctaagcaaatgtgttcgctcctcggtaatttgccatttttattttcaatttccaattctatactaagacatcatggggggttctgtgacagctacctttgcccctgcc

SEQ ID NO: 523745 - DNA, 170 bp, Homo sapiens
  misc_feature (164)..(164): n is a, c, g, or t
tcggggcccagagtactggagagctgccaggtctgcctcgaccacggttgcttgggccccggagcccacggtgtctggtgatgccatagctgccaccaccgcggcgcctagggctgcggcagggcactcgggcctctgggcaggtttacctcgacccccacttngtgccc

SEQ ID NO: 523746 - DNA, 132 bp, Homo sapiens
gccatacattatgctactatagtcactctgctacagaacattacatttgttctttttatttaactgtatgcttgtacccattaaccaacttctttatatgcctactcccacccacactgggttaagtaagca

SEQ ID NO: 523747 - DNA, 429 bp, Homo sapiens
cacgaggagagagagagagagagagagagagagagagagagagagagagagagagagagagagagagagagagagagacatgtagagaggtgaccgttactggaactgaagttgtggattatgcctgatcaatatgacaacctccctaaagcacccagactttgtggcatatcccatgttggagaagccagtggggagcctgactgggattgttgcattcctgggcaagaagctggcggaaaggggttttgacatggcctatgctgtccttgtccagttcttggtgctaaagaaagatgaatacctcttgcgattatggctggacacttgtggctgcaacgccaatcaaccctggtactttttctgatgccttcgagagtagtgcgacgccttcttgtgatgctctctgaggttctcattgctcgccct

SEQ ID NO: 523748 - DNA, 171 bp, Homo sapiens
ttagctatcatgatttatagcatccatatgttctatatccatatttgtccagcgctccatactcttctgaagctccttaatgccagcttctgttttatcaatggaattgtccaaatcttctgatcgtgccatagtgtcttttactctgctattgaaacttctaaaactagg

SEQ ID NO: 523749 - DNA, 342 bp, Homo sapiens
  misc_feature (6)..(6): n is a, c, g, or t
accccntttaccatgttggccaggctgatcacgaacttctgacctcaggtgatctgcctgactcggcctcccaaagtggtgggattgcaggcgtgagccaccacgcccaactgcattacctactttgaggctatttctacagaatttgcggaggttgggttatgattaatttaagacttatacagtgttaagaaatttgtggtcactgcatcaactcactgttccatgtaatgaattttgtaagctcttcaactagagaaggaactcgaagttttaaagcttgtgactattttggaatgctattcattctcttaataattaaaacaaaattcagtgagaatc

SEQ ID NO: 523750 - DNA, 172 bp, Homo sapiens
cggtagagacggggtttcaccattttggccaggctggtctcgaactcctgacctacggtgatccacccgcctcggactcccaaagtgctgggattacaggcgtgagccaccgcacccagccgcctgagtcttacagatgctgctcctgtagctccccttctgtcgtcttctc

SEQ ID NO: 523751 - DNA, 1237 bp, Homo sapiens
  misc_feature (1)..(1): n is a, c, g, or t
  misc_feature (90)..(90): n is a, c, g, or t
ntcgtctgactgtgcagtcgcgacggggtctgagaggtggctgtgggtggtgtggtaggactgtcacttgtctgctgctgcgctgtctgnttcaggcgatggtgcgtgtccatcgtgttgactcgacttggttgccttgctacaattgtcgtctgctgtgttcggtcaaccgctctgtctctaatattgtgacggtctcctctgtcgtgtgtccgcccgctgcttctgtagctgcaatgctcttttcggatgtgtggcccccccctgtgaccccagaggggacccgtgggttgagacggacaagtatatgtccgccgcacccctgtcatctctgaaggtgttgccccactatagtgtgcccggtcctctgtttaagtggtgtaatgtgagcacccccgtggcccagccccgacaagtcatggtatgaccaggaaatgtgtgcccccatgccagtgtatttggaccacagagtcccaaaccttcggccacagttttcttctagttatgatggaaagtttcttgttttcgtgcctctgaatagaactcacgctgtgggttctctataagtgccattttgggctttcccccttttgtgtaaagccaagtctgcctagtttattgcccagttaactttagtgaccctttaaaagttggccttgtaaataaacaccacttgccaaaaagttttttcggaatagaattgacccaatattatctcttattcactcgagttggaaactcgggaaaagcgctttcttgaagataaatagtttctcgagtggaggctacttgggaatgtctttccacgccctcctgccaagtcacaaggaggtaccaccctgtaattgaattatgccctgtaatgtaccacgggcgtccccttcaattgcaatctgagggacttgttttcttttttcctttaatttttaatcctcttagttttaaaatatattgcctatgagactcacgttactacccacgtttgtggttttttgggagaaaatgtaaactggaccacgttagcttttccaatttaaaagaccaccttaaacccactgtgggatgtcactctttttataattagtgttccactgtggagaaaattattcaccacctacttgcactgtaaagaataatttaaacttttaaccactttaaaataatgtggttaaaacccacgaaagcactccatcatgaatgccagatactttccaattaaaagtaagttatatagtta

SEQ ID NO: 523752 - DNA, 920 bp, Homo sapiens
  misc_feature (73)..(73): n is a, c, g, or t
agatcccccaagaagaatgcagggttgcagacgagcacagtcagctctgctgagtatggatggtgactcaagnttgcccatcattgggagtatctctaaggaccccttctgtaggtagctgggatgtcatcatctatatccctattgacgcgctggtgtgtcctttgaccgatgtatgtgtagcaagtccaaagcataggatttgcgccgggtgtcagttacccgattctcctcgacacttgattcataggacatggccttgtagactcaatgttagctctgaagcagaagaagtccatggaggtcaatttgcacatttccttgtgttgcccctttttgcacatagtcgaatcctcgttagtaggcaggttttctaagcttcatactaaagaatatttcttttcccataaccaatcataccactttggctatgtttcattccacatctccttttcccctcaccttaaagggagaactaccctctttgccccatatttgtcaacctaaattttctctcgtactctctctagtgaatgatgtgctaaccaagtatatgccaggcttgtgagaggattatacctgagtagtagaaagaagctaactttgaaaatacacaactattcgtatactaacgaacagcagattagattgcacattgttcaacagggacagttgactggaatgttctgccaacgttagaattcaaaacatcattaaagatgatacgcttgtccataattattagctaagccattatgttaagcctttgttagggtgcggcagctttccggttattcccttcctctgtggtgaccacggggaatatccaacgaatactctaccgggcatcggcccaccgtaaatccccctcgttgcacgggatgcgcgacgtcacaatcacactttggtacacgacccct

SEQ ID NO: 523753 - DNA, 400 bp, Homo sapiens
  misc_feature (13)..(14): n is a, c, g, or t
  misc_feature (18)..(18): n is a, c, g, or t
  misc_feature (62)..(64): n is a, c, g, or t
  misc_feature (71)..(72): n is a, c, g, or t
  misc_feature (79)..(79): n is a, c, g, or t
  misc_feature (130)..(130): n is a, c, g, or t
  misc_feature (143)..(143): n is a, c, g, or t
  misc_feature (155)..(155): n is a, c, g, or t
  misc_feature (193)..(194): n is a, c, g, or t
  misc_feature (197)..(197): n is a, c, g, or t
  misc_feature (201)..(201): n is a, c, g, or t
  misc_feature (211)..(211): n is a, c, g, or t
  misc_feature (222)..(222): n is a, c, g, or t
  misc_feature (225)..(225): n is a, c, g, or t
  misc_feature (227)..(227): n is a, c, g, or t
  misc_feature (253)..(253): n is a, c, g, or t
  misc_feature (291)..(291): n is a, c, g, or t
  misc_feature (333)..(333): n is a, c, g, or t
  misc_feature (346)..(346): n is a, c, g, or t
  misc_feature (348)..(348): n is a, c, g, or t
  misc_feature (367)..(367): n is a, c, g, or t
  misc_feature (381)..(383): n is a, c, g, or t
caggcttacctannacancctattctttcctctatgatatccgaattggactgacctcacgnnnaaagttnntgtcccnttttgtcaccctatcttatctcggggaaattgcagactgatggccagaccnactctgttgaaantcttgcatagancaaacctgtgctcatttttaagtggcatgggagaggcnnggngccnagtaaagccnagtctgtgtcntcncngtgctggtagaatgtgtttgtgtgtntaaatatatgatatagatttatatatgttctaacgccntatattgaaggccgacataactggtggacagggtgggtgacngaaaatgaaagcngntttggtgattgtttaagcnagatgtgtataaannnataaatagtttttcttt

SEQ ID NO: 523754 - DNA, 427 bp, Homo sapiens
tactgcctccttggggactggggaactcatgccctgcccccaccacggggctccagggtgagagaaaggggtgaatggagaatccggtggctgggtgatggggaggaacagcagctggggtatttagggctgggggagtaggggcagaaccaccgatgaatggaaaggctgcgggggtcgtctgcagattctgggagctcaggtcctggggaaggaggatgtgggcgggggtactcttcctcccacgagtgacaccgatccccaacccatactgggtgggtccaagttgccatggagaccactcacaccgggggcaacgtaatttccagggaacgttccgaatttctgggtcccccgggagaaaaccaaaaaacagccatcgtcacactgctgcgtgacattcaacctgttcccctcgcgcaggtcc

SEQ ID NO: 523755 - DNA, 157 bp, Homo sapiens
acagcgattcggtgtggcgcgcctgggtccaatgtcaggtaatgtgaacgatggtcgataggcttggttggccttagcgagatcgctggtcaatgacgtagatcgataggagtcctcaccaagtaaacacacatgctcggtcggcagaccgagtcga

SEQ ID NO: 523756 - DNA, 122 bp, Homo sapiens
  misc_feature (60)..(60): n is a, c, g, or t
gcacgggacaccttaccctactttttctcagtttagagagtaagtaagataagaccattntctttttgggagcctgcggtttataagcgttcaattaagccaagagataaggattttttttt

SEQ ID NO: 523757 - DNA, 780 bp, Homo sapiens
ctcagctgcagacgcgatgctcagttatgccagaggcatgagtctctgtggacatgtatcttgtggaggctgtgttgaatctgtctctcgggtcctcaataagcttggaggagttaagtgtgacattgacctgcccaatcaagaaggtctgcattagaatcgagagacacagaatggacactctgcttgcaaccctgaagaaatagcagtgaaagtaggtgttctcctaaccttgagtccttgtagtagctacgggtgcctggtcaccacaacaacgccacagtgatggactcagaaggggtgctatgcctgagattggatgaatggcacacagagaggacgcatctctgggccacactagccttagactgtctattctagtttttgccccatatatccacgacagtaataatgtgtcgtgtcctaattgtttgcaggggaagatcactggaccctgaaagtggtaagtagaatcctggtcgtgaaatgcctgcttacagataggaactgataagactttgtgaaaagatttaatgtggacatcttatccattttgccccaatatttaaatagcgttttataaatttccttactgcctgttttttacgtggaggtactcgagaaatcatcaagtgtgaagatctaactggactattgatcacctttttcccagatccaataccccttgctgatttcccttatgctggttctctctactttaatctcttattcctggtcatcttcaataagctgaggtaccgctttgtccatcttcaggac

SEQ ID NO: 523758 - DNA, 120 bp, Homo sapiens
cgtaccatatactaaggggaagtagtagccaataagagaaggggaggagataagcaagagataatagcagaatagagagaccctagagaaagtacctagtccacagtctatcgcgtagat

SEQ ID NO: 523759 - DNA, 100 bp, Homo sapiens
ctgccccatcctcacttggggctgatgccattttaggcctcagcctgtctgcatgcaggcgctcattaaaacagcatgttgctccaattattaaaaaaaa

SEQ ID NO: 523760 - DNA, 134 bp, Homo sapiens
ttaggcacagaaacgacaaagggcttatactagagaattgcacacaaaatgagttacttggcagcacaaggtagggatgtatgtgtcacaagagtatatagaccgttctaccttcatgctctacgcgtgcctta

SEQ ID NO: 523761 - DNA, 375 bp, Homo sapiens
actctttagggacgtagtggaccgacggggttaacgggacgacgggacgcgcgcctgcgccgctgggtgattttttcacgtgtcgccaggccggactgcgagtctctttgcggcgctacactacgagcagagtacgagtctagaggcggagggaagtaatggcaggacaagcgtatagaaagtttcttccactctttgaccgagtatgggttgaaaggagtgctgctgaaaccgtaaccaaaggaggcattatgcttccagacaaatctcaaggaacagtattgccagcaccagtagtcgctgttggatcgggttctaaaggacagggtggagagattcacccagttagcgtgccagttggagatacagttcttc

SEQ ID NO: 523762 - DNA, 296 bp, Homo sapiens
gcgcgatgtaacacgagaaagcacataccaaggcaccacacaccacctgtccaaaaaggccttcgatacgggataatcctatttattacctcagaggttttttcttcggcaggattttctgagccttttaccactccagcctagcccctacccccaattaggaggcactggccccaacaagcatcacccgtaaatccctagaggcccactcctaacaaatccgtattactcgcatcagggttatcaatcacctgagctcaccatagtctatagaaacaccgaaaccaataattcag

SEQ ID NO: 523763 - DNA, 349 bp, Homo sapiens
tttctgtttggggcccaaaaagttgctttttgacccacaacgccccttatcttgcccccatataaacccaaaaccccaacctccagagcataccagcaggtgagtatttacgacgcaagccgactgccggcaaaccgacgtagcagagaaagagagaagaggagggacgtctggacaccgagagatgtttggctcggggcagtcagagcggagtccagcccctgggcggcccaactccaggggaagatcaccttcccacttcatccatccccacccttccagctccccatccatcctgctgaaagccatttccaccactcaataaaacctcgcattcatccttcaataa

SEQ ID NO: 523764 - DNA, 172 bp, Homo sapiens
gggaaaacgaggattccagcgtgcacatttccccccggcagaagcgagatgccaacttcagcatctacaagggcaggaggtgccgcatgggtctgttcgattactttgcagaaaacgttcaagttagtatacccagcaaaggggggaaattgcgcagttaccaaattttagg

SEQ ID NO: 523765 - DNA, 276 bp, Homo sapiens
ggaccgcgtctctgcatctatggtgaggagtctctgggtcagagagctccaaaggacagcagccatttggggtcttttgtagccctgaggttcgtcttacctatggtgagagggtgtcgggtgtagttttgcaaaattatcggaacacaggcaggctctagaatgggcaaataatattgggcctacatttaaagcaatcggatgtgcaagaatttgagtttggtgctggcaggcttgagttaacggtcctgggctgtggtgtggaagtaaacagca

SEQ ID NO: 523766 - DNA, 141 bp, Homo sapiens
ctcctttctccttctcaacacctcagctgactccaagcacaccatcctgagtccgtggatgaggagcagcagtgagcactgcacactggccgtctcggtgcacaggcacctgcagccctctggaaggtacattgcccagct

SEQ ID NO: 523767 - DNA, 902 bp, Homo sapiens
acgacacgagacggcgctcgggcacacccaaggagaagaaggccaagactccaagaagaagaagcgctccaaggccaaggcggagcgagagggtccccgtgccgacctcccaattgacccaaggaacccagtactgtctgtgcaaccaggtctcctatggggacgatgaatcggtgcgacaacggacgagtgccccatcgaggtgtcccacttctcgtgcgtggggctcaatcattaaaccccagggcaagtggtactgtcccaaatgtgcccgggcgggagaaaccgagaagaacatggggacaaagccccgtgggagaaaatccaacaaaaaagagaaggggcttacaaaacagggtaaggtgtgtggacaccaggcgcctggtgtggacgcgaggacaaaattaacacccggtgttattacaattaaccattggcctgcccttgtgttagagggtgggcaacgggaggttgtaaccaaggtgtctattgctaaacaaactgtgttcacgacaaaaagggacacccatctccttttcaatagggaatgggcaggagaattacgtgttgcgcccttgtcgttcattgaggctacccggttgtcaccaagaacaggtgtcctgtgagaactcagccattttaagaaaactacaaaatattgggtgagatccacaacactttaagttctcaagactgatatcttggcgagaaggagcggggacctaaactcaaatctaagcacaattaatgtgcaaccgcacacatattccacgcagcgtgtgcattgtaatcacacggtaatttattacttaatgcaccaattttgtacatgggcagtgtcgcaaaaaacggcatagaaaggggttctggcgccgatgttttcccttcacactcgaccaagt

SEQ ID NO: 523768 - DNA, 185 bp, Homo sapiens
taaaagagatgtccgacgatgaagcatgttgatggggtttaggagatgcgtatgcctgaatatggaaactcaatattagagaaaatggcagaatcaggaaggtcactctcaccttctctcctgaagcaggtcagaaaatcttccctaggttatatgacctgcttcagcgagagaaggtgagagtg

SEQ ID NO: 523769 - DNA, 114 bp, Homo sapiens
tccaggaacatcctgcttcctctcacctccccaatgactgtgcctgtcttggttaatttggcctgtccccactgtgtgtcccaatgtgcgtgcctgtggcacgcccgccactgt

SEQ ID NO: 523770 - DNA, 315 bp, Homo sapiens
gttgtaggttcatagtcccggtaatacgtgtaaaggagtaggaaacttagggtcatcattcacagttggagaaagccgacagctgtccatcaaacggatcgtatttgatttcaacctaaacagcacatgccatgcagttgcatatcaacgtctgttgaggggccacagtctctctcgtgtcttttctctggttgttggtatgtggctatttgtaaatacaggtagttgtcctgtacgatggcattataaacggtatgtgaggtcaaaactgtgttgtgtctatggctttagtttcatcccagttagcgtgcgatg

SEQ ID NO: 523771 - DNA, 177 bp, Homo sapiens
ggggggggggggggggggggggtgttcccccttaaaatttttttccccgggggggggggcccccaaaaaaaggggggggccttttgggggggggggggggattttttttttttttttccccccggcccgggggggggcccccccccaaaagggggcccccctaatttttttggggga

SEQ ID NO: 523772 - DNA, 1196 bp, Homo sapiens
  misc_feature (481)..(481): n is a, c, g, or t
  misc_feature (508)..(508): n is a, c, g, or t
  misc_feature (564)..(564): n is a, c, g, or t
  misc_feature (586)..(586): n is a, c, g, or t
  misc_feature (589)..(589): n is a, c, g, or t
  misc_feature (602)..(602): n is a, c, g, or t
gcctcggcatcagacagccgtcttggagaggtgtacctgggccacgtcgtcctctccaccctgtccagcaacggcatgagtagaacatctctccgcgctaaacctcttcaagcgggcacttcttcgggacatagacacaacgaaagtgcgcagtccgttcatggtgctgggcgctggatgcgtgaaccggaaggacgcacggagcctctacattatacgttagatgcgtcgggtaagatcgtgatccaccatttcccagctcgctaccgcatatcatacgatgcgaaaactgctggagagacagacgaacaatcagcctatcatctggtgctggggacccgtgtagtgccctacgtgaccattgaatcctggtccccacctgtttgtgtcagccccacatttatgtatcccagcgaaactgaacatcgaagaggctcttggaatccgaatatctggttgggctcggggaacataggctatnttcgatctcaaagcaacgaaggctcgnttcgattttgagaacccggaagcgaaggcgccggcgaggaatccggaagtgtgcantggccgatccgaacttcgcacntgngaatttttggcanattgtcggcctccgcggaagaagaacctccgcaacagccttactcgggtggtggagcttcgccggataagatcctcttttccccttttgtcgattggtaatcctaagctccccaaaccgaaaaaagcacaaagggaaacccttgctccgcccttaggaactgcggcgagatggaaacttggcggcgtcgagagtaagtcactagggaccaataggcgtgggtggaccatgtcttcgttcaaacctaaacgactcgatcgaacagtacaacgtggtataaattgcgaagggctcagacacagaagctgagccaagctggacgaaacagagagtgtactcactcgtcaatgggagcttgtggatcttggcacttggtgccaacctcagtttacccggtgacactcgagacagttggagacggcgcaaactccactcttccctttcgttcgattgtacctatcttttggaccctctgtttggtaacctcgtacaggggtcggcgacccggtagtccgggtcgtgggtgggaaaattgccctaagaactagcctccgcggggttgggacaccgggttttcttcgccccgggctctgga

SEQ ID NO: 523773 - DNA, 316 bp, Homo sapiens
gtttatgtctattctaagtgaatttcactgtgtgaaaaaattcacacctgttatcccagcaatttgggaggccaaggcgggtgtatcatttgagcccaggagtttgaaactagcctgggcaagatggtgaaaccccgtctctataaagaaattttaaaaattagctgggcatagtggcacgtgcctgtagttccatctactagggaggctggggtgggaggatcgcatgagcccaggagtttgaggctgcagtgagctgtgatcgcagcactgcactccagtctgggcaacaaagcaaaaccctgtctcttaaaaa

SEQ ID NO: 523774 - DNA, 656 bp, Homo sapiens
  misc_feature (4)..(4): n is a, c, g, or t
  misc_feature (185)..(185): n is a, c, g, or t
  misc_feature (248)..(248): n is a, c, g, or t
  misc_feature (280)..(280): n is a, c, g, or t
  misc_feature (302)..(302): n is a, c, g, or t
  misc_feature (329)..(329): n is a, c, g, or t
atcngccagtctgttcttggcagcaaatctgtgttcacagcctaaccattggcctatatgagatagtgggcttggtcttccttgtacaccaaagagcatcagagagtaggtatctcttccccctctgccaagttcccttctgcgcaagaggggagatctgtttgtctgagtccgagtgcttttcntaggttgatatagcaagctccagaagaatctgacagaaaaagaccctaactgtgtaggagggnccctcagagtcaagaggcaaggatgattttanattctgcatgtagggcatattntggggagtgatgggattatgcacatcnttcaggtgtcaagataaagagataaaaccagagtttgtgcagaatgagcttgctgacacacaagcctaaatttgtaccgcatgtttcatactaactccctctgagtttgcacatgggacccatgaggaggcatgaagaggtaactgcccatgcccgaggattttccagcccttccttttctttctgtcaatcacctactaatcacagaatccactccctacaccttttctactaaaataactctttaaaataagtacaatgggacagatttgagctgggctcctgtctccttgttaatcaaattgcaatcaaatgttttcttttgtt

SEQ ID NO: 523775 - DNA, 921 bp, Homo sapiens
  misc_feature (568)..(568): n is a, c, g, or t
ctttatacacctcggctcccgtgttataatctctctcacatttaaattttatctccattttttcgccttttttaaggcccctcttttgtgtcccccctctcatatgtgtgccatctattctttgaaaccaccactttttttacaaaaaacgtgcccgtatcttatgggtcgtctccgcaacctctctccataaaatatttgggctgtgtccaaaacacactctcgcccataactgttggttctatgaccaatcgcctcgcctgctccctcccattggatgtgcgttttaattgatgaattctccctcttgccgctatgttaaaccttactctctctctatcaattgtccttatcttgcgcccttcttcccgccgaaaccctttcttcaaccccaaggaggactactctgtcggccactattaacaaccccgtctctaaacaaatggggtttcacccttaagttcccaccctcataatgatatcttcctttctttccctttgtatccccctcttacataagataaatatagcgtactataggtggtatatacaccaccacacccccccncactctgataataaggggataaattagttagatcacccccccacaccatgtcagaacatactgctctgcattgtaaaataatttgtgcacacagatattctttagtagtgaaaaattcttcatggaaggaaaaggttttttaaaaacagccattttcttcagtacaaaccacacggcaacaacaaatattgagctaataataatcaagctcacaagaagattcatcgtcttgtaaaaagtacatcccgcttggttaagattccaccccaccaactgacacctccaccattgatgccacacagccaccattcaagacgttgaacttttgaaccatttaacattcaaaaaaaaca

SEQ ID NO: 523776 - DNA, 379 bp, Homo sapiens
acactaaagaagatatataaataatgtcaatcaaacataaaggtgatcaacatcttatgttatcagggaacggcaaattacaacagtgacataccatctcacacctagtaaaatggctaaaatccaaaaactgacccaaaaccaaacgatgataaggatgcggggcaatagaaactttcattcactgtcagtgggaatgcaaaatggtacagccactttggcatgcagtttggcagcttcttataaaactaaacatgtttacagcaattgcactcctaagtatatacccaattgagctgaaaactcacggccacacaaaaacctacatacaaatgtttagagcagttttatttatagctgtgaaactggaagcaatcaa

SEQ ID NO: 523777 - DNA, 605 bp, Homo sapiens
ggcaagctatcggttcactaaacacacaggatcacacgggaaaagcctactggtgtcatcactgtggaaagactttctgtagcaagtccaatctttccaaaaattagggaagtccacactggaagagggaagaagcacgtaactttcaagcgcctcctgttggtgtcggtggtttaaactttagaattctgaaacccaaaagaaggtcttgtcattgcaggagcatcgattcccggtggatagaggtttgtatcactcaaacatacagggggatgcctgaggagtgcgagctcccacagcaacatggcaggcaggaggtcctcagaaggtgtaggaggttcccacactcgccagttcactggagcagagtccccttcgccacacttagggtcccagtaagccatgccagcattaccttttgcgtaaacagacgtgtatccagtctagttaaggaagaaacattaagattgtttaatttttaacatatattcaagaattttaatttgtaaagaattgaaccggatagcttgccggcaagctatccggttcaatgagttcaccctctaaatcaccacgatcaaaagggacaagcatcaagcacgcag

SEQ ID NO: 523778 - DNA, 190 bp, Homo sapiens
tgtgttatcctgctctacaaggttgagtgacatgtgccatgcgctatgaaatggatcatctggctgcgcattggcattgatgcaggtgtccagggctgagtttctgatgaccagctccatccgtgagctgctccgcctccactcttcttctcttccagctccttggacaggttgtctcgtaccattccgc

SEQ ID NO: 523779 - DNA, 171 bp, Homo sapiens
tccagcctttctcctccttagcctagcacaccggacggacatcctccttgccacccggtctcagtcatagctgttcccgtgtctgtacggcccccatcccctcggcaacatccgccctgtcaagagggaagtcaaagtggagcctgagaagaaagagctgagcaagcgagg

SEQ ID NO: 523780 - DNA, 168 bp, Homo sapiens
ccgttgggtcagtgagtccatgccgccatgctcggcagcaggcgcaggctcctccacgccccagtgtgccgctgcgtgcggatcgcgccgtccgactctgggtcgtagccagcctgaaggagcaacctcatcacctcaatgtagcccttggcagctcgcccctgagtt

SEQ ID NO: 523781 - DNA, 582 bp, Homo sapiens
  misc_feature (1)..(1): n is a, c, g, or t
  misc_feature (3)..(3): n is a, c, g, or t
  misc_feature (5)..(5): n is a, c, g, or t
  misc_feature (8)..(8): n is a, c, g, or t
  misc_feature (13)..(13): n is a, c, g, or t
  misc_feature (19)..(19): n is a, c, g, or t
  misc_feature (27)..(27): n is a, c, g, or t
  misc_feature (41)..(41): n is a, c, g, or t
  misc_feature (49)..(49): n is a, c, g, or t
  misc_feature (70)..(70): n is a, c, g, or t
  misc_feature (72)..(73): n is a, c, g, or t
  misc_feature (77)..(77): n is a, c, g, or t
  misc_feature (103)..(103): n is a, c, g, or t
  misc_feature (108)..(108): n is a, c, g, or t
  misc_feature (111)..(111): n is a, c, g, or t
  misc_feature (122)..(122): n is a, c, g, or t
  misc_feature (136)..(136): n is a, c, g, or t
  misc_feature (143)..(143): n is a, c, g, or t
  misc_feature (146)..(146): n is a, c, g, or t
  misc_feature (148)..(148): n is a, c, g, or t
  misc_feature (150)..(150): n is a, c, g, or t
  misc_feature (158)..(158): n is a, c, g, or t
  misc_feature (168)..(168): n is a, c, g, or t
  misc_feature (175)..(175): n is a, c, g, or t
  misc_feature (177)..(177): n is a, c, g, or t
  misc_feature (185)..(185): n is a, c, g, or t
  misc_feature (187)..(187): n is a, c, g, or t
  misc_feature (201)..(201): n is a, c, g, or t
  misc_feature (203)..(203): n is a, c, g, or t
  misc_feature (218)..(218): n is a, c, g, or t
  misc_feature (221)..(221): n is a, c, g, or t
  misc_feature (236)..(236): n is a, c, g, or t
  misc_feature (248)..(248): n is a, c, g, or t
  misc_feature (254)..(254): n is a, c, g, or t
  misc_feature (256)..(256): n is a, c, g, or t
  misc_feature (262)..(262): n is a, c, g, or t
  misc_feature (286)..(286): n is a, c, g, or t
  misc_feature (290)..(290): n is a, c, g, or t
  misc_feature (293)..(293): n is a, c, g, or t
  misc_feature (295)..(295): n is a, c, g, or t
  misc_feature (298)..(298): n is a, c, g, or t
  misc_feature (306)..(306): n is a, c, g, or t
  misc_feature (315)..(315): n is a, c, g, or t
  misc_feature (319)..(319): n is a, c, g, or t
  misc_feature (343)..(343): n is a, c, g, or t
  misc_feature (350)..(350): n is a, c, g, or t
  misc_feature (354)..(354): n is a, c, g, or t
  misc_feature (357)..(357): n is a, c, g, or t
  misc_feature (360)..(360): n is a, c, g, or t
  misc_feature (365)..(365): n is a, c, g, or t
  misc_feature (376)..(376): n is a, c, g, or t
  misc_feature (387)..(387): n is a, c, g, or t
  misc_feature (402)..(402): n is a, c, g, or t
  misc_feature (411)..(411): n is a, c, g, or t
  misc_feature (418)..(418): n is a, c, g, or t
  misc_feature (428)..(428): n is a, c, g, or t
  misc_feature (430)..(430): n is a, c, g, or t
  misc_feature (455)..(455): n is a, c, g, or t
  misc_feature (459)..(459): n is a, c, g, or t
  misc_feature (473)..(473): n is a, c, g, or t
  misc_feature (484)..(484): n is a, c, g, or t
  misc_feature (575)..(575): n is a, c, g, or t
ngntnaanctttnatttgnaaaaaaanaaaaaaagactganaccaattnaacctttaaatgtgcaaaacncnntccncccccccaccccccaaccccaaaacnaaaanttnaaaacccaaanacccacccaaacancttcccncananangccctttnttttcttccnctcttcnanggttcctnanggaaaaccttcttnanggaaaaaaaacaaanaanaacccaatctggccnccaacaacccanggtcancncaaccnccactggaggcgagggaggagggnaaanggnanggnaaaagaanggctgcccnccangaaccttccccttcccaaaaaacnaataaanattnggnaanaaagnaaaagggtccnaaccaactgtnaaaaaaaaaaaaaanggctgggantgggganaaaaaaaaananaaaaaaaaaaaaaatttggggaaangganaaaaaactcagctntttcaataatntggaggggaggtatggtgggggaccaaccatggccctatccaaccccaagctccacaagccccaaattggctttgcaaatccaaacatttnaaggaag

SEQ ID NO: 523782 - DNA, 114 bp, Homo sapiens
gtggtttgttagtactgtttctttagaaagacagggtctcactatgttgctcaggctgaagtactgaggctattcccaggtgtgataatacgcatactaacaccgttgaactcc

SEQ ID NO: 523783 - DNA, 472 bp, Homo sapiens
cccgcgggttacccgtgtatatcaaattgtatgtaataactgtgtgcaatacagactttgttatactgataactgctttaataaatattttaatactttttaggcattatagctatattaatgcaaaataataatagtctaaaatcatcatatcatcaatcagtactctgattattcattttccagctattaatagtaaagggatcttcaacatccctagaagaagactgctctagcaaatgcaatctaatacggaaaaatattgcgaggattcataatataagtagatatgcttcacaaaatagatgaatatactatactgtcatcagaccacatctttatcatgccaccatatattaattgtaatctgtcttacattgtatgaatttctgccttagttaaatttcaaaatgctatgctacttttgctattatgctactggtgaagaacgacccacgggtagccgagctcg

SEQ ID NO: 523784 - DNA, 558 bp, Homo sapiens
tagtttatacctacgaagtatcatcacttcccgctgacagctctgatataatcctggtatccctctatccactagtgccagtaatgccaccacccagttttgcatctcaatttctcgtcggcagaagtggatcctcagcaatgaagtgacattcccacgaagtgccgaaccaagtccggggttcacggaactttgtagtctcgtatcgtcacagataaatgtcaaatcatcggactatgtactcccctgcgctgatagaaagctcggcattaaaagtgaacagatgtcatcgtattagattgccattcccatcggttaatagatgactacataaccctcgtgcatctaacgactagatacgtctcaccatattctgcaattaacagcatgcaattacggcttccctatgagtcggtcatcattgttgtgaactttttcgctatgatcatacaatgcttcaacgtagcaatataggccccacatgtcattctcatcagtaactaggcctatatggaaggattccagttccggtcggctatggaacaattcctaataagg

SEQ ID NO: 523785 - DNA, 367 bp, Homo sapiens
  misc_feature (30)..(30): n is a, c, g, or t
  misc_feature (99)..(99): n is a, c, g, or t
  misc_feature (114)..(114): n is a, c, g, or t
  misc_feature (190)..(190): n is a, c, g, or t
  misc_feature (211)..(211): n is a, c, g, or t
  misc_feature (226)..(226): n is a, c, g, or t
  misc_feature (237)..(237): n is a, c, g, or t
  misc_feature (259)..(259): n is a, c, g, or t
  misc_feature (346)..(346): n is a, c, g, or t
tcttgcaagaggagcacctccttggtctancttgattcccacccgatcccctttcccttgagaatgtttctacacagctttccctgcctgtccttctgntagagggtctcgtgnaaaaggttcacacccccaatgctctggttaatgaaccccaccttgatcctctgcagccggttccccatggtacctncagattcatctacagccaggntcccctttccattgncaccaatgctntggccaatttctgagagctccntcttctgctcctgggtgaggctctggaactcggtggcccatggtcacaggtagtttgagagagaagagtcctcctagatctcaaaanctgtgtgtgagccctcgtgcc

SEQ ID NO: 523786 - DNA, 129 bp, Homo sapiens
ctttcacaggctatgggagaaagagaaagagaggaagagagacagagagagatcagttgatgtaatgaacagttcatggtgagcatgatttcatttcgtcccttggtcctataccccggtggaaaagta

SEQ ID NO: 523787 - DNA, 446 bp, Homo sapiens
tctagagtaccccgcgcggctgcggccgggagagggaccgcaagccgtgaaccagacctccgtgaccgcctcagcctggctttgcaggtgaagcctagctgagctgcaacccctacatggtttccctgcgtgccgggctcggatccctttccccgacatggtggcctggctctgcagcctggcccacctcgtctgcaccctttcccctttcatccgagccttggccccctgcgcagcgacaacgtctagcgctggcagctgggccagcccctgcggcctgacatgtcctatgctgagcggctggcagctgagaggcagcacgcaaaatgggtggccgccctggccccatgacccactggcccggctgcggatgctcgctgtgactccccatcagcaccagcactcccccattcactcgcacctgcacctgccccagccagatgctc

SEQ ID NO: 523788 - DNA, 923 bp, Homo sapiens
aagcctgtgggagcccgtggtctttaaagttgccgttcaggcttttcctccaggtgtgctttgtaatcacggactgtgctcaggtctcgcgggtgaccgaaaggatcatgaactagtgagctggaaagggtactagatggaaacttgagaaaggactgcttattgataacagctaaggtattcctggaagcagagtaaatacatagctcatggcccaccagctagaagagtattcttgccatggagaaacagagaatgtgataagttattcaacttatgaaatgcaatgtcacaatgtgaattctgttcagggcaataaccaaggaacctggtggatagtattcggcaacggtgatgacaaacccttactatgtagctgcgcctggatgtggccaggcgtatataccagcgaggaatcatttgtgctgtcccatacaagcatgaaaacatgatatgacactgaaatttggtccagccacgtaatgacaggtgtcgttgtggctgatcagatcccatcaccatgtagattcttgagaaactgtgtaagaagtggagttgtttatatcgagtggggctgagtccactttgatgagatgatgttcaggatgagcttctgaagatgtacattataacaatgcctctagcatttatcccctctggtcatgacctcatccatgagtaagcaattggtgaggagccttgctgtgtagaacactaactcacagtgataagtcctttatctccaccaagagtctactagcagtggatgagaaggaagtcccatggggcaaagtgcagcggccacatcaggtatggtcgccagcgtccatacaggtccaaggggcgctcaattctggtcagtgtattatcgaggaggcttccacttagtcgggataccaggcactcaaaggcatgtctgtcag

SEQ ID NO: 523789 - DNA, 607 bp, Homo sapiens
gatggcggtgtgcgccctgtattctgtccctcactcgccgacgaggagcgtgtctcgccgagcgcacgccttgccgcgccccgcagaaatgcttcggtgtacccagagtctttcgccagatgagaccggtgtccagggtactggctcctcactctcactcgggccttatgccaaagatgtaaaagttgggtgcagatgcccgagccttaatgctattcaaggtgtagaccttcctagccgagtgctgtggccgtgtacatagtggggccatgatgggaagaacagtgattattgagcagagtttggggaagtcccaaagtatacaaatagatggtgtgactgttgctaatagtcaagttgattaaacagataagataggagaacatgggagctaaacttgttcaagatgtggccaataacagaaatgaagaagctggggatgggactaccagtgctactgtactggcacggtctataggcaaggaaggcttcgagaagattagaaaaggtgctaatccagtggaaatcaggagaggtgtgatgttagctgtgatggtgtaattgtggacttagacaaggagtctaaacttgtgagcaacctgaagaa

SEQ ID NO: 523790 - DNA, 399 bp, Homo sapiens
tgatatataattcacatctgtgtagttcatccatttaaaatgtacaattcgctggtttttagtatattcacagcgttgtgcagctatcaccacaatcaactttgagtattttcatcaccccaaaaagaaactcccaaggaagaagccctataccctttagtagtcacttttcattttcctccaatttccccagcccgtggcaaccactaacctgctttctgtctctgtagatttgcccattctggacatctcatgtaaatggaatcatgcaatatgtggtctttggtgactgggttttttcacacagcacactgtttttgaaattcatcttcatgttataacatgtatcagcatttcattctttttattttaaataaaatgaggtaaaattcatataac

SEQ ID NO: 523791 - DNA, 197 bp, Homo sapiens
gagcgagactcagtctcaaaaaaaaaaaaaaaaaaacacaaaagggaaagggggagagagagagatagacatcgaggcgggggtatctgcctacagccagattggtcccacacttgcaagggttgtgtgatgaggccagagcgattgggcggtgttagggaaccggcgggttttaagccagtgatattgttggagaa

SEQ ID NO: 523792 - DNA, 389 bp, Homo sapiens
ccacatgccagtcgaccttactactagacaggcttaggcggaccatttactctaataaagtatgggcgatggagcattggaactctgagcgatatactgagtaccagctgggaaagatgagagagattcagcatgcataatatagcaaggactaacccatataccttctgcataatgaagtaactagatataacttggcaaggagagccaaagctaagactcccgaaaccagacgagctacctaagaacagctagaagagcacacccgtatatggagcaggatagtgcgaagattgataggtagaggcgaccctaccgagcctggtgatagctggatgttcaagatagaatcttagttcaactgtgaatttgcgcacagaccctctgtc

SEQ ID NO: 523793 - DNA, 1088 bp, Homo sapiens
gcgtgacgcgtgggcgtgacgcgtgggtcgacagcttcaggaggtgctggagggcttcaacatggccaatgtgctggcgttcctcagtgatgactgaggacgatggaggaggaggagtgaaggagaagatggaagaagaggaagcagaagaagaggaggagtgaagatgaggaagatggatggatgaagaggaggaggaggaggaagaagatgcctcagcagcgaggtgcagggagatgaagtcagccacgccctcacggaagattctggaccactaacactgggtgagccagctcccgatgcatgtcctccccacctcctgcagacgtctccaccttcctgggcttattccctcgtccagagaagctgctgcgcctagggcccaagagctccgatgctgatagcccagggagactgacacgtctgaacccgagaaggtggatcgtctgccttacctaaaggtgtcatctggtgttcaaggacgaagctactgtgagcgataggccgtgcaggatgcaggaggatgccctgatgcagaaggcgttcaactcctcgtccttcaaggccaagaactacctcaccgaggatggtcggtgcacatgaggtcatggtcaagaaggtgaagacgaggtcaaggccatttacgaagctgataacggcccctgatggagcagaacgaatggtgcagcaggactatatcccaaggccttgcacccctgctcgcggccgacgctgacgaagccaccagcggcctggaagctagaccctagacgccgacaactgtggagcaggcgaacacgcgagaaacaaagccctcccaacgtgggcatggacacagaaagggcaggacagaacaagcgaggaacgaaggaacgatggaaaggtatggcaaggagtgataatagtaaagataaggaagccagaagaaatagagagtgcataaaaaagaagtaaagaaaggaacaaagtaaaagaagtaagataggataagagaaagaaaacataaaaaagagaagacagagagagagcagagaaagtaggagaaagaaaaataataagacatgctcaaagagtggagggaagaaaga

SEQ ID NO: 523794 - DNA, 455 bp, Homo sapiens
agagcggcctcattgtgcctgattctgacacattccatcaaatcatctccagaacatagtccaatccacatcccaaggtggaacgggaatacgggattcagaagccccagccaacaataaaatcctatttttggaactcctgcctctgtccttatctgtcacctacacgggtatcagttctgtccccgccaccccaaattcaagccccatttctgacggttcactactcatctctacctggacatcccacagacgcttcaaacccagctcgtcccaagtcaccttctctcccatcgtcgccaagttctctcatgccctccccactagctagcagggctgcccttcttccgggcccaggtgacacctcagctcctccacagaaggctgcccagggcgccgcattgcttggcacccctcccctcactttcctcctgagcattctccatggcccaccc

SEQ ID NO: 523795 - DNA, 110 bp, Homo sapiens
tatgacgttctttctttcttttgtgagacagtctcactcggttgtatgtagcagtgacaatctccactcactacagtcttcacctcctgggttcaacgtgattctcctgt

SEQ ID NO: 523796 - DNA, 348 bp, Homo sapiens
cctcaatttacactgactttttatacgttcgtcgggccgcggcgcctacatatcaatgaaactacttacaacatttaattcctttcataatattaaacaattcatacaaccctatttatctcgtaaacctggtctgcagaaattcaaacttacaaaaactgttgtcacaaatgttatctacatatattcatatgtaactgcattacttgccattttcaatcacagtggtcatcgtgtcaatatatttaacactgtgttaaattaatttacgttgctattttattttaatcataaacaactaccatgtttcttaatgttttgtgtaaatttaaggtaattatactatcc

SEQ ID NO: 523797 - DNA, 173 bp, Homo sapiens
tgtgtcggcatgactatttggactgggcgtctcttggagcaacgtcgaagtatggggtgtgtcctctctcagagtctcgtttcagcgtatcttttcagcaccctgtgaatgactccctggtgtgtgtggtaatggatgtgcaggactcaacacatgtgacgctgtacaactct

SEQ ID NO: 523798 - DNA, 1284 bp, Homo sapiens
tgaccctacatcgacgacatatcgggtacttccgcacataccgtctgagtctccctgggagagacctacgtgcttgctgctaggcatgcttggccagccggcatccgatacagctccgtactatggatgtgacaatgctgtccttgagcatcactgctcgtgacatgcaaaccgattctacaaggcctcctagttatcgtgtcgctccaccatcctggactgttgctctctctccatcactcgccaccatgctactctgggtgccacatatctgtgttgtgacttcccgactgtggtagcccatgatcgtgtcatggtagattggcgcccacccgataccgctcgggtgtgcctcggcgcgatgatgccattgaccacttccattcccttggcagtgctagagcggcgttagcttgttaatacatgtttcatgtttgtggtatcactgcttcggggtagtggagtctctactaggtcccttggtcccgcctcttccacgccctccaatcctgccaactcatcatgatacacttggttcgagacactagtatctagattaggacatgtcagcgcaattttgctcccgttctccttttgcggcgtgtaacattgctcacgatgtccatagacatagccactgttgtagcatatttccagagaagccgggagagaaaacgaaaacacatgtccgcaggtggccaccccataacgtattttgcagtgcgtgcgagctgtgtggaactgcaagttgcgagcggcacagtgcacaggcagtgcgcgccaccatcgtgcgttgcgcgtttgaaccccgttgtctttctccctgtgaaagccaccgagccctttttctccgtctggtgtggccgccaggatgtggcgtccaagacaatgcgtgccccacgcttcctcgttaccccctatttatttcacttgcgtgggttcccgggtattttcaattgttttcccggacaacattagtgcccgcacaagaggttccccacccctcttcggcggttttctaatgatcctctgcgggcggggagaaaaacgttccctcgcaccgacagccacagcttccgggttggggacacacacaattttggaattttcccccatggttctctattttggaacaccacgcggggtaacggttatacgcgcgcgattaacccgaagaaacagggcccttggcaacttggtgtccaacaaccacggaccattcggaagtgtgcacttgaacacgcactggtcgggggcattcgacaaaccacgacagcaactgtc

SEQ ID NO: 523799 - DNA, 405 bp, Homo sapiens
aggactgttcaactggcccgtggctctgatcgactccttcccagatctcctcggcttagcagctgaagactgacactgcctgatcgcctcggaagccccttggaccatcacggacgctgagcttcgggtaactctcacagtgaagggtaagtccatccccttcttaatcaatacggaggctactcactccacattaccttattttcaagggcctgtttcccttgcctccataactgttgtgagtattgacggccaggcttctaaacctcttaaaactccccaactctggtgccaacttggacaatattcttttatatactcctttttagttatccccatctgcccgactcccttattaggttgagacattttaactaaattatctgctcctctcactattcctgg

SEQ ID NO: 523800 - DNA, 234 bp, Homo sapiens
ctaccgaagagggagtcctcgcggacgtcagccaagattccagagtgactactatacttgacttacccctattaaaaatcttcccactgcatcaaaatgggccctcagcattttccataagacctcatgcagctgttcctcccatgctacgagactgccccagactgtccagtaccaaaagcgaatggcaggagcagattttgagctttcagattactatttccacaagccacc

SEQ ID NO: 523801 - DNA, 1165 bp, Homo sapiens
gggccccatatttgatctgtcaagaaactgttggctgggaactcctgaggtcaggagttcgagaccagcctggccaacatagggaaaccccatctctaccaaaaaaaaaaaaaaaaaaaaaaaaaaaaaatgtgtgtggcgccggcccgcgggcccctgagaaagcctttcataaaaccaactgtgtgtgggggcgcggggggccccaggaggggaaaagggcgaaccagagggtccacaagagccggttccccagaaggaaaaactcgcggcgacgaagagcacaaagagcgcgtgggaactgcctccaccaaattaaaaaaagccccgggggggaaacccgacagtgttcctggaaacaaacccccaacgaggagaactctccgacggagagcacaacacagggggaactcaatagaccacaagagggagattctccaaaagcgagaagcctcaggcaataacaacaaagatgtaaagcgccgccgcggtgcgggtggggaaaaagaaagagcgaagtagcgaagcacaaaaaacacaaacagaagaagggaagcagagaaagaaacagaagaacaggacagatgaggaagatacgacagagagacggacgaaagaacaagacaggaagacgaccgacagcacagacgagtataaacgaagacaacgaacgcggagaggggaggcaaaaggagaagacagaacgagaagaaaggagaggagaagacgaggacaggagaagagagggaggagaagaaaaagagggggcagggacgagaagagagaggagagaggaagaagggacggagtgagggaagaaagagaagagaggagaaaggagaagacgagagggcagagaaagagaggagaggaaggagggaggagaagacgcagcaggcacgagaaggagaggaggaggacgagggacggacgcggcgggaggaaggaggacggtgagcgagcgggaggaggagaaggcgagagaggcaggagggagaagagagggagcgggaagaaagcaagaaagatacgacagagagcagcggagcgagagaggaagaagagacgacgaagacggagcgagaggaggggagggaagaagacggaggaggagggcgacgaaggaggacgaacgagcagcagagacagaaagagagggaggatc

SEQ ID NO: 523802 - DNA, 701 bp, Homo sapiens
ttatactagcatttaccatctcacttctaggaatactagtatatcgctcacaacctcatatcctccctactatgcctagaaaggaataatactatcgctgttcattatagctactctcataaccctcaaacccactccctcttagccaaatatttgtgcctattggccatactagtctttgtgccgcctgcgaagacagcggttgggcctagcccctaactagttctcaattctcccaaacacattattggcctagaattaacgtacattaacccttaaaaccttacctcccaaatggcctaaacacctaaatcgttccccaacacattatttatttacttacccaccttgacaatgcactttcccaaaaaaaccacattattttgactcaacacaaaacacccacaagcctaatttattaagcatccatcccttcctgctatcttcttcaacccaaatcaaccaacccaacctatttaagcttgtccccaaacctttttcctccgacccccttaacacccccctcctaattatagccaccttgatccttaccctcaaaattcatggcaagccacgcgccacttattcagtgaccactatcacgagaaaaactcctacctctctatacaatctcctacaaatctcctaatatacttcacagcacagactatcatatcatatctccgaaaccaattatccca

SEQ ID NO: 523803 - DNA, 100 bp, Homo sapiens
taccccttttttgccagcagacagacttgagtctgtaagagacaagcatacactgacagaagtttaccatagtttctaaaatgtaaaaaaagaaaacccc

SEQ ID NO: 523804 - DNA, 549 bp, Homo sapiens
  misc_feature (24)..(24): n is a, c, g, or t
  misc_feature (256)..(256): n is a, c, g, or t
actatctccaggacagacaacatnttaggtcacaaaacaagtgttaccaaattcccaaagcttggaatcaggccaagcatatttttcaattacaatggaatggaatttaaaatccacagcagaggaaaactgaaaattccccaataagtagaaattaacacatttttcccttaacagtgggtcaaagaggaggccataggagaaattaaaaaaaaaaaaacttgaggccaatggaaataaaaaccggcccttcatncccaacttatgatatagtgaaagtagggctaacaagggaggttatagctgtgaacaaatatatttcaaaaaggaaggtctccaaggccccaacctaactttatacctcaaaggacaaataaaaacaagaaaaaccttaacccaaagctagggaaaggtaggggtaataaaatttagagcccccataaataaaatagaggattccaaaaccttcccaaaatatcaatggaactaagagtttttttttttaaagattggcaaaattgaaaaacccttaggtagatttacttcgga

SEQ ID NO: 523805 - DNA, 125 bp, Homo sapiens
ctgaaaattactcatgggagcactgcgtgacttcatgatataatttaaattttagaggttgtggcgttttgtgtgtgtgtgtgagacagggtctcaccatgttgcctaggctggacttgaactcc

SEQ ID NO: 523806 - DNA, 481 bp, Homo sapiens
gtcagtcctaataactaattcatgggatccagatgaaaaatccccatctggaatttttaaccaccttgagggtcagagatttttttgagaatcagaggaaagcaatgaacctcaggcctggcaggtgaggggaccaggagaagacaggaagtacatgtgtgcaaacagacaaaagtttgcacacaagtagttcattcccaagcttcagaaccctagcgctgcttgattcccttcagttgcagatattggtggctggaatcaagggccaggccccagaaaagtttcacagaagggacatacatagggccaaattggaccctccgattcacaccgggtatctctgagatgtgtgtcaagattcctagcgtgatttaccaaaggcttgatgatctcacttcatctttattctgcaaactcatgccctagcattcttcccaatagcaactatcactatccctaaataaatgtttaatacttgaaa

SEQ ID NO: 523807 - DNA, 288 bp, Homo sapiens
tctctagcagtcgttttgaatttgctcgctactgtctcaggccagtgctgaaccataattagttttttccactcatggttgtcacgcaggcgcttgtccgcaccgcccatgtgcaaatgcaactgccaggcagatggcatgcccatgcagggccctgtgcagggctgcaatgggctgcatggtgcctgacctgctggagagaactgctgccagttgccgctccggctcccacttcccacctgctgcccgatgaatacttccgggagaaacgcttgtctctgagccccc

SEQ ID NO: 523808 - DNA, 538 bp, Homo sapiens
gaaaatcttgatgcatagggtgtacggttatagaggacatgactgcttctcgtggaagagtgctgtatacgaggtaggtggtaattaaagtgaaccagtgttactcagaagtgtgagttatctcacattaaggtttcgcgtcaaatggtaagtgaaataattatgagtaaacagagtggaatggaatggagtgggatggaatgaaatagaatggaaaacaaaatactggagtgtaccacatgtcgtcagattaggctattagttgggtaaaacgtgtgccatggtaggagggcagaatgatgtcacattcgacactttagaaaaatgtaaatgctatgttcatattacttcgaatacttcactgcattacaatgcttcagaatcgtttcacttgtgattagagtaagtctcagagtccataattgatagagttaagacagattaacaaacagggtggagcattcactacaatagcaacactcttcctccctgaggctcggaaagccagcagtgacaccaacagcttgcgagaggtaaa

SEQ ID NO: 523809 - DNA, 550 bp, Homo sapiens
gtaatatgatatttggagtagagtaattcagtaatttttgtatttttagtcttgaactcctgagctcaggtgatccacctgccttggctcccaaagtgctgtgattacagacgtgagccatacgtgcctggcgctttgcccactttttgatggggttaattggttttttctggtaaatttgtttaagttccttgtcgtttctggatctacaagaatatacaagattctggatctgacctttgtcagatgggtagattgcaaaaattttctctcgttctgtaggctgcctgttcacttggatgctagtttcttttgctatgcagaagctctttagtttaattagatcccatttgtcaattttggcttttgttgcaattgcttttggtgttctagtcatgaagactttgcccatgcctatgtcctgaatggtcattgcgtaggtattcttctaggattttaatggttttggattttcacatttaagtctttaatccatcttgagttacatttttataaggtgttagggcaggggtccagttcaggttctgta

SEQ ID NO: 523810 - DNA, 157 bp, Homo sapiens
  misc_feature (149)..(149): n is a, c, g, or t
ggtgactctaaggatccgggtatagagatagagatatgctgtatgtggaggctgataagacttaagagtggcattattcgtagctagcagaagcagttgcagtttagactacgcagcattgtagagtggacgggtagggtacatacttntggtgtgg

SEQ ID NO: 523811 - DNA, 213 bp, Homo sapiens
caaatgataacaaagacctttggactcgatgatcatggcggctccttgggccttaatgttattgcagtacgggcatatgcgcttcccactgactgacctgttacgcagctgagagcctgactgtgaagctgaaggggaaaggcttctcggggtgggggactgggtggaggccacacctgtggtggagggctttacggagccagctgaacgtgg

SEQ ID NO: 523812 - DNA, 865 bp, Homo sapiens
cggtcggtgttgtaccctctttgtctctttttattgtaccggcgttttatcaccggcggttttcctgtgggttgacgcttgaatagcgctcaccgtccgtagggttggttttacgcaccgcttcccccgcgggggtcgcccagcttggtctgatgaatgttccgcgcggcattgttgtggcccccctctgtggggtggtttaatgaacccctttctgatccagtgggcccgccctttggggaccaaccaccgctccggtttactcggccgctcctggtcttttctttacgcgcacatggatggcgtcgccagctggtccgctttaccggcgctgttttcttcactcgctcgtccgcctcccgtcgttccacgtctgcctgatgattttgttccgcaccgcggttcactcgcgctgcttgagaacttggtcgatccccccgccgctatgttttcgcacctccccgcctccctccgctctccgcgtttaggtaggcgcacttccgcgctccctttaaccgcgttggtgtgtattctccacccagagtgggcgccctcttactgttcatggattctctcccgcccgtcacaccttgttggcgccacttcgacgcgcccaccctaagatgccccctaccccccctttagacctccactctctcttcacaccggccctgctatgaatcccacccacgcatttcgacgacgatttgtccacaattgtcttaccaacctaagaagatgatgagacgaccttgtgtataaccaaaccagatcgccccctcaccttccttccccaccatcaagtttgccccgtcccccatgtcagacgtgcctttccttccccttttttaaatttctcccacat

SEQ ID NO: 523813 - DNA, 142 bp, Homo sapiens
gagggcctatttggatcagactgggggagaaagcgaagaagctgcctggagatgaataggtttattcagctgaggacagagctcaggaagagacacacattgaggagtacaagggggagaaaaagctactagtcagagatgt

SEQ ID NO: 523814 - DNA, 139 bp, Homo sapiens
tccggtactcggggctaccgcgaaccggtcccgtattgccggcgcaaatcttccgggcaagtccgaaatcgggggtcttcctgggtaatgctgcgcggcgcctcaggtgacgtgggcggaatggaataccttgcggccg

SEQ ID NO: 523815 - DNA, 706 bp, Homo sapiens
  misc_feature (28)..(28): n is a, c, g, or t
  misc_feature (119)..(119): n is a, c, g, or t
  misc_feature (218)..(218): n is a, c, g, or t
  misc_feature (282)..(283): n is a, c, g, or t
  misc_feature (328)..(329): n is a, c, g, or t
  misc_feature (333)..(333): n is a, c, g, or t
  misc_feature (358)..(358): n is a, c, g, or t
  misc_feature (362)..(362): n is a, c, g, or t
  misc_feature (365)..(365): n is a, c, g, or t
  misc_feature (374)..(374): n is a, c, g, or t
  misc_feature (393)..(393): n is a, c, g, or t
  misc_feature (461)..(464): n is a, c, g, or t
  misc_feature (501)..(501): n is a, c, g, or t
  misc_feature (503)..(503): n is a, c, g, or t
  misc_feature (506)..(506): n is a, c, g, or t
  misc_feature (517)..(522): n is a, c, g, or t
  misc_feature (524)..(525): n is a, c, g, or t
  misc_feature (529)..(529): n is a, c, g, or t
  misc_feature (533)..(533): n is a, c, g, or t
  misc_feature (536)..(536): n is a, c, g, or t
  misc_feature (538)..(538): n is a, c, g, or t
  misc_feature (541)..(541): n is a, c, g, or t
  misc_feature (555)..(556): n is a, c, g, or t
  misc_feature (558)..(558): n is a, c, g, or t
  misc_feature (565)..(565): n is a, c, g, or t
  misc_feature (596)..(596): n is a, c, g, or t
  misc_feature (694)..(694): n is a, c, g, or t
aactgtatgatataaaataatttaaganatgttgggaattagcagcaccatctgttattgaaatagcaagggaaacttcacatattttaagcaaacacgggaagggggtaactactttnagacctaataatgccattggtctgggatgaaaaagaagggaattgttttagattgttttaggcaaacacacttccttctatgctggggatttagtgggngtgatctgatgactaaggttttagaaaaatgctactgatgtcagagatactgcctagtattttnnttggggcaagactaactgtggcctggctccccccttctatggcanntttngttctggcttatggcatcaggaatnacanatnatgtttaanaggcacttggctctggggnacattaggtggacccaggtccctatggccctccctcccttttcccgtctgcttaatcctttgctttgnnnngttgcgcggttttcccggccggtggcttatcccgctntnttngtgggtgtttnnnnnngnntggntgtnttncnggnatcgcctgggttcnntnggtttcnttcggcctttggccctgttggcgcccttgcngtgtatcagagactctgaatactgtgtattcagagactgaatttgtgtgggtacaaatttacacaaattttacagcaacttataccctaacatctacnaaatccacattt

SEQ ID NO: 523816 - DNA, 244 bp, Homo sapiens
  misc_feature (239)..(239): n is a, c, g, or t
gggcagatttcttggccaaaaatattggccagccaggatccactgcccattatgagaaattcctagcttgccagcaatgggatctctttccaggggacgtaagtctcatcttaccaggacagaaccacttcattaatagtggttttccagtctgatggggcaattttcttcaggttcatggaaacgtaaagatcttcaaacatcttgtggagaacgatctcttcaaggaaattacaggnttgag

SEQ ID NO: 523817 - DNA, 152 bp, Homo sapiens
taaccagctgcattgagtacacacaccggactggtactatattgtatttttttagtagaaatgggatttcaccatgtgggttagactggtctcaaagtcctgagctcaagtcatccgcccacctctgactctttcttgggattgcatggtat

SEQ ID NO: 523818 - DNA, 122 bp, Homo sapiens
ccccggcccccccaaatgggcccggtttttgtttttttttaaagtccccccgattttttcccccctttttttttcccggggggggggggggcccccattaattccctttttgggtttttcca

SEQ ID NO: 523819 - DNA, 312 bp, Homo sapiens
acttcgcattgtccaagctctcgatctgtgtgcccaacgtggccgcgtagaatgggtagaagtagacactgagaagaagtcgggcgttttcaagaacgttcctgctcgcagtgatctgtccgccgacatcaacgaaagcctgattgtcgagctctactccaagtaagggctagaaaataggtgcatccatgcagatttcggtaaatgagttcctgacaccccgtcacattgatgtgcaggttgtcagtccaacacgcgccaagatcatctcgagcatctcgagcgtgtttggccacacctggaacgggccga

SEQ ID NO: 523820 - DNA, 326 bp, Homo sapiens
gggtacaagtggtttttgattacgtggatgaattgtatggtgatgaagtctgggctcttattgtttctatcagcccaatgcccgtcttaaaagtcgggcgttttcaagaacgttcctgctcgcagtgatctgtccgccgacatcaacgaaagcctgattgtcgagctctactccaagtaagggctagaaaataggtgcatccatgcagatttcggtaaatgagttcctgacaccccgtcacattgatgtgcaggttgtcagtccaacacgcgccaagatcatctcgagcatctcgagcgtgtttggccacacctggaacgggccga

SEQ ID NO: 523821 - DNA, 87 bp, Homo sapiens
aagcttcgactgtagatagaatagcctcacttggtgcttattaccagttattcaagaacaataacaacaacaaaattagtagacatc

SEQ ID NO: 523822 - DNA, 191 bp, Homo sapiens
aaggagctgatgagctgtcgcacctgagccaggaaggaactgttaaatcctgtgaccccagttactaatggaaatgggggcatcaaatggggcttaatccggctactaattttctcatcgtcacttcgttattatcttactaaaaaatgtagtcactattcattgcagaaacttagaaagcacagttaagg

SEQ ID NO: 523823 - DNA, 1046 bp, Homo sapiens
  misc_feature (51)..(51): n is a, c, g, or t
  misc_feature (75)..(75): n is a, c, g, or t
  misc_feature (177)..(177): n is a, c, g, or t
  misc_feature (301)..(301): n is a, c, g, or t
  misc_feature (334)..(334): n is a, c, g, or t
  misc_feature (390)..(390): n is a, c, g, or t
  misc_feature (456)..(456): n is a, c, g, or t
  misc_feature (480)..(480): n is a, c, g, or t
  misc_feature (530)..(530): n is a, c, g, or t
  misc_feature (567)..(567): n is a, c, g, or t
  misc_feature (602)..(602): n is a, c, g, or t
  misc_feature (631)..(631): n is a, c, g, or t
  misc_feature (634)..(634): n is a, c, g, or t
  misc_feature (666)..(666): n is a, c, g, or t
  misc_feature (686)..(686): n is a, c, g, or t
gcggagggtcaggtcgtttctgcgcgggctcccggcgctgctactgctgcngctcttcctcgggccctggcccgntgcgagccacggcggcaagtactcgcgggagaagaaccagccctagccgtccccgaaacgcgagtccggagaggagttccgcatggagaagttgaaccagcngtgggagaaggcccagcgactgcgtcttcctcccgtgaggctggccgagctccacgctgatctgaagatacaggagagggacgaactcgcctggaagaaactaaagcttgacggcttggacgangatggggagaaggaagcgagactcatacgcganctcaatgtcatcttggccaagtatggtctggacggaaagaaggacgctcggcaggngaccagcaactccctcagtggcacccaggaagacgggctggatgaccccaggctggaaaagctgtngcacaaggcgaagacctctggganattctcccgcgaagaactggacaagctctggcgggagttcctgcatcacnaagagaaagttcacgagtacaacgtcctgctggagancctgagcaggaccgaagaaatccacgagaacgtcnttagcccctcggacctgagcgacatcaanggnagcgtcctgcacagcaggcacacggagctganggagaagctgcgcacatcanccagggcctggaccgcctgcgcagggtcaggcaccagggctacagcactgacgctgagctccgaggagccccaggctgattgacctgtgggaccctggacgcaactccagcaactcaccggacaaagagctggcaccgctcccgggaaggaagctccaaggcacttcgaaggcccagattcgacgacagcccaagcactaccagacagcagctgcagaattgcgcaccgagcaagctggcgggccgccacagcacgtgtgccgacggccaaccgtgtgaacccgcatcgcgagaaagccccctgtctggaggggccgacccaggagctgggtacacggtgagaagcatctgcggcctggc

SEQ ID NO: 523824 - DNA, 177 bp, Homo sapiens
agctgggaacgtgtggatataccggtctctgaaaaatttagaaaggtgggtcgggcatggtggcttgtcctgtggtctcggctgctgggggaggctgaggtgggaggatcgcttgagcctgggaatctgaggcaacagtgggctataattgtgccactgcattctagcctgggtgac

SEQ ID NO: 523825 - DNA, 409 bp, Homo sapiens
  misc_feature (9)..(9): n is a, c, g, or t
ggtacccgnatgcgatgtgcgcgggacaacacagaggttcaggatcatgctggaaggacaggcggattgctggagatccttttgtctggagtagcagagctgctggctatccagcccctattatcaccagccgctcaatccagatgggtgtctcaaagtgtccttcagggtctgcggagctggagacaagggtgttgccagcacaatgtagaatcgcacgcagccaggagctcttgcgcgggtctgatagttgaacgtgtgcccatcatccacgaccgagctctccttgagctgtagcctgagggctacgtgcgtcagagagagtgatggggtcatccttcatacgttctgacgagcgccgggctcggatgcatcgaggcgcgattgtccctccatgctggcacgccgg

SEQ ID NO: 523826 - DNA, 406 bp, Homo sapiens
gctcgacccagcactttgggaggctgaggtggggccactccggatcacaaggtcaggagttcaagaccagcatgaccaacatggtgaaagcccgtctctactaaagaatacaaaaaaaatgagctgggcgtgggggtgcacatctgtaatcccagctacttgggaggctgaggcaggagaatcacttgaacctggaagtcagaggttgcagtgagccaagattgcatcactgcactccagcctgggtgacagagcgagacaccatcgcaaaaaaaaaaaaaaaaaaaaaaaaaattggctaaacagcccaggtttggtctgatatgttcagaaaaaagcaaaacagtcacctctcaccttttcttttcccgcagtgatgcagttgcatacaacaatggcgtcgacg

SEQ ID NO: 523827 - DNA, 338 bp, Homo sapiens
  misc_feature (67)..(67): n is a, c, g, or t
  misc_feature (134)..(134): n is a, c, g, or t
  misc_feature (141)..(141): n is a, c, g, or t
  misc_feature (191)..(191): n is a, c, g, or t
  misc_feature (216)..(216): n is a, c, g, or t
  misc_feature (234)..(234): n is a, c, g, or t
  misc_feature (254)..(254): n is a, c, g, or t
  misc_feature (326)..(326): n is a, c, g, or t
ggaacactgagcagatagatacctttggccccttccagcttttactgacagagagttccaggctagncaccataaaaaccaccccttggtctccctcccttgttctgagggggtgaggctggaaatagattgtncagacangcaagggttgggtggtggttcccacacgaagtcatctcttaaacatcatnagcaatagcagttcccttccaaggnctcccctcactcccgaancacttacgtcccatgcaggnccaatgcaaaaaaacacatttggagcttttttcccgcaggggcatgaagtccccttaagttcccatatctangatgggcaggct

SEQ ID NO: 523828 - DNA, 569 bp, Homo sapiens
tgtttgcagctgctgaggtcttgtgagtgtcttactgcaagcactccaaagtccactttagaacgcgaacacgcaagtgtcagaagtcaaagctctaactcatgattccattttctttcactttcctcagactttctctcctcacttctctgagcgaactcaagagcacacagctgctaggatttctttctcacggaagagttcacaggtctttccctccccgcttgggcttgttaaccaatattcatgataaagaaagcatcataaacttctggtgtaaagatgccggtgggaaaccacgcacctatatagtctctttgccaaaccccactcccatgaccgaccatacctagcatatacaaaagtcatcaactagttgggcgcagtggctcatgccctgtactcccacccagcccgtatgggacgctgagatgggctggatcacctgaggtcaggacgtcatgagcagcctggccaacatgacaacaccctgtctctactaaaaatacaaacatcaggcaggcgtggtggagcgcactgtaatccagctctcatgggtacgagctcaa

SEQ ID NO: 523829 - DNA, 319 bp, Homo sapiens
tggaaagtcagctgaaggatggttaaacagcacagcgaaaactgctaaatgcactgaccccccccattaaaatgtgattttggtcccttttaatttctctgtgggctttggtttcggttttggtttgggtagatcttcaattgggatattgggaggagtgaacatcgtggtttggctggagggaagatctggagggtgttctatccccaaaaatggactcagatataaacattgggggcttataagagagagttaacaaaaaacataggatggcttcacttaaaatttacaaaacaaaacaacacacaacaacaaacgg

SEQ ID NO: 523830 - DNA, 667 bp, Homo sapiens
  misc_feature (166)..(166): n is a, c, g, or t
gggggtttaccagcaggtagggcccaacctttccccccccttggggggccaggagggggcacaggtttccccgaggttttaaagtggcccttcaaatatggttcttattccggccgatggggccagggcggggatggggatttcttcaattttaaaaagaaggggnggcgtttttctcccccccccttcccatttttgaagcaaagaaggagggcggggtgcccaccttttgggcccctggtcccccttcctcccctttggaaggggtctttgggccgtttacccccatttaaggggtcttccccaaggggcccccccctggggaaaaaaccccctttttttttttaataccccagggggtgggccgggggcccccccctttggggttccccccggggggggttcccccgttttgggggcagttttattaaagggccgggggatttatttggtctttggccaaaaatatgggggcccccttttaaatatggggagggggggcccgggggtttgggtttttgttaaaaaaataaaaaaaatcccccaagggggggggggggggggggtttttttttttccccaaaccttgggaaatcccctttggggttccaaattttgggcccccttttccccttaaaagggccccttaaaaaattttaacccggga

SEQ ID NO: 523831 - DNA, 593 bp, Homo sapiens
cctaacaacctcctccagctacttcctactctacctctgcctcctccatctccggcttgggggggatcagtgtcctctctcggcagcagaatgagccggcaggtggtccgctccagcaagttccgacacgtgtgtggacagccggacaaggccgaacagtgctatgaatatgtgcgcgtctcacagaacatgtgggacaggggttctgtgctgtcaaccctaagtgtgtggccctgatctgagaggccagcggggagaggggccttcctggtgctgcccctgggcaagagtggacgtgtggacaaaaatgcgcacacggtctgtggacacagcagcctgctgtgctagatatcgtgctggtgcgcgcacagtgacaatcgtttattgccagtggctccgaagagtgcacagtcatggtgtgggagatcccggatgggggcctgatgctgcccctgggggagcccgtcgtccaccctggagggccaccaccaagcgtgtgggccattgtggtctggcacaacagagcccagaaatgtggctgctcagtgcgtgttgtgaccatcgtgctcgtggtgtggggacgtgggcacgtg

SEQ ID NO: 523832 - DNA, 856 bp, Homo sapiens
gaatgtaccccacgcgggttttgctcgctgggctgggacatgacccagccgtgaattgctgggcagcagtcgaagtgtggaaaaacaatagtaaaggatcatccggttggttaaatgaggcgatatgtggtgcccaactcacgttgtgcagttgcgtgcccaccgcgcggagacacgactcacgcatgctcttgtatttaatgcgcagtcggcgaccatgtctgtcatacaagcagccgagtccaatgttgctgaggtccccgcaagatacatcactaaggggtccaaccttgcgtaagactctcttgtagagagccaccatgctattctacgatgttaatgcctatactggctttgtagaaggcacagagacgcgcacctctgttgttgtcggagattccacaatgcgagaccaccgcgtcgtgggtgacggccactcaacaaaattcaaagcgagccggccgtctcttcccccacccccattaatgattcttggtggacaatagggccggccgcactgcttagataacagcagcactgttagtagtgaccctcctcccgccctatagtaatgcaccacaacagttggggagcaacatttctgcgcgctggcgtcgtcactggaggatccctcccgggaaatgttccgccctgactcgctattgtttgggaccacagacactgtagtgaaggtagcacttgtttaccacgtgaggagacatcaaatactggatatgagtgttctccagctctgtgtccacattggtatgggatcatcattgttactgatggcaaagagctcccgttaatagctagttcgcaaataaagaaatatactcgcccaatcataacaaag

SEQ ID NO: 523833 - DNA, 379 bp, Homo sapiens
cacgacatagaggcaggctctccatgttggtcaggctaatctcgaacgtccaacgtcaggaatgtccggtgattcgcctgcatcagactccataaatgctaggattacaggcatcagccactgcatctggcctcttttttttttttttaaaaatggagtctcactccgttgcccaggcggaaatgcaggggtgctatctcagctcatggaaagtttcacctcacagtttcaatcaattctcccgcctcagcgtcccaagcagtggggaccacgggcgcacaccaccaggcggggccaatttttgggtatttccagtagagatactgttttcaccacatcggccaggttgggacttgaactccggatctccggatccact

SEQ ID NO: 523834 - DNA, 111 bp, Homo sapiens
  misc_feature (7)..(7): n is a, c, g, or t
atcgctntctaatctatcagcaacagaatcagtcaatattttcggccaccgtatgtcatcaaaaagatatcatttaattttcccatctggccattgtggatgtaaatctta

SEQ ID NO: 523835 - DNA, 158 bp, Homo sapiens
  misc_feature (82)..(82): n is a, c, g, or t
aatctaccaccagtcagaatgggtctccggtatatgaagagccaccctttcctgcccactcgcaggagggcacggaagagcnacttccaggactgtcatcttccccagaccagtccgagagctcctccggggagaaccatggggtgtttggagagcgg

SEQ ID NO: 523836 - DNA, 245 bp, Homo sapiens
attcactgcctccgggcagcactgtgtggtattaggcatatcagtatccattgggtactggatacgtgcttagtagcactgcggtgagtaataatcaggtcctgtgttctctgagggttgacacatcaggtctattgatcttgaccttgaactctcctagccatgcctgcctgaagcccaaccgtggagcccaggctgaggctgaaacctgaagaactgtcttaaagtgagtctctccttagggc

SEQ ID NO: 523837 - DNA, 441 bp, Homo sapiens
ctcgcccgttgctactgtgtggatcttatgaccgccctgaagctatccctgggctcttatgaatttcttgtgcccttgtagattactgcaagaacaactaagttccccagtcccttcctgcctttatcttcattattgagcgtctcctaccattgccatcaggactggtcttgttaggctcctctgttaggagctcaagtcactgttagactttctaccttgggagggtggcgcagaagagtcacgcaagtccgcgttggttttgtcacctacaataatggtgctccatttctatcatgtgaagagctcattggcccagccacagatgatggttgtgtctgatgtggctgacatgtttgtgcctctgctggatggcttcctggtcaacgtcaatgagtctcgggcgttttcaccagcttattggatcagattccagaaatg

SEQ ID NO: 523838 - DNA, 339 bp, Homo sapiens
  misc_feature (245)..(245): n is a, c, g, or t
  misc_feature (248)..(248): n is a, c, g, or t
attcgcggccgcgtcgacgggaaagtccctactgaagatagctttgcttaaatgagctcaattacaatgtgaatgctgaggtttattgtgttggctgtatggtcatgagaaaatggtcatttccttgattacctgatacggtttggctgtgtccccacccaagtcttattttgaattgtaatccccataattcccacatgttgaaggagggacttggtggtaggtgactggatcatgggggtggnttnctccttgactctcttatgaatgctttgtttcaccaaaggctaccgggaaataacggggatcagaatattgcagtggttacattcctgcagg

SEQ ID NO: 523839 - DNA, 233 bp, Homo sapiens
agcctgtctcgctcttggccggagcttcttggccaggtgcactgctgtccgacggatgccttctgcgagctggtcacagccgctgcatcacagccaggggcacccaccccctggcaaagaagctccctgcgcagaggactaccagggcagtggccttgtccagctcggtcatgtgttcggaggcacggtcccggtgcggttatggttctagctgctgtgagctgcgcagtggg

SEQ ID NO: 523840 - DNA, 568 bp, Homo sapiens
tggtccgacttcttgacgaggctgcggtgtctgcggctattctccgagcttcgcaatgccgcctaaggacgacaagaaaaaaaaggacgctggaaagttcggccaagaaaagacaaagacccaggtgaacaaatctccgggggcagggccaaaaagaagaagtgtggctccaagaggcaaagttcgggacaagcctcaataacttagctctgtgtttgtgacacaagctaccctagtgataacactcgtgtaaggaagttcccaacttattaaacttataaccccaagctgtggtggctctcgtgagaagacgtgaaaattcgaaggcctccctgtggccagggcagccctttcgaggagcctccttagttaaagggacttactcaaacgtggtttccaaagccacaagagcttcaaagttaatttgtcacaccagaaaatttcaccacgagggggggcagattgcctccaggcgtgcgtgggtgaaagattgctgtgacaataggctccaaaccagcttgtccctttgggacaaaattaaaactttttatttaaattcaaacaaaaa

SEQ ID NO: 523841 - DNA, 1806 bp, Homo sapiens
  misc_feature (342)..(342): n is a, c, g, or t
  misc_feature (1650)..(1650): n is a, c, g, or t
ctcttctgataccacgagtccatctagggtacacaaagtctaggctgtctgcgccaccaagagtttatgtgacgtctgatacatctttagggacgtccagcgcgtggcatccatgtaccattcaatacgatgctgtgaaatcatgaccatggcagcgacagcctctcagactggtcgctatgaagcgttacaccgtaactcagcaatggtgctaaccgacatagggtcaatacatcattgtctatataaaggctcgcacatctctggaaggtgtccttcgtaaccgtagtatttagtaggaacgatcgaggcgccggtgagcatgtggcacgaggtaacggncccacaacttccgcttcatttcgagacggacgccggcaattgcttagacccaattgcatgcgcacgtcgctcattttggaccacactgggttcctgtccgtgccaggggatcgcgtcatctagtactttcccattgcctctagccgcttccaaactatacaatccatgtctgacgctcacgaactgtttggcacgcgttggaagaagcacttgcaggacgctcaacacgcattgtagagcaattcctcggccagcatggtggggcacttcttgtagagaactaacccaaacttgcgaaaccacccttggacttcattccgaggctaacccgcctgtgaacgcctgggccacatatgactgatctccttggccgcgcttggggcttgtgggcgaccttgctcactgtggcaagtggctactggtccaggaccgcgccgatgcgatacccggtgggcccaaacgcggggcgaacagcgggggcaagaccaactgagtttggacgtggctacttcattattaccggcacttggcgacagggtggcccacgtaacacgggacgcacccggaggggagaccctaaggggggtcccacacgaccccagagcactctttgccctaggggtggccttgacactactggatggcccgcgcaacgcctatgatgattggtttcgacgggtcgccattccaattgccccgaaaaaggggagggaaagccacatgagaggcccccgacaggggcgtgtggttatatggagacagcccgtgaggagaaacgcttaccgccgcatatatcacgagcagaaggagccactgttgtggggttcatcgcgtcggtgggacattgctccgtcacaacgatcacccagttatgcggttcacacttcaacagatacaacaggggcttacatattggatttcacaccatattgggcgcgcaccacatcttcacgacggcgagtcagcagaccaatctcacgaggatactgatcggctggggggctaggacaaccggtgaccccccaaacgggcttgtcgccaccaagcgtgggcggacgtgttatggctcccctcgtggtggcggggagcacaacgatgaagcagcaatcgaagtgaggactagcacgccgcacaaacgtggtgtgccaaacagatggcacctccatctgagcggtacgcgtaaatagcagccccaccctgtgggggcaggacaaagcgcgcgcagctcacaaaacacagcgcacagcgcccgagcggaacccagacagcaccaaatacgaggagcacccccacgacctagactagganagtgagcggcgctatcatccctagacagcaggcaagcaagagaggaaagaaccaagcagcaggctcacagcgagacgataaaacagagccgacgaccaccgcacgaaaggtgtcaacacgaacacaagccagacaacacacagagacgcgtcacct

SEQ ID NO: 523842 - DNA, 394 bp, Homo sapiens
  misc_feature (378)..(378): n is a, c, g, or t
aataggcgcaaagagagagggttttttcccccctgtagatctcggggtgtttgagaactaaaattcagttagggagggaagcaaggccaactagactagcacgagggcctagctgggaccctcccgagtccaggcactcacccgcccagctatacggccataaggcaatacgcctacctaccaaccaggctaccctaggtaaaaaggcggggcatactagtagctagcggtcaggaacagggacgggtaaggtggtagcaaccaggggcaagaacacgtcgaaggctagggaaatagttttcaaaagccaaagtaagaggtgtactagcttccaactaggaaactagtgaaggaaccctgtaataaccccaggacgtnaggggagtcccgagca

SEQ ID NO: 523843 - DNA, 142 bp, Homo sapiens
tagctggccacatctggaagcacacaaagtgtctcctcggtaactataacataatgtgtgcatgccattgttgtctgttcttcttcactattgtcaaaggaagctttctggctctccaacgatgtctgtccgaaaagaacaa

SEQ ID NO: 523844 - DNA, 281 bp, Homo sapiens
  misc_feature (53)..(53): n is a, c, g, or t
  misc_feature (91)..(91): n is a, c, g, or t
ggctgctgcgcccgcggtccccagtgccccgagtgcccgcgccgcagcggagntgggacccagccctaggagaacccaggcgccggccggngacgccgcggagagagccactcccgcccacgtcccatttcgcccctcgcgtccggagtccccgtggccaggtgtgtgtctggggaagagacttacagaagtggagttgctgagtcaaagatctaaccatgagctaccctggctatcccccgcccccaggtggctacccaccagctgcaccaggtggtggt

SEQ ID NO: 523845 - DNA, 1378 bp, Homo sapiens
  misc_feature (1026)..(1026): n is a, c, g, or t
  misc_feature (1378)..(1378): n is a, c, g, or t
gcagtggccctggtcatggcgagtgccgcgcgggtccaccatggtccacggacgagctggcaccaagctgagccggctggctgcagatggagggcgagggcggcggcgagtaccccgtgagcatcccgtggcttgaactggggcatgctggctggctgtgctggctgggtggtgcaacccgacgaggctggcctgaggcgcttggtgctagcgcgggacttgcgagcttgagctgccaagcttgcttgcgggctgcgcaagacctcagaccagtggcatcggcgagcccccagtcgcccagctcgccggcggtcgttcaagccaccttacaacctgagtttcaaaggaagttctcccagtgaagccagattcaagggaccatttgggaggaaggcatgttcaaggcccaggtacttgaattgcccggtggccggggaagcgggcttttcgattcaggaacccctttgattttgggacaggcttaaagaaacctttccgatttgtatttgggaaggaaagcaccttttgggaggggcctcacctttccaagaatcccccgaagccttttgggaggccctttggaagatacgaaccaatttgcattccaacagcgggaacgggctttggcgcactttgcgaggaggcacaccgtttttgggaagccagcaggcccatcatacgggcccgtttagacaggcggccctttttcccccgtgagaggcaacgaggtttttcccgcgtttccccattttagaaacgttacagtttaccccccgagaccacaacaggggccggtagcagcatcgggagccccacgcagagagagaggaaactagcccattttttcccacaaagagcggaaacgcggctagcccgaggcgccagcgagggacgaccctttcggttatccaccagggttttcgcactttggatgggccagcaccatgggaccagagtttccatttccatttcgagcagcacacttccacagagaaccgagggttttcgtttcccccaaaagtagtntcaggacgccggggagtatgcgttccccacgcacacgggagtaggagtgggttctcccccacacaatgacgaaagcagccttatcactcattatatctcagaaaacaggggcggcaccaacaaaagggagggttcacccacaagtgtggggtgcgcccagtttcccataggacgccggggttcggctattcccccaaaagaacgaccgatgggcattttctatcacggagacggaggagcagtggcggagcaaggacttctcaacaacaagggtggcgcacaagggaatacgtaccacatgaggacgcagcggtcggaaacaactcaggcggggataccacggcgacacgtn

SEQ ID NO: 523846 - DNA, 846 bp, Homo sapiens
agagtcctagggatggcccaggggaaaaagggggccgcgaggtctaaaaggttggcctgccaacgcaggggggtcccccagggcacaaggtcaaaggcccgccggccccaccactggggagacccgcgtggtgtgctcgagaagcgccagaaatatagctgggcggttggttggagcaactccctagaacatcacccacgaacctgtggggggcgctaagacaccgagagaattcgtttgacacccccgggaggcggggggttcccgctaaagcccggacgaccggcttttttgccccccacacttctggggccacccacaaatgtgaagctcccgcttctccccacaaaaaaaagtaggttccgcacattcgtaccacacgagtatttttggacaccacaccacaaggcttttgtgttttggtgaattatagaaatgagcttttcacggaaattgacccaaccccccgttggtaacaccgctgtcctcgggctaatttagacgaagatttcacttttccgcgcacaccacccctgttgcacctcccacatcctctatgtgccacgccctatgcccatatataagattgttctattgcaccctgatacactttatggagtgcctccacacccccagatagtggaatttatatgaaagggtgtgaaaagtatttctttaactaactatagataggttaggttaaaaccttgcatctataaatgagccttttcatctgtccaaagctatgggtttttttaaaaggttcaccatatttagatctatcccccctggttttttattgtttcacccaccccctaaagtgaatattggttttaggactgccca

SEQ ID NO: 523847 - DNA, 132 bp, Homo sapiens
agctcgtgggggctctttgcgtggctcgttgcgtggcccctcgcgtggctcgttgtgggctatttagagctttatggccctgaagtaggaaccagatgtcggatacagttcactttatgctacccccacgcg

SEQ ID NO: 523848 - DNA, 465 bp, Homo sapiens
cctatcttggcataattctcataaaacacacatgctctccctgccattcttgtcagactgatctctcaaaccccagcaccttctacaaaacaacgactcccttccttcctaggcatagttggtgcagtcagaattcttacacaagagccaggaccgcaccctgtagcctttctgtccaaacaacttgaccttactgttttagcctagccctcgtgtctgcgtgcagcggctgccgctgctttaataccgttgagaagcttaagcttctcaacggagggtccccctcaccactctatgaggggccattattcatacacctacaaaggacaagccctgaagaggggcaggaaaagaatgtgcccttcttgagtgtgggtgtgtatggaaatgtgtacaaccatggcccacaggatccaggtaatccaaacaagaagcagagcacgcgttgagaagcttgggtaccga

SEQ ID NO: 523849 - DNA, 425 bp, Homo sapiens
  misc_feature (28)..(28): n is a, c, g, or t
  misc_feature (82)..(82): n is a, c, g, or t
  misc_feature (90)..(90): n is a, c, g, or t
  misc_feature (108)..(108): n is a, c, g, or t
  misc_feature (126)..(126): n is a, c, g, or t
  misc_feature (199)..(199): n is a, c, g, or t
  misc_feature (205)..(206): n is a, c, g, or t
  misc_feature (245)..(245): n is a, c, g, or t
  misc_feature (260)..(260): n is a, c, g, or t
  misc_feature (268)..(268): n is a, c, g, or t
  misc_feature (289)..(289): n is a, c, g, or t
  misc_feature (348)..(348): n is a, c, g, or t
  misc_feature (356)..(357): n is a, c, g, or t
  misc_feature (359)..(359): n is a, c, g, or t
  misc_feature (364)..(364): n is a, c, g, or t
  misc_feature (381)..(381): n is a, c, g, or t
  misc_feature (390)..(390): n is a, c, g, or t
  misc_feature (408)..(408): n is a, c, g, or t
gtttgagcatcctccatccaagacaganaggaaagaaggaagggaaaggagaattataaagactatacacagtacatttcanagaaaaanattagaaaagataatttnagacaattacaaaatganattttgttaatgcaaattaataaatttcaggacattttattgaggatttaataacatttccaatatacatttnattgtnnataatatattatgctgtcactttacatattttgtctaanagcaaatatcatttntccttttnattttactgttttcacattanagttaattggctcagagacaaagttcatcaaattacaataatcactaacagaataagtnacaattanntntctgntgggtatcattccagtnacttctgtntcctttacaaggtttatnttttcaaaagagcttta

SEQ ID NO: 523850 - DNA, 175 bp, Homo sapiens
  misc_feature (30)..(30): n is a, c, g, or t
  misc_feature (40)..(40): n is a, c, g, or t
  misc_feature (56)..(56): n is a, c, g, or t
  misc_feature (144)..(144): n is a, c, g, or t
  misc_feature (172)..(172): n is a, c, g, or t
cacaagttagtactaaaaaaattatgttgnatatgctctnatacaacatgcttttncccttcatgaacaatttgtgttttactgagaagagtcattgtttatggtagacattagactacagatgaatatgcactttaaacactnttagtttgctttcttaatttaatatctnctg

SEQ ID NO: 523851 - DNA, 423 bp, Homo sapiens
  misc_feature (92)..(92): n is a, c, g, or t
  misc_feature (114)..(114): n is a, c, g, or t
  misc_feature (116)..(116): n is a, c, g, or t
  misc_feature (119)..(119): n is a, c, g, or t
  misc_feature (135)..(135): n is a, c, g, or t
  misc_feature (140)..(140): n is a, c, g, or t
  misc_feature (148)..(148): n is a, c, g, or t
  misc_feature (153)..(153): n is a, c, g, or t
  misc_feature (156)..(156): n is a, c, g, or t
  misc_feature (161)..(161): n is a, c, g, or t
  misc_feature (165)..(165): n is a, c, g, or t
  misc_feature (171)..(171): n is a, c, g, or t
  misc_feature (184)..(184): n is a, c, g, or t
  misc_feature (187)..(188): n is a, c, g, or t
  misc_feature (191)..(192): n is a, c, g, or t
  misc_feature (194)..(194): n is a, c, g, or t
  misc_feature (197)..(197): n is a, c, g, or t
  misc_feature (201)..(201): n is a, c, g, or t
  misc_feature (208)..(209): n is a, c, g, or t
  misc_feature (214)..(215): n is a, c, g, or t
  misc_feature (220)..(221): n is a, c, g, or t
  misc_feature (275)..(275): n is a, c, g, or t
tgggaaaatgtggaagcaaaataaaggcaatcgattggttttcaatactaattgttttttgggggtaggtatcttcttagaaagtccctagncacctaattatatgttagtagncngcntgtgattggctggggntgtcntatttctnacatnagnatttnccanaaatgntccaagttaagtntgnntanncntgnatgnagtatgnncccgnnaagtnntgctgtgttgtagtttaagcaaagttaaagctatttctaagggccaggtggttntgtttgctcaggatccggccagtctccatttccattttcctttacctattcccctctcctttgtcatgccactcagtaagctgagagtatgatcacatggcttaacgttactctttagttattactgttgaaatggtggtcacaccgg

SEQ ID NO: 523852 - DNA, 324 bp, Homo sapiens
  misc_feature (17)..(17): n is a, c, g, or t
cccaaccgccaacaggnccaggacggacccaaagccagacgaatggactccaaccccagaatgatcgtgccgacagacggacggactcacgaacaataggtggcctccccaatttgcgcacagaactcagaatatttgccttaggcccggacctcccgcacccaaagagacctcaaccactttgtgccctagccccgctctctccagtagccgcgaccgcgagccctccactatctgcgactgtgcgtgcctccaacgattctccccattcaccccaccctcgaccgcccaccgatcatcgatgcattcgctgacccccgtaca

SEQ ID NO: 523853 - DNA, 117 bp, Homo sapiens
atcaggatccgagcattcggtatctagtattgtgacatgcgtaatcctatatgaggtcgtagcctctcagaaccgtaaggatgctgaagcctggttcaccagccggactgaagaatt

SEQ ID NO: 523854 - DNA, 476 bp, Homo sapiens
agagtgagctgatcaggaagtataatttatatatcacattgaattatgcagtggtgatgaatttggtgttaccccctccttctggttttacatcatgaggatcagttagctgctgacagaaaagtcatcttgtgtcttttgtaaatttgaatttttttttaaatctattaggaactggaaaacagcaagtatggttgatttctcatatattcaagggtagttcactgttctataagagtcacttgctgaacacgtgaatttagcaacatataagacaccgtaggggaaatacagaggctagatttcgtgcaagcgcactggtcacaaatttcatcgaagcagtcaacatgtaaatttctgttgtaaagacaccttatttaatataatcgattcattaacattgaagtcatgaccaagaagactgtaactcatgcctgaatgaagcttatctgacacataagcttcataaggcacac

SEQ ID NO: 523855 - DNA, 332 bp, Homo sapiens
atgatggcttgggcagatgttatgcaagttatttgcatgtatatggactttctttttttggagacaagtctctctctgtcgcccaggctgagtccagtggcacaatctcggtcactgcacctccgctcccaggttcaagcggttctctgcctcagcctcccgagtggctgggattacaggcgcctaccacatgcccggctaatttttgtatttttagtaaagacggggtttcaccatgttgttcaggctggtcttgaactactgacctcatgatttacccgccttggcctcccaaagtgctgggattacaggcgtgagccattgcactccgg

SEQ ID NO: 523856 - DNA, 215 bp, Homo sapiens
acccctaattggctcttcgatgacgctaagagagtcttagaggacggcgactaaccttacctggactcgacatccatgaccgttttgagagaggagaacgggccaccgctacccgcgagacagttgctggatgtatgccagtgagcactcccacccagaatgacgtacaagcatcagctagcagtcagaccagcagccaagcaggctggtccctg

SEQ ID NO: 523857 - DNA, 714 bp, Homo sapiens
gcctttcctttcagcggagcggcgggggcgagatggcagtgtaaatatccaagaagaggaagttgtcgtctgatgagcatcttcaagactgaacgtcgaagtgatgtcttcttcactcgggagctggccttgaagcatggctactcttggagctgcatggtgcgagattacaccaacgccaggtagtcgtagcatcgattatcttagccacagatgaacacagagaactgttctctgcgtgagaagggccggcggtgttcgggaactgactgcgtgtatgttcagcaagaggtttggctttccagagggcagtgtacgcagctttatgctgtaaacaagtgtggccactagaggtctcgtgtgccattgcccaggcatgagtctctgcgttacaaactcctacggagggtcttgctgtgcgggagggactgctatggtgtgctgcggttcatcactggagagtggggccaaaggttgcgacgtcgtggtcgtctggtgaaactccgaggacagagggctaaatccatgaagtattgtggatggtctgatgatccacagtggagaccctgttaactactacgttgacactgttgtgcgccacgtgttgctgcagacagggtgtgctgggcatcactgtgaagatcaatgctgccgtggacccatattggtaagattggcctaagaagacccctgcctgaaccagtgagcattgtg

SEQ ID NO: 523858 - DNA, 129 bp, Homo sapiens
cctgcgtgttatcgtctatggatgtacaactgccagacaaacagagaaaaaagaactgaaagacacggagttcccgattgctggctcatgtggttaacgatatcctactgtggttgcggcgttaatgac

SEQ ID NO: 523859 - DNA, 972 bp, Homo sapiens
  misc_feature (21)..(21): n is a, c, g, or t
  misc_feature (863)..(863): n is a, c, g, or t
  misc_feature (885)..(885): n is a, c, g, or t
cgctctctcatacaacccccncccccccgtcagggtcactgtgatcctgagtttcaagaactgactcagtggcagaagaaacttcatcgaggccaagcacattcaccagcaagtcaaaattttctgggccaagcaagaacaaaaagtgaaatgcaaaatggaggaccatgtagtacctcgagtcaacatgaaaattccatcatgttagccatagctacgacgtctatttcgcccttcctacgccaacttacctgcgccccgggttcttggtacagctgaacctctctgtccagctatacctcaacaaacaccccgcacctccgccataaggccacccccttatactccagccccgccaccgccgagcccgtccacccgccggagaatcaaaatccaaccgcaattacctacataatcgtcccccacccgcaatctctctactcctcactcaatactactccccacctacaaccccctataacatacccacaattaccccccttaacgcgcgactcccccacgacgacgacgtaccccgcccgccatattatataatcaccaccaccaaccacactccaccttaacctccacgcctcgccaattgcttgctcgtccgtccctttcattttttctccccctttgcctagttgctccccaagctcaacctcctccccaccgcctcattactatatcaccctcctctcctccacatatcgatatacacaactccgactaccccttccaccgaacccatatacctcctgtcgcattccgttgacagaaactaccgctcacccacccccctcaccgcatgaaccccatataactccccgccatttccaccccactataacacctccccnccccgctcccacccttctcacnacactcatactccggacgaaacgcccactcacccgatctcctacccactcacacttcccgtcccacttgtcgatcatcgccatcttt

SEQ ID NO: 523860 - DNA, 344 bp, Homo sapiens
gaagagtccggctgttaaacgtttaatgaaagaagcggcagaattgaaagatccaacagatcattaccatgcgcacctttagaaggaaaactttttggattggaattcaagggtagaggggcccccaaatcccgttttgaatggaggagtttataaggggcggatagtattgcaacaagagtatcccatgaaaccaccaagcattattctcctaacggctaatggtcgatttgaagtgggcaagaaatctgtttgagcatctcaggccatcatactgaaacttggcagcctccgtggagtataggacagcattattagccatcattgggttatgccaacaaagg

SEQ ID NO: 523861 - DNA, 287 bp, Homo sapiens
  misc_feature (7)..(7): n is a, c, g, or t
  misc_feature (216)..(216): n is a, c, g, or t
tagctgnaataacaagcatgcctggctagtttttgtattgttagtataaatgaggtttcgcggggttggtctggttggtctcgaacaactgacctcaagtgatccacccatctcagcctcccaaagtaatgggattacaggcatgagctaccacacccggccttcgtttttcttttgacacagtgttttgctctgtcacccaggctggagtgcagnggtgcagtcatagctcactgcagcctcaaagtcctgagttcaagcaatcctcttgcctcagcaggctgcat

SEQ ID NO: 523862 - DNA, 527 bp, Homo sapiens
agcattcaggaatgtacagataaaacctatctttcaaagaatatcaaatctctttaccagcaacaagaaataatataatggtaacattcttaaaaggaccttaaaaggagatatttaatttctcaacatatattttggaaaaccataacttggctagcatatatacgagttagatctaaccggcaaggttaatttctcatttcaaacacttaacatcgtcatggcaagatgatcaaacctcacccaagcacacaccatcctccaacagctgaaattcattcctaacaagacatttttttttaatggtagtagtttttcaagtaaaattttagagttctggagattattggcgtaacaaggtaaatgtacttaacactgctgaaccacacacacaaaaagggttaagatgatcaatattatagtatgtccattttaagacaaccaaaatttttttaaatcctaatatgtgtaaatatccttatgatttttaaataaatcctctcaatgggaaaaaaataacattttaa

SEQ ID NO: 523863 - DNA, 291 bp, Homo sapiens
aaaaaaaggggggtcccccccccgcgcgggggggggccctcttttcgcgcggggggggggggtgggggggggtttttttttgcagcaccccgcgggggttccccctttttttttcccgggggggggggcccctgggggggtttttttttttaggggggggggggggggggggcccccccccccccctttttcccccggcggttttttccaaagcccccgcgggggtttttttttttttggggggggtcccctttttggggtcccccgggttttttttttttttttttttta

SEQ ID NO: 523864 - DNA, 665 bp, Homo sapiens
aaattaaccggatggcagtgaattaaggcctgcgagagggatacggtgccaaggtctcctgctggtcagggatagaagccaggtcctcatagaaggttcggagctttgagggttgctcatggtcatagtctgcccttaatcctatcccacggaacagaaacttgatgtccaagtcagtcattgggagagagctgatccacagttctaggagagctatttatgggctgtatacgtacctggggtacttccatctccaggggttcagtttttgcggccacgcagactccgggcagcagttccccacacttgcattgaccacactggctggcggcataaactgaccttagacaaaaacatatcgagagcaaaaagtggtaccacaatgtgcacatgacttgctgatgcaatgagaactcacaaggtcagtagaacaagaaacaaaaagtgaaccctgacccagtgtgaacttccagccaatcagtaattcccaaaactaacgcaataagaaataaggtaccctgctactgttactaattatataatttctcccacaaatcatagtttaaaaaccttgtttgctgaagattaacaaaacttataataacactgggggtaatccacgaaagggtaccggccgatccgatctagctgcttacaaaggaaag

SEQ ID NO: 523865 - DNA, 743 bp, Homo sapiens
tgagccaggctccatgaggattggtagagggacttcctttggcagcgtcgtagtttagaatcgggggtataatatccggcttgttacacgaggtatattgcactggtgctgatggtttggagtatgaacggatccgtccttcaggtaatgagcctagtacgcccataggtagtgttcaacccgggccgcccttcctccttgccgcccgtcttgtattcccccagtgtctgttgtgtccccagaccattgatctttttcctctatgttgctaagactggtagaaaggctggagattgtctggccaacccatctttgccaacccatagccgggagaacttactttggaaatgaagccagacctaagaagaaacaccagattaaaggagaccaaataagtttgactttgtaccagctggaaacccagccatagctggaaatgagccactgaaggccagatttaatggggtttgtcccattgtgaacccagatgaccccatggccagacgtccacagatattgtattggccagaattcctccttttctttatttaaaatggtacattttggcccagagcaaagtggttcacacccgtaatcccaagaactttgggaggccgaggcgccctgatcaccccaggtcagaaattcgagaaccgcctggcccaccttggcgaaaccccctctctactaaaaaataccaacccttagctggctgcggtggccctttctacccgctttttgtc

SEQ ID NO: 523866 - DNA, 885 bp, Homo sapiens
  misc_feature (675)..(675): n is a, c, g, or t
  misc_feature (794)..(794): n is a, c, g, or t
gcacatgtaataaaaatgtaatatggagagataaattaggatgagggaaaatgggaatagaggtggaaagtcaagaccgcataaaagggaaacatggttacagtttgatggtgagagctcaaatttactggtaatatttcatgagtacctattgttgagcatttgtaggaaatctgtggggatagtaatctaaaacaaatttcattagtaattaaggaaaagtaatttaaacaataaattttagccatttatgtttgtaaaactgtcaagaatgagaatgtgaatatatgtagtacctaagacagtttaaagccagttttattcttatgtgcaatcaaatttgattaaacatatcaaatccatatatatatatatatatatatatatatatgcatgcatatatagctatgtgtatctaggtctatctctgtattatgaagttgagctgataatctaggtaaacaacgagtgctccaagggtacttggtattggaatatcaacttgttatatttgacagaataattggggttgctttggagtttatagtccagaagagattggaagattaatgctcctttgataaccttgtaacgggagatataatatgggctcaagtccaggggagatagtcatgtgccggtgacagtgggttataggagtgggacaagtgagangactctgtgttacaacccagttcacttaagtgagtggcccccggggtaagtggctttgacgccagcacctggttttgtgtgagacagttggcagaggccgggcgcgcgtgttgtggtgngcgccactgccgaggttttcttgcggtagcggggggtctcggtttccgtcccctgtgggttattgggccggtttttgccggcggcagtaca

SEQ ID NO: 523867 - DNA, 279 bp, Homo sapiens
gagtcagggacgtactctgtcatccaggccggagagcagtgatggcatcacggctccctgcagccctgaacacctggattcgggtgatcctcctgcctcagcctcctgagtagctaagactacaggcacactgtaatttttttttcctttagagacaaggtgtcactatgttgcccaggctggtcttgagcttttgggctcaagcagtcctcctgtcttgtcctcccaaagtgctgggactgcgggtttgatccactgtgcttagccaggatagattaa

SEQ ID NO: 523868 - DNA, 660 bp, Homo sapiens
  misc_feature (660)..(660): n is a, c, g, or t
agccaggcatggaattatttatttatttatttagtgagatggagtcttgctctgttgcccgggctgaggtgcggtggcgcagtctcggctcactgcagcccctgcctcccgggttcgggtgattctcctgcctcggcctcccaagtggctgggactgcaggcgcccaccaccacacccggctaattgttgtgtttttttggtatttttacgtggagacggggtttcactgtgttggccggggtggtctcggaatcctgacctcgggtggtcctcccgctttggcctcccagagcgctgggattgcaggcgtgagccgccatgcccagcccttattctattcattgtgatttctcttttaaaataaacataaattttaaaaattggatggaaattttttaaacaaacttttcactttggagatgatcggattcggtagagcaggaaagaacaagtaccctagagagtatgttctgggctcccggctcctcttccgggggttgaagatgaattgccgtgggccttggtaaaagaggagagatgttgcagaattgcagttggcagagatgtgcttgggatcagggtggcaaggatcacaaagaacagaggatgagggtgggtgtgggtgggtcatacctgtgggcccagccacttgggcgggn

SEQ ID NO: 523869 - DNA, 141 bp, Homo sapiens
catcggacacaacacaaccatatcaggtgtactgtagccccttgatggaagctttctagaacagactttggaacgtgtgcgtagatagtgagaacggggagcagcacctgtagaaagagctgatttcgtattccatggtct

SEQ ID NO: 523870 - DNA, 588 bp, Homo sapiens
ggtgtttcaagtaccacagtaaagctccatggtagtctcaatgtacgggctatggcacatagaatgcaggtaggtaggatttaagaaattactggccgtgtgtattgaatcaggcctgtaatcccagcacttcgagaggctgaggcagacagatggcctgagctcaagagttcgagatcagcctgagcaacatggcaaaactctgtctctacaaaaaatataaaaatcagccaggtatgttggtgtgcacctgtagtcccagctactggggaggttgaggcaggaggattgcttgagcccagaagatgcaggttgcagtgagccgagatcatgccactgcacttcagcctgggcgacagactggactctgtctcgggaacaaacaaaaaaaaataagggaaagagtcgaaaaatattccctgcggagatgacaaggggacactacgggttacggatcacaatgtccgtatcctgggtgaatctgtttccggggaattcacacatgctatgtgaaagatatagcatataaataatactatcattgctcaatagggatccagaggaggctatagagggtgaaataaagaa

SEQ ID NO: 523871 - DNA, 958 bp, Homo sapiens
ggcgcagctttccccgatggcccactgcgtgtaccttggttcagctgtccatttcctgtgaccatctcattgacaatggacatcgcgctccaagtctgacccactcgtgcgtccttttacaggatgtgggagggggcgagctgcggctgtaggcttggccggactgatagcgggtgctggaactgcttcagagccctgagttctccaagactcgtatcagcttgagctaccgcgtttagtagacagtccagaaagctacgcatttgggcaatctcatgcactatatcacaacgaagacgccagagcttgagggcattgatcgcacttcctgacgtggtgtgccttgatgttgttcccatagcgaccagatccgtcgtccgagcccatggtgacctgactacttcgcccttgtatagcctagatagaccttgggatacaatccttggctgaggccgtggtggtagccagtcaacggctacttcaggctgcagggacatctacacacgtgcaccacatcgttgcttaggtcaagccattggaagcgtagacgggccaggaaatccgtaggactaacgcacacggcacttcctgtggcaatagaatcagcaatccattcttcgtgtgaggttccttgccgcgcagtggctgaatggcgagagactggccgacctgagatgtcacagaatcgtgaagcgtcctagtacaaagaagcaaacgctgatagccctagcgattggaccaggcgtcttcttctagtcccgcgatctacgagcatttgtcctggtgggtgggggagacccccagtcacaagctcattccagggtgccgaatagctcccgacttattgaccaggtgacggggtccacatggatctcattcgagttaccttccacacccaggcttgggccccagctgccaggccaagtccccgggcttgagtttggaattgcattccatc

SEQ ID NO: 523872 - DNA, 242 bp, Homo sapiens
ggatcttaagaggttgcggtgggctgacggtcgtgctactgcaacctctgcctcccgagctcaagcgattctcctgcctcagcctccccagcagctgggaccacaggcacgcgccaccacgcccggctaacttttgtgtaggtatgtgtgtatatgtgtgtgtgtgtgtgtgtgtgtatgtatatatatatatataaatatctttcccaatatgccccgttgacagtgtataaattccagac

SEQ ID NO: 523873 - DNA, 222 bp, Homo sapiens
agctcgtggagaccatggctgcaggggatggggacttccagaagtgggcgtctgtggtggtgccttctggacaggaacagaaatacacctgccatgtgcagcatgagggtctgccaaagccctcaccctgagatgggaagcgtcttcccagcccaacatccccatcgtgggcatcattgctgggctggttctctttggagctgtgatcgctggagctgtggg

SEQ ID NO: 523874 - DNA, 815 bp, Homo sapiens
ggtcatggacatcgcagcgacgcagaccccagcaggttcagtcccgtgctgccactcagctgtccagctgggtgtctggagggaagagggcagaggagggtcatgtcccttcagcctgggggaggggcccagtgatgctccacgtggctttttcccaacagggagcaacgagggaaggattggtgcgagaaaacaatggacgaggggacctgctgaaggaaaacagggaggaacgtgagcggtttgagtcagctctgcatagtcacggtggttctgtgctctcttatttagccagtgcgcttaagggacagatactatcagcagtcctaacgtttgggaagaggcctttgagccagtgtcatctgagcgtctcctccagtagcgtctgaaagctgtggacatccaatggctcaggattccttctcccctggttctgaggatccctgggtcttctgagactggtcaggagcagggatggtggggccagtggttgtgtgaaagcagggaggggcatgtcctcctggactacgtgtgatcgccccttataatcggttctcgaggaggttcagtgagtaggagatgctgcttgttcgtgatgaggctgctgcaggggctccatgggagctgtgctgatcccggggggcacagaagggtggtgacgtgtgagcatagtctagttctcactcgccactggcttagtctaactactaacttcagtccggcaaccagtgcactcctggactcttgtcgcactgtgctctgagggagaggaccttggggagaacctgggactcaggatacgccaatcctgcccc

SEQ ID NO: 523875 - DNA, 507 bp, Homo sapiens
  misc_feature (13)..(13): n is a, c, g, or t
cagtctgcaggcntacaggctgtacaactcctccctgccgggggacagttgtccggacctcaagctgcatcctgccacgacaaggaaggacgtctccaggattgagctggccagcgaggacggggtgtctgtctcctgtgacgtgcccaccggcctctgcagcctgactctgggcctctggcagcacggcatatccgctggccttctgggcaccaatgacaacgaagcaggcaatgagctgatgttgccggatggctctatggcccgcagcctggaggagctcagcctggcctggcaggtgggtggtgactgcagggccactgagaagcctcagcaggagcaggcctgcccgggacagctccccgcctgctgggccttcttcgagggcccccactccagcttgagggactgcttccgggtggtagaccctacaccattcctcagcctgtgtgtgcaggtcccctgtggcacccaggagctccagcctgcctgcaacctggcggccgc

SEQ ID NO: 523876 - DNA, 391 bp, Homo sapiens
  misc_feature (39)..(39): n is a, c, g, or t
ttttttatttttcagaaattaaaaaaaaaatcccactcncaaaattaccctttacccccattcctcccaacaagaagtacccatttttacccttgtaatatgttggtttccagatttatgtttatgctttaaaaaattaggcagccaacatattggcccatggccccttttttcattggttttaacccatgttttttcccatttaaacaggagcaatttttgcattcagttatgggatcctataaatccctagtataatggcagcaaaaaaaattactatggttgtaacccttttttcgccccttgctcctcaaaacccttaaagtttaaaatttattgtggaaagtttttgaaatgcagaccggtgaaaataaacaaattcccagtggta

SEQ ID NO: 523877 - DNA, 142 bp, Homo sapiens
tcacctatagtagaaaaaccgactactgatagagaagatgttagataaagtacaaacatggcatttaccacacttgtcatctatcagaatacaaaaattatctatgtcagggtcacggcaataagcaacatagcatattgct

SEQ ID NO: 523878 - DNA, 703 bp, Homo sapiens
atttgttatttcttgtctctttgtttagtctttcttgttctcatctgtctttatctgttgcattgtctgatgttgaatcattcctttctccttttattggtcatgggcctctgcaatgtcttgctctctgtttattatgtttttattctctggtgatgtttgttttctgttcagtctttggcattcctgcctgctgggagagtttgctttctcatggtatccaggcatcagcctttgtcttcccttcctactccctatgacttccatccacccatggaccaggctgctctacgtcctatactgtgtgaccttgggcaagttgcttcccctttctgggttccctccatcatgtaaaatgtggaccctttcagtacttaccccctatgatgttattgtgaggattacatgagttaatactggcaaagtgcttagaacagggtctggcacatggcagctacaatatcagtatttgttggccgcccccggcggctcacacctgtaatcccagcactttgggaggcacaaggcaggaggatcacttgaggtcagagtttaacacaagcctggccaatagggtaaaaccctgtctctacagaaaatacaaaaattagccgggtgcgctgcacagcctgtagtctcagctactcgagaggctgaggcaggaggatcgcagaacatggagatagagctgggttgattgata

SEQ ID NO: 523879 - DNA, 899 bp, Homo sapiens
  misc_feature (74)..(74): n is a, c, g, or t
  misc_feature (92)..(92): n is a, c, g, or t
  misc_feature (119)..(119): n is a, c, g, or t
  misc_feature (127)..(127): n is a, c, g, or t
  misc_feature (140)..(141): n is a, c, g, or t
  misc_feature (145)..(145): n is a, c, g, or t
  misc_feature (148)..(148): n is a, c, g, or t
  misc_feature (154)..(154): n is a, c, g, or t
  misc_feature (168)..(168): n is a, c, g, or t
  misc_feature (176)..(176): n is a, c, g, or t
  misc_feature (203)..(203): n is a, c, g, or t
  misc_feature (215)..(216): n is a, c, g, or t
gtgagctagagggtgaagctggcggagcaggaggatgggcgagcagtctgaatgccagaatggataaccgtttngctacagcatttgtaatngcttgtgtgcttagcctcatttccacnatctatantggcacctccatnngcanagncttctnggtatgaatatcgnagtccagntcaagaaaattccagtgattggaatanaagcatctgggnntgaattcattagtgatgaggcagatgaaacgacttataatgatgcactttttcgatacaattggcacagtgggatgtggacgaccggtgtatcaccatacccaaaaacatgcttggtatagcccaccagaaaggacagagtcatttgactgtggtcaccaaaatgtgtgagcttccacagtaactgagcagttcatggcgaacttcgttgatcccggaaaccaaatagcgggatggatctccttaggaccctatctttggcgtgcccgttccttatacctttgtgagtaacggtggactgtgccttggggcttgatcggacttgtgcttgcttttgccgaagttatattccaccatttgcaagggacttctccatctccttgcaggtcttgtgtacccggggctcagtaagttggtcgtgttggtggaagtgaatatctccccagacatatagctcctgaaacgtctcccggggacttggagtggacctctgctggttgtgctaggcccctcaagtacggtcgttcctacgtgctgtcaccacccgaaaggaccctaaagagcggtctgtggcgggagacagccgcacaatgcctattgtcacaaatagtgccacactagtgtatttagtgtacttgtagatctttcaccccaactcattggttgcgctcaatacagcacctc

SEQ ID NO: 523880 - DNA, 1027 bp, Homo sapiens
  misc_feature (1027)..(1027): n is a, c, g, or t
aacattcactgtggaaatatgatttcatttctttaggctacaaacctgtattactttactgaatgttaaggccatgtcatatattgggtagaaagatattgagatcccaattttgtacaagattgtgattgcttttatctaaaccttagacttaatcctttaaattttgtagctttaggctgcatctgcccgcatagtactattccatggcaaattaagaggttggaagtacctttaataatataaaacataatgatagtcaagtcttatacttctgttggcccttagtcttgaaaatagcagttgagaataaaattcatgtgttgccttgattatcagatagcttgaaatttatgttgtgcactataaagcttgaaaatatttgattactgtgatataaaaacaagtgtgatctttactgtatatgctggtttcttctaaatgttgatagaattgtggcattacatctacatttgtaagtcttatcatatcaaacaagccaggctttgtatgctgctaagtctgtgggtgcacaaagaaaacaccccttggaagggcaacagaaaagccggtggttgcatcaccccgttgcagtttctcacacacatctcttttctgattctgtgttcaaaaagaggctgacggataaaactgaatgcagttgccggagcaccagcttgtctgggccacagaatggtgcaggcccaagaacccaacatcaccagtgggccatggggaacggtgaagtatgggcaaataagaatccttcccttcccactttagtaagtgaagtcctcctcctttataattggaagaagaaaactgacacacaaacaagcctggagatccacccctatgagattagattttggcttgtaacagtgcgaaagtacgaataaacgatatgagtctttacaggtgtcaaaaaccattgactaaacaacgaccccaaatgcgaagaaaacgaacgacatgaaagagataagcgacgagcatagagagagcagacaacactacaagtaagagn

SEQ ID NO: 523881 - DNA, 206 bp, Homo sapiens
tgggggggggggggtttttttttgggtgcccctgggccccccccgggccccggggaaggggaaacctcaaaggttttaagcccccccggggggctttcccccccccccccggaaaggaaaaggggggggctttttttttaaaaggggggcccgggggggttttttaaaccggggggaaattttgggggaaaaaaaggttttgggga

SEQ ID NO: 523882 - DNA, 717 bp, Homo sapiens
atgagcccaataggcaaaattaagcccctaataaaattaagttaagccactcacatcactcgacactccccagccctatccaagtatctccggcatgatgaaagttgcgggctcacgtgcctgtgtgcgcctgctctgtaatcgcttccaaatcatccatcagggactatgtcctagccatgcagctagtcatccagaacgtgctcaaccgccgttgttcatcaatgcgcccacatcactcgagacgtaaattatggtctgatatcatcgcgctatccttcacgccagtggacgcctcaatattctttatctgcctcttcctacacaatcgggcgaggcctagtattaacggatcagttggctctactcagaaacctgaaacatcggcaattatcctctctgctttgaaactatagcgaagcagcctgtcataggctatgtcctcccggtgaggccaacatatcattctgaggggccagagtaattacaaaccttgctatccgtcatcccatacaatgggacagacctgagttcaatgaatctgagtgaggctagtcagatagacgagtcccagcctcacaggatgctttacctggtcacttcatcgttgcccttcattattgcagccctagcagcactcctacctcctattcttgcaacgaaacgggatcgaaacaatcccctaggaatcagctcccattcgataagatcagcttc

SEQ ID NO: 523883 - DNA, 530 bp, Homo sapiens
  misc_feature (1)..(1): n is a, c, g, or t
  misc_feature (465)..(465): n is a, c, g, or t
  misc_feature (511)..(511): n is a, c, g, or t
nctcatcaggttctctgtgctctctgagactcgttgactctccgattcaagtgcgagtgctagttttagactctcatggagctgttagtctgagttctgtcgaatcttctggtcttcaatcagatttgtgcatttccgcaaaataatcagtgggtcgcttcgtaaggactttgagctgatggaggcggggtaagactgcaagcactgcgggctgggcttggcgatagctgagaatcgtaggacaaaatgtgtaatgaggtgaaggaggaggccttacgttccttttcaccgccaatcatgagttatccaagctcagaaggactctcaaaatctgacctccattagcaagaacaaacaaacaaaaactgtctcactgatttagtatctaaaagaaatgtagccgtatactagtttttaaaaaggggaggggtgttgctaaaaatagtttaagagaatgactactcntaaaggtaccattaacacaaacgaatgtcgattatggattcttatngtaattactaaagcattcc

SEQ ID NO: 523884 - DNA, 1227 bp, Homo sapiens
  misc_feature (534)..(534): n is a, c, g, or t
ggtaaagatggcagcttcctagctgatttgcgcggaatgattatagaaggaggttcatgctatcgtccacaccgagtgagacctagtaggtaaagttgtgcatgtagctcgagcagctccattgaaaaggatgcatgcggaggaattaggaagctagctcaggttagcagcccatcgcgacgcgccgacaactctcatccattatcctgcacaggcgagctgcaacgaccgtggtcacgttaggtggcgacaggcccagcgtggtccagccgccatggatggtgagggtgaggccgacgcgatgttggctgatgattgggagcctcaatcacattctattgatgcctggacccatagatgtcctggtaagagtgtccccgccgtgcagactccgcctgcagggtccaagatttccgtggaccgatcaaaggggttccaattggtccaggatagacaggtgaattatcgggccttgggcacctttgctcgtggactggcaagattgtcatccttgtcgcaaagagcttggggagntcagatatgcgacatcggtgcatcgctatagatagcctagatcgtccccttcaaaatggtcgtcaccaagaaaggatgcatttgagcactgttccggtgtcggagcaataacacagagaatcgacaaaaaaggccgaacgaagcttttgtcaactttgtgattgtggtgtgtttggaaaccgaagtggatcatccgcggcccttgggcttgtttcgttgtgccactatgcacgcgtctcggtagcctccccgctgtagacctcgtggtaaggcattgcacttcttaatgcactctggggacgcaacggctcgtccatgtatccgacgcctttcaagtcttggcaacgtgaacttttatccaagcgcttcattcccttaggctagaaaaaacctagaggcttttcccgcgttccatcgaggaaggaaaccgggtgcaagtaatcgaatatcacccccagccccgattattggttgaggttccccgagaaaacgatcgcattttggtcattaaacacggccgggtcccaacgccttttggccaaggcccccaagttttcgttctctttggaactgggaggcccctagtgaatagaaaagattggtttcgcaagttgtgcccccattaatttttctttccttctggaacggttgggtttatacatttccaacaaattggggcacctgaggagagat

SEQ ID NO: 523885 - DNA, 1045 bp, Homo sapiens
ggagagtgtacctggatgcttctgggctcccgttggcatagcagctcttggctgatgtgcacagtctggctcccagctcaccctttttgtttagagtatgacaatagttgctaccgagtagggacttcgccaagtccaatatatcttctaggattcgaaaggtgcatttaccgccataaaaaaggcgaggaaaaacccaaggctctgctttagtgtcatcctcagccgtatcttacagcatcccccgtggtgcattgtagcgttggctagctagagtccagatcatccttaacaaagtcttttcacattttatgttctgttcagcattgtaagtcaggtcttccaaagaaggacagagcaatatggaagtatgtgacgcaaaagggggcaactcttctgttgtagccgttctcagtcagaaaggtcaccaaaaatcgatggaatcatgttccactgggcaagaattgacctttggtatgtatctgtggggtaaattattacgcgttccagatgcttgcaggcttcctgcatccaggagatgctgtgttccccgtgatgcatctggaacccaagctgcagcaggagatgcatggtgtcaggatgttccccacgtgacgctggaggaatatctacagcagtgatgccttgaaattttgtctgaattatgtgtcgtctagccttgcctccagaatcagaaagttcgaggattacttttagtactttggatttcttccccccttgtttgtaagaaagtaaggttttttattggacacagcctcctggcatggtttaccctggtgatagcaaaggagggcggggggcagaaaggtaccacgggggggcaaccctgaggaacccgtcttttgagtaagcggcgcattaagaggcgctatataaggccagggggccgattaaacggccgtgtggaaaaggttggggtttgagacaccacatccttgggggggccaagtgggacccccagaataaggcggataataatatgttggtggaaccgctctgttgggtcgtgtgataaacgactacg

SEQ ID NO: 523886 - DNA, 313 bp, Homo sapiens
ccccgagatgttactgagcttgaatcgtagtacgctgactcacactgtaatacctgccacgtctggacacgagggcgcggccaccgcgctggttttgcattttcaagagacgctccgaaccctcgcgcttctcctcggccaattcgcgaaaaacatgactcacgccctccagagccacatcgtcgcggttgaaatagaagccctgcgggaacagagaaggcgtgaacaatggttagccggagccaaggccgggcttgtggattctgccttccaactacacagttgggacaatagaaaggccaggcgcgtgcgc

SEQ ID NO: 523887 - DNA, 392 bp, Homo sapiens
  misc_feature (28)..(28): n is a, c, g, or t
  misc_feature (30)..(30): n is a, c, g, or t
tcgactccagctgaggctgccgaagacnangtgatcatggcgatgtttgagcagatgagagcgaacgtgggcaagttgctcaagggtatcgacaggtacaatcctgagaacttggctaccctggagcgatatgtggagacacaagccaaagagaatgcctatgatctggaggccaacctggcgtccctgaaactgtaccagttcaacccagccttcttccagaccacaagtcactgcccagattctgctgaaagccctcaccaacctgccccacaccgacttcactctgtgtaaatgtatgatcgaccaggcacatcaagaagagcggcccatccggcagatcttgtaccttcggggaccttgctggaagaccttgccacttttcaaagcct

SEQ ID NO: 523888 - DNA, 325 bp, Homo sapiens
cccagtttctctgaattccaccacaaaacgagaccctgaataagaggagcagtttccctgtgcatatagggggtgtgtcaacggtgaagctttttgggggaccggggaaaaacaaagttgcctgattccgcggcaggtgccacaggccccggatgtacacccggacaggggagtttgggtttaggataattcatccgtatacagtaaaacaatttcgccaataaagtacatgtcttcctaaggcaaatataaatacggtaacagacacttgatttaggatatagcttgatgttaaatatgtgcacctttacaaacctctcagata

SEQ ID NO: 523889 - DNA, 104 bp, Homo sapiens
tcccggagccttacctcggagccttacctcggaccttacctccggagccttacctccggagccttaacctcgctgcgatctattgaaagtcagccctcgacaca

SEQ ID NO: 523890 - DNA, 186 bp, Homo sapiens
gtaatgaaccttaggacatagtgtatgaaactcagggagttggaatacaagtgtctcaaggccactccctccttacccactttaacatcaaacaagctctattcatcccacctccataactgaaggattaaccttcttttgctttttcttttagttgtcttggggaaatggagtctggtgctggtg

SEQ ID NO: 523891 - DNA, 987 bp, Homo sapiens
ataaaatttgcagcacatcagatccaaaacagaattattgacgtaaatcaaagatcgacacagcaaggtggaacaggatatagacagtcgctatatttacactgatggtgaagaacataagatacatgaaaggcactgctctacatgcaatcagttagagagcctgtaaatggaaccatcgcatgaaaacttatgcaacaacaaccggcatagtggttggctgctcgagcaacaaatcggagcatgtcattgcacttttctcctacactggcgcagttttccagtggacagacgagtaagagtcattacttcaatacccaaaaacgattgattacaatacgcggttacgggacctccgttcgtgcagaggtgtgtgatggcattaccgcgcaggtgaccatataacaaacctatccaaaattatcaacgtgtgaatccatagttaaagagggatccaagaatatcatacaaccttaggttctttagtaccgtcgaggataacccgaagatggggagccaccaaatttgcctaagcaagaaatccttgtcgtggaaactagaagttcaacaagtgcaccagggtgcttaatcatcataccagttatctaagttcccaggacagatcagctagctcaatttacggctcagcgatattggggaatagaaagcggctcgatgttaggatatgctgttagaaatcacaagcccaaagccaatgaccagtcttctcctcatactaacaagtgagattgcacgcattcagcacataacagaaaagaattaaagccaaacccctagaatggttcctggtcaaaaagcataacatggtagtcggcgggaaggacccattaattcccaaggattccttaactttggccaggtatattgacagaattatgaaggtggtcacctattgtagcccgggggagggaaatcgcttcagagaggagtaagcacagggaggaaaatattgggcacacaagacga

SEQ ID NO: 523892 - DNA, 1556 bp, Homo sapiens
  misc_feature (972)..(972): n is a, c, g, or t
ggcgtcatctgagatagatcgccgtcgggaggtgctctcgtgcgagttttgtattctgtgcgccggggggggtatagtactaattgttcctcgtcggggcgacgcgttgttgcccctggtgcgcgcgtcctttgttggtgcgccccccgttcgtgggtgcccaagggggggtgtctcgcgaagagcacgcgcggtggtggtcgtgcccggccggcgggaggtttctgccgggggatgtgttttggtctgcgatacgcaggcgtcgctgccgacgatattattatttggtggcgcagcggggggtttgcacgtggcccccggcccgtgtgtttgttgttgctgccctcctgttatttagcctcctggtggggggcggcccccgctagagtgtaaggggggtgttgctctttctctgcctgcgcgaagggtgcggccgccgtctgtgaggggagggttttgtctttttgtgtaggaccaccttgcctggcaggggtgagatattgtttggtggggagagtatcgtggggtggtggtggtgttctcgccgcctctatgttgtcgccgcacgcgttggttgtgtgtctccgcccccgcttcgtggatgagagagtttgttagaggagacgaagagtctggtgtgtttgggtgtgccttgagaagggggttcctctcccccccccccccgcgcgtttgtgtcttgtgtgtgtgtgtgtgtgtggcgccccgcagcacgcagaggtggttgtgaagggttttttctggtgtgatgtgtgtggtgtgtatagtagtgtgtgtctgtaatatcattgtgtgagagagagagaggtgtgtgagagaccccggcactcactgccattgtgtggagtgttttgtttatatatctgtctctgtgtggtgtggtgtgtggcgtcgcgcgcgcgccgccctctccgctctctctcagatatatgacaccctctctctgtgtgtgtntttgtctctctctccccggcctctctatatatatacacgccctctctcacacactcgcgcgccagctttaaaagagattttcctcgcagagcaagaacacacacacacacgataagaagaagaagaccacgcacgaatattcacccccgcgttatatatatatttctcccccccgcacaatatatatctcacatctgtctcacacacactcttgtgtggagatagaatatgtttttcacaccggtgctttcttgtggggggggccccccctctcggggtgcccgcgcgcatatatggtggtgccgccgctttttttttgtaccccctctcttttttccctcttgtgctgcggtggacacacacattttaagggttttttttaatatattttttgtgtgaacaattatcgcttttgttggacccacactctgtggggggacgcacaaaattgttttacacaaatgatgtttatttgtggtgacacacacactgggcgtcgccccccccccgcgcgtcgcccccatatataaatatataaaccggggggactttttttttcgcccctcacacacacacaccacaca

SEQ ID NO: 523893 - DNA, 345 bp, Homo sapiens
  misc_feature (1)..(1): n is a, c, g, or t
naaagagatgagccaccactagaggctgtcttagacaatgtatgctgactcagtaatgcttttcgtataaggtcaagtatcagtcatacagctagggtagtccctgaaaaaaacaattgctaagaagtataatacccttttcataacactcaatgcagctcagttttcagttactcatcagtggtcatgatgactatcaccatttctccataagatcctccgtccatattcatgcattatggctcaaaagactctaagtgccatcagacagaaggaccagagtttctgattataaccaatgatgctgggtaatgtccaaatgagcacattgcatatggatggtcg

SEQ ID NO: 523894 - DNA, 172 bp, Homo sapiens
tttgactacagcatcaggcataagcatagcaattttgttatttttccttgcagtttcattgacttagtttatgcagcttggaccacactacttttttgatgaatccatgtccatacccaggcaaaaataatgtaactacctctataagtctagataaccaggcaagtagctc

SEQ ID NO: 523895 - DNA, 359 bp, Homo sapiens
ggggttctaggaggacaactgagccttcaatgcctcaggttatttttcttgtaattagtattattattattattagaaacacggtctcgctcggtcgctcaggctgatatgcagtggtgcggtctcagctcactgcagcctcaacctcccaggctcaagcgatcctcctgtctcgtgctcccaagtagctgagattacagtgcatgtgccaccatgcccggctaattattagtttatcattttagtagagatggggcttgctatgtttgcccaggctgtcctcaagcgatcctcccaccttgtgctcccaaggcactgggattatcgacatgagctgctgcctcatgctcatctgtcaa

SEQ ID NO: 523896 - DNA, 214 bp, Homo sapiens
accacccacagcctaattattatcatcatccctctactatttcttaaccaaagtcaacaaaagcctatttagctgtttcccaaccttttcctccaacccccgtaacaacccccctcctaaatactacatctaccctgcatcattcctaccccttcacctaatcatggtcacatgccaacgtccacattactccaggtcgaaccacatgatctac

SEQ ID NO: 523897 - DNA, 373 bp, Homo sapiens
ggggggggggggggggggggggggggggggggggggcccaccggcccttttcccaagttgtgggttttcccggatttttccaaagtttttgtttaccggcgtttttggtttagaacccccccctcagggccctccccccccctttggcggggggttgttttgttttttaacccaaaaggccccccctttgattggggccgggtttccccctttttaaaacaagggtttgttttttttccccccagggcccttatcaggggcccaaagtttttttttaaatttttgccgggtttccccggtaagtttttttttttttttatttaatttttttttttttccccttttaaaattaaaggccttttttttccgggga

SEQ ID NO: 523898 - DNA, 271 bp, Homo sapiens
catcatcgccatagctcactcctgagacagaacggcgtgcaggaagagccagatgctaaggatgacaagttgctcggtgcccctaggctagctgtggaacactgtgccctcaacaggaaagactggaatgacagccccaactcaaactatttctatttccagctgatttctcttattaggctactttaaaacttccaagattttcatttttaatttttgtaaaacagtagtctaaatgatggtttgtgaaaaatactttgcctggaagata

SEQ ID NO: 523899 - DNA, 128 bp, Homo sapiens
  misc_feature (118)..(118): n is a, c, g, or t
aggtggtgtgtctgctattcccggcttccggagatgaagcacccataggccaccaggggcgattggcaagaaggtgcaccaggccgtccagggagcccgggcctgccggtatgccagnccgcagcgtc

SEQ ID NO: 523900 - DNA, 484 bp, Homo sapiens
gggggcgaggggaagaccctgagctgcacggacacacggcacacacgcgcggcagagccacgctcccagaccacagccaccgtgcacgccgcgctcaccgtgcccgggatgtagtggaagagcttgttggcggcggcgtccccgcttcgagcagcctcggggcccggcaggccggccgacatccgcgcgctgtcctctctggggacaaggcaaggggtctcgtggcttggccccggagcgggtgggggagccctgcgcccaggtggccgcacccacgccccgctcacctgtttcccttcagcgagggctttctggagaaggaggcccggagcctcctgggggcctgagggacacagtggctgttccccatggccagagtcgtacaggtcggcaagtctgggtccctgtccacagcctcctgcccccgcctcccgcgggcaggcggggctccgggacgtcccgcccggcaccagggcctggaaat

SEQ ID NO: 523901 - DNA, 523 bp, Homo sapiens
aaagagacagactcctcatctgcatcggcagcgacaccttctaaaaagaaaagtttaatcgatcagttcttcggtgttgagtttgaaactaccatgacaactgtacagaatctgaacgaagaagaagtcagccaacaggaaaggaaccatcacacttccagcttatgctgttttatcaatcaggcaagtcacacgtatcttgttcacaggaccttaaagttgcgacttcaggaagaaatcaccaagacagtctccaagcgtctgcaacagaaatgccttgtatatcgaaatcttccaagatcagccggctgcctgcttacttgaccattcagatggtgcgacttctcttcatacagacgaaggaatctgtgaatgccaaagttcttaacggatgttaaatttccctcttatgtcgcgatatgtactgaactgctgtacaccagcaaccttcaagagacaaacgcgtgctcttttcgatccaacattcaaggatctagaagataccccccgtgactcagcagct

SEQ ID NO: 523902 - DNA, 231 bp, Homo sapiens
ttcggtgaccaggctgaggcccgcaggtctaggaaccaagaaagcacgcaagcgcggtgaagagcgcctccaggccaaaaaggaggagatcatcacgaactttatccagggaggaagagaccaaaaaataaaacctcccacttggtctgtacatacgggcctctgtaattacttagatcagccattaaaataaaacaagccttatcggcgcatacctaatctgcgggggta

SEQ ID NO: 523903 - DNA, 640 bp, Homo sapiens
  misc_feature (1)..(1): n is a, c, g, or t
  misc_feature (313)..(313): n is a, c, g, or t
ngagcagtgtctcacacctctaatcccagcactttgggaggccgaggtggacagataacctgaggtcaggagttcaagaccagcatggccaacatggtgaaaccccgtctctactaaaaatataaaaattagctacgcatgggccgggtgcggtggctcatgcctgtaatcccagcactttgggaggctgaggcgggcagatcatgaggtcaggagatcgagaccatcctggttaacatggtgaaaccccatctctactaaaaatataaaaaattagccaggcatggtggtgggcgcctgtagtcccagctanctcggaggctgaggtaggagaatggcatgaacccgcgaggtagagcttgcagtgagctgagatagcaccactgcactccagcctgggtgacagagcgaaactccgtctcaaaaaaaaattaacttgccgtggtggtgagcgcctgtaatcccagctactcaggaggctgaggccagagaatcactagaagctgcgaggcagaggttgcagtgagctgagattgtgccagggccctcctgggcaacaagagcgaaactctgtctgcacatattataatcaagggccctttgttgctgatgaatacattggttagtacccctcttttcg

SEQ ID NO: 523904 - DNA, 811 bp, Homo sapiens
gtagagtgttgtatattcaagggattgtgtgcagaaattcttgtggtgataacccttttatttatttatttattttgagatgggctctcactctatcacccaggctggagtgcagtggcatgatcacagcttactgcagcctcaaccttccaggctcaggtgatccccagcctcagcctcccaagtagctgggactacagtcatgcctcaccatgcccagctaatttttttgggtatttttgtagagacagggtttcaccatattgccaaggctggtctcaaactcctagactcaagcaatctacccgcctcagcctcccaaagtgctgggattacaaatgtgacactgcactggcctaacctgtttattaatcgtacctcacctacataggactcaaccattatgcaacctacctccggaatataactgaagactggggaataagagaaataattttcaaagtaaatgcatttctccgagtcccaaaggactttgttcagagcctatccttaattcataggcagttctaacaaacagtataatctaatttctgagcccatagctgatcagaagtgggtcagaaagactatcttgggaaatgcccctgcagcagaaggtagtgacagttgcaaggcaagcatacttaaaataagcgtaagaacacagaagatatcttcccataaacggaagttactgtctcagcaagttgaggaaaatttctttccctttccattactgctaatggatattgcctaccatggctttccttttatccgtcctacggtagataccggtgtgtctgggacgatc

SEQ ID NO: 523905 - DNA, 132 bp, Homo sapiens
  misc_feature (62)..(62): n is a, c, g, or t
aattacatgtaattgtttatttaaaataattttccaagtcttccaaggagggaatctgctcntgctgctttttaaccaccccaaacagctataaatcaacacactttctgtattttattttactactatgta

SEQ ID NO: 523906 - DNA, 112 bp, Homo sapiens
ttctgccactatcactaatccgaaggtacatgaattattggtatctatgaacaagctttgttactgtcacttattcacattatttacgatcgattgtaatgtcggtacgaga

SEQ ID NO: 523907 - DNA, 413 bp, Homo sapiens
  misc_feature (75)..(75): n is a, c, g, or t
  misc_feature (181)..(181): n is a, c, g, or t
  misc_feature (300)..(300): n is a, c, g, or t
  misc_feature (362)..(362): n is a, c, g, or t
  misc_feature (406)..(406): n is a, c, g, or t
tccttaatctctttgcatctcaatcctcatttccttaaaatgggaatcctaccctcatgatgttccttacagggntgaaatgactaaaagtttcctaggctggacgtggttgcttactgctgtaatcccagcactttggaaggcagaggcaagaggatcgcttgagctcaggagtttgagnccagactgagcaacacagtgggaccttgtctctactaaaaatcaaaaacattagccagatgtgttggtgcatgcctgtagtcccagctactcaggaggctgacgtggaaagattgatcncctgagccctggaggtcgaagctggagtgagctatggtcataccactgcactccagcctggntgaccctgtctcaaaaaaaaaaagagtaagatcctgtctaaaantaaaaaa

SEQ ID NO: 523908 - DNA, 868 bp, Homo sapiens
  misc_feature (353)..(353): n is a, c, g, or t
  misc_feature (395)..(395): n is a, c, g, or t
  misc_feature (467)..(467): n is a, c, g, or t
  misc_feature (528)..(528): n is a, c, g, or t
  misc_feature (564)..(564): n is a, c, g, or t
  misc_feature (569)..(569): n is a, c, g, or t
  misc_feature (612)..(612): n is a, c, g, or t
  misc_feature (665)..(665): n is a, c, g, or t
  misc_feature (763)..(763): n is a, c, g, or t
  misc_feature (766)..(766): n is a, c, g, or t
cagcattgcaggagtacctagtatggggtgagcccaccgagtattaacccccgaggtgaaggagatccgctgcattgtgatgtctgccgtcacttgcgtgcgcactcaccagaccgtgcaccgtgtcgctggctcagctgtccccagcatgtagtacctctacatgatatggatcccttaagttggatccatattcataccctaatgagtccccgcagttatcaccccaggatgtcacacccatgccaagatcatggctgacaacccatcttgggatggcgagaagaccattatcatcacatgcagcttcacgccaggctcctgtacactgacggcctacaagctgacccccngtggctacgaatggggccgccagaacacagacaagggcaacnaccccaaagggctacctgccttcacactatgagagggtgcagatgctgctgtcggaccgtttccttggcttnttcatggtccctgcccagtcctcgtggaactacaacttcatgggtgttcggcatgaccccnacatgaaatatgagctacagctggcgaaccccaaanagttntaccccgaggtgcacaggccctctcacttcctcaactttgctntcctgcaggagggggaggtttactctgcggatcgggaggacctgtatgcctgnccgtttccctgcctcctgcttcagcctcccgaggccgaagcctcagcccctccagacaggccgctgacattcagcagtttggcctctttccctctgtntgngcttgtgttgttgacctcctgatggcttgtcatcctgaataaaaaataataataaattttgtataaatagggacaacttaaaatagtaaaaaaaaagacaaa

SEQ ID NO: 523909 - DNA, 224 bp, Homo sapiens
ggagcacggagatctcgccggctttacgttcaactcggtgtcttcagcaccctccgctttcttcttctaggggacgggacccagttgctagttcaccatttctattcttaagattcatggcagaggagatctttaacttttgcggggattccacttttgaggtgtgatctctctcacctctaaaagggtctctctcagagactgtctgtgtcccagttgtgtgt

SEQ ID NO: 523910 - DNA, 219 bp, Homo sapiens
atacgggatgaggatgggaggagcagaggagacagtctggcactgcactgggacactaagctaaggctccaacgggggaaaacaaatctgatatcccatttccatactccctccttcctgcttgacttgccaatgtgtactgctgcttccccctccttccactctgaggatctctctctctctctctctctctctctctctctctctctctctttctgt

SEQ ID NO: 523911 - DNA, 188 bp, Homo sapiens
aaccctacttgttctaaaaaatctgtccacaaatataaaactatatagtaataaattgttatttccgaactctggaaagtaacattttattacttatgttttatatctgtggacggatggttttataacaagtagaggtcattcgcgaattaaagctcacttgacagttggaagtatttgaaatcatt

SEQ ID NO: 523912 - DNA, 386 bp, Homo sapiens
ctgtcgcccaggctggagtgcaacggcgcaatctccgctcactacaacctccgcctcccgggtttaagtgattctcctgcctcagcctcctgagtagctgggattacaagtgtgtgccaccatgcccagctaatttttgtattttcagtagagacggtgttttaccctgttggtcaggcaggtcttgaactcctgacctcatgatccacctgccttggcttcccaaagtgctgggattacaggcatgagccactgtgcccggcctaacagttttgtttttaaagtccaaatggggagacataatcagcaaaatatagagcacatttctgagaatgaagataaatgagaagggactatcccattacatatcaacgaacattagagat

SEQ ID NO: 523913 - DNA, 121 bp, Homo sapiens
gcttatgcgtacgtcagtgctaaccatatcgctcaggatgccgactcgtgtgaaggtgatggtcagcgagtcgacgcgattgcgagctcagtgaattgggccgccttgagtcgaccacgcg

SEQ ID NO: 523914 - DNA, 869 bp, Homo sapiens
cgaaaaaagccaggggagggaacccagcacgaggttaggggcctcccccacagagggaagtgtgggcaacccgccccgcagggcccccaaaaaattcggtcaagcgccggggttccaagccgatggcggagcccacaagggggccaaaaacaaagaggggaaaaaataccacctcaggatgaacatactaaggagcatccttgaaacaagaaaggtttggccaacaacacaccctaaacgttgttgcagtggaagacgcacacttgtgtaagccaactggggtaaaaaaaaacgtccccagtgcatggagcaccattttaaacaccatagtcctagaaaaatacgttggtattgggaaaagccactgtcatgtcaaatgggacgaagtactactcctcccgtggaggctactgacaaaaaaatggtcttcgaaaatttatgcggagaccttgcacatttttgtaagtggcgcgtcgaataaaatactttatacacagcacgcattgtataaaccccattaataccgtctatttacacgacggtacaccaccggaggggtacaacgacatctatgccccactctccgccaatagaatgaacacacaagtgataataaaattgagggcacaagggagcggagcagtgaaagttttatataagtgacggtgggcgctaacaattacattgaataattatgttttcggactggcaagtgctttctgaaaaaaaaggatttcaccacgggacgctacaaatctatgcggtgggggcttctagacattcctttcatgcatttgtcttacctccgctcttctcttataaggagaagatcctgaccaaacaaaataaacacccccgaccacatgaca

SEQ ID NO: 523915 - DNA, 320 bp, Homo sapiens
gccggtaccctacatccagtgaagagagctgagcaggaaagaaagaaaattttaaattgacaggtgtggagaagtgtggtcgaccagttttccaggctgatggcagatgtggctttctcatctcaagctcagaggcaaaagatatagtgtgcagcgtgtcaccaactgtctcctttgctcatctgagccaattggttcctcccactatggtctgcattcttgggcatttgtcctcacctgccaggttccaattgcaatgtcagctgcacagaagctgctgattcttgatagctctactatctgccagctctgctcatcct

SEQ ID NO: 523916 - DNA, 335 bp, Homo sapiens
tcttactataaatacaaaaaattagccgggagtgctggccgcgtgtctataatccgtagctacctgagagtgctgaggcacaagaattgcttgaacccgggaggtggaggttgcagtgagccgagatcataccactgtgctccagcctgggtgacagagtgaaactgtctgaaacaaaaaaaaaaaagaaaaagagcaattagccaggcatggtgatgtgcaccagtgttcccagctgggcgcctgaggcaaaaagctgtgcttgtgcccaggagttacaggttgcacagagctacgataatcatgacgctgggctccagggtgggcaacacact

SEQ ID NO: 523917 - DNA, 581 bp, Homo sapiens
ttagtctgtctggggtcagataatgtaccttaaaatctatttaggcgcgcgcgtggtcacgcctgtaatcccagcactttggaggccaaggcgggcggatcacgaggtcaggagatcgggaccatcctagctaacacggtgagaccccgtctctactacaaatataaaaaaattagccaggtgtggtggtgggtgcctgtagtcccagctactcgggaggctgaggcaggagaatggtgtgaacccggaaggcggagcttgcaagtgagccaagatcgtgccactgcactccagcctgggcgagcactccagcctgggcgagcactccagcctgggcgagcactccagcctgggcaacagagcgagactctgtctcaaaaacaaaaaacctatgtgtggtggctcatgcctataatccccgcacattgggaggccaatgcggagaattgtaggaacccaggaattcaagaccagccagggcaataaatcgagaccttgtctctacaaaaaataaataaaaggacaataccagcaaaacctatgctaaaaaacaaacaagaaaaagcctcactgtttacttt

SEQ ID NO: 523918 - DNA, 161 bp, Homo sapiens
atccaaaactgattcatctctattaaaagtaagcacttaacaaaaagagcatgtctgtgtatatagacatatttttacaggaatcagcatatctttgaagcagccttagtgtttcttgtaaatttgtttatttgtagattctggaaattaagcctttgcaa

SEQ ID NO: 523919 - DNA, 204 bp, Homo sapiens
ggcatttttgggggctgtatatatgtaccacaagtaccaaaaccggaaactcaatgcccccttttgcaccatcgagctgaaagaagacggtatcagtttcagcagctaccatgacagcattcccaatgcaaatctttcgggattcttggaagatgatagcaatgaagtggctcccaatgggcagctcaccctgacaacgcccat

SEQ ID NO: 523920 - DNA, 1087 bp, Homo sapiens
ggcggaggtcgcgatgtagccgggtgcgagcgagtgagggcccttgcgggtggcccgatcggggcccagggtgtccctaagccattcctgaagtcatgggctgtccaggacattggtgtacccgccattccggtatggtaccgtagctggaagctccacgtgctccctctagttcaaggccctttgtggtgctcggtaaatgacagcgcgcagcttggtaccttaccgtggcatagtataaactgactaaaaccatgctgtgtgcctctgtcgagaagtattctcgttcagagcacgcgaggcccgtgacatctctatccctgcatggtttggcaccttggtcgactatggttcaactaatcaatgttcgtagtccgtgcgacgaccttccgggtggagtcccactcaggatgatacggccagatgcaaaggaacgctctagaaggcctcgcaggccatagcactgtatgaatgagggcccattaagagtcgcaggcatgggaaatgcctcctcaaacggcagccaggaaggtcattgcatggtcccccgcggagcggggtggtaccttgtgcaccggtaaagaggcgttcgtactttcaaaggatctgtccataccaatatggtataattggtggcaggatgcgaattggtacacccagcagatcgcttggagacgcgactcgacggcgccctgagtaagccaaagtctgccctgtgaggcacttcccaatgatctcctatcgtacctttctagaccaagggcccaacagggcgaccacccgttgagttggcacaaaatcgggtagctgtatgagccctctgttagattcactccctaccatcgacgagatttcacggggaccacttgggttgcccttgaattccctctcaaatagtgggatacgacaggccccggtgactcagaagttagcctgagattcctgccctttggaccacatgggaatgaagggggccttccatatcccaggtcttccaatgggacatacaagaccaactgtgattccatgcctgcacggaggcccctggggggcaggggcctacgtgcattgtggaccccctggtcca

SEQ ID NO: 523921 - DNA, 275 bp, Homo sapiens
atcattgatttggtaaacttcccagtcgtttgtacgcttccactgccgagggacaactgtactagggggaccccgacgtaggggctgatcatcatcagtagcctcgagaatgagacttccaggtgcactgaggggatggcagaagaacaagcccgtgtagtccttggctagcctgggagggtagtcattcacatccataaggatcaggtggaactctgacacagagcttaaggaagacccccctacttctgtggccaccaattgtacccgatatg

SEQ ID NO: 523922 - DNA, 973 bp, Homo sapiens
  misc_feature (676)..(676): n is a, c, g, or t
gactggtgtgattccgtcctgcgcggttgtatctctggagcagcgtgctttcatctccgtccgaccttctctcctaacctaagtgcgtgccgccaacccgatggaagattcgatggatcatggacatgagccccctgaggtccagaaatatctttctcggttgtgaactacaggccgacaaatattatcactttaaggtggataactgatgactaatgagcaccagttatctttaagaacggtcagtctctactgggctggtggccaacaggatgagttgccagcattgtttgaagcatgcaggcaattgtaattacgaacggcagtccatgttaaagtaaaacactggcaactttgtaaaaatgtctgtacagacaaatgggcttttcccttgtgggggcttttggaaactatcaccaccaggtggtcttaagagttgaagcctgtgtgtttcaggaccagtgccataattagctggtacatgcacttagctagctgtggaggaagatgcaagagtccagaaacatgaacgatgaggaggatgttgaaactcttgagtatttcttggaaagcggtctgccccctgaaggtggttagcaaggtttccacccaaaagaacgctaaaactttgctgctgattgaaatgattgacaatgattgatgaccaggatgccantgaagattaatactgatgaggagttgtaacgttacggaagctggccaaagacgcccccgtgagaaaactattctggaatattccaggcaaaggttgctcgcgctgttccaatgggaaaggtcagagcctcctgcgacaagtcggggtaacctttggacagggacacctaaaccaaagactttggaccttccaagagctaaaaggggcgcccgagcaactaaaatgcgcgcaggttctcgaaagcaaaataaaatcttgacatgataacacacctggttcctctctctgatactctcg

SEQ ID NO: 523923 - DNA, 1057 bp, Homo sapiens
ttgtatgtcaaattatgagatctgatatgagatggatctctgcaagggtcacagtatgctcaatctttatacattcgaatatgcagaaaaagatgtgcgccgtgattagaggcgcgacatgaaccatacctacgtactgaaaagaccactatgtaggttcaatcgatgaatgtatgaacgaacctgaccaaaaccatcaggttctttaaatctgacccaagaaactatttgattagacaactatgtcagagtaagaggtgcctgacacgtactagaatccaaggatatccctacacactcacgtacgacgatgtcaccacttgcttacaggaggtgtacttcacaagatgctaataggctgaaccatattttactaaactgcgaactatgaatctcaagtgactgtgtggatccaaacggacaacgaaggtataaagcctaatgagatcagacaggcgcgacttcgcctatgcattcgaatgtccattatctaatcaaactcaggagatttaacctcgatcgctatccgaatcgtctcgtgagatctagagagagtaatcgcactagcttgagatcgcagcgaacgttgaatcttcatttcgcttcgtggtgtcgttgcatacggaaattaagaaagtccctaacgggatgaatcatgaacgatttcaacgaacgacagtaggtaagtacctagaagctccgagtttttctaaatcctagcatttcaaaattcactgcccagctcaatgaagttgggacagccgcagaaatagttagggcacgtactttttaaccataatggaggtcctttcccacccggtaccatgactggtgactcttaaaaatttccctaataataatttcacaattaatctagccctaccagaaacaggggggtttggggagaaaaggcataaaacaagcctggtttgaaaagggggagcgcgcgacgcatgtccaagttaatcccttagaaggcgtggggcaccccaggtttcaaccgaaagggcctaacgctggtttctttggacaaccaccgttgggttcgctcataggg

SEQ ID NO: 523924 - DNA, 286 bp, Homo sapiens
aaacccgtgaaagggggggggaacctttttcccttatatgctgtttccctggaggggttccccccagtccccagaaataatgtgtccccccagtcttttcaatcctttcccccccgaagtgcaaaacccccgcgggggattgtgcggggattttgggggcaaaccccagccaatttgccctcccctccccatgtttttgaatgcaatttccccctttttttcgccctaagttttccccccctttaaacccctaaagttaaataaaggaatagggtccccatgccca

SEQ ID NO: 523925 - DNA, 388 bp, Homo sapiens
  misc_feature (37)..(37): n is a, c, g, or t
  misc_feature (193)..(193): n is a, c, g, or t
  misc_feature (374)..(374): n is a, c, g, or t
  misc_feature (384)..(384): n is a, c, g, or t
tttcttttgtatttagagacagggtctcactctcttncccaggctggagtacagtgatctcagctcactgcaaccatctccctcccagttccagctattctcctgcctcagcctcccaagttgccagtgtgccactttccattattacttttttttttttaagagaaagggtcttactctgtcacccaggctngaataagtggcatgatcatagctcatttcagtctggaactcctgggctcaagcaatcctcccacctcggcctccccagtagcggggactgcaggcaggcgccaccatgcctggctactttattagtaattcactgctacaaagtgagagcagctcccaggggcacagaacttccccacacnggcaggcttncccg

SEQ ID NO: 523926 - DNA, 302 bp, Homo sapiens
aggatgactaggtagttcatgtggcacttatagcagaccgccaaagacttcaagtaacacgtgaacacatatggtattcaaactcaaactcctcaacaagtagaacccattccgatatggcctcagcaggagctagtgaaagctcatatgcagctgggtatcaatgacaccgttaggactctctggaacgccagacaggcccattggttagctcgggacatcaaagatttatcgcattctaggaaagactgtggtatgttacccgcattataatcggagctaagtgatttctacatagtctc

SEQ ID NO: 523927 - DNA, 528 bp, Homo sapiens
  misc_feature (130)..(130): n is a, c, g, or t
  misc_feature (132)..(132): n is a, c, g, or t
  misc_feature (151)..(151): n is a, c, g, or t
  misc_feature (270)..(270): n is a, c, g, or t
  misc_feature (346)..(346): n is a, c, g, or t
  misc_feature (398)..(398): n is a, c, g, or t
tctatcaccagtggagaattgccgggggttgtgttggctcccccaagtggccccttgcccaaggtgggttcaacaataatggggggcatcctgttggccttcattgagggggttggcatcctcttcactngntaaaaagccaagcagtttngaaatgggcccccatttgtggaggaccccagcaagttgccccttaaggatggcacccgggccccaggttaccccagttatcagcagtacccttgaggaagccattgccaccatgggagntatttttgggttccctccccaatggtttaccttaaagggaggggtggttcccagttaaccctgggaccctcaaaanagggtttttactttgctccatagtccaagggtgggggtggggcaccccaaantgccctaaaaaaggggtcccctttttttttttaagggccccccagccccacattaaaatggaggaagttttccccccagttcctttgtggggccccctgatgagtatttaaagcccgttttgaaatgcca

SEQ ID NO: 523928 - DNA, 233 bp, Homo sapiens
ttctagaggatcccggaagatgtgcatgtatagagaaaaatcctctacctgttatattccaatgaaaatttgtactttctttgctaatactgataaatcagctaaaaattgatttaatttactttccatgttcacccctattattttttattctttatttctttatactttgttacttgtctaaccattatatcaagcattgcatcaattgctgaataaagactcttatcttt

SEQ ID NO: 523929 - DNA, 198 bp, Homo sapiens
gcgcggaggcggtgaccctgggcgtggatgcctgagctgaacactgtcagtgaggtggtgagatttgccatcctgtggagaatggcttcctgctggagtacctgtgtggccatccccatggcgaaatggccttgactcccaaggctgcttctgcgcaggctgctcccggcagactcggcttctcctttgtacgaccca

SEQ ID NO: 523930 - DNA, 452 bp, Homo sapiens
tatagagcgcacgaactgataatgctatcaagaaccactgtaattctacactgtgtcggaaggtcgaacaggaaggttatctgcagaagtcttcaaaagccagccagccagcagtggccacaagcttgcagaagaacagccatttgatggaatttgctcaggctccgcctacagctcaactccctgccactagccagcccactggtaacaacgactattcctattaccacatttctgaagcacaaaatgactgcagtcatgttccatacactgcagcgctacatgtaaatatagacaatgtcccacagtcagctgccgcagccattcagagacactataatgatgaagaccctgagacggataagcgaacacaggcatttgaattgctcctaatgtcaaacgagaacgagctataaggacagcagctgctaccagcacagaatcacacatgc

SEQ ID NO: 523931 - DNA, 232 bp, Homo sapiens
gctcagggcagcatggactacacacgcatccatggacaagttgcacaggcacaacagcacaagcagcacaaggtcttcaacatgccagagcgcacattgcacatgctcgctccagcaccatcccgtctgcgtatggctgcatccaaatcatgctgcacatttccccatacaccggttgcaatgactcacatctctctcctcttgcacaacacattgctcagcatgcaccagc

SEQ ID NO: 523932 - DNA, 207 bp, Homo sapiens
gagatgttacgttaaaggttggaggttgagatgacatatctgacactctgttgttaccctcagaagctactacatgtgaaattctaatgactgcattatcctgccaagtgaaagaggcaggcatgagcaaggacagttaagaggggtgggagccttatcatgatggggagtcttgttctgacatctttggaaaaacttgtccacagt

SEQ ID NO: 523933 - DNA, 763 bp, Homo sapiens
  misc_feature (176)..(176): n is a, c, g, or t
gttacatatgcagcaatatgctgtttagggagcgcgtggcctgtagtgatagttgaccttggtcttatctgctaatgtcctatgagatcctggatcatagacttatgtagtctctgcgcatgtctcgagcaattaataaataccgactctcggccgtgaaaactgcaagcgtcctntgagataatatcctgtgaatggagttctagaggagtgcaatttaactggtgattctaatctaagcatgtgagttcccgaagctgagctcgagatcagataaacgccgcggcatgagtgtttgtggcactgtaaatgctgaaattcatgggaaacttaccaaatgactgcttgagtgttatttcccattaaattgggtagctgtcacaataaccagaagaaatcttgtggcccttttgaagaaagccatgtatgttttgttacctaggttcatagtattttaatttaaaggcaaagagaagcattctacttatttgtcttataaaccattaatcgttttttgtgcagaagagagcttatttggttatactacttttgtataaatggacaataagtcacattctggggggaacaaaaactggaatcgtctgtcatttgtaaagagggggggatctttcatgtgacaacatcagagctacttgttaccataaagcccttactatcaacagataattcatctgtaatcactttttttatcccaggttggaattgctttccctttctaaagttatccttccttaaataactt

SEQ ID NO: 523934 - DNA, 369 bp, Homo sapiens
  misc_feature (26)..(26): n is a, c, g, or t
  misc_feature (130)..(130): n is a, c, g, or t
  misc_feature (159)..(159): n is a, c, g, or t
  misc_feature (166)..(166): n is a, c, g, or t
cacgaggtcgatcgatcggcggatcnagcgccccgcgttgttgacgaggatatcgaccgcgccgtgctccttcagcaccgtctgcacgaagcggtcgcaatcggccatgtcggacaggtcggcggtgtangcgaacaccttgccgcccgcggcgcgcanctcgtcncgcaccttgaacagctcgtcctcgccacgcgcgcacagcacggtgatcgcgccggcttcggcgatcttgcgcgcggcggcaaggccgatgcccgaggagccgccggtgatcacgaccaccttgcccttcacccggctcttgagcgagcgatcgacgaacagatcgggatcgagatggggctcccagtagtcccacagccgcca

SEQ ID NO: 523935 - DNA, 154 bp, Homo sapiens
atataaactcaggatcttagtccgctcggacgatagcttggagggctgtgagaggcggctcgtgccatgatctgtatttaatggttttaatttctcgggtgcatttgagagaagccacgctgtcctctctgagcccagatatgtcctgagcgga

SEQ ID NO: 523936 - DNA, 537 bp, Homo sapiens
  misc_feature (4)..(4): n is a, c, g, or t
  misc_feature (7)..(7): n is a, c, g, or t
  misc_feature (9)..(9): n is a, c, g, or t
  misc_feature (33)..(33): n is a, c, g, or t
  misc_feature (35)..(35): n is a, c, g, or t
  misc_feature (38)..(38): n is a, c, g, or t
  misc_feature (45)..(45): n is a, c, g, or t
  misc_feature (48)..(48): n is a, c, g, or t
  misc_feature (72)..(72): n is a, c, g, or t
  misc_feature (93)..(93): n is a, c, g, or t
  misc_feature (102)..(102): n is a, c, g, or t
  misc_feature (107)..(107): n is a, c, g, or t
  misc_feature (118)..(118): n is a, c, g, or t
  misc_feature (143)..(144): n is a, c, g, or t
  misc_feature (151)..(151): n is a, c, g, or t
  misc_feature (163)..(163): n is a, c, g, or t
  misc_feature (196)..(196): n is a, c, g, or t
  misc_feature (206)..(206): n is a, c, g, or t
  misc_feature (210)..(210): n is a, c, g, or t
  misc_feature (236)..(236): n is a, c, g, or t
  misc_feature (248)..(248): n is a, c, g, or t
  misc_feature (308)..(308): n is a, c, g, or t
  misc_feature (327)..(327): n is a, c, g, or t
  misc_feature (329)..(329): n is a, c, g, or t
  misc_feature (337)..(337): n is a, c, g, or t
  misc_feature (367)..(367): n is a, c, g, or t
  misc_feature (381)..(381): n is a, c, g, or t
  misc_feature (383)..(383): n is a, c, g, or t
  misc_feature (388)..(388): n is a, c, g, or t
  misc_feature (400)..(400): n is a, c, g, or t
  misc_feature (404)..(404): n is a, c, g, or t
  misc_feature (406)..(406): n is a, c, g, or t
  misc_feature (424)..(424): n is a, c, g, or t
  misc_feature (427)..(427): n is a, c, g, or t
  misc_feature (446)..(446): n is a, c, g, or t
  misc_feature (451)..(451): n is a, c, g, or t
  misc_feature (465)..(465): n is a, c, g, or t
  misc_feature (489)..(489): n is a, c, g, or t
tcanacnanaaaagtaaattttatttgttcaananccnaaaatgnaancattaaaaccaagcaaaggctttnattctgtaagcccaaattcanaaattgaanaagancaaagcaaacngtgatccatgtacatggatgaaaannaaaggcncgagtaaatcanattgtagtttttaaatttctacagcctagagcncactagtaanaggncttttaggtccttctggatgtcccanagggtatctgcncttttcttgagcggagcaaccccatcaccctttagcttctggttgaaaacgcgggtaaanccccgggcattgaggaaananggaaggcncaggaagacttcattctcaatgccaaaaancccctttaccattntngaaangggaggaatccnggananatttttcaacatggattnaanaagaacagccacacttaanccaanagcccagtgggtanatccttttagcttgaggacttcanaggcactttcaaccaccaccttatgcacttccttccaattttcactat

SEQ ID NO: 523937 - DNA, 327 bp, Homo sapiens
gcccctgggccccaagaagggggcccagtttcctcctggggaagaaggggtttttacccaaaaccgtttttaaaaaattccgaagaaatttggtgaaaggaaaaagaatgcccaaatcccccgttttctgggggggccgttcccgcagggcaagctttttgggggcatcgcttcaaggccggggcaggggggccgggccgatggttttgtgttagagggccaagggttggggttttttttttgggaaatccggggccccaaaggccaattaatccttgttttgttttcccccctgtaataaaggggttttttgttttgttcccccca

SEQ ID NO: 523938 - DNA, 574 bp, Homo sapiens
  misc_feature (105)..(105): n is a, c, g, or t
  misc_feature (144)..(144): n is a, c, g, or t
  misc_feature (149)..(150): n is a, c, g, or t
  misc_feature (176)..(176): n is a, c, g, or t
  misc_feature (260)..(260): n is a, c, g, or t
  misc_feature (274)..(274): n is a, c, g, or t
  misc_feature (276)..(276): n is a, c, g, or t
  misc_feature (292)..(292): n is a, c, g, or t
  misc_feature (297)..(297): n is a, c, g, or t
  misc_feature (323)..(323): n is a, c, g, or t
  misc_feature (391)..(391): n is a, c, g, or t
  misc_feature (409)..(409): n is a, c, g, or t
  misc_feature (469)..(469): n is a, c, g, or t
tatagttgataccatcgcatgagtggtcccaaagccgtttatgcagttaagcaccagtcgtattactcgatgacaattagttggatgccactaataggttgacgntctgaataattaattataagcttacagagcatctgtgtncacannggtctggttcttacacagagactgtntcgtctgtgaggcatgaagtaatagagcattgcctatgccctcgtagtgattacgtgtgtggtgatagaggacagccttgtacnctatctataggtgngntgatcgatcattacantgtgngtacacatagcatcgtatcacgtatntcacagacgtagatgtaacacacggcagctcgtctatagagagatatatacgtagatacaagactttntctttcaactgctgttancttacattggttgtattaataaaaactacggcctcgtaagtaaatgtaactatggcttgnctatgtacgttacgtaagtatcgcactgtaatcttgaatggtatctcagactcgttagtttgtatacagactcattgtactaggtagacaagtagacgacttacg

SEQ ID NO: 523939 - DNA, 563 bp, Homo sapiens
  misc_feature (5)..(5): n is a, c, g, or t
  misc_feature (122)..(122): n is a, c, g, or t
  misc_feature (142)..(142): n is a, c, g, or t
  misc_feature (177)..(177): n is a, c, g, or t
  misc_feature (182)..(182): n is a, c, g, or t
  misc_feature (191)..(191): n is a, c, g, or t
  misc_feature (195)..(195): n is a, c, g, or t
  misc_feature (228)..(228): n is a, c, g, or t
  misc_feature (239)..(240): n is a, c, g, or t
  misc_feature (242)..(242): n is a, c, g, or t
  misc_feature (246)..(246): n is a, c, g, or t
  misc_feature (254)..(254): n is a, c, g, or t
  misc_feature (322)..(322): n is a, c, g, or t
  misc_feature (334)..(334): n is a, c, g, or t
  misc_feature (337)..(337): n is a, c, g, or t
  misc_feature (342)..(342): n is a, c, g, or t
  misc_feature (349)..(349): n is a, c, g, or t
  misc_feature (385)..(387): n is a, c, g, or t
  misc_feature (412)..(412): n is a, c, g, or t
  misc_feature (435)..(435): n is a, c, g, or t
  misc_feature (473)..(473): n is a, c, g, or t
  misc_feature (479)..(479): n is a, c, g, or t
  misc_feature (495)..(495): n is a, c, g, or t
  misc_feature (540)..(540): n is a, c, g, or t
aaggncacacacggcccgcccagagacacaagaccacgagccgagcggggaggggagcggggcgggggggggggccggagggggcgggcgggagacagcgcccgcgggaaaaagcccgacgnaaacacaggggacagaaganaggggggaccgagggcagagcagaaacggacaggngcccngcggccggngggngggcgaagggggaaacggggagaacgggcgggncacagcggggnngngggnggaggggncgggggtggggggaggggggggagtggagaaaggccagagtggggagagaagagcgtggagtagtcanccagtgtgtgtnggncaggnagggggnagcacaggggggggtagcgtacgtgggggcaggaannnaaccaggcggcagggggggggagcnaggggaagcgggagcccagaggnggaaccggggggaggggggagggccccagagaaaaggnacccgngcaggcacggcaaggnagagacaacgggaaaggggaaggccccggggagggggggggcaangagagaaggggcaacaggggcag

SEQ ID NO: 523940 - DNA, 1269 bp, Homo sapiens
gcgcgggaatgctgccgcgatgggttgacagctctccgccacatcttccacctctcttgtgtccaggcgagctgttgcctggtgccctagggtcaatctggaggtgctccgactgtgcgcggacgtgagcgaagcgccgagccatgggcaccaaagtgggctatccactgccactggaagagctgaaggaattctttgccaatggcacgggctggctctgtgcggctcatcaaggttgtgattgaggacagagcagctcgtgctgggtgcctcgcaggagccagtaatgccgctgggatcaggactatgacagtggccgtgctagccacttgctggactgcccagcagccctgctacctgatctacctgcctcgactcacagaattgctcagtggcttcgaatggctcttacctcgacatggtcgccttgataacataccccctgttgcggcttgaaagattgctgtaccgccgggacaccgccgagtgccaccaggtgaacataacgtgaggttagggaagggtgggccacaattccaacgtgattgaggctctttcgggggacctgatgcacaggggaattgaccctcgtcgttatttgcctggggttaacccgatggataaacaagcgcttggtaacggatacgctttgtttgctgtgcaacccttttgcacgaccgtgcttggaaccttcgaggctttgacgcaagcatggaaggcatccccatgctatggatatcccgggcatttataacgctgaagtggttgagatcagcgacctggatgaatttcaagagttgggttgggaaagaaatgggcccaacatgggcgcaagtctaaaaaggaaatcgcccctttggcacaagtggggtcgcccgttcctaggacccttttttgccccgccctccttgttgttcatgctgccccttttctacgtcgtgggcgccccacatatggagtgtgtgggttgagaacgattcctccagagtgctgaaggtagcgcgttctacaaaacgagggaccagcgggataacacaaactttggtggtgtcccaaaatcacgtttatatcggcaatttttccccaacgcgaacaagttggagatgcaaggcgcctgcttgggcagcaacccgccattatagcgaatcggacgccgggtagggagaagaaacacgcccatgacagtaattgatgggctagcaacacttcggagttgtctagcccacgtcgcaccacaacggtaaagtagtcacacgcctcacactgtgg

SEQ ID NO: 523941 - DNA, 286 bp, Homo sapiens
taaggaggacaaaggtacattatcaaaaaatcatgattgagaaaggatatgggtacatataagattgtattgttttgtttttgagactgagtctcgcgatgtcacccaagctggagtgcagtggcacaatctcggctcaatgcaacctctgcctcctgggttcaagcgattcttgtgcttcagcctcctgagttagctgggattataggtgcccgacaacacgcccagctcatttttctattttaactagagacggtgtttcaccatgttggccaggctggtctgg

SEQ ID NO: 523942 - DNA, 264 bp, Homo sapiens
  misc_feature (160)..(160): n is a, c, g, or t
ccactttcatagtagagagatggcagccatttctttgtcccgtgagtctttttccaggtaaccaatctgccctttgtgaagaaaagacaaaggtagaaaggatggtggaggacaagacagaaggctaagaacaggaaggtaatcttgtgcacctgacaanatagaaagaataaaggatcaaaaattgaatgcagtctataagagtatcaagaaattcttagaaaaccataaagtgatttggtagcacaaaacttacagttaatg

SEQ ID NO: 523943 - DNA, 162 bp, Homo sapiens
  misc_feature (34)..(34): n is a, c, g, or t
  misc_feature (133)..(133): n is a, c, g, or t
cccccaaaaaaggtttaaacccctttaaaaaaangcctttcaaaaaaggggaaagttggggggcaaattttttaaacgggaaaattaaaaaccccccccaaaagtttttttaacccggtcccccaaacaaaanccccaaaaaaaaaaggttttgggggtcca

SEQ ID NO: 523944 - DNA, 429 bp, Homo sapiens
cgggcgccgggggtcacacctattgtcctagttctttgcaaggctcgggtcgtgacgacacgtcaagagttcaaggccagcctgaggaacatactgagtgctcgtttatacaaaacatacaagagttgggcagctgctgcggctcacgcctgtatgccagactgtgggggtcaaggtgcacggatcacgaggtcatgagttagagaccagactgtccaacatggcgaatccctgttcctactaaagatacaataaattagctgggcgcggtggtatgcacctatagtcccatctactcgccaggctgaggctggagaaactcttgcacccggtagacgtatgatgccgtgagtcgagatcgcaccattggactccagccagggcgagactccgtctcaatattattagccggcgtggtgccgcgtgcct

SEQ ID NO: 523945 - DNA, 252 bp, Homo sapiens
gggggggttttttttccccctttacctagcccgggggggggaaggatttccggtggaccaggttgtcttccccccctaaaagggggggaattggggtttggtctcccccccccccatggatttcccccttttttttttttttcccttttgaacccccccggtttccccggggccccgggttttttttctcccccaatggggaaggggcggtttgttttttttaagggttattaattttgggttttttcttga

SEQ ID NO: 523946 - DNA, 450 bp, Homo sapiens
gagccaaaagagaattttttttccttttaaaaatacattggttcagcaggaaaaaacattttaaaaacaagctttttcatattaagtggaaattaaaaacaatggcttttcccccgccaacttatgaggaatagggctggtcagcaatagatcttttagtgcttccaatatgtttttaggcctttgtccccagtctgttccttgtcttccacagaaaggagttccaggggaaaaaaaaattagaatctcaccaaaacagcttcctaaatacagatggaaaaataagagggggacacgactgtttcgatttaatttatttggtagactgtgcaagatattttaatatttaaaattttcagtgggattaaaaccaattgtttaaacattcattaaacctttgagggtttaaatgcctaacattttaaaaaattccctcgtgccaaaattcct

SEQ ID NO: 523947 - DNA, 163 bp, Homo sapiens
cagaaaagacgctgggcctggcaagcggggcagtagcggcttccgggagagtttttggcctccacacggctgcgtcgggcgccgcgctctttccggcagcggtacttttgggagacgccgggaacccgcgttggcgtggttgactagtgcctcgagcctcagc

SEQ ID NO: 523948 - DNA, 87 bp, Homo sapiens
  misc_feature (24)..(24): n is a, c, g, or t
cattggataagcggatgagggggngatcattcagttttacttttctttttgttgaaattttgtacccggaatcgcctcagttgatag

SEQ ID NO: 523949 - DNA, 149 bp, Homo sapiens
aaccccagccttcggcccggaagtttactaaggcggacccatggtttccaactcatatgtagtaaaccccgtcaccctctcggaagatgaagaagtagataacctcatagcccttgatagcatagtactacatgtaccagttgtactcc

SEQ ID NO: 523950 - DNA, 276 bp, Homo sapiens
gtatgtaaggaacggtagtgtagtgagtactcttatgagaatgtgtagcaagtgatgacaataataattgcaaagtactatagaaactgcagagcaaatgccgtggcttcatgatcctgaagggaaaacttctgatggtagctatagtaactggccagttacaaagcttatataggagtccttagaaaacagtacgggaacctatacggtagtataccacccagatatatgacacacctagcaatatcatcaaattactaacgtaacctaccaatc

SEQ ID NO: 523951 - DNA, 1068 bp, Homo sapiens
gatcctgcatggcgatcacctacagtctgtgtcgtggcaacatggttgctgtgcgatgtcacactatactctcgaggcacatcatgctatctcaacgcaccattcttgagctttcgcatgcgggtattaatgcacatgcttccgatcttcctcggacctgcgcggcgggtaggctagtgcttcattgcgctgataattccctgactcacttgttgtaccttgtacaggcacgcgccggtatcgaacgctgaggcttccacgtacgttgtacagaccaagccatgtgaaccaaccactggatgaagaatcctcagattcttacctaaccgaatgatgaaagagttgagcgcagcgaatggctggcatcacagcctgatagctgcacaggctatcttagcgaacgtcatgatgcgtctgcgtgagaactctaccttatttaaccgcacccagggagagttcaaaaagtggtggcgtccatggtgaaggcgtgggatgaatgcacgacttttattgtccagctgcgacaattcgcgtgggcaggcgcgacagaagaaagggccgaaagaggtcctgaatgggaagcgatactccctgaaaagaatggccaaaaaaacacaagacggatgggctgtgtccggcggcctcttctgtcccagcggacaatacaatgacaggtcccaagcctgtcaggcattgaggtggggcgtggagagacccccgccaaggagcgtgccattggaaacaacgcttgcccaatgggccgctggtgacgcaaaaaaaaagcttgatagcgcgagggcaccctacttgtgtggatcgtgtcaattggcccctggggggatacttaagcccgggcacggggggggcccccccaaatcgtcttgtttgtacattcccatggtgacagaacctccgagttgcctcaggaattgaaggcgacaggtgagggctttcattccaacggaaaggattgggcttgaccacgcctttggaagcatatactaccatagggctggcgggggtgagtggcgcgcagaaggactgggcggtctgcggcggggacgtaat

SEQ ID NO: 523952 - DNA, 354 bp, Homo sapiens
atattatactagcattcaccatctcacttctaggaatactagtatatcgctcacactcatattcccccaaaaaatggagggattatacttttggttgtcaatataggcacctttaaacccccaacacacccactcctctctaggcacatatatgtgtcgccctatgcgcacatatttggctcttttcccccccctcgcagagggagtgcgggctttacgccatctttaggtcaaactccccaaaaatagggtataccaccagcagcagcataccataacctcctactaccagtaaaaactactaatcggcccccaacatttattactactaccctcacttctctccaccaaaca

SEQ ID NO: 523953 - DNA, 395 bp, Homo sapiens
agaagtttctgagaatgcttctgtctagatttgatctgaagacaatcccgtttccaacgaaatcctcaaggctaggcaaatatcctcttgcagattccagaaaaagagtgtttcaaaactgctccttcaaaacggtggttcaattctcttagttgagtacacacatctcaaataagtttctgagaatgcttctgcctagttgttacgggaagatatttccctttccaacataggcctgaaagcgctccaaatgtccacttccagatactacaaaaagagtgtttcaaacctgctctaccaaagggaatgttctactctgtgacttgaatgcaatcatcacaaagaactttctgagaatgctgctgtctgctttttatatgtaatcgcgtttccac

SEQ ID NO: 523954 - DNA, 370 bp, Homo sapiens
catgttacagttgctcacgcctgtaatcccagaactttaggaggctgaggcagagaatcacttgaacccaaaaggcagacattgcagtgagccaagatcacacccttacacttcagcctgggtgaccaagactccgtctcaaaaaaaaaaaaaaaaaaaaaaaaaaaaccaggtgttgtggcatgcagctgtagtctcagttcctagggaggctgaggcgggaggattgtttaagcctgggaggttgaagttgctgtgagctgtgattgcaccagtgtactccagcctgggcaataaagcaagaccttgtttcaaaaagaaagaaagaaattagcatggtgggaatggggacagatggcaatgttaagta

SEQ ID NO: 523955 - DNA, 174 bp, Homo sapiens
  misc_feature (19)..(20): n is a, c, g, or t
  misc_feature (25)..(25): n is a, c, g, or t
  misc_feature (28)..(28): n is a, c, g, or t
  misc_feature (39)..(40): n is a, c, g, or t
  misc_feature (61)..(61): n is a, c, g, or t
  misc_feature (90)..(90): n is a, c, g, or t
  misc_feature (103)..(103): n is a, c, g, or t
  misc_feature (108)..(109): n is a, c, g, or t
  misc_feature (138)..(140): n is a, c, g, or t
  misc_feature (167)..(167): n is a, c, g, or t
ggaggcgggcggcccgggnnccaanaanaccccatgganncccccagcacggggcgctganacccccgcgtcgctgcccagcccggtccngcgcgccacgcanagggnnatctggacaggacaagactccgaagcaannnccccagcacacagcccgggacccacanacccagc

SEQ ID NO: 523956 - DNA, 339 bp, Homo sapiens
  misc_feature (103)..(103): n is a, c, g, or t
  misc_feature (105)..(105): n is a, c, g, or t
  misc_feature (337)..(337): n is a, c, g, or t
cccaggaaatatgatcctatatggttcccttaaaagattttccaatacactgaaaatttagttccttatgttcattgtataaaaatcttaggccaggcgcggntntcacgcctgtaatcccagcacttcgggaggccgaggcgggcagatcatgaggtgaagagatcgagaccatcctgaccaaaatggtgaaactctgtctctactaaaaatacaaaaattagctgggtgtggtggtgtgtgccagtggtcccagctactagggaggctgaggcaggaaatcacttgaacctgggaggcagaggttgcagtgagccaagatcgcgccactgaattnca

SEQ ID NO: 523957 - DNA, 89 bp, Homo sapiens
taggaggaagaaggtggggaggaagaggaggaggaagaacaaggtgatggtgacgaagaggatggagatgaagatgaggaagctgagtc

SEQ ID NO: 523958 - DNA, 298 bp, Homo sapiens
  misc_feature (32)..(32): n is a, c, g, or t
  misc_feature (39)..(39): n is a, c, g, or t
  misc_feature (62)..(62): n is a, c, g, or t
  misc_feature (137)..(137): n is a, c, g, or t
  misc_feature (155)..(155): n is a, c, g, or t
  misc_feature (163)..(163): n is a, c, g, or t
  misc_feature (181)..(181): n is a, c, g, or t
  misc_feature (190)..(190): n is a, c, g, or t
  misc_feature (214)..(214): n is a, c, g, or t
  misc_feature (223)..(223): n is a, c, g, or t
  misc_feature (225)..(225): n is a, c, g, or t
  misc_feature (237)..(237): n is a, c, g, or t
  misc_feature (246)..(246): n is a, c, g, or t
  misc_feature (251)..(251): n is a, c, g, or t
  misc_feature (254)..(254): n is a, c, g, or t
  misc_feature (258)..(258): n is a, c, g, or t
  misc_feature (281)..(281): n is a, c, g, or t
gttttccttagaaatttaggtgagagattttngcctttnttattggataaattgggccaganaggcagggtagatttcgaagcactggttctgttgaagttaagtttattaagcctgggaacattaaaagctaattnataaaagcaatacttttnaatatganacttactgcaagtttgtntatactttngcctaaaaaggaaattggatgggnatactgtgnanaatcataaaacnccagtatanttganctntgangttatagaaaatcagagaggggnaagtttatagggcattt

SEQ ID NO: 523959 - DNA, 145 bp, Homo sapiens
gtggattaactggcatccctccatctagttctcctgtagatcctccctggaatcttccaccactcttctcccccactctaccccctcaactgcctcctggacctcttcccacccactccagccccttgcctggagcctggcggac

SEQ ID NO: 523960 - DNA, 124 bp, Homo sapiens
tctcacgaagatcggcatcccacctctaagagggagcaccaggggcagggggactctttcgggatgtggtagtcagacagggggcgtccatcttccagcggttcccagcaaagatcaacctcgg

SEQ ID NO: 523961 - DNA, 210 bp, Homo sapiens
gtgagagtgggaggattatggagctgcagtctgtctccgcggctgaagtggtgtccagcctaggaatttgagatcccctcactcctcctcacaagaggtcaggcttgcaattgcatcagaaaataggatagtattgtcagggctaacacgagaccaagggctccaactataacacaatctctctggaaacttcaaggctttacctattaa

SEQ ID NO: 523962 - DNA, 242 bp, Homo sapiens
aatgataggggtggggaacacggaagaagagaaaagaaccagaggagagaagagagctagtgtaggtatattctctgacaacttaagggagtttaaagggattgctaagagattaaccaggacagataaggtaagggctacccgtttttatgtactaaagaggttactaggtgagctttatggagtaatgtccttgtgtatccatacctctcatgtaagagtgagatcgacgtaggagttcg

SEQ ID NO: 523963 - DNA, 692 bp, Homo sapiens
  misc_feature (20)..(20): n is a, c, g, or t
  misc_feature (31)..(31): n is a, c, g, or t
  misc_feature (322)..(322): n is a, c, g, or t
  misc_feature (498)..(498): n is a, c, g, or t
  misc_feature (523)..(523): n is a, c, g, or t
gccagggtggccagggtggnccaggttgccnggggtgggagctaaaatgcgttcccccccggggttttttttcccggggagcagcaagccctttttggggccgttctgtgggttccgacccaatattgggggggcaaaaattacggggcctttcaaccgacaccctttcccccccctgggttttgcatgccgggttcccgctattagcttggggcggggccatttgggcctggaaaaacccagcttatttttatttttgggtgcccacccccccccccggttgtttggtgattccccttgttttccaaaaaaccaagaaagnacccaaattggttttgggccccggggggccctcccccttggagggaaaggggggggggaccccctccctgggttttttcaccccccggggtccccccccccccttttttttgggttttttaaaaaagccccccccgccccgggggggattttccccgtcccccctatgggggtttncccgggggccccccccggttgggantgggaaggttttcccccccggaaaaaggggttaaaaaaaagccccttttttaaaggtaccattcttccccccccgggggccccggtaaaaaaaaccccccctttagtttttttgggttttcctgttttttttttccccccaaaaaaaaaaaaatcccggggttttttta

SEQ ID NO: 523964 - DNA, 1549 bp, Homo sapiens
gggttaccgacgcctcgctctgtgttcgccagaccagcagtcgcgccctgagcaatgcggtggcagggaattcgtgaccgcagtccagacgctgggccggcaggatggcaccggcgcaccgcgtcgcgtgactgacgtcgcgtgtgtagcgctgggcgtctcgggggcgacctgggcattgcgacgctggtgcgcgcgatgcagttgtaggaggactagggctgctctggtgtggatatcattggagttgcgctttgtgtcgaatgtactaatctaatccctcgggagatccgttgcctcgtcagtaccgatacgaactagatagcatcgatagacacctgacatactacgtagtaatcagccgcaactttcgtcccacaattgacgcgtcctgaggacgtctagttgtcccaactagcgacataggtaattgcacaagttccttggcgcctccattgtctcatttcgaaagattctcttacacagttgacctagcgagatttgtcacgaagaaggcgacagggattgccggttagactagtagggccgtgtatggtatagggactagaccctgggtccggacgcggtggatcgcgcaaaatccacaaaggacgacggggcggagaagtccattcgcagttttggctaagaacaagtggctacaacacggcgtgtgtttcatgactgggtcctacatcggtcgtgatggaggctttactacgtccccagcaagtaaacaacacaacttacaaagtgttgttcatacttcttattgcccttccctagaagcaacgaccagtgaccggtagggacttggacgcttcatcgaagacagttcctccttggtaccattgcgcaaaccacccgagatcttccacccgggggaacgttatcacagtggcacgctctggctacccatcgggacccaatcctaccaaacaccaaagagaacctaagctcacgacttgcaacgccacatctacaccctgggggcactgcgcttggtaatgggtcccccttcccaatccgactgtctgctatacacccagaaacaacgacctgccgcactcacgggaaggacaaggcagccaagccgaatgggcgcccaggctctcccacaggtgggacactcgagggttacgaaattcacccgtgtatgggtctcaaaccatctctgcacttggcaaggtgccccacgaattatataaacacacagcccaggagatctcccaaaaacacacggcccagcataggaccagtcagcaggtacacacaacagcgagaaacaggacaagcggacccaccaaagacatccagatcaatacaccaccggcggagaagggaaatccacagaacgacaggcacagcaacagcacgaagaaaagcgaccacctagcacacccgcaacccccagcacacacacaggcaccagacgcccccaacgagcatcacaacagccagagcataaccgcacagactcatagcaccgccgaacgaagcgacgtccacaatgcagaccacgccgccaaccaacacgcacaacgcagct

SEQ ID NO: 523965 - DNA, 1059 bp, Homo sapiens
  misc_feature (4)..(4): n is a, c, g, or t
  misc_feature (91)..(91): n is a, c, g, or t
  misc_feature (96)..(96): n is a, c, g, or t
  misc_feature (111)..(111): n is a, c, g, or t
  misc_feature (118)..(118): n is a, c, g, or t
  misc_feature (138)..(138): n is a, c, g, or t
  misc_feature (260)..(260): n is a, c, g, or t
  misc_feature (263)..(263): n is a, c, g, or t
  misc_feature (354)..(354): n is a, c, g, or t
  misc_feature (475)..(475): n is a, c, g, or t
  misc_feature (500)..(500): n is a, c, g, or t
  misc_feature (511)..(511): n is a, c, g, or t
  misc_feature (522)..(522): n is a, c, g, or t
  misc_feature (525)..(525): n is a, c, g, or t
  misc_feature (534)..(534): n is a, c, g, or t
  misc_feature (538)..(539): n is a, c, g, or t
  misc_feature (549)..(549): n is a, c, g, or t
  misc_feature (554)..(554): n is a, c, g, or t
  misc_feature (561)..(561): n is a, c, g, or t
  misc_feature (569)..(569): n is a, c, g, or t
  misc_feature (574)..(574): n is a, c, g, or t
  misc_feature (586)..(586): n is a, c, g, or t
  misc_feature (593)..(593): n is a, c, g, or t
  misc_feature (596)..(596): n is a, c, g, or t
  misc_feature (610)..(610): n is a, c, g, or t
  misc_feature (615)..(615): n is a, c, g, or t
  misc_feature (618)..(618): n is a, c, g, or t
  misc_feature (621)..(621): n is a, c, g, or t
  misc_feature (624)..(624): n is a, c, g, or t
  misc_feature (628)..(628): n is a, c, g, or t
  misc_feature (635)..(635): n is a, c, g, or t
  misc_feature (638)..(638): n is a, c, g, or t
  misc_feature (644)..(644): n is a, c, g, or t
  misc_feature (646)..(646): n is a, c, g, or t
  misc_feature (657)..(657): n is a, c, g, or t
  misc_feature (670)..(670): n is a, c, g, or t
  misc_feature (715)..(715): n is a, c, g, or t
  misc_feature (738)..(738): n is a, c, g, or t
  misc_feature (756)..(756): n is a, c, g, or t
  misc_feature (759)..(759): n is a, c, g, or t
  misc_feature (797)..(797): n is a, c, g, or t
  misc_feature (802)..(802): n is a, c, g, or t
  misc_feature (806)..(806): n is a, c, g, or t
  misc_feature (818)..(818): n is a, c, g, or t
  misc_feature (822)..(822): n is a, c, g, or t
  misc_feature (850)..(850): n is a, c, g, or t
  misc_feature (870)..(870): n is a, c, g, or t
  misc_feature (888)..(888): n is a, c, g, or t
  misc_feature (899)..(899): n is a, c, g, or t
  misc_feature (938)..(938): n is a, c, g, or t
  misc_feature (952)..(952): n is a, c, g, or t
  misc_feature (973)..(973): n is a, c, g, or t
  misc_feature (990)..(990): n is a, c, g, or t
  misc_feature (1033)..(1033): n is a, c, g, or t
aaanaaaaacataaaaagcgataaatgataagataatgctatttaaattaagcacagtgattggaatactatttatagaacagtataaaanatgtnctccatatgccttcnccatggncctctaagatgttagaaganacattagtaggtgaaatgtaagggtaggtagttgcctttttcagcgaattgagaggcagggaaacacagtggcaaacacaggcaatatccattgttgcttaagaaagtgaagaattttcccntcntccaaagtattgacaaagatggtgatttttgttgtagccttgaacctgagactaaatagtatatgttgactaaataatatatttgattggncttcaaactggaacattaatttgaaaaggttaatcaaaatttcattggtttataactacacataattaattttctttaattaataactgttggttttctttaaatcttgttgaaaaatatnccatagaattggaaaatgtgttttntgtttttaacntttttagaaantgncccatttcntgtnnttttcaagtnggacnttttatnatgcaaancattnatttttcctttnacacgtnaanacaaaggcatggtnagttncanttnatnatgntttcacntanttcaancnttttaaattcntgtccaatagatnttttcacacttattcctttaaattatacatagggagtttttagtngttcatttcacccatttgttaanatgaggaacttggaaaanttnaaaaaccccatttggaaaaagaatttctgtaaaggggntcttncccnagacttttgganaaantttttttttttagtaaacttttaaatgnctaaacattatggcttggtnatttagaaaaggaagggnaaataaaaggngaaaaggaaaaataccaggttaaataaactacaattctnattattattacaanccagggtgggttttggtgatnactaaatgcataaagangagtaggggcattttgtttagaaccacagaactgatttagggnttctgggagttttttcatattccttc

SEQ ID NO: 523966 - DNA, 206 bp, Homo sapiens
aaggcatgacggaagtccagtgtggcacagtcaccgtccacgttacagtgctcctcggacagcaccaacggcacgggggtacacggagggccagatccctagaacttatattctatcacgtgacgagcacttccccagagcgtcggatgtgggctcctgaggtgcacatacacatccacatccgtcccctgcttgcttagatgcta

SEQ ID NO: 523967 - DNA, 466 bp, Homo sapiens
  misc_feature (30)..(30): n is a, c, g, or t
  misc_feature (62)..(62): n is a, c, g, or t
  misc_feature (80)..(80): n is a, c, g, or t
  misc_feature (443)..(443): n is a, c, g, or t
cggagaacagctctcaaatccaccttcccntgaagaccaaggcctcggggatatttatgggnttaggggaaagccagggntggtcctaacgttgtgggggaaaaagttgattgggccaatgggggaaaaaaaatgaaagtaaccaggttccattctgccaccaagccattagtcgggggttcattgccatctcaaaggaagtatgttcagtaaatggcagcattagcgtgatctgggggaggtggagcttttggccctccaatgtcaaaaggccacctctccggcacttgctcaggcccagttgaaggggcagtggtcctaactggtttgaactggacaggagcttgccctagtttctgaaaaacaactgttgcgaccattaccgtggtgacctatgaatgttatctgtaaagtagccagtgaaggtcaagttccagcattcnagtgcaaggcctcagcttcatgg

SEQ ID NO: 523968 - DNA, 1482 bp, Homo sapiens
  misc_feature (988)..(988): n is a, c, g, or t
  misc_feature (1262)..(1262): n is a, c, g, or t
aatgaaccaccagtcatctgcgtatcgatactagttacaagctcagctctatgagggccacttatgagtggagcctctcgttctacgtgcgcgtgcacgtgaaatgcaagcgtacctgacacttaaggactcatggtggaaatgtttcaccttttcctatctgcccgaataaagctgacttccctacgaattaactcagtgccacttagcatgatactctacatcgactacttaacctcaatattacccaaatgaatggacgcagtactagtagacagcgtaggcaagaggcaactagttaaccacaggcgacaaaacaagctacccaattcatcgcgtgggtctcatataccaaatgaggcacatataccggaggtaaccagagtggagtcaaagtccccttgaggtgctcattttcattccctacgaggcataggtgtgcaaaatgctcctttcctggaatgcgcatatttcttcttgaccacctattgaacgtatgtactcaggcttgtatagctgcttgtacccttgcgctgattgtccttatgggacgagagtcagctgggatccctccaaagcacgagcgtattcaagtccactggtgtcatgagtccccgcaataggaaattattccaccagctcgcatactgagagaaacatcgcggctatctaaacactcgtgcgatccactaacacgtctatgtccaaaattcaacacccctgtggcccttcacccgtggtagtaactgatacttagatatcgcccattatccagaattcacaccaacacgtcattttatcccatacggtcaaaactttggctttgcaatttggaccggaatattgtcggtctggtgagtgaatactacctcaatttcttggtccctctttcaccttaaacaatatgaccctttgccaggaagtaaaccccgtagcgagtacgcttcacctggtacacactccggagtgctaaccggtgacgccaggnactttactatgaagaggaggggtatctacagcaatcttctttatggggaggttacgagcccaaacaattgggaacatttttccacggcgtggctttacacagaacagaggtcgcacgtctacatttagtgtaaacaataggggttttcacattccacagtatatggtgcggtttgcatggaccaggtccccaccagtgaactctgcactggcgacagctttgtgtgtacgctgagttaaccgattaaaatatcctctcaccttctctcggaggnccattttgcgttgaagaagacacgtgggtctgacacgtgtgtgattacacgtgggcgctacacttttcctgagaaagcaaatttgcgtggatactgtggaagctagagtgtcgacactggctgacgttgtgaagtcacacacgagtatattgtacgtcacgtgagcgggtatatatacaggagaacacacatagaagaggatagttgagaaacaacagga

SEQ ID NO: 523969 - DNA, 890 bp, Homo sapiens
  misc_feature (6)..(6): n is a, c, g, or t
  misc_feature (226)..(226): n is a, c, g, or t
  misc_feature (246)..(248): n is a, c, g, or t
  misc_feature (250)..(250): n is a, c, g, or t
  misc_feature (258)..(258): n is a, c, g, or t
  misc_feature (339)..(339): n is a, c, g, or t
  misc_feature (391)..(392): n is a, c, g, or t
  misc_feature (433)..(433): n is a, c, g, or t
  misc_feature (448)..(448): n is a, c, g, or t
  misc_feature (450)..(450): n is a, c, g, or t
  misc_feature (452)..(452): n is a, c, g, or t
  misc_feature (474)..(474): n is a, c, g, or t
  misc_feature (476)..(476): n is a, c, g, or t
  misc_feature (495)..(495): n is a, c, g, or t
  misc_feature (506)..(506): n is a, c, g, or t
  misc_feature (517)..(517): n is a, c, g, or t
  misc_feature (527)..(528): n is a, c, g, or t
  misc_feature (532)..(532): n is a, c, g, or t
  misc_feature (558)..(558): n is a, c, g, or t
  misc_feature (560)..(560): n is a, c, g, or t
  misc_feature (620)..(620): n is a, c, g, or t
  misc_feature (636)..(636): n is a, c, g, or t
  misc_feature (744)..(744): n is a, c, g, or t
  misc_feature (751)..(751): n is a, c, g, or t
  misc_feature (777)..(777): n is a, c, g, or t
  misc_feature (804)..(804): n is a, c, g, or t
  misc_feature (806)..(806): n is a, c, g, or t
  misc_feature (811)..(811): n is a, c, g, or t
  misc_feature (879)..(879): n is a, c, g, or t
tatatnaaggctgaaggaaaaccatatctggataaagtttaatgttcactgagcatgacctaagactactgggagaaagttaatttccagcactcattttaccaaacctatgtaaccctgatcagggatccctgagttagctccagagctggaacagacagggcaaagggactgagcctccaaccctgagcagtggccaggcactcgacatgacaagctggaagancctgaagaacgagctctcannngngatttttnggaaagatcctccacgactcctccagacgctcagtccagggccgccaggttcagccaccctccccgctgtctctatctgtngccctgccaccagtcactcaacccgactttttggtctagagtaagagcagcnnctgtaccccaatggcacagcaaagcaaatccccctacatgnaccatgcaaggtcancntnggcagctcagtgaaggcaacanantccagtgcaggtccacaangtccccctgcnggacgcctgtntgcaggatgnngggnggagggaactgaattggaagccaaangnggagggcagctgggagcaggagcccctagcccttttcagaatagggcaaggtactcagancttctgactctgaggnagaagtacaagaactcctttcactgcagaagtatcccaggacttaagccatgggaagaattcacaaccttgaagtcagaagtgaaataaactgtgtggagtccaaggnaggaggntgcctccagagcagaaggaaatggangggtggaggtgtgggcaggaatgcagnanaaganaaaaaaaaaaccacctccacttccacccccaccctcttgctgctgtaacttggagggtaatgaaaggntgtgcataaga

SEQ ID NO: 523970 - DNA, 185 bp, Homo sapiens
ttctcctcctcttgcactgacttatttctcattagaagcaggtgtcaggcgaagagaggacaacaaggtcaaggaagtgaggcagactggagtatacagagcccacatattcttataaagaacatcactttgaagggggacagatatgtgggcgacgcaaacaatgagctagacacttatgccat

SEQ ID NO: 523971 - DNA, 357 bp, Homo sapiens
cgaggaacgcactcacagtcgaatcataatcctcatctcaaggactatacacactctactaccaataatagctagtttgatagacatctagcacgcctcgatacaactcgcctataacccccaatattaaactactgggagaacactactctgagctagtaaccatgtactcctgatccaatatcactctcctacatacaggacacaacaaactagtcacagccctatactcttcttctaccatattacaccaaacccggctcaataatactggatacaaagtaagagacggaatacacaacatgtagcccaggcttgatactaccaaatcctgaaaaaaagagacaaacctcctga

SEQ ID NO: 523972 - DNA, 153 bp, Homo sapiens
tactcgaacccaggaggtggaagttggaggtggtgaccgtggagacgtggcaggagggctccctcaaagcctcctgcctatacgggcagctccccaagttcaggacggagacctcacccggtaccagtccaataccatcctgcgaacctatga

SEQ ID NO: 523973 - DNA, 420 bp, Homo sapiens
  misc_feature (127)..(127): n is a, c, g, or t
acgcgtccgcccacgcgtccgagcgatcctcctatcttggcctcccaaagtgctgggattacaggcatgagcaacagcacccagcctagtcataagaataatggattttaaacaaggtctgttgcantttactggaagtccactccaaaacctgattgcctgggtatcaccagtggaggctgcagaacaacaaagattcctgcctgcttcttcctctggaagctttgtgtctggaattgttacccatggccaaccatggcccaaagatattaatggaaaattccagatataagtaattgatgaattttaacgtgtgtgtcattctgagtaatgtgatacctgtaccaacctgctccatcctacctgagacatgcatcattcctgttttcaagagaccatcaagcttcagataattatatg

SEQ ID NO: 523974 - DNA, 398 bp, Homo sapiens
  misc_feature (35)..(36): n is a, c, g, or t
ataacacaaaattccttttgcccataaaagacccnnccttttagtggggcccaaagaggggtggggaatttttttctcgaaaaagggtttttccccccccaaaaaagcccaatttaaagggggaattgtgtccgcccttttaagttaacccccccaaaaggggttttggcccaaacacaaagtgttggtttttaaaatggaaaccccccggttggaaaaatagggtttttcccccccccggggtttttttaaaaaaaaccaaaggtgcctttaaaaggaatttaaattagggaaagggctgggggggggaccccgggtttttttaaaaaaaacccggttggctttggggtttaaacccgggaacctttttttaaaaaaggttttttcggggttcccca

SEQ ID NO: 523975 - DNA, 151 bp, Homo sapiens
tgattgccggccacctactcatgcaccttattggaaacgccaccctaactatatcataccattaactcttccctctacacttatcatcttcactattcttattctactgactatcctaaaaatcgctgtcgccttgcaattccagcctgga

SEQ ID NO: 523976 - DNA, 206 bp, Homo sapiens
atctaaggacttgatatgtgccatcactaggatatcatgtctctatcattctactaattgttgcttctcatcactcatatgatatgagcctcatgtttcaattttcagctggaatggaagggcaacttcgctgacaattctttgcctggccttccatctctgtgacctttcttcctttcttctctcgctccatttcacacatatca

SEQ ID NO: 523977 - DNA, 1127 bp, Homo sapiens
  misc_feature (206)..(206): n is a, c, g, or t
  misc_feature (211)..(211): n is a, c, g, or t
  misc_feature (216)..(216): n is a, c, g, or t
  misc_feature (553)..(553): n is a, c, g, or t
cagtgggagccagaagccgtgtgacagatccagcaagtgtgactccttactctccaccgtgagcaagtcagcagaaccacagcagaactgaacctccgagaaggcagctgttgagatcctaagttaaagaagataaactaagaatgcttgagatattcacagactagaggaaggaaacagcctgaaccaggagccacatgaccgcnaaacntgacntggagactggaaaggagtcagagaacatctagaaatgacaagtatgatacatgaccgccaaacatgacgtggagactggaaaggagtcagagaacatctagaaatgacaagtatgatacatgaccgccaaacatgacgtggagactggaaaggagtcagagaacatctagaaatgacaagtatgatacatgaccgccaaacatgacgtggagactggaaaggagtcagagaacatctagaaatgacaagtatgacagatgaaactgtgtgggtttagcagcaggtccattttggctaaacagatcttgtattagtggatggaaaggaaaccagaagnaatgcgggctaaagagccaaacagaaaacaagagacactaggaaccgtggaggccagggtgaggcacagcacacgtttaaacaaagtttgggggtgtgaggcttaaagtgacagtggccagcaattttctctaaattatgaaagcctgaatacacaggatcgggagcacagcatccatccatctcataatgaaattgcaggacaccaaacgcaaagagaatatcttaaatgcacccaaggaaaaaacgcaaattagctctgagagcggacaccgagatgagactcggctttgccacggcacagtgggagccagaagccgtgtgacagatccagcaagtgtgactccttactctcaccggcagttagaatcaagcttgaagtagatgcttgtgcaagaatctggtggtggataaggcattttcaattggggaaacatgtattcacgaagggaatcagtagaagcgagtgtaaggggagcctggctgcagaaaagggtgagacagattgggagagaaagaggctggagggagagcggggaaacttggagttggacaaggagggctaggaagggagg

SEQ ID NO: 523978 - DNA, 147 bp, Homo sapiens
ggtgcagaggatccctccaagatgaggaatgtcgagagcttttgttggcgttgatattcgtgagatggagtcttggcttattgcccaggttgtagggcacgtggtgctgctcttgggtcactgaaatctccatctctcaggttcacg

SEQ ID NO: 523979 - DNA, 1067 bp, Homo sapiens
  misc_feature (146)..(146): n is a, c, g, or t
  misc_feature (151)..(151): n is a, c, g, or t
  misc_feature (156)..(156): n is a, c, g, or t
  misc_feature (493)..(493): n is a, c, g, or t
cctcctacccacgcctggagactggaaatggaatcagagggaacatctagaaatgacaagtatgatacatgaccgccaaacatgacgtggagactggaaaggagtcagagaacatctagaaatgacaagtatgatacatgaccgcnaaacntgacntggagactggaaaggagtcagagaacatctagaaatgacaagtatgatacatgaccgccaaacatgacgtggagactggaaaggagtcagagaacatctagaaatgacaagtatgatacatgaccgccaaacatgacgtggagactggaaaggagtcagagaacatctagaaatgacaagtatgatacatgaccgccaaacatgacgtggagactggaaaggagtcagagaacatctagaaatgacaagtatgacagatgaaactgtgtgggtttagcagcaggtccattttggctaaacagatcttgtattagtggatggaaaggaaaccagaagnaatgcgggctaaagagccaaacagaaaacaagagacactaggaaccgtggaggccagggtgaggcacagcacacgtttaaacaaagtttgggggtgtgaggcttaaagtgacagtggccagcaattttctctaaattatgaaagcctgaatacacaggatcgggagcacagcatccatccatctcataatgaaattgcaggacaccaaacgcaaagagaatatcttaaatgcacccaaggaaaaaacgcaaattagctctgagagcggacaccgagatgagactcggctttgccacggcacagtgggagccagaagccgtgtgacagatccagcaagtgtgactccttactctcaccggcagttagaatcaagcttgaagtagatgcttgtgcaagaatctggtggtggataaggcattttcaattggggaaacatgtattcacgaagggaatcagtagaagcgagtgtaaggggagcctggctgcagaaaagggtgagacagattgggagagaaagaggctggagggagagcggggaaacttggagttggacaaggagggctaggaagggagg

SEQ ID NO: 523980 - DNA, 655 bp, Homo sapiens
  misc_feature (206)..(206): n is a, c, g, or t
  misc_feature (211)..(211): n is a, c, g, or t
  misc_feature (216)..(216): n is a, c, g, or t
  misc_feature (553)..(553): n is a, c, g, or t
cagtgggagccagaagccgtgtgacagatccagcaagtgtgactccttactctccaccgtgagcaagtcagcagaaccacagcagaactgaacctccgagaaggcagctgttgagatcctaagttaaagaagataaactaagaatgcttgagatattcacagactagaggaaggaaacagcctgaaccaggagccacatgaccgcnaaacntgacntggagactggaaaggagtcagagaacatctagaaatgacaagtatgatacatgaccgccaaacatgacgtggagactggaaaggagtcagagaacatctagaaatgacaagtatgatacatgaccgccaaacatgacgtggagactggaaaggagtcagagaacatctagaaatgacaagtatgatacatgaccgccaaacatgacgtggagactggaaaggagtcagagaacatctagaaatgacaagtatgacagatgaaactgtgtgggtttagcagcaggtccattttggctaaacagatcttgtattagtggatggaaaggaaaccagaagnaatgcgggctaaagagccaaacagaaacagccagcaaggaggagctggaagtgtcaaggttaaggctccctaggctaagccccctaagatcctctagagtac

SEQ ID NO: 523981 - DNA, 726 bp, Homo sapiens
  misc_feature (394)..(394): n is a, c, g, or t
  misc_feature (413)..(413): n is a, c, g, or t
  misc_feature (462)..(462): n is a, c, g, or t
  misc_feature (520)..(520): n is a, c, g, or t
ccacacctggcctgcactcattttaaagttggaaaaacagaggccccagtgattagctttaggacggaaaccagtaaatagaaataaaaacacacaaaaatatatacatatatatacctacacacatctatacctacaaatgtttatatatgtatatacacacatatacacacacctgtataatatacacatattatatatattatttatttatttaagtttttattctttgtttttttgagacagagtctcactttgttgcccaggctggagtgccatggcgtgaccatagctcaatgcagcctcgacctcccaaacacaagcaaacctgcctcagcctctcaagtagttgcgactacagacatgcaccaccacacctggctaatttttggtntattctttgtacacatggngatcttgatatgtacctaggttggtctggaaactctggcctcaagtganctttccaactcagtattccaaagtgctgagattacaggtgtgaagcactgtgccaagncaaaccaaacatttttgagttgcccctaataggatggcagattagataaccaataggtcaataagaagatcttgacaagttaatcactaattaaacgatatggaaataatggattcgaaagtgaggaaattctgaatattaaaggatgatagaatttggcaaataacttgggtaagggatccattagggtatctttgctggggggg

SEQ ID NO: 523982 - DNA, 153 bp, Homo sapiens
  misc_feature (89)..(89): n is a, c, g, or t
cgtgttggttcctcaaagaaaacaccagatagattgtttctaagctagagccaccccagatttgcttaaagttgcaaagctcacttgcntgtttgggggttacccttcttgagacactggaaagactgggttttacccgctggcccctgtgaa

SEQ ID NO: 523983 - DNA, 724 bp, Homo sapiens
accggccgatgtagctcaccccggtcgcgctttgttgccccagcgcactaagtgggccagtatgtttggcgcgcccctctgttcccggcgggggttgtggataatataactcttgcgtgggcacaggaagaacagcccagcaggtgtgcctgaaacacactgctctccatgggagagaagttgagtagagtctaatcaaggacggaggcagtcgctctgtgcgaggcaccacacacgggtgagtatctagatactcacgatgtactccccatctcataggagtggccttttgtgtggaggaagaagtaatcggcggacagatacaccacgtggcatgaggaatatgaaaagcaggtctctcctcgagcgttgggaccccactggcgtggtcgcacaataggaagtagagatcaacgagacaagataattggttgaggaaatcgatttctttgctagacctcctactgtgagtgtatgcggggtaccccctaccacaattctctctaccctctttggtggaataaatagcgccataaccctactgcttcctctagagcaaagataattatttgttatatctacaatatggccctcacatattcaataaaacaataacaagttatcttaatcattatccacccttaatcatcacccattttctatatttgcattttataccacgagtgcgcccaactcccacccccacatcaataataagaaacaa

SEQ ID NO: 523984 - DNA, 279 bp, Homo sapiens
ggaactggcctgtcccttggaaaaggacatgtattagaacagcactgatggtgcaggagagaggagtggagtactgtcttggtcttgactttgaaggagaggctgggatgttggagatgtgtgtgtgtgtaagtgtgttggtcatgaagtgtgttaaaagatagtatctgccacatggagttctctgcttaaggtagttttctttttcttcttctttttttttttttttttttggggctttttaggggccgcccccattggattttggaggaattctca

SEQ ID NO: 523985 - DNA, 603 bp, Homo sapiens
taatttatccccttgatgatgagacccaagatctcatgattaggaaacatgtgagtacccagtgggcaaaatcccgcagataatctcaattaagtggttcttccaataagcaagcaataatttaaggtttgtgtgtttgcgcagtatgaaatttcttaatggagggtttcataatatatcttagtcacagcttttgagagttttgaaggagaacaaacccatggcaaggcccgtgcaaataattacgggccctttgagattagacaatacacgcattcttaaaaaaaaaaatttagcacacacctttattaatgcctttatatggaaaaagaccgttagatatatatagatctattttttaagtcaggaaactccgggacatgattttacacattattttaacaatgggttacatattcacagggtataaaaaaaaaaaatagtgagaagtgggtttcccacccatcctatatccacccggttctcatccctcaccccaaagagtataaacactgtctttttttttttttgtgacacactcttactcgtgtcacccgagtatagggtgcagtggcaccatctgggctcaataccacctccatc

SEQ ID NO: 523986 - DNA, 486 bp, Homo sapiens
  misc_feature (425)..(425): n is a, c, g, or t
  misc_feature (459)..(459): n is a, c, g, or t
  misc_feature (479)..(479): n is a, c, g, or t
aattcggcatgagggctacatctcattgctgcccttcttcccaatccaaagcctcctttgtgtcctctaacatccccacaatatcaccccttaccacaagacctcccttcagcttaatctctcccactctaggttcccacgccgcccctaatcccacttgaagcagccctgagaaacatcgcccattctctctccataccaccccccaaaaattttcgccgctccaacacttcaacactattttgttttatttgtcttattaatatcagaaggcaggaatgtcaggcctctgagcccagggccagggccatcgcatcccctgtggacttggcacgtgtaacatccaggatgggcctggaagttaactggaaggttccacaaaaggaagttaaaaacagcctttaactggatggacatttccaccntgtggattttgtttccttgccccaccttaattgntcattgttatttggtaattntccccct

SEQ ID NO: 523987 - DNA, 704 bp, Homo sapiens
tgttgcactgtaccagtttttaaaaacctgaaccataacggcttcgcattctagtacacttacttacaaaaaaaaaaaaaaaaaaaaaaaaaaaaaaaaaaaaaaaaaaaaaaaaaaaaaaaaaaaaaaaagggggggggggcaaccctcgggggggccaaaagtagtagagcaaccccccctgtttttgatgaaacagaagggtggcccccacaagaggaggactgttctatatataaacaagagaagaggcagggggccggtcttttaaacaacaaaagccggatgggacgacggaacaacgacgatgacacggtgggtagaactatgcgggggaaagaagaacaccatctctctccggggggcgggggaagcaacatagtgtggggacacacacacctccaccccagcgagtattttatataccaacagcccacaaggaggggagcataaatatatttcacttctttctacagagggcgtgacatctaggcgggggtgtaaaaacacccccaccgcccgaatcatatttacgccctcggcgcccgttagagaagagaaacatgtcgtcgtcgcccccccaccgcgggcacagtctctaaccttccctccaagccaacaactattattctacccccggcgcggcgcctcctttgctacataattcctctccccccaccccagaccaaaccccacccccacac

SEQ ID NO: 523988 - DNA, 929 bp, Homo sapiens
  misc_feature (387)..(387): n is a, c, g, or t
gcccttgcaagtaatagggcttctgctaagctctccctccagccaataggcagtttcttaatatcctaaaagccttggaccaaatggaaataaagcttttggatgcaaaaaaaaaaacaacaacaaacaaaaaaacttgtgtggggccgctcgggccctgaaaataagtttttcaagcccatcttgtgtggggcgcggggccccagtaggtttagtttgacacactgggcgcaaggcttgtcccagaggaaaaccgggccccaggacatagggtgtgtggctttctcccccaaaataaaaaaagcggccggggcgcgacccgcagtgtttcggaacacaattccaaagaggggaggtcgggaggccaaactggcgtcttcatcacancgggggggtcgccaaaggggagggggtccggagtaaataaaaattaaaccgcccgcgggggcagggggaaaacaatccagcaacataacacgatcacatgaacacaagacctacacaatccagcacaacaagcacacacacaaacagaacacagctaacgacaaacataacaagtacaactacatatcaagacaatcacaaacacgttatacagcaccaacactcagcaacacacacacacaacaacacaagctaccaaccacagagtgacagaagggtgaggcaagaaagcacgcgtaaacagagaaacagacacagacgagacagagagcaagagcacaggcagaccagcagagcgaaagcggagacagacaagtacatagaagagcgagaggagcgaaatcaagacgaacaaaacaaggcagagagagagagcggagacgcacggacatagcagactcgacagaacgacagcggacgcatgagaagaagcgcggcggtggcagcgagcggcggcacagagcggctgacagaccacggtg

SEQ ID NO: 523989 - DNA, 390 bp, Homo sapiens
ggtaccagtatcttcacgttggtcagctgttacttgatagcctcttaaggaaaatttgcttccaaatgaagctggagagtcatgtaatctttaaagtatccagactttccgtaatgacatttgcctttaagagagctatcatgctcacgtggaatacgactttgtcaaacaaatgaattacaatacatgggctttggaagaatttccgttacgtattggttaacgaattatgtcgtacaaaactttgagattggtcgtggtcactggaatccatcgaaccgacataaacatctcaagttttattgacaacataagaaaacaaagaaacacaaaaaagagacctggggggcgatcatattgtgcgcgggctgcgggcgaaacaaggggtaa

SEQ ID NO: 523990 - DNA, 296 bp, Homo sapiens
  misc_feature (14)..(14): n is a, c, g, or t
  misc_feature (177)..(177): n is a, c, g, or t
  misc_feature (199)..(199): n is a, c, g, or t
  misc_feature (214)..(214): n is a, c, g, or t
  misc_feature (283)..(283): n is a, c, g, or t
tttgttatttctcntttttttcgttttatttttttttggagatggagtctccctcggtcaccaggcgggagtgcaggggcgtgacctgggctcacggcaacctccacctcccaggttcaagcgattctcatggcctcggcctcccaagtagctgggattacaggcatgcaccaccangccccggcccagcctcttaaanggccggtttattttnatttttagacatgcagataagcgtagttgcctagttcctaaacttacagcaaattagaagataatttcngtgcccatttcaa

SEQ ID NO: 523991 - DNA, 220 bp, Homo sapiens
ccacgtataagtaatacacatctgatcaaccacgcgctccatcatcttaacgtcgtctctcggtgaagcttctccccgctggagtggtctgtcggtgaccagtgtgactgcttgattgtagatatatgacgcagtcagtgcacagaagttgtactaggtagctgtactcatccatggagcctgtagtacacttggtatggggtaacaggtgcagtgtttt

SEQ ID NO: 523992 - DNA, 243 bp, Homo sapiens
  misc_feature (232)..(232): n is a, c, g, or t
gatctgaggttaccctcggaatcgacggttctcaacttttgcagtgaaaaagaaaacagatgatgatgcagaacgcatttgttctatgtgcaatgctttaactactggccagatagtgcaagtgtggaatttgtatactcccagttaatgagtttgacagaacagagtctctgtgtacgttcacttcgtactataccagatgcgtttacggagacaggacaagaactctccnccagctgctca

SEQ ID NO: 523993 - DNA, 449 bp, Homo sapiens
cgtgccgccacgggtgactccggggcccccccctgtgccgcccacgggtgactctgaggctgcccctgtgcccccctacaggtatgagtccgaggaagctcagatgcctgcgttcattaggtttagggtgccatgagccttggtatccataggttacttgagacggtgggacgctcgcatgtgagcgtcctccttacgcgatcttgagcgtcttccttgaagttaacgccttcgataccgcctaagaagaaaataaatactaagaaagagagcagaacaataacgaaaagaatcgaatataaatacaattataaagaaaaaaagaatagtggggtggcggcctttagataaatattatatttatatgaagaggacgggtgaagcgagatagtagcagagatatatattaaaagaaggggagagacgaaaattaaggggtaataaaaagg

SEQ ID NO: 523994 - DNA, 320 bp, Homo sapiens
  misc_feature (77)..(77): n is a, c, g, or t
  misc_feature (292)..(292): n is a, c, g, or t
  misc_feature (299)..(299): n is a, c, g, or t
ttcaataccctgtaacatgcgcttactgaggcttcaggagctgtaaacatcctcccctatacactgccacgggtctngagccccacagcctacccatctgtatgctaccctagaggtttgagtagcagggcactgaagaagcgagccacaccctcatcgcatgccctgccagggggacaagggaacctttcccttatcaatagtaatatctataattgtacatcatttgaccgtgagataatatataaaatctttctggagtatccctacacacttttcaagataacaacanaactcanggaattattgaaaagaggatg

SEQ ID NO: 523995 - DNA, 195 bp, Homo sapiens
gacagacacacacacacacaccccataccccacactgactgtctagcgacaaagaccctatttcctggcatacgggcttcctctgtaccctgtattttttgtgtacatacttgtaaacacggatttgtctgggttttggtttgctttttccttttgtccccctgtctgtgttttatgtcctgatagacactctgt

SEQ ID NO: 523996 - DNA, 344 bp, Homo sapiens
ccacacaaacataccacacactgcacacaccacacataccacatacacacacatgcacacacatacaacataccatgtacactacacactatataccacacatacataccccacaccacacacacccacacgagtgacatgtgaataagctcttggtccatactggtgccagatgcctgggtgtgacgtgacgacaccactgtatgtgtggcatataatgtggtatataatgtaccatatggtatgttgtctgtgtggatatgtatgtggtatgtttgtgcagtgtgtggggtgtgtgtagtatgcagtgtgtttgtgctgtgccagtgtgtgtgtggtatgtg

SEQ ID NO: 523997 - DNA, 358 bp, Homo sapiens
  misc_feature (358)..(358): n is a, c, g, or t
ggagagcacttagatgagacacaatggaggtttagtacaccgcattagtctacatctgatgatcacggctcagttgatgccacagcgaatgtagacaaactgcctggcaatctaatgctagtgactgtcagagagtcaagaggaaagaggctctacaatcacagagatgtatcaccttacaaagttctttacggagagagcatagtggcattctacctcttagcttcacttagaggcctattaggtgtagtaacaatgggttacttaggactgggcctgaacttgcattttttgagacgcccgatgttgcagttcctctgggtctagcttacagaccctgacctcatcttacctcttn

SEQ ID NO: 523998 - DNA, 136 bp, Homo sapiens
ataaagtaagtgctgtttgggctaacaggatctctcttgcagtctgcagccaggacggtgattccagcagcggcttaccgggagccggaaggttcactattgtgaaaatggccttcaattccccttccgcgtcaaa

SEQ ID NO: 523999 - DNA, 340 bp, Homo sapiens
  misc_feature (4)..(4): n is a, c, g, or t
  misc_feature (6)..(6): n is a, c, g, or t
  misc_feature (16)..(16): n is a, c, g, or t
  misc_feature (220)..(220): n is a, c, g, or t
  misc_feature (327)..(327): n is a, c, g, or t
tagnanatcagtcatntgattcagtgtggtggtgtatttgtaccttttcacactgctataaagaactgccggagactgggtaatttatgaagaaaagaggtttaactgactcacagttctgcaggcttaacaggaagcatgactgggaggtctcacggaaacttaccattatggcggaaggcgaagggtacaaggactttcttcacattgtgggcaggtnagagaggggtagtggtaaatattttttaaacaagcagatcttcgtgagaagtcactctttgaaaacagcactagttgggatgggtgctaaaccctccaggaaactgncccccggggtccc

SEQ ID NO: 524000 - DNA, 691 bp, Homo sapiens
  misc_feature (400)..(400): n is a, c, g, or t
tccccacattctgcaaggacaggagccaccttcctctctctcacctcccctgccctgtcaccagaggtctctatgattaatttcttaggcctatttaagatacatattatatagtcctaaacggttttctctgatcatttcctctcatttttagaatccccaggtctctctcagccaagacagtggcagggagagcctgaacttatgaggggagagggcagagccccttcctcaagaccctcaagctctaacccattttcctccagccctggtctaccccggatgaagagcgttcgcaggtgggcagccagggtagccagttgaggtcaggaaggtctgtgtgcctataagcgtccccctttccccaggaacacacacccttctccgctcccaggtctgnttggagagacctgggaagtcaaggaataggggaaaacggggaatttgtgggttggggggttttccccttgaagcccctccctttttctttcaggcctgttttccttccccccccatttgttgtctttgaccctcacttaaggtgggacaccacttatttcaataaccccatgaggattctgtcccaggccccagagtccggacaagacctgttttggcccctattccttaattgagggggttgtgtggggccccatgggtggagcgggaaggggatttggggggtacagag

SEQ ID NO: 524001 - DNA, 235 bp, Homo sapiens
gaggatcccggtgtttccgttgtctattaaaactcaaaaattagcggggcgtggtggtgcgcatctatagttccagctacttgggaggctgaggcaggagaatgacttgaacccaggaggtaaaggttgcagcgagctgagatcgtgccatttcactacagcctgggtgacagagcgagactctatctcaaaataaaaatttttttggttaaaaagtagggataccagacaaagg

SEQ ID NO: 524002 - DNA, 1235 bp, Homo sapiens
  misc_feature (550)..(550): n is a, c, g, or t
  misc_feature (838)..(838): n is a, c, g, or t
gagatgtgaaatcttcagtagaagaatagctctttaggtgagttcgcaggaaggtagatgatatggagatcttgagctaaagaataggaaatgtgtatcagaattggtcgtacaaagcaggtcctgtgatttattgataacatgaagagcaggagtatgtgcgaagattggtgaagtgatcactaaaggtgtgattcggggatcactcgagtgaggccaccattatgcttacgcattctaatcgcagtgccgtcggattgtcagcctgacgcttgagaatagaaggccagtcaaatcggttcacaaggggtggtggcattgaatgggaaaccgatgcgattcgtgctacttccttataactataagccgtaaaagtaatgtcaacgacgcagtccacatgaggtactctcataggaccaagcaataattcgtcgctaggtggagacacaaggagaacacaacgtggcacccgtgagtaattgaaacgatcaagggtagaatacgcgaaaaggcgcacatttaacctatggggttcgaaacattgtgtcangcggaggagtttggcccgtttaggggctccgttgtttttaaagcacaatttatgcctaagagttggcaagaattttggattggacgtaggaagagcagaatggtagcggaaagggcaatgggagggcaacctgggaggaggggggttcccttttggcggaaaaggatcgatattgtgggatgggaaatgacctatccatagagaacttggtagggaaattttctcatgggagagcatggcgaaagagaaaattccttaaagggaaaccagtgttacatacttctaggnaatgaatcctattgatcaaggagcaggggtgtttaacatagaggttagtaaggaaagtggggatatccttgaattacataagcccagggaattctttgcgtttagtctcataacaggttataactataatgccattgagagggatttaccaagtccttggggagaaaaagtctagacggagggaaaaacaggcgtttatgggacataatttggttacatttgtgagacgtatacaaggagggtttggactcgcggacctaattgatacggggagccttttggggcagtggtaggtaacgtgtgagcgaattatatgagaggcctcggaattgtacattcacttgggctggaagagagccattgtggtatacttggaatttggggagaaggagggaac

SEQ ID NO: 524003 - DNA, 125 bp, Homo sapiens
ccagcgactcaggaaggcagtcgctctctacactcaatcagcgccaagaggcactttctatgggactcttaaggtagagatgagtacatccactagtagtctcttgcgcaaaatgtctctgagag

SEQ ID NO: 524004 - DNA, 466 bp, Homo sapiens
  misc_feature (12)..(12): n is a, c, g, or t
  misc_feature (61)..(61): n is a, c, g, or t
  misc_feature (91)..(91): n is a, c, g, or t
  misc_feature (104)..(104): n is a, c, g, or t
  misc_feature (352)..(352): n is a, c, g, or t
  misc_feature (367)..(367): n is a, c, g, or t
  misc_feature (422)..(422): n is a, c, g, or t
  misc_feature (424)..(424): n is a, c, g, or t
ccattcagtccnggactgtccaaggggtggaggtagctccgtacaggaagctgcctgctgngtgtggatcagtaatatcagacttgcccancaactcactgganacatgaaaaccaatgcatgggggatgcatgacgtcacccaaatatttatgaacactcttgtgctgccagagaccccagatctttaaaccaatgcatggggaatgcatgacatcacccaaatatttacgaacacgcttgtgctgccagagaccccagatcacttttcctgcctcctgctaaataaatgggggcagtagctttgcatcggcttccacattacattactcataactgtggccttcctaatntctcatgtccctaancacttattacaatgtctcagcacgtttcgctcagcctctcaaaatattagtcatnangaaaataaatgtctgatgttaaagcatcaggggtcaattgta

SEQ ID NO: 524005 - DNA, 240 bp, Homo sapiens
gagagaggaacgtttcgttacctgagtaaagaacatcgaaaaaaacccgtacagctaatatcattagttgatgattaagaaacctggaacgctttccatgcaaaggattaagcacaaggcaaggaatgtccccatctaactccattgcattttccagccatccattctagttctcagctgcatgccagtaagcacaaagaaatgggaaataacacaggtatatagcatttgcaacaaggg

SEQ ID NO: 524006 - DNA, 707 bp, Homo sapiens
tcaaagtagttcaatcaccaaatcctatcatttctacctcctacatatttaaaacatccgtttaatggcctctttatctcctccagtctattctccacattgcaaccagagggttcctctaaaaagaacttaatcttgcctccttttgactgaccaactagccttcaatgggctagcactatctgtcggttaaatccagactccttaacacagcaaacaagggcctccgtaatccggcccattcccacctttgcagcctcatcactcctcactgcctcgtacccgctcccctctatcttggctggctctcagtttttcaaatgcactgggcactttctctctcatgggactttctgctctttcctctgcccagaatcctccctccactccctagatcagagttgggaccttctctgaccaaagactgtgataggaccctctgctgtatgttccttgtctccttttaactttccataataaaaaattcatcacacctcagtgcaattttttatctaaagtctatgttcccaatagcatgaggatggggacaatgtctatcttcttcaactctgtatcccagtgcttagcacagagccacatatatagtggactatcaagaaatatctgtagaatgaatgaatggatgaataaatgaatgaatgtcagagctacttggagggatggcatactggccatcatagcaaagc

SEQ ID NO: 524007 - DNA, 455 bp, Homo sapiens
gtggggggtatgacacatcatcgaagcacataatagccagaagtaatactgggatatcctaagataaactattacctactactaccagacaacaacaaagatactccatgataatctaccagttccgaaagaatcacagcatttgttaaaggtagaataggatatttctgacggtttatatgttgccgatcatagcttgaacactgtacctataatgttcctgacaatagactattctgccttgaataaaataaaccggtaagacaagtttgcaatcaaatattcactcgttcgagcatatgagtctttgtttttgtccgtgaatataacatcttgtttggttgcccaggctgaattgcaagggcgcgatctcagctcactacaacctccgcctccgtgaattcaagttgatctcccacctcagccctccaagtatagctgaattacaacgcatg

SEQ ID NO: 524008 - DNA, 173 bp, Homo sapiens
  misc_feature (115)..(115): n is a, c, g, or t
ccccctggcaattgtgtaaagatagaatagtacatcataaactgtattaaaagacttggtcaatgcgtgtgtggcacgatggatatgtgctcgtgtcaaatagcctttgtgtgtnaataacgtgctctgtgtagtaattatcgctatcctggatgagatgtctaatacattgt

SEQ ID NO: 524009 - DNA, 1033 bp, Homo sapiens
  misc_feature (31)..(31): n is a, c, g, or t
  misc_feature (51)..(51): n is a, c, g, or t
  misc_feature (94)..(94): n is a, c, g, or t
  misc_feature (96)..(98): n is a, c, g, or t
  misc_feature (100)..(102): n is a, c, g, or t
  misc_feature (411)..(411): n is a, c, g, or t
  misc_feature (427)..(427): n is a, c, g, or t
  misc_feature (471)..(471): n is a, c, g, or t
  misc_feature (702)..(702): n is a, c, g, or t
  misc_feature (897)..(897): n is a, c, g, or t
  misc_feature (925)..(925): n is a, c, g, or t
  misc_feature (939)..(939): n is a, c, g, or t
  misc_feature (942)..(942): n is a, c, g, or t
  misc_feature (951)..(952): n is a, c, g, or t
  misc_feature (954)..(954): n is a, c, g, or t
  misc_feature (959)..(959): n is a, c, g, or t
  misc_feature (963)..(963): n is a, c, g, or t
  misc_feature (968)..(968): n is a, c, g, or t
ccatgagcgcatggctctggcgtgagcgctnggtgccggcatgggcttcgnccttgagcgcatgcccgctcccatcgaccgtgtgggccagacnannnannncatgggatctggcgtggagcgcatgggccctgccatcgagcgcatgggcctgagcatggagcgcatggtgcccgcaggtatgggagctggcctggagcgcatgggccccgtgatggatcgcatggccaccggcctggagcgcatgggcgccaacaatctggagcggatgggcctggagcgcatgggcgccaacagcctcgagcgcatgggcctggagcgcatgggtgccaacagcctcgagcgcatgggccccgccatgggcccggccctgggcgctggcattgagcgcatgggcctggccatgggtgncggtggcggtgccagntttgaccgtgccatcgagatggagcgtggcaacttcggaggaancttcgcaggttcctttggtggagctggaggccatgctcctggggtggccaggaaggcctgccagatatttgtgagaaatctgccattcgatttcacatggaagatgctaaaggacaaattcaacgagtgcggccacgtgctgtacgccgacatcaagatggataatgggaagtccaaggggtgtggtgtggttaagttcgagtcgccagaggtggccgagagagcctgccngatgatgaatggcatgaagctgagtggccgagagattgacgttcgaattgatagaaacgcttaagcagttgccttttttaaacatcgatacgagacctctgaatttgtattttttcttgttaaccattttaatttgttggctggatgtataaagatgtttaaaaaattcagttgctttttggggtaatttgaaanacttttttaatgactggggttccatttnactgttgcattganatngcaatgtgnncnatttntttngtaangtggcatcttgttgccatcgaatatgcctttcataataaatcccggttcctgtacataaaaaaaa

SEQ ID NO: 524010 - DNA, 309 bp, Homo sapiens
acaaggtagggggatatgtcatggtcatagatttgaagactaactgcggtaaataagggaattttgcccaatattaagctgtcgattaaagtcagaatcaaaaattccagcaggtttctttcctgctgcaattcacccactgatggtaaaatacatgtagcactgcaaacgatccagaatagccagagcaatcctgaagaacaataaaactggaagctctacactacaggtgccaagcactactataaagctatactagctaagatactgtcagtgtcggccaccacaaaaaaaacaaaaacaacattt

SEQ ID NO: 524011 - DNA, 1037 bp, Homo sapiens
ggttaagggtcggtgtggaattgctggacgaagaaagcgcgctccccgggtacttaggacctttccctctctactgctataccatggtctggggctatatagggcgcaagaaaaagttgtgcctacccggtgttcctcccaaccaaggggaatgttcaacacgctcgaggcccttgccacatctcttgggaattgggggggcatggaccagggggtcaatcctgacgaggttttctaatgcgccgggcctgtcccctaaccaaggacaaagcgtgctaccaagcccaatacgaagcgagatgactaggggtcttatcggcgtctaaaggcgcgatactgggactgcaagcttcgaacttcgttgttataaacttggtagggtgtggtcactacgaggagagcgactacgaaaaatgacccctatgcgcgtgaacgataggtatgtagcagttcaaccacctttgtgagagcttaaaacgggaccaagtatcgttcctgcctaaagggtgatccgacttcccctggaatgactgggcatgataatatgtctatgtcacaaggtcttgtcacgtggaacctcatgtgctcatccaacgctcaacctgtatatgtctcggaagcaattttcaccctcaaattccccttgtctgggccttgccatgaaatctaggggggatcataagggaagctagacggactggtcgttcagagtagtggacagacgctgagcacaacagggcacgtccgagagtcagccactcgagcaaaagtggacataagggatcacagggatgaggtcatggtaacctggaaagcgcggcacatgatgaagcgcagcccatgtgaggaggagaccaggagtggctggggatcccccactgtgtgcagaaggcagcagccttggaagcagggtgtgctcctcgcgtgtgggtcgcatcgataccagaaaatgactctaaaaactgaagagtgtttgagtgttcattaacacaaaacatggacatcatctgtgaaactcgctccgagagagacaggcc

SEQ ID NO: 524012 - DNA, 396 bp, Homo sapiens
  misc_feature (348)..(348): n is a, c, g, or t
  misc_feature (385)..(385): n is a, c, g, or t
ggaggcagctcctgatcaaagagcattgtactggggctcttagatcttcggccacagactgaaggctgcactgtcagcttccctacttttgaggtttttggactcagactggcttccttgctgctcagcttgcagacggcctattgtgggacttcaccttgtgatcatgaagtagaagtgattatccacattccatagaagaagaagcggactccaggaatggtctcatctccagggcagctgtccctcttctggatctctgggcaactccagtttcacagcaccctttctcctcctagcctagggatccagtgcctttagcagcccagtcatggcgacttttttaanaccagctgggggaactgggggttttcgccccaaaagncttccttaaga

SEQ ID NO: 524013 - DNA, 335 bp, Homo sapiens
gacccctatcataatgaggccccggctgccctgcatccggtgtcattaggcgatctgcccgactcagactcctatagtgccatcgcatagccactgcacccagctattttctgactgatccttgctctatctccttttttttttttaggggagggcgttttctacttggcccccagtctgatgctaactgttgggaactcggctcactgcaacctccacctcctgggttaaaggaattctcctgcctaagcctcccaagtggctgggactacaggggcgcaccaccgggcctggctaatttttgtttttctagcagagacggggtttcaccatgt

SEQ ID NO: 524014 - DNA, 1255 bp, Homo sapiens
tcctcccggttcgccaccgaggtctcgcacgcgggaagaatttcttcgcggcgcgaagaacgccgccgggaaggcgcatagcgttcgccctccataccgtggcggggcgtgcccatagggggcaacttccttcccccgagggccagaggacatcaaaaaaatcttgggacacaggcgggggttactcgagagggggacacgaacgacacgcggctctcaacaaggggtctactcgaggtggagcgtgaagagtggcaaacaaactttggaaacaagcgctcattgtgcccgagggtcttagtgggccaaagcttgtgcccgagtgtgttccctgtggggggtggggctgttatacccggttctctcgtgtgtgcccccagagggcctcgtggagagccccccgtggctgtggcgtgggtttctgtgccccctttgttgtgcagtccgacaggcagaaatagaaaagagaagtgcagacaacagaaagcagggagcgagagtcttccgggaaaagacagcattccagatgtcagcataaaccctggtggcgcccatgtgggggccccctttatacgaggatctactacaattctcgcgggggcttcccccccggtgccccactctcacacgcctctatataacaccacccctgttcaacaacaaaaacgacaacaccacaacacaccccgaacaaccagaagcgcacgagagcgccaacacacacaggcacacgaggagaggcgagacaacaccgagagggagaaaaaagaaaacacggcgcgccccacggggggaaaaaccaacgcgaaggcacaccccatagagaaccgagaaaatataaaagcgagtaacaccacaagcggctcgaacaaccctgagcgaagaaaagtaccaccccacataaaaggagagcaacacagaccaaatacacgaatgtcgagaaaacgcgcccagcagtctcaacactgcggaacacttgacgaacatgttgcacacaaacagaagaccagcaatacaacacagcaccaccacacaacgcgatcgaccaaccaaggaggaaacacaaaccccaataacacaacaaaaatataaaaataaaaaaaaaaataaataaacctattataacaaaaaaaaaaaaaaaaaaaaaccaacaaaaacaccaacaacacaacaaaaacacaaaaaaaaaacacaattaaaaacaaatcaataaaaacaaaaaaaaatacaaccactacactaccaaacaatcaat

SEQ ID NO: 524015 - DNA, 130 bp, Homo sapiens
gggggaaggggtgggagcccatactgagggcccgccgcctttactactctgttttccctattcagaacttggaactaaagtatttaaaaaaactgttttttaatgccaattaaagggccgattttttcca

SEQ ID NO: 524016 - DNA, 204 bp, Homo sapiens
gcagtaacctgtacacgttggcacgtgcgtcttttggactgcagaacacaaagtcgtggcgaactgggactgggacccaggcccaacttaaggtgcaggtgtcagcctctggtggccgtacctgatgcacgaacgccctgcgtaagctgtattcattggagatccgaggacagggcttcgattggccgccgatggtgtataccg

SEQ ID NO: 524017 - DNA, 358 bp, Homo sapiens
acccctgctgattgcctgttggacatctatcttgtgtttttctctaaccatggaaggttgcgaggacatatacagtatctgggggctgcacttactctactagctaggggcatcacatcggagagataggacagagaccagagtcgtgccagcttggggtcttgggaagagaggcatatggttactctgttctggaatgggactctgcatttctatgcagtggcccatattctgagcactttgtgcaaatgcttgtatgacgctcaagaacatctccatccagaaccccttccccatctgcagagaccatgtccaggcccttcttgtgtctgcagaggtgaagtgcacatgtggaaag

SEQ ID NO: 524018 - DNA, 239 bp, Homo sapiens
cagccgtccataaatatctgaacactttatgtcacaacatttaatataaatgggcaatttccttaaagacaaaaactagcacagttcactaacaaagaaacagataacctccatcaaatgaattgaacttgtagttcaaaatcttcccaataaggcaacttcagaccaagacagctttactggtgaattctgccaaacacttaaggtagaaataatgccaattttacacaaacttttcc

SEQ ID NO: 524019 - DNA, 861 bp, Homo sapiens
  misc_feature (11)..(11): n is a, c, g, or t
gggtctgccantcacagcagggccctggtggggatttgcactgggcactcctaatcctggagcaggatgccaggacggggatgctgatgaattcagagagcttggtacggttgaagaaaactgagtcttgtggcaatttgtgctaaaactaggtgaagttgccaaattccaaggcatcttacctaacagtctggtttggtcggctggttaccctggtgttgtgtgttacctatcctttgggcttggcttgaccatctccgttgtgagctcacctgagccctcccagggccaggttcctgacagtgttggtttctgcatatccactggaaaggtgtcattaatgacccagtgttagaatgcaagaggtcaggttattctagccctcatggctgaaggcccagtcctgggtccagcagtcctccagccagagggtctggaccatccagtgcctgtcctcgccacaggggctccaggagcattcgggtcaaatccatggacgaccctgggctacaaaccaaggcttgctgttcattcccacatcgtgtggggcagtgtcccatcccctgcagctacttggtgacttaacaactccaggagcccctgtcaggtgccctccttcaactaatagcccttcgagtcttcttgctttggacgacagaaaatgacattggggaggggaaggtgttccggctcccaggttgtctcaaatagtcctattagatactggtaaatctgtgaactgaagaagtcaattctgtcctcctgcagctacttttggccgaatggttcagggaagtatctggggtaggattaatggcaaaaagttgtttaaagggttgggacacagacttatacaacaat

SEQ ID NO: 524020 - DNA, 84 bp, Homo sapiens
gccagcaccaaccagacatctatgtacctctgtgccagcacgaaaggtcacgtcctgactttcggggccggcagtaggctgacc

SEQ ID NO: 524021 - DNA, 187 bp, Homo sapiens
ggagtaaaacgccgaggcaacattcaagcagccgtaagtcgccgtctctttgcattatgcagctgcattctatttctcaattggtaattctcgtggtggagaatttcgtaccagtgcatactcactatcatcagacaatccatattctctcatatcaatgcaccacacaatttattggaggtaccgc

SEQ ID NO: 524022 - DNA, 448 bp, Homo sapiens
  misc_feature (389)..(389): n is a, c, g, or t
  misc_feature (445)..(445): n is a, c, g, or t
acacaactgtaggaggtggctggagaccacggtttggaggtctcacccaatcaggggaaaggggatgagcaaccaattaaaggaggagtctggctgtgttttggtagagcaactgtactgtgttggggggatttgttcagcccccaattggcttgggctctccaaggcccacaggctgcactggctgagatgcccaaacagcaaagatggtgacccactctgcctcctgggcacccccatcccagggagaaattagaactctgttggccttagaacatgggcatgggtggcaggaagccctggctggggagtacctgcccagcaaggaaaaatggattggggtcccattttaaagaaacagttattgccatgcctcgacaaaacagccntttccatgctgggggaaccaccttttttcccagttcagtttggattcttaaagctngga

SEQ ID NO: 524023 - DNA, 180 bp, Homo sapiens
ccctctccgatcacgaacatataggacctgctatgagtaccaggctccctaaaacggaaacatgaaaaagcatagctcctcgcctgtaaccccaatattgtgggaagctagaggttgggcagactcacttcgagtccggagaatttgagcaccatccctgcgacaaaactgtgtgaaacc

SEQ ID NO: 524024 - DNA, 983 bp, Homo sapiens
tcataaggaagggttaaagaaaagtaaaaggaactcggtaaagtcttaccccgcctgtttaccaaaaacatcacctctagcatcaccagtattagatggcaccgccgtgccctagtgacacgatgttgtaacggcccgcggtacccgtaaccgtgcacaacgcgtagcactaatcactgtgctgccgttaacttcaggagacctgctagtgacagtggcctccacgcagggttcagcgtgtcgtctctactttatagaccagctgaagcttgacgctgcccgcagaagcaggcggagcatgcaccacagcaccagtacgcagcaagaccccgtatggagccttcacacttgcatctcaactgcgaaaccacgtacctacaccaaacccgacagcgtgcctaacactacgcaaacgctgccattcaacacaaataacgagccaggaggcgaccatcggcagccagaaacgcaacccatccgcagcagacaccatgctaaagactatcgacccagtcccaaaacgcggcaactacctcagtcacgtccaacttcgatccccaaatgaacctcggaaccaaacggcacacaaggtcctacccccataacggcgactaacacgccgccatatatccctacttcctagaacgtcccactactcacacaactacgcggctcatctaccagaacgcctccgacctgctttcggactcaacggaccaaatccccgaacttgcgtgcaacctctgccttgctcaccacggcttccgtgacgctccaaccgaccttaacaacgctccctaacggttgaattcctgaaggcttccaagcagccgggccagctaacctcccagggtccgcgactcccctattcttaacgtttccacactggccttccctggtaccgaaaacgggtcccacggagacacttacggggcgctaaccttcagccgaaggcggccttttccccccctaaaatgatattc

SEQ ID NO: 524025 - DNA, 625 bp, Homo sapiens
  misc_feature (26)..(26): n is a, c, g, or t
gactctattgcccgcaggcaggcgtntcaagcagcgcgaggcaagataggccgcttcctacaacggaaagggaaacaccgcaccgattggtcgatgcgatgggcctcactgcaccggcaggaaattcatcagcaacaggctttgtgcgtaattgaggccaatgcgccggtagcgctcatcaaggatttgggtcagcaggtccaaacgcgcgacgatcttgccgaactcaacggcaaagctgaggttactgccctcctctgatatctcgttggaaaacaacagcagcacgccattggcatcctgacgctgactgagcagccaggtggccttttcgatattgcgcgcggcattgctgacaaactgcgggttgatcgagtcggtcacataaaactgcgtacgcccgccgtgagcggtcacgagcatgctgccaatcgcgtagatgaacgcgccgacgcggtcgccgcgaaagtcagggctcaaggaataactcagggcagccaggtcactacgatctcccagtgcgggcaagggacggcgattttcgatggcctgacggatttgccgggcggcggtcactgcatccggataccccgattgacgccactggagaacgacccggggatcc

SEQ ID NO: 524026 - DNA, 180 bp, Homo sapiens
cggcccactcgcccaaggtcttgactggacggttgtcttatttccaggtgggcggacggtggtggtggagctagttaatcgggatttagaatggccctggtgagcgcgcgggaaaggagatgcctgagaaagagggcaagtaggactgggaatggctcaaataggattgcgaggaagagg

SEQ ID NO: 524027 - DNA, 743 bp, Homo sapiens
ggggcggttaaggccctggtggtctcgaaggactcgctgcggcatctgcattcatgttcctgtccccggggggtcggacgccttcccagtgcgcagcccggttcacctctccgtgccgagcgccgaggacagggtcgcgctggtgctgctttggatgcgtgagttcattatgatgggaccgaagaatccatcgaaggggcgctcgggcgagtcctggatggcaccgtgaatgccggtgtaagagggacgtgaagctccagactcgtttgactcacatgagcgatcccctcaggattgcactgctgaattgaaccagcagcgcaaaggaggtcacgtccgttccgaatggcgtagaggcaggacactgtttttcgaccgcgacgtctgtcgcaggattcggcccggtggtcacacaaatcatggagaggctggtccaagctctcacgtgcacgccatcccactgatgctgccactcgttatccacggaggcttttggatgcgggctaaggagaccctgatgcatcgttggccggtggaccgggtaaacacgattcgccataggattgcaatcaaaggcaagatgggcacgccgtgtacatggagatccagttcacaacgaggccttgcgagaagcttatctcggcttgtgctgtaatatggatctgtccttcgggagcatggtgttcagaggcgatccggtgactgtcggcgcgagccggcagcacggggagtggactatgcag

SEQ ID NO: 524028 - DNA, 158 bp, Homo sapiens
cataagaaaggaagaggtggacggatcaccatgacagtcaggaattctggatgagagatcaagccagctggacttcctgggtcgagtgacagccttggagacacctttatctgtctagcgtaaacggacttgtacactgcaccaactcagcactctgt

SEQ ID NO: 524029 - DNA, 988 bp, Homo sapiens
  misc_feature (49)..(49): n is a, c, g, or t
  misc_feature (68)..(68): n is a, c, g, or t
  misc_feature (76)..(76): n is a, c, g, or t
  misc_feature (78)..(78): n is a, c, g, or t
  misc_feature (88)..(88): n is a, c, g, or t
  misc_feature (117)..(117): n is a, c, g, or t
  misc_feature (137)..(137): n is a, c, g, or t
  misc_feature (141)..(141): n is a, c, g, or t
  misc_feature (143)..(143): n is a, c, g, or t
  misc_feature (151)..(151): n is a, c, g, or t
  misc_feature (157)..(157): n is a, c, g, or t
  misc_feature (164)..(164): n is a, c, g, or t
  misc_feature (168)..(168): n is a, c, g, or t
  misc_feature (173)..(173): n is a, c, g, or t
  misc_feature (176)..(176): n is a, c, g, or t
  misc_feature (206)..(206): n is a, c, g, or t
  misc_feature (218)..(218): n is a, c, g, or t
  misc_feature (226)..(226): n is a, c, g, or t
  misc_feature (237)..(237): n is a, c, g, or t
  misc_feature (249)..(250): n is a, c, g, or t
  misc_feature (254)..(254): n is a, c, g, or t
  misc_feature (257)..(257): n is a, c, g, or t
  misc_feature (259)..(259): n is a, c, g, or t
  misc_feature (281)..(281): n is a, c, g, or t
  misc_feature (291)..(291): n is a, c, g, or t
  misc_feature (301)..(301): n is a, c, g, or t
  misc_feature (306)..(306): n is a, c, g, or t
  misc_feature (310)..(310): n is a, c, g, or t
  misc_feature (317)..(317): n is a, c, g, or t
  misc_feature (321)..(321): n is a, c, g, or t
  misc_feature (324)..(325): n is a, c, g, or t
  misc_feature (333)..(333): n is a, c, g, or t
  misc_feature (338)..(339): n is a, c, g, or t
  misc_feature (343)..(344): n is a, c, g, or t
  misc_feature (353)..(354): n is a, c, g, or t
  misc_feature (362)..(362): n is a, c, g, or t
  misc_feature (378)..(378): n is a, c, g, or t
  misc_feature (405)..(405): n is a, c, g, or t
  misc_feature (457)..(457): n is a, c, g, or t
  misc_feature (741)..(741): n is a, c, g, or t
  misc_feature (876)..(876): n is a, c, g, or t
  misc_feature (975)..(975): n is a, c, g, or t
ggggggtaggaaggagaggggggggggggtgtatttaaaaggggggctnggcagaaatacaataactnaggggtcngnatttaatatngacaaccaaaaagtatatataaatatctngcatctatacacaacagggnaggngngtccaggncttctngagcagngagnggggnggntcccacaggccctcttctcatggtaatagngtggccctcagngcaaaggngactagaaccnggcagcccaganngggnctncncctctcctccctgcactccagngctcccaacnggtctcaggnaaagnaagnttaattngggnggnngggtaggnagggnngggnnggggcaaannctaatggngcctgagccctagggnggggagatccaggccagcggagggggnggccatagccacctcctgggatagaagctttgtagttcatagttcgattagngtgtgcttaggacataggtccagccctacagattagctgggtgaagaaggcaagtgtctggacagggcttagtctccaccctcaggcatggaaccattcagggtgaagcctgggatgtgggcacaggagactcaggctgatataaaaataacaaaatcagtaataaaaaaattataaaacctgtcgcttgtctgaatagatttgagcaacagtcttgcttttgttaaaatcctggagccgttaagtcctgaatattcttctggacatcattgctggctggaganaggagcgccaggcccggctcggctgacatctgtgaggtttggaagtctcatccagctgcctgtgctcctgagagatccttagggctgctgggagcaggccgggctggtgatctggggcgactaaacttgggaatnagcccccaggggatggaacagctcctcgggtgttttgtcactttggctggctccccctgccggaagcgggagcgatctatcgaggtccggctttagttnaggaatttgaagt

SEQ ID NO: 524030 - DNA, 357 bp, Homo sapiens
gcgtggtcgcggccgaggtacaatggaatggaatggaatggaatggaatggaatggaatggaatggaatcattccgagtggaataggagggaatgtattcgagtggaatggaaaggaatggtatcaaccagagtggaaaggatgggaatggaatggaatggaaactaatagaatggaatcaaccagagtggaatggaatggaaaggactggaatggaatggaatggaatggaatcaactcgattgtaatggaatggaatggaatggaatggaatggaatggaattaacctgaatacaatggaatggaatggaatggaacggaatggagtggaatggaatggaatcaacccgagtgca

SEQ ID NO: 524031 - DNA, 1041 bp, Homo sapiens
  misc_feature (23)..(23): n is a, c, g, or t
  misc_feature (129)..(129): n is a, c, g, or t
  misc_feature (141)..(141): n is a, c, g, or t
  misc_feature (190)..(190): n is a, c, g, or t
  misc_feature (251)..(251): n is a, c, g, or t
  misc_feature (400)..(400): n is a, c, g, or t
  misc_feature (412)..(412): n is a, c, g, or t
  misc_feature (417)..(417): n is a, c, g, or t
  misc_feature (421)..(421): n is a, c, g, or t
  misc_feature (445)..(445): n is a, c, g, or t
  misc_feature (473)..(473): n is a, c, g, or t
  misc_feature (477)..(477): n is a, c, g, or t
  misc_feature (490)..(490): n is a, c, g, or t
  misc_feature (505)..(505): n is a, c, g, or t
  misc_feature (514)..(514): n is a, c, g, or t
  misc_feature (523)..(523): n is a, c, g, or t
  misc_feature (536)..(536): n is a, c, g, or t
  misc_feature (549)..(549): n is a, c, g, or t
  misc_feature (557)..(557): n is a, c, g, or t
  misc_feature (560)..(560): n is a, c, g, or t
  misc_feature (571)..(571): n is a, c, g, or t
  misc_feature (580)..(580): n is a, c, g, or t
  misc_feature (591)..(591): n is a, c, g, or t
  misc_feature (600)..(601): n is a, c, g, or t
  misc_feature (604)..(605): n is a, c, g, or t
  misc_feature (610)..(611): n is a, c, g, or t
  misc_feature (619)..(619): n is a, c, g, or t
  misc_feature (634)..(634): n is a, c, g, or t
  misc_feature (642)..(642): n is a, c, g, or t
  misc_feature (647)..(648): n is a, c, g, or t
  misc_feature (655)..(659): n is a, c, g, or t
  misc_feature (661)..(662): n is a, c, g, or t
  misc_feature (672)..(672): n is a, c, g, or t
  misc_feature (678)..(678): n is a, c, g, or t
  misc_feature (696)..(696): n is a, c, g, or t
  misc_feature (853)..(853): n is a, c, g, or t
attcccagcttcattaccttgcnggaatgggaatgagagctgaatgtagggacaattttctagtgctgtataaagtagcctcgcatctgttttctcaaccttatccatcatttctgacattcatgcagnacttgccctgtngccaccaatgttctcggtatttcacatgcagctctctttctgccactgnaaacatgggttcaatccatttgtgaagctgtgatagtgtaactggaaagctagtgtggtgnaaattcctttattattttttgttaacatgctgatctttcccggacaaatgaactgaagggtaatttactggaactctcgtgtacagcttcatcaactgtaaccatataaatataactggaatattcttaaacaaaaagaaactaggggncctcttaagtgnaaatntatnactagccaacagagttttactatnttgattgtctggttggtttaacaaagancctngctgactcccccnctgtaaagccccccnggtaggctnttttaaagnactgtacatattngcaatcacattgngcatagantcntaatggcaganatgatcccntttgccaggcnacaacaatnnacnncagannccttgttngtaatgtaaatgatngaaaacantttgnnaatatgnnnnnanncctatgtttngctatnaaaaattttataacattnccaagacaaaaattccaagtttatgctttgaagaatttatgtaattaaaatttcactaaactaatctttttagtttaggaattatttgggttttgacactggaagttgccccaaataagcatcagaaataggagatgcttaacattgctatactacntgtgttggttaggggtttggatttgggggttctttggttttaatttttttttccacatttaaaacccttaaatgtactgtaagccccagatcgttgtccaactgggctgcggttgattgcccgtttgtgtactgttgcttggatgcggcccagtggttggtaatggaataaaggatgcctgggtccga

SEQ ID NO: 524032 - DNA, 1497 bp, Homo sapiens
  misc_feature (1046)..(1046): n is a, c, g, or t
  misc_feature (1082)..(1082): n is a, c, g, or t
tccatgcgtctgctggttgctctctagacgtctgctgctgcacatgatgcttgttgtgtcattactaacgggtcgtgtggtcttcggtctccccccgtcacagtattgtggtgtgcctcaccacgtccgttgtgggggcgcgctgtgtgccgccccctttatgtggcgcttttctcagggggggttcctacttacattatccgcgggggatcgctgagggatcgacgcctcttgtcggtcccggctgttgtttcccaggcggtgtggagcgatgcttttgttgagcccgcccccctgttggtgggggaaaaaattatccgccttgttgtgcgccccaccataggtgggtcacaccatcttgtaagatgagtggttatagcccgccgcttattatgtatggggattttgtaaccgcccggtaggaactcataaacgtgtttttgctcctatatcatgtaagccaccctctgggggggggaattaaagacaacagccgtgcggaggatgtgttaccaatgtgtggtcgcacgaagaatatgtctttgtcgccgcacattctttcggcgacacagttggtcgaagaaatatttgggtggtggagtcttttaggaaataaaaataaaaattaaaaacgcccccttttttcacaaagtttgtggcccagctcgggggtgaatggggtcccagctggtgtaggaatatggaaacgccacagaatatgtttcgtggaaaaatgaaaaatagtgttggttttttagaacggagtatccattcacccggtgtatacccagggatattgcaccaaagccttggctcttctttctcggtaatagttttctatagggtgtgttatattgtggacatttgtcagctcggtgttatatatatgaatgtgggccgccaaataatatagaagtggaagatatatatagaatttgataaataaatagtgtatatagtgggtgtgtcgcacacaagaagctcttaggacccttgtgtacactgtccacagcgccacacccccaccagtggcgttgaataatatnccaggagtgccagatgccatatgggtttaatacacnatagtgggtatagtgtgcccacaagccactcatataagctttagaaagagaaggaaataatatgttcttagggacgccacatcacccatactgtgtttccagacacatggaatagccccaccacacaccattaggactcccccaccacacacatccaatattccattgccaccaggactggactggtagattaatatttgtccaccaggaatctttatggacatgaatctaatagcttcccaaaaatagttgtgttgtttcgccaaataatccaaccattgttatgccagaaattattaattcaccaaatgaagatttataacccttgtgggtgttaagctgtgactgaactaaatctgtgggaaagcattgtgaactgtaaaagccaagtatccatataagcttatagacttta

SEQ ID NO: 524033 - DNA, 663 bp, Homo sapiens
  misc_feature (477)..(477): n is a, c, g, or t
  misc_feature (493)..(493): n is a, c, g, or t
gaaacaaacctttttattataaacaggtgtcacaagaacaaaaggccaggactctttcttgggccttggcaataaagttccaccactggtctggtcaaaagggaatggaagccaggcaacaaaccagctttgcccagggccctggttccgcccacggaaaattgctgatcccagtgcaaagttaagcattttccaagccaccacaacgtttttgaccccctctgtggccggactggccagaagccaaggggaccctccatgagctgcaagtggttacctgaaagaaaacttgctaatcttaggtttcctcttaagggtttccaatcttgtttcacaagatggccttgatgctgcgctgtgccccatgaataaatgtgtgatgtcttgcaggtgaaggtcaggccccgtctcctcatgatgctttcacagtatctgtcatccgggccctgtggtttggcatcatagtgctgggtcagnaagtgtgtgtacctgnagtatcctgaagccagggtcggtggggtcagacccagacccagcacgaagaccaacaacaaaacgcccaggcccatcaccatctcttccaacacaggctcccaggaggaagaatcttacaaaaatctggcagtttcccttcaacgggagatgggttccacctgtttgttc

SEQ ID NO: 524034 - DNA, 794 bp, Homo sapiens
gctacactatacattggtggcgtgctaccgagcatgataatgatgttggtccttgaagtttccagtgcccattaggccatcttgagtgcatgtgtctcttctaaaaatatggctcagtagcgatacagccgtgttctattaacaactctaagaggaagttcagaggttttgtttggatcttatcaacaggatttgtgacgtgcatctattcattgaactcatgtcttgattcaccgccttttttcacgttgtgccaacggaaatagggtgtcgatatttcttcatatgtaaggagatgcttcaaaatgtcaatgtgctttaaacttaaattacctctcaagagaccaaggtacatttacctcatgtgtgtatatcatgtttaatatttgtcagagcattctccaggttgtgcagttttatttctataaagtatgggtataatgtgtgctcagttactcaaatggtactgtattgttatatttgtaccccaaataacatcgtctgtacttctgttctgtatggtattgtgcaggattcttagggcttaatcagtgtaatctctgctttaagatatgtacagaaaatgtccatataaatttccattggaagtcgaatgatacttgagaagctgtaaggaggaggaaaacaaataaggctgtgttcccataagttttttaacttgtattggttttggggtattattccagaaggactgtaatggacctagagagggtgctatgttaggtcctaactacaggggaagatggaggggggactaattacttttcccacac

SEQ ID NO: 524035 - DNA, 396 bp, Homo sapiens
tcgagctcgcacccagacaaggagaggtctatgtccacgctttgggcaacaggataaagaaaaacagctactgcctggaaaagttgtttgtaagatgggaagaggtattctccagagctctgatacaactctatccagcaatagtgtagataggaacctgatggcagagataagagtcctagattcactgtggcacatataagcattcaatttccagagattacttgaagaaaaaaatagctgttattaaacacttaatatggattcagagtaatgggtacattaggtttatcaaatcccatttattcctgacaacatagctacaggtaaacatcattattatcctgatgtaaaggtgcagcagtggtgtcttacttcacatagttcagcgtctga

SEQ ID NO: 524036 - DNA, 706 bp, Homo sapiens
attattctcctgtaaaaataattgggaggggcgggtgtgttcggtgtgtgtgtgtgtgtgtgtgtgtgtgtgtgtgtatttttttttttacaggggcgcctgtctaaagtatttcacacaacatgtgtgataatcagcgcttaaaaagcagcagtgctcctatgaaggggaaatgtcagttctagagcatgggatgtgaagttctggtcatgtcaccttgcgtgtctcacccgtggaggagagaaggtgggcggcccggcgggggggtgtggctgcaccccagcaccgggagggggcacgcacgacaccagaggaggggacagccccacccatgtcaagcagcaggcaacccggttgtgcttcatttcacgggggatacagtattttttataatagggagccatatttttttaaaagagtggagatctgaatgtgatctctacctggtctcagacgttaggtgtgtcaaagctactaacaacgttccaacaaccccactctcgggcgcccactctatagaaacggggcctggctatctattacagcggcgtacttgcggacggggcgacagttgggggcccccctctagcatgggggtcccaatcacccaaaaaaaacaacacacaaacaaaacacaacatgcggcggccccgccgggcccggaaaaaagtcaaacacaagcggggggccaccggccaagcaagcc

SEQ ID NO: 524037 - DNA, 403 bp, Homo sapiens
  misc_feature (365)..(365): n is a, c, g, or t
ccggatcctttctaatgcacttgagcagcagtctccaaccacagggccacagagctgaagctggatctaccatgaaagacttgtgaatccaggacgagagactgactgggcaacatgttattcagggtctccctctgttgtccaaggctggagtgtaatagtgctatcacagctgactgcagcctcaaccttccaggctgaagtgattctcccatctgaacctaccacgtggctgagactacaggtgcttgccaccatgcccaactaatatttggaaccttcatataagtggattccagaggggtgacagcataacgtgggaccatccaggtgcaggaaaacaagcttaacacgcccactgattntacattatgctgctaccacccggcagcctctccaggcc

SEQ ID NO: 524038 - DNA, 118 bp, Homo sapiens
tttttaatacgtacaaagactgacatgtacccagggacccatttaccactgctctgttgcgcagctttgttttcagcatgtagcgatactagcgggaggatcatgtgtgctgcatcaa

SEQ ID NO: 524039 - DNA, 613 bp, Homo sapiens
  misc_feature (2)..(2): n is a, c, g, or t
  misc_feature (207)..(207): n is a, c, g, or t
  misc_feature (300)..(300): n is a, c, g, or t
  misc_feature (305)..(305): n is a, c, g, or t
  misc_feature (388)..(391): n is a, c, g, or t
  misc_feature (405)..(405): n is a, c, g, or t
  misc_feature (430)..(430): n is a, c, g, or t
  misc_feature (438)..(438): n is a, c, g, or t
  misc_feature (459)..(459): n is a, c, g, or t
  misc_feature (476)..(476): n is a, c, g, or t
  misc_feature (495)..(495): n is a, c, g, or t
  misc_feature (505)..(505): n is a, c, g, or t
  misc_feature (511)..(511): n is a, c, g, or t
  misc_feature (535)..(536): n is a, c, g, or t
  misc_feature (542)..(542): n is a, c, g, or t
  misc_feature (568)..(568): n is a, c, g, or t
gnggccaagttttacatttttaacagcccttctacatacactccatcttctctatcttagttccaagttttagttttcaatcccaattataccaattccattgttattttaagaaaaaaccttcccagttattgtcagaaactatgatttagcttaccccctccactacccagcaaactacagagaggatggggtgtaatatgagcngtacagagtcttaatgccattcatgggggccacttagtccttacatgaatctggttgctaacatttctattatattgtgacaatgactcccgnctgtnattctctgtgggagatggggggggtgaattcttaataaaagacacccggtacaaagcaacattttacttctgttgtgataaannnnaaaaaaaggtcacnttttccggatgacatgtgggacccngggatgcnggcccattctcttatcgggcncgatgcggggggtctcntccgattcacttttcaccngcgcattganggtgtncaaaaaagaaaagaaaaaaaatcnncccccnaagcttctaaaaaaggaacccgcggnacttcctcttgtgggatgtttaaaaagttagcctactaaagataa

SEQ ID NO: 524040 - DNA, 136 bp, Homo sapiens
gtgattctaaggatccccggttctcccccagtgctgggattacatcgcctgagctaccatgtcgggcctcatcctctattgactttttgagagcagaacacatttggggtgcttccgcatccatgtggctccactg

SEQ ID NO: 524041 - DNA, 376 bp, Homo sapiens
aaggagggggaaaggggattatttccgttggaggttgaaagctgggaaacccattaaaggacctcctttggttaattccaccaggaggacgttgggatccaggagattccttttttctggggccaaaccatttttaaaaacttacctggtcaggtcaaaattggttttagacccggtttacccattagaaatatttaatgtcaggggggaaaccattagggaaaccaaaatggttttaaggccttccggggttatatggaaaggaatggggctaatatggaaattaatggttccaattaacaggttccatgaaaataggaagtccattgccagtttcagacctgtttggcaaatactcagcatacttgggatccat

SEQ ID NO: 524042 - DNA, 200 bp, Homo sapiens
tttcctcactttatggaaagtcatgctgactctagcgatcccaccatccctgttcactaccataaggtggcagtgtgttttctggctcctgaaaagaactaacactgattccatagcatatccgagtggttgatggaaactgctgaaaaggccgatacccctgtggaacagtagggtaccgatctccatttctttatcat

SEQ ID NO: 524043 - DNA, 286 bp, Homo sapiens
gggacagtatctctcacccagtctggagcgcaacagcgtggtctccgctcactgcagcctccacctcccagattcaaatgattcttgtgcctcagcctcctgagtagctgggactacaggcatgtgacactatgcctggctaatttttttgctatttttaagtagagacggggttttgccatgttggcccgaggcaggtggatcacttgaggccagaattcgagaccagcctggccaatgtggtgaaaccctgtatcactcttttaggcccttctgtcgtcttctc

SEQ ID NO: 524044 - DNA, 183 bp, Homo sapiens
tccacgccgagcgaccatacagatcagaatgccgagcgttcgtatgcacggtctcggtggacgaagttgttgctagcacacgcctgaatgtccaaaccccttggtgacacaaattatgtggacgaagttgttgcaggtcaggattgacgaagttgttgcagatcgcaatggacgaagttgttg

SEQ ID NO: 524045 - DNA, 143 bp, Homo sapiens
gcaagagcaactgatgattaaatgttgctttttataaggtttttaacttgaaaatttgaaatatttatgttgacagactccacttaggctataggagtcatatctccctgtcgaggcagctcctccgggagtgaattatacca

SEQ ID NO: 524046 - DNA, 947 bp, Homo sapiens
gtatatttacagagttgtacaactattaccactatataatcccagaacactttcatcactccaaaaagaaacaccatacccactaccagtcactcctcatgcccccttcctatgacccctggcagccattaatctactttctgtctccttgaatttggattttctggacacttcataaaaattgaataatacaatatatgaacttttatgtttgacttctttcacttagcataatgttttcagagtgcatcactgttgtaacatgtatcagtaccctttttgtgactgaatattattccaccgaatggatataccacattttacttatccattcaaccgttgatgtacatttgagttgattccaaattttggctattaagaatgctgctctgaacattgatgtgcaagttttttttttttggtatgtccttttgtttccaatttcctgtggatatttttctaagaattagaatggctggatcatacagtaattctgcttaaacttttgaggagctgccaggctgtttcccaaagtggctacaactttttgcttttccaccagctgtgtttgagggtcccattttctcctcattctgacaactttattactccctttttaaattttagtcatcatagtgtgggtgacgaacgtgtccttcctgggggtttgattggcattccttagtgactgatgtgtggagcctcttccctgtgtttttgactttatatatttggggagtattctgtcctttccttgtcctttcccttgttcttgtcctttcctggccccttcactggggtcttcgcggaggacgcagggttttttttctggctagcgtctttttttggttaaacaaaagggggcgatttctcggcggcctcccctgttaggctctgggtaatggcggcctgagggttggacgcgtgcccacgatattgggctcgtg

SEQ ID NO: 524047 - DNA, 729 bp, Homo sapiens
  misc_feature (237)..(239): n is a, c, g, or t
  misc_feature (241)..(243): n is a, c, g, or t
  misc_feature (246)..(247): n is a, c, g, or t
  misc_feature (254)..(254): n is a, c, g, or t
  misc_feature (256)..(256): n is a, c, g, or t
  misc_feature (258)..(258): n is a, c, g, or t
  misc_feature (386)..(387): n is a, c, g, or t
gaaaacaaccgcccaccaccagatctctgtgaattcttttgcaagcactgcagagagcggccccggtccatggtggtcatcgaggtgttcacccccgtggtgcagcgaatcctcaagcataacatggactttgggaagtgcccgcgactgaggctgtttactcaggagtacatccctgccttgaacgagctcaacgcggggatggaagtggtgaagaagttcattcagagcatgcannncnnnacnnggcctcncncncccccgggtcctgcccaacctggtggccgtgtgcctggctgccatctactcctgctatgaagagttcatcaacagccgcgacaattccccaagcctgaaggaaatccggaacggctgccagcagcgtnngcgaccggaagcccactttacctctgcgccttctgcaccccagcccggacctggtgtctcaggaagccacgctgtctgaggcccggctcaagtcggtggtcgtggcctccagtgagatccacgtggaggtggaacgcaccagcactgccaagccggcgctgacggccagcgcaggcaacgacagcgagcccaacctcatcgactgcctcatggtcagccccgcctgcagcaccatgagcatcgagctgggcccccaggccgaccgcacgctcggctgctacgtggaaatcctcaagctgctgtcagactatgatgactggagaccgtctctgggccagtttg

SEQ ID NO: 524048 - DNA, 141 bp, Homo sapiens
cccggttcaggtgttacttcatgctttgtgcaatagttttatagccgagcagccctgaatgaattaaaacccacagcggtcacacatgaaatggttcactcctgcgtggatgagcatatgctgctccaggtactgaatacg

SEQ ID NO: 524049 - DNA, 400 bp, Homo sapiens
  misc_feature (99)..(99): n is a, c, g, or t
  misc_feature (117)..(117): n is a, c, g, or t
  misc_feature (123)..(124): n is a, c, g, or t
  misc_feature (132)..(133): n is a, c, g, or t
  misc_feature (135)..(135): n is a, c, g, or t
  misc_feature (150)..(150): n is a, c, g, or t
  misc_feature (153)..(154): n is a, c, g, or t
  misc_feature (165)..(165): n is a, c, g, or t
  misc_feature (201)..(202): n is a, c, g, or t
  misc_feature (282)..(282): n is a, c, g, or t
  misc_feature (285)..(285): n is a, c, g, or t
  misc_feature (294)..(294): n is a, c, g, or t
  misc_feature (302)..(302): n is a, c, g, or t
  misc_feature (319)..(320): n is a, c, g, or t
  misc_feature (337)..(337): n is a, c, g, or t
  misc_feature (340)..(340): n is a, c, g, or t
  misc_feature (350)..(350): n is a, c, g, or t
gtcctcgtggaagtgacatcgtctttaaaccctgcgtggcaatccctgacgcaccgccgtgatgcccagggaagacagggcgacctggatcatatctanctcattgtttcaattctngacaanntggcacanncnatcgttctccgagtngtnnatgcaaccatnccagctcgagactgaaacatctgaaatgtgctctannggatgtgtgtgtccagagactctgaatcagcttgctgcatagtgcactgtgcgtgctgtgcatgccttatcctgtgcacnacntgtctggcnagactctntcagttagttacataanntcagccatgatctatgngtnatgtcaatgnacatggacagacgtgtgatgtattccctctctggtgctccgtgtcaggtt

SEQ ID NO: 524050 - DNA, 1069 bp, Homo sapiens
ttgtagctgctggggtgtctacttgtcagagcgtgcgtccgtgctgtcgtgtgcttatttctagctgccgtttcactgtgttgtttccttggtcttttcccaaccggtgtggtcttcggttcgcggttttctgaccacgctccgtggggcgcgtacgctctgggtactcccggtttgccttcacagagggtctgtcccgctgccattggtccttgtccccttggatcctgtcagcccagtggcacttcgggtctcttgtttttgcacttgggcacaaatttcttgccccagttctggccactatggaaaatggcaagcatggtggcaccctgttatggcccagatgtatgagaacttttgtggaggaagtggatatctcgtggacacaatgggatctcccccgtgggcacaggggggagcctcgatatgccctgccccgcttcgctgagtgcacgagttgctcgactttattcctacctggtgcccctccctgtcccagaccctgaggccgggttcaagcgtgccaatggatctggttcaagaggagtttttgcagagattagatttctacccacacagctggctgccaacccgggccttggtggaaaaggcaccttgcccagcgattccaaggtggaacccacaatggagagaattttggaaactggcgagaaaggtgcaatgtccctggaaggagcatctctaccaccctggaaatttgggctgtcccctccacagtggccacttttctttgttatctaccacctgagccacggctggacacgtggcgaatatcacgtgtgtgccccaggaggccccacctcacttcccaagccggctgcccctgccacgaggccactggcggggttttcgggacgaggccctggagccacggtcacgtgggagtccctggctgcattttctgtccacatgcacagccggcgttcaattggccggtcaccccgcaacccgcaagaagggtgccttgaggcactggcccgtgccacaccttggcccagcgctcatacctcccaccaatttcctagtttaattaaaccttccatttcca

SEQ ID NO: 524051 - DNA, 488 bp, Homo sapiens
  misc_feature (303)..(303): n is a, c, g, or t
gccttacaccacgccttaacctgcagtcgcctagaaaacttgctctcaaacttcagggttttttcttccttcaaattttggaccaaagtctcatttctgtgttttgcctgcctctgatgctgggacccggaaggcgggcgctcctgtctttgtgctctttctaccgcccccgcgtactgtcccgggggctctactaggatcccctttccgtaaaagcgtgtaacaagggtgtaaatatttataattttttatacctgttgggaaaacccaagggcggggggccggttttttatggtgacacanatgtatattttgctaacagcaattgccagctcaatatcgttgaccgcggggcccaagggaccccaagcacattccgttgccttaccccatgggttgttaccgggataggaccgtttaaaaacgtttgagaaactacttcttggtttagcccttgtttctttgggaccctgttaaaggaggttggt

SEQ ID NO: 524052 - DNA, 951 bp, Homo sapiens
  misc_feature (482)..(482): n is a, c, g, or t
  misc_feature (489)..(489): n is a, c, g, or t
  misc_feature (542)..(542): n is a, c, g, or t
agcggcaggggaggtgctagacagagtccagtgttctagaagaggcggtgtctagagcctaattttacttggctaagttctggtagctatgaccaggaatttgtgaacacgttagtttaacgtacgtgctaaatatgtttctgatagtaaaatgagcattaagatttcttcgctactggtatagaactttcttgtagacctaatcaggtgaatcaagtattgttctgatcaggtgccactgggcttcctgtagttctatctgcaagtgttacaatcacaactaatttgtggagataatgaggtcgaatacctctgctgatagtgctgtaattttgagagactctgagtactcaggtggcaagagtagttggtggcaatgtacctagagagttaatggaaatgaaaattggataggctgtcaataggaataaagaaataataaccttcttctcgaggagtgacagggggtagtccccgtgacncattcangtgcgcggcgcgtaggagtcggcgtttgcagtaggggtgggggggaccggggngttacggggggctatctaagggtgacccgcatttgaagaggagggggtccacccatctaactagagcgccggcgtggaggattacatcgagctggggcgtcaagaaaaaagtttggggtatcgcgccgtggggggcctgtgaaaccatttggggtgtgcacctcccgtgggtctcccaagaaagctttcgcctagctactagataggtgtgaaaagagcacacgaaatttccagagcccttggcccccaaggaaggaaattttcccttccggggaaagccagtccagagccagtttgggggcggaatcctccacagcgaattcaaaaaggtttccccaaaagagccttggtcccccaagttttgtggttctggaagggaatccaaaggtaatttggggcgctggaacga

SEQ ID NO: 524053 - DNA, 348 bp, Homo sapiens
  misc_feature (23)..(23): n is a, c, g, or t
cgatctagaggatcccgtatatnggtgagcatcctcaccgaccgtcccccagctttttatttttttttcgtgagaagggattctcactctccagccggggcagtagagggagacccggcctcataaaaaaacgaaacagaagtcggacgccttcagaagcctcaatctaaactcagctccacggcttgttggccagggggccttaggaaaggggctgacctcccgttaccacaggtgctctctcatcgtgggacgaggcggaggctctagggcctccttccagggtctccccagggttaagggcggggcggccggtaaaaggctcaccaatataggggtaccgagctc

SEQ ID NO: 524054 - DNA, 152 bp, Homo sapiens
aaactggttttggggcagggatgggtggacagctgggggtttccaaagagaagatcggaagtcatctgcatcccactccagcaggctgtggtcctcccagctgctccctgccgctgtgcgactcgcccgtttcaattcctcatccttggaag

SEQ ID NO: 524055 - DNA, 155 bp, Homo sapiens
ggtgacctagaggtatccaatctctcattgcgatccgatggataacttcgaggaattgctcaaagtgctgggggtgaactgtgatgctgaggaagattgctgtggctgcagcgtcaagcccagcagtggagatcaacaggagggagacactttct

SEQ ID NO: 524056 - DNA, 927 bp, Homo sapiens
gaacacgggacggagtatgacacgctgcccttccgacacagtctccctcagtgactcggactctgacctcagcttgcccggtggtgctgagagtggaagcactgtccccgatggggctgcctggggaggaggattcaggtcctgatgagccgccctcactccccgtcaggcctcctcccagatcacggtgtcagctcattccatctgaggaggcatgagctccaccttctcccagcgcaggcgtgacatctttgactgcctggagggggcggccagacgggctccatcctctgtggcccacagcagcatgaatgacaacggaggcttctaagcggtcatctagcgccctcaggccggtctccagtgaaaggcctggagcagggcccgatcggagaccctggctcaccaagggtgacctccggtccccgaatacgtgtgacacacactccgagcgcctggaccaaggtagccagcctgtgaagatgtgacccgaggtcagcagagtcagaggcaatcaggtccaccgtcccctggaccttcctggagctcccagagcctggactgaccccactgactgtgtgttcatccttcaatccaggatccctccagtgtggtggcaggggagggtcatcttcaccaaacagtccgaaggggtcgaagcaggacgacgagaggacgagcgtcctgggggaaggtgggagcagccaggcaaggggcggcttgggaatcctggcacaagaacaggggcgagggccctgtggagctggcccaatctggcgggccgggagcccagaggctgaggaagtgggcaccccaaggaggcccgcgggacgctgaggcccgcccggagcggcccggggccgggcaggctcccgccggaaaggggtcccggacacgaaggggtaacactcgaaacagcccgtcatg

SEQ ID NO: 524057 - DNA, 143 bp, Homo sapiens
tcacatcctcggtccttcgtgctgccatccatcatgctcctcaccacccatcttacttggctgaaggctctctgaggctatgccgggcaacacatctgatccttccactggacggcctagtgctgcttatccttaatttctca

SEQ ID NO: 524058 - DNA, 260 bp, Homo sapiens
gtaatgccttttcactgactgaaaaaattactccctcaacaatgggactaatactggaagacatgagcagaagaaacctatactaccactgggtcccagccctatagcaaggctagctctattacacaggggaaaacaggatgcattcaagtagttatgtacaacccgtagccatattccaatatgcagtaaatcacaagatgttcaggtcgaactgacactcatggaacacaacaatgcatttcatctaaccaacatta

SEQ ID NO: 524059 - DNA, 146 bp, Homo sapiens
tgaaccccatatatgcttttctattcattataatacctagccagatcacatggtcttgtagcgaatacttatcaagtttcccttgaattgatgtgtcgagcttctaccttagaaatccgtaacattctagtgtactagctactatg

SEQ ID NO: 524060 - DNA, 981 bp, Homo sapiens
tgccatgaggaggcaagaaccacaatggggggaccgctctttgagaagttgttgtccccccccgggggtgacagacagacaaagaacctgggcaataattatgatggcggcaccttcacacaacaccagtgatttcttcgggaatgtgggcggcaccctttcttgatgatgtggattatagaaccgaatatcatcgctgtgctgcgttggataaatgggctcccctctgggtggatgcgcgatggctgcacaaaagtctacgagttcccccttcttcagataactaccctggctccctcaactagaggtaatgaatgctttttcctactgcctccttttgtggtcccacccaatttttgacaacaactttctgccccctttgtaattgggcaccacacgttaccccccctcccccaagagagtgctggcacacaacaccggcctttaagagcgttaataatttcctctagggccaactttcttcacagcacattctcggttcacaagttgggaggaacccccccggccccctcgtcttcgacccgttgtggtttgaaatgtcttcatacgccccacgagacctcttcggacaaaccacttcacggcccacatgatatatggggtcaccacaccttctggctattggagcccccaaccccagagccactcttgctgtcaacacaaccacctgcacaacctggccaaccacaaccacggaacacctatgtcccacacccttgtgaagaagaacccaggggtacaaccaaggagttttcctcccacagtgagagggagaccctggagagccctaatccaagcggaagggcgctggctggcccccactgggtctgctggccatcccgaccctggccgatagaccaccctgtatggactattccctggccaaacctggggagataggcccagaaggaaaatttgacgaattaagaccccccctgccccatagccctgagtggtcca

SEQ ID NO: 524061 - DNA, 698 bp, Homo sapiens
gggtgcatggtaagtcctgctcgtgtagacctctctctgctgagcacgcgctgggcacgaaaggctaccactcaccgcactgagcatcaacaaggaagatttataagattggccagggctaccttatcaaggacggcaagcgtgatcaggaacaagtgcctccactgactatgacctatctgacaagagcatcaaccctctggtgtggcttcgatccactagtggtgtaaggtgaccaagtgagcttatgtcatgctgagaaggctgtgtggtgggaaccaagaagcgggtgctcaccctccgcaagtcctgtgctggtgcagacgaatgcggcgggctctggagaatgattgaccgttaagttcattgatcacctacctccaagtttggccatgggccgcttccagaccagtggcagggagaacgacaagcattcagtggggaccgactgaagcaaagcagccgaatcgctaatggaagaacggagcttaatgccaggaacagagttttgcagctttggtgtgggtctcaactaaacagttattttccactgaaataccatagacactaaaaatgccgggtgcgccaatctaaggagggggggccggatacaagggggttcccgaaaagtggcccaggtgatcaaacaggttgatcaccgtgaaacacaactttgtggttcccagggggacaaatag

SEQ ID NO: 524062 - DNA, 1021 bp, Homo sapiens
ttctttaatctattcgttggtgcttcttaaacatgtatagcacaaaccaacttcagttaccattccccgcaaaaaacccctaactttactctgaactttttttgtttttgcattccatagaggttctgtcttcagatcatatctctaggtaatgtcatataacgtaccacactactatttatataactcagctgattgacgactctaggaaaaagcactctctaaagaatattcgcttcccttcagaactacacgactcgacaatcttataacgcatggtgcctacagcatctatgtatgttctcttctaccaagtaccacaagattttacatgtaggagcagccaaggattataaaaccacttccctaaaggcaacattaatgcaaaagtaccccagatggcaatacaaagtatcccctgagtaacaacatatattccattctgtgagtacggatatagagcacattatctaacccaattcacgtagttcacaaaacaccatactaaatatctagagttcctgaataagaacaggatgacctggagactggagccactataaagttatgtacttctgacctaccaccctggaattatgcagtgagtgaacgaacctgctccacctacatatcacgcactgagccacatcccacacattgagcgtacggaccacttacacacactgcttcgcaaccaccctacaaacccccactgcaacatccacaacaccttccctcactattgccactaactgtctaaacacagtatgaggaaacgcagtgataccccaaataaagagcagcttgaaaaaaaatgaatatgatgcatcacccaaaactactcatagtgtcgtgaaaacaacatcaacaaaactacaaatgaaacaacacaacggatatcccacataacttaccctaataagcttcccccactagcatatacaacagtaaatacaaagacccaaacacagcgaccaagctgtcatctaataagagattaatgcaaagcgacatactatcc

SEQ ID NO: 524063 - DNA, 181 bp, Homo sapiens
tgttcttcagagactgacgtctgcactccagagaacaaagtaatgaaaatcaacgctatttatactaaaataaaaaggctgttaccactgtgcccatcgttgtttctctactgaatttgtttcacagtcggccttcctatctcaccttctcattttgcctttagttttttttcacctgata

SEQ ID NO: 524064 - DNA, 470 bp, Homo sapiens
  misc_feature (4)..(4): n is a, c, g, or t
  misc_feature (11)..(11): n is a, c, g, or t
  misc_feature (16)..(16): n is a, c, g, or t
  misc_feature (41)..(41): n is a, c, g, or t
ccancccccanggaangatatgtatccaaaatatctacatngatgctgtgatgaaaatagaaggcatgcatcttcaggggttttaagcttctcatttttttctttccttgatttctagccctcttctctatttctcatcatttcttttttctttactctctccctgtcaatatttattctgaggaaaggatctgagttaaaaacaaagtttcacttgtcttttaaactgtgtaaaaaattaactcttcctggaagatgagcatttcaaaatgagcaaagttttaactttcagtaaaattttgactactgtaaatagtccaggtagatttgggctggaaggtggataaaagttatggagtaataagtaacattatgtcatctagactaggccttaaatcaaactttttttgtgtttttttagtgggtttgaacctttaataaaaataaaaaatgaatgcaaaaagaaaaaa

SEQ ID NO: 524065 - DNA, 460 bp, Homo sapiens
agcatagaaaagagttgcataacctgggtgatcagtgcagagatatgtcacaatgtcccctgtaggcaaagcctaggcaagagttacatcacctttctcattagttcagggatatgtgaaatctcccctgtaggaagagcctagagaagagttacatcgcctagctgatcattgctctgatatttcacaatacccctgtaggcagatcctagacaagagctgaatcacctaggtgatcagtgcagagatatttcacactgccccctttggacagagggtagacaagagttacataacctatgtgatcagtgcagaggtttgtcaaaattccctgcaggcattgcttatacaagtgttacatcacctaagggatcagtgcagagatatgtcacaaagctcctgtaggcagaacttagatgagttacatcacctaggtgatcagtgaacaggtatgtcacaa

SEQ ID NO: 524066 - DNA, 360 bp, Homo sapiens
  misc_feature (9)..(9): n is a, c, g, or t
  misc_feature (21)..(21): n is a, c, g, or t
  misc_feature (23)..(23): n is a, c, g, or t
  misc_feature (105)..(105): n is a, c, g, or t
  misc_feature (219)..(219): n is a, c, g, or t
  misc_feature (227)..(227): n is a, c, g, or t
  misc_feature (254)..(254): n is a, c, g, or t
  misc_feature (284)..(284): n is a, c, g, or t
  misc_feature (327)..(327): n is a, c, g, or t
gaactcggntgcaatatcagntnggaactcaaaccatttctagactctacgcccaaaggaagacagacttttgagtggaagcgatacaaattacctgtggagcanaaaacgatctcctgttggcactcaggcttcctcctgctctaggtgagacctcgggacctgggtgggcctggccttcaatgccttagaggtcagacatggggcattgaagggccncttggctnagctggggccaactcactctgccttcnaagagcagctgactcatggtctgggctganggcctgcatctgcatagactttcagattcctttccttcagctnagacactaccctctgctgatgcaggggcctgcc

SEQ ID NO: 524067 - DNA, 230 bp, Homo sapiens
ctttgggggtcttcgctctatttgtctttaaggaaaattaattcaactttttttttgttctgtccgagatttttatgagatatctctcacttgtcttccacttcgaaccggttaaagctcatagctgtcagctctgactgaggaggacagaagcccctgggtctttctttgaacggaatcagatgcttgaggtctgcctccctcatggagtgcgtggcgcttctcttcct

SEQ ID NO: 524068 - DNA, 582 bp, Homo sapiens
ggggccgccgacacccgcctcccaccatggctctgaagagaattcacatggaatggactgatctgacacgggaccctccagtacagtgatcagcaggtcctgttggagatgatatgttccattggtaagctacaataatggcgccatatgacagtccctatcagggtggtgtatttctcttgacaattcatttcccaacagattacctgttcaaaccacctaagggtgcatttacaacacgaatttatcatatcaaatattatacatgtatggcagcatatgtcttgatattctacgatcacagcggtctccatgactaactatttgataagtactcttgtgcatctgttgtctgatgtgtgatcccaatgcagatgatcctttagtgcctgagattgctcggatctaccatatagagagaagtacagcagattagctcgagaatggactcagaagtatgcgatgtaactaatgatgttattgcataacctctacagatgagaggtgaactctgaggacctaattcaatatgttgtgatgttcttattgagatggtcaccagtcactgacgctcagtttccc

SEQ ID NO: 524069 - DNA, 783 bp, Homo sapiens
gagtatactcagcttctctcccatcccaggctgtgtggagccaggtcccccacactcctcctatggcgctcttagcaacagcaatgcccatccaggccccttccctccctctactggggcccagtccacggccacccaccagtctcaacacatcaccatcaccaccagcaacagcaacagcagcagcagcagcagcagcagcagcagcagcagcagcagcagcagcagcagcagcagcagcagcatcacggaaactctgggccccctcctcctggagcatttccccacccactggagggcggtagctcccaccacgcacaccttacgccatgtctccctccctggggtctctggagggccctaaccacgcaagggcgcagcacacgctgcccccacctcacagcgcgaggtgtactacagacaacgcgaggccgccagagtggtcctccagtctcttcctcttccaaattcttcctcttccacttctcaagggtcctaccccatgttcacacctcctccccttaccagggtcctcaaggggcgcacctacccctttaccagccggtgcctactggtcaccacctctttccggctacccttaccacggtcaagtcgcaccgtgtgcttcctcgcccagccaggtacaaagacggccttccccatgctggggcccccaccgtaccggcacccgagagccccgtctccccggggcgccctacaaagaccaggcacccaacccggataccaaccccgggggtccgcctccccttccttccgaacggg

SEQ ID NO: 524070 - DNA, 843 bp, Homo sapiens
tggcagaaaaaggtttggttttattggcaattatttaaagcgcgtcccaagggggaggggaaggggggggtctcgtggtattaaggtggaaacattgttgtggagctggagactcttttgggaaaaaaagcaaaaacacaaattcctttcagtcagcaggccccggcagagcagcaaaggccctcgccccggggtgtgccgggcgctcgctcgcttctctctcgtgtctctctcgtggtgtctctctctctctctctcgtgtctctgtctcgtgactcttctctcacattcttcgtgggctctcttttcccccttatctttgcgtgccaggaggcccccgagataccgtgggtgggcgggggccaggagtgggggcctcaccggggcgtggggcgtgatttcggggcaagggcgaggaccaccctccaggtccacgtgaggctgggggagctcggggcaggctgaggcccagggcccgtgcgggaggggtcccagggtcccgagacaggcaggaaggggctcaaaagttgctgaagattttcacgcttccgtgtccagtccatctgttggcgcgcgcttgtaaactcgctgggctcgagccttctcctgggcctcgggccgccgtgggggcccaggtggaggccgttctcctcagtgtccttgtccggaaccaggcaggtcactccgggacgaacacgcagagccccattgacgctgggcagggcgtgtccccttgcggaaccggtaaaaggacaaggaacctctcagtgcccacacgggggtgtgaacccaagacctttaaggtgacctgtttccgggcccaaccagaacgggaccaacacg

SEQ ID NO: 524071 - DNA, 114 bp, Homo sapiens
  misc_feature (90)..(90): n is a, c, g, or t
  misc_feature (105)..(105): n is a, c, g, or t
ctactctacttttgtctcatgaattgcctattctaggtaaatttatataattataataagtggagcccacttatatggcatcccactatntgtcctttggtgtgntgggcgata

SEQ ID NO: 524072 - DNA, 436 bp, Homo sapiens
cacgagggtcgatgccgacgggaaagcgcttgatcgagaggcgatggtcgaaggcactgacgcgcccgtcctgcaggatgcgccccgagacgctgtcctccaggaactggatgaggtttgcgacatccgcctgcgtctgcaacccgatgaggtcgtaagcggtgagggcacgtgccagctcgcgatactctggaatggcgagaaacgtctgcgaaggcggcacggggatgtgcagatagaatccaatcggattgtccacgcccgcccgtctcagctctgccgcaagcggaatgaggtggtagtcgtgaatccaaatgatgtcgtcgggctggatgagggggcggagcgcgcgggcgaaacgctcgttcacaccgatgtatcgagcgtagaaaccggcatcgaattgcgcgagatccagccggttatgaaataccgg

SEQ ID NO: 524073 - DNA, 325 bp, Homo sapiens
gcgtcgaccacgggaaggctgttaatgtacactgaaaattgtgtggcagcaaaatgagatactctcagccgcacagtttatctaggggcacctgtataaaacaggcctcatgtagcattaaatctcattttatgtgatcagggtttatctttaaatgggccactcaggattcatgctataagacttttttactgagtttcaagagaaggtccttccacccttcacccaaacccttataatgcaatttatcataaaatttgcctagattttggccaaattagcactgtatatgtcatgtgcatctggtatatataaaggaccaaaa

SEQ ID NO: 524074 - DNA, 330 bp, Homo sapiens
  misc_feature (41)..(41): n is a, c, g, or t
aggatctcgaatcagagcatacccctaggatcaagttgtantttcgaaatgtgtaagatgtttaacttgtagatacttaaaaagtatgaactactataaaatctgatatatctaatttaaatatagggcgggctgtgtggctcatgcccagcactttggaaggccgagacgagtggatggtttgagttcaggagttcgagaccagcctgagtaacgtggcaaaaccccgtctctaagaaaaataacaaaaatcagccagttgtcgtggcacatgcctgtagtcccagctactaaggaggctgacctggagaattgcttgaacctgggagg

SEQ ID NO: 524075 - DNA, 1454 bp, Homo sapiens
aagttgtttaaatgtattcgtcggatatctatacgtattgcctcgtatccgtcttcatgacaatggaacgccgatgccatgagcttgagtgccatcacttctacgtgtgcaagcagcatgctgtgccgcagatggatgactgaagagcgaacctgagggtgacaggtgactgacaacagaccattctacgactctatccttgtgtctcgctgtggcgtaccccaatcccagcccaggtgtatgctcgttgcggtcctcattggacgcgcttgttaacgccaaggtattgagagccatactgtccgtttgaatccaaatggtccaccctacaactgcaattgaatacggtgccacaacggacagtcatgtcatgtgtggatgctgatataactctcctcgagagtcgacatgacaatactgtgtgaaggcggtcctcgcgagaggtgcttgattgccaccgcaggcgacgtcacgtggagagcacctcatagtgcccaggcttgcaccgaaggtattatgccggcgctgactccccatttgtctatctgattaatgtcattcccgagtcatcgaccgtgtgtgaaccgtgtcatgccacagacctgggcccaaagggcttcctagtctgccataagatcggtctcatgtgtaacgtgctgtgggagcagaaagacattgtcagagtggatgacgccacagatggtgaacctgtggtaagcaggcggatgaccgttcgatggtttggtgtaccaacaccccctgtgagactgcaaggcatggttttggcagggcacgagcacgccaggcaaaattgattggcaggcctagcgaatggctcattggacccagaggatcggggcggcaggggaatatggccttggagaccccttggacttgccattgcaaccctatggaactgcacttcccaagacacacggattattcccactttcaaagttaaaccaggaagctttgcatctccccgagggtagacgccgggatcggcgggcgttgagaaggccccttctctgtgtggtcccccggggacgccacccctttaaggcagtccgcgttggacattatcccaactgagtggggggagaaacgcctcagccccctgggttggccccagttgttgttccagatggcgtacagaacatacaaaatcttggtttaacattccagggaatacttcccacttggatggcccccaattcccacccggttttgaaccctggacgccaggtttgggacgttttatcacgaacgggggcacttgtaccccccgatacaaacagagtagtgtacaaggttggcattaggatggaaagggagatatcggcaagtttcaacatgtcgaaattcactttgggctatcagtcttacgcggtggggtatgagtgtaactaaaaaatttttgaaggaaaaacaaatagaagagagtagaacaagat

SEQ ID NO: 524076 - DNA, 174 bp, Homo sapiens
gctctatcctggcagcacacagtgaggcgacgccctgttgaaatgaagcattgacggctcctgtctgaagctgtctccatcagtccagccacctggtgtcactggtatctgcgaacatttcctgatactccatattttgtgttcaaaaaatgtatttggaggctgtgctgcctg

SEQ ID NO: 524077 - DNA, 156 bp, Homo sapiens
tgctctgagccctaggattcatctttcttttcaccgtagggccctgactggcattgtattagcaactcatcactagacatcgtactacaaggcaagtactacggtgtagccacttccactatgtccctcaataggagctgtattgccactaaggag

SEQ ID NO: 524078 - DNA, 829 bp, Homo sapiens
  misc_feature (7)..(7): n is a, c, g, or t
  misc_feature (76)..(76): n is a, c, g, or t
  misc_feature (78)..(78): n is a, c, g, or t
  misc_feature (155)..(155): n is a, c, g, or t
  misc_feature (160)..(160): n is a, c, g, or t
  misc_feature (164)..(164): n is a, c, g, or t
  misc_feature (224)..(224): n is a, c, g, or t
  misc_feature (269)..(271): n is a, c, g, or t
  misc_feature (281)..(281): n is a, c, g, or t
  misc_feature (288)..(288): n is a, c, g, or t
  misc_feature (296)..(296): n is a, c, g, or t
  misc_feature (406)..(406): n is a, c, g, or t
  misc_feature (431)..(431): n is a, c, g, or t
  misc_feature (471)..(471): n is a, c, g, or t
  misc_feature (478)..(478): n is a, c, g, or t
  misc_feature (500)..(500): n is a, c, g, or t
  misc_feature (539)..(539): n is a, c, g, or t
  misc_feature (574)..(574): n is a, c, g, or t
  misc_feature (584)..(584): n is a, c, g, or t
  misc_feature (589)..(589): n is a, c, g, or t
  misc_feature (592)..(592): n is a, c, g, or t
  misc_feature (601)..(601): n is a, c, g, or t
  misc_feature (642)..(642): n is a, c, g, or t
  misc_feature (657)..(657): n is a, c, g, or t
  misc_feature (669)..(669): n is a, c, g, or t
  misc_feature (685)..(685): n is a, c, g, or t
  misc_feature (687)..(687): n is a, c, g, or t
  misc_feature (692)..(692): n is a, c, g, or t
  misc_feature (697)..(697): n is a, c, g, or t
  misc_feature (708)..(708): n is a, c, g, or t
  misc_feature (728)..(728): n is a, c, g, or t
  misc_feature (781)..(781): n is a, c, g, or t
  misc_feature (783)..(783): n is a, c, g, or t
  misc_feature (820)..(820): n is a, c, g, or t
acagagncaataaagaaatagccattaacccagtaaaccaagtgtactgaagtagaaaaaatgcaacaagaaaaananctaaattagaaagaccaacactttagaaaaagagtaaaacactttcactctactcccctttaagaccctaaaacaanatctnacantctggatctggaaaaaaaaaaaaaaaaaaaaatataaatatactaaaatatttgtcaggngggaaaaaataaaatgacactggccagtacagtctttggctattnnngccgggggcnggggganagtcagtnctcagaacaaattagtcagcttcagtctcgtcagcagggtctttgggttctttgttcttccgcacttcttcaatgtgcttatccttctctcgcaaacgttccagtttggnagccatattgtgcctctcggttctntttattagcttccattttgtgggtgagtttctcttctgcnattttantgaagttgttgttctcttctantgccttctgaagcacttctttctcgtgctctcgtttctnagccagctgcttcaagacctcagcttcatgggacntgcgtctttnttctncancttctaatntcttctgaatttcctccagggaaagatccttcttctttggnggggaaagggggaantctggaacagantcttttgaacgagggntnagaancagcncaaaagcctgncctgaggcacgcttctccantactttcacctggatatcagaagaagccaaggagaatagaagacaagcgacangnagtgtattctgcacaatcaactgggataaggaaagtnctgctcagt

SEQ ID NO: 524079 - DNA, 361 bp, Homo sapiens
  misc_feature (250)..(250): n is a, c, g, or t
  misc_feature (262)..(262): n is a, c, g, or t
  misc_feature (359)..(359): n is a, c, g, or t
cgcgtaatacctggatgccctatcgcaaaattgttacacgtttgacatggatcagcacacaggctggtgtctctcaaacaggtcaaccagataaggcctcacttgcctccctgtaaagcaccgcattactgcgctctggaatcgcagatctgttttaaagtcctgagcaatttctcgcactcagacgctggaagggaagtttccgaatcagaagttcagtggacttctgataacgtcttatttcacggancgccacagtacnagacctgtaacgatgaggtttcttcaccacctccagtagaggtcgcactcttgcgagcgacttttgacagcgttgcctgtagttgcacgaggtcgtncc

SEQ ID NO: 524080 - DNA, 528 bp, Homo sapiens
agctgctagacgactccgttagccgcgttgagacacaaattggtaaaggcatcatgtgacactcgcctggtagccatagagaccatgctgaacacaaaagtccagcagtctggaatatccccagcgacatttaataacatacgtgccacggacggacatacatcgagaagcagaaccgtggtagaatagtacctgatgcacagttctaataaggtgcagtgatcgacgcggtctcattacagctcaggcagtcctcgaagcgaaattgcagagcgctcaaaatttactgcgccatctcatgcggggaagactaccagcaagtcaattgctacatcactggtcacattaggaccaacactttaaaaccatctatggcaaaaattaatgggcctcataaactgacacgtccaattcatctgataagcgccatgcatttcgtacctcgacaactcggcccgacgaacttgaaagcagcgctcgtgccacggtaacatactcccctttccaccttgtctattccttcacttg

SEQ ID NO: 524081 - DNA, 245 bp, Homo sapiens
gtcctcagctggggagacagaaactccatctccaaaaaaaaaaccaagaaagatatcagcgtacccatagtaatacaaaattccaatgtaactcccatcaaaatcccaagggtatatcctggcagattttccaaattatatatatgatttctaaattatggtgagggatttctggcaagttaatccaggtcacggttacttaataacaatcgggctctttttaaaaatttttactttaaaatata

SEQ ID NO: 524082 - DNA, 1064 bp, Homo sapiens
  misc_feature (885)..(885): n is a, c, g, or t
atcttgtagaatggagacctgcggatgaggtgtggttccggctcattcagggtagaaagggtggaaaatccgcttgggggtatttgggccgaatttcaagatccgggtaatgtcagacttgcctgcggatgagccctgtcaccggttcccttcagagatgccaagacaaggggcctgttggggacgaaaccggacctcatttctcaggtactgctggcgactaccggccaattgccaatttgccgtctccgtaactcaattgaagaaagtgtttgtctttcgcaaatacagggaagcgctccttttgtgttttctctcgctgtttgttgaggctttcctgtccaggagtggtttctggggagggccaccccatccgaagtccccacctttatgtagacctttgggtgctttaatttgggctggtgagaactcttctatagtcctggaggacagttctgagcttataggccaatgaggtcttcatatacaacagggcctattcctttagtgattggcctagtcccaccaactgtaacatccagaatacatcaggacagtagagctcgcaatacaggagagcatgtgagaattgaatggtctcagaacctgggtagttctggcacatcagtgataggaacaaggcatatcgttcatgtgtcttatatgtgtgaacacgactgtctggaatgtgttgtctctacagagttttcctggcatggagtgtagacccccacactctcccaagttctgtctttcgcctacagcgtccgtaaaaatctataagggggaccattcccagggtggtacctgtggttgatatatgaacagtccttgtcccacacagatctccacagagtttcaaagcccagtgttgaatgagtctcntgtttgaaatttagattagacaccaccaattgggaagggcaaagagcagacagcctcaacagtggtggagccaaccatgaacttctcaggaatgtgacctgtgcttccttaaggcagtttctgttatgtgtatccttctaagaccctgcatttcttaatcaccgacggatcacgtgtta

SEQ ID NO: 524083 - DNA, 140 bp, Homo sapiens
agttgttacctcacagtcagcctgggataggaaaaaatattaagagcactttgtcttgccgggcgcgagtggcatcacgcctgttaccccagcactttgtggaggccatggtgtggagggtcacttgcagcctagtttgt

SEQ ID NO: 524084 - DNA, 747 bp, Homo sapiens
  misc_feature (22)..(22): n is a, c, g, or t
  misc_feature (111)..(111): n is a, c, g, or t
  misc_feature (113)..(113): n is a, c, g, or t
  misc_feature (118)..(118): n is a, c, g, or t
  misc_feature (157)..(157): n is a, c, g, or t
  misc_feature (192)..(192): n is a, c, g, or t
  misc_feature (249)..(249): n is a, c, g, or t
  misc_feature (261)..(261): n is a, c, g, or t
  misc_feature (274)..(274): n is a, c, g, or t
  misc_feature (282)..(283): n is a, c, g, or t
  misc_feature (301)..(301): n is a, c, g, or t
  misc_feature (365)..(365): n is a, c, g, or t
  misc_feature (395)..(395): n is a, c, g, or t
  misc_feature (402)..(402): n is a, c, g, or t
  misc_feature (412)..(414): n is a, c, g, or t
  misc_feature (471)..(471): n is a, c, g, or t
  misc_feature (499)..(499): n is a, c, g, or t
  misc_feature (512)..(512): n is a, c, g, or t
  misc_feature (531)..(531): n is a, c, g, or t
  misc_feature (609)..(610): n is a, c, g, or t
  misc_feature (641)..(641): n is a, c, g, or t
  misc_feature (644)..(644): n is a, c, g, or t
  misc_feature (738)..(738): n is a, c, g, or t
ttttagttcaacataaaatganaaaaaaaaaatatttctgacattttcaaagaacagaaataggaaagtatgttcatatacattcaacgtatactgcacatattggttacnanaaaanaaacgcaatgagttttttttaaagtgtagtttgcaaganggcacggttagtaggctcactggctttcatctgtngttgctggagggtgcagtctgctctcccatacatacagtaccatgtaaacacatcangctgagcgcgtngaggtggtagganaggttggnngcataagagttggaacangcgcagataagtcaacagctttttagggctttcttggtaagcccccttctggtgagtagttggngaccccaccaagtggaggggggactggggnccatggnaacatgggtnnnctcccacgaagggctcttgcactgctgaattcctctcttgggatcttgggtccatgngccgagctgcctgtttcagtggtgaagntcaaggtgtatgntgtttccgtcagtaacatnaggttggccatgccggtgcacccgcttttcctctgtgcaaatttctaggatgaaagactagagaggggtactcggtgnnctctttgctctccttttcccagtaaaaaaanagnggtggaatattcaagttttttcaaaggtctctctcttgtttttgtagatcagaagtgagataacccagaccctctctcagtcccagccagcagngaagacttt

SEQ ID NO: 524085 - DNA, 1042 bp, Homo sapiens
  misc_feature (390)..(390): n is a, c, g, or t
ggctgacgccattgtacaccgtcagcccgatctgtacccaggccgcatcattagaacagcggtagtcgcgtccacaccggccttgtgatgttcgttaccgcgcatcttggaggattctgaaccgaatacacgcgaggcgttggcagactcatttcagtgtgtggtcaatacatattcacttattttgtactctgcagaagtgcacagattacctatccaactgatctattacaagagcgtgtgagcaactcatgaaagttcgcataggccaaaacactgctgaagtcgagcgtatcgtctgcgtcctcgtctacactagtgcttgtgaggtgactagtggcaatgcgtccgcatgctcaactcgcagacactgtgagatctcactgatgncgtgacatgcgcagtcctttcctcactctccagtcctactccaatacattacatgagcacaacgtaccactcgtgataggagtttggcaaaaaagtgtatctgaccggtgacagagaactggccaggtgatgcaaacgactttcaaacccacctaagtactgaacatcactgacgaacaggctagttatactactcgctagatgcacttgtcattagccctccagtctaccttcacatcaatcaagcccatcgaagactggcttgtccgttctactaacttgggctggttttccgtgagactacagaccctcagttcagccgctaaattgcatttctacttcactattcttattgatgcactccgacatttaccccatagaggacagtaccttcgctttaaaactcaagattacaaaatcgtgtactcccctataagcttatcacacagattcttccatgttcctcaatgtctgttcaccctttgaagccttctgcacaaaacaaaggtctccgtacttacttgccagtgagacctggttctttcaccattacagattaacccatttagtcagttgcattccttgaccttcctaacgcgcaaggtcttccatttcttggagttgaagcaatctccactactataatgtgaca

SEQ ID NO: 524086 - DNA, 146 bp, Homo sapiens
ggctatagcggctaggacgctgtggctgggtcggattcgcgtgttctcagtgaagtcgtcctaaggcctctggaggtccagatcactgcttggggccggaagtctgtctgcccttccctacccatctgaagagctgtggtttgggc

SEQ ID NO: 524087 - DNA, 403 bp, Homo sapiens
  misc_feature (41)..(41): n is a, c, g, or t
  misc_feature (101)..(101): n is a, c, g, or t
  misc_feature (116)..(116): n is a, c, g, or t
  misc_feature (277)..(277): n is a, c, g, or t
  misc_feature (297)..(297): n is a, c, g, or t
  misc_feature (388)..(388): n is a, c, g, or t
  misc_feature (394)..(394): n is a, c, g, or t
ccaaacaggaggaagcaggtgaaaaaactcatcacagcgantgatattcgtgaagcacacgcgcgcggcgaacaggcaatgtccgtggttctgcgcgccanattattaccccggangcccgtgaagtagcggatctactgggttttaccatcaccgaatgtgatgaatcgatcccggtaacgcgtccgtgcccgacagcgtgccagccgacaaaaccgaaagccagcgcatccggaaaccatcattgcccagctgccggaagcagtttaccgaaagnctggtcgcacagtgatgganaaagtgatgaaggaaaacagtcgctggagcagggcgcaatgcagccgagcttcaaatcggtgaccggcaaaggcggcatcaaagtgatttntggcantagcgtcaa

SEQ ID NO: 524088 - DNA, 105 bp, Homo sapiens
ccggggttggttggatggtttttgtttgtttgtttcgagactttctccggctctgccgccgggggctgcagagcaatgtcgcgatctcacctcactgcggccttc

SEQ ID NO: 524089 - DNA, 694 bp, Homo sapiens
gtggtcttcagagattctccccgcattattatgtagtttgttcagaagctgttgctactgcgtctctctgtctgcagtggggcacttgtacctgaggtcctcgccttgggtcctgacattctgtagtttctgtgaagaacgtggcttgtcctgtgggctccttgatgctgttgctggactagctgccactgaggctcctgacgacatgcttgccccattaaccttgcataagggtcatgggagcccagtgggcccccacagaaaaagcaattgcgcttgacgggagacccccttatccacaggtaacgggcttgtccccaagatggcacgccaaaataccaaatgggcggtgccacgtgttttctccatggggcacacacctctcaggcctctgagtacgccagaactggcattcacactacatcaagtaaacccccagtttctcaaagcaactttgcaccacgtgttgcaaacagcagcagggctaccaaggggcgtatatttctacccccataaaaggttggcacagggtattaaccctcactgtgcacatgcatgatcaagcccccaagggcatggcaagccaaagagttggtgcatggcaagggctaactcttcgtgctcccttcctaagggacccaggtagacagtagctggtgcacagacgatgctagtggtagatactactgggatg

SEQ ID NO: 524090 - DNA, 198 bp, Homo sapiens
cgcggacggacaggtcagatagcagaggcataccatgtgacatggtttggctgtgtccccacccaaatctcatcttgtagtacccattatgccacacgggatatagtgtgggggatcacttcctatagactcgctgtgcacaggtgtgcgcttgtgactgtggcgcggtgttacacaacggaaaaaactcttaaccgg

SEQ ID NO: 524091 - DNA, 777 bp, Homo sapiens
gtagacccttgtctcagaaaaaaaaaaaaagaaaaactggcagatgggggactcttacgagggatagatgggaaaggtcctaaagtaaaacacacttgggatctgggcaatatatatattcaatggtactattctggaccaaagggggcttaatcagatagctggagaatgatttaatggtgaacgaaatctggtcaatggcattaatctcacataatagatcgggggaatacctattataaattctctcaacaaatcctggtatttggatttacaaaatgggatggggaggttccagggagagcagtgggaagcctggtgtgctcacctggttaggaaccgagagtgggcaacagcagtgggggaggagtggctccggactccctggcacctggtctcgatgggcagagcccacaggctagggctggacagacgtggggatgacaggaaagagaagcctctacatctcttcccacagcatggtagtggcgattatcatggcaagacagtccaaggcagggttcccagggacaatgggtggtaacgacagcgctatgggaccaagagaaccgtctaaaaaaaaccgggaaaattggacatacgagggattttgcgccctgtgtgagctaaagatcttcacgcaagggctggtgcgcagttggacacgcatggtcctgggtagctgggggctcgctggggcaagagccggggacgcccaggatccagcgcactggggccactggcgcctgggggaccctgggtcatctaaggcgtgtg

SEQ ID NO: 524092 - DNA, 119 bp, Homo sapiens
tgggagaccattaagcatctgcaggaacgcgctggagttgaaaagatcttaattcaggacggtatctcacaatacgaatgtggactaacctctccgcatcattggggatccttacaaag

SEQ ID NO: 524093 - DNA, 233 bp, Homo sapiens
atccaaagaattcggcacgaggctagaaataactttggcaaggagagccaaagctaagaccccccgaacccagacgagctacctaagaacagctaaaagagcacacccgtctatgtagcaaattagtgggaggattattaggtagaggcgccaaacctaccgagcctggtgtatagctggtgtgtccaggtatagatctctaaagtttcactctctaaaatttgccccacaga

SEQ ID NO: 524094 - DNA, 323 bp, Homo sapiens
atcatgccactgcactccagcctgggtgacagagggagactccgtctcaaaaaaaaaaagagaaaaataagcctctagggcaggatccttccagcctcttctggcttttgggggctccaggtgtaccttggcttgtggctccatcactctagcctgagtggagtgagatcctatttcaaaaaaacaaaatgtgcttaaccacaactatcagaacaaattcagtgagagtataaccctgtcaaaatgagaaaagtttttttaaaaagtgactaaatgtggagtaaatttctgtagggatggaaaggagggtaatatacataaaa

SEQ ID NO: 524095 - DNA, 454 bp, Homo sapiens
tctgccatatgaagatgcagtaagaggatggccatcttgggcagggcacactggctcacacctgtaatcccagcattttgggaggccaggatgggaggatagcttgagctcaggagtttgagaacagcgtgggcagcatgctgaaatcctgtctctactcaaaaaaaacaaaatagccaggtgtagtggtgcacacctgtggtcccagctactcgagagagtaaggcaggagaattgcctcagcctgggagatcaaggctccagtgagctgtgattgcaccagtgcactccagccaggtgacagaacaagcccttgtcaaaaaacaaaacaaaacaacccatctgcaaaccaggaagagagtcctccagactttggagctgctggcaccttgatcttggacttctcagcctctagcacttgtgagaaataaatgtgtgttgtttaagccaaaaa

SEQ ID NO: 524096 - DNA, 857 bp, Homo sapiens
ggtgagtgttgctgctatgagagagacaacaaaaaacagccacaatagacgattctgccttcaaaggttggcttgccacctgaagcagccactgcccaggggtgcaaagaagagacagcagcgcccagcttggaggtgctaactccagaggccagatcagcacatgggcacgaaggagccgcctgggaagggaccatggcacgagcacatccctgggttggcttgtgcgtactggggaccctggtggggctctcagatactccaggccccaagagctgaccagagagtcactactgggctcagggcaaagctgtgctgccagatgttggtgagccaggaacattcctcgtgaaggactgtgaccagatagaaaggctgactcagtgtgatccttggcataccgggggtctccattctctcctgacaaccacacccggccccatctgtgagagctgtcggactgtaactctggtcttctcgtacgaaattgcaccatcattggcattgctgagttgtgcctgtcgaatggctggcagtgccagggacaaaggaggtgccccgagttgtgatcctcttccaaacccttcggctgaaccgcatcggagtcgtctcagggcccatgagccacgacccatcaagcgacccatttacctataatttcagtgacgaagcatggagggcacggcacaagtgggaacatgcaagactagttgttaattaaggcacgatgcttgccgggaatctatttagccacgggtcaccccaaagatccttaggaagacccacataaatagagatcgagaggatctctctggaagtcttggtatcccctggcgggacatgtcctcctcacgaaa

SEQ ID NO: 524097 - DNA, 336 bp, Homo sapiens
taggagcgttgatgtccttcggatgtttgtctcctccaaatctcatgttgaaatttgatccccagtggcagacttggggcctggtgggagatgtttgaatcatgggggtggatccctcatgaatggctctgtgctgtccccacggtaataagtgagttctcactctattcgttcactagagaactgattgttaaaacaagagcctggcactttcctcccctctccctcttgctccctctcttgccatgtgatgtctgctccccttctctttctgccatgattggaagcttcctgaagtcctcaccagaatcaggtgctaatgccatccttcttgta

SEQ ID NO: 524098 - DNA, 1324 bp, Homo sapiens
cccctgttttgtttgagaccgacttttcttggggcggcgcggtatagtttctctcgccgccgccaagtttggtcctgcccttttccctctctccctccggggtggatcccccccccctcctttggttccctgcgaggcggcgcgctccccctcccctgtttgggctccgctgctccccctcccccccagggggttggccccccacactccctcctccacacccagcctctccgtcggcggccgcccacctgcttgttgtcgtggggagaatgtagttgtttttgtgctgctccgggcggcgcccctctggtttcgtcgcagcccccggtgaggcccccacccgcttgttgtgtgttgttgtctcacatcgtgtgtggtgtccccgcgtatttcttcttgggggaggggcgccccccctgttattagaaggcccccccccccgcggtgattttctctggcgccgccaccacccccccccagaggcccccccttattagaggagagaggcccacgcgtcgcaacgtcgtgcgcgcaagatgtctcgcgccccacgccccaccgacaggggaccaccacgtgtgaaaatgtgtgtggtggtgttccacacgacgaagaggcccaactcgcgacgagggagaccccccccccgagaagagcgcgacgtctcactcgtcgtagggcgcgcgtgttttgtagacccacagagttttcccccgcgcctcacccttctctctctcgctctcgcacactctcgtctctcggccccgcctctctttctctctccccggcgcgcacacgcggccacaccctcatcacacttctatcactcttgtagactatccgcgagagaatttgggggcgcccgccgcgagaagaaagagagaagagctctatcacacctcttggagagttattccgcgctatccctcggagaggagcccgcggagacctctccacgctggagacacaccgcgcgccctctctcctctctatactccacccccctgctttctctcgccgccactctgtcttgagtgtcccccctcgcgcccacgcgtgtgagagagggccctcgccccctcgcgagaagactctcgcgagagggagaggccccaccaagccccgcgggcactatccccctctcttcccacggaaaccacagcggaagggggcaccggaaggtttttcctctctcaagccccacccctcgggggccccggggcgcaagggctcgccccctccctcccctcccccctgggggcccttttttggtaaacccattttccttttgggaaatatttatgaattaatagttttatatgaa

SEQ ID NO: 524099 - DNA, 375 bp, Homo sapiens
gaactttcgaagctcacaagagactgctaagaccattaattttaattgacaaaggacggtcggagactaaatgaccccctatcctcatgctgtattaacgcagcagtagcagcttcttcttttatcttttctctttatttgctactccttcattctcaggcctctctacgagctagcatgaaacatagaactcttagcctgtatccttatcctactcgggatttttcctttttctccagtagaagggaaaagcccatgatcttcaagcagggaatccccattgagtagctgcattcctagaaattgaagtttcagatctacacgaacactttttctgtccctaccgttctctcacagtaaagcgacaaatcaggc

SEQ ID NO: 524100 - DNA, 472 bp, Homo sapiens
  misc_feature (1)..(1): n is a, c, g, or t
  misc_feature (38)..(38): n is a, c, g, or t
  misc_feature (49)..(49): n is a, c, g, or t
  misc_feature (60)..(60): n is a, c, g, or t
  misc_feature (458)..(458): n is a, c, g, or t
ntccacctgtgatatttgccagtttggtgcagaatgtnacgaagatgcnggaggatgtcnggtgtgtgtgtaatattgactgttctcaaaccaacttcaatcccctctgcgcttctgatgggaaatcttatgataatgcatgccaaatcaaagaagcatcgtgtcagaaacaggagaaaattgaagtcatgtctttgggtcgatgtcaagataatgttcataccaaaattcatttcaaagaatgattttagtctttgtgcaaaaatgaaaagtgaagaaaactccttattaggcagctattccatttccaaaatgcagtgcttatttacaatggatagtagagtctactgtagcatttgtgtcgattataggattttgaggggctctcagcaaccgtccagatctgtctctatacaatgggactgtattgtcacaatgccataaacacaggagccatnttcacaggtagcag

SEQ ID NO: 524101 - DNA, 344 bp, Homo sapiens
  misc_feature (1)..(1): n is a, c, g, or t
  misc_feature (38)..(38): n is a, c, g, or t
  misc_feature (49)..(49): n is a, c, g, or t
  misc_feature (60)..(60): n is a, c, g, or t
ntccacctgtgatatttgccagtttggtgcagaatgtnacgaagatgcnggaggatgtcnggtgtgtgtgtaatattgactgttctcaaaccaacttcaatcccctctgcgcttctgatgggaaatcttatgataatgcatgccaaatcaaagaagcatcgtgtcagaaacaggagaaaattgaagtcatgtctttgggtcgatgtcaagataacacaactacaactactaagtctgaagatgggcattatgcaagaacagattatgcagagaagagaaagcaagaggaaagtgtttgctactgagtaatcctgcattaataaaaaaataaaaataaacagaga

SEQ ID NO: 524102 - DNA, 941 bp, Homo sapiens
  misc_feature (1)..(1): n is a, c, g, or t
  misc_feature (38)..(38): n is a, c, g, or t
  misc_feature (49)..(49): n is a, c, g, or t
  misc_feature (60)..(60): n is a, c, g, or t
ntccacctgtgatatttgccagtttggtgcagaatgtnacgaagatgcnggaggatgtcnggtgtgtgtgtaatattgactgttctcaaaccaacttcaatcccctctgcgcttctgatgggaaatcttatgataatgcatgccaaatcaaagaagcatcgtgtcagaaacaggagaaaattgaagtcatgtctttgggtcgatgtcaagataacacaactacaactactaagtctgaagatgggcattatgcaagaacagattatgcagagaatgctaacaaattagaagaaagtgccagagaacaccacataccttgtccggaacattacaatggcttctgcatgcatgggaagtgtgagcattctatcaatatgcaggagccatcttgcaggtgtgatgctggttatactggacaacactgtgaaaaaaaggactacagtgttctatacgttgttcccggtcctgtacgatttcagtatgtcttaatcgcagctgtgattggaacaattcagattgctgtcatctgtgtggtggtcctctgcatcacaaggaaatgccccagaagcaacagaattcacagacagaagcaaaatacagggcactacagttcagacaatacaacaagagcgtccacgaggttaatctaaagggagcatgtttcacagtggctggactaccgagagcttggactacacaatacagtattatagacaaaagaataagacaagagatctacacatgttgccttgcatttgtggtaatctacaccaatgaaaacatgtactacagctatatttgattatgtatggatatatttgaaatagtatacattgtcttgatgttttttctgtaatgtaaataaactatttatatcacacaatatagttttttctttcccatgtatttgttatatataataaatactcagtgatgagaaa

SEQ ID NO: 524103 - DNA, 452 bp, Homo sapiens
gcaacggagtatgcggtttgcctgctagtctggggcagcggcgctgacgagcggctcccaggtcgaccgtgatccgcgtgtaccgcgactgcgtactgcagtgcgaagagcagaatcgctctgggggcgctctgaatcacttccgctcccgccatccaatctacactcatgtctagcaggctgcacctttcgtgactactgtaactctgacgtgtatgtgggtcaccgttgggctctacctccaggaaggtcacaaagtgcctcagttccatggcaagtggcccttctcccggttcctgttctttcaagagccggcatcggccgtggcctcgtttctcaatggcctggccagcctggtgatgctctgccgttaccgcaccttcgtgccagcctcctcccccatgttccacacctgtgttgccttcgcctgggtgtccctcaatgcatggttc

SEQ ID NO: 524104 - DNA, 116 bp, Homo sapiens
  misc_feature (86)..(86): n is a, c, g, or t
tcatcgaaaccctgaaattaactgctaaagtaatttctttcaagtaggaaaatttacgccatcaacctttgtggcacaaattaggntgaaaagtaggtttaaaaatgggtgctgaa

SEQ ID NO: 524105 - DNA, 218 bp, Homo sapiens
ggtcgacttggcacactagctggggcaagtgctcagacatgctagttttgctgtcgtacctcaaactgcaaaagtttgtgcataataagtgcttaaactttatcataggtacctatgaacttataagaaaaaacatagtatatataggattcggtaccatctgcagtttcaggcatccactggggggtcttagaatgtacatacccccaaggtcgacg

SEQ ID NO: 524106 - DNA, 203 bp, Homo sapiens
ctagactactatctataaactagccatacacccccttatgagcgggcgcagtgataataggctaatcgctactaagattaaaaatgccctagacaccacatacattaccacaaggacacacctacaaccccttatccccatactagttattatcgaaaccatcagcctactcattcaaccaatagccctggacgtacgcctaa

SEQ ID NO: 524107 - DNA, 300 bp, Homo sapiens
  misc_feature (24)..(24): n is a, c, g, or t
  misc_feature (68)..(68): n is a, c, g, or t
  misc_feature (70)..(70): n is a, c, g, or t
  misc_feature (150)..(150): n is a, c, g, or t
  misc_feature (183)..(183): n is a, c, g, or t
tttacaggagtaagaagtcctctnttgcatggtgagatggggaacatttaattcaatagaaatatttnanaccgggtatggtggctcaagcctgtagtcccagcgctttgggaggctgagttgggtggttcacctgacatcaggggtttnagactagcctggccaacatagcaataccctgtntcaaagatacaaaaattacccaggcttggtggtgtgtgtctgtggtcccagctactcaggaggctgaggcgggagaatcgcttgggcctgggcggcaaaggtttccagttacccggg

SEQ ID NO: 524108 - DNA, 235 bp, Homo sapiens
gtaaacgaggcagagtacccgaaggggagagttagacgttagaatggagactcacatgaactatgttcatacagacgttgagcgtatataagtgtagatcgtctctttaataaagagatcatgggcgactgcaatttctaactcatacatcatggctacaaaccttatttgtttactgtttctcttccaaggaccatcagtcatcctttaaaattcatttcaagagtacaaccgg

SEQ ID NO: 524109 - DNA, 156 bp, Homo sapiens
ggaggccgcacgatgcctggagttactgtaaaaggacgtgaaccagcaggagtttcgtcagagctctggcagccttccttcaaaggtccgggaggctgaaggttccgcaatggtgggataccctcaagctggccagcacaaggagctttctaccta

SEQ ID NO: 524110 - DNA, 828 bp, Homo sapiens
gagtgactgtggcattaccttgaggaatgatctgataggttccaacttttctgcttagttctgggcatgtgtgttgggagtcgcggcacagtctggcagatgtcgagagaacatagcagtcggttgatttaggtcgtgtaagtaggaagaggacgagttttgaagagttcccgtgtccgaagagtgtggttgtgggttgatgatgtaagtatgaagatgcttacatgtctggtgagtgataattcggtatgatgacataatgtggaggatgacttctcttaatcagttaggagcggaactaaatagaggtggttattgggatggagatttcataacgcatccatgcatgaagtcgttagaatgtaggagtcttaatatattgtacactgtcttctatatcatttcttaggtgcaagatgatacactgtgatgggatcatctaagtaaaaggtgtgaatatcatgattctgcttgggtattcatgaagtgttatgtgttccacataagttgaatgtgtagagatagtcgattcactgagtgtggagcttcatgaaaaacattcatatgatgttcaggcttacagacccttgtgagtcatgtatcccataatttaattgttcgctggacagaggacctcgattgtttatagtggtggtgttgccctaaccagtaagaatacatcgggactaccttcggacaatatgacatttcttttggtgtttagcctggcactaacagaatcctagcgccagaaggtaattactagtgggcctcttttaattaaacaacggccataggtggacacttaatgcgaaatctagcctttaa

SEQ ID NO: 524111 - DNA, 757 bp, Homo sapiens
tgtacatataaggtatttttagagaagagaaacaggccgttattttcctatgtccttttttacgtttagaatagtcacccgaggggggatcagctcaactgtactgtgggagaaattcttttccaacaaacctcatgctcgtttttctgtggtgcaatttcaagggcaacgtgttctgtcctcacctcactctggtactcgcctcttggggcggctcagcccattcatggggatggcaccaagcggccatgctcagtcttccagccccgctgagggtaaaccgaggcctctggcagctgtgcacaggtgctggcctctggctccttcaaggagcactggctgttactcgcttctgggctggctaaccatggtttccaaccccaatttaacggaagcaagtgtgtgggagtatcaggcagagtcgtgttctatatgttatgtgagtgtatgaaatcatttctcattttatcacaattccttcaactcagcttactcgcgtggctgcctgttcatattctgaacagcagccaccgtgctgtggccttaggtatcggaaaaagcatagcacgcacttcccttggtttttcccttcccagagccgaccgcagctgtgtcaagccctctcattaccggctcctgaacctttacttactggactttgagctctgtgactccgtcggtactcgcaggaattaactaacttaccacatggttcaatccacttgagcgccatagctctgagctcctctgtgtgacc

SEQ ID NO: 524112 - DNA, 1274 bp, Homo sapiens
gtctcccacgagatctggaggtcagaaagtcgtgctccaggttgttagtggaatagtgtggacttgcatacgacgtattcgcttggtagaggtatcaaaaaatgcagatccccctcatgcgcaagcaggaggtaacgtgcgactaccggacgtcagatgactccaagcgcccgcatacaagccccggccaaggcaagacgtccagggcctccacgcctaacagagcagtgcgcacacgcctagcatgcaggagcaatggtgcttgggtggtagcggccatgcctgcatgacatggacccttgcatggcgcctttggcacaagcatgaccgtgcaaagcgcagcatgcgaggggcactgcacaccgtcgccggccaattgcacccatggacaacacaaaagccccctgtgcaagggaggttacataaccggggcgtgcctggtccccgcaggggctacgggtcccagtggagcaaaaaagttcctcaggcgtcctgtcgtcggcaggacgacaacgtactgtaggagcgcgaccgtggggtcacacgcgtgggaaacgggcaactcggtgccaagaaaggcaatgggtccataggacatggaatgagttggggcctaggaagacgttagccacacggacacggaccccgggggaatagggtcaaccgagctggcgcctttggaaccgagaagcaaggggccctaccccgggggggcgaagcaggaacgtaacccaaagaaacgcgcgggcgttcgctgggtagagttcgaggaacggaacacgacttggcgggaaccacctcccttatgatagggcccacttagggaggcacaggaatatcgccatgggcattgggaactggttaacacacagccccgggaaagggccacggaaaccgccggtcagggaggagacgaaatcggccgtcagagaaacaaggcccgggcacgggcaaggcatctcacctaggggacaacccaaagtgaaaacacactgtggagtggtcgaacacgaaccttcgcacaaagagtgcggaccgagccacagcccgttgcaacttccagagggaagagatagacaccacgcactgggttgaggccaccgagaacaaaggcatctcgtgatatcgcgggcctacaccacacagacggaacatatacagtccggtggggtaccctacggaaggacaaacttggaacgcaccgagggtcaccacaacggggtcgcgaagagacacggtgagtagtaaacccggttggacagaggcgcacaaag

SEQ ID NO: 524113 - DNA, 496 bp, Homo sapiens
cattatcagtcttaaaagttatctggaggctctaaggtgttgttttccaacccaaggtactctaaattttggattggcacggtaagatgattgctaagaaagtccatatatagatttccttttcaaaataagtattttgtaatctggcatagtatgtaatgagaattgtcaggaactagaaacagggaattttcaatttttaaaagcagaagaaaaatgttatctttttggggattccaatccccctcactaaacttatccccaaaggttttctttcggtcagttgtacaacatttttagtttctccacaagtaacatcataatttttactttaaaacaccaagtcatacattttacattgtagaagcagtagcagcagtactatactcagtatttaaatatgtcccagtatagaagcataacttcaattaatttgctgacactaacttcttaaaaacttacaaatattcaaaacaaagggaaaaaattttagata

SEQ ID NO: 524114 - DNA, 187 bp, Homo sapiens
  misc_feature (120)..(120): n is a, c, g, or t
gggcagcagaggaaaaaaaagttttctagtttcgtgatttttgttgattttttttgtgagttaaatcttcattacctaaagctgggagggacccaaaaaagccaaattgtgagcccgttntatgcgtcaatttgaaagtttggctcagggttctctagaacagatataaccattagcaataggttga

SEQ ID NO: 524115 - DNA, 172 bp, Homo sapiens
tgtggttatcgcagccccacagagccgcgcgaccccacgtaccccacgccagcgccagccatggaggcatacacgaagaaaatgcagatactgaagtaggacaagggagaatgccatacgaccggcgcgcagacaggccggaggcggacataagacaagcccgctagaggga

SEQ ID NO: 524116 - DNA, 1750 bp, Homo sapiens
  misc_feature (1564)..(1564): n is a, c, g, or t
ccatcgggagtgagtagaatttctttttccgcggggtgtgggaatcctcttgtagagatcaagagagattgtggcgctggttatataagtatatattaagatgctccccctacttaatggccggcccccacactagggtgtggggcgcgacagcaagtatccaagaataagaaaaagtagtagcttttgtttgtgaagtattgtgtagagagcgcactactttcttcgtcgaagggagtagtggttgttattagcgttgcattcacacacaccaagcaggaagaaaagttgtgtgtgtcgctctctttattgacactgttgtgggggtcctaacattatatgaggaaggatatttttccttgggcggtgaaatacagggaagaatgttgttgttgttgtgtgtgagaaaatacacagacgttgctgcccccgccccatttgtgggtgtggtgtgttttgttttgttgtggtccaccaacaccaacaaaaaagtgtggggggaaatataatattttattaaggggggaacaccaccagggggaagaataaacagttgtgtggaagaataggggcgctcgagatagattatttccccccgcattttgtggtgtgtcttggtggtcgccaccgccccgcgagcaattaattaggaggaacgagtgatgttgtctgtttctccaccggcgggtatatctttagttgcgggaaaacaaccatgttgttgtccgtcgcccctccaccacaaagatggtttataaagatcgttatcatccagcaccacgttcgtgttggagaaataaaaggccaccccttcttgtgatcttcttccttggggagacattttgtcctctttattaggggagaatagcggctcatcaacatcttggggggagagacacctctccttatacaactcttttggtggagaaaaatttttgtgtgtgttggcaccacaattagcctcttctgagctttcttgttctgcgtctctccgcaacacacacaggagaataggggtttgttctactacagttgggacgaaccctcacaggctctttgtgtcggcacacccacccacagcgtattatggagagccacacagccacctctttaaagaggagagattttgtgcgttctcagaacacacaaacactgggctgtctgtctcgcggggctagtgttgagagagatagagatggtgacaccctgccgtgtgagaaaatagtgatacagcttgggggagacctctcagagcggtgtctcagagatagattctttatagagttgtatttatatggcgcacacagtgtgtctctctgtgtgaaatgtttctcacacgcgcggtgccagcgcgggtgtgtgttgccccacacctctcagtgtatatgtattctctagacgctatagacgggggcacacaatgttgcgtgtgtatcattctctgtgtggagatagctgtaagaggagaatgagatgggcttctgggagatggaatagtggccagagttttataaaataaacattctcattgttgtgggcacctgccataaattagacctgtttntgggacacccagattggattcccttggagagtttctaaaaataaagagctgctcgccagtctcaccatccaccaataattccagtggtgaaattttgcttgttacctgtccagtccccttccttttctgtttagaatccagaataaagttgtatttccaataattctataacacagaggaaaataa

SEQ ID NO: 524117 - DNA, 381 bp, Homo sapiens
  misc_feature (353)..(353): n is a, c, g, or t
ggcaaggtccatgaaccacacgcagacacaatccagtcccgaataatggcacagcaaatgtgtatcaagataacccgcgatcattaacagatacgaacttcgtcttgaagggggtgggaccccaagttgcctgaggtagagcatgcgcttagccaaggaagcacgaacaaagatagggcctacataggaaggatgcaggccaagaatggccaaggactcatgagttgcagcgtgccgatggctactcaaagggccctcgtaagagcccgcagaaggcaggcttaaagcccaagagtcccaaagggtgtcagctcgtcaagctcgatcgacttgtctacattgccacaccgccnaagcattggggaagctgtgtctcggtgg

SEQ ID NO: 524118 - DNA, 199 bp, Homo sapiens
  misc_feature (73)..(73): n is a, c, g, or t
ccctggaaaagggggaataatttaggttaaatgcaggcttacccacttttttggggtcccaggcgcccctacntagttcattttgcatccaaaaaaagtattagggacccaaaagtggaatttagggtagctaggatggccggaaaattaaaagggcaatgcccaaaaaaaaataggccccaaaaaggaataaatatta

SEQ ID NO: 524119 - DNA, 886 bp, Homo sapiens
ctgaggaaggcattgctggtgcgggctttcctctgcttgacgtcccctcggatttggagtgtccgttatcctgcctgcctttgcgtcgagtcccttctcgctctctttcctccacccattctctgatcctgcctgcctttgctgtcccctaggccttgtgagtggatctgcccgtgctggctgtggggtattgggaggttatagggatagggcgtagaatgcgtgcctgggagtcattcgcgctggagtgtgggcgtggcgggtgcaggacctccctggagatcccgacgcaggggttgtcataggaggccaggcattgcgtctctggtggatttggcttggggggaggacgcgtcgaatgggtacgcgaacaatggactgtttctgtagccatggagtacacttacctataagtatccttgggggaccaatgtaatctagtgtagcaataacagcaatatgctatcgcaaccgatccaaaaattaagaaaactaaagacaaaatgtaaaaatagaaactatatagcaacaagctaaagggaaacatgcttgtaggacattttaaccttccgcgtgagatgccataatactgcatacttcattttctccccccatagaaggagacacaaatggaggcacacactcacttagtataccatcatcccccaagccgtacaccgcatcgaacctgagtcgaaaaaatgaaaaactcaatacgaggtgagcacgtgtgaagttcctgggcgtatcaaacagcctaagtggtttcctgtcaatgacgtgaaacatgtttccctactttgaacttccaccccaatgcaaatccacttaaatccctccggccaagtgaaaaggcatgggtgggcccaaaccgcgaaaagccgta

SEQ ID NO: 524120 - DNA, 555 bp, Homo sapiens
cgcacactcgatgaagacgcacgagatccccctcggtatccttcacacctcctgtctttccacatcagagctctgaacttgagaggtgtcaaacagtctgtaagagcagcctaaagtggggagatgccagttagcccgaaccaccccactatgagtgactatgagacacctaactcttccctcttctgtcaaccatagacactccctggactctgtacctgctccatcaaccaagagcaagcatgtcagcacacccccacctagccgtacatgaacacaggctctgtccaacatccctcacccaagtacaggggtgttgggcgagtggcccctgcggatcagcgaagtgttaatgcagaaggcccgaggacacaagcgtttggctatgaggctctgctcagggagagcaaaggctatagactggcacaggtttagaatcaagtaccatgtataggtttctgtctcacatcacatgattccactaggggctgcagaacagattcccctcaaaggggtctctgctgattacagccacattcttactagtggctcatc

SEQ ID NO: 524121 - DNA, 126 bp, Homo sapiens
  misc_feature (46)..(46): n is a, c, g, or t
gatatgctgttcagcatcacagcataattctgcttcaagctcaggnatgggaatccttctattatagcataacattgcctaccaatatcttcacaaagtggagttgaaccatcaagctgcaacaac

SEQ ID NO: 524122 - DNA, 249 bp, Homo sapiens
gctgcgcctactactacataccaagcagtcaccaaattagatgaaactcagtttacaaaaaaaaaaaaaaaaaaaaccaccacaaggggagctcggtgtagtacctttggggggtgggcccgaaaagattgtccatttctttttcctggggtagcactctgggtctttcaagttaattcactaatatcccataccccctttgcatgagaggtgactaagttagggcaacccagtgctttaagccattca

SEQ ID NO: 524123 - DNA, 773 bp, Homo sapiens
aatctagcctctttcttgtcccacatatacattctaccccttgaataaaaaagttcaatgacgccgggcgtggaggctcatgcctgtaatcccagcacttgggaggccaaggtgggcggatcacgaggtcaggagttcgagggcagcctgaccaacatagtgaaaccccatctctactaaaaatacaaaaattagctgggcgtggtggtgtacccctgtaatcccagctactcgggaggctgagacaggagcaatcacttgaacccaggaggcggaggctgcagtgagctgagatcacgccattgcactcaagcctggcgacagagcgagactccgtctcaaaaaaaaaagttcaactgactgggagtaacccaaaaagaaatgtcgtggaacattgaaaagtacttctcatgtgtccttgcagaacatgatgtctgctaagtgccagggtttcacaatttacattttcctgacctacaatgtggtaccattttttcacaatggttcgtaccacgaacatatagaggtgtctcttcaggacactagaatgtcatgcactggcggggacctgaaaccaactcgttggaaggtgaaccattgcgttctccagaagagggctgctgggatgatgagcccctcacaatcgacacaggtatacagctgtcgcccaggctctggacatcaccctaaccggatgcaaacgcggctagggcatacggtgcgagccccacactacacagacgcgaatcagacgtcccgcaaccacacaaaca

SEQ ID NO: 524124 - DNA, 135 bp, Homo sapiens
tatgagggtgccgtagctactagccctgctggctgcatgaggctatcatgtattccactgcactccagtcctatattgacaaggtgagactgctgtctcaaaacaaaaaaaaataataaaacagaaaaacaaaat

SEQ ID NO: 524125 - DNA, 110 bp, Homo sapiens
ctctgtttgtaattaatttgaatgcttccagagcttccttttataccctccctgttgtaattccatggggagttcacagctcttccgaatcttggcagtgtccctttgct

SEQ ID NO: 524126 - DNA, 236 bp, Homo sapiens
ctgtataggaccaggaccagctctagcactggcatctccatcatcatcatcaccaacacaaccaccttcaccaccagctctactgtcatctccatcatcatcaccagcacaaccacaaccaccttaacaaacactaccaccaccacgacctgctaattttcttatttttatagagacggggttttgccctgtagcacatactggtctcaaactcctgcgctcaagcgatccgcaat

SEQ ID NO: 524127 - DNA, 973 bp, Homo sapiens
  misc_feature (7)..(7): n is a, c, g, or t
  misc_feature (10)..(11): n is a, c, g, or t
  misc_feature (17)..(17): n is a, c, g, or t
  misc_feature (27)..(27): n is a, c, g, or t
  misc_feature (29)..(29): n is a, c, g, or t
  misc_feature (31)..(31): n is a, c, g, or t
  misc_feature (37)..(37): n is a, c, g, or t
  misc_feature (39)..(39): n is a, c, g, or t
  misc_feature (42)..(42): n is a, c, g, or t
  misc_feature (44)..(44): n is a, c, g, or t
  misc_feature (51)..(51): n is a, c, g, or t
  misc_feature (55)..(57): n is a, c, g, or t
  misc_feature (59)..(59): n is a, c, g, or t
  misc_feature (63)..(63): n is a, c, g, or t
  misc_feature (68)..(68): n is a, c, g, or t
  misc_feature (72)..(72): n is a, c, g, or t
  misc_feature (76)..(77): n is a, c, g, or t
  misc_feature (88)..(89): n is a, c, g, or t
  misc_feature (98)..(98): n is a, c, g, or t
  misc_feature (107)..(107): n is a, c, g, or t
  misc_feature (112)..(112): n is a, c, g, or t
  misc_feature (123)..(123): n is a, c, g, or t
  misc_feature (132)..(132): n is a, c, g, or t
  misc_feature (138)..(139): n is a, c, g, or t
  misc_feature (148)..(148): n is a, c, g, or t
  misc_feature (156)..(156): n is a, c, g, or t
  misc_feature (168)..(168): n is a, c, g, or t
  misc_feature (178)..(179): n is a, c, g, or t
  misc_feature (186)..(186): n is a, c, g, or t
  misc_feature (189)..(191): n is a, c, g, or t
  misc_feature (211)..(211): n is a, c, g, or t
  misc_feature (214)..(214): n is a, c, g, or t
  misc_feature (224)..(224): n is a, c, g, or t
  misc_feature (240)..(240): n is a, c, g, or t
  misc_feature (247)..(247): n is a, c, g, or t
  misc_feature (250)..(250): n is a, c, g, or t
  misc_feature (253)..(253): n is a, c, g, or t
  misc_feature (259)..(259): n is a, c, g, or t
  misc_feature (261)..(263): n is a, c, g, or t
  misc_feature (268)..(268): n is a, c, g, or t
  misc_feature (273)..(273): n is a, c, g, or t
  misc_feature (280)..(280): n is a, c, g, or t
  misc_feature (282)..(282): n is a, c, g, or t
  misc_feature (285)..(286): n is a, c, g, or t
  misc_feature (288)..(289): n is a, c, g, or t
  misc_feature (292)..(292): n is a, c, g, or t
  misc_feature (295)..(295): n is a, c, g, or t
  misc_feature (302)..(302): n is a, c, g, or t
  misc_feature (310)..(310): n is a, c, g, or t
  misc_feature (315)..(315): n is a, c, g, or t
  misc_feature (319)..(319): n is a, c, g, or t
  misc_feature (322)..(322): n is a, c, g, or t
  misc_feature (326)..(327): n is a, c, g, or t
  misc_feature (330)..(331): n is a, c, g, or t
  misc_feature (334)..(334): n is a, c, g, or t
  misc_feature (340)..(340): n is a, c, g, or t
  misc_feature (342)..(343): n is a, c, g, or t
  misc_feature (347)..(347): n is a, c, g, or t
  misc_feature (350)..(350): n is a, c, g, or t
  misc_feature (355)..(356): n is a, c, g, or t
  misc_feature (358)..(358): n is a, c, g, or t
  misc_feature (368)..(368): n is a, c, g, or t
  misc_feature (371)..(371): n is a, c, g, or t
  misc_feature (378)..(378): n is a, c, g, or t
  misc_feature (385)..(386): n is a, c, g, or t
  misc_feature (388)..(388): n is a, c, g, or t
  misc_feature (390)..(390): n is a, c, g, or t
  misc_feature (396)..(397): n is a, c, g, or t
  misc_feature (401)..(403): n is a, c, g, or t
  misc_feature (405)..(405): n is a, c, g, or t
  misc_feature (416)..(416): n is a, c, g, or t
  misc_feature (424)..(424): n is a, c, g, or t
  misc_feature (430)..(431): n is a, c, g, or t
  misc_feature (434)..(434): n is a, c, g, or t
  misc_feature (436)..(436): n is a, c, g, or t
  misc_feature (442)..(442): n is a, c, g, or t
  misc_feature (450)..(450): n is a, c, g, or t
  misc_feature (474)..(474): n is a, c, g, or t
  misc_feature (477)..(477): n is a, c, g, or t
  misc_feature (483)..(483): n is a, c, g, or t
  misc_feature (491)..(491): n is a, c, g, or t
  misc_feature (495)..(495): n is a, c, g, or t
  misc_feature (497)..(497): n is a, c, g, or t
  misc_feature (518)..(518): n is a, c, g, or t
  misc_feature (542)..(542): n is a, c, g, or t
  misc_feature (550)..(550): n is a, c, g, or t
  misc_feature (552)..(552): n is a, c, g, or t
  misc_feature (926)..(926): n is a, c, g, or t
gggattngtnngagacncgcactcggnancngggggngngtncnggggagntctnnngngtgngaagngcgngggnnggggggggggnngggcatgtnaaggggggnagggntgggctattcntaggaatcnggggtnnatcggcacnccactgtnttaggggacacnggaatttggnnggggttnggnnngggaacagtgtcccgagggnatngtggccatcnccaccgaacaccctanggatttnggnatnagagangnnnggtgntgtgntgcaatnanggnngnnttngcngtggagnagcacagncaggnaatnggngagnnagnnggngggggncnngggnatnagganngngagggaccanaangcctagnctggggnnangnaagcgnngagnnngnagcagaggggnggggaaangggggnngcngngggggnggaggagngggggcgggccgcgagggatggcngcngcagtnctcaatgngaancnccctgaatccatctttggggntcccaaggctggcaatgggcgagngggcctcngngatcgcgggtgatgaatcccattcaagggaacacactggaccttgtccagctggaacagaatgaggcagcttttagtgtggctgtgtgcaggttttccaacactggtgaagactggtatgtgctggtgggtgtggccaaggacctgatactaaacccccgatctgtggcagggggcttcgtctatacttacaagcttgtgaacaatggggaaaaactggagtttttgcacaagactcctgtggaagaggtccctgctgctattgccccattccaggggagggtgttgattggtgtggggaagctgttgcgtgtctatgacctgggaaagaagaagttactccgaaaatgtgagaataagcatattgccaattanatctctgggatcagactatcggacatagggtaattgtatctgatgtc
